United States Patent Application Publication US 2018/0305689 A1 - sequence listing, part 14

SEQ ID NO: 152848 - RNA, 19 nt, Artificial Sequence
  Description of Artificial Sequence: Synthetic oligonucleotide
  Sense strand starting at position 430 of SEQ ID NO: 1964
uuugguacagauuguaagu

SEQ ID NO: 152849 - RNA, 19 nt, Artificial Sequence
  Description of Artificial Sequence: Synthetic oligonucleotide
  Antisense strand to SEQ ID NO: 152848
acuuacaaucuguaccaaa

SEQ ID NO: 152850 - RNA, 19 nt, Artificial Sequence
  Description of Artificial Sequence: Synthetic oligonucleotide
  Sense strand starting at position 441 of SEQ ID NO: 1964
uuguaaguaccuuaacaga

SEQ ID NO: 152851 - RNA, 19 nt, Artificial Sequence
  Description of Artificial Sequence: Synthetic oligonucleotide
  Antisense strand to SEQ ID NO: 152850
ucuguuaagguacuuacaa

SEQ ID NO: 152852 - RNA, 19 nt, Artificial Sequence
  Description of Artificial Sequence: Synthetic oligonucleotide
  Sense strand starting at position 482 of SEQ ID NO: 1964
cuuuauaauugagggauuu

SEQ ID NO: 152853 - RNA, 19 nt, Artificial Sequence
  Description of Artificial Sequence: Synthetic oligonucleotide
  Antisense strand to SEQ ID NO: 152852
aaaucccucaauuauaaag

SEQ ID NO: 152854 - RNA, 19 nt, Artificial Sequence
  Description of Artificial Sequence: Synthetic oligonucleotide
  Sense strand starting at position 526 of SEQ ID NO: 1964
uacagcaugggcuauuaua

SEQ ID NO: 152855 - RNA, 19 nt, Artificial Sequence
  Description of Artificial Sequence: Synthetic oligonucleotide
  Antisense strand to SEQ ID NO: 152854
uauaauagcccaugcugua

SEQ ID NO: 152856 - RNA, 19 nt, Artificial Sequence
  Description of Artificial Sequence: Synthetic oligonucleotide
  Sense strand starting at position 533 of SEQ ID NO: 1964
ugggcuauuauagguuaaa

SEQ ID NO: 152857 - RNA, 19 nt, Artificial Sequence
  Description of Artificial Sequence: Synthetic oligonucleotide
  Antisense strand to SEQ ID NO: 152856
uuuaaccuauaauagccca

SEQ ID NO: 152858 - RNA, 19 nt, Artificial Sequence
  Description of Artificial Sequence: Synthetic oligonucleotide
  Sense strand starting at position 622 of SEQ ID NO: 1964
auuaacagcucugugaaau

SEQ ID NO: 152859 - RNA, 19 nt, Artificial Sequence
  Description of Artificial Sequence: Synthetic oligonucleotide
  Antisense strand to SEQ ID NO: 152858
auuucacagagcuguuaau

SEQ ID NO: 152860 - RNA, 19 nt, Artificial Sequence
  Description of Artificial Sequence: Synthetic oligonucleotide
  Sense strand starting at position 623 of SEQ ID NO: 1964
uuaacagcucugugaaaua

SEQ ID NO: 152861 - RNA, 19 nt, Artificial Sequence
  Description of Artificial Sequence: Synthetic oligonucleotide
  Antisense strand to SEQ ID NO: 152860
uauuucacagagcuguuaa

SEQ ID NO: 152862 - RNA, 19 nt, Artificial Sequence
  Description of Artificial Sequence: Synthetic oligonucleotide
  Sense strand starting at position 644 of SEQ ID NO: 1964
uuucccuuagacuauguau

SEQ ID NO: 152863 - RNA, 19 nt, Artificial Sequence
  Description of Artificial Sequence: Synthetic oligonucleotide
  Antisense strand to SEQ ID NO: 152862
auacauagucuaagggaaa

SEQ ID NO: 152864 - RNA, 19 nt, Artificial Sequence
  Description of Artificial Sequence: Synthetic oligonucleotide
  Sense strand starting at position 761 of SEQ ID NO: 1964
acuugaagauguuccauaa

SEQ ID NO: 152865 - RNA, 19 nt, Artificial Sequence
  Description of Artificial Sequence: Synthetic oligonucleotide
  Antisense strand to SEQ ID NO: 152864
uuauggaacaucuucaagu

SEQ ID NO: 152866 - RNA, 19 nt, Artificial Sequence
  Description of Artificial Sequence: Synthetic oligonucleotide
  Sense strand starting at position 765 of SEQ ID NO: 1964
gaagauguuccauaagucc

SEQ ID NO: 152867 - RNA, 19 nt, Artificial Sequence
  Description of Artificial Sequence: Synthetic oligonucleotide
  Antisense strand to SEQ ID NO: 152866
ggacuuauggaacaucuuc

SEQ ID NO: 152868 - RNA, 19 nt, Artificial Sequence
  Description of Artificial Sequence: Synthetic oligonucleotide
  Sense strand starting at position 878 of SEQ ID NO: 1964
ugagguggugcuuacaacu

SEQ ID NO: 152869 - RNA, 19 nt, Artificial Sequence
  Description of Artificial Sequence: Synthetic oligonucleotide
  Antisense strand to SEQ ID NO: 152868
aguuguaagcaccaccuca

SEQ ID NO: 152870 - RNA, 19 nt, Artificial Sequence
  Description of Artificial Sequence: Synthetic oligonucleotide
  Sense strand starting at position 945 of SEQ ID NO: 1964
guaacagguuucucagaca

SEQ ID NO: 152871 - RNA, 19 nt, Artificial Sequence
  Description of Artificial Sequence: Synthetic oligonucleotide
  Antisense strand to SEQ ID NO: 152870
ugucugagaaaccuguuac

SEQ ID NO: 152872 - RNA, 19 nt, Artificial Sequence
  Description of Artificial Sequence: Synthetic oligonucleotide
  Sense strand starting at position 1056 of SEQ ID NO: 1964
ucgguacugcccugaauuu

SEQ ID NO: 152873 - RNA, 19 nt, Artificial Sequence
  Description of Artificial Sequence: Synthetic oligonucleotide
  Antisense strand to SEQ ID NO: 152872
aaauucagggcaguaccga

SEQ ID NO: 152874 - RNA, 19 nt, Artificial Sequence
  Description of Artificial Sequence: Synthetic oligonucleotide
  Sense strand starting at position 1202 of SEQ ID NO: 1964
auguuauagccucacucuu

SEQ ID NO: 152875 - RNA, 19 nt, Artificial Sequence
  Description of Artificial Sequence: Synthetic oligonucleotide
  Antisense strand to SEQ ID NO: 152874
aagagugaggcuauaacau

SEQ ID NO: 152876 - RNA, 19 nt, Artificial Sequence
  Description of Artificial Sequence: Synthetic oligonucleotide
  Sense strand starting at position 1230 of SEQ ID NO: 1964
gggucaaugccucaaauac

SEQ ID NO: 152877 - RNA, 19 nt, Artificial Sequence
  Description of Artificial Sequence: Synthetic oligonucleotide
  Antisense strand to SEQ ID NO: 152876
guauuugaggcauugaccc

SEQ ID NO: 152878 - RNA, 19 nt, Artificial Sequence
  Description of Artificial Sequence: Synthetic oligonucleotide
  Sense strand starting at position 1437 of SEQ ID NO: 1964
gugacaaaccuguauguug

SEQ ID NO: 152879 - RNA, 19 nt, Artificial Sequence
  Description of Artificial Sequence: Synthetic oligonucleotide
  Antisense strand to SEQ ID NO: 152878
caacauacagguuugucac

SEQ ID NO: 152880 - RNA, 19 nt, Artificial Sequence
  Description of Artificial Sequence: Synthetic oligonucleotide
  Sense strand starting at position 1511 of SEQ ID NO: 1964
gcauaucacuucucaggua

SEQ ID NO: 152881 - RNA, 19 nt, Artificial Sequence
  Description of Artificial Sequence: Synthetic oligonucleotide
  Antisense strand to SEQ ID NO: 152880
uaccugagaagugauaugc

SEQ ID NO: 152882 - RNA, 19 nt, Artificial Sequence
  Description of Artificial Sequence: Synthetic oligonucleotide
  Sense strand starting at position 1745 of SEQ ID NO: 1964
aagaguuucuaucugagca

SEQ ID NO: 152883 - RNA, 19 nt, Artificial Sequence
  Description of Artificial Sequence: Synthetic oligonucleotide
  Antisense strand to SEQ ID NO: 152882
ugcucagauagaaacucuu

SEQ ID NO: 152884 - RNA, 19 nt, Artificial Sequence
  Description of Artificial Sequence: Synthetic oligonucleotide
  Sense strand starting at position 1899 of SEQ ID NO: 1964
gguagacugcacugaaugu

SEQ ID NO: 152885 - RNA, 19 nt, Artificial Sequence
  Description of Artificial Sequence: Synthetic oligonucleotide
  Antisense strand to SEQ ID NO: 152884
acauucagugcagucuacc

SEQ ID NO: 152886 - RNA, 19 nt, Artificial Sequence
  Description of Artificial Sequence: Synthetic oligonucleotide
  Sense strand starting at position 2085 of SEQ ID NO: 1964
aaaguaaugugacuagauu

SEQ ID NO: 152887 - RNA, 19 nt, Artificial Sequence
  Description of Artificial Sequence: Synthetic oligonucleotide
  Antisense strand to SEQ ID NO: 152886
aaucuagucacauuacuuu

SEQ ID NO: 152888 - RNA, 19 nt, Artificial Sequence
  Description of Artificial Sequence: Synthetic oligonucleotide
  Sense strand starting at position 2366 of SEQ ID NO: 1964
guaaauggcccuuggaaau

SEQ ID NO: 152889 - RNA, 19 nt, Artificial Sequence
  Description of Artificial Sequence: Synthetic oligonucleotide
  Antisense strand to SEQ ID NO: 152888
auuuccaagggccauuuac

SEQ ID NO: 152890 - RNA, 19 nt, Artificial Sequence
  Description of Artificial Sequence: Synthetic oligonucleotide
  Sense strand starting at position 2529 of SEQ ID NO: 1964
guggcacuuccugaaguua

SEQ ID NO: 152891 - RNA, 19 nt, Artificial Sequence
  Description of Artificial Sequence: Synthetic oligonucleotide
  Antisense strand to SEQ ID NO: 152890
uaacuucaggaagugccac

SEQ ID NO: 152892 - RNA, 19 nt, Artificial Sequence
  Description of Artificial Sequence: Synthetic oligonucleotide
  Sense strand starting at position 2644 of SEQ ID NO: 1964
uuuauaagacugcauguga

SEQ ID NO: 152893 - RNA, 19 nt, Artificial Sequence
  Description of Artificial Sequence: Synthetic oligonucleotide
  Antisense strand to SEQ ID NO: 152892
ucacaugcagucuuauaaa

SEQ ID NO: 152894 - RNA, 19 nt, Artificial Sequence
  Description of Artificial Sequence: Synthetic oligonucleotide
  Sense strand starting at position 2709 of SEQ ID NO: 1964
augugagucaaugagucaa

SEQ ID NO: 152895 - RNA, 19 nt, Artificial Sequence
  Description of Artificial Sequence: Synthetic oligonucleotide
  Antisense strand to SEQ ID NO: 152894
uugacucauugacucacau

SEQ ID NO: 152896 - RNA, 19 nt, Artificial Sequence
  Description of Artificial Sequence: Synthetic oligonucleotide
  Sense strand starting at position 2711 of SEQ ID NO: 1964
gugagucaaugagucaaau

SEQ ID NO: 152897 - RNA, 19 nt, Artificial Sequence
  Description of Artificial Sequence: Synthetic oligonucleotide
  Antisense strand to SEQ ID NO: 152896
auuugacucauugacucac

SEQ ID NO: 152898 - RNA, 19 nt, Artificial Sequence
  Description of Artificial Sequence: Synthetic oligonucleotide
  Sense strand starting at position 2828 of SEQ ID NO: 1964
agcucucugcuauagauau

SEQ ID NO: 152899 - RNA, 19 nt, Artificial Sequence
  Description of Artificial Sequence: Synthetic oligonucleotide
  Antisense strand to SEQ ID NO: 152898
auaucuauagcagagagcu

SEQ ID NO: 152900 - RNA, 19 nt, Artificial Sequence
  Description of Artificial Sequence: Synthetic oligonucleotide
  Sense strand starting at position 3094 of SEQ ID NO: 1964
acugaucccguagaaauac

SEQ ID NO: 152901 - RNA, 19 nt, Artificial Sequence
  Description of Artificial Sequence: Synthetic oligonucleotide
  Antisense strand to SEQ ID NO: 152900
guauuucuacgggaucagu

SEQ ID NO: 152902 - RNA, 19 nt, Artificial Sequence
  Description of Artificial Sequence: Synthetic oligonucleotide
  Sense strand starting at position 3633 of SEQ ID NO: 1964
agaauccauuacguaaaca

SEQ ID NO: 152903 - RNA, 19 nt, Artificial Sequence
  Description of Artificial Sequence: Synthetic oligonucleotide
  Antisense strand to SEQ ID NO: 152902
uguuuacguaauggauucu

SEQ ID NO: 152904 - RNA, 19 nt, Artificial Sequence
  Description of Artificial Sequence: Synthetic oligonucleotide
  Sense strand starting at position 74 of SEQ ID NO: 1965
ugacaaacaucagugcaau

SEQ ID NO: 152905 - RNA, 19 nt, Artificial Sequence
  Description of Artificial Sequence: Synthetic oligonucleotide
  Antisense strand to SEQ ID NO: 152904
auugcacugauguuuguca

SEQ ID NO: 152906 - RNA, 19 nt, Artificial Sequence
  Description of Artificial Sequence: Synthetic oligonucleotide
  Sense strand starting at position 115 of SEQ ID NO: 1965
gagcuacuccucugagauc

SEQ ID NO: 152907 - RNA, 19 nt, Artificial Sequence
  Description of Artificial Sequence: Synthetic oligonucleotide
  Antisense strand to SEQ ID NO: 152906
gaucucagaggaguagcuc

SEQ ID NO: 152908 - RNA, 19 nt, Artificial Sequence
  Description of Artificial Sequence: Synthetic oligonucleotide
  Sense strand starting at position 264 of SEQ ID NO: 1965
gccaaaugugcucagagga

SEQ ID NO: 152909 - RNA, 19 nt, Artificial Sequence
  Description of Artificial Sequence: Synthetic oligonucleotide
  Antisense strand to SEQ ID NO: 152908
uccucugagcacauuuggc

SEQ ID NO: 152910 - RNA, 19 nt, Artificial Sequence
  Description of Artificial Sequence: Synthetic oligonucleotide
  Sense strand starting at position 291 of SEQ ID NO: 1965
aggucuugucuuugaaaua

SEQ ID NO: 152911 - RNA, 19 nt, Artificial Sequence
  Description of Artificial Sequence: Synthetic oligonucleotide
  Antisense strand to SEQ ID NO: 152910
uauuucaaagacaagaccu

SEQ ID NO: 152912 - RNA, 19 nt, Artificial Sequence
  Description of Artificial Sequence: Synthetic oligonucleotide
  Sense strand starting at position 591 of SEQ ID NO: 1965
ggaggaugccaaggagagu

SEQ ID NO: 152913 - RNA, 19 nt, Artificial Sequence
  Description of Artificial Sequence: Synthetic oligonucleotide
  Antisense strand to SEQ ID NO: 152912
acucuccuuggcauccucc

SEQ ID NO: 152914 - RNA, 19 nt, Artificial Sequence
  Description of Artificial Sequence: Synthetic oligonucleotide
  Sense strand starting at position 958 of SEQ ID NO: 1965
ugggauacucuuggaaagu

SEQ ID NO: 152915 - RNA, 19 nt, Artificial Sequence
  Description of Artificial Sequence: Synthetic oligonucleotide
  Antisense strand to SEQ ID NO: 152914
acuuuccaagaguauccca

SEQ ID NO: 152916 - RNA, 19 nt, Artificial Sequence
  Description of Artificial Sequence: Synthetic oligonucleotide
  Sense strand starting at position 987 of SEQ ID NO: 1965
uuggaaguagcuuaaccau

SEQ ID NO: 152917 - RNA, 19 nt, Artificial Sequence
  Description of Artificial Sequence: Synthetic oligonucleotide
  Antisense strand to SEQ ID NO: 152916
augguuaagcuacuuccaa

SEQ ID NO: 152918 - RNA, 19 nt, Artificial Sequence
  Description of Artificial Sequence: Synthetic oligonucleotide
  Sense strand starting at position 1012 of SEQ ID NO: 1965
uuuaucuaggugcauauaa

SEQ ID NO: 152919 - RNA, 19 nt, Artificial Sequence
  Description of Artificial Sequence: Synthetic oligonucleotide
  Antisense strand to SEQ ID NO: 152918
uuauaugcaccuagauaaa

SEQ ID NO: 152920 - RNA, 19 nt, Artificial Sequence
  Description of Artificial Sequence: Synthetic oligonucleotide
  Sense strand starting at position 1060 of SEQ ID NO: 1965
cuuggaucuucccugaauu

SEQ ID NO: 152921 - RNA, 19 nt, Artificial Sequence
  Description of Artificial Sequence: Synthetic oligonucleotide
  Antisense strand to SEQ ID NO: 152920
aauucagggaagauccaag

SEQ ID NO: 152922 - RNA, 19 nt, Artificial Sequence
  Description of Artificial Sequence: Synthetic oligonucleotide
  Sense strand starting at position 1061 of SEQ ID NO: 1965
uuggaucuucccugaauua

SEQ ID NO: 152923 - RNA, 19 nt, Artificial Sequence
  Description of Artificial Sequence: Synthetic oligonucleotide
  Antisense strand to SEQ ID NO: 152922
uaauucagggaagauccaa

SEQ ID NO: 152924 - RNA, 19 nt, Artificial Sequence
  Description of Artificial Sequence: Synthetic oligonucleotide
  Sense strand starting at position 1150 of SEQ ID NO: 1965
cuuggaucuucccugaauc

SEQ ID NO: 152925 - RNA, 19 nt, Artificial Sequence
  Description of Artificial Sequence: Synthetic oligonucleotide
  Antisense strand to SEQ ID NO: 152924
gauucagggaagauccaag

SEQ ID NO: 152926 - RNA, 19 nt, Artificial Sequence
  Description of Artificial Sequence: Synthetic oligonucleotide
  Sense strand starting at position 1152 of SEQ ID NO: 1965
uggaucuucccugaauccu

SEQ ID NO: 152927 - RNA, 19 nt, Artificial Sequence
  Description of Artificial Sequence: Synthetic oligonucleotide
  Antisense strand to SEQ ID NO: 152926
aggauucagggaagaucca

SEQ ID NO: 152928 - RNA, 19 nt, Artificial Sequence
  Description of Artificial Sequence: Synthetic oligonucleotide
  Sense strand starting at position 1249 of SEQ ID NO: 1965
ggcucagaucuggaugcuu

SEQ ID NO: 152929 - RNA, 19 nt, Artificial Sequence
  Description of Artificial Sequence: Synthetic oligonucleotide
  Antisense strand to SEQ ID NO: 152928
aagcauccagaucugagcc

SEQ ID NO: 152930 - RNA, 19 nt, Artificial Sequence
  Description of Artificial Sequence: Synthetic oligonucleotide
  Sense strand starting at position 1386 of SEQ ID NO: 1965
cuauguggauauuccagau

SEQ ID NO: 152931 - RNA, 19 nt, Artificial Sequence
  Description of Artificial Sequence: Synthetic oligonucleotide
  Antisense strand to SEQ ID NO: 152930
aucuggaauauccacauag

SEQ ID NO: 152932 - RNA, 19 nt, Artificial Sequence
  Description of Artificial Sequence: Synthetic oligonucleotide
  Sense strand starting at position 1390 of SEQ ID NO: 1965
guggauauuccagaucagu

SEQ ID NO: 152933 - RNA, 19 nt, Artificial Sequence
  Description of Artificial Sequence: Synthetic oligonucleotide
  Antisense strand to SEQ ID NO: 152932
acugaucuggaauauccac

SEQ ID NO: 152934 - RNA, 19 nt, Artificial Sequence
  Description of Artificial Sequence: Synthetic oligonucleotide
  Sense strand starting at position 1555 of SEQ ID NO: 1965
gugacagguuuaccaugau

SEQ ID NO: 152935 - RNA, 19 nt, Artificial Sequence
  Description of Artificial Sequence: Synthetic oligonucleotide
  Antisense strand to SEQ ID NO: 152934
aucaugguaaaccugucac

SEQ ID NO: 152936 - RNA, 19 nt, Artificial Sequence
  Description of Artificial Sequence: Synthetic oligonucleotide
  Sense strand starting at position 1558 of SEQ ID NO: 1965
acagguuuaccaugaucua

SEQ ID NO: 152937 - RNA, 19 nt, Artificial Sequence
  Description of Artificial Sequence: Synthetic oligonucleotide
  Antisense strand to SEQ ID NO: 152936
uagaucaugguaaaccugu

SEQ ID NO: 152938 - RNA, 19 nt, Artificial Sequence
  Description of Artificial Sequence: Synthetic oligonucleotide
  Sense strand starting at position 1561 of SEQ ID NO: 1965
gguuuaccaugaucuauuc

SEQ ID NO: 152939 - RNA, 19 nt, Artificial Sequence
  Description of Artificial Sequence: Synthetic oligonucleotide
  Antisense strand to SEQ ID NO: 152938
gaauagaucaugguaaacc

SEQ ID NO: 152940 - RNA, 19 nt, Artificial Sequence
  Description of Artificial Sequence: Synthetic oligonucleotide
  Sense strand starting at position 1749 of SEQ ID NO: 1965
ggguguugggagggucaaa

SEQ ID NO: 152941 - RNA, 19 nt, Artificial Sequence
  Description of Artificial Sequence: Synthetic oligonucleotide
  Antisense strand to SEQ ID NO: 152940
uuugacccucccaacaccc

SEQ ID NO: 152942 - RNA, 19 nt, Artificial Sequence
  Description of Artificial Sequence: Synthetic oligonucleotide
  Sense strand starting at position 2063 of SEQ ID NO: 1965
agcccuucccaugaaguua

SEQ ID NO: 152943 - RNA, 19 nt, Artificial Sequence
  Description of Artificial Sequence: Synthetic oligonucleotide
  Antisense strand to SEQ ID NO: 152942
uaacuucaugggaagggcu

SEQ ID NO: 152944 - RNA, 19 nt, Artificial Sequence
  Description of Artificial Sequence: Synthetic oligonucleotide
  Sense strand starting at position 2116 of SEQ ID NO: 1965
uagaaauagugguugccaa

SEQ ID NO: 152945 - RNA, 19 nt, Artificial Sequence
  Description of Artificial Sequence: Synthetic oligonucleotide
  Antisense strand to SEQ ID NO: 152944
uuggcaaccacuauuucua

SEQ ID NO: 152946 - RNA, 19 nt, Artificial Sequence
  Description of Artificial Sequence: Synthetic oligonucleotide
  Sense strand starting at position 2188 of SEQ ID NO: 1965
ugaauuacuccuggauauc

SEQ ID NO: 152947 - RNA, 19 nt, Artificial Sequence
  Description of Artificial Sequence: Synthetic oligonucleotide
  Antisense strand to SEQ ID NO: 152946
gauauccaggaguaauuca

SEQ ID NO: 152948 - RNA, 19 nt, Artificial Sequence
  Description of Artificial Sequence: Synthetic oligonucleotide
  Sense strand starting at position 2240 of SEQ ID NO: 1965
aaagguuuccuuggauuau

SEQ ID NO: 152949 - RNA, 19 nt, Artificial Sequence
  Description of Artificial Sequence: Synthetic oligonucleotide
  Antisense strand to SEQ ID NO: 152948
auaauccaaggaaaccuuu

SEQ ID NO: 152950 - RNA, 19 nt, Artificial Sequence
  Description of Artificial Sequence: Synthetic oligonucleotide
  Sense strand starting at position 2244 of SEQ ID NO: 1965
guuuccuuggauuaugaua

SEQ ID NO: 152951 - RNA, 19 nt, Artificial Sequence
  Description of Artificial Sequence: Synthetic oligonucleotide
  Antisense strand to SEQ ID NO: 152950
uaucauaauccaaggaaac

SEQ ID NO: 152952 - RNA, 19 nt, Artificial Sequence
  Description of Artificial Sequence: Synthetic oligonucleotide
  Sense strand starting at position 2348 of SEQ ID NO: 1965
uaugacaugucagugaaug

SEQ ID NO: 152953 - RNA, 19 nt, Artificial Sequence
  Description of Artificial Sequence: Synthetic oligonucleotide
  Antisense strand to SEQ ID NO: 152952
cauucacugacaugucaua

SEQ ID NO: 152954 - RNA, 19 nt, Artificial Sequence
  Description of Artificial Sequence: Synthetic oligonucleotide
  Sense strand starting at position 2350 of SEQ ID NO: 1965
ugacaugucagugaauguu

SEQ ID NO: 152955 - RNA, 19 nt, Artificial Sequence
  Description of Artificial Sequence: Synthetic oligonucleotide
  Antisense strand to SEQ ID NO: 152954
aacauucacugacauguca

SEQ ID NO: 152956 - RNA, 19 nt, Artificial Sequence
  Description of Artificial Sequence: Synthetic oligonucleotide
  Sense strand starting at position 2380 of SEQ ID NO: 1965
cagccuucugagggaaaga

SEQ ID NO: 152957 - RNA, 19 nt, Artificial Sequence
  Description of Artificial Sequence: Synthetic oligonucleotide
  Antisense strand to SEQ ID NO: 152956
ucuuucccucagaaggcug

SEQ ID NO: 152958 - RNA, 19 nt, Artificial Sequence
  Description of Artificial Sequence: Synthetic oligonucleotide
  Sense strand starting at position 2621 of SEQ ID NO: 1965
uggcauagugguuaagacu

SEQ ID NO: 152959 - RNA, 19 nt, Artificial Sequence
  Description of Artificial Sequence: Synthetic oligonucleotide
  Antisense strand to SEQ ID NO: 152958
agucuuaaccacuaugcca

SEQ ID NO: 152960 - RNA, 19 nt, Artificial Sequence
  Description of Artificial Sequence: Synthetic oligonucleotide
  Sense strand starting at position 2689 of SEQ ID NO: 1965
cuaucuacugggcaaacua

SEQ ID NO: 152961 - RNA, 19 nt, Artificial Sequence
  Description of Artificial Sequence: Synthetic oligonucleotide
  Antisense strand to SEQ ID NO: 152960
uaguuugcccaguagauag

SEQ ID NO: 152962 - RNA, 19 nt, Artificial Sequence
  Description of Artificial Sequence: Synthetic oligonucleotide
  Sense strand starting at position 2772 of SEQ ID NO: 1965
guuguuguaggaugaaaug

SEQ ID NO: 152963 - RNA, 19 nt, Artificial Sequence
  Description of Artificial Sequence: Synthetic oligonucleotide
  Antisense strand to SEQ ID NO: 152962
cauuucauccuacaacaac

SEQ ID NO: 152964 - RNA, 19 nt, Artificial Sequence
  Description of Artificial Sequence: Synthetic oligonucleotide
  Sense strand starting at position 2788 of SEQ ID NO: 1965
augaguuaauauguacaga

SEQ ID NO: 152965 - RNA, 19 nt, Artificial Sequence
  Description of Artificial Sequence: Synthetic oligonucleotide
  Antisense strand to SEQ ID NO: 152964
ucuguacauauuaacucau

SEQ ID NO: 152966 - RNA, 19 nt, Artificial Sequence
  Description of Artificial Sequence: Synthetic oligonucleotide
  Sense strand starting at position 2796 of SEQ ID NO: 1965
auauguacagagugauuga

SEQ ID NO: 152967 - RNA, 19 nt, Artificial Sequence
  Description of Artificial Sequence: Synthetic oligonucleotide
  Antisense strand to SEQ ID NO: 152966
ucaaucacucuguacauau

SEQ ID NO: 152968 - RNA, 19 nt, Artificial Sequence
  Description of Artificial Sequence: Synthetic oligonucleotide
  Sense strand starting at position 2799 of SEQ ID NO: 1965
uguacagagugauugaaau

SEQ ID NO: 152969 - RNA, 19 nt, Artificial Sequence
  Description of Artificial Sequence: Synthetic oligonucleotide
  Antisense strand to SEQ ID NO: 152968
auuucaaucacucuguaca

SEQ ID NO: 152970 - RNA, 19 nt, Artificial Sequence
  Description of Artificial Sequence: Synthetic oligonucleotide
  Sense strand starting at position 2817 of SEQ ID NO: 1965
ugacacuuggcccacaauu

SEQ ID NO: 152971 - RNA, 19 nt, Artificial Sequence
  Description of Artificial Sequence: Synthetic oligonucleotide
  Antisense strand to SEQ ID NO: 152970
aauugugggccaaguguca

SEQ ID NO: 152972 - RNA, 19 nt, Artificial Sequence
  Description of Artificial Sequence: Synthetic oligonucleotide
  Sense strand starting at position 3094 of SEQ ID NO: 1965
gguauauaaggcugcauuu

SEQ ID NO: 152973 - RNA, 19 nt, Artificial Sequence
  Description of Artificial Sequence: Synthetic oligonucleotide
  Antisense strand to SEQ ID NO: 152972
aaaugcagccuuauauacc

SEQ ID NO: 152974 - RNA, 19 nt, Artificial Sequence
  Description of Artificial Sequence: Synthetic oligonucleotide
  Sense strand starting at position 3107 of SEQ ID NO: 1965
gcauuugcacguuggaauu

SEQ ID NO: 152975 - RNA, 19 nt, Artificial Sequence
  Description of Artificial Sequence: Synthetic oligonucleotide
  Antisense strand to SEQ ID NO: 152974
aauuccaacgugcaaaugc

SEQ ID NO: 152976 - RNA, 19 nt, Artificial Sequence
  Description of Artificial Sequence: Synthetic oligonucleotide
  Sense strand starting at position 3440 of SEQ ID NO: 1965
ccugguagaucauugaauc

SEQ ID NO: 152977 - RNA, 19 nt, Artificial Sequence
  Description of Artificial Sequence: Synthetic oligonucleotide
  Antisense strand to SEQ ID NO: 152976
gauucaaugaucuaccagg

SEQ ID NO: 152978 - RNA, 19 nt, Artificial Sequence
  Description of Artificial Sequence: Synthetic oligonucleotide
  Sense strand starting at position 3441 of SEQ ID NO: 1965
cugguagaucauugaauca

SEQ ID NO: 152979 - RNA, 19 nt, Artificial Sequence
  Description of Artificial Sequence: Synthetic oligonucleotide
  Antisense strand to SEQ ID NO: 152978
ugauucaaugaucuaccag

SEQ ID NO: 152980 - RNA, 19 nt, Artificial Sequence
  Description of Artificial Sequence: Synthetic oligonucleotide
  Sense strand starting at position 3692 of SEQ ID NO: 1965
cucuaucagcaucaugaga

SEQ ID NO: 152981 - RNA, 19 nt, Artificial Sequence
  Description of Artificial Sequence: Synthetic oligonucleotide
  Antisense strand to SEQ ID NO: 152980
ucucaugaugcugauagag

SEQ ID NO: 152982 - RNA, 19 nt, Artificial Sequence
  Description of Artificial Sequence: Synthetic oligonucleotide
  Sense strand starting at position 3965 of SEQ ID NO: 1965
aagugugguauguagacua

SEQ ID NO: 152983 - RNA, 19 nt, Artificial Sequence
  Description of Artificial Sequence: Synthetic oligonucleotide
  Antisense strand to SEQ ID NO: 152982
uagucuacauaccacacuu

SEQ ID NO: 152984 - RNA, 19 nt, Artificial Sequence
  Description of Artificial Sequence: Synthetic oligonucleotide
  Sense strand starting at position 3698 of SEQ ID NO: 1968
cgaaguguugcucuguugu

SEQ ID NO: 152985 - RNA, 19 nt, Artificial Sequence
  Description of Artificial Sequence: Synthetic oligonucleotide
  Antisense strand to SEQ ID NO: 152984
acaacagagcaacacuucg

SEQ ID NO: 152986 - RNA, 19 nt, Artificial Sequence
  Description of Artificial Sequence: Synthetic oligonucleotide
  Sense strand starting at position 3566 of SEQ ID NO: 1968
gguagugagcuuuaucuac

SEQ ID NO: 152987 - RNA, 19 nt, Artificial Sequence
  Description of Artificial Sequence: Synthetic oligonucleotide
  Antisense strand to SEQ ID NO: 152986
guagauaaagcucacuacc

SEQ ID NO: 152988 - RNA, 19 nt, Artificial Sequence
  Description of Artificial Sequence: Synthetic oligonucleotide
  Sense strand starting at position 3098 of SEQ ID NO: 1968
gggccucucugcuuaaaca

SEQ ID NO: 152989 - RNA, 19 nt, Artificial Sequence
  Description of Artificial Sequence: Synthetic oligonucleotide
  Antisense strand to SEQ ID NO: 152988
uguuuaagcagagaggccc

SEQ ID NO: 152990 - RNA, 19 nt, Artificial Sequence
  Description of Artificial Sequence: Synthetic oligonucleotide
  Sense strand starting at position 3096 of SEQ ID NO: 1968
cugggccucucugcuuaaa

SEQ ID NO: 152991 - RNA, 19 nt, Artificial Sequence
  Description of Artificial Sequence: Synthetic oligonucleotide
  Antisense strand to SEQ ID NO: 152990
uuuaagcagagaggcccag

SEQ ID NO: 152992 - RNA, 19 nt, Artificial Sequence
  Description of Artificial Sequence: Synthetic oligonucleotide
  Sense strand starting at position 2943 of SEQ ID NO: 1968
ucaagacuugccuaggacu

SEQ ID NO: 152993 - RNA, 19 nt, Artificial Sequence
  Description of Artificial Sequence: Synthetic oligonucleotide
  Antisense strand to SEQ ID NO: 152992
aguccuaggcaagucuuga

SEQ ID NO: 152994 - RNA, 19 nt, Artificial Sequence
  Description of Artificial Sequence: Synthetic oligonucleotide
  Sense strand starting at position 2930 of SEQ ID NO: 1968
acaaucguuucugucaaga

SEQ ID NO: 152995 - RNA, 19 nt, Artificial Sequence
  Description of Artificial Sequence: Synthetic oligonucleotide
  Antisense strand to SEQ ID NO: 152994
ucuugacagaaacgauugu

SEQ ID NO: 152996 - RNA, 19 nt, Artificial Sequence
  Description of Artificial Sequence: Synthetic oligonucleotide
  Sense strand starting at position 2928 of SEQ ID NO: 1968
ugacaaucguuucugucaa

SEQ ID NO: 152997 - RNA, 19 nt, Artificial Sequence
  Description of Artificial Sequence: Synthetic oligonucleotide
  Antisense strand to SEQ ID NO: 152996
uugacagaaacgauuguca

SEQ ID NO: 152998 - RNA, 19 nt, Artificial Sequence
  Description of Artificial Sequence: Synthetic oligonucleotide
  Sense strand starting at position 2766 of SEQ ID NO: 1968
aaguccuuccuguagugua

SEQ ID NO: 152999 - RNA, 19 nt, Artificial Sequence
  Description of Artificial Sequence: Synthetic oligonucleotide
  Antisense strand to SEQ ID NO: 152998
uacacuacaggaaggacuu

SEQ ID NO: 153000 - RNA, 19 nt, Artificial Sequence
  Description of Artificial Sequence: Synthetic oligonucleotide
  Sense strand starting at position 2691 of SEQ ID NO: 1968
acagacaucccagggcuaa

SEQ ID NO: 153001 - RNA, 19 nt, Artificial Sequence
  Description of Artificial Sequence: Synthetic oligonucleotide
  Antisense strand to SEQ ID NO: 153000
uuagcccugggaugucugu

SEQ ID NO: 153002 - RNA, 19 nt, Artificial Sequence
  Description of Artificial Sequence: Synthetic oligonucleotide
  Sense strand starting at position 2618 of SEQ ID NO: 1968
agaacucuguggccuacaa

SEQ ID NO: 153003 - RNA, 19 nt, Artificial Sequence
  Description of Artificial Sequence: Synthetic oligonucleotide
  Antisense strand to SEQ ID NO: 153002
uuguaggccacagaguucu

SEQ ID NO: 153004 - RNA, 19 nt, Artificial Sequence
  Description of Artificial Sequence: Synthetic oligonucleotide
  Sense strand starting at position 2615 of SEQ ID NO: 1968
ccaagaacucuguggccua

SEQ ID NO: 153005 - RNA, 19 nt, Artificial Sequence
  Description of Artificial Sequence: Synthetic oligonucleotide
  Antisense strand to SEQ ID NO: 153004
uaggccacagaguucuugg

SEQ ID NO: 153006 - RNA, 19 nt, Artificial Sequence
  Description of Artificial Sequence: Synthetic oligonucleotide
  Sense strand starting at position 2594 of SEQ ID NO: 1968
ggguuaaugaggcauccag

SEQ ID NO: 153007 - RNA, 19 nt, Artificial Sequence
  Description of Artificial Sequence: Synthetic oligonucleotide
  Antisense strand to SEQ ID NO: 153006
cuggaugccucauuaaccc

SEQ ID NO: 153008 - RNA, 19 nt, Artificial Sequence
  Description of Artificial Sequence: Synthetic oligonucleotide
  Sense strand starting at position 2370 of SEQ ID NO: 1968
uuaggcucuuauccaugau

SEQ ID NO: 153009 - RNA, 19 nt, Artificial Sequence
  Description of Artificial Sequence: Synthetic oligonucleotide
  Antisense strand to SEQ ID NO: 153008
aucauggauaagagccuaa

SEQ ID NO: 153010 - RNA, 19 nt, Artificial Sequence
  Description of Artificial Sequence: Synthetic oligonucleotide
  Sense strand starting at position 2292 of SEQ ID NO: 1968
ccugcaguggucuaaccuu

SEQ ID NO: 153011 - RNA, 19 nt, Artificial Sequence
  Description of Artificial Sequence: Synthetic oligonucleotide
  Antisense strand to SEQ ID NO: 153010
aagguuagaccacugcagg

SEQ ID NO: 153012 - RNA, 19 nt, Artificial Sequence
  Description of Artificial Sequence: Synthetic oligonucleotide
  Sense strand starting at position 1601 of SEQ ID NO: 1968
ccagguugguuaucagcau

SEQ ID NO: 153013 - RNA, 19 nt, Artificial Sequence
  Description of Artificial Sequence: Synthetic oligonucleotide
  Antisense strand to SEQ ID NO: 153012
augcugauaaccaaccugg

SEQ ID NO: 153014 - RNA, 19 nt, Artificial Sequence
  Description of Artificial Sequence: Synthetic oligonucleotide
  Sense strand starting at position 1566 of SEQ ID NO: 1968
ugauacuuccagggaggca

SEQ ID NO: 153015 - RNA, 19 nt, Artificial Sequence
  Description of Artificial Sequence: Synthetic oligonucleotide
  Antisense strand to SEQ ID NO: 153014
ugccucccuggaaguauca

SEQ ID NO: 153016 - RNA, 19 nt, Artificial Sequence
  Description of Artificial Sequence: Synthetic oligonucleotide
  Sense strand starting at position 1452 of SEQ ID NO: 1968
gccucauacucagcucuga

SEQ ID NO: 153017 - RNA, 19 nt, Artificial Sequence
  Description of Artificial Sequence: Synthetic oligonucleotide
  Antisense strand to SEQ ID NO: 153016
ucagagcugaguaugaggc

SEQ ID NO: 153018 - RNA, 19 nt, Artificial Sequence
  Description of Artificial Sequence: Synthetic oligonucleotide
  Sense strand starting at position 1231 of SEQ ID NO: 1968
ucuguugucuucucaccaa

SEQ ID NO: 153019 - RNA, 19 nt, Artificial Sequence
  Description of Artificial Sequence: Synthetic oligonucleotide
  Antisense strand to SEQ ID NO: 153018
uuggugagaagacaacaga

SEQ ID NO: 153020 - RNA, 19 nt, Artificial Sequence
  Description of Artificial Sequence: Synthetic oligonucleotide
  Sense strand starting at position 1108 of SEQ ID NO: 1968
agagaagguucccuaucug

SEQ ID NO: 153021 - RNA, 19 nt, Artificial Sequence
  Description of Artificial Sequence: Synthetic oligonucleotide
  Antisense strand to SEQ ID NO: 153020
cagauagggaaccuucucu

SEQ ID NO: 153022 - RNA, 19 nt, Artificial Sequence
  Description of Artificial Sequence: Synthetic oligonucleotide
  Sense strand starting at position 1107 of SEQ ID NO: 1968
cagagaagguucccuaucu

SEQ ID NO: 153023 - RNA, 19 nt, Artificial Sequence
  Description of Artificial Sequence: Synthetic oligonucleotide
  Antisense strand to SEQ ID NO: 153022
agauagggaaccuucucug

SEQ ID NO: 153024 - RNA, 19 nt, Artificial Sequence
  Description of Artificial Sequence: Synthetic oligonucleotide
  Sense strand starting at position 1002 of SEQ ID NO: 1968
ggcacuuucugggugagca

SEQ ID NO: 153025 - RNA, 19 nt, Artificial Sequence
  Description of Artificial Sequence: Synthetic oligonucleotide
  Antisense strand to SEQ ID NO: 153024
ugcucacccagaaagugcc

SEQ ID NO: 153026 - RNA, 19 nt, Artificial Sequence
  Description of Artificial Sequence: Synthetic oligonucleotide
  Sense strand starting at position 656 of SEQ ID NO: 1968
ucucucuuucuccgagauc

SEQ ID NO: 153027 - RNA, 19 nt, Artificial Sequence
  Description of Artificial Sequence: Synthetic oligonucleotide
  Antisense strand to SEQ ID NO: 153026
gaucucggagaaagagaga

SEQ ID NO: 153028 - RNA, 19 nt, Artificial Sequence
  Description of Artificial Sequence: Synthetic oligonucleotide
  Sense strand starting at position 655 of SEQ ID NO: 1968
gucucucuuucuccgagau

SEQ ID NO: 153029 - RNA, 19 nt, Artificial Sequence
  Description of Artificial Sequence: Synthetic oligonucleotide
  Antisense strand to SEQ ID NO: 153028
aucucggagaaagagagac

SEQ ID NO: 153030 - RNA, 19 nt, Artificial Sequence
  Description of Artificial Sequence: Synthetic oligonucleotide
  Sense strand starting at position 516 of SEQ ID NO: 1968
agugauauuuaaggaagga

SEQ ID NO: 153031 - RNA, 19 nt, Artificial Sequence
  Description of Artificial Sequence: Synthetic oligonucleotide
  Antisense strand to SEQ ID NO: 153030
uccuuccuuaaauaucacu

SEQ ID NO: 153032 - RNA, 19 nt, Artificial Sequence
  Description of Artificial Sequence: Synthetic oligonucleotide
  Sense strand starting at position 509 of SEQ ID NO: 1968
uggugacagugauauuuaa

SEQ ID NO: 153033 - RNA, 19 nt, Artificial Sequence
  Description of Artificial Sequence: Synthetic oligonucleotide
  Antisense strand to SEQ ID NO: 153032
uuaaauaucacugucacca

SEQ ID NO: 153034 - RNA, 19 nt, Artificial Sequence
  Description of Artificial Sequence: Synthetic oligonucleotide
  Sense strand starting at position 475 of SEQ ID NO: 1968
gugugaagcaguuaggagu

SEQ ID NO: 153035 - RNA, 19 nt, Artificial Sequence
  Description of Artificial Sequence: Synthetic oligonucleotide
  Antisense strand to SEQ ID NO: 153034
acuccuaacugcuucacac

SEQ ID NO: 153036 - RNA, 19 nt, Artificial Sequence
  Description of Artificial Sequence: Synthetic oligonucleotide
  Sense strand starting at position 426 of SEQ ID NO: 1968
guccacauauggucuucua

SEQ ID NO: 153037 - RNA, 19 nt, Artificial Sequence
  Description of Artificial Sequence: Synthetic oligonucleotide
  Antisense strand to SEQ ID NO: 153036
uagaagaccauauguggac

SEQ ID NO: 153038 - RNA, 19 nt, Artificial Sequence
  Description of Artificial Sequence: Synthetic oligonucleotide
  Sense strand starting at position 382 of SEQ ID NO: 1968
gaucuaugugguuggcaug

SEQ ID NO: 153039 - RNA, 19 nt, Artificial Sequence
  Description of Artificial Sequence: Synthetic oligonucleotide
  Antisense strand to SEQ ID NO: 153038
caugccaaccacauagauc

SEQ ID NO: 153040 - RNA, 19 nt, Artificial Sequence
  Description of Artificial Sequence: Synthetic oligonucleotide
  Sense strand starting at position 381 of SEQ ID NO: 1968
ugaucuaugugguuggcau

SEQ ID NO: 153041 - RNA, 19 nt, Artificial Sequence
  Description of Artificial Sequence: Synthetic oligonucleotide
  Antisense strand to SEQ ID NO: 153040
augccaaccacauagauca

SEQ ID NO: 153042 - RNA, 19 nt, Artificial Sequence
  Description of Artificial Sequence: Synthetic oligonucleotide
  Sense strand starting at position 376 of SEQ ID NO: 1968
cagcaugaucuaugugguu

SEQ ID NO: 153043 - RNA, 19 nt, Artificial Sequence
  Description of Artificial Sequence: Synthetic oligonucleotide
  Antisense strand to SEQ ID NO: 153042
aaccacauagaucaugcug

SEQ ID NO: 153044 - RNA, 19 nt, Artificial Sequence
  Description of Artificial Sequence: Synthetic oligonucleotide
  Sense strand starting at position 369 of SEQ ID NO: 1968
uaugguccagcaugaucua

SEQ ID NO: 153045 - RNA, 19 nt, Artificial Sequence
  Description of Artificial Sequence: Synthetic oligonucleotide
  Antisense strand to SEQ ID NO: 153044
uagaucaugcuggaccaua

SEQ ID NO: 153046 - RNA, 19 nt, Artificial Sequence
  Description of Artificial Sequence: Synthetic oligonucleotide
  Sense strand starting at position 276 of SEQ ID NO: 1968
uccacagucucaguaagaa

SEQ ID NO: 153047 - RNA, 19 nt, Artificial Sequence
  Description of Artificial Sequence: Synthetic oligonucleotide
  Antisense strand to SEQ ID NO: 153046
uucuuacugagacugugga

SEQ ID NO: 153048 - RNA, 19 nt, Artificial Sequence
  Description of Artificial Sequence: Synthetic oligonucleotide
  Sense strand starting at position 241 of SEQ ID NO: 1968
gagucuucucccuggaggu

SEQ ID NO: 153049 - RNA, 19 nt, Artificial Sequence
  Description of Artificial Sequence: Synthetic oligonucleotide
  Antisense strand to SEQ ID NO: 153048
accuccagggagaagacuc

SEQ ID NO: 153050 - RNA, 19 nt, Artificial Sequence
  Description of Artificial Sequence: Synthetic oligonucleotide
  Sense strand starting at position 229 of SEQ ID NO: 1968
acauccuuuccugagucuu

SEQ ID NO: 153051 - RNA, 19 nt, Artificial Sequence
  Description of Artificial Sequence: Synthetic oligonucleotide
  Antisense strand to SEQ ID NO: 153050
aagacucaggaaaggaugu

SEQ ID NO: 153052 - RNA, 19 nt, Artificial Sequence
  Description of Artificial Sequence: Synthetic oligonucleotide
  Sense strand starting at position 226 of SEQ ID NO: 1968
ucuacauccuuuccugagu

SEQ ID NO: 153053 - RNA, 19 nt, Artificial Sequence
  Description of Artificial Sequence: Synthetic oligonucleotide
  Antisense strand to SEQ ID NO: 153052
acucaggaaaggauguaga

SEQ ID NO: 153054 - RNA, 19 nt, Artificial Sequence
  Description of Artificial Sequence: Synthetic oligonucleotide
  Sense strand starting at position 133 of SEQ ID NO: 1968
ugcaucaaugagcaauaua

SEQ ID NO: 153055 - RNA, 19 nt, Artificial Sequence
  Description of Artificial Sequence: Synthetic oligonucleotide
  Antisense strand to SEQ ID NO: 153054
uauauugcucauugaugca

SEQ ID NO: 153056 - RNA, 19 nt, Artificial Sequence
  Description of Artificial Sequence: Synthetic oligonucleotide
  Sense strand starting at position 132 of SEQ ID NO: 1968
cugcaucaaugagcaauau

SEQ ID NO: 153057 - RNA, 19 nt, Artificial Sequence
  Description of Artificial Sequence: Synthetic oligonucleotide
  Antisense strand to SEQ ID NO: 153056
auauugcucauugaugcag

SEQ ID NO: 153058 - RNA, 19 nt, Artificial Sequence
  Description of Artificial Sequence: Synthetic oligonucleotide
  Sense strand starting at position 121 of SEQ ID NO: 1968
agaggaggucucugcauca

SEQ ID NO: 153059 - RNA, 19 nt, Artificial Sequence
  Description of Artificial Sequence: Synthetic oligonucleotide
  Antisense strand to SEQ ID NO: 153058
ugaugcagagaccuccucu

SEQ ID NO: 153060 - RNA, 19 nt, Artificial Sequence
  Description of Artificial Sequence: Synthetic oligonucleotide
  Sense strand starting at position 95 of SEQ ID NO: 1968
guguuugugcgcccagcau

SEQ ID NO: 153061 - RNA, 19 nt, Artificial Sequence
  Description of Artificial Sequence: Synthetic oligonucleotide
  Antisense strand to SEQ ID NO: 153060
augcugggcgcacaaacac

SEQ ID NO: 153062 - RNA, 19 nt, Artificial Sequence
  Description of Artificial Sequence: Synthetic oligonucleotide
  Sense strand starting at position 15 of SEQ ID NO: 1968
cccuguauugauggucuga

SEQ ID NO: 153063 - RNA, 19 nt, Artificial Sequence
  Description of Artificial Sequence: Synthetic oligonucleotide
  Antisense strand to SEQ ID NO: 153062
ucagaccaucaauacaggg

SEQ ID NO: 153064 - RNA, 19 nt, Artificial Sequence
  Description of Artificial Sequence: Synthetic oligonucleotide
  Sense strand starting at position 3976 of SEQ ID NO: 1966
uagucuugaugagagagua

SEQ ID NO: 153065 - RNA, 19 nt, Artificial Sequence
  Description of Artificial Sequence: Synthetic oligonucleotide
  Antisense strand to SEQ ID NO: 153064
uacucucucaucaagacua

SEQ ID NO: 153066 - RNA, 19 nt, Artificial Sequence
  Description of Artificial Sequence: Synthetic oligonucleotide
  Sense strand starting at position 3970 of SEQ ID NO: 1966
gcuaaauagucuugaugag

SEQ ID NO: 153067 - RNA, 19 nt, Artificial Sequence
  Description of Artificial Sequence: Synthetic oligonucleotide
  Antisense strand to SEQ ID NO: 153066
cucaucaagacuauuuagc

SEQ ID NO: 153068 - RNA, 19 nt, Artificial Sequence
  Description of Artificial Sequence: Synthetic oligonucleotide
  Sense strand starting at position 3967 of SEQ ID NO: 1966
agagcuaaauagucuugau

SEQ ID NO: 153069 - RNA, 19 nt, Artificial Sequence
  Description of Artificial Sequence: Synthetic oligonucleotide
  Antisense strand to SEQ ID NO: 153068
aucaagacuauuuagcucu

SEQ ID NO: 153070 - RNA, 19 nt, Artificial Sequence
  Description of Artificial Sequence: Synthetic oligonucleotide
  Sense strand starting at position 3936 of SEQ ID NO: 1966
cuugccauaugagaaucaa

SEQ ID NO: 153071 - RNA, 19 nt, Artificial Sequence
  Description of Artificial Sequence: Synthetic oligonucleotide
  Antisense strand to SEQ ID NO: 153070
uugauucucauauggcaag

SEQ ID NO: 153072 - RNA, 19 nt, Artificial Sequence
  Description of Artificial Sequence: Synthetic oligonucleotide
  Sense strand starting at position 3933 of SEQ ID NO: 1966
ggccuugccauaugagaau

SEQ ID NO: 153073 - RNA, 19 nt, Artificial Sequence
  Description of Artificial Sequence: Synthetic oligonucleotide
  Antisense strand to SEQ ID NO: 153072
auucucauauggcaaggcc

SEQ ID NO: 153074 - RNA, 19 nt, Artificial Sequence
  Description of Artificial Sequence: Synthetic oligonucleotide
  Sense strand starting at position 3931 of SEQ ID NO: 1966
cuggccuugccauaugaga

SEQ ID NO: 153075 - RNA, 19 nt, Artificial Sequence
  Description of Artificial Sequence: Synthetic oligonucleotide
  Antisense strand to SEQ ID NO: 153074
ucucauauggcaaggccag

SEQ ID NO: 153076 - RNA, 19 nt, Artificial Sequence
  Description of Artificial Sequence: Synthetic oligonucleotide
  Sense strand starting at position 3829 of SEQ ID NO: 1966
ggagcuaccuuucugaaau

SEQ ID NO: 153077 - RNA, 19 nt, Artificial Sequence
  Description of Artificial Sequence: Synthetic oligonucleotide
  Antisense strand to SEQ ID NO: 153076
auuucagaaagguagcucc

SEQ ID NO: 153078 - RNA, 19 nt, Artificial Sequence
  Description of Artificial Sequence: Synthetic oligonucleotide
  Sense strand starting at position 3691 of SEQ ID NO: 1966
cugaacuaguaugauaaca

SEQ ID NO: 153079 - RNA, 19 nt, Artificial Sequence
  Description of Artificial Sequence: Synthetic oligonucleotide
  Antisense strand to SEQ ID NO: 153078
uguuaucauacuaguucag

SEQ ID NO: 153080 - RNA, 19 nt, Artificial Sequence
  Description of Artificial Sequence: Synthetic oligonucleotide
  Sense strand starting at position 3690 of SEQ ID NO: 1966
ccugaacuaguaugauaac

SEQ ID NO: 153081 - RNA, 19 nt, Artificial Sequence
  Description of Artificial Sequence: Synthetic oligonucleotide
  Antisense strand to SEQ ID NO: 153080
guuaucauacuaguucagg

SEQ ID NO: 153082 - RNA, 19 nt, Artificial Sequence
  Description of Artificial Sequence: Synthetic oligonucleotide
  Sense strand starting at position 3474 of SEQ ID NO: 1966
uugcuuuguggugaagcaa

SEQ ID NO: 153083 - RNA, 19 nt, Artificial Sequence
  Description of Artificial Sequence: Synthetic oligonucleotide
  Antisense strand to SEQ ID NO: 153082
uugcuucaccacaaagcaa

SEQ ID NO: 153084 - RNA, 19 nt, Artificial Sequence
  Description of Artificial Sequence: Synthetic oligonucleotide
  Sense strand starting at position 3469 of SEQ ID NO: 1966
agcauuugcuuugugguga

SEQ ID NO: 153085 - RNA, 19 nt, Artificial Sequence
  Description of Artificial Sequence: Synthetic oligonucleotide
  Antisense strand to SEQ ID NO: 153084
ucaccacaaagcaaaugcu

SEQ ID NO: 153086 - RNA, 19 nt, Artificial Sequence
  Description of Artificial Sequence: Synthetic oligonucleotide
  Sense strand starting at position 3262 of SEQ ID NO: 1966
cugugugaugcugggcaga

SEQ ID NO: 153087 - RNA, 19 nt, Artificial Sequence
  Description of Artificial Sequence: Synthetic oligonucleotide
  Antisense strand to SEQ ID NO: 153086
ucugcccagcaucacacag

SEQ ID NO: 153088 - RNA, 19 nt, Artificial Sequence
  Description of Artificial Sequence: Synthetic oligonucleotide
  Sense strand starting at position 2799 of SEQ ID NO: 1966
gcccuaacuuuguuggcaa

SEQ ID NO: 153089 - RNA, 19 nt, Artificial Sequence
  Description of Artificial Sequence: Synthetic oligonucleotide
  Antisense strand to SEQ ID NO: 153088
uugccaacaaaguuagggc

SEQ ID NO: 153090 - RNA, 19 nt, Artificial Sequence
  Description of Artificial Sequence: Synthetic oligonucleotide
  Sense strand starting at position 2660 of SEQ ID NO: 1966
gccggauucuuucccauuc

SEQ ID NO: 153091 - RNA, 19 nt, Artificial Sequence
  Description of Artificial Sequence: Synthetic oligonucleotide
  Antisense strand to SEQ ID NO: 153090
gaaugggaaagaauccggc

SEQ ID NO: 153092 - RNA, 19 nt, Artificial Sequence
  Description of Artificial Sequence: Synthetic oligonucleotide
  Sense strand starting at position 2652 of SEQ ID NO: 1966
agaagacagccggauucuu

SEQ ID NO: 153093 - RNA, 19 nt, Artificial Sequence
  Description of Artificial Sequence: Synthetic oligonucleotide
  Antisense strand to SEQ ID NO: 153092
aagaauccggcugucuucu

SEQ ID NO: 153094 - RNA, 19 nt, Artificial Sequence
  Description of Artificial Sequence: Synthetic oligonucleotide
  Sense strand starting at position 2582 of SEQ ID NO: 1966
agguuugugcuguagagag

SEQ ID NO: 153095 - RNA, 19 nt, Artificial Sequence
  Description of Artificial Sequence: Synthetic oligonucleotide
  Antisense strand to SEQ ID NO: 153094
cucucuacagcacaaaccu

SEQ ID NO: 153096 - RNA, 19 nt, Artificial Sequence
  Description of Artificial Sequence: Synthetic oligonucleotide
  Sense strand starting at position 2536 of SEQ ID NO: 1966
agaagccuucuguggcuaa

SEQ ID NO: 153097 - RNA, 19 nt, Artificial Sequence
  Description of Artificial Sequence: Synthetic oligonucleotide
  Antisense strand to SEQ ID NO: 153096
uuagccacagaaggcuucu

SEQ ID NO: 153098 - RNA, 19 nt, Artificial Sequence
  Description of Artificial Sequence: Synthetic oligonucleotide
  Sense strand starting at position 2502 of SEQ ID NO: 1966
uuccuaagcugccugagaa

SEQ ID NO: 153099 - RNA, 19 nt, Artificial Sequence
  Description of Artificial Sequence: Synthetic oligonucleotide
  Antisense strand to SEQ ID NO: 153098
uucucaggcagcuuaggaa

SEQ ID NO: 153100 - RNA, 19 nt, Artificial Sequence
  Description of Artificial Sequence: Synthetic oligonucleotide
  Sense strand starting at position 2448 of SEQ ID NO: 1966
uauccugacuucugaggga

SEQ ID NO: 153101 - RNA, 19 nt, Artificial Sequence
  Description of Artificial Sequence: Synthetic oligonucleotide
  Antisense strand to SEQ ID NO: 153100
ucccucagaagucaggaua

SEQ ID NO: 153102 - RNA, 19 nt, Artificial Sequence
  Description of Artificial Sequence: Synthetic oligonucleotide
  Sense strand starting at position 2444 of SEQ ID NO: 1966
acaguauccugacuucuga

SEQ ID NO: 153103 - RNA, 19 nt, Artificial Sequence
  Description of Artificial Sequence: Synthetic oligonucleotide
  Antisense strand to SEQ ID NO: 153102
ucagaagucaggauacugu

SEQ ID NO: 153104 - RNA, 19 nt, Artificial Sequence
  Description of Artificial Sequence: Synthetic oligonucleotide
  Sense strand starting at position 2430 of SEQ ID NO: 1966
gcccucuucuauuuacagu

SEQ ID NO: 153105 - RNA, 19 nt, Artificial Sequence
  Description of Artificial Sequence: Synthetic oligonucleotide
  Antisense strand to SEQ ID NO: 153104
acuguaaauagaagagggc

SEQ ID NO: 153106 - RNA, 19 nt, Artificial Sequence
  Description of Artificial Sequence: Synthetic oligonucleotide
  Sense strand starting at position 2403 of SEQ ID NO: 1966
gacagacucuguuaagaac

SEQ ID NO: 153107 - RNA, 19 nt, Artificial Sequence
  Description of Artificial Sequence: Synthetic oligonucleotide
  Antisense strand to SEQ ID NO: 153106
guucuuaacagagucuguc

SEQ ID NO: 153108 - RNA, 19 nt, Artificial Sequence
  Description of Artificial Sequence: Synthetic oligonucleotide
  Sense strand starting at position 2337 of SEQ ID NO: 1966
ucaguuugccaaugaggac

SEQ ID NO: 153109 - RNA, 19 nt, Artificial Sequence
  Description of Artificial Sequence: Synthetic oligonucleotide
  Antisense strand to SEQ ID NO: 153108
guccucauuggcaaacuga

SEQ ID NO: 153110 - RNA, 19 nt, Artificial Sequence
  Description of Artificial Sequence: Synthetic oligonucleotide
  Sense strand starting at position 1532 of SEQ ID NO: 1966
gucaacuuauauguauuga

SEQ ID NO: 153111 - RNA, 19 nt, Artificial Sequence
  Description of Artificial Sequence: Synthetic oligonucleotide
  Antisense strand to SEQ ID NO: 153110
ucaauacauauaaguugac

SEQ ID NO: 153112 - RNA, 19 nt, Artificial Sequence
  Description of Artificial Sequence: Synthetic oligonucleotide
  Sense strand starting at position 1508 of SEQ ID NO: 1966
uuguuauggucacaggcaa

SEQ ID NO: 153113 - RNA, 19 nt, Artificial Sequence
  Description of Artificial Sequence: Synthetic oligonucleotide
  Antisense strand to SEQ ID NO: 153112
uugccugugaccauaacaa

SEQ ID NO: 153114 - RNA, 19 nt, Artificial Sequence
  Description of Artificial Sequence: Synthetic oligonucleotide
  Sense strand starting at position 1359 of SEQ ID NO: 1966
uggcuucacgagugaucug

SEQ ID NO: 153115 - RNA, 19 nt, Artificial Sequence
  Description of Artificial Sequence: Synthetic oligonucleotide
  Antisense strand to SEQ ID NO: 153114
cagaucacucgugaagcca

SEQ ID NO: 153116 - RNA, 19 nt, Artificial Sequence
  Description of Artificial Sequence: Synthetic oligonucleotide
  Sense strand starting at position 1244 of SEQ ID NO: 1966
cuaugcuaccucugagcuu

SEQ ID NO: 153117 - RNA, 19 nt, Artificial Sequence
  Description of Artificial Sequence: Synthetic oligonucleotide
  Antisense strand to SEQ ID NO: 153116
aagcucagagguagcauag

SEQ ID NO: 153118 - RNA, 19 nt, Artificial Sequence
  Description of Artificial Sequence: Synthetic oligonucleotide
  Sense strand starting at position 1171 of SEQ ID NO: 1966
uucuauugugcagaggaaa

SEQ ID NO: 153119 - RNA, 19 nt, Artificial Sequence
  Description of Artificial Sequence: Synthetic oligonucleotide
  Antisense strand to SEQ ID NO: 153118
uuuccucugcacaauagaa

SEQ ID NO: 153120 - RNA, 19 nt, Artificial Sequence
  Description of Artificial Sequence: Synthetic oligonucleotide
  Sense strand starting at position 1169 of SEQ ID NO: 1966
gguucuauugugcagagga

SEQ ID NO: 153121 - RNA, 19 nt, Artificial Sequence
  Description of Artificial Sequence: Synthetic oligonucleotide
  Antisense strand to SEQ ID NO: 153120
uccucugcacaauagaacc

SEQ ID NO: 153122 - RNA, 19 nt, Artificial Sequence
  Description of Artificial Sequence: Synthetic oligonucleotide
  Sense strand starting at position 962 of SEQ ID NO: 1966
gucagauguucagggaccu

SEQ ID NO: 153123 - RNA, 19 nt, Artificial Sequence
  Description of Artificial Sequence: Synthetic oligonucleotide
  Antisense strand to SEQ ID NO: 153122
aggucccugaacaucugac

SEQ ID NO: 153124 - RNA, 19 nt, Artificial Sequence
  Description of Artificial Sequence: Synthetic oligonucleotide
  Sense strand starting at position 859 of SEQ ID NO: 1966
uccugacaaccguacaaau

SEQ ID NO: 153125 - RNA, 19 nt, Artificial Sequence
  Description of Artificial Sequence: Synthetic oligonucleotide
  Antisense strand to SEQ ID NO: 153124
auuuguacgguugucagga

SEQ ID NO: 153126 - RNA, 19 nt, Artificial Sequence
  Description of Artificial Sequence: Synthetic oligonucleotide
  Sense strand starting at position 726 of SEQ ID NO: 1966
guugaaaguccucauaaua

SEQ ID NO: 153127 - RNA, 19 nt, Artificial Sequence
  Description of Artificial Sequence: Synthetic oligonucleotide
  Antisense strand to SEQ ID NO: 153126
uauuaugaggacuuucaac

SEQ ID NO: 153128 - RNA, 19 nt, Artificial Sequence
  Description of Artificial Sequence: Synthetic oligonucleotide
  Sense strand starting at position 725 of SEQ ID NO: 1966
uguugaaaguccucauaau

SEQ ID NO: 153129 - RNA, 19 nt, Artificial Sequence
  Description of Artificial Sequence: Synthetic oligonucleotide
  Antisense strand to SEQ ID NO: 153128
auuaugaggacuuucaaca

SEQ ID NO: 153130 - RNA, 19 nt, Artificial Sequence
  Description of Artificial Sequence: Synthetic oligonucleotide
  Sense strand starting at position 714 of SEQ ID NO: 1966
ugcuguugcucuguugaaa

SEQ ID NO: 153131 - RNA, 19 nt, Artificial Sequence
  Description of Artificial Sequence: Synthetic oligonucleotide
  Antisense strand to SEQ ID NO: 153130
uuucaacagagcaacagca

SEQ ID NO: 153132 - RNA, 19 nt, Artificial Sequence
  Description of Artificial Sequence: Synthetic oligonucleotide
  Sense strand starting at position 691 of SEQ ID NO: 1966
gggccacacuugguuuaau

SEQ ID NO: 153133 - RNA, 19 nt, Artificial Sequence
  Description of Artificial Sequence: Synthetic oligonucleotide
  Antisense strand to SEQ ID NO: 153132
auuaaaccaaguguggccc

SEQ ID NO: 153134 - RNA, 19 nt, Artificial Sequence
  Description of Artificial Sequence: Synthetic oligonucleotide
  Sense strand starting at position 465 of SEQ ID NO: 1966
gaaggaaggcugugaggua

SEQ ID NO: 153135 - RNA, 19 nt, Artificial Sequence
  Description of Artificial Sequence: Synthetic oligonucleotide
  Antisense strand to SEQ ID NO: 153134
uaccucacagccuuccuuc

SEQ ID NO: 153136 - RNA, 19 nt, Artificial Sequence
  Description of Artificial Sequence: Synthetic oligonucleotide
  Sense strand starting at position 418 of SEQ ID NO: 1966
gcuuauuugugucaauaaa

SEQ ID NO: 153137 - RNA, 19 nt, Artificial Sequence
  Description of Artificial Sequence: Synthetic oligonucleotide
  Antisense strand to SEQ ID NO: 153136
uuuauugacacaaauaagc

SEQ ID NO: 153138 - RNA, 19 nt, Artificial Sequence
  Description of Artificial Sequence: Synthetic oligonucleotide
  Sense strand starting at position 414 of SEQ ID NO: 1966
gcaagcuuauuugugucaa

SEQ ID NO: 153139 - RNA, 19 nt, Artificial Sequence
  Description of Artificial Sequence: Synthetic oligonucleotide
  Antisense strand to SEQ ID NO: 153138
uugacacaaauaagcuugc

SEQ ID NO: 153140 - RNA, 19 nt, Artificial Sequence
  Description of Artificial Sequence: Synthetic oligonucleotide
  Sense strand starting at position 111 of SEQ ID NO: 1966
cgaaguguugcucuguugu

SEQ ID NO: 153141 - RNA, 19 nt, Artificial Sequence
  Description of Artificial Sequence: Synthetic oligonucleotide
  Antisense strand to SEQ ID NO: 153140
acaacagagcaacacuucg

SEQ ID NO: 153142 - RNA, 19 nt, Artificial Sequence
  Description of Artificial Sequence: Synthetic oligonucleotide
  Sense strand starting at position 24 of SEQ ID NO: 1966
ggugauuucugaggacuuu

SEQ ID NO: 153143 - RNA, 19 nt, Artificial Sequence
  Description of Artificial Sequence: Synthetic oligonucleotide
  Antisense strand to SEQ ID NO: 153142
aaaguccucagaaaucacc

SEQ ID NO: 153144 - RNA, 19 nt, Artificial Sequence
  Description of Artificial Sequence: Synthetic oligonucleotide
  Sense strand starting at position 3745 of SEQ ID NO: 1967
cgaaguguugcucuguugu

SEQ ID NO: 153145 - RNA, 19 nt, Artificial Sequence
  Description of Artificial Sequence: Synthetic oligonucleotide
  Antisense strand to SEQ ID NO: 153144
acaacagagcaacacuucg

SEQ ID NO: 153146 - RNA, 19 nt, Artificial Sequence
  Description of Artificial Sequence: Synthetic oligonucleotide
  Sense strand starting at position 3613 of SEQ ID NO: 1967
gguagugagcuuuaucuac

SEQ ID NO: 153147 - RNA, 19 nt, Artificial Sequence
  Description of Artificial Sequence: Synthetic oligonucleotide
  Antisense strand to SEQ ID NO: 153146
guagauaaagcucacuacc

SEQ ID NO: 153148 - RNA, 19 nt, Artificial Sequence
  Description of Artificial Sequence: Synthetic oligonucleotide
  Sense strand starting at position 3145 of SEQ ID NO: 1967
gggccucucugcuuaaaca

SEQ ID NO: 153149 - RNA, 19 nt, Artificial Sequence
  Description of Artificial Sequence: Synthetic oligonucleotide
  Antisense strand to SEQ ID NO: 153148
uguuuaagcagagaggccc

SEQ ID NO: 153150 - RNA, 19 nt, Artificial Sequence
  Description of Artificial Sequence: Synthetic oligonucleotide
  Sense strand starting at position 3143 of SEQ ID NO: 1967
cugggccucucugcuuaaa

SEQ ID NO: 153151 - RNA, 19 nt, Artificial Sequence
  Description of Artificial Sequence: Synthetic oligonucleotide
  Antisense strand to SEQ ID NO: 153150
uuuaagcagagaggcccag

SEQ ID NO: 153152 - RNA, 19 nt, Artificial Sequence
  Description of Artificial Sequence: Synthetic oligonucleotide
  Sense strand starting at position 2990 of SEQ ID NO: 1967
ucaagacuugccuaggacu

SEQ ID NO: 153153 - RNA, 19 nt, Artificial Sequence
  Description of Artificial Sequence: Synthetic oligonucleotide
  Antisense strand to SEQ ID NO: 153152
aguccuaggcaagucuuga

SEQ ID NO: 153154 - RNA, 19 nt, Artificial Sequence
  Description of Artificial Sequence: Synthetic oligonucleotide
  Sense strand starting at position 2977 of SEQ ID NO: 1967
acaaucguuucugucaaga

SEQ ID NO: 153155 - RNA, 19 nt, Artificial Sequence
  Description of Artificial Sequence: Synthetic oligonucleotide
  Antisense strand to SEQ ID NO: 153154
ucuugacagaaacgauugu

SEQ ID NO: 153156 - RNA, 19 nt, Artificial Sequence
  Description of Artificial Sequence: Synthetic oligonucleotide
  Sense strand starting at position 2975 of SEQ ID NO: 1967
ugacaaucguuucugucaa

SEQ ID NO: 153157 - RNA, 19 nt, Artificial Sequence
  Description of Artificial Sequence: Synthetic oligonucleotide
  Antisense strand to SEQ ID NO: 153156
uugacagaaacgauuguca

SEQ ID NO: 153158 - RNA, 19 nt, Artificial Sequence
  Description of Artificial Sequence: Synthetic oligonucleotide
  Sense strand starting at position 2813 of SEQ ID NO: 1967
aaguccuuccuguagugua

SEQ ID NO: 153159 - RNA, 19 nt, Artificial Sequence
  Description of Artificial Sequence: Synthetic oligonucleotide
  Antisense strand to SEQ ID NO: 153158
uacacuacaggaaggacuu

SEQ ID NO: 153160 - RNA, 19 nt, Artificial Sequence
  Description of Artificial Sequence: Synthetic oligonucleotide
  Sense strand starting at position 2738 of SEQ ID NO: 1967
acagacaucccagggcuaa

SEQ ID NO: 153161 - RNA, 19 nt, Artificial Sequence
  Description of Artificial Sequence: Synthetic oligonucleotide
  Antisense strand to SEQ ID NO: 153160
uuagcccugggaugucugu

SEQ ID NO: 153162 - RNA, 19 nt, Artificial Sequence
  Description of Artificial Sequence: Synthetic oligonucleotide
  Sense strand starting at position 2665 of SEQ ID NO: 1967
agaacucuguggccuacaa

SEQ ID NO: 153163 - RNA, 19 nt, Artificial Sequence
  Description of Artificial Sequence: Synthetic oligonucleotide
  Antisense strand to SEQ ID NO: 153162
uuguaggccacagaguucu

SEQ ID NO: 153164 - RNA, 19 nt, Artificial Sequence
  Description of Artificial Sequence: Synthetic oligonucleotide
  Sense strand starting at position 2662 of SEQ ID NO: 1967
ccaagaacucuguggccua

SEQ ID NO: 153165 - RNA, 19 nt, Artificial Sequence
  Description of Artificial Sequence: Synthetic oligonucleotide
  Antisense strand to SEQ ID NO: 153164
uaggccacagaguucuugg

SEQ ID NO: 153166 - RNA, 19 nt, Artificial Sequence
  Description of Artificial Sequence: Synthetic oligonucleotide
  Sense strand starting at position 2641 of SEQ ID NO: 1967
ggguuaaugaggcauccag

SEQ ID NO: 153167 - RNA, 19 nt, Artificial Sequence
  Description of Artificial Sequence: Synthetic oligonucleotide
  Antisense strand to SEQ ID NO: 153166
cuggaugccucauuaaccc

SEQ ID NO: 153168 - RNA, 19 nt, Artificial Sequence
  Description of Artificial Sequence: Synthetic oligonucleotide
  Sense strand starting at position 2417 of SEQ ID NO: 1967
uuaggcucuuauccaugau

SEQ ID NO: 153169 - RNA, 19 nt, Artificial Sequence
  Description of Artificial Sequence: Synthetic oligonucleotide
  Antisense strand to SEQ ID NO: 153168
aucauggauaagagccuaa

SEQ ID NO: 153170 - RNA, 19 nt, Artificial Sequence
  Description of Artificial Sequence: Synthetic oligonucleotide
  Sense strand starting at position 2339 of SEQ ID NO: 1967
ccugcaguggucuaaccuu

SEQ ID NO: 153171 - RNA, 19 nt, Artificial Sequence
  Description of Artificial Sequence: Synthetic oligonucleotide
  Antisense strand to SEQ ID NO: 153170
aagguuagaccacugcagg

SEQ ID NO: 153172 - RNA, 19 nt, Artificial Sequence
  Description of Artificial Sequence: Synthetic oligonucleotide
  Sense strand starting at position 1648 of SEQ ID NO: 1967
ccagguugguuaucagcau

SEQ ID NO: 153173 - RNA, 19 nt, Artificial Sequence
  Description of Artificial Sequence: Synthetic oligonucleotide
  Antisense strand to SEQ ID NO: 153172
augcugauaaccaaccugg

SEQ ID NO: 153174 - RNA, 19 nt, Artificial Sequence
  Description of Artificial Sequence: Synthetic oligonucleotide
  Sense strand starting at position 1613 of SEQ ID NO: 1967
ugauacuuccagggaggca

SEQ ID NO: 153175 - RNA, 19 nt, Artificial Sequence
  Description of Artificial Sequence: Synthetic oligonucleotide
  Antisense strand to SEQ ID NO: 153174
ugccucccuggaaguauca

SEQ ID NO: 153176 - RNA, 19 nt, Artificial Sequence
  Description of Artificial Sequence: Synthetic oligonucleotide
  Sense strand starting at position 1499 of SEQ ID NO: 1967
gccucauacucagcucuga

SEQ ID NO: 153177 - RNA, 19 nt, Artificial Sequence
  Description of Artificial Sequence: Synthetic oligonucleotide
  Antisense strand to SEQ ID NO: 153176
ucagagcugaguaugaggc

SEQ ID NO: 153178 - RNA, 19 nt, Artificial Sequence
  Description of Artificial Sequence: Synthetic oligonucleotide
  Sense strand starting at position 1278 of SEQ ID NO: 1967
ucuguugucuucucaccaa

SEQ ID NO: 153179 - RNA, 19 nt, Artificial Sequence
  Description of Artificial Sequence: Synthetic oligonucleotide
  Antisense strand to SEQ ID NO: 153178
uuggugagaagacaacaga

SEQ ID NO: 153180 - RNA, 19 nt, Artificial Sequence
  Description of Artificial Sequence: Synthetic oligonucleotide
  Sense strand starting at position 1155 of SEQ ID NO: 1967
agagaagguucccuaucug

SEQ ID NO: 153181 - RNA, 19 nt, Artificial Sequence
  Description of Artificial Sequence: Synthetic oligonucleotide
  Antisense strand to SEQ ID NO: 153180
cagauagggaaccuucucu

SEQ ID NO: 153182 - RNA, 19 nt, Artificial Sequence
  Description of Artificial Sequence: Synthetic oligonucleotide
  Sense strand starting at position 1154 of SEQ ID NO: 1967
cagagaagguucccuaucu

SEQ ID NO: 153183 - RNA, 19 nt, Artificial Sequence
  Description of Artificial Sequence: Synthetic oligonucleotide
  Antisense strand to SEQ ID NO: 153182
agauagggaaccuucucug

SEQ ID NO: 153184 - RNA, 19 nt, Artificial Sequence
  Description of Artificial Sequence: Synthetic oligonucleotide
  Sense strand starting at position 1049 of SEQ ID NO: 1967
ggcacuuucugggugagca

SEQ ID NO: 153185 - RNA, 19 nt, Artificial Sequence
  Description of Artificial Sequence: Synthetic oligonucleotide
  Antisense strand to SEQ ID NO: 153184
ugcucacccagaaagugcc

SEQ ID NO: 153186 - RNA, 19 nt, Artificial Sequence
  Description of Artificial Sequence: Synthetic oligonucleotide
  Sense strand starting at position 703 of SEQ ID NO: 1967
ucucucuuucuccgagauc

SEQ ID NO: 153187 - RNA, 19 nt, Artificial Sequence
  Description of Artificial Sequence: Synthetic oligonucleotide
  Antisense strand to SEQ ID NO: 153186
gaucucggagaaagagaga

SEQ ID NO: 153188 - RNA, 19 nt, Artificial Sequence
  Description of Artificial Sequence: Synthetic oligonucleotide
  Sense strand starting at position 563 of SEQ ID NO: 1967
agugauauuuaaggaagga

SEQ ID NO: 153189 - RNA, 19 nt, Artificial Sequence
  Description of Artificial Sequence: Synthetic oligonucleotide
  Antisense strand to SEQ ID NO: 153188
uccuuccuuaaauaucacu

SEQ ID NO: 153190 - RNA, 19 nt, Artificial Sequence
  Description of Artificial Sequence: Synthetic oligonucleotide
  Sense strand starting at position 556 of SEQ ID NO: 1967
uggugacagugauauuuaa

SEQ ID NO: 153191 - RNA, 19 nt, Artificial Sequence
  Description of Artificial Sequence: Synthetic oligonucleotide
  Antisense strand to SEQ ID NO: 153190
uuaaauaucacugucacca

SEQ ID NO: 153192 - RNA, 19 nt, Artificial Sequence
  Description of Artificial Sequence: Synthetic oligonucleotide
  Sense strand starting at position 522 of SEQ ID NO: 1967
gugugaagcaguuaggagu

SEQ ID NO: 153193 - RNA, 19 nt, Artificial Sequence
  Description of Artificial Sequence: Synthetic oligonucleotide
  Antisense strand to SEQ ID NO: 153192
acuccuaacugcuucacac

SEQ ID NO: 153194 - RNA, 19 nt, Artificial Sequence
  Description of Artificial Sequence: Synthetic oligonucleotide
  Sense strand starting at position 473 of SEQ ID NO: 1967
guccacauauggucuucua

SEQ ID NO: 153195 - RNA, 19 nt, Artificial Sequence
  Description of Artificial Sequence: Synthetic oligonucleotide
  Antisense strand to SEQ ID NO: 153194
uagaagaccauauguggac

SEQ ID NO: 153196 - RNA, 19 nt, Artificial Sequence
  Description of Artificial Sequence: Synthetic oligonucleotide
  Sense strand starting at position 429 of SEQ ID NO: 1967
gaucuaugugguuggcaug

SEQ ID NO: 153197 - RNA, 19 nt, Artificial Sequence
  Description of Artificial Sequence: Synthetic oligonucleotide
  Antisense strand to SEQ ID NO: 153196
caugccaaccacauagauc

SEQ ID NO: 153198 - RNA, 19 nt, Artificial Sequence
  Description of Artificial Sequence: Synthetic oligonucleotide
  Sense strand starting at position 428 of SEQ ID NO: 1967
ugaucuaugugguuggcau

SEQ ID NO: 153199 - RNA, 19 nt, Artificial Sequence
  Description of Artificial Sequence: Synthetic oligonucleotide
  Antisense strand to SEQ ID NO: 153198
augccaaccacauagauca

SEQ ID NO: 153200 - RNA, 19 nt, Artificial Sequence
  Description of Artificial Sequence: Synthetic oligonucleotide
  Sense strand starting at position 423 of SEQ ID NO: 1967
cagcaugaucuaugugguu

SEQ ID NO: 153201 - RNA, 19 nt, Artificial Sequence
  Description of Artificial Sequence: Synthetic oligonucleotide
  Antisense strand to SEQ ID NO: 153200
aaccacauagaucaugcug

SEQ ID NO: 153202 - RNA, 19 nt, Artificial Sequence
  Description of Artificial Sequence: Synthetic oligonucleotide
  Sense strand starting at position 416 of SEQ ID NO: 1967
uaugguccagcaugaucua

SEQ ID NO: 153203 - RNA, 19 nt, Artificial Sequence
  Description of Artificial Sequence: Synthetic oligonucleotide
  Antisense strand to SEQ ID NO: 153202
uagaucaugcuggaccaua

SEQ ID NO: 153204 - RNA, 19 nt, Artificial Sequence
  Description of Artificial Sequence: Synthetic oligonucleotide
  Sense strand starting at position 323 of SEQ ID NO: 1967
uccacagucucaguaagaa

SEQ ID NO: 153205 - RNA, 19 nt, Artificial Sequence
  Description of Artificial Sequence: Synthetic oligonucleotide
  Antisense strand to SEQ ID NO: 153204
uucuuacugagacugugga

SEQ ID NO: 153206 - RNA, 19 nt, Artificial Sequence
  Description of Artificial Sequence: Synthetic oligonucleotide
  Sense strand starting at position 288 of SEQ ID NO: 1967
gagucuucucccuggaggu

SEQ ID NO: 153207 - RNA, 19 nt, Artificial Sequence
  Description of Artificial Sequence: Synthetic oligonucleotide
  Antisense strand to SEQ ID NO: 153206
accuccagggagaagacuc

SEQ ID NO: 153208 - RNA, 19 nt, Artificial Sequence
  Description of Artificial Sequence: Synthetic oligonucleotide
  Sense strand starting at position 276 of SEQ ID NO: 1967
acauccuuuccugagucuu

SEQ ID NO: 153209 - RNA, 19 nt, Artificial Sequence
  Description of Artificial Sequence: Synthetic oligonucleotide
  Antisense strand to SEQ ID NO: 153208
aagacucaggaaaggaugu

SEQ ID NO: 153210 - RNA, 19 nt, Artificial Sequence
  Description of Artificial Sequence: Synthetic oligonucleotide
  Sense strand starting at position 273 of SEQ ID NO: 1967
ucuacauccuuuccugagu

SEQ ID NO: 153211 - RNA, 19 nt, Artificial Sequence
  Description of Artificial Sequence: Synthetic oligonucleotide
  Antisense strand to SEQ ID NO: 153210
acucaggaaaggauguaga

SEQ ID NO: 153212 - RNA, 19 nt, Artificial Sequence
  Description of Artificial Sequence: Synthetic oligonucleotide
  Sense strand starting at position 180 of SEQ ID NO: 1967
ugcaucaaugagcaauaua

SEQ ID NO: 153213 - RNA, 19 nt, Artificial Sequence
  Description of Artificial Sequence: Synthetic oligonucleotide
  Antisense strand to SEQ ID NO: 153212
uauauugcucauugaugca

SEQ ID NO: 153214 - RNA, 19 nt, Artificial Sequence
  Description of Artificial Sequence: Synthetic oligonucleotide
  Sense strand starting at position 179 of SEQ ID NO: 1967
cugcaucaaugagcaauau

SEQ ID NO: 153215 - RNA, 19 nt, Artificial Sequence
  Description of Artificial Sequence: Synthetic oligonucleotide
  Antisense strand to SEQ ID NO: 153214
auauugcucauugaugcag

SEQ ID NO: 153216 - RNA, 19 nt, Artificial Sequence
  Description of Artificial Sequence: Synthetic oligonucleotide
  Sense strand starting at position 168 of SEQ ID NO: 1967
agaggaggucucugcauca

SEQ ID NO: 153217 - RNA, 19 nt, Artificial Sequence
  Description of Artificial Sequence: Synthetic oligonucleotide
  Antisense strand to SEQ ID NO: 153216
ugaugcagagaccuccucu

SEQ ID NO: 153218 - RNA, 19 nt, Artificial Sequence
  Description of Artificial Sequence: Synthetic oligonucleotide
  Sense strand starting at position 142 of SEQ ID NO: 1967
guguuugugcgcccagcau

SEQ ID NO: 153219 - RNA, 19 nt, Artificial Sequence
  Description of Artificial Sequence: Synthetic oligonucleotide
  Antisense strand to SEQ ID NO: 153218
augcugggcgcacaaacac

SEQ ID NO: 153220 - RNA, 19 nt, Artificial Sequence
  Description of Artificial Sequence: Synthetic oligonucleotide
  Sense strand starting at position 62 of SEQ ID NO: 1967
cccuguauugauggucuga

SEQ ID NO: 153221 - RNA, 19 nt, Artificial Sequence
  Description of Artificial Sequence: Synthetic oligonucleotide
  Antisense strand to SEQ ID NO: 153220
ucagaccaucaauacaggg

SEQ ID NO: 153222 - RNA, 19 nt, Artificial Sequence
  Description of Artificial Sequence: Synthetic oligonucleotide
  Sense strand starting at position 40 of SEQ ID NO: 1967
cccucaguugcugaacaga

SEQ ID NO: 153223 - RNA, 19 nt, Artificial Sequence
  Description of Artificial Sequence: Synthetic oligonucleotide
  Antisense strand to SEQ ID NO: 153222
ucuguucagcaacugaggg

SEQ ID NO: 153224 - RNA, 19 nt, Artificial Sequence
  Description of Artificial Sequence: Synthetic oligonucleotide
  Sense strand starting at position 12 of SEQ ID NO: 1969
cagggcuagccuuggcaaa

SEQ ID NO: 153225 - RNA, 19 nt, Artificial Sequence
  Description of Artificial Sequence: Synthetic oligonucleotide
  Antisense strand to SEQ ID NO: 153224
uuugccaaggcuagcccug

SEQ ID NO: 153226 - RNA, 19 nt, Artificial Sequence
  Description of Artificial Sequence: Synthetic oligonucleotide
  Sense strand starting at position 62 of SEQ ID NO: 1969
cgaccacucccauguuaag

SEQ ID NO: 153227 - RNA, 19 nt, Artificial Sequence
  Description of Artificial Sequence: Synthetic oligonucleotide
  Antisense strand to SEQ ID NO: 153226
cuuaacaugggaguggucg

SEQ ID NO: 153228 - RNA, 19 nt, Artificial Sequence
  Description of Artificial Sequence: Synthetic oligonucleotide
  Sense strand starting at position 74 of SEQ ID NO: 1969
uguuaaggcccucagaauc

SEQ ID NO: 153229 - RNA, 19 nt, Artificial Sequence
  Description of Artificial Sequence: Synthetic oligonucleotide
  Antisense strand to SEQ ID NO: 153228
gauucugagggccuuaaca

SEQ ID NO: 153230 - RNA, 19 nt, Artificial Sequence
  Description of Artificial Sequence: Synthetic oligonucleotide
  Sense strand starting at position 115 of SEQ ID NO: 1969
gccuuagcuagggacaaua

SEQ ID NO: 153231 - RNA, 19 nt, Artificial Sequence
  Description of Artificial Sequence: Synthetic oligonucleotide
  Antisense strand to SEQ ID NO: 153230
uauugucccuagcuaaggc

SEQ ID NO: 153232 - RNA, 19 nt, Artificial Sequence
  Description of Artificial Sequence: Synthetic oligonucleotide
  Sense strand starting at position 209 of SEQ ID NO: 1969
uuccuuccucccugagaga

SEQ ID NO: 153233 - RNA, 19 nt, Artificial Sequence
  Description of Artificial Sequence: Synthetic oligonucleotide
  Antisense strand to SEQ ID NO: 153232
ucucucagggaggaaggaa

SEQ ID NO: 153234 - RNA, 19 nt, Artificial Sequence
  Description of Artificial Sequence: Synthetic oligonucleotide
  Sense strand starting at position 277 of SEQ ID NO: 1969
cccacuuuaggcuggauua

SEQ ID NO: 153235 - RNA, 19 nt, Artificial Sequence
  Description of Artificial Sequence: Synthetic oligonucleotide
  Antisense strand to SEQ ID NO: 153234
uaauccagccuaaaguggg

SEQ ID NO: 153236 - RNA, 19 nt, Artificial Sequence
  Description of Artificial Sequence: Synthetic oligonucleotide
  Sense strand starting at position 279 of SEQ ID NO: 1969
cacuuuaggcuggauuagu

SEQ ID NO: 153237 - RNA, 19 nt, Artificial Sequence
  Description of Artificial Sequence: Synthetic oligonucleotide
  Antisense strand to SEQ ID NO: 153236
acuaauccagccuaaagug

SEQ ID NO: 153238 - RNA, 19 nt, Artificial Sequence
  Description of Artificial Sequence: Synthetic oligonucleotide
  Sense strand starting at position 415 of SEQ ID NO: 1969
aacuccuggccuggagaaa

SEQ ID NO: 153239 - RNA, 19 nt, Artificial Sequence
  Description of Artificial Sequence: Synthetic oligonucleotide
  Antisense strand to SEQ ID NO: 153238
uuucuccaggccaggaguu

SEQ ID NO: 153240 - RNA, 19 nt, Artificial Sequence
  Description of Artificial Sequence: Synthetic oligonucleotide
  Sense strand starting at position 434 of SEQ ID NO: 1969
agaucacucugcccuggaa

SEQ ID NO: 153241 - RNA, 19 nt, Artificial Sequence
  Description of Artificial Sequence: Synthetic oligonucleotide
  Antisense strand to SEQ ID NO: 153240
uuccagggcagagugaucu

SEQ ID NO: 153242 - RNA, 19 nt, Artificial Sequence
  Description of Artificial Sequence: Synthetic oligonucleotide
  Sense strand starting at position 436 of SEQ ID NO: 1969
aucacucugcccuggaaga

SEQ ID NO: 153243 - RNA, 19 nt, Artificial Sequence
  Description of Artificial Sequence: Synthetic oligonucleotide
  Antisense strand to SEQ ID NO: 153242
ucuuccagggcagagugau

SEQ ID NO: 153244 - RNA, 19 nt, Artificial Sequence
  Description of Artificial Sequence: Synthetic oligonucleotide
  Sense strand starting at position 437 of SEQ ID NO: 1969
ucacucugcccuggaagaa

SEQ ID NO: 153245 - RNA, 19 nt, Artificial Sequence
  Description of Artificial Sequence: Synthetic oligonucleotide
  Antisense strand to SEQ ID NO: 153244
uucuuccagggcagaguga

SEQ ID NO: 153246 - RNA, 19 nt, Artificial Sequence
  Description of Artificial Sequence: Synthetic oligonucleotide
  Sense strand starting at position 837 of SEQ ID NO: 1969
ggacaauccaggugucuaa

SEQ ID NO: 153247 - RNA, 19 nt, Artificial Sequence
  Description of Artificial Sequence: Synthetic oligonucleotide
  Antisense strand to SEQ ID NO: 153246
uuagacaccuggauugucc

SEQ ID NO: 153248 - RNA, 19 nt, Artificial Sequence
  Description of Artificial Sequence: Synthetic oligonucleotide
  Sense strand starting at position 1160 of SEQ ID NO: 1969
ggauguccuccuugggaga

SEQ ID NO: 153249 - RNA, 19 nt, Artificial Sequence
  Description of Artificial Sequence: Synthetic oligonucleotide
  Antisense strand to SEQ ID NO: 153248
ucucccaaggaggacaucc

SEQ ID NO: 153250 - RNA, 19 nt, Artificial Sequence
  Description of Artificial Sequence: Synthetic oligonucleotide
  Sense strand starting at position 1287 of SEQ ID NO: 1969
uucagagggugcucagauu

SEQ ID NO: 153251 - RNA, 19 nt, Artificial Sequence
  Description of Artificial Sequence: Synthetic oligonucleotide
  Antisense strand to SEQ ID NO: 153250
aaucugagcacccucugaa

SEQ ID NO: 153252 - RNA, 19 nt, Artificial Sequence
  Description of Artificial Sequence: Synthetic oligonucleotide
  Sense strand starting at position 1300 of SEQ ID NO: 1969
cagauuccggcuugcacaa

SEQ ID NO: 153253 - RNA, 19 nt, Artificial Sequence
  Description of Artificial Sequence: Synthetic oligonucleotide
  Antisense strand to SEQ ID NO: 153252
uugugcaagccggaaucug

SEQ ID NO: 153254 - RNA, 19 nt, Artificial Sequence
  Description of Artificial Sequence: Synthetic oligonucleotide
  Sense strand starting at position 1338 of SEQ ID NO: 1969
acacaaaguccggaacgau

SEQ ID NO: 153255 - RNA, 19 nt, Artificial Sequence
  Description of Artificial Sequence: Synthetic oligonucleotide
  Antisense strand to SEQ ID NO: 153254
aucguuccggacuuugugu

SEQ ID NO: 153256 - RNA, 19 nt, Artificial Sequence
  Description of Artificial Sequence: Synthetic oligonucleotide
  Sense strand starting at position 1421 of SEQ ID NO: 1969
cuaguuuccuugcugggaa

SEQ ID NO: 153257 - RNA, 19 nt, Artificial Sequence
  Description of Artificial Sequence: Synthetic oligonucleotide
  Antisense strand to SEQ ID NO: 153256
uucccagcaaggaaacuag

SEQ ID NO: 153258 - RNA, 19 nt, Artificial Sequence
  Description of Artificial Sequence: Synthetic oligonucleotide
  Sense strand starting at position 1759 of SEQ ID NO: 1969
ggguacuugcuccaggauu

SEQ ID NO: 153259 - RNA, 19 nt, Artificial Sequence
  Description of Artificial Sequence: Synthetic oligonucleotide
  Antisense strand to SEQ ID NO: 153258
aauccuggagcaaguaccc

SEQ ID NO: 153260 - RNA, 19 nt, Artificial Sequence
  Description of Artificial Sequence: Synthetic oligonucleotide
  Sense strand starting at position 1827 of SEQ ID NO: 1969
cgcugaguucgcaauccgu

SEQ ID NO: 153261 - RNA, 19 nt, Artificial Sequence
  Description of Artificial Sequence: Synthetic oligonucleotide
  Antisense strand to SEQ ID NO: 153260
acggauugcgaacucagcg

SEQ ID NO: 153262 - RNA, 19 nt, Artificial Sequence
  Description of Artificial Sequence: Synthetic oligonucleotide
  Sense strand starting at position 1863 of SEQ ID NO: 1969
augcgaugagcguccgaau

SEQ ID NO: 153263 - RNA, 19 nt, Artificial Sequence
  Description of Artificial Sequence: Synthetic oligonucleotide
  Antisense strand to SEQ ID NO: 153262
auucggacgcucaucgcau

SEQ ID NO: 153264 - RNA, 19 nt, Artificial Sequence
  Description of Artificial Sequence: Synthetic oligonucleotide
  Sense strand starting at position 1864 of SEQ ID NO: 1969
ugcgaugagcguccgaauu

SEQ ID NO: 153265 - RNA, 19 nt, Artificial Sequence
  Description of Artificial Sequence: Synthetic oligonucleotide
  Antisense strand to SEQ ID NO: 153264
aauucggacgcucaucgca

SEQ ID NO: 153266 - RNA, 19 nt, Artificial Sequence
  Description of Artificial Sequence: Synthetic oligonucleotide
  Sense strand starting at position 1880 of SEQ ID NO: 1969
auuggauggugcuugaauu

SEQ ID NO: 153267 - RNA, 19 nt, Artificial Sequence
  Description of Artificial Sequence: Synthetic oligonucleotide
  Antisense strand to SEQ ID NO: 153266
aauucaagcaccauccaau

SEQ ID NO: 153268 - RNA, 19 nt, Artificial Sequence
  Description of Artificial Sequence: Synthetic oligonucleotide
  Sense strand starting at position 2615 of SEQ ID NO: 1969
gcaggagguuucccuuguu

SEQ ID NO: 153269 - RNA, 19 nt, Artificial Sequence
  Description of Artificial Sequence: Synthetic oligonucleotide
  Antisense strand to SEQ ID NO: 153268
aacaagggaaaccuccugc

SEQ ID NO: 153270 - RNA, 19 nt, Artificial Sequence
  Description of Artificial Sequence: Synthetic oligonucleotide
  Sense strand starting at position 2669 of SEQ ID NO: 1969
gcaugaguuugggccacua

SEQ ID NO: 153271 - RNA, 19 nt, Artificial Sequence
  Description of Artificial Sequence: Synthetic oligonucleotide
  Antisense strand to SEQ ID NO: 153270
uaguggcccaaacucaugc

SEQ ID NO: 153272 - RNA, 19 nt, Artificial Sequence
  Description of Artificial Sequence: Synthetic oligonucleotide
  Sense strand starting at position 2690 of SEQ ID NO: 1969
gcaagaacuagcuagcagu

SEQ ID NO: 153273 - RNA, 19 nt, Artificial Sequence
  Description of Artificial Sequence: Synthetic oligonucleotide
  Antisense strand to SEQ ID NO: 153272
acugcuagcuaguucuugc

SEQ ID NO: 153274 - RNA, 19 nt, Artificial Sequence
  Description of Artificial Sequence: Synthetic oligonucleotide
  Sense strand starting at position 2777 of SEQ ID NO: 1969
cuaacugacucagagaaag

SEQ ID NO: 153275 - RNA, 19 nt, Artificial Sequence
  Description of Artificial Sequence: Synthetic oligonucleotide
  Antisense strand to SEQ ID NO: 153274
cuuucucugagucaguuag

SEQ ID NO: 153276 - RNA, 19 nt, Artificial Sequence
  Description of Artificial Sequence: Synthetic oligonucleotide
  Sense strand starting at position 2946 of SEQ ID NO: 1969
cugggaaugucagugagga

SEQ ID NO: 153277 - RNA, 19 nt, Artificial Sequence
  Description of Artificial Sequence: Synthetic oligonucleotide
  Antisense strand to SEQ ID NO: 153276
uccucacugacauucccag

SEQ ID NO: 153278 - RNA, 19 nt, Artificial Sequence
  Description of Artificial Sequence: Synthetic oligonucleotide
  Sense strand starting at position 2947 of SEQ ID NO: 1969
ugggaaugucagugaggag

SEQ ID NO: 153279 - RNA, 19 nt, Artificial Sequence
  Description of Artificial Sequence: Synthetic oligonucleotide
  Antisense strand to SEQ ID NO: 153278
cuccucacugacauuccca

SEQ ID NO: 153280 - RNA, 19 nt, Artificial Sequence
  Description of Artificial Sequence: Synthetic oligonucleotide
  Sense strand starting at position 3003 of SEQ ID NO: 1969
uugguauugccugguagga

SEQ ID NO: 153281 - RNA, 19 nt, Artificial Sequence
  Description of Artificial Sequence: Synthetic oligonucleotide
  Antisense strand to SEQ ID NO: 153280
uccuaccaggcaauaccaa

SEQ ID NO: 153282 - RNA, 19 nt, Artificial Sequence
  Description of Artificial Sequence: Synthetic oligonucleotide
  Sense strand starting at position 3013 of SEQ ID NO: 1969
cugguaggauucuucucua

SEQ ID NO: 153283 - RNA, 19 nt, Artificial Sequence
  Description of Artificial Sequence: Synthetic oligonucleotide
  Antisense strand to SEQ ID NO: 153282
uagagaagaauccuaccag

SEQ ID NO: 153284 - RNA, 19 nt, Artificial Sequence
  Description of Artificial Sequence: Synthetic oligonucleotide
  Sense strand starting at position 3016 of SEQ ID NO: 1969
guaggauucuucucuaugu

SEQ ID NO: 153285 - RNA, 19 nt, Artificial Sequence
  Description of Artificial Sequence: Synthetic oligonucleotide
  Antisense strand to SEQ ID NO: 153284
acauagagaagaauccuac

SEQ ID NO: 153286 - RNA, 19 nt, Artificial Sequence
  Description of Artificial Sequence: Synthetic oligonucleotide
  Sense strand starting at position 3196 of SEQ ID NO: 1969
ccuuaacuggacugugauc

SEQ ID NO: 153287 - RNA, 19 nt, Artificial Sequence
  Description of Artificial Sequence: Synthetic oligonucleotide
  Antisense strand to SEQ ID NO: 153286
gaucacaguccaguuaagg

SEQ ID NO: 153288 - RNA, 19 nt, Artificial Sequence
  Description of Artificial Sequence: Synthetic oligonucleotide
  Sense strand starting at position 3358 of SEQ ID NO: 1969
acaguaacucaguaaaguc

SEQ ID NO: 153289 - RNA, 19 nt, Artificial Sequence
  Description of Artificial Sequence: Synthetic oligonucleotide
  Antisense strand to SEQ ID NO: 153288
gacuuuacugaguuacugu

SEQ ID NO: 153290 - RNA, 19 nt, Artificial Sequence
  Description of Artificial Sequence: Synthetic oligonucleotide
  Sense strand starting at position 3424 of SEQ ID NO: 1969
gaauuaacggccgagggau

SEQ ID NO: 153291 - RNA, 19 nt, Artificial Sequence
  Description of Artificial Sequence: Synthetic oligonucleotide
  Antisense strand to SEQ ID NO: 153290
aucccucggccguuaauuc

SEQ ID NO: 153292 - RNA, 19 nt, Artificial Sequence
  Description of Artificial Sequence: Synthetic oligonucleotide
  Sense strand starting at position 3436 of SEQ ID NO: 1969
gagggaucuuggguccaag

SEQ ID NO: 153293 - RNA, 19 nt, Artificial Sequence
  Description of Artificial Sequence: Synthetic oligonucleotide
  Antisense strand to SEQ ID NO: 153292
cuuggacccaagaucccuc

SEQ ID NO: 153294 - RNA, 19 nt, Artificial Sequence
  Description of Artificial Sequence: Synthetic oligonucleotide
  Sense strand starting at position 3580 of SEQ ID NO: 1969
ggguuuagguacucagaua

SEQ ID NO: 153295 - RNA, 19 nt, Artificial Sequence
  Description of Artificial Sequence: Synthetic oligonucleotide
  Antisense strand to SEQ ID NO: 153294
uaucugaguaccuaaaccc

SEQ ID NO: 153296 - RNA, 19 nt, Artificial Sequence
  Description of Artificial Sequence: Synthetic oligonucleotide
  Sense strand starting at position 3581 of SEQ ID NO: 1969
gguuuagguacucagauac

SEQ ID NO: 153297 - RNA, 19 nt, Artificial Sequence
  Description of Artificial Sequence: Synthetic oligonucleotide
  Antisense strand to SEQ ID NO: 153296
guaucugaguaccuaaacc

SEQ ID NO: 153298 - RNA, 19 nt, Artificial Sequence
  Description of Artificial Sequence: Synthetic oligonucleotide
  Sense strand starting at position 3592 of SEQ ID NO: 1969
ucagauacaugcuuaugga

SEQ ID NO: 153299 - RNA, 19 nt, Artificial Sequence
  Description of Artificial Sequence: Synthetic oligonucleotide
  Antisense strand to SEQ ID NO: 153298
uccauaagcauguaucuga

SEQ ID NO: 153300 - RNA, 19 nt, Artificial Sequence
  Description of Artificial Sequence: Synthetic oligonucleotide
  Sense strand starting at position 3602 of SEQ ID NO: 1969
gcuuauggaauagauuagu

SEQ ID NO: 153301 - RNA, 19 nt, Artificial Sequence
  Description of Artificial Sequence: Synthetic oligonucleotide
  Antisense strand to SEQ ID NO: 153300
acuaaucuauuccauaagc

SEQ ID NO: 153302 - RNA, 19 nt, Artificial Sequence
  Description of Artificial Sequence: Synthetic oligonucleotide
  Sense strand starting at position 3943 of SEQ ID NO: 1969
auaaauauucuccgaagac

SEQ ID NO: 153303 - RNA, 19 nt, Artificial Sequence
  Description of Artificial Sequence: Synthetic oligonucleotide
  Antisense strand to SEQ ID NO: 153302
gucuucggagaauauuuau

SEQ ID NO: 153304 - RNA, 19 nt, Artificial Sequence
  Description of Artificial Sequence: Synthetic oligonucleotide
  Sense strand starting at position 94 of SEQ ID NO: 1970
ugcuuugagaaauauguga

SEQ ID NO: 153305 - RNA, 19 nt, Artificial Sequence
  Description of Artificial Sequence: Synthetic oligonucleotide
  Antisense strand to SEQ ID NO: 153304
ucacauauuucucaaagca

SEQ ID NO: 153306 - RNA, 19 nt, Artificial Sequence
  Description of Artificial Sequence: Synthetic oligonucleotide
  Sense strand starting at position 96 of SEQ ID NO: 1970
cuuugagaaauaugugaug

SEQ ID NO: 153307 - RNA, 19 nt, Artificial Sequence
  Description of Artificial Sequence: Synthetic oligonucleotide
  Antisense strand to SEQ ID NO: 153306
caucacauauuucucaaag

SEQ ID NO: 153308 - RNA, 19 nt, Artificial Sequence
  Description of Artificial Sequence: Synthetic oligonucleotide
  Sense strand starting at position 114 of SEQ ID NO: 1970
ggaaguaauauaugugauu

SEQ ID NO: 153309 - RNA, 19 nt, Artificial Sequence
  Description of Artificial Sequence: Synthetic oligonucleotide
  Antisense strand to SEQ ID NO: 153308
aaucacauauauuacuucc

SEQ ID NO: 153310 - RNA, 19 nt, Artificial Sequence
  Description of Artificial Sequence: Synthetic oligonucleotide
  Sense strand starting at position 286 of SEQ ID NO: 1970
agugguaauccuggaaccu

SEQ ID NO: 153311 - RNA, 19 nt, Artificial Sequence
  Description of Artificial Sequence: Synthetic oligonucleotide
  Antisense strand to SEQ ID NO: 153310
agguuccaggauuaccacu

SEQ ID NO: 153312 - RNA, 19 nt, Artificial Sequence
  Description of Artificial Sequence: Synthetic oligonucleotide
  Sense strand starting at position 287 of SEQ ID NO: 1970
gugguaauccuggaaccuu

SEQ ID NO: 153313 - RNA, 19 nt, Artificial Sequence
  Description of Artificial Sequence: Synthetic oligonucleotide
  Antisense strand to SEQ ID NO: 153312
aagguuccaggauuaccac

SEQ ID NO: 153314 - RNA, 19 nt, Artificial Sequence
  Description of Artificial Sequence: Synthetic oligonucleotide
  Sense strand starting at position 444 of SEQ ID NO: 1970
guuacacagcuauagacaa

SEQ ID NO: 153315 - RNA, 19 nt, Artificial Sequence
  Description of Artificial Sequence: Synthetic oligonucleotide
  Antisense strand to SEQ ID NO: 153314
uugucuauagcuguguaac

SEQ ID NO: 153316 - RNA, 19 nt, Artificial Sequence
  Description of Artificial Sequence: Synthetic oligonucleotide
  Sense strand starting at position 505 of SEQ ID NO: 1970
aaauguuaucucgaaugac

SEQ ID NO: 153317 - RNA, 19 nt, Artificial Sequence
  Description of Artificial Sequence: Synthetic oligonucleotide
  Antisense strand to SEQ ID NO: 153316
gucauucgagauaacauuu

SEQ ID NO: 153318 - RNA, 19 nt, Artificial Sequence
  Description of Artificial Sequence: Synthetic oligonucleotide
  Sense strand starting at position 588 of SEQ ID NO: 1970
gcaccaaaugccugaauaa

SEQ ID NO: 153319 - RNA, 19 nt, Artificial Sequence
  Description of Artificial Sequence: Synthetic oligonucleotide
  Antisense strand to SEQ ID NO: 153318
uuauucaggcauuuggugc

SEQ ID NO: 153320 - RNA, 19 nt, Artificial Sequence
  Description of Artificial Sequence: Synthetic oligonucleotide
  Sense strand starting at position 615 of SEQ ID NO: 1970
uuggaauguuaauuacaga

SEQ ID NO: 153321 - RNA, 19 nt, Artificial Sequence
  Description of Artificial Sequence: Synthetic oligonucleotide
  Antisense strand to SEQ ID NO: 153320
ucuguaauuaacauuccaa

SEQ ID NO: 153322 - RNA, 19 nt, Artificial Sequence
  Description of Artificial Sequence: Synthetic oligonucleotide
  Sense strand starting at position 693 of SEQ ID NO: 1970
cucuuugagaaagguaagu

SEQ ID NO: 153323 - RNA, 19 nt, Artificial Sequence
  Description of Artificial Sequence: Synthetic oligonucleotide
  Antisense strand to SEQ ID NO: 153322
acuuaccuuucucaaagag

SEQ ID NO: 153324 - RNA, 19 nt, Artificial Sequence
  Description of Artificial Sequence: Synthetic oligonucleotide
  Sense strand starting at position 779 of SEQ ID NO: 1970
caggucuccuuauuagaga

SEQ ID NO: 153325 - RNA, 19 nt, Artificial Sequence
  Description of Artificial Sequence: Synthetic oligonucleotide
  Antisense strand to SEQ ID NO: 153324
ucucuaauaaggagaccug

SEQ ID NO: 153326 - RNA, 19 nt, Artificial Sequence
  Description of Artificial Sequence: Synthetic oligonucleotide
  Sense strand starting at position 1216 of SEQ ID NO: 1970
cuugaagacuugccucuaa

SEQ ID NO: 153327 - RNA, 19 nt, Artificial Sequence
  Description of Artificial Sequence: Synthetic oligonucleotide
  Antisense strand to SEQ ID NO: 153326
uuagaggcaagucuucaag

SEQ ID NO: 153328 - RNA, 19 nt, Artificial Sequence
  Description of Artificial Sequence: Synthetic oligonucleotide
  Sense strand starting at position 1220 of SEQ ID NO: 1970
aagacuugccucuaagagu

SEQ ID NO: 153329 - RNA, 19 nt, Artificial Sequence
  Description of Artificial Sequence: Synthetic oligonucleotide
  Antisense strand to SEQ ID NO: 153328
acucuuagaggcaagucuu

SEQ ID NO: 153330 - RNA, 19 nt, Artificial Sequence
  Description of Artificial Sequence: Synthetic oligonucleotide
  Sense strand starting at position 1259 of SEQ ID NO: 1970
ucuugcauuucuguccauu

SEQ ID NO: 153331 - RNA, 19 nt, Artificial Sequence
  Description of Artificial Sequence: Synthetic oligonucleotide
  Antisense strand to SEQ ID NO: 153330
aauggacagaaaugcaaga

SEQ ID NO: 153332 - RNA, 19 nt, Artificial Sequence
  Description of Artificial Sequence: Synthetic oligonucleotide
  Sense strand starting at position 1351 of SEQ ID NO: 1970
uagcaagagccguauaaga

SEQ ID NO: 153333 - RNA, 19 nt, Artificial Sequence
  Description of Artificial Sequence: Synthetic oligonucleotide
  Antisense strand to SEQ ID NO: 153332
ucuuauacggcucuugcua

SEQ ID NO: 153334 - RNA, 19 nt, Artificial Sequence
  Description of Artificial Sequence: Synthetic oligonucleotide
  Sense strand starting at position 1353 of SEQ ID NO: 1970
gcaagagccguauaagaga

SEQ ID NO: 153335 - RNA, 19 nt, Artificial Sequence
  Description of Artificial Sequence: Synthetic oligonucleotide
  Antisense strand to SEQ ID NO: 153334
ucucuuauacggcucuugc

SEQ ID NO: 153336 - RNA, 19 nt, Artificial Sequence
  Description of Artificial Sequence: Synthetic oligonucleotide
  Sense strand starting at position 1358 of SEQ ID NO: 1970
agccguauaagagaagcua

SEQ ID NO: 153337 - RNA, 19 nt, Artificial Sequence
  Description of Artificial Sequence: Synthetic oligonucleotide
  Antisense strand to SEQ ID NO: 153336
uagcuucucuuauacggcu

SEQ ID NO: 153338 - RNA, 19 nt, Artificial Sequence
  Description of Artificial Sequence: Synthetic oligonucleotide
  Sense strand starting at position 1529 of SEQ ID NO: 1970
ccgaauguugcgucuuucu

SEQ ID NO: 153339 - RNA, 19 nt, Artificial Sequence
  Description of Artificial Sequence: Synthetic oligonucleotide
  Antisense strand to SEQ ID NO: 153338
agaaagacgcaacauucgg

SEQ ID NO: 153340 - RNA, 19 nt, Artificial Sequence
  Description of Artificial Sequence: Synthetic oligonucleotide
  Sense strand starting at position 1539 of SEQ ID NO: 1970
cgucuuucucagcugcaau

SEQ ID NO: 153341 - RNA, 19 nt, Artificial Sequence
  Description of Artificial Sequence: Synthetic oligonucleotide
  Antisense strand to SEQ ID NO: 153340
auugcagcugagaaagacg

SEQ ID NO: 153342 - RNA, 19 nt, Artificial Sequence
  Description of Artificial Sequence: Synthetic oligonucleotide
  Sense strand starting at position 1795 of SEQ ID NO: 1970
uuggaagugacagguauua

SEQ ID NO: 153343 - RNA, 19 nt, Artificial Sequence
  Description of Artificial Sequence: Synthetic oligonucleotide
  Antisense strand to SEQ ID NO: 153342
uaauaccugucacuuccaa

SEQ ID NO: 153344 - RNA, 19 nt, Artificial Sequence
  Description of Artificial Sequence: Synthetic oligonucleotide
  Sense strand starting at position 2015 of SEQ ID NO: 1970
gaaugucgucuugauugag

SEQ ID NO: 153345 - RNA, 19 nt, Artificial Sequence
  Description of Artificial Sequence: Synthetic oligonucleotide
  Antisense strand to SEQ ID NO: 153344
cucaaucaagacgacauuc

SEQ ID NO: 153346 - RNA, 19 nt, Artificial Sequence
  Description of Artificial Sequence: Synthetic oligonucleotide
  Sense strand starting at position 2883 of SEQ ID NO: 1970
gagcacgagcuccaagaau

SEQ ID NO: 153347 - RNA, 19 nt, Artificial Sequence
  Description of Artificial Sequence: Synthetic oligonucleotide
  Antisense strand to SEQ ID NO: 153346
auucuuggagcucgugcuc

SEQ ID NO: 153348 - RNA, 19 nt, Artificial Sequence
  Description of Artificial Sequence: Synthetic oligonucleotide
  Sense strand starting at position 2891 of SEQ ID NO: 1970
gcuccaagaauggguugaa

SEQ ID NO: 153349 - RNA, 19 nt, Artificial Sequence
  Description of Artificial Sequence: Synthetic oligonucleotide
  Antisense strand to SEQ ID NO: 153348
uucaacccauucuuggagc

SEQ ID NO: 153350 - RNA, 19 nt, Artificial Sequence
  Description of Artificial Sequence: Synthetic oligonucleotide
  Sense strand starting at position 2892 of SEQ ID NO: 1970
cuccaagaauggguugaau

SEQ ID NO: 153351 - RNA, 19 nt, Artificial Sequence
  Description of Artificial Sequence: Synthetic oligonucleotide
  Antisense strand to SEQ ID NO: 153350
auucaacccauucuuggag

SEQ ID NO: 153352 - RNA, 19 nt, Artificial Sequence
  Description of Artificial Sequence: Synthetic oligonucleotide
  Sense strand starting at position 3086 of SEQ ID NO: 1970
ucgcguguucucuuggaag

SEQ ID NO: 153353 - RNA, 19 nt, Artificial Sequence
  Description of Artificial Sequence: Synthetic oligonucleotide
  Antisense strand to SEQ ID NO: 153352
cuuccaagagaacacgcga

SEQ ID NO: 153354 - RNA, 19 nt, Artificial Sequence
  Description of Artificial Sequence: Synthetic oligonucleotide
  Sense strand starting at position 3157 of SEQ ID NO: 1970
ugggcaucuggauacgaau

SEQ ID NO: 153355 - RNA, 19 nt, Artificial Sequence
  Description of Artificial Sequence: Synthetic oligonucleotide
  Antisense strand to SEQ ID NO: 153354
auucguauccagaugccca

SEQ ID NO: 153356 - RNA, 19 nt, Artificial Sequence
  Description of Artificial Sequence: Synthetic oligonucleotide
  Sense strand starting at position 3195 of SEQ ID NO: 1970
gggauaggugcgcagaaau

SEQ ID NO: 153357 - RNA, 19 nt, Artificial Sequence
  Description of Artificial Sequence: Synthetic oligonucleotide
  Antisense strand to SEQ ID NO: 153356
auuucugcgcaccuauccc

SEQ ID NO: 153358 - RNA, 19 nt, Artificial Sequence
  Description of Artificial Sequence: Synthetic oligonucleotide
  Sense strand starting at position 3240 of SEQ ID NO: 1970
gcaacaugugaacacugua

SEQ ID NO: 153359 - RNA, 19 nt, Artificial Sequence
  Description of Artificial Sequence: Synthetic oligonucleotide
  Antisense strand to SEQ ID NO: 153358
uacaguguucacauguugc

SEQ ID NO: 153360 - RNA, 19 nt, Artificial Sequence
  Description of Artificial Sequence: Synthetic oligonucleotide
  Sense strand starting at position 3285 of SEQ ID NO: 1970
agcaaaggaccuuguaauu

SEQ ID NO: 153361 - RNA, 19 nt, Artificial Sequence
  Description of Artificial Sequence: Synthetic oligonucleotide
  Antisense strand to SEQ ID NO: 153360
aauuacaagguccuuugcu

SEQ ID NO: 153362 - RNA, 19 nt, Artificial Sequence
  Description of Artificial Sequence: Synthetic oligonucleotide
  Sense strand starting at position 3402 of SEQ ID NO: 1970
uggcgcuaaacugaugaau

SEQ ID NO: 153363 - RNA, 19 nt, Artificial Sequence
  Description of Artificial Sequence: Synthetic oligonucleotide
  Antisense strand to SEQ ID NO: 153362
auucaucaguuuagcgcca

SEQ ID NO: 153364 - RNA, 19 nt, Artificial Sequence
  Description of Artificial Sequence: Synthetic oligonucleotide
  Sense strand starting at position 3428 of SEQ ID NO: 1970
ugagaauagggaugccuau

SEQ ID NO: 153365 - RNA, 19 nt, Artificial Sequence
  Description of Artificial Sequence: Synthetic oligonucleotide
  Antisense strand to SEQ ID NO: 153364
auaggcaucccuauucuca

SEQ ID NO: 153366 - RNA, 19 nt, Artificial Sequence
  Description of Artificial Sequence: Synthetic oligonucleotide
  Sense strand starting at position 3459 of SEQ ID NO: 1970
acggcaguguugaugugaa

SEQ ID NO: 153367 - RNA, 19 nt, Artificial Sequence
  Description of Artificial Sequence: Synthetic oligonucleotide
  Antisense strand to SEQ ID NO: 153366
uucacaucaacacugccgu

SEQ ID NO: 153368 - RNA, 19 nt, Artificial Sequence
  Description of Artificial Sequence: Synthetic oligonucleotide
  Sense strand starting at position 3543 of SEQ ID NO: 1970
uaggauuaugcggaaagcu

SEQ ID NO: 153369 - RNA, 19 nt, Artificial Sequence
  Description of Artificial Sequence: Synthetic oligonucleotide
  Antisense strand to SEQ ID NO: 153368
agcuuuccgcauaauccua

SEQ ID NO: 153370 - RNA, 19 nt, Artificial Sequence
  Description of Artificial Sequence: Synthetic oligonucleotide
  Sense strand starting at position 3555 of SEQ ID NO: 1970
gaaagcuaaccauaugguu

SEQ ID NO: 153371 - RNA, 19 nt, Artificial Sequence
  Description of Artificial Sequence: Synthetic oligonucleotide
  Antisense strand to SEQ ID NO: 153370
aaccauaugguuagcuuuc

SEQ ID NO: 153372 - RNA, 19 nt, Artificial Sequence
  Description of Artificial Sequence: Synthetic oligonucleotide
  Sense strand starting at position 3673 of SEQ ID NO: 1970
gauaauagguacuuucgga

SEQ ID NO: 153373 - RNA, 19 nt, Artificial Sequence
  Description of Artificial Sequence: Synthetic oligonucleotide
  Antisense strand to SEQ ID NO: 153372
uccgaaaguaccuauuauc

SEQ ID NO: 153374 - RNA, 19 nt, Artificial Sequence
  Description of Artificial Sequence: Synthetic oligonucleotide
  Sense strand starting at position 3681 of SEQ ID NO: 1970
guacuuucggauuaauagg

SEQ ID NO: 153375 - RNA, 19 nt, Artificial Sequence
  Description of Artificial Sequence: Synthetic oligonucleotide
  Antisense strand to SEQ ID NO: 153374
ccuauuaauccgaaaguac

SEQ ID NO: 153376 - RNA, 19 nt, Artificial Sequence
  Description of Artificial Sequence: Synthetic oligonucleotide
  Sense strand starting at position 3726 of SEQ ID NO: 1970
cauggagagcgagaguuaa

SEQ ID NO: 153377 - RNA, 19 nt, Artificial Sequence
  Description of Artificial Sequence: Synthetic oligonucleotide
  Antisense strand to SEQ ID NO: 153376
uuaacucucgcucuccaug

SEQ ID NO: 153378 - RNA, 19 nt, Artificial Sequence
  Description of Artificial Sequence: Synthetic oligonucleotide
  Sense strand starting at position 3747 of SEQ ID NO: 1970
gaaugacagugauaaauuu

SEQ ID NO: 153379 - RNA, 19 nt, Artificial Sequence
  Description of Artificial Sequence: Synthetic oligonucleotide
  Antisense strand to SEQ ID NO: 153378
aaauuuaucacugucauuc

SEQ ID NO: 153380 - RNA, 19 nt, Artificial Sequence
  Description of Artificial Sequence: Synthetic oligonucleotide
  Sense strand starting at position 3798 of SEQ ID NO: 1970
agcucaagaggauguaauu

SEQ ID NO: 153381 - RNA, 19 nt, Artificial Sequence
  Description of Artificial Sequence: Synthetic oligonucleotide
  Antisense strand to SEQ ID NO: 153380
aauuacauccucuugagcu

SEQ ID NO: 153382 - RNA, 19 nt, Artificial Sequence
  Description of Artificial Sequence: Synthetic oligonucleotide
  Sense strand starting at position 3953 of SEQ ID NO: 1970
cugugaguggaugauuaau

SEQ ID NO: 153383 - RNA, 19 nt, Artificial Sequence
  Description of Artificial Sequence: Synthetic oligonucleotide
  Antisense strand to SEQ ID NO: 153382
auuaaucauccacucacag

SEQ ID NO: 153384 - RNA, 19 nt, Artificial Sequence
  Description of Artificial Sequence: Synthetic oligonucleotide
  Sense strand starting at position 3772 of SEQ ID NO: 1971
cugcccagugcugaagaaa

SEQ ID NO: 153385 - RNA, 19 nt, Artificial Sequence
  Description of Artificial Sequence: Synthetic oligonucleotide
  Antisense strand to SEQ ID NO: 153384
uuucuucagcacugggcag

SEQ ID NO: 153386 - RNA, 19 nt, Artificial Sequence
  Description of Artificial Sequence: Synthetic oligonucleotide
  Sense strand starting at position 3606 of SEQ ID NO: 1971
ucuauucuauuggaagcaa

SEQ ID NO: 153387 - RNA, 19 nt, Artificial Sequence
  Description of Artificial Sequence: Synthetic oligonucleotide
  Antisense strand to SEQ ID NO: 153386
uugcuuccaauagaauaga

SEQ ID NO: 153388 - RNA, 19 nt, Artificial Sequence
  Description of Artificial Sequence: Synthetic oligonucleotide
  Sense strand starting at position 3578 of SEQ ID NO: 1971
uacgauacaugauacuaga

SEQ ID NO: 153389 - RNA, 19 nt, Artificial Sequence
  Description of Artificial Sequence: Synthetic oligonucleotide
  Antisense strand to SEQ ID NO: 153388
ucuaguaucauguaucgua

SEQ ID NO: 153390 - RNA, 19 nt, Artificial Sequence
  Description of Artificial Sequence: Synthetic oligonucleotide
  Sense strand starting at position 3575 of SEQ ID NO: 1971
guguacgauacaugauacu

SEQ ID NO: 153391 - RNA, 19 nt, Artificial Sequence
  Description of Artificial Sequence: Synthetic oligonucleotide
  Antisense strand to SEQ ID NO: 153390
aguaucauguaucguacac

SEQ ID NO: 153392 - RNA, 19 nt, Artificial Sequence
  Description of Artificial Sequence: Synthetic oligonucleotide
  Sense strand starting at position 3573 of SEQ ID NO: 1971
cuguguacgauacaugaua

SEQ ID NO: 153393 - RNA, 19 nt, Artificial Sequence
  Description of Artificial Sequence: Synthetic oligonucleotide
  Antisense strand to SEQ ID NO: 153392
uaucauguaucguacacag

SEQ ID NO: 153394 - RNA, 19 nt, Artificial Sequence
  Description of Artificial Sequence: Synthetic oligonucleotide
  Sense strand starting at position 3571 of SEQ ID NO: 1971
cccuguguacgauacauga

SEQ ID NO: 153395 - RNA, 19 nt, Artificial Sequence
  Description of Artificial Sequence: Synthetic oligonucleotide
  Antisense strand to SEQ ID NO: 153394
ucauguaucguacacaggg

SEQ ID NO: 153396 - RNA, 19 nt, Artificial Sequence
  Description of Artificial Sequence: Synthetic oligonucleotide
  Sense strand starting at position 3390 of SEQ ID NO: 1971
gugucugucagaugaauga

SEQ ID NO: 153397 - RNA, 19 nt, Artificial Sequence
  Description of Artificial Sequence: Synthetic oligonucleotide
  Antisense strand to SEQ ID NO: 153396
ucauucaucugacagacac

SEQ ID NO: 153398 - RNA, 19 nt, Artificial Sequence
  Description of Artificial Sequence: Synthetic oligonucleotide
  Sense strand starting at position 3384 of SEQ ID NO: 1971
uccucagugucugucagau

SEQ ID NO: 153399 - RNA, 19 nt, Artificial Sequence
  Description of Artificial Sequence: Synthetic oligonucleotide
  Antisense strand to SEQ ID NO: 153398
aucugacagacacugagga

SEQ ID NO: 153400 - RNA, 19 nt, Artificial Sequence
  Description of Artificial Sequence: Synthetic oligonucleotide
  Sense strand starting at position 3200 of SEQ ID NO: 1971
ggucuauggguccaaaucu

SEQ ID NO: 153401 - RNA, 19 nt, Artificial Sequence
  Description of Artificial Sequence: Synthetic oligonucleotide
  Antisense strand to SEQ ID NO: 153400
agauuuggacccauagacc

SEQ ID NO: 153402 - RNA, 19 nt, Artificial Sequence
  Description of Artificial Sequence: Synthetic oligonucleotide
  Sense strand starting at position 3197 of SEQ ID NO: 1971
ccaggucuauggguccaaa

SEQ ID NO: 153403 - RNA, 19 nt, Artificial Sequence
  Description of Artificial Sequence: Synthetic oligonucleotide
  Antisense strand to SEQ ID NO: 153402
uuuggacccauagaccugg

SEQ ID NO: 153404 - RNA, 19 nt, Artificial Sequence
  Description of Artificial Sequence: Synthetic oligonucleotide
  Sense strand starting at position 2950 of SEQ ID NO: 1971
ugcagaagccucuagacaa

SEQ ID NO: 153405 - RNA, 19 nt, Artificial Sequence
  Description of Artificial Sequence: Synthetic oligonucleotide
  Antisense strand to SEQ ID NO: 153404
uugucuagaggcuucugca

SEQ ID NO: 153406 - RNA, 19 nt, Artificial Sequence
  Description of Artificial Sequence: Synthetic oligonucleotide
  Sense strand starting at position 2910 of SEQ ID NO: 1971
agaugucucuaccugcauu

SEQ ID NO: 153407 - RNA, 19 nt, Artificial Sequence
  Description of Artificial Sequence: Synthetic oligonucleotide
  Antisense strand to SEQ ID NO: 153406
aaugcagguagagacaucu

SEQ ID NO: 153408 - RNA, 19 nt, Artificial Sequence
  Description of Artificial Sequence: Synthetic oligonucleotide
  Sense strand starting at position 2805 of SEQ ID NO: 1971
ggugguguugaggacauau

SEQ ID NO: 153409 - RNA, 19 nt, Artificial Sequence
  Description of Artificial Sequence: Synthetic oligonucleotide
  Antisense strand to SEQ ID NO: 153408
auauguccucaacaccacc

SEQ ID NO: 153410 - RNA, 19 nt, Artificial Sequence
  Description of Artificial Sequence: Synthetic oligonucleotide
  Sense strand starting at position 2472 of SEQ ID NO: 1971
ugucaucuagagcaagaca

SEQ ID NO: 153411 - RNA, 19 nt, Artificial Sequence
  Description of Artificial Sequence: Synthetic oligonucleotide
  Antisense strand to SEQ ID NO: 153410
ugucuugcucuagaugaca

SEQ ID NO: 153412 - RNA, 19 nt, Artificial Sequence
  Description of Artificial Sequence: Synthetic oligonucleotide
  Sense strand starting at position 2469 of SEQ ID NO: 1971
cucugucaucuagagcaag

SEQ ID NO: 153413 - RNA, 19 nt, Artificial Sequence
  Description of Artificial Sequence: Synthetic oligonucleotide
  Antisense strand to SEQ ID NO: 153412
cuugcucuagaugacagag

SEQ ID NO: 153414 - RNA, 19 nt, Artificial Sequence
  Description of Artificial Sequence: Synthetic oligonucleotide
  Sense strand starting at position 2465 of SEQ ID NO: 1971
guuccucugucaucuagag

SEQ ID NO: 153415 - RNA, 19 nt, Artificial Sequence
  Description of Artificial Sequence: Synthetic oligonucleotide
  Antisense strand to SEQ ID NO: 153414
cucuagaugacagaggaac

SEQ ID NO: 153416 - RNA, 19 nt, Artificial Sequence
  Description of Artificial Sequence: Synthetic oligonucleotide
  Sense strand starting at position 2334 of SEQ ID NO: 1971
cccugugcuuuccuggaga

SEQ ID NO: 153417 - RNA, 19 nt, Artificial Sequence
  Description of Artificial Sequence: Synthetic oligonucleotide
  Antisense strand to SEQ ID NO: 153416
ucuccaggaaagcacaggg

SEQ ID NO: 153418 - RNA, 19 nt, Artificial Sequence
  Description of Artificial Sequence: Synthetic oligonucleotide
  Sense strand starting at position 2216 of SEQ ID NO: 1971
ccgugcuuccguucccaaa

SEQ ID NO: 153419 - RNA, 19 nt, Artificial Sequence
  Description of Artificial Sequence: Synthetic oligonucleotide
  Antisense strand to SEQ ID NO: 153418
uuugggaacggaagcacgg

SEQ ID NO: 153420 - RNA, 19 nt, Artificial Sequence
  Description of Artificial Sequence: Synthetic oligonucleotide
  Sense strand starting at position 1469 of SEQ ID NO: 1971
cuuuaagacucugcgggaa

SEQ ID NO: 153421 - RNA, 19 nt, Artificial Sequence
  Description of Artificial Sequence: Synthetic oligonucleotide
  Antisense strand to SEQ ID NO: 153420
uucccgcagagucuuaaag

SEQ ID NO: 153422 - RNA, 19 nt, Artificial Sequence
  Description of Artificial Sequence: Synthetic oligonucleotide
  Sense strand starting at position 1468 of SEQ ID NO: 1971
ccuuuaagacucugcggga

SEQ ID NO: 153423 - RNA, 19 nt, Artificial Sequence
  Description of Artificial Sequence: Synthetic oligonucleotide
  Antisense strand to SEQ ID NO: 153422
ucccgcagagucuuaaagg

SEQ ID NO: 153424 - RNA, 19 nt, Artificial Sequence
  Description of Artificial Sequence: Synthetic oligonucleotide
  Sense strand starting at position 1273 of SEQ ID NO: 1971
aaauguugccucugaacug

SEQ ID NO: 153425 - RNA, 19 nt, Artificial Sequence
  Description of Artificial Sequence: Synthetic oligonucleotide
  Antisense strand to SEQ ID NO: 153424
caguucagaggcaacauuu

SEQ ID NO: 153426 - RNA, 19 nt, Artificial Sequence
  Description of Artificial Sequence: Synthetic oligonucleotide
  Sense strand starting at position 1269 of SEQ ID NO: 1971
gugcaaauguugccucuga

SEQ ID NO: 153427 - RNA, 19 nt, Artificial Sequence
  Description of Artificial Sequence: Synthetic oligonucleotide
  Antisense strand to SEQ ID NO: 153426
ucagaggcaacauuugcac

SEQ ID NO: 153428 - RNA, 19 nt, Artificial Sequence
  Description of Artificial Sequence: Synthetic oligonucleotide
  Sense strand starting at position 1260 of SEQ ID NO: 1971
gguccaucugugcaaaugu

SEQ ID NO: 153429 - RNA, 19 nt, Artificial Sequence
  Description of Artificial Sequence: Synthetic oligonucleotide
  Antisense strand to SEQ ID NO: 153428
acauuugcacagauggacc

SEQ ID NO: 153430 - RNA, 19 nt, Artificial Sequence
  Description of Artificial Sequence: Synthetic oligonucleotide
  Sense strand starting at position 1258 of SEQ ID NO: 1971
ccgguccaucugugcaaau

SEQ ID NO: 153431 - RNA, 19 nt, Artificial Sequence
  Description of Artificial Sequence: Synthetic oligonucleotide
  Antisense strand to SEQ ID NO: 153430
auuugcacagauggaccgg

SEQ ID NO: 153432 - RNA, 19 nt, Artificial Sequence
  Description of Artificial Sequence: Synthetic oligonucleotide
  Sense strand starting at position 948 of SEQ ID NO: 1971
cgcuccugcucagugaaga

SEQ ID NO: 153433 - RNA, 19 nt, Artificial Sequence
  Description of Artificial Sequence: Synthetic oligonucleotide
  Antisense strand to SEQ ID NO: 153432
ucuucacugagcaggagcg

SEQ ID NO: 153434 - RNA, 19 nt, Artificial Sequence
  Description of Artificial Sequence: Synthetic oligonucleotide
  Sense strand starting at position 814 of SEQ ID NO: 1971
ugcucacaagucugagaaa

SEQ ID NO: 153435 - RNA, 19 nt, Artificial Sequence
  Description of Artificial Sequence: Synthetic oligonucleotide
  Antisense strand to SEQ ID NO: 153434
uuucucagacuugugagca

SEQ ID NO: 153436 - RNA, 19 nt, Artificial Sequence
  Description of Artificial Sequence: Synthetic oligonucleotide
  Sense strand starting at position 806 of SEQ ID NO: 1971
gguauuauugcucacaagu

SEQ ID NO: 153437 - RNA, 19 nt, Artificial Sequence
  Description of Artificial Sequence: Synthetic oligonucleotide
  Antisense strand to SEQ ID NO: 153436
acuugugagcaauaauacc

SEQ ID NO: 153438 - RNA, 19 nt, Artificial Sequence
  Description of Artificial Sequence: Synthetic oligonucleotide
  Sense strand starting at position 805 of SEQ ID NO: 1971
ugguauuauugcucacaag

SEQ ID NO: 153439 - RNA, 19 nt, Artificial Sequence
  Description of Artificial Sequence: Synthetic oligonucleotide
  Antisense strand to SEQ ID NO: 153438
cuugugagcaauaauacca

SEQ ID NO: 153440 - RNA, 19 nt, Artificial Sequence
  Description of Artificial Sequence: Synthetic oligonucleotide
  Sense strand starting at position 792 of SEQ ID NO: 1971
aaagaauguuagcugguau

SEQ ID NO: 153441 - RNA, 19 nt, Artificial Sequence
  Description of Artificial Sequence: Synthetic oligonucleotide
  Antisense strand to SEQ ID NO: 153440
auaccagcuaacauucuuu

SEQ ID NO: 153442 - RNA, 19 nt, Artificial Sequence
  Description of Artificial Sequence: Synthetic oligonucleotide
  Sense strand starting at position 791 of SEQ ID NO: 1971
caaagaauguuagcuggua

SEQ ID NO: 153443 - RNA, 19 nt, Artificial Sequence
  Description of Artificial Sequence: Synthetic oligonucleotide
  Antisense strand to SEQ ID NO: 153442
uaccagcuaacauucuuug

SEQ ID NO: 153444 - RNA, 19 nt, Artificial Sequence
  Description of Artificial Sequence: Synthetic oligonucleotide
  Sense strand starting at position 771 of SEQ ID NO: 1971
gcgugagcuaccucgcaga

SEQ ID NO: 153445 - RNA, 19 nt, Artificial Sequence
  Description of Artificial Sequence: Synthetic oligonucleotide
  Antisense strand to SEQ ID NO: 153444
ucugcgagguagcucacgc

SEQ ID NO: 153446 - RNA, 19 nt, Artificial Sequence
  Description of Artificial Sequence: Synthetic oligonucleotide
  Sense strand starting at position 587 of SEQ ID NO: 1971
ccucauggccucuagugau

SEQ ID NO: 153447 - RNA, 19 nt, Artificial Sequence
  Description of Artificial Sequence: Synthetic oligonucleotide
  Antisense strand to SEQ ID NO: 153446
aucacuagaggccaugagg

SEQ ID NO: 153448 - RNA, 19 nt, Artificial Sequence
  Description of Artificial Sequence: Synthetic oligonucleotide
  Sense strand starting at position 376 of SEQ ID NO: 1971
ggaucaugacaguguccau

SEQ ID NO: 153449 - RNA, 19 nt, Artificial Sequence
  Description of Artificial Sequence: Synthetic oligonucleotide
  Antisense strand to SEQ ID NO: 153448
auggacacugucaugaucc

SEQ ID NO: 153450 - RNA, 19 nt, Artificial Sequence
  Description of Artificial Sequence: Synthetic oligonucleotide
  Sense strand starting at position 311 of SEQ ID NO: 1971
accuuucuagcuugggaaa

SEQ ID NO: 153451 - RNA, 19 nt, Artificial Sequence
  Description of Artificial Sequence: Synthetic oligonucleotide
  Antisense strand to SEQ ID NO: 153450
uuucccaagcuagaaaggu

SEQ ID NO: 153452 - RNA, 19 nt, Artificial Sequence
  Description of Artificial Sequence: Synthetic oligonucleotide
  Sense strand starting at position 309 of SEQ ID NO: 1971
gcaccuuucuagcuuggga

SEQ ID NO: 153453 - RNA, 19 nt, Artificial Sequence
  Description of Artificial Sequence: Synthetic oligonucleotide
  Antisense strand to SEQ ID NO: 153452
ucccaagcuagaaaggugc

SEQ ID NO: 153454 - RNA, 19 nt, Artificial Sequence
  Description of Artificial Sequence: Synthetic oligonucleotide
  Sense strand starting at position 215 of SEQ ID NO: 1971
cauauucgucacugugcau

SEQ ID NO: 153455 - RNA, 19 nt, Artificial Sequence
  Description of Artificial Sequence: Synthetic oligonucleotide
  Antisense strand to SEQ ID NO: 153454
augcacagugacgaauaug

SEQ ID NO: 153456 - RNA, 19 nt, Artificial Sequence
  Description of Artificial Sequence: Synthetic oligonucleotide
  Sense strand starting at position 214 of SEQ ID NO: 1971
gcauauucgucacugugca

SEQ ID NO: 153457 - RNA, 19 nt, Artificial Sequence
  Description of Artificial Sequence: Synthetic oligonucleotide
  Antisense strand to SEQ ID NO: 153456
ugcacagugacgaauaugc

SEQ ID NO: 153458 - RNA, 19 nt, Artificial Sequence
  Description of Artificial Sequence: Synthetic oligonucleotide
  Sense strand starting at position 211 of SEQ ID NO: 1971
acugcauauucgucacugu

SEQ ID NO: 153459 - RNA, 19 nt, Artificial Sequence
  Description of Artificial Sequence: Synthetic oligonucleotide
  Antisense strand to SEQ ID NO: 153458
acagugacgaauaugcagu

SEQ ID NO: 153460 - RNA, 19 nt, Artificial Sequence
  Description of Artificial Sequence: Synthetic oligonucleotide
  Sense strand starting at position 203 of SEQ ID NO: 1971
ggaaaucuacugcauauuc

SEQ ID NO: 153461 - RNA, 19 nt, Artificial Sequence
  Description of Artificial Sequence: Synthetic oligonucleotide
  Antisense strand to SEQ ID NO: 153460
gaauaugcaguagauuucc

SEQ ID NO: 153462 - RNA, 19 nt, Artificial Sequence
  Description of Artificial Sequence: Synthetic oligonucleotide
  Sense strand starting at position 184 of SEQ ID NO: 1971
guuauagcugcugucuauu

SEQ ID NO: 153463 - RNA, 19 nt, Artificial Sequence
  Description of Artificial Sequence: Synthetic oligonucleotide
  Antisense strand to SEQ ID NO: 153462
aauagacagcagcuauaac

SEQ ID NO: 153464 - RNA, 19 nt, Artificial Sequence
  Description of Artificial Sequence: Synthetic oligonucleotide
  Sense strand starting at position 1 of SEQ ID NO: 1972
acacauuauucgucagauu

SEQ ID NO: 153465 - RNA, 19 nt, Artificial Sequence
  Description of Artificial Sequence: Synthetic oligonucleotide
  Antisense strand to SEQ ID NO: 153464
aaucugacgaauaaugugu

SEQ ID NO: 153466 - RNA, 19 nt, Artificial Sequence
  Description of Artificial Sequence: Synthetic oligonucleotide
  Sense strand starting at position 69 of SEQ ID NO: 1972
acaagucagcguuacuuaa

SEQ ID NO: 153467 - RNA, 19 nt, Artificial Sequence
  Description of Artificial Sequence: Synthetic oligonucleotide
  Antisense strand to SEQ ID NO: 153466
uuaaguaacgcugacuugu

SEQ ID NO: 153468 - RNA, 19 nt, Artificial Sequence
  Description of Artificial Sequence: Synthetic oligonucleotide
  Sense strand starting at position 117 of SEQ ID NO: 1972
gcuagauugccauaaagcu

SEQ ID NO: 153469 - RNA, 19 nt, Artificial Sequence
  Description of Artificial Sequence: Synthetic oligonucleotide
  Antisense strand to SEQ ID NO: 153468
agcuuuauggcaaucuagc

SEQ ID NO: 153470 - RNA, 19 nt, Artificial Sequence
  Description of Artificial Sequence: Synthetic oligonucleotide
  Sense strand starting at position 131 of SEQ ID NO: 1972
aagcuuaacuggcugaaga

SEQ ID NO: 153471 - RNA, 19 nt, Artificial Sequence
  Description of Artificial Sequence: Synthetic oligonucleotide
  Antisense strand to SEQ ID NO: 153470
ucuucagccaguuaagcuu

SEQ ID NO: 153472 - RNA, 19 nt, Artificial Sequence
  Description of Artificial Sequence: Synthetic oligonucleotide
  Sense strand starting at position 133 of SEQ ID NO: 1972
gcuuaacuggcugaagaga

SEQ ID NO: 153473 - RNA, 19 nt, Artificial Sequence
  Description of Artificial Sequence: Synthetic oligonucleotide
  Antisense strand to SEQ ID NO: 153472
ucucuucagccaguuaagc

SEQ ID NO: 153474 - RNA, 19 nt, Artificial Sequence
  Description of Artificial Sequence: Synthetic oligonucleotide
  Sense strand starting at position 144 of SEQ ID NO: 1972
ugaagagauacuuggccua

SEQ ID NO: 153475 - RNA, 19 nt, Artificial Sequence
  Description of Artificial Sequence: Synthetic oligonucleotide
  Antisense strand to SEQ ID NO: 153474
uaggccaaguaucucuuca

SEQ ID NO: 153476 - RNA, 19 nt, Artificial Sequence
  Description of Artificial Sequence: Synthetic oligonucleotide
  Sense strand starting at position 146 of SEQ ID NO: 1972
aagagauacuuggccuaag

SEQ ID NO: 153477 - RNA, 19 nt, Artificial Sequence
  Description of Artificial Sequence: Synthetic oligonucleotide
  Antisense strand to SEQ ID NO: 153476
cuuaggccaaguaucucuu

SEQ ID NO: 153478 - RNA, 19 nt, Artificial Sequence
  Description of Artificial Sequence: Synthetic oligonucleotide
  Sense strand starting at position 147 of SEQ ID NO: 1972
agagauacuuggccuaagu

SEQ ID NO: 153479 - RNA, 19 nt, Artificial Sequence
  Description of Artificial Sequence: Synthetic oligonucleotide
  Antisense strand to SEQ ID NO: 153478
acuuaggccaaguaucucu

SEQ ID NO: 153480 - RNA, 19 nt, Artificial Sequence
  Description of Artificial Sequence: Synthetic oligonucleotide
  Sense strand starting at position 149 of SEQ ID NO: 1972
agauacuuggccuaaguga

SEQ ID NO: 153481 - RNA, 19 nt, Artificial Sequence
  Description of Artificial Sequence: Synthetic oligonucleotide
  Antisense strand to SEQ ID NO: 153480
ucacuuaggccaaguaucu

SEQ ID NO: 153482 - RNA, 19 nt, Artificial Sequence
  Description of Artificial Sequence: Synthetic oligonucleotide
  Sense strand starting at position 625 of SEQ ID NO: 1972
acuauuaaccgccagugaa

SEQ ID NO: 153483 - RNA, 19 nt, Artificial Sequence
  Description of Artificial Sequence: Synthetic oligonucleotide
  Antisense strand to SEQ ID NO: 153482
uucacuggcgguuaauagu

SEQ ID NO: 153484 - RNA, 19 nt, Artificial Sequence
  Description of Artificial Sequence: Synthetic oligonucleotide
  Sense strand starting at position 1415 of SEQ ID NO: 1972
cgugaagaaacgugaggau

SEQ ID NO: 153485 - RNA, 19 nt, Artificial Sequence
  Description of Artificial Sequence: Synthetic oligonucleotide
  Antisense strand to SEQ ID NO: 153484
auccucacguuucuucacg

SEQ ID NO: 153486 - RNA, 19 nt, Artificial Sequence
  Description of Artificial Sequence: Synthetic oligonucleotide
  Sense strand starting at position 2031 of SEQ ID NO: 1972
guauguaggccagagucau

SEQ ID NO: 153487 - RNA, 19 nt, Artificial Sequence
  Description of Artificial Sequence: Synthetic oligonucleotide
  Antisense strand to SEQ ID NO: 153486
augacucuggccuacauac

SEQ ID NO: 153488 - RNA, 19 nt, Artificial Sequence
  Description of Artificial Sequence: Synthetic oligonucleotide
  Sense strand starting at position 2266 of SEQ ID NO: 1972
ggcguaacugacucgcgaa

SEQ ID NO: 153489 - RNA, 19 nt, Artificial Sequence
  Description of Artificial Sequence: Synthetic oligonucleotide
  Antisense strand to SEQ ID NO: 153488
uucgcgagucaguuacgcc

SEQ ID NO: 153490 - RNA, 19 nt, Artificial Sequence
  Description of Artificial Sequence: Synthetic oligonucleotide
  Sense strand starting at position 2279 of SEQ ID NO: 1972
cgcgaaagugcucuuuggu

SEQ ID NO: 153491 - RNA, 19 nt, Artificial Sequence
  Description of Artificial Sequence: Synthetic oligonucleotide
  Antisense strand to SEQ ID NO: 153490
accaaagagcacuuucgcg

SEQ ID NO: 153492 - RNA, 19 nt, Artificial Sequence
  Description of Artificial Sequence: Synthetic oligonucleotide
  Sense strand starting at position 2280 of SEQ ID NO: 1972
gcgaaagugcucuuugguu

SEQ ID NO: 153493 - RNA, 19 nt, Artificial Sequence
  Description of Artificial Sequence: Synthetic oligonucleotide
  Antisense strand to SEQ ID NO: 153492
aaccaaagagcacuuucgc

SEQ ID NO: 153494 - RNA, 19 nt, Artificial Sequence
  Description of Artificial Sequence: Synthetic oligonucleotide
  Sense strand starting at position 2375 of SEQ ID NO: 1972
aucugagacgcacaaacuu

SEQ ID NO: 153495 - RNA, 19 nt, Artificial Sequence
  Description of Artificial Sequence: Synthetic oligonucleotide
  Antisense strand to SEQ ID NO: 153494
aaguuugugcgucucagau

SEQ ID NO: 153496 - RNA, 19 nt, Artificial Sequence
  Description of Artificial Sequence: Synthetic oligonucleotide
  Sense strand starting at position 2657 of SEQ ID NO: 1972
gggugucguaggagugguu

SEQ ID NO: 153497 - RNA, 19 nt, Artificial Sequence
  Description of Artificial Sequence: Synthetic oligonucleotide
  Antisense strand to SEQ ID NO: 153496
aaccacuccuacgacaccc

SEQ ID NO: 153498 - RNA, 19 nt, Artificial Sequence
  Description of Artificial Sequence: Synthetic oligonucleotide
  Sense strand starting at position 2812 of SEQ ID NO: 1972
acaugcgcucaauacauau

SEQ ID NO: 153499 - RNA, 19 nt, Artificial Sequence
  Description of Artificial Sequence: Synthetic oligonucleotide
  Antisense strand to SEQ ID NO: 153498
auauguauugagcgcaugu

SEQ ID NO: 153500 - RNA, 19 nt, Artificial Sequence
  Description of Artificial Sequence: Synthetic oligonucleotide
  Sense strand starting at position 2838 of SEQ ID NO: 1972
gaacauuucgagugcaugu

SEQ ID NO: 153501 - RNA, 19 nt, Artificial Sequence
  Description of Artificial Sequence: Synthetic oligonucleotide
  Antisense strand to SEQ ID NO: 153500
acaugcacucgaaauguuc

SEQ ID NO: 153502 - RNA, 19 nt, Artificial Sequence
  Description of Artificial Sequence: Synthetic oligonucleotide
  Sense strand starting at position 2908 of SEQ ID NO: 1972
augacaaagcauugauacu

SEQ ID NO: 153503 - RNA, 19 nt, Artificial Sequence
  Description of Artificial Sequence: Synthetic oligonucleotide
  Antisense strand to SEQ ID NO: 153502
aguaucaaugcuuugucau

SEQ ID NO: 153504 - RNA, 19 nt, Artificial Sequence
  Description of Artificial Sequence: Synthetic oligonucleotide
  Sense strand starting at position 2917 of SEQ ID NO: 1972
cauugauacuaguugagaa

SEQ ID NO: 153505 - RNA, 19 nt, Artificial Sequence
  Description of Artificial Sequence: Synthetic oligonucleotide
  Antisense strand to SEQ ID NO: 153504
uucucaacuaguaucaaug

SEQ ID NO: 153506 - RNA, 19 nt, Artificial Sequence
  Description of Artificial Sequence: Synthetic oligonucleotide
  Sense strand starting at position 2963 of SEQ ID NO: 1972
uugaaugcguauuuaagca

SEQ ID NO: 153507 - RNA, 19 nt, Artificial Sequence
  Description of Artificial Sequence: Synthetic oligonucleotide
  Antisense strand to SEQ ID NO: 153506
ugcuuaaauacgcauucaa

SEQ ID NO: 153508 - RNA, 19 nt, Artificial Sequence
  Description of Artificial Sequence: Synthetic oligonucleotide
  Sense strand starting at position 2967 of SEQ ID NO: 1972
augcguauuuaagcacauu

SEQ ID NO: 153509 - RNA, 19 nt, Artificial Sequence
  Description of Artificial Sequence: Synthetic oligonucleotide
  Antisense strand to SEQ ID NO: 153508
aaugugcuuaaauacgcau

SEQ ID NO: 153510 - RNA, 19 nt, Artificial Sequence
  Description of Artificial Sequence: Synthetic oligonucleotide
  Sense strand starting at position 2995 of SEQ ID NO: 1972
cggguuuaaguauaucaua

SEQ ID NO: 153511 - RNA, 19 nt, Artificial Sequence
  Description of Artificial Sequence: Synthetic oligonucleotide
  Antisense strand to SEQ ID NO: 153510
uaugauauacuuaaacccg

SEQ ID NO: 153512 - RNA, 19 nt, Artificial Sequence
  Description of Artificial Sequence: Synthetic oligonucleotide
  Sense strand starting at position 3046 of SEQ ID NO: 1972
gcaaaugcaucgcuuauuu

SEQ ID NO: 153513 - RNA, 19 nt, Artificial Sequence
  Description of Artificial Sequence: Synthetic oligonucleotide
  Antisense strand to SEQ ID NO: 153512
aaauaagcgaugcauuugc

SEQ ID NO: 153514 - RNA, 19 nt, Artificial Sequence
  Description of Artificial Sequence: Synthetic oligonucleotide
  Sense strand starting at position 3057 of SEQ ID NO: 1972
gcuuauuugguaggagcua

SEQ ID NO: 153515 - RNA, 19 nt, Artificial Sequence
  Description of Artificial Sequence: Synthetic oligonucleotide
  Antisense strand to SEQ ID NO: 153514
uagcuccuaccaaauaagc

SEQ ID NO: 153516 - RNA, 19 nt, Artificial Sequence
  Description of Artificial Sequence: Synthetic oligonucleotide
  Sense strand starting at position 3062 of SEQ ID NO: 1972
uuugguaggagcuaugaau

SEQ ID NO: 153517 - RNA, 19 nt, Artificial Sequence
  Description of Artificial Sequence: Synthetic oligonucleotide
  Antisense strand to SEQ ID NO: 153516
auucauagcuccuaccaaa

SEQ ID NO: 153518 - RNA, 19 nt, Artificial Sequence
  Description of Artificial Sequence: Synthetic oligonucleotide
  Sense strand starting at position 3194 of SEQ ID NO: 1972
caggcauuagcccaguauu

SEQ ID NO: 153519 - RNA, 19 nt, Artificial Sequence
  Description of Artificial Sequence: Synthetic oligonucleotide
  Antisense strand to SEQ ID NO: 153518
aauacugggcuaaugccug

SEQ ID NO: 153520 - RNA, 19 nt, Artificial Sequence
  Description of Artificial Sequence: Synthetic oligonucleotide
  Sense strand starting at position 3197 of SEQ ID NO: 1972
gcauuagcccaguauucua

SEQ ID NO: 153521 - RNA, 19 nt, Artificial Sequence
  Description of Artificial Sequence: Synthetic oligonucleotide
  Antisense strand to SEQ ID NO: 153520
uagaauacugggcuaaugc

SEQ ID NO: 153522 - RNA, 19 nt, Artificial Sequence
  Description of Artificial Sequence: Synthetic oligonucleotide
  Sense strand starting at position 3320 of SEQ ID NO: 1972
ggauauguaacauggcgga

SEQ ID NO: 153523 - RNA, 19 nt, Artificial Sequence
  Description of Artificial Sequence: Synthetic oligonucleotide
  Antisense strand to SEQ ID NO: 153522
uccgccauguuacauaucc

SEQ ID NO: 153524 - RNA, 19 nt, Artificial Sequence
  Description of Artificial Sequence: Synthetic oligonucleotide
  Sense strand starting at position 3325 of SEQ ID NO: 1972
uguaacauggcggaaugua

SEQ ID NO: 153525 - RNA, 19 nt, Artificial Sequence
  Description of Artificial Sequence: Synthetic oligonucleotide
  Antisense strand to SEQ ID NO: 153524
uacauuccgccauguuaca

SEQ ID NO: 153526 - RNA, 19 nt, Artificial Sequence
  Description of Artificial Sequence: Synthetic oligonucleotide
  Sense strand starting at position 3333 of SEQ ID NO: 1972
ggcggaauguaaucaucaa

SEQ ID NO: 153527 - RNA, 19 nt, Artificial Sequence
  Description of Artificial Sequence: Synthetic oligonucleotide
  Antisense strand to SEQ ID NO: 153526
uugaugauuacauuccgcc

SEQ ID NO: 153528 - RNA, 19 nt, Artificial Sequence
  Description of Artificial Sequence: Synthetic oligonucleotide
  Sense strand starting at position 3334 of SEQ ID NO: 1972
gcggaauguaaucaucaau

SEQ ID NO: 153529 - RNA, 19 nt, Artificial Sequence
  Description of Artificial Sequence: Synthetic oligonucleotide
  Antisense strand to SEQ ID NO: 153528
auugaugauuacauuccgc

SEQ ID NO: 153530 - RNA, 19 nt, Artificial Sequence
  Description of Artificial Sequence: Synthetic oligonucleotide
  Sense strand starting at position 3627 of SEQ ID NO: 1972
ucaagugcaauguagaaga

SEQ ID NO: 153531 - RNA, 19 nt, Artificial Sequence
  Description of Artificial Sequence: Synthetic oligonucleotide
  Antisense strand to SEQ ID NO: 153530
ucuucuacauugcacuuga

SEQ ID NO: 153532 - RNA, 19 nt, Artificial Sequence
  Description of Artificial Sequence: Synthetic oligonucleotide
  Sense strand starting at position 3637 of SEQ ID NO: 1972
uguagaagaucuccacauu

SEQ ID NO: 153533 - RNA, 19 nt, Artificial Sequence
  Description of Artificial Sequence: Synthetic oligonucleotide
  Antisense strand to SEQ ID NO: 153532
aauguggagaucuucuaca

SEQ ID NO: 153534 - RNA, 19 nt, Artificial Sequence
  Description of Artificial Sequence: Synthetic oligonucleotide
  Sense strand starting at position 3679 of SEQ ID NO: 1972
ggcuguugcgucucugaga

SEQ ID NO: 153535 - RNA, 19 nt, Artificial Sequence
  Description of Artificial Sequence: Synthetic oligonucleotide
  Antisense strand to SEQ ID NO: 153534
ucucagagacgcaacagcc

SEQ ID NO: 153536 - RNA, 19 nt, Artificial Sequence
  Description of Artificial Sequence: Synthetic oligonucleotide
  Sense strand starting at position 3710 of SEQ ID NO: 1972
uugagacaucugugaaagc

SEQ ID NO: 153537 - RNA, 19 nt, Artificial Sequence
  Description of Artificial Sequence: Synthetic oligonucleotide
  Antisense strand to SEQ ID NO: 153536
gcuuucacagaugucucaa

SEQ ID NO: 153538 - RNA, 19 nt, Artificial Sequence
  Description of Artificial Sequence: Synthetic oligonucleotide
  Sense strand starting at position 3820 of SEQ ID NO: 1972
cgugaucuccuuuaaaccu

SEQ ID NO: 153539 - RNA, 19 nt, Artificial Sequence
  Description of Artificial Sequence: Synthetic oligonucleotide
  Antisense strand to SEQ ID NO: 153538
agguuuaaaggagaucacg

SEQ ID NO: 153540 - RNA, 19 nt, Artificial Sequence
  Description of Artificial Sequence: Synthetic oligonucleotide
  Sense strand starting at position 3930 of SEQ ID NO: 1972
caaagagcuuaaguaaguu

SEQ ID NO: 153541 - RNA, 19 nt, Artificial Sequence
  Description of Artificial Sequence: Synthetic oligonucleotide
  Antisense strand to SEQ ID NO: 153540
aacuuacuuaagcucuuug

SEQ ID NO: 153542 - RNA, 19 nt, Artificial Sequence
  Description of Artificial Sequence: Synthetic oligonucleotide
  Sense strand starting at position 3934 of SEQ ID NO: 1972
gagcuuaaguaaguuaacu

SEQ ID NO: 153543 - RNA, 19 nt, Artificial Sequence
  Description of Artificial Sequence: Synthetic oligonucleotide
  Antisense strand to SEQ ID NO: 153542
aguuaacuuacuuaagcuc

SEQ ID NO: 153544 - RNA, 19 nt, Artificial Sequence
  Description of Artificial Sequence: Synthetic oligonucleotide
  Sense strand starting at position 3669 of SEQ ID NO: 1975
ggguaagucauauauggug

SEQ ID NO: 153545 - RNA, 19 nt, Artificial Sequence
  Description of Artificial Sequence: Synthetic oligonucleotide
  Antisense strand to SEQ ID NO: 153544
caccauauaugacuuaccc

SEQ ID NO: 153546 - RNA, 19 nt, Artificial Sequence
  Description of Artificial Sequence: Synthetic oligonucleotide
  Sense strand starting at position 3663 of SEQ ID NO: 1975
ggacauggguaagucauau

SEQ ID NO: 153547 - RNA, 19 nt, Artificial Sequence
  Description of Artificial Sequence: Synthetic oligonucleotide
  Antisense strand to SEQ ID NO: 153546
auaugacuuacccaugucc

SEQ ID NO: 153548 - RNA, 19 nt, Artificial Sequence
  Description of Artificial Sequence: Synthetic oligonucleotide
  Sense strand starting at position 3638 of SEQ ID NO: 1975
auggaaugugcauguauaa

SEQ ID NO: 153549 - RNA, 19 nt, Artificial Sequence
  Description of Artificial Sequence: Synthetic oligonucleotide
  Antisense strand to SEQ ID NO: 153548
uuauacaugcacauuccau

SEQ ID NO: 153550 - RNA, 19 nt, Artificial Sequence
  Description of Artificial Sequence: Synthetic oligonucleotide
  Sense strand starting at position 3627 of SEQ ID NO: 1975
ugaauaugugcauggaaug

SEQ ID NO: 153551 - RNA, 19 nt, Artificial Sequence
  Description of Artificial Sequence: Synthetic oligonucleotide
  Antisense strand to SEQ ID NO: 153550
cauuccaugcacauauuca

SEQ ID NO: 153552 - RNA, 19 nt, Artificial Sequence
  Description of Artificial Sequence: Synthetic oligonucleotide
  Sense strand starting at position 3625 of SEQ ID NO: 1975
ugugaauaugugcauggaa

SEQ ID NO: 153553 - RNA, 19 nt, Artificial Sequence
  Description of Artificial Sequence: Synthetic oligonucleotide
  Antisense strand to SEQ ID NO: 153552
uuccaugcacauauucaca

SEQ ID NO: 153554 - RNA, 19 nt, Artificial Sequence
  Description of Artificial Sequence: Synthetic oligonucleotide
  Sense strand starting at position 3624 of SEQ ID NO: 1975
augugaauaugugcaugga

SEQ ID NO: 153555 - RNA, 19 nt, Artificial Sequence
  Description of Artificial Sequence: Synthetic oligonucleotide
  Antisense strand to SEQ ID NO: 153554
uccaugcacauauucacau

SEQ ID NO: 153556 - RNA, 19 nt, Artificial Sequence
  Description of Artificial Sequence: Synthetic oligonucleotide
  Sense strand starting at position 3593 of SEQ ID NO: 1975
gguauaugugcacagauga

SEQ ID NO: 153557 - RNA, 19 nt, Artificial Sequence
  Description of Artificial Sequence: Synthetic oligonucleotide
  Antisense strand to SEQ ID NO: 153556
ucaucugugcacauauacc

SEQ ID NO: 153558 - RNA, 19 nt, Artificial Sequence
  Description of Artificial Sequence: Synthetic oligonucleotide
  Sense strand starting at position 3591 of SEQ ID NO: 1975
uagguauaugugcacagau

SEQ ID NO: 153559 - RNA, 19 nt, Artificial Sequence
  Description of Artificial Sequence: Synthetic oligonucleotide
  Antisense strand to SEQ ID NO: 153558
aucugugcacauauaccua

SEQ ID NO: 153560 - RNA, 19 nt, Artificial Sequence
  Description of Artificial Sequence: Synthetic oligonucleotide
  Sense strand starting at position 3533 of SEQ ID NO: 1975
gggucuucugugaguguau

SEQ ID NO: 153561 - RNA, 19 nt, Artificial Sequence
  Description of Artificial Sequence: Synthetic oligonucleotide
  Antisense strand to SEQ ID NO: 153560
auacacucacagaagaccc

SEQ ID NO: 153562 - RNA, 19 nt, Artificial Sequence
  Description of Artificial Sequence: Synthetic oligonucleotide
  Sense strand starting at position 3521 of SEQ ID NO: 1975
uacagauguccagggucuu

SEQ ID NO: 153563 - RNA, 19 nt, Artificial Sequence
  Description of Artificial Sequence: Synthetic oligonucleotide
  Antisense strand to SEQ ID NO: 153562
aagacccuggacaucugua

SEQ ID NO: 153564 - RNA, 19 nt, Artificial Sequence
  Description of Artificial Sequence: Synthetic oligonucleotide
  Sense strand starting at position 3509 of SEQ ID NO: 1975
agaugcuuuccuuacagau

SEQ ID NO: 153565 - RNA, 19 nt, Artificial Sequence
  Description of Artificial Sequence: Synthetic oligonucleotide
  Antisense strand to SEQ ID NO: 153564
aucuguaaggaaagcaucu

SEQ ID NO: 153566 - RNA, 19 nt, Artificial Sequence
  Description of Artificial Sequence: Synthetic oligonucleotide
  Sense strand starting at position 3476 of SEQ ID NO: 1975
cagucacaggucugaggau

SEQ ID NO: 153567 - RNA, 19 nt, Artificial Sequence
  Description of Artificial Sequence: Synthetic oligonucleotide
  Antisense strand to SEQ ID NO: 153566
auccucagaccugugacug

SEQ ID NO: 153568 - RNA, 19 nt, Artificial Sequence
  Description of Artificial Sequence: Synthetic oligonucleotide
  Sense strand starting at position 3427 of SEQ ID NO: 1975
gccagaaauguauggagga

SEQ ID NO: 153569 - RNA, 19 nt, Artificial Sequence
  Description of Artificial Sequence: Synthetic oligonucleotide
  Antisense strand to SEQ ID NO: 153568
uccuccauacauuucuggc

SEQ ID NO: 153570 - RNA, 19 nt, Artificial Sequence
  Description of Artificial Sequence: Synthetic oligonucleotide
  Sense strand starting at position 3419 of SEQ ID NO: 1975
uggcacuugccagaaaugu

SEQ ID NO: 153571 - RNA, 19 nt, Artificial Sequence
  Description of Artificial Sequence: Synthetic oligonucleotide
  Antisense strand to SEQ ID NO: 153570
acauuucuggcaagugcca

SEQ ID NO: 153572 - RNA, 19 nt, Artificial Sequence
  Description of Artificial Sequence: Synthetic oligonucleotide
  Sense strand starting at position 3270 of SEQ ID NO: 1975
aguggauggucugugggau

SEQ ID NO: 153573 - RNA, 19 nt, Artificial Sequence
  Description of Artificial Sequence: Synthetic oligonucleotide
  Antisense strand to SEQ ID NO: 153572
aucccacagaccauccacu

SEQ ID NO: 153574 - RNA, 19 nt, Artificial Sequence
  Description of Artificial Sequence: Synthetic oligonucleotide
  Sense strand starting at position 2930 of SEQ ID NO: 1975
cucacaugucagcagauga

SEQ ID NO: 153575 - RNA, 19 nt, Artificial Sequence
  Description of Artificial Sequence: Synthetic oligonucleotide
  Antisense strand to SEQ ID NO: 153574
ucaucugcugacaugugag

SEQ ID NO: 153576 - RNA, 19 nt, Artificial Sequence
  Description of Artificial Sequence: Synthetic oligonucleotide
  Sense strand starting at position 2827 of SEQ ID NO: 1975
uucucaggagaaugcaauu

SEQ ID NO: 153577 - RNA, 19 nt, Artificial Sequence
  Description of Artificial Sequence: Synthetic oligonucleotide
  Antisense strand to SEQ ID NO: 153576
aauugcauucuccugagaa

SEQ ID NO: 153578 - RNA, 19 nt, Artificial Sequence
  Description of Artificial Sequence: Synthetic oligonucleotide
  Sense strand starting at position 2781 of SEQ ID NO: 1975
gaacaugcacagugaucau

SEQ ID NO: 153579 - RNA, 19 nt, Artificial Sequence
  Description of Artificial Sequence: Synthetic oligonucleotide
  Antisense strand to SEQ ID NO: 153578
augaucacugugcauguuc

SEQ ID NO: 153580 - RNA, 19 nt, Artificial Sequence
  Description of Artificial Sequence: Synthetic oligonucleotide
  Sense strand starting at position 2744 of SEQ ID NO: 1975
ccaagaaguuagguaacuu

SEQ ID NO: 153581 - RNA, 19 nt, Artificial Sequence
  Description of Artificial Sequence: Synthetic oligonucleotide
  Antisense strand to SEQ ID NO: 153580
aaguuaccuaacuucuugg

SEQ ID NO: 153582 - RNA, 19 nt, Artificial Sequence
  Description of Artificial Sequence: Synthetic oligonucleotide
  Sense strand starting at position 2741 of SEQ ID NO: 1975
gcuccaagaaguuagguaa

SEQ ID NO: 153583 - RNA, 19 nt, Artificial Sequence
  Description of Artificial Sequence: Synthetic oligonucleotide
  Antisense strand to SEQ ID NO: 153582
uuaccuaacuucuuggagc

SEQ ID NO: 153584 - RNA, 19 nt, Artificial Sequence
  Description of Artificial Sequence: Synthetic oligonucleotide
  Sense strand starting at position 2731 of SEQ ID NO: 1975
ggaaauugaugcuccaaga

SEQ ID NO: 153585 - RNA, 19 nt, Artificial Sequence
  Description of Artificial Sequence: Synthetic oligonucleotide
  Antisense strand to SEQ ID NO: 153584
ucuuggagcaucaauuucc

SEQ ID NO: 153586 - RNA, 19 nt, Artificial Sequence
  Description of Artificial Sequence: Synthetic oligonucleotide
  Sense strand starting at position 2687 of SEQ ID NO: 1975
agaugaauuuaagguagga

SEQ ID NO: 153587 - RNA, 19 nt, Artificial Sequence
  Description of Artificial Sequence: Synthetic oligonucleotide
  Antisense strand to SEQ ID NO: 153586
uccuaccuuaaauucaucu

SEQ ID NO: 153588 - RNA, 19 nt, Artificial Sequence
  Description of Artificial Sequence: Synthetic oligonucleotide
  Sense strand starting at position 2659 of SEQ ID NO: 1975
aggcacucugcugagauua

SEQ ID NO: 153589 - RNA, 19 nt, Artificial Sequence
  Description of Artificial Sequence: Synthetic oligonucleotide
  Antisense strand to SEQ ID NO: 153588
uaaucucagcagagugccu

SEQ ID NO: 153590 - RNA, 19 nt, Artificial Sequence
  Description of Artificial Sequence: Synthetic oligonucleotide
  Sense strand starting at position 1637 of SEQ ID NO: 1975
uuuccagagcaagguaaua

SEQ ID NO: 153591 - RNA, 19 nt, Artificial Sequence
  Description of Artificial Sequence: Synthetic oligonucleotide
  Antisense strand to SEQ ID NO: 153590
uauuaccuugcucuggaaa

SEQ ID NO: 153592 - RNA, 19 nt, Artificial Sequence
  Description of Artificial Sequence: Synthetic oligonucleotide
  Sense strand starting at position 1589 of SEQ ID NO: 1975
gaugacuguauguguaaag

SEQ ID NO: 153593 - RNA, 19 nt, Artificial Sequence
  Description of Artificial Sequence: Synthetic oligonucleotide
  Antisense strand to SEQ ID NO: 153592
cuuuacacauacagucauc

SEQ ID NO: 153594 - RNA, 19 nt, Artificial Sequence
  Description of Artificial Sequence: Synthetic oligonucleotide
  Sense strand starting at position 1588 of SEQ ID NO: 1975
agaugacuguauguguaaa

SEQ ID NO: 153595 - RNA, 19 nt, Artificial Sequence
  Description of Artificial Sequence: Synthetic oligonucleotide
  Antisense strand to SEQ ID NO: 153594
uuuacacauacagucaucu

SEQ ID NO: 153596 - RNA, 19 nt, Artificial Sequence
  Description of Artificial Sequence: Synthetic oligonucleotide
  Sense strand starting at position 1585 of SEQ ID NO: 1975
uuaagaugacuguaugugu

SEQ ID NO: 153597 - RNA, 19 nt, Artificial Sequence
  Description of Artificial Sequence: Synthetic oligonucleotide
  Antisense strand to SEQ ID NO: 153596
acacauacagucaucuuaa

SEQ ID NO: 153598 - RNA, 19 nt, Artificial Sequence
  Description of Artificial Sequence: Synthetic oligonucleotide
  Sense strand starting at position 1583 of SEQ ID NO: 1975
gauuaagaugacuguaugu

SEQ ID NO: 153599 - RNA, 19 nt, Artificial Sequence
  Description of Artificial Sequence: Synthetic oligonucleotide
  Antisense strand to SEQ ID NO: 153598
acauacagucaucuuaauc

SEQ ID NO: 153600 - RNA, 19 nt, Artificial Sequence
  Description of Artificial Sequence: Synthetic oligonucleotide
  Sense strand starting at position 1562 of SEQ ID NO: 1975
aguuaucugcaaggaacga

SEQ ID NO: 153601 - RNA, 19 nt, Artificial Sequence
  Description of Artificial Sequence: Synthetic oligonucleotide
  Antisense strand to SEQ ID NO: 153600
ucguuccuugcagauaacu

SEQ ID NO: 153602 - RNA, 19 nt, Artificial Sequence
  Description of Artificial Sequence: Synthetic oligonucleotide
  Sense strand starting at position 1559 of SEQ ID NO: 1975
agcaguuaucugcaaggaa

SEQ ID NO: 153603 - RNA, 19 nt, Artificial Sequence
  Description of Artificial Sequence: Synthetic oligonucleotide
  Antisense strand to SEQ ID NO: 153602
uuccuugcagauaacugcu

SEQ ID NO: 153604 - RNA, 19 nt, Artificial Sequence
  Description of Artificial Sequence: Synthetic oligonucleotide
  Sense strand starting at position 1485 of SEQ ID NO: 1975
cggaaauagguaggguuau

SEQ ID NO: 153605 - RNA, 19 nt, Artificial Sequence
  Description of Artificial Sequence: Synthetic oligonucleotide
  Antisense strand to SEQ ID NO: 153604
auaacccuaccuauuuccg

SEQ ID NO: 153606 - RNA, 19 nt, Artificial Sequence
  Description of Artificial Sequence: Synthetic oligonucleotide
  Sense strand starting at position 1401 of SEQ ID NO: 1975
cuuguucugccacagauga

SEQ ID NO: 153607 - RNA, 19 nt, Artificial Sequence
  Description of Artificial Sequence: Synthetic oligonucleotide
  Antisense strand to SEQ ID NO: 153606
ucaucuguggcagaacaag

SEQ ID NO: 153608 - RNA, 19 nt, Artificial Sequence
  Description of Artificial Sequence: Synthetic oligonucleotide
  Sense strand starting at position 1295 of SEQ ID NO: 1975
ggacacuucugcucuaaga

SEQ ID NO: 153609 - RNA, 19 nt, Artificial Sequence
  Description of Artificial Sequence: Synthetic oligonucleotide
  Antisense strand to SEQ ID NO: 153608
ucuuagagcagaagugucc

SEQ ID NO: 153610 - RNA, 19 nt, Artificial Sequence
  Description of Artificial Sequence: Synthetic oligonucleotide
  Sense strand starting at position 1198 of SEQ ID NO: 1975
agucaucuucugcacggaa

SEQ ID NO: 153611 - RNA, 19 nt, Artificial Sequence
  Description of Artificial Sequence: Synthetic oligonucleotide
  Antisense strand to SEQ ID NO: 153610
uuccgugcagaagaugacu

SEQ ID NO: 153612 - RNA, 19 nt, Artificial Sequence
  Description of Artificial Sequence: Synthetic oligonucleotide
  Sense strand starting at position 1105 of SEQ ID NO: 1975
augcuuacuggaugaaugu

SEQ ID NO: 153613 - RNA, 19 nt, Artificial Sequence
  Description of Artificial Sequence: Synthetic oligonucleotide
  Antisense strand to SEQ ID NO: 153612
acauucauccaguaagcau

SEQ ID NO: 153614 - RNA, 19 nt, Artificial Sequence
  Description of Artificial Sequence: Synthetic oligonucleotide
  Sense strand starting at position 1100 of SEQ ID NO: 1975
agugaaugcuuacuggaug

SEQ ID NO: 153615 - RNA, 19 nt, Artificial Sequence
  Description of Artificial Sequence: Synthetic oligonucleotide
  Antisense strand to SEQ ID NO: 153614
cauccaguaagcauucacu

SEQ ID NO: 153616 - RNA, 19 nt, Artificial Sequence
  Description of Artificial Sequence: Synthetic oligonucleotide
  Sense strand starting at position 791 of SEQ ID NO: 1975
aaaucaagcgucgaauaaa

SEQ ID NO: 153617 - RNA, 19 nt, Artificial Sequence
  Description of Artificial Sequence: Synthetic oligonucleotide
  Antisense strand to SEQ ID NO: 153616
uuuauucgacgcuugauuu

SEQ ID NO: 153618 - RNA, 19 nt, Artificial Sequence
  Description of Artificial Sequence: Synthetic oligonucleotide
  Sense strand starting at position 737 of SEQ ID NO: 1975
cucguuuacagaugaggaa

SEQ ID NO: 153619 - RNA, 19 nt, Artificial Sequence
  Description of Artificial Sequence: Synthetic oligonucleotide
  Antisense strand to SEQ ID NO: 153618
uuccucaucuguaaacgag

SEQ ID NO: 153620 - RNA, 19 nt, Artificial Sequence
  Description of Artificial Sequence: Synthetic oligonucleotide
  Sense strand starting at position 708 of SEQ ID NO: 1975
cccugagaagucgauuaau

SEQ ID NO: 153621 - RNA, 19 nt, Artificial Sequence
  Description of Artificial Sequence: Synthetic oligonucleotide
  Antisense strand to SEQ ID NO: 153620
auuaaucgacuucucaggg

SEQ ID NO: 153622 - RNA, 19 nt, Artificial Sequence
  Description of Artificial Sequence: Synthetic oligonucleotide
  Sense strand starting at position 525 of SEQ ID NO: 1975
ccauaccucucagugaaga

SEQ ID NO: 153623 - RNA, 19 nt, Artificial Sequence
  Description of Artificial Sequence: Synthetic oligonucleotide
  Antisense strand to SEQ ID NO: 153622
ucuucacugagagguaugg

SEQ ID NO: 153624 - RNA, 19 nt, Artificial Sequence
  Description of Artificial Sequence: Synthetic oligonucleotide
  Sense strand starting at position 3543 of SEQ ID NO: 1974
accacacagcaaugugaaa

SEQ ID NO: 153625 - RNA, 19 nt, Artificial Sequence
  Description of Artificial Sequence: Synthetic oligonucleotide
  Antisense strand to SEQ ID NO: 153624
uuucacauugcuguguggu

SEQ ID NO: 153626 - RNA, 19 nt, Artificial Sequence
  Description of Artificial Sequence: Synthetic oligonucleotide
  Sense strand starting at position 3060 of SEQ ID NO: 1974
ggguaagucauauauggug

SEQ ID NO: 153627 - RNA, 19 nt, Artificial Sequence
  Description of Artificial Sequence: Synthetic oligonucleotide
  Antisense strand to SEQ ID NO: 153626
caccauauaugacuuaccc

SEQ ID NO: 153628 - RNA, 19 nt, Artificial Sequence
  Description of Artificial Sequence: Synthetic oligonucleotide
  Sense strand starting at position 3054 of SEQ ID NO: 1974
ggacauggguaagucauau

SEQ ID NO: 153629 - RNA, 19 nt, Artificial Sequence
  Description of Artificial Sequence: Synthetic oligonucleotide
  Antisense strand to SEQ ID NO: 153628
auaugacuuacccaugucc

SEQ ID NO: 153630 - RNA, 19 nt, Artificial Sequence
  Description of Artificial Sequence: Synthetic oligonucleotide
  Sense strand starting at position 3029 of SEQ ID NO: 1974
auggaaugugcauguauaa

SEQ ID NO: 153631 - RNA, 19 nt, Artificial Sequence
  Description of Artificial Sequence: Synthetic oligonucleotide
  Antisense strand to SEQ ID NO: 153630
uuauacaugcacauuccau

SEQ ID NO: 153632 - RNA, 19 nt, Artificial Sequence
  Description of Artificial Sequence: Synthetic oligonucleotide
  Sense strand starting at position 3018 of SEQ ID NO: 1974
ugaauaugugcauggaaug

SEQ ID NO: 153633 - RNA, 19 nt, Artificial Sequence
  Description of Artificial Sequence: Synthetic oligonucleotide
  Antisense strand to SEQ ID NO: 153632
cauuccaugcacauauuca

SEQ ID NO: 153634 - RNA, 19 nt, Artificial Sequence
  Description of Artificial Sequence: Synthetic oligonucleotide
  Sense strand starting at position 3016 of SEQ ID NO: 1974
ugugaauaugugcauggaa

SEQ ID NO: 153635 - RNA, 19 nt, Artificial Sequence
  Description of Artificial Sequence: Synthetic oligonucleotide
  Antisense strand to SEQ ID NO: 153634
uuccaugcacauauucaca

SEQ ID NO: 153636 - RNA, 19 nt, Artificial Sequence
  Description of Artificial Sequence: Synthetic oligonucleotide
  Sense strand starting at position 3015 of SEQ ID NO: 1974
augugaauaugugcaugga

SEQ ID NO: 153637 - RNA, 19 nt, Artificial Sequence
  Description of Artificial Sequence: Synthetic oligonucleotide
  Antisense strand to SEQ ID NO: 153636
uccaugcacauauucacau

SEQ ID NO: 153638 - RNA, 19 nt, Artificial Sequence
  Description of Artificial Sequence: Synthetic oligonucleotide
  Sense strand starting at position 2984 of SEQ ID NO: 1974
gguauaugugcacagauga

SEQ ID NO: 153639 - RNA, 19 nt, Artificial Sequence
  Description of Artificial Sequence: Synthetic oligonucleotide
  Antisense strand to SEQ ID NO: 153638
ucaucugugcacauauacc

SEQ ID NO: 153640 - RNA, 19 nt, Artificial Sequence
  Description of Artificial Sequence: Synthetic oligonucleotide
  Sense strand starting at position 2982 of SEQ ID NO: 1974
uagguauaugugcacagau

SEQ ID NO: 153641 - RNA, 19 nt, Artificial Sequence
  Description of Artificial Sequence: Synthetic oligonucleotide
  Antisense strand to SEQ ID NO: 153640
aucugugcacauauaccua

SEQ ID NO: 153642 - RNA, 19 nt, Artificial Sequence
  Description of Artificial Sequence: Synthetic oligonucleotide
  Sense strand starting at position 2924 of SEQ ID NO: 1974
gggucuucugugaguguau

SEQ ID NO: 153643 - RNA, 19 nt, Artificial Sequence
  Description of Artificial Sequence: Synthetic oligonucleotide
  Antisense strand to SEQ ID NO: 153642
auacacucacagaagaccc

SEQ ID NO: 153644 - RNA, 19 nt, Artificial Sequence
  Description of Artificial Sequence: Synthetic oligonucleotide
  Sense strand starting at position 2912 of SEQ ID NO: 1974
uacagauguccagggucuu

SEQ ID NO: 153645 - RNA, 19 nt, Artificial Sequence
  Description of Artificial Sequence: Synthetic oligonucleotide
  Antisense strand to SEQ ID NO: 153644
aagacccuggacaucugua

SEQ ID NO: 153646 - RNA, 19 nt, Artificial Sequence
  Description of Artificial Sequence: Synthetic oligonucleotide
  Sense strand starting at position 2900 of SEQ ID NO: 1974
agaugcuuuccuuacagau

SEQ ID NO: 153647 - RNA, 19 nt, Artificial Sequence
  Description of Artificial Sequence: Synthetic oligonucleotide
  Antisense strand to SEQ ID NO: 153646
aucuguaaggaaagcaucu

SEQ ID NO: 153648 - RNA, 19 nt, Artificial Sequence
  Description of Artificial Sequence: Synthetic oligonucleotide
  Sense strand starting at position 2867 of SEQ ID NO: 1974
cagucacaggucugaggau

SEQ ID NO: 153649 - RNA, 19 nt, Artificial Sequence
  Description of Artificial Sequence: Synthetic oligonucleotide
  Antisense strand to SEQ ID NO: 153648
auccucagaccugugacug

SEQ ID NO: 153650 - RNA, 19 nt, Artificial Sequence
  Description of Artificial Sequence: Synthetic oligonucleotide
  Sense strand starting at position 2818 of SEQ ID NO: 1974
gccagaaauguauggagga

SEQ ID NO: 153651 - RNA, 19 nt, Artificial Sequence
  Description of Artificial Sequence: Synthetic oligonucleotide
  Antisense strand to SEQ ID NO: 153650
uccuccauacauuucuggc

SEQ ID NO: 153652 - RNA, 19 nt, Artificial Sequence
  Description of Artificial Sequence: Synthetic oligonucleotide
  Sense strand starting at position 2810 of SEQ ID NO: 1974
uggcacuugccagaaaugu

SEQ ID NO: 153653 - RNA, 19 nt, Artificial Sequence
  Description of Artificial Sequence: Synthetic oligonucleotide
  Antisense strand to SEQ ID NO: 153652
acauuucuggcaagugcca

SEQ ID NO: 153654 - RNA, 19 nt, Artificial Sequence
  Description of Artificial Sequence: Synthetic oligonucleotide
  Sense strand starting at position 2661 of SEQ ID NO: 1974
aguggauggucugugggau

SEQ ID NO: 153655 - RNA, 19 nt, Artificial Sequence
  Description of Artificial Sequence: Synthetic oligonucleotide
  Antisense strand to SEQ ID NO: 153654
aucccacagaccauccacu

SEQ ID NO: 153656 - RNA, 19 nt, Artificial Sequence
  Description of Artificial Sequence: Synthetic oligonucleotide
  Sense strand starting at position 2321 of SEQ ID NO: 1974
cucacaugucagcagauga

SEQ ID NO: 153657 - RNA, 19 nt, Artificial Sequence
  Description of Artificial Sequence: Synthetic oligonucleotide
  Antisense strand to SEQ ID NO: 153656
ucaucugcugacaugugag

SEQ ID NO: 153658 - RNA, 19 nt, Artificial Sequence
  Description of Artificial Sequence: Synthetic oligonucleotide
  Sense strand starting at position 2218 of SEQ ID NO: 1974
uucucaggagaaugcaauu

SEQ ID NO: 153659 - RNA, 19 nt, Artificial Sequence
  Description of Artificial Sequence: Synthetic oligonucleotide
  Antisense strand to SEQ ID NO: 153658
aauugcauucuccugagaa

SEQ ID NO: 153660 - RNA, 19 nt, Artificial Sequence
  Description of Artificial Sequence: Synthetic oligonucleotide
  Sense strand starting at position 2172 of SEQ ID NO: 1974
gaacaugcacagugaucau

SEQ ID NO: 153661 - RNA, 19 nt, Artificial Sequence
  Description of Artificial Sequence: Synthetic oligonucleotide
  Antisense strand to SEQ ID NO: 153660
augaucacugugcauguuc

SEQ ID NO: 153662 - RNA, 19 nt, Artificial Sequence
  Description of Artificial Sequence: Synthetic oligonucleotide
  Sense strand starting at position 2135 of SEQ ID NO: 1974
ccaagaaguuagguaacuu

SEQ ID NO: 153663 - RNA, 19 nt, Artificial Sequence
  Description of Artificial Sequence: Synthetic oligonucleotide
  Antisense strand to SEQ ID NO: 153662
aaguuaccuaacuucuugg

SEQ ID NO: 153664 - RNA, 19 nt, Artificial Sequence
  Description of Artificial Sequence: Synthetic oligonucleotide
  Sense strand starting at position 2132 of SEQ ID NO: 1974
gcuccaagaaguuagguaa

SEQ ID NO: 153665 - RNA, 19 nt, Artificial Sequence
  Description of Artificial Sequence: Synthetic oligonucleotide
  Antisense strand to SEQ ID NO: 153664
uuaccuaacuucuuggagc

SEQ ID NO: 153666 - RNA, 19 nt, Artificial Sequence
  Description of Artificial Sequence: Synthetic oligonucleotide
  Sense strand starting at position 2122 of SEQ ID NO: 1974
ggaaauugaugcuccaaga

SEQ ID NO: 153667 - RNA, 19 nt, Artificial Sequence
  Description of Artificial Sequence: Synthetic oligonucleotide
  Antisense strand to SEQ ID NO: 153666
ucuuggagcaucaauuucc

SEQ ID NO: 153668 - RNA, 19 nt, Artificial Sequence
  Description of Artificial Sequence: Synthetic oligonucleotide
  Sense strand starting at position 2078 of SEQ ID NO: 1974
agaugaauuuaagguagga

SEQ ID NO: 153669 - RNA, 19 nt, Artificial Sequence
  Description of Artificial Sequence: Synthetic oligonucleotide
  Antisense strand to SEQ ID NO: 153668
uccuaccuuaaauucaucu

SEQ ID NO: 153670 - RNA, 19 nt, Artificial Sequence
  Description of Artificial Sequence: Synthetic oligonucleotide
  Sense strand starting at position 2050 of SEQ ID NO: 1974
aggcacucugcugagauua

SEQ ID NO: 153671 - RNA, 19 nt, Artificial Sequence
  Description of Artificial Sequence: Synthetic oligonucleotide
  Antisense strand to SEQ ID NO: 153670
uaaucucagcagagugccu

SEQ ID NO: 153672 - RNA, 19 nt, Artificial Sequence
  Description of Artificial Sequence: Synthetic oligonucleotide
  Sense strand starting at position 1028 of SEQ ID NO: 1974
uuuccagagcaagguaaua

SEQ ID NO: 153673 - RNA, 19 nt, Artificial Sequence
  Description of Artificial Sequence: Synthetic oligonucleotide
  Antisense strand to SEQ ID NO: 153672
uauuaccuugcucuggaaa

SEQ ID NO: 153674 - RNA, 19 nt, Artificial Sequence
  Description of Artificial Sequence: Synthetic oligonucleotide
  Sense strand starting at position 980 of SEQ ID NO: 1974
gaugacuguauguguaaag

SEQ ID NO: 153675 - RNA, 19 nt, Artificial Sequence
  Description of Artificial Sequence: Synthetic oligonucleotide
  Antisense strand to SEQ ID NO: 153674
cuuuacacauacagucauc

SEQ ID NO: 153676 - RNA, 19 nt, Artificial Sequence
  Description of Artificial Sequence: Synthetic oligonucleotide
  Sense strand starting at position 979 of SEQ ID NO: 1974
agaugacuguauguguaaa

SEQ ID NO: 153677 - RNA, 19 nt, Artificial Sequence
  Description of Artificial Sequence: Synthetic oligonucleotide
  Antisense strand to SEQ ID NO: 153676
uuuacacauacagucaucu

SEQ ID NO: 153678 - RNA, 19 nt, Artificial Sequence
  Description of Artificial Sequence: Synthetic oligonucleotide
  Sense strand starting at position 976 of SEQ ID NO: 1974
uuaagaugacuguaugugu

SEQ ID NO: 153679 - RNA, 19 nt, Artificial Sequence
  Description of Artificial Sequence: Synthetic oligonucleotide
  Antisense strand to SEQ ID NO: 153678
acacauacagucaucuuaa

SEQ ID NO: 153680 - RNA, 19 nt, Artificial Sequence
  Description of Artificial Sequence: Synthetic oligonucleotide
  Sense strand starting at position 974 of SEQ ID NO: 1974
gauuaagaugacuguaugu

SEQ ID NO: 153681 - RNA, 19 nt, Artificial Sequence
  Description of Artificial Sequence: Synthetic oligonucleotide
  Antisense strand to SEQ ID NO: 153680
acauacagucaucuuaauc

SEQ ID NO: 153682 - RNA, 19 nt, Artificial Sequence
  Description of Artificial Sequence: Synthetic oligonucleotide
  Sense strand starting at position 953 of SEQ ID NO: 1974
aguuaucugcaaggaacga

SEQ ID NO: 153683 - RNA, 19 nt, Artificial Sequence
  Description of Artificial Sequence: Synthetic oligonucleotide
  Antisense strand to SEQ ID NO: 153682
ucguuccuugcagauaacu

SEQ ID NO: 153684 - RNA, 19 nt, Artificial Sequence
  Description of Artificial Sequence: Synthetic oligonucleotide
  Sense strand starting at position 950 of SEQ ID NO: 1974
agcaguuaucugcaaggaa

SEQ ID NO: 153685 - RNA, 19 nt, Artificial Sequence
  Description of Artificial Sequence: Synthetic oligonucleotide
  Antisense strand to SEQ ID NO: 153684
uuccuugcagauaacugcu

SEQ ID NO: 153686 - RNA, 19 nt, Artificial Sequence
  Description of Artificial Sequence: Synthetic oligonucleotide
  Sense strand starting at position 876 of SEQ ID NO: 1974
cggaaauagguaggguuau

SEQ ID NO: 153687 - RNA, 19 nt, Artificial Sequence
  Description of Artificial Sequence: Synthetic oligonucleotide
  Antisense strand to SEQ ID NO: 153686
auaacccuaccuauuuccg

SEQ ID NO: 153688 - RNA, 19 nt, Artificial Sequence
  Description of Artificial Sequence: Synthetic oligonucleotide
  Sense strand starting at position 792 of SEQ ID NO: 1974
cuuguucugccacagauga

SEQ ID NO: 153689 - RNA, 19 nt, Artificial Sequence
  Description of Artificial Sequence: Synthetic oligonucleotide
  Antisense strand to SEQ ID NO: 153688
ucaucuguggcagaacaag

SEQ ID NO: 153690 - RNA, 19 nt, Artificial Sequence
  Description of Artificial Sequence: Synthetic oligonucleotide
  Sense strand starting at position 686 of SEQ ID NO: 1974
ggacacuucugcucuaaga

SEQ ID NO: 153691 - RNA, 19 nt, Artificial Sequence
  Description of Artificial Sequence: Synthetic oligonucleotide
  Antisense strand to SEQ ID NO: 153690
ucuuagagcagaagugucc

SEQ ID NO: 153692 - RNA, 19 nt, Artificial Sequence
  Description of Artificial Sequence: Synthetic oligonucleotide
  Sense strand starting at position 589 of SEQ ID NO: 1974
agucaucuucugcacggaa

SEQ ID NO: 153693 - RNA, 19 nt, Artificial Sequence
  Description of Artificial Sequence: Synthetic oligonucleotide
  Antisense strand to SEQ ID NO: 153692
uuccgugcagaagaugacu

SEQ ID NO: 153694 - RNA, 19 nt, Artificial Sequence
  Description of Artificial Sequence: Synthetic oligonucleotide
  Sense strand starting at position 496 of SEQ ID NO: 1974
augcuuacuggaugaaugu

SEQ ID NO: 153695 - RNA, 19 nt, Artificial Sequence
  Description of Artificial Sequence: Synthetic oligonucleotide
  Antisense strand to SEQ ID NO: 153694
acauucauccaguaagcau

SEQ ID NO: 153696 - RNA, 19 nt, Artificial Sequence
  Description of Artificial Sequence: Synthetic oligonucleotide
  Sense strand starting at position 491 of SEQ ID NO: 1974
agugaaugcuuacuggaug

SEQ ID NO: 153697 - RNA, 19 nt, Artificial Sequence
  Description of Artificial Sequence: Synthetic oligonucleotide
  Antisense strand to SEQ ID NO: 153696
cauccaguaagcauucacu

SEQ ID NO: 153698 - RNA, 19 nt, Artificial Sequence
  Description of Artificial Sequence: Synthetic oligonucleotide
  Sense strand starting at position 182 of SEQ ID NO: 1974
aaaucaagcgucgaauaaa

SEQ ID NO: 153699 - RNA, 19 nt, Artificial Sequence
  Description of Artificial Sequence: Synthetic oligonucleotide
  Antisense strand to SEQ ID NO: 153698
uuuauucgacgcuugauuu

SEQ ID NO: 153700 - RNA, 19 nt, Artificial Sequence
  Description of Artificial Sequence: Synthetic oligonucleotide
  Sense strand starting at position 128 of SEQ ID NO: 1974
cucguuuacagaugaggaa

SEQ ID NO: 153701 - RNA, 19 nt, Artificial Sequence
  Description of Artificial Sequence: Synthetic oligonucleotide
  Antisense strand to SEQ ID NO: 153700
uuccucaucuguaaacgag

SEQ ID NO: 153702 - RNA, 19 nt, Artificial Sequence
  Description of Artificial Sequence: Synthetic oligonucleotide
  Sense strand starting at position 99 of SEQ ID NO: 1974
cccugagaagucgauuaau

SEQ ID NO: 153703 - RNA, 19 nt, Artificial Sequence
  Description of Artificial Sequence: Synthetic oligonucleotide
  Antisense strand to SEQ ID NO: 153702
auuaaucgacuucucaggg

SEQ ID NO: 153704 - RNA, 19 nt, Artificial Sequence
  Description of Artificial Sequence: Synthetic oligonucleotide
  Sense strand starting at position 3667 of SEQ ID NO: 1976
acugcauccuuggcugauu

SEQ ID NO: 153705 - RNA, 19 nt, Artificial Sequence
  Description of Artificial Sequence: Synthetic oligonucleotide
  Antisense strand to SEQ ID NO: 153704
aaucagccaaggaugcagu

SEQ ID NO: 153706 - RNA, 19 nt, Artificial Sequence
  Description of Artificial Sequence: Synthetic oligonucleotide
  Sense strand starting at position 3616 of SEQ ID NO: 1976
gaaagaagucucugugccu

SEQ ID NO: 153707 - RNA, 19 nt, Artificial Sequence
  Description of Artificial Sequence: Synthetic oligonucleotide
  Antisense strand to SEQ ID NO: 153706
aggcacagagacuucuuuc

SEQ ID NO: 153708 - RNA, 19 nt, Artificial Sequence
  Description of Artificial Sequence: Synthetic oligonucleotide
  Sense strand starting at position 3600 of SEQ ID NO: 1976
acaagauaauguuagggaa

SEQ ID NO: 153709 - RNA, 19 nt, Artificial Sequence
  Description of Artificial Sequence: Synthetic oligonucleotide
  Antisense strand to SEQ ID NO: 153708
uucccuaacauuaucuugu

SEQ ID NO: 153710 - RNA, 19 nt, Artificial Sequence
  Description of Artificial Sequence: Synthetic oligonucleotide
  Sense strand starting at position 3540 of SEQ ID NO: 1976
gaaguagggcucuguaauu

SEQ ID NO: 153711 - RNA, 19 nt, Artificial Sequence
  Description of Artificial Sequence: Synthetic oligonucleotide
  Antisense strand to SEQ ID NO: 153710
aauuacagagcccuacuuc

SEQ ID NO: 153712 - RNA, 19 nt, Artificial Sequence
  Description of Artificial Sequence: Synthetic oligonucleotide
  Sense strand starting at position 3526 of SEQ ID NO: 1976
gugugagagacccagaagu

SEQ ID NO: 153713 - RNA, 19 nt, Artificial Sequence
  Description of Artificial Sequence: Synthetic oligonucleotide
  Antisense strand to SEQ ID NO: 153712
acuucugggucucucacac

SEQ ID NO: 153714 - RNA, 19 nt, Artificial Sequence
  Description of Artificial Sequence: Synthetic oligonucleotide
  Sense strand starting at position 3491 of SEQ ID NO: 1976
ggccacauuccugacagau

SEQ ID NO: 153715 - RNA, 19 nt, Artificial Sequence
  Description of Artificial Sequence: Synthetic oligonucleotide
  Antisense strand to SEQ ID NO: 153714
aucugucaggaauguggcc

SEQ ID NO: 153716 - RNA, 19 nt, Artificial Sequence
  Description of Artificial Sequence: Synthetic oligonucleotide
  Sense strand starting at position 3425 of SEQ ID NO: 1976
gcuuaucacucccuaggga

SEQ ID NO: 153717 - RNA, 19 nt, Artificial Sequence
  Description of Artificial Sequence: Synthetic oligonucleotide
  Antisense strand to SEQ ID NO: 153716
ucccuagggagugauaagc

SEQ ID NO: 153718 - RNA, 19 nt, Artificial Sequence
  Description of Artificial Sequence: Synthetic oligonucleotide
  Sense strand starting at position 3087 of SEQ ID NO: 1976
augguaggugcuugacaaa

SEQ ID NO: 153719 - RNA, 19 nt, Artificial Sequence
  Description of Artificial Sequence: Synthetic oligonucleotide
  Antisense strand to SEQ ID NO: 153718
uuugucaagcaccuaccau

SEQ ID NO: 153720 - RNA, 19 nt, Artificial Sequence
  Description of Artificial Sequence: Synthetic oligonucleotide
  Sense strand starting at position 3086 of SEQ ID NO: 1976
caugguaggugcuugacaa

SEQ ID NO: 153721 - RNA, 19 nt, Artificial Sequence
  Description of Artificial Sequence: Synthetic oligonucleotide
  Antisense strand to SEQ ID NO: 153720
uugucaagcaccuaccaug

SEQ ID NO: 153722 - RNA, 19 nt, Artificial Sequence
  Description of Artificial Sequence: Synthetic oligonucleotide
  Sense strand starting at position 3074 of SEQ ID NO: 1976
gugguuacaacacauggua

SEQ ID NO: 153723 - RNA, 19 nt, Artificial Sequence
  Description of Artificial Sequence: Synthetic oligonucleotide
  Antisense strand to SEQ ID NO: 153722
uaccauguguuguaaccac

SEQ ID NO: 153724 - RNA, 19 nt, Artificial Sequence
  Description of Artificial Sequence: Synthetic oligonucleotide
  Sense strand starting at position 3041 of SEQ ID NO: 1976
cggucuguaaagugaggau

SEQ ID NO: 153725 - RNA, 19 nt, Artificial Sequence
  Description of Artificial Sequence: Synthetic oligonucleotide
  Antisense strand to SEQ ID NO: 153724
auccucacuuuacagaccg

SEQ ID NO: 153726 - RNA, 19 nt, Artificial Sequence
  Description of Artificial Sequence: Synthetic oligonucleotide
  Sense strand starting at position 2996 of SEQ ID NO: 1976
aagaaacuucggcaaguca

SEQ ID NO: 153727 - RNA, 19 nt, Artificial Sequence
  Description of Artificial Sequence: Synthetic oligonucleotide
  Antisense strand to SEQ ID NO: 153726
ugacuugccgaaguuucuu

SEQ ID NO: 153728 - RNA, 19 nt, Artificial Sequence
  Description of Artificial Sequence: Synthetic oligonucleotide
  Sense strand starting at position 2843 of SEQ ID NO: 1976
gaaaucgaccucgguuuga

SEQ ID NO: 153729 - RNA, 19 nt, Artificial Sequence
  Description of Artificial Sequence: Synthetic oligonucleotide
  Antisense strand to SEQ ID NO: 153728
ucaaaccgaggucgauuuc

SEQ ID NO: 153730 - RNA, 19 nt, Artificial Sequence
  Description of Artificial Sequence: Synthetic oligonucleotide
  Sense strand starting at position 2832 of SEQ ID NO: 1976
gugagcguucggaaaucga

SEQ ID NO: 153731 - RNA, 19 nt, Artificial Sequence
  Description of Artificial Sequence: Synthetic oligonucleotide
  Antisense strand to SEQ ID NO: 153730
ucgauuuccgaacgcucac

SEQ ID NO: 153732 - RNA, 19 nt, Artificial Sequence
  Description of Artificial Sequence: Synthetic oligonucleotide
  Sense strand starting at position 2813 of SEQ ID NO: 1976
gcucgcauccugcuccaaa

SEQ ID NO: 153733 - RNA, 19 nt, Artificial Sequence
  Description of Artificial Sequence: Synthetic oligonucleotide
  Antisense strand to SEQ ID NO: 153732
uuuggagcaggaugcgagc

SEQ ID NO: 153734 - RNA, 19 nt, Artificial Sequence
  Description of Artificial Sequence: Synthetic oligonucleotide
  Sense strand starting at position 921 of SEQ ID NO: 1976
ugagaaaggcccuguuacu

SEQ ID NO: 153735 - RNA, 19 nt, Artificial Sequence
  Description of Artificial Sequence: Synthetic oligonucleotide
  Antisense strand to SEQ ID NO: 153734
aguaacagggccuuucuca

SEQ ID NO: 153736 - RNA, 19 nt, Artificial Sequence
  Description of Artificial Sequence: Synthetic oligonucleotide
  Sense strand starting at position 907 of SEQ ID NO: 1976
ucccaacagcauugugaga

SEQ ID NO: 153737 - RNA, 19 nt, Artificial Sequence
  Description of Artificial Sequence: Synthetic oligonucleotide
  Antisense strand to SEQ ID NO: 153736
ucucacaaugcuguuggga

SEQ ID NO: 153738 - RNA, 19 nt, Artificial Sequence
  Description of Artificial Sequence: Synthetic oligonucleotide
  Sense strand starting at position 836 of SEQ ID NO: 1976
ccaccuuuccuugauguua

SEQ ID NO: 153739 - RNA, 19 nt, Artificial Sequence
  Description of Artificial Sequence: Synthetic oligonucleotide
  Antisense strand to SEQ ID NO: 153738
uaacaucaaggaaaggugg

SEQ ID NO: 153740 - RNA, 19 nt, Artificial Sequence
  Description of Artificial Sequence: Synthetic oligonucleotide
  Sense strand starting at position 835 of SEQ ID NO: 1976
cccaccuuuccuugauguu

SEQ ID NO: 153741 - RNA, 19 nt, Artificial Sequence
  Description of Artificial Sequence: Synthetic oligonucleotide
  Antisense strand to SEQ ID NO: 153740
aacaucaaggaaagguggg

SEQ ID NO: 153742 - RNA, 19 nt, Artificial Sequence
  Description of Artificial Sequence: Synthetic oligonucleotide
  Sense strand starting at position 806 of SEQ ID NO: 1976
uuugcauugucuccaaaug

SEQ ID NO: 153743 - RNA, 19 nt, Artificial Sequence
  Description of Artificial Sequence: Synthetic oligonucleotide
  Antisense strand to SEQ ID NO: 153742
cauuuggagacaaugcaaa

SEQ ID NO: 153744 - RNA, 19 nt, Artificial Sequence
  Description of Artificial Sequence: Synthetic oligonucleotide
  Sense strand starting at position 771 of SEQ ID NO: 1976
uguagaaugcuguaacuca

SEQ ID NO: 153745 - RNA, 19 nt, Artificial Sequence
  Description of Artificial Sequence: Synthetic oligonucleotide
  Antisense strand to SEQ ID NO: 153744
ugaguuacagcauucuaca

SEQ ID NO: 153746 - RNA, 19 nt, Artificial Sequence
  Description of Artificial Sequence: Synthetic oligonucleotide
  Sense strand starting at position 759 of SEQ ID NO: 1976
ugcucucagcauuguagaa

SEQ ID NO: 153747 - RNA, 19 nt, Artificial Sequence
  Description of Artificial Sequence: Synthetic oligonucleotide
  Antisense strand to SEQ ID NO: 153746
uucuacaaugcugagagca

SEQ ID NO: 153748 - RNA, 19 nt, Artificial Sequence
  Description of Artificial Sequence: Synthetic oligonucleotide
  Sense strand starting at position 756 of SEQ ID NO: 1976
aucugcucucagcauugua

SEQ ID NO: 153749 - RNA, 19 nt, Artificial Sequence
  Description of Artificial Sequence: Synthetic oligonucleotide
  Antisense strand to SEQ ID NO: 153748
uacaaugcugagagcagau

SEQ ID NO: 153750 - RNA, 19 nt, Artificial Sequence
  Description of Artificial Sequence: Synthetic oligonucleotide
  Sense strand starting at position 719 of SEQ ID NO: 1976
gucuucucaucuguaaaca

SEQ ID NO: 153751 - RNA, 19 nt, Artificial Sequence
  Description of Artificial Sequence: Synthetic oligonucleotide
  Antisense strand to SEQ ID NO: 153750
uguuuacagaugagaagac

SEQ ID NO: 153752 - RNA, 19 nt, Artificial Sequence
  Description of Artificial Sequence: Synthetic oligonucleotide
  Sense strand starting at position 683 of SEQ ID NO: 1976
uuaggaaagucagcuaucu

SEQ ID NO: 153753 - RNA, 19 nt, Artificial Sequence
  Description of Artificial Sequence: Synthetic oligonucleotide
  Antisense strand to SEQ ID NO: 153752
agauagcugacuuuccuaa

SEQ ID NO: 153754 - RNA, 19 nt, Artificial Sequence
  Description of Artificial Sequence: Synthetic oligonucleotide
  Sense strand starting at position 638 of SEQ ID NO: 1976
uguugauccuaacuaugca

SEQ ID NO: 153755 - RNA, 19 nt, Artificial Sequence
  Description of Artificial Sequence: Synthetic oligonucleotide
  Antisense strand to SEQ ID NO: 153754
ugcauaguuaggaucaaca

SEQ ID NO: 153756 - RNA, 19 nt, Artificial Sequence
  Description of Artificial Sequence: Synthetic oligonucleotide
  Sense strand starting at position 632 of SEQ ID NO: 1976
aucagauguugauccuaac

SEQ ID NO: 153757 - RNA, 19 nt, Artificial Sequence
  Description of Artificial Sequence: Synthetic oligonucleotide
  Antisense strand to SEQ ID NO: 153756
guuaggaucaacaucugau

SEQ ID NO: 153758 - RNA, 19 nt, Artificial Sequence
  Description of Artificial Sequence: Synthetic oligonucleotide
  Sense strand starting at position 626 of SEQ ID NO: 1976
ccaggaaucagauguugau

SEQ ID NO: 153759 - RNA, 19 nt, Artificial Sequence
  Description of Artificial Sequence: Synthetic oligonucleotide
  Antisense strand to SEQ ID NO: 153758
aucaacaucugauuccugg

SEQ ID NO: 153760 - RNA, 19 nt, Artificial Sequence
  Description of Artificial Sequence: Synthetic oligonucleotide
  Sense strand starting at position 510 of SEQ ID NO: 1976
gggucccuugcugauauua

SEQ ID NO: 153761 - RNA, 19 nt, Artificial Sequence
  Description of Artificial Sequence: Synthetic oligonucleotide
  Antisense strand to SEQ ID NO: 153760
uaauaucagcaagggaccc

SEQ ID NO: 153762 - RNA, 19 nt, Artificial Sequence
  Description of Artificial Sequence: Synthetic oligonucleotide
  Sense strand starting at position 460 of SEQ ID NO: 1976
guaaaugucggaggccaga

SEQ ID NO: 153763 - RNA, 19 nt, Artificial Sequence
  Description of Artificial Sequence: Synthetic oligonucleotide
  Antisense strand to SEQ ID NO: 153762
ucuggccuccgacauuuac

SEQ ID NO: 153764 - RNA, 19 nt, Artificial Sequence
  Description of Artificial Sequence: Synthetic oligonucleotide
  Sense strand starting at position 449 of SEQ ID NO: 1976
ccagaaccucaguaaaugu

SEQ ID NO: 153765 - RNA, 19 nt, Artificial Sequence
  Description of Artificial Sequence: Synthetic oligonucleotide
  Antisense strand to SEQ ID NO: 153764
acauuuacugagguucugg

SEQ ID NO: 153766 - RNA, 19 nt, Artificial Sequence
  Description of Artificial Sequence: Synthetic oligonucleotide
  Sense strand starting at position 448 of SEQ ID NO: 1976
gccagaaccucaguaaaug

SEQ ID NO: 153767 - RNA, 19 nt, Artificial Sequence
  Description of Artificial Sequence: Synthetic oligonucleotide
  Antisense strand to SEQ ID NO: 153766
cauuuacugagguucuggc

SEQ ID NO: 153768 - RNA, 19 nt, Artificial Sequence
  Description of Artificial Sequence: Synthetic oligonucleotide
  Sense strand starting at position 435 of SEQ ID NO: 1976
guaaaugucagaggccaga

SEQ ID NO: 153769 - RNA, 19 nt, Artificial Sequence
  Description of Artificial Sequence: Synthetic oligonucleotide
  Antisense strand to SEQ ID NO: 153768
ucuggccucugacauuuac

SEQ ID NO: 153770 - RNA, 19 nt, Artificial Sequence
  Description of Artificial Sequence: Synthetic oligonucleotide
  Sense strand starting at position 428 of SEQ ID NO: 1976
uggcucaguaaaugucaga

SEQ ID NO: 153771 - RNA, 19 nt, Artificial Sequence
  Description of Artificial Sequence: Synthetic oligonucleotide
  Antisense strand to SEQ ID NO: 153770
ucugacauuuacugagcca

SEQ ID NO: 153772 - RNA, 19 nt, Artificial Sequence
  Description of Artificial Sequence: Synthetic oligonucleotide
  Sense strand starting at position 421 of SEQ ID NO: 1976
caguaccuggcucaguaaa

SEQ ID NO: 153773 - RNA, 19 nt, Artificial Sequence
  Description of Artificial Sequence: Synthetic oligonucleotide
  Antisense strand to SEQ ID NO: 153772
uuuacugagccagguacug

SEQ ID NO: 153774 - RNA, 19 nt, Artificial Sequence
  Description of Artificial Sequence: Synthetic oligonucleotide
  Sense strand starting at position 357 of SEQ ID NO: 1976
aacgaugucauaggguaga

SEQ ID NO: 153775 - RNA, 19 nt, Artificial Sequence
  Description of Artificial Sequence: Synthetic oligonucleotide
  Antisense strand to SEQ ID NO: 153774
ucuacccuaugacaucguu

SEQ ID NO: 153776 - RNA, 19 nt, Artificial Sequence
  Description of Artificial Sequence: Synthetic oligonucleotide
  Sense strand starting at position 350 of SEQ ID NO: 1976
augggcuaacgaugucaua

SEQ ID NO: 153777 - RNA, 19 nt, Artificial Sequence
  Description of Artificial Sequence: Synthetic oligonucleotide
  Antisense strand to SEQ ID NO: 153776
uaugacaucguuagcccau

SEQ ID NO: 153778 - RNA, 19 nt, Artificial Sequence
  Description of Artificial Sequence: Synthetic oligonucleotide
  Sense strand starting at position 331 of SEQ ID NO: 1976
ugggauaguuaucuguaaa

SEQ ID NO: 153779 - RNA, 19 nt, Artificial Sequence
  Description of Artificial Sequence: Synthetic oligonucleotide
  Antisense strand to SEQ ID NO: 153778
uuuacagauaacuauccca

SEQ ID NO: 153780 - RNA, 19 nt, Artificial Sequence
  Description of Artificial Sequence: Synthetic oligonucleotide
  Sense strand starting at position 330 of SEQ ID NO: 1976
uugggauaguuaucuguaa

SEQ ID NO: 153781 - RNA, 19 nt, Artificial Sequence
  Description of Artificial Sequence: Synthetic oligonucleotide
  Antisense strand to SEQ ID NO: 153780
uuacagauaacuaucccaa

SEQ ID NO: 153782 - RNA, 19 nt, Artificial Sequence
  Description of Artificial Sequence: Synthetic oligonucleotide
  Sense strand starting at position 25 of SEQ ID NO: 1976
uccugaaguugcccagaaa

SEQ ID NO: 153783 - RNA, 19 nt, Artificial Sequence
  Description of Artificial Sequence: Synthetic oligonucleotide
  Antisense strand to SEQ ID NO: 153782
uuucugggcaacuucagga

SEQ ID NO: 153784 - RNA, 19 nt, Artificial Sequence
  Description of Artificial Sequence: Synthetic oligonucleotide
  Sense strand starting at position 3795 of SEQ ID NO: 1973
ccacacagcucagaagaaa

SEQ ID NO: 153785 - RNA, 19 nt, Artificial Sequence
  Description of Artificial Sequence: Synthetic oligonucleotide
  Antisense strand to SEQ ID NO: 153784
uuucuucugagcugugugg

SEQ ID NO: 153786 - RNA, 19 nt, Artificial Sequence
  Description of Artificial Sequence: Synthetic oligonucleotide
  Sense strand starting at position 3752 of SEQ ID NO: 1973
cguugacugugaucacugu

SEQ ID NO: 153787 - RNA, 19 nt, Artificial Sequence
  Description of Artificial Sequence: Synthetic oligonucleotide
  Antisense strand to SEQ ID NO: 153786
acagugaucacagucaacg

SEQ ID NO: 153788 - RNA, 19 nt, Artificial Sequence
  Description of Artificial Sequence: Synthetic oligonucleotide
  Sense strand starting at position 3749 of SEQ ID NO: 1973
aaacguugacugugaucac

SEQ ID NO: 153789 - RNA, 19 nt, Artificial Sequence
  Description of Artificial Sequence: Synthetic oligonucleotide
  Antisense strand to SEQ ID NO: 153788
gugaucacagucaacguuu

SEQ ID NO: 153790 - RNA, 19 nt, Artificial Sequence
  Description of Artificial Sequence: Synthetic oligonucleotide
  Sense strand starting at position 3743 of SEQ ID NO: 1973
ucgaauaaacguugacugu

SEQ ID NO: 153791 - RNA, 19 nt, Artificial Sequence
  Description of Artificial Sequence: Synthetic oligonucleotide
  Antisense strand to SEQ ID NO: 153790
acagucaacguuuauucga

SEQ ID NO: 153792 - RNA, 19 nt, Artificial Sequence
  Description of Artificial Sequence: Synthetic oligonucleotide
  Sense strand starting at position 3733 of SEQ ID NO: 1973
aaaucaagcgucgaauaaa

SEQ ID NO: 153793 - RNA, 19 nt, Artificial Sequence
  Description of Artificial Sequence: Synthetic oligonucleotide
  Antisense strand to SEQ ID NO: 153792
uuuauucgacgcuugauuu

SEQ ID NO: 153794 - RNA, 19 nt, Artificial Sequence
  Description of Artificial Sequence: Synthetic oligonucleotide
  Sense strand starting at position 3732 of SEQ ID NO: 1973
uaaaucaagcgucgaauaa

SEQ ID NO: 153795 - RNA, 19 nt, Artificial Sequence
  Description of Artificial Sequence: Synthetic oligonucleotide
  Antisense strand to SEQ ID NO: 153794
uuauucgacgcuugauuua

SEQ ID NO: 153796 - RNA, 19 nt, Artificial Sequence
  Description of Artificial Sequence: Synthetic oligonucleotide
  Sense strand starting at position 3729 of SEQ ID NO: 1973
auguaaaucaagcgucgaa

SEQ ID NO: 153797 - RNA, 19 nt, Artificial Sequence
  Description of Artificial Sequence: Synthetic oligonucleotide
  Antisense strand to SEQ ID NO: 153796
uucgacgcuugauuuacau

SEQ ID NO: 153798 - RNA, 19 nt, Artificial Sequence
  Description of Artificial Sequence: Synthetic oligonucleotide
  Sense strand starting at position 3718 of SEQ ID NO: 1973
ugacacgcgaaauguaaau

SEQ ID NO: 153799 - RNA, 19 nt, Artificial Sequence
  Description of Artificial Sequence: Synthetic oligonucleotide
  Antisense strand to SEQ ID NO: 153798
auuuacauuucgcguguca

SEQ ID NO: 153800 - RNA, 19 nt, Artificial Sequence
  Description of Artificial Sequence: Synthetic oligonucleotide
  Sense strand starting at position 3713 of SEQ ID NO: 1973
aguagugacacgcgaaaug

SEQ ID NO: 153801 - RNA, 19 nt, Artificial Sequence
  Description of Artificial Sequence: Synthetic oligonucleotide
  Antisense strand to SEQ ID NO: 153800
cauuucgcgugucacuacu

SEQ ID NO: 153802 - RNA, 19 nt, Artificial Sequence
  Description of Artificial Sequence: Synthetic oligonucleotide
  Sense strand starting at position 3711 of SEQ ID NO: 1973
gaaguagugacacgcgaaa

SEQ ID NO: 153803 - RNA, 19 nt, Artificial Sequence
  Description of Artificial Sequence: Synthetic oligonucleotide
  Antisense strand to SEQ ID NO: 153802
uuucgcgugucacuacuuc

SEQ ID NO: 153804 - RNA, 19 nt, Artificial Sequence
  Description of Artificial Sequence: Synthetic oligonucleotide
  Sense strand starting at position 3679 of SEQ ID NO: 1973
cucguuuacagaugaggaa

SEQ ID NO: 153805 - RNA, 19 nt, Artificial Sequence
  Description of Artificial Sequence: Synthetic oligonucleotide
  Antisense strand to SEQ ID NO: 153804
uuccucaucuguaaacgag

SEQ ID NO: 153806 - RNA, 19 nt, Artificial Sequence
  Description of Artificial Sequence: Synthetic oligonucleotide
  Sense strand starting at position 3650 of SEQ ID NO: 1973
cccugagaagucgauuaau

SEQ ID NO: 153807 - RNA, 19 nt, Artificial Sequence
  Description of Artificial Sequence: Synthetic oligonucleotide
  Antisense strand to SEQ ID NO: 153806
auuaaucgacuucucaggg

SEQ ID NO: 153808 - RNA, 19 nt, Artificial Sequence
  Description of Artificial Sequence: Synthetic oligonucleotide
  Sense strand starting at position 3517 of SEQ ID NO: 1973
ugguuccauuaggaaugaa

SEQ ID NO: 153809 - RNA, 19 nt, Artificial Sequence
  Description of Artificial Sequence: Synthetic oligonucleotide
  Antisense strand to SEQ ID NO: 153808
uucauuccuaauggaacca

SEQ ID NO: 153810 - RNA, 19 nt, Artificial Sequence
  Description of Artificial Sequence: Synthetic oligonucleotide
  Sense strand starting at position 3467 of SEQ ID NO: 1973
ccauaccucucagugaaga

SEQ ID NO: 153811 - RNA, 19 nt, Artificial Sequence
  Description of Artificial Sequence: Synthetic oligonucleotide
  Antisense strand to SEQ ID NO: 153810
ucuucacugagagguaugg

SEQ ID NO: 153812 - RNA, 19 nt, Artificial Sequence
  Description of Artificial Sequence: Synthetic oligonucleotide
  Sense strand starting at position 3447 of SEQ ID NO: 1973
cuuugaagcuugcucacau

SEQ ID NO: 153813 - RNA, 19 nt, Artificial Sequence
  Description of Artificial Sequence: Synthetic oligonucleotide
  Antisense strand to SEQ ID NO: 153812
augugagcaagcuucaaag

SEQ ID NO: 153814 - RNA, 19 nt, Artificial Sequence
  Description of Artificial Sequence: Synthetic oligonucleotide
  Sense strand starting at position 2970 of SEQ ID NO: 1973
acugcauccuuggcugauu

SEQ ID NO: 153815 - RNA, 19 nt, Artificial Sequence
  Description of Artificial Sequence: Synthetic oligonucleotide
  Antisense strand to SEQ ID NO: 153814
aaucagccaaggaugcagu

SEQ ID NO: 153816 - RNA, 19 nt, Artificial Sequence
  Description of Artificial Sequence: Synthetic oligonucleotide
  Sense strand starting at position 2919 of SEQ ID NO: 1973
gaaagaagucucugugccu

SEQ ID NO: 153817 - RNA, 19 nt, Artificial Sequence
  Description of Artificial Sequence: Synthetic oligonucleotide
  Antisense strand to SEQ ID NO: 153816
aggcacagagacuucuuuc

SEQ ID NO: 153818 - RNA, 19 nt, Artificial Sequence
  Description of Artificial Sequence: Synthetic oligonucleotide
  Sense strand starting at position 2903 of SEQ ID NO: 1973
acaagauaauguuagggaa

SEQ ID NO: 153819 - RNA, 19 nt, Artificial Sequence
  Description of Artificial Sequence: Synthetic oligonucleotide
  Antisense strand to SEQ ID NO: 153818
uucccuaacauuaucuugu

SEQ ID NO: 153820 - RNA, 19 nt, Artificial Sequence
  Description of Artificial Sequence: Synthetic oligonucleotide
  Sense strand starting at position 2843 of SEQ ID NO: 1973
gaaguagggcucuguaauu

SEQ ID NO: 153821 - RNA, 19 nt, Artificial Sequence
  Description of Artificial Sequence: Synthetic oligonucleotide
  Antisense strand to SEQ ID NO: 153820
aauuacagagcccuacuuc

SEQ ID NO: 153822 - RNA, 19 nt, Artificial Sequence
  Description of Artificial Sequence: Synthetic oligonucleotide
  Sense strand starting at position 2829 of SEQ ID NO: 1973
gugugagagacccagaagu

SEQ ID NO: 153823 - RNA, 19 nt, Artificial Sequence
  Description of Artificial Sequence: Synthetic oligonucleotide
  Antisense strand to SEQ ID NO: 153822
acuucugggucucucacac

SEQ ID NO: 153824 - RNA, 19 nt, Artificial Sequence
  Description of Artificial Sequence: Synthetic oligonucleotide
  Sense strand starting at position 2794 of SEQ ID NO: 1973
ggccacauuccugacagau

SEQ ID NO: 153825 - RNA, 19 nt, Artificial Sequence
  Description of Artificial Sequence: Synthetic oligonucleotide
  Antisense strand to SEQ ID NO: 153824
aucugucaggaauguggcc

SEQ ID NO: 153826 - RNA, 19 nt, Artificial Sequence
  Description of Artificial Sequence: Synthetic oligonucleotide
  Sense strand starting at position 2728 of SEQ ID NO: 1973
gcuuaucacucccuaggga

SEQ ID NO: 153827 - RNA, 19 nt, Artificial Sequence
  Description of Artificial Sequence: Synthetic oligonucleotide
  Antisense strand to SEQ ID NO: 153826
ucccuagggagugauaagc

SEQ ID NO: 153828 - RNA, 19 nt, Artificial Sequence
  Description of Artificial Sequence: Synthetic oligonucleotide
  Sense strand starting at position 2390 of SEQ ID NO: 1973
augguaggugcuugacaaa

SEQ ID NO: 153829 - RNA, 19 nt, Artificial Sequence
  Description of Artificial Sequence: Synthetic oligonucleotide
  Antisense strand to SEQ ID NO: 153828
uuugucaagcaccuaccau

SEQ ID NO: 153830 - RNA, 19 nt, Artificial Sequence
  Description of Artificial Sequence: Synthetic oligonucleotide
  Sense strand starting at position 2389 of SEQ ID NO: 1973
caugguaggugcuugacaa

SEQ ID NO: 153831 - RNA, 19 nt, Artificial Sequence
  Description of Artificial Sequence: Synthetic oligonucleotide
  Antisense strand to SEQ ID NO: 153830
uugucaagcaccuaccaug

SEQ ID NO: 153832 - RNA, 19 nt, Artificial Sequence
  Description of Artificial Sequence: Synthetic oligonucleotide
  Sense strand starting at position 2377 of SEQ ID NO: 1973
gugguuacaacacauggua

SEQ ID NO: 153833 - RNA, 19 nt, Artificial Sequence
  Description of Artificial Sequence: Synthetic oligonucleotide
  Antisense strand to SEQ ID NO: 153832
uaccauguguuguaaccac

SEQ ID NO: 153834 - RNA, 19 nt, Artificial Sequence
  Description of Artificial Sequence: Synthetic oligonucleotide
  Sense strand starting at position 2344 of SEQ ID NO: 1973
cggucuguaaagugaggau

SEQ ID NO: 153835 - RNA, 19 nt, Artificial Sequence
  Description of Artificial Sequence: Synthetic oligonucleotide
  Antisense strand to SEQ ID NO: 153834
auccucacuuuacagaccg

SEQ ID NO: 153836 - RNA, 19 nt, Artificial Sequence
  Description of Artificial Sequence: Synthetic oligonucleotide
  Sense strand starting at position 2299 of SEQ ID NO: 1973
aagaaacuucggcaaguca

SEQ ID NO: 153837 - RNA, 19 nt, Artificial Sequence
  Description of Artificial Sequence: Synthetic oligonucleotide
  Antisense strand to SEQ ID NO: 153836
ugacuugccgaaguuucuu

SEQ ID NO: 153838 - RNA, 19 nt, Artificial Sequence
  Description of Artificial Sequence: Synthetic oligonucleotide
  Sense strand starting at position 2146 of SEQ ID NO: 1973
gaaaucgaccucgguuuga

SEQ ID NO: 153839 - RNA, 19 nt, Artificial Sequence
  Description of Artificial Sequence: Synthetic oligonucleotide
  Antisense strand to SEQ ID NO: 153838
ucaaaccgaggucgauuuc

SEQ ID NO: 153840 - RNA, 19 nt, Artificial Sequence
  Description of Artificial Sequence: Synthetic oligonucleotide
  Sense strand starting at position 2135 of SEQ ID NO: 1973
gugagcguucggaaaucga

SEQ ID NO: 153841 - RNA, 19 nt, Artificial Sequence
  Description of Artificial Sequence: Synthetic oligonucleotide
  Antisense strand to SEQ ID NO: 153840
ucgauuuccgaacgcucac

SEQ ID NO: 153842 - RNA, 19 nt, Artificial Sequence
  Description of Artificial Sequence: Synthetic oligonucleotide
  Sense strand starting at position 2116 of SEQ ID NO: 1973
gcucgcauccugcuccaaa

SEQ ID NO: 153843 - RNA, 19 nt, Artificial Sequence
  Description of Artificial Sequence: Synthetic oligonucleotide
  Antisense strand to SEQ ID NO: 153842
uuuggagcaggaugcgagc

SEQ ID NO: 153844 - RNA, 19 nt, Artificial Sequence
  Description of Artificial Sequence: Synthetic oligonucleotide
  Sense strand starting at position 224 of SEQ ID NO: 1973
ugagaaaggcccuguuacu

SEQ ID NO: 153845 - RNA, 19 nt, Artificial Sequence
  Description of Artificial Sequence: Synthetic oligonucleotide
  Antisense strand to SEQ ID NO: 153844
aguaacagggccuuucuca

SEQ ID NO: 153846 - RNA, 19 nt, Artificial Sequence
  Description of Artificial Sequence: Synthetic oligonucleotide
  Sense strand starting at position 210 of SEQ ID NO: 1973
ucccaacagcauugugaga

SEQ ID NO: 153847 - RNA, 19 nt, Artificial Sequence
  Description of Artificial Sequence: Synthetic oligonucleotide
  Antisense strand to SEQ ID NO: 153846
ucucacaaugcuguuggga

SEQ ID NO: 153848 - RNA, 19 nt, Artificial Sequence
  Description of Artificial Sequence: Synthetic oligonucleotide
  Sense strand starting at position 139 of SEQ ID NO: 1973
ccaccuuuccuugauguua

SEQ ID NO: 153849 - RNA, 19 nt, Artificial Sequence
  Description of Artificial Sequence: Synthetic oligonucleotide
  Antisense strand to SEQ ID NO: 153848
uaacaucaaggaaaggugg

SEQ ID NO: 153850 - RNA, 19 nt, Artificial Sequence
  Description of Artificial Sequence: Synthetic oligonucleotide
  Sense strand starting at position 138 of SEQ ID NO: 1973
cccaccuuuccuugauguu

SEQ ID NO: 153851 - RNA, 19 nt, Artificial Sequence
  Description of Artificial Sequence: Synthetic oligonucleotide
  Antisense strand to SEQ ID NO: 153850
aacaucaaggaaagguggg

SEQ ID NO: 153852 - RNA, 19 nt, Artificial Sequence
  Description of Artificial Sequence: Synthetic oligonucleotide
  Sense strand starting at position 109 of SEQ ID NO: 1973
uuugcauugucuccaaaug

SEQ ID NO: 153853 - RNA, 19 nt, Artificial Sequence
  Description of Artificial Sequence: Synthetic oligonucleotide
  Antisense strand to SEQ ID NO: 153852
cauuuggagacaaugcaaa

SEQ ID NO: 153854 - RNA, 19 nt, Artificial Sequence
  Description of Artificial Sequence: Synthetic oligonucleotide
  Sense strand starting at position 74 of SEQ ID NO: 1973
uguagaaugcuguaacuca

SEQ ID NO: 153855 - RNA, 19 nt, Artificial Sequence
  Description of Artificial Sequence: Synthetic oligonucleotide
  Antisense strand to SEQ ID NO: 153854
ugaguuacagcauucuaca

SEQ ID NO: 153856 - RNA, 19 nt, Artificial Sequence
  Description of Artificial Sequence: Synthetic oligonucleotide
  Sense strand starting at position 69 of SEQ ID NO: 1973
agcauuguagaaugcugua

SEQ ID NO: 153857 - RNA, 19 nt, Artificial Sequence
  Description of Artificial Sequence: Synthetic oligonucleotide
  Antisense strand to SEQ ID NO: 153856
uacagcauucuacaaugcu

SEQ ID NO: 153858 - RNA, 19 nt, Artificial Sequence
  Description of Artificial Sequence: Synthetic oligonucleotide
  Sense strand starting at position 62 of SEQ ID NO: 1973
ugcucucagcauuguagaa

SEQ ID NO: 153859 - RNA, 19 nt, Artificial Sequence
  Description of Artificial Sequence: Synthetic oligonucleotide
  Antisense strand to SEQ ID NO: 153858
uucuacaaugcugagagca

SEQ ID NO: 153860 - RNA, 19 nt, Artificial Sequence
  Description of Artificial Sequence: Synthetic oligonucleotide
  Sense strand starting at position 59 of SEQ ID NO: 1973
aucugcucucagcauugua

SEQ ID NO: 153861 - RNA, 19 nt, Artificial Sequence
  Description of Artificial Sequence: Synthetic oligonucleotide
  Antisense strand to SEQ ID NO: 153860
uacaaugcugagagcagau

SEQ ID NO: 153862 - RNA, 19 nt, Artificial Sequence
  Description of Artificial Sequence: Synthetic oligonucleotide
  Sense strand starting at position 22 of SEQ ID NO: 1973
gucuucucaucuguaaaca

SEQ ID NO: 153863 - RNA, 19 nt, Artificial Sequence
  Description of Artificial Sequence: Synthetic oligonucleotide
  Antisense strand to SEQ ID NO: 153862
uguuuacagaugagaagac

SEQ ID NO: 153864 - RNA, 19 nt, Artificial Sequence
  Description of Artificial Sequence: Synthetic oligonucleotide
  Sense strand starting at position 340 of SEQ ID NO: 1977
caauaucugugugcugaag

SEQ ID NO: 153865 - RNA, 19 nt, Artificial Sequence
  Description of Artificial Sequence: Synthetic oligonucleotide
  Antisense strand to SEQ ID NO: 153864
cuucagcacacagauauug

SEQ ID NO: 153866 - RNA, 19 nt, Artificial Sequence
  Description of Artificial Sequence: Synthetic oligonucleotide
  Sense strand starting at position 351 of SEQ ID NO: 1977
ugcugaagauuccuacauc

SEQ ID NO: 153867 - RNA, 19 nt, Artificial Sequence
  Description of Artificial Sequence: Synthetic oligonucleotide
  Antisense strand to SEQ ID NO: 153866
gauguaggaaucuucagca

SEQ ID NO: 153868 - RNA, 19 nt, Artificial Sequence
  Description of Artificial Sequence: Synthetic oligonucleotide
  Sense strand starting at position 521 of SEQ ID NO: 1977
cagugaaucccguacagaa

SEQ ID NO: 153869 - RNA, 19 nt, Artificial Sequence
  Description of Artificial Sequence: Synthetic oligonucleotide
  Antisense strand to SEQ ID NO: 153868
uucuguacgggauucacug

SEQ ID NO: 153870 - RNA, 19 nt, Artificial Sequence
  Description of Artificial Sequence: Synthetic oligonucleotide
  Sense strand starting at position 531 of SEQ ID NO: 1977
cguacagaaaccugagaau

SEQ ID NO: 153871 - RNA, 19 nt, Artificial Sequence
  Description of Artificial Sequence: Synthetic oligonucleotide
  Antisense strand to SEQ ID NO: 153870
auucucagguuucuguacg

SEQ ID NO: 153872 - RNA, 19 nt, Artificial Sequence
  Description of Artificial Sequence: Synthetic oligonucleotide
  Sense strand starting at position 543 of SEQ ID NO: 1977
ugagaaucacccuggauuc

SEQ ID NO: 153873 - RNA, 19 nt, Artificial Sequence
  Description of Artificial Sequence: Synthetic oligonucleotide
  Antisense strand to SEQ ID NO: 153872
gaauccagggugauucuca

SEQ ID NO: 153874 - RNA, 19 nt, Artificial Sequence
  Description of Artificial Sequence: Synthetic oligonucleotide
  Sense strand starting at position 800 of SEQ ID NO: 1977
gagauaaagucucuuguaa

SEQ ID NO: 153875 - RNA, 19 nt, Artificial Sequence
  Description of Artificial Sequence: Synthetic oligonucleotide
  Antisense strand to SEQ ID NO: 153874
uuacaagagacuuuaucuc

SEQ ID NO: 153876 - RNA, 19 nt, Artificial Sequence
  Description of Artificial Sequence: Synthetic oligonucleotide
  Sense strand starting at position 921 of SEQ ID NO: 1977
caucuucuccugggagaga

SEQ ID NO: 153877 - RNA, 19 nt, Artificial Sequence
  Description of Artificial Sequence: Synthetic oligonucleotide
  Antisense strand to SEQ ID NO: 153876
ucucucccaggagaagaug

SEQ ID NO: 153878 - RNA, 19 nt, Artificial Sequence
  Description of Artificial Sequence: Synthetic oligonucleotide
  Sense strand starting at position 1255 of SEQ ID NO: 1977
ggcuaugaagcacaaauua

SEQ ID NO: 153879 - RNA, 19 nt, Artificial Sequence
  Description of Artificial Sequence: Synthetic oligonucleotide
  Antisense strand to SEQ ID NO: 153878
uaauuugugcuucauagcc

SEQ ID NO: 153880 - RNA, 19 nt, Artificial Sequence
  Description of Artificial Sequence: Synthetic oligonucleotide
  Sense strand starting at position 1360 of SEQ ID NO: 1977
ggacaacucucauugugag

SEQ ID NO: 153881 - RNA, 19 nt, Artificial Sequence
  Description of Artificial Sequence: Synthetic oligonucleotide
  Antisense strand to SEQ ID NO: 153880
cucacaaugagaguugucc

SEQ ID NO: 153882 - RNA, 19 nt, Artificial Sequence
  Description of Artificial Sequence: Synthetic oligonucleotide
  Sense strand starting at position 1403 of SEQ ID NO: 1977
agucaaaggucacugggau

SEQ ID NO: 153883 - RNA, 19 nt, Artificial Sequence
  Description of Artificial Sequence: Synthetic oligonucleotide
  Antisense strand to SEQ ID NO: 153882
aucccagugaccuuugacu

SEQ ID NO: 153884 - RNA, 19 nt, Artificial Sequence
  Description of Artificial Sequence: Synthetic oligonucleotide
  Sense strand starting at position 1404 of SEQ ID NO: 1977
gucaaaggucacugggauu

SEQ ID NO: 153885 - RNA, 19 nt, Artificial Sequence
  Description of Artificial Sequence: Synthetic oligonucleotide
  Antisense strand to SEQ ID NO: 153884
aaucccagugaccuuugac

SEQ ID NO: 153886 - RNA, 19 nt, Artificial Sequence
  Description of Artificial Sequence: Synthetic oligonucleotide
  Sense strand starting at position 1441 of SEQ ID NO: 1977
gguggaucugaguggaaga

SEQ ID NO: 153887 - RNA, 19 nt, Artificial Sequence
  Description of Artificial Sequence: Synthetic oligonucleotide
  Antisense strand to SEQ ID NO: 153886
ucuuccacucagauccacc

SEQ ID NO: 153888 - RNA, 19 nt, Artificial Sequence
  Description of Artificial Sequence: Synthetic oligonucleotide
  Sense strand starting at position 1442 of SEQ ID NO: 1977
guggaucugaguggaagaa

SEQ ID NO: 153889 - RNA, 19 nt, Artificial Sequence
  Description of Artificial Sequence: Synthetic oligonucleotide
  Antisense strand to SEQ ID NO: 153888
uucuuccacucagauccac

SEQ ID NO: 153890 - RNA, 19 nt, Artificial Sequence
  Description of Artificial Sequence: Synthetic oligonucleotide
  Sense strand starting at position 1482 of SEQ ID NO: 1977
gguccucauggguagcauu

SEQ ID NO: 153891 - RNA, 19 nt, Artificial Sequence
  Description of Artificial Sequence: Synthetic oligonucleotide
  Antisense strand to SEQ ID NO: 153890
aaugcuacccaugaggacc

SEQ ID NO: 153892 - RNA, 19 nt, Artificial Sequence
  Description of Artificial Sequence: Synthetic oligonucleotide
  Sense strand starting at position 1502 of SEQ ID NO: 1977
gcucucuucccggauggau

SEQ ID NO: 153893 - RNA, 19 nt, Artificial Sequence
  Description of Artificial Sequence: Synthetic oligonucleotide
  Antisense strand to SEQ ID NO: 153892
auccauccgggaagagagc

SEQ ID NO: 153894 - RNA, 19 nt, Artificial Sequence
  Description of Artificial Sequence: Synthetic oligonucleotide
  Sense strand starting at position 1585 of SEQ ID NO: 1977
gcaucuuuacaccagggau

SEQ ID NO: 153895 - RNA, 19 nt, Artificial Sequence
  Description of Artificial Sequence: Synthetic oligonucleotide
  Antisense strand to SEQ ID NO: 153894
aucccugguguaaagaugc

SEQ ID NO: 153896 - RNA, 19 nt, Artificial Sequence
  Description of Artificial Sequence: Synthetic oligonucleotide
  Sense strand starting at position 1707 of SEQ ID NO: 1977
caaacaggucuuugacugu

SEQ ID NO: 153897 - RNA, 19 nt, Artificial Sequence
  Description of Artificial Sequence: Synthetic oligonucleotide
  Antisense strand to SEQ ID NO: 153896
acagucaaagaccuguuug

SEQ ID NO: 153898 - RNA, 19 nt, Artificial Sequence
  Description of Artificial Sequence: Synthetic oligonucleotide
  Sense strand starting at position 1711 of SEQ ID NO: 1977
caggucuuugacuguaacu

SEQ ID NO: 153899 - RNA, 19 nt, Artificial Sequence
  Description of Artificial Sequence: Synthetic oligonucleotide
  Antisense strand to SEQ ID NO: 153898
aguuacagucaaagaccug

SEQ ID NO: 153900 - RNA, 19 nt, Artificial Sequence
  Description of Artificial Sequence: Synthetic oligonucleotide
  Sense strand starting at position 1713 of SEQ ID NO: 1977
ggucuuugacuguaacuac

SEQ ID NO: 153901 - RNA, 19 nt, Artificial Sequence
  Description of Artificial Sequence: Synthetic oligonucleotide
  Antisense strand to SEQ ID NO: 153900
guaguuacagucaaagacc

SEQ ID NO: 153902 - RNA, 19 nt, Artificial Sequence
  Description of Artificial Sequence: Synthetic oligonucleotide
  Sense strand starting at position 1739 of SEQ ID NO: 1977
agggccuggucuucucaaa

SEQ ID NO: 153903 - RNA, 19 nt, Artificial Sequence
  Description of Artificial Sequence: Synthetic oligonucleotide
  Antisense strand to SEQ ID NO: 153902
uuugagaagaccaggcccu

SEQ ID NO: 153904 - RNA, 19 nt, Artificial Sequence
  Description of Artificial Sequence: Synthetic oligonucleotide
  Sense strand starting at position 1755 of SEQ ID NO: 1977
aaagguguuggaggucauu

SEQ ID NO: 153905 - RNA, 19 nt, Artificial Sequence
  Description of Artificial Sequence: Synthetic oligonucleotide
  Antisense strand to SEQ ID NO: 153904
aaugaccuccaacaccuuu

SEQ ID NO: 153906 - RNA, 19 nt, Artificial Sequence
  Description of Artificial Sequence: Synthetic oligonucleotide
  Sense strand starting at position 1779 of SEQ ID NO: 1977
gaguccuuuggaggucaca

SEQ ID NO: 153907 - RNA, 19 nt, Artificial Sequence
  Description of Artificial Sequence: Synthetic oligonucleotide
  Antisense strand to SEQ ID NO: 153906
ugugaccuccaaaggacuc

SEQ ID NO: 153908 - RNA, 19 nt, Artificial Sequence
  Description of Artificial Sequence: Synthetic oligonucleotide
  Sense strand starting at position 1873 of SEQ ID NO: 1977
ggaauacauggccgcuaau

SEQ ID NO: 153909 - RNA, 19 nt, Artificial Sequence
  Description of Artificial Sequence: Synthetic oligonucleotide
  Antisense strand to SEQ ID NO: 153908
auuagcggccauguauucc

SEQ ID NO: 153910 - RNA, 19 nt, Artificial Sequence
  Description of Artificial Sequence: Synthetic oligonucleotide
  Sense strand starting at position 1914 of SEQ ID NO: 1977
gagauagugugaucugagg

SEQ ID NO: 153911 - RNA, 19 nt, Artificial Sequence
  Description of Artificial Sequence: Synthetic oligonucleotide
  Antisense strand to SEQ ID NO: 153910
ccucagaucacacuaucuc

SEQ ID NO: 153912 - RNA, 19 nt, Artificial Sequence
  Description of Artificial Sequence: Synthetic oligonucleotide
  Sense strand starting at position 1916 of SEQ ID NO: 1977
gauagugugaucugaggca

SEQ ID NO: 153913 - RNA, 19 nt, Artificial Sequence
  Description of Artificial Sequence: Synthetic oligonucleotide
  Antisense strand to SEQ ID NO: 153912
ugccucagaucacacuauc

SEQ ID NO: 153914 - RNA, 19 nt, Artificial Sequence
  Description of Artificial Sequence: Synthetic oligonucleotide
  Sense strand starting at position 2071 of SEQ ID NO: 1977
cccaguguuguuuaauuag

SEQ ID NO: 153915 - RNA, 19 nt, Artificial Sequence
  Description of Artificial Sequence: Synthetic oligonucleotide
  Antisense strand to SEQ ID NO: 153914
cuaauuaaacaacacuggg

SEQ ID NO: 153916 - RNA, 19 nt, Artificial Sequence
  Description of Artificial Sequence: Synthetic oligonucleotide
  Sense strand starting at position 2077 of SEQ ID NO: 1977
guuguuuaauuaguagaga

SEQ ID NO: 153917 - RNA, 19 nt, Artificial Sequence
  Description of Artificial Sequence: Synthetic oligonucleotide
  Antisense strand to SEQ ID NO: 153916
ucucuacuaauuaaacaac

SEQ ID NO: 153918 - RNA, 19 nt, Artificial Sequence
  Description of Artificial Sequence: Synthetic oligonucleotide
  Sense strand starting at position 2080 of SEQ ID NO: 1977
guuuaauuaguagagaagu

SEQ ID NO: 153919 - RNA, 19 nt, Artificial Sequence
  Description of Artificial Sequence: Synthetic oligonucleotide
  Antisense strand to SEQ ID NO: 153918
acuucucuacuaauuaaac

SEQ ID NO: 153920 - RNA, 19 nt, Artificial Sequence
  Description of Artificial Sequence: Synthetic oligonucleotide
  Sense strand starting at position 2206 of SEQ ID NO: 1977
cccucaaacuugguuagga

SEQ ID NO: 153921 - RNA, 19 nt, Artificial Sequence
  Description of Artificial Sequence: Synthetic oligonucleotide
  Antisense strand to SEQ ID NO: 153920
uccuaaccaaguuugaggg

SEQ ID NO: 153922 - RNA, 19 nt, Artificial Sequence
  Description of Artificial Sequence: Synthetic oligonucleotide
  Sense strand starting at position 2207 of SEQ ID NO: 1977
ccucaaacuugguuaggaa

SEQ ID NO: 153923 - RNA, 19 nt, Artificial Sequence
  Description of Artificial Sequence: Synthetic oligonucleotide
  Antisense strand to SEQ ID NO: 153922
uuccuaaccaaguuugagg

SEQ ID NO: 153924 - RNA, 19 nt, Artificial Sequence
  Description of Artificial Sequence: Synthetic oligonucleotide
  Sense strand starting at position 2485 of SEQ ID NO: 1977
augccaagcgcguuucuaa

SEQ ID NO: 153925 - RNA, 19 nt, Artificial Sequence
  Description of Artificial Sequence: Synthetic oligonucleotide
  Antisense strand to SEQ ID NO: 153924
uuagaaacgcgcuuggcau

SEQ ID NO: 153926 - RNA, 19 nt, Artificial Sequence
  Description of Artificial Sequence: Synthetic oligonucleotide
  Sense strand starting at position 2585 of SEQ ID NO: 1977
cguacaacugcugaaauaa

SEQ ID NO: 153927 - RNA, 19 nt, Artificial Sequence
  Description of Artificial Sequence: Synthetic oligonucleotide
  Antisense strand to SEQ ID NO: 153926
uuauuucagcaguuguacg

SEQ ID NO: 153928 - RNA, 19 nt, Artificial Sequence
  Description of Artificial Sequence: Synthetic oligonucleotide
  Sense strand starting at position 2779 of SEQ ID NO: 1977
ccugcugugugaucaagga

SEQ ID NO: 153929 - RNA, 19 nt, Artificial Sequence
  Description of Artificial Sequence: Synthetic oligonucleotide
  Antisense strand to SEQ ID NO: 153928
uccuugaucacacagcagg

SEQ ID NO: 153930 - RNA, 19 nt, Artificial Sequence
  Description of Artificial Sequence: Synthetic oligonucleotide
  Sense strand starting at position 2813 of SEQ ID NO: 1977
guugcagucauaggcauuu

SEQ ID NO: 153931 - RNA, 19 nt, Artificial Sequence
  Description of Artificial Sequence: Synthetic oligonucleotide
  Antisense strand to SEQ ID NO: 153930
aaaugccuaugacugcaac

SEQ ID NO: 153932 - RNA, 19 nt, Artificial Sequence
  Description of Artificial Sequence: Synthetic oligonucleotide
  Sense strand starting at position 3631 of SEQ ID NO: 1977
gggccauaugaauaucuuu

SEQ ID NO: 153933 - RNA, 19 nt, Artificial Sequence
  Description of Artificial Sequence: Synthetic oligonucleotide
  Antisense strand to SEQ ID NO: 153932
aaagauauucauauggccc

SEQ ID NO: 153934 - RNA, 19 nt, Artificial Sequence
  Description of Artificial Sequence: Synthetic oligonucleotide
  Sense strand starting at position 3679 of SEQ ID NO: 1977
auacaaagaccuugagguu

SEQ ID NO: 153935 - RNA, 19 nt, Artificial Sequence
  Description of Artificial Sequence: Synthetic oligonucleotide
  Antisense strand to SEQ ID NO: 153934
aaccucaaggucuuuguau

SEQ ID NO: 153936 - RNA, 19 nt, Artificial Sequence
  Description of Artificial Sequence: Synthetic oligonucleotide
  Sense strand starting at position 3816 of SEQ ID NO: 1977
uggugaacaucgcuggaaa

SEQ ID NO: 153937 - RNA, 19 nt, Artificial Sequence
  Description of Artificial Sequence: Synthetic oligonucleotide
  Antisense strand to SEQ ID NO: 153936
uuuccagcgauguucacca

SEQ ID NO: 153938 - RNA, 19 nt, Artificial Sequence
  Description of Artificial Sequence: Synthetic oligonucleotide
  Sense strand starting at position 3852 of SEQ ID NO: 1977
cuaccaggucaaggaauua

SEQ ID NO: 153939 - RNA, 19 nt, Artificial Sequence
  Description of Artificial Sequence: Synthetic oligonucleotide
  Antisense strand to SEQ ID NO: 153938
uaauuccuugaccugguag

SEQ ID NO: 153940 - RNA, 19 nt, Artificial Sequence
  Description of Artificial Sequence: Synthetic oligonucleotide
  Sense strand starting at position 3880 of SEQ ID NO: 1977
acaucaggguuuguguuua

SEQ ID NO: 153941 - RNA, 19 nt, Artificial Sequence
  Description of Artificial Sequence: Synthetic oligonucleotide
  Antisense strand to SEQ ID NO: 153940
uaaacacaaacccugaugu

SEQ ID NO: 153942 - RNA, 19 nt, Artificial Sequence
  Description of Artificial Sequence: Synthetic oligonucleotide
  Sense strand starting at position 3884 of SEQ ID NO: 1977
caggguuuguguuuaauuu

SEQ ID NO: 153943 - RNA, 19 nt, Artificial Sequence
  Description of Artificial Sequence: Synthetic oligonucleotide
  Antisense strand to SEQ ID NO: 153942
aaauuaaacacaaacccug

SEQ ID NO: 153944 - RNA, 19 nt, Artificial Sequence
  Description of Artificial Sequence: Synthetic oligonucleotide
  Sense strand starting at position 3943 of SEQ ID NO: 1978
uacacuuggcugugugaaa

SEQ ID NO: 153945 - RNA, 19 nt, Artificial Sequence
  Description of Artificial Sequence: Synthetic oligonucleotide
  Antisense strand to SEQ ID NO: 153944
uuucacacagccaagugua

SEQ ID NO: 153946 - RNA, 19 nt, Artificial Sequence
  Description of Artificial Sequence: Synthetic oligonucleotide
  Sense strand starting at position 3863 of SEQ ID NO: 1978
ggaggcauggcuuauuaug

SEQ ID NO: 153947 - RNA, 19 nt, Artificial Sequence
  Description of Artificial Sequence: Synthetic oligonucleotide
  Antisense strand to SEQ ID NO: 153946
cauaauaagccaugccucc

SEQ ID NO: 153948 - RNA, 19 nt, Artificial Sequence
  Description of Artificial Sequence: Synthetic oligonucleotide
  Sense strand starting at position 3705 of SEQ ID NO: 1978
ccagguuaagaguagagua

SEQ ID NO: 153949 - RNA, 19 nt, Artificial Sequence
  Description of Artificial Sequence: Synthetic oligonucleotide
  Antisense strand to SEQ ID NO: 153948
uacucuacucuuaaccugg

SEQ ID NO: 153950 - RNA, 19 nt, Artificial Sequence
  Description of Artificial Sequence: Synthetic oligonucleotide
  Sense strand starting at position 3699 of SEQ ID NO: 1978
gcauguccagguuaagagu

SEQ ID NO: 153951 - RNA, 19 nt, Artificial Sequence
  Description of Artificial Sequence: Synthetic oligonucleotide
  Antisense strand to SEQ ID NO: 153950
acucuuaaccuggacaugc

SEQ ID NO: 153952 - RNA, 19 nt, Artificial Sequence
  Description of Artificial Sequence: Synthetic oligonucleotide
  Sense strand starting at position 3613 of SEQ ID NO: 1978
auugcauuggcucaugcau

SEQ ID NO: 153953 - RNA, 19 nt, Artificial Sequence
  Description of Artificial Sequence: Synthetic oligonucleotide
  Antisense strand to SEQ ID NO: 153952
augcaugagccaaugcaau

SEQ ID NO: 153954 - RNA, 19 nt, Artificial Sequence
  Description of Artificial Sequence: Synthetic oligonucleotide
  Sense strand starting at position 3568 of SEQ ID NO: 1978
uugggaauugggcauccau

SEQ ID NO: 153955 - RNA, 19 nt, Artificial Sequence
  Description of Artificial Sequence: Synthetic oligonucleotide
  Antisense strand to SEQ ID NO: 153954
auggaugcccaauucccaa

SEQ ID NO: 153956 - RNA, 19 nt, Artificial Sequence
  Description of Artificial Sequence: Synthetic oligonucleotide
  Sense strand starting at position 3540 of SEQ ID NO: 1978
aagacauuccaggguugca

SEQ ID NO: 153957 - RNA, 19 nt, Artificial Sequence
  Description of Artificial Sequence: Synthetic oligonucleotide
  Antisense strand to SEQ ID NO: 153956
ugcaacccuggaaugucuu

SEQ ID NO: 153958 - RNA, 19 nt, Artificial Sequence
  Description of Artificial Sequence: Synthetic oligonucleotide
  Sense strand starting at position 3470 of SEQ ID NO: 1978
agagauggcaauuaugcuu

SEQ ID NO: 153959 - RNA, 19 nt, Artificial Sequence
  Description of Artificial Sequence: Synthetic oligonucleotide
  Antisense strand to SEQ ID NO: 153958
aagcauaauugccaucucu

SEQ ID NO: 153960 - RNA, 19 nt, Artificial Sequence
  Description of Artificial Sequence: Synthetic oligonucleotide
  Sense strand starting at position 3463 of SEQ ID NO: 1978
gaagcugagagauggcaau

SEQ ID NO: 153961 - RNA, 19 nt, Artificial Sequence
  Description of Artificial Sequence: Synthetic oligonucleotide
  Antisense strand to SEQ ID NO: 153960
auugccaucucucagcuuc

SEQ ID NO: 153962 - RNA, 19 nt, Artificial Sequence
  Description of Artificial Sequence: Synthetic oligonucleotide
  Sense strand starting at position 3456 of SEQ ID NO: 1978
guauuaggaagcugagaga

SEQ ID NO: 153963 - RNA, 19 nt, Artificial Sequence
  Description of Artificial Sequence: Synthetic oligonucleotide
  Antisense strand to SEQ ID NO: 153962
ucucucagcuuccuaauac

SEQ ID NO: 153964 - RNA, 19 nt, Artificial Sequence
  Description of Artificial Sequence: Synthetic oligonucleotide
  Sense strand starting at position 3413 of SEQ ID NO: 1978
uuuguugaacuuuguacau

SEQ ID NO: 153965 - RNA, 19 nt, Artificial Sequence
  Description of Artificial Sequence: Synthetic oligonucleotide
  Antisense strand to SEQ ID NO: 153964
auguacaaaguucaacaaa

SEQ ID NO: 153966 - RNA, 19 nt, Artificial Sequence
  Description of Artificial Sequence: Synthetic oligonucleotide
  Sense strand starting at position 3303 of SEQ ID NO: 1978
cugacaugcaguuaaguga

SEQ ID NO: 153967 - RNA, 19 nt, Artificial Sequence
  Description of Artificial Sequence: Synthetic oligonucleotide
  Antisense strand to SEQ ID NO: 153966
ucacuuaacugcaugucag

SEQ ID NO: 153968 - RNA, 19 nt, Artificial Sequence
  Description of Artificial Sequence: Synthetic oligonucleotide
  Sense strand starting at position 3297 of SEQ ID NO: 1978
gggugacugacaugcaguu

SEQ ID NO: 153969 - RNA, 19 nt, Artificial Sequence
  Description of Artificial Sequence: Synthetic oligonucleotide
  Antisense strand to SEQ ID NO: 153968
aacugcaugucagucaccc

SEQ ID NO: 153970 - RNA, 19 nt, Artificial Sequence
  Description of Artificial Sequence: Synthetic oligonucleotide
  Sense strand starting at position 3291 of SEQ ID NO: 1978
aaacuugggugacugacau

SEQ ID NO: 153971 - RNA, 19 nt, Artificial Sequence
  Description of Artificial Sequence: Synthetic oligonucleotide
  Antisense strand to SEQ ID NO: 153970
augucagucacccaaguuu

SEQ ID NO: 153972 - RNA, 19 nt, Artificial Sequence
  Description of Artificial Sequence: Synthetic oligonucleotide
  Sense strand starting at position 3187 of SEQ ID NO: 1978
ggauuagcaucugcaaauu

SEQ ID NO: 153973 - RNA, 19 nt, Artificial Sequence
  Description of Artificial Sequence: Synthetic oligonucleotide
  Antisense strand to SEQ ID NO: 153972
aauuugcagaugcuaaucc

SEQ ID NO: 153974 - RNA, 19 nt, Artificial Sequence
  Description of Artificial Sequence: Synthetic oligonucleotide
  Sense strand starting at position 3080 of SEQ ID NO: 1978
ugauccuccgacugugaaa

SEQ ID NO: 153975 - RNA, 19 nt, Artificial Sequence
  Description of Artificial Sequence: Synthetic oligonucleotide
  Antisense strand to SEQ ID NO: 153974
uuucacagucggaggauca

SEQ ID NO: 153976 - RNA, 19 nt, Artificial Sequence
  Description of Artificial Sequence: Synthetic oligonucleotide
  Sense strand starting at position 2890 of SEQ ID NO: 1978
cauaacuucugucuaggga

SEQ ID NO: 153977 - RNA, 19 nt, Artificial Sequence
  Description of Artificial Sequence: Synthetic oligonucleotide
  Antisense strand to SEQ ID NO: 153976
ucccuagacagaaguuaug

SEQ ID NO: 153978 - RNA, 19 nt, Artificial Sequence
  Description of Artificial Sequence: Synthetic oligonucleotide
  Sense strand starting at position 2847 of SEQ ID NO: 1978
cuccuauaguggccucaga

SEQ ID NO: 153979 - RNA, 19 nt, Artificial Sequence
  Description of Artificial Sequence: Synthetic oligonucleotide
  Antisense strand to SEQ ID NO: 153978
ucugaggccacuauaggag

SEQ ID NO: 153980 - RNA, 19 nt, Artificial Sequence
  Description of Artificial Sequence: Synthetic oligonucleotide
  Sense strand starting at position 2789 of SEQ ID NO: 1978
ugcucaagagaauguaauu

SEQ ID NO: 153981 - RNA, 19 nt, Artificial Sequence
  Description of Artificial Sequence: Synthetic oligonucleotide
  Antisense strand to SEQ ID NO: 153980
aauuacauucucuugagca

SEQ ID NO: 153982 - RNA, 19 nt, Artificial Sequence
  Description of Artificial Sequence: Synthetic oligonucleotide
  Sense strand starting at position 2784 of SEQ ID NO: 1978
guccuugcucaagagaaug

SEQ ID NO: 153983 - RNA, 19 nt, Artificial Sequence
  Description of Artificial Sequence: Synthetic oligonucleotide
  Antisense strand to SEQ ID NO: 153982
cauucucuugagcaaggac

SEQ ID NO: 153984 - RNA, 19 nt, Artificial Sequence
  Description of Artificial Sequence: Synthetic oligonucleotide
  Sense strand starting at position 2781 of SEQ ID NO: 1978
auuguccuugcucaagaga

SEQ ID NO: 153985 - RNA, 19 nt, Artificial Sequence
  Description of Artificial Sequence: Synthetic oligonucleotide
  Antisense strand to SEQ ID NO: 153984
ucucuugagcaaggacaau

SEQ ID NO: 153986 - RNA, 19 nt, Artificial Sequence
  Description of Artificial Sequence: Synthetic oligonucleotide
  Sense strand starting at position 2780 of SEQ ID NO: 1978
gauuguccuugcucaagag

SEQ ID NO: 153987 - RNA, 19 nt, Artificial Sequence
  Description of Artificial Sequence: Synthetic oligonucleotide
  Antisense strand to SEQ ID NO: 153986
cucuugagcaaggacaauc

SEQ ID NO: 153988 - RNA, 19 nt, Artificial Sequence
  Description of Artificial Sequence: Synthetic oligonucleotide
  Sense strand starting at position 2777 of SEQ ID NO: 1978
agagauuguccuugcucaa

SEQ ID NO: 153989 - RNA, 19 nt, Artificial Sequence
  Description of Artificial Sequence: Synthetic oligonucleotide
  Antisense strand to SEQ ID NO: 153988
uugagcaaggacaaucucu

SEQ ID NO: 153990 - RNA, 19 nt, Artificial Sequence
  Description of Artificial Sequence: Synthetic oligonucleotide
  Sense strand starting at position 2776 of SEQ ID NO: 1978
aagagauuguccuugcuca

SEQ ID NO: 153991 - RNA, 19 nt, Artificial Sequence
  Description of Artificial Sequence: Synthetic oligonucleotide
  Antisense strand to SEQ ID NO: 153990
ugagcaaggacaaucucuu

SEQ ID NO: 153992 - RNA, 19 nt, Artificial Sequence
  Description of Artificial Sequence: Synthetic oligonucleotide
  Sense strand starting at position 2774 of SEQ ID NO: 1978
acaagagauuguccuugcu

SEQ ID NO: 153993 - RNA, 19 nt, Artificial Sequence
  Description of Artificial Sequence: Synthetic oligonucleotide
  Antisense strand to SEQ ID NO: 153992
agcaaggacaaucucuugu

SEQ ID NO: 153994 - RNA, 19 nt, Artificial Sequence
  Description of Artificial Sequence: Synthetic oligonucleotide
  Sense strand starting at position 2593 of SEQ ID NO: 1978
augucuuugcaggaccaaa

SEQ ID NO: 153995 - RNA, 19 nt, Artificial Sequence
  Description of Artificial Sequence: Synthetic oligonucleotide
  Antisense strand to SEQ ID NO: 153994
uuugguccugcaaagacau

SEQ ID NO: 153996 - RNA, 19 nt, Artificial Sequence
  Description of Artificial Sequence: Synthetic oligonucleotide
  Sense strand starting at position 2592 of SEQ ID NO: 1978
gaugucuuugcaggaccaa

SEQ ID NO: 153997 - RNA, 19 nt, Artificial Sequence
  Description of Artificial Sequence: Synthetic oligonucleotide
  Antisense strand to SEQ ID NO: 153996
uugguccugcaaagacauc

SEQ ID NO: 153998 - RNA, 19 nt, Artificial Sequence
  Description of Artificial Sequence: Synthetic oligonucleotide
  Sense strand starting at position 2588 of SEQ ID NO: 1978
aacagaugucuuugcagga

SEQ ID NO: 153999 - RNA, 19 nt, Artificial Sequence
  Description of Artificial Sequence: Synthetic oligonucleotide
  Antisense strand to SEQ ID NO: 153998
uccugcaaagacaucuguu

SEQ ID NO: 154000 - RNA, 19 nt, Artificial Sequence
  Description of Artificial Sequence: Synthetic oligonucleotide
  Sense strand starting at position 2416 of SEQ ID NO: 1978
gcuccagccgaauaaugua

SEQ ID NO: 154001 - RNA, 19 nt, Artificial Sequence
  Description of Artificial Sequence: Synthetic oligonucleotide
  Antisense strand to SEQ ID NO: 154000
uacauuauucggcuggagc

SEQ ID NO: 154002 - RNA, 19 nt, Artificial Sequence
  Description of Artificial Sequence: Synthetic oligonucleotide
  Sense strand starting at position 2413 of SEQ ID NO: 1978
uuggcuccagccgaauaau

SEQ ID NO: 154003 - RNA, 19 nt, Artificial Sequence
  Description of Artificial Sequence: Synthetic oligonucleotide
  Antisense strand to SEQ ID NO: 154002
auuauucggcuggagccaa

SEQ ID NO: 154004 - RNA, 19 nt, Artificial Sequence
  Description of Artificial Sequence: Synthetic oligonucleotide
  Sense strand starting at position 2126 of SEQ ID NO: 1978
aggagagguucugcaggau

SEQ ID NO: 154005 - RNA, 19 nt, Artificial Sequence
  Description of Artificial Sequence: Synthetic oligonucleotide
  Antisense strand to SEQ ID NO: 154004
auccugcagaaccucuccu

SEQ ID NO: 154006 - RNA, 19 nt, Artificial Sequence
  Description of Artificial Sequence: Synthetic oligonucleotide
  Sense strand starting at position 2081 of SEQ ID NO: 1978
ugugaaacccgucaauccu

SEQ ID NO: 154007 - RNA, 19 nt, Artificial Sequence
  Description of Artificial Sequence: Synthetic oligonucleotide
  Antisense strand to SEQ ID NO: 154006
aggauugacggguuucaca

SEQ ID NO: 154008 - RNA, 19 nt, Artificial Sequence
  Description of Artificial Sequence: Synthetic oligonucleotide
  Sense strand starting at position 1305 of SEQ ID NO: 1978
gaaggugucagcuacugca

SEQ ID NO: 154009 - RNA, 19 nt, Artificial Sequence
  Description of Artificial Sequence: Synthetic oligonucleotide
  Antisense strand to SEQ ID NO: 154008
ugcaguagcugacaccuuc

SEQ ID NO: 154010 - RNA, 19 nt, Artificial Sequence
  Description of Artificial Sequence: Synthetic oligonucleotide
  Sense strand starting at position 898 of SEQ ID NO: 1978
aagguaggauuccaaggaa

SEQ ID NO: 154011 - RNA, 19 nt, Artificial Sequence
  Description of Artificial Sequence: Synthetic oligonucleotide
  Antisense strand to SEQ ID NO: 154010
uuccuuggaauccuaccuu

SEQ ID NO: 154012 - RNA, 19 nt, Artificial Sequence
  Description of Artificial Sequence: Synthetic oligonucleotide
  Sense strand starting at position 762 of SEQ ID NO: 1978
aaggcaaguugucuuucua

SEQ ID NO: 154013 - RNA, 19 nt, Artificial Sequence
  Description of Artificial Sequence: Synthetic oligonucleotide
  Antisense strand to SEQ ID NO: 154012
uagaaagacaacuugccuu

SEQ ID NO: 154014 - RNA, 19 nt, Artificial Sequence
  Description of Artificial Sequence: Synthetic oligonucleotide
  Sense strand starting at position 745 of SEQ ID NO: 1978
ccaaguguccgggaacaaa

SEQ ID NO: 154015 - RNA, 19 nt, Artificial Sequence
  Description of Artificial Sequence: Synthetic oligonucleotide
  Antisense strand to SEQ ID NO: 154014
uuuguucccggacacuugg

SEQ ID NO: 154016 - RNA, 19 nt, Artificial Sequence
  Description of Artificial Sequence: Synthetic oligonucleotide
  Sense strand starting at position 172 of SEQ ID NO: 1978
gucugauuccagcacugga

SEQ ID NO: 154017 - RNA, 19 nt, Artificial Sequence
  Description of Artificial Sequence: Synthetic oligonucleotide
  Antisense strand to SEQ ID NO: 154016
uccagugcuggaaucagac

SEQ ID NO: 154018 - RNA, 19 nt, Artificial Sequence
  Description of Artificial Sequence: Synthetic oligonucleotide
  Sense strand starting at position 145 of SEQ ID NO: 1978
ugauuaagaucauuauagc

SEQ ID NO: 154019 - RNA, 19 nt, Artificial Sequence
  Description of Artificial Sequence: Synthetic oligonucleotide
  Antisense strand to SEQ ID NO: 154018
gcuauaaugaucuuaauca

SEQ ID NO: 154020 - RNA, 19 nt, Artificial Sequence
  Description of Artificial Sequence: Synthetic oligonucleotide
  Sense strand starting at position 140 of SEQ ID NO: 1978
gcauuugauuaagaucauu

SEQ ID NO: 154021 - RNA, 19 nt, Artificial Sequence
  Description of Artificial Sequence: Synthetic oligonucleotide
  Antisense strand to SEQ ID NO: 154020
aaugaucuuaaucaaaugc

SEQ ID NO: 154022 - RNA, 19 nt, Artificial Sequence
  Description of Artificial Sequence: Synthetic oligonucleotide
  Sense strand starting at position 134 of SEQ ID NO: 1978
uggagagcauuugauuaag

SEQ ID NO: 154023 - RNA, 19 nt, Artificial Sequence
  Description of Artificial Sequence: Synthetic oligonucleotide
  Antisense strand to SEQ ID NO: 154022
cuuaaucaaaugcucucca

SEQ ID NO: 154024 - RNA, 19 nt, Artificial Sequence
  Description of Artificial Sequence: Synthetic oligonucleotide
  Sense strand starting at position 3971 of SEQ ID NO: 1979
ggaaucuuccuuugcauca

SEQ ID NO: 154025 - RNA, 19 nt, Artificial Sequence
  Description of Artificial Sequence: Synthetic oligonucleotide
  Antisense strand to SEQ ID NO: 154024
ugaugcaaaggaagauucc

SEQ ID NO: 154026 - RNA, 19 nt, Artificial Sequence
  Description of Artificial Sequence: Synthetic oligonucleotide
  Sense strand starting at position 3969 of SEQ ID NO: 1979
acggaaucuuccuuugcau

SEQ ID NO: 154027 - RNA, 19 nt, Artificial Sequence
  Description of Artificial Sequence: Synthetic oligonucleotide
  Antisense strand to SEQ ID NO: 154026
augcaaaggaagauuccgu

SEQ ID NO: 154028 - RNA, 19 nt, Artificial Sequence
  Description of Artificial Sequence: Synthetic oligonucleotide
  Sense strand starting at position 3528 of SEQ ID NO: 1979
gagucuggcuuaucugauc

SEQ ID NO: 154029 - RNA, 19 nt, Artificial Sequence
  Description of Artificial Sequence: Synthetic oligonucleotide
  Antisense strand to SEQ ID NO: 154028
gaucagauaagccagacuc

SEQ ID NO: 154030 - RNA, 19 nt, Artificial Sequence
  Description of Artificial Sequence: Synthetic oligonucleotide
  Sense strand starting at position 3526 of SEQ ID NO: 1979
cugagucuggcuuaucuga

SEQ ID NO: 154031 - RNA, 19 nt, Artificial Sequence
  Description of Artificial Sequence: Synthetic oligonucleotide
  Antisense strand to SEQ ID NO: 154030
ucagauaagccagacucag

SEQ ID NO: 154032 - RNA, 19 nt, Artificial Sequence
  Description of Artificial Sequence: Synthetic oligonucleotide
  Sense strand starting at position 3524 of SEQ ID NO: 1979
cacugagucuggcuuaucu

SEQ ID NO: 154033 - RNA, 19 nt, Artificial Sequence
  Description of Artificial Sequence: Synthetic oligonucleotide
  Antisense strand to SEQ ID NO: 154032
agauaagccagacucagug

SEQ ID NO: 154034 - RNA, 19 nt, Artificial Sequence
  Description of Artificial Sequence: Synthetic oligonucleotide
  Sense strand starting at position 3027 of SEQ ID NO: 1979
gccuccagauucuugggaa

SEQ ID NO: 154035 - RNA, 19 nt, Artificial Sequence
  Description of Artificial Sequence: Synthetic oligonucleotide
  Antisense strand to SEQ ID NO: 154034
uucccaagaaucuggaggc

SEQ ID NO: 154036 - RNA, 19 nt, Artificial Sequence
  Description of Artificial Sequence: Synthetic oligonucleotide
  Sense strand starting at position 3017 of SEQ ID NO: 1979
uugguuuccugccuccaga

SEQ ID NO: 154037 - RNA, 19 nt, Artificial Sequence
  Description of Artificial Sequence: Synthetic oligonucleotide
  Antisense strand to SEQ ID NO: 154036
ucuggaggcaggaaaccaa

SEQ ID NO: 154038 - RNA, 19 nt, Artificial Sequence
  Description of Artificial Sequence: Synthetic oligonucleotide
  Sense strand starting at position 2972 of SEQ ID NO: 1979
ugagacuucuaagucuaag

SEQ ID NO: 154039 - RNA, 19 nt, Artificial Sequence
  Description of Artificial Sequence: Synthetic oligonucleotide
  Antisense strand to SEQ ID NO: 154038
cuuagacuuagaagucuca

SEQ ID NO: 154040 - RNA, 19 nt, Artificial Sequence
  Description of Artificial Sequence: Synthetic oligonucleotide
  Sense strand starting at position 2904 of SEQ ID NO: 1979
guuauuguuuauucuagac

SEQ ID NO: 154041 - RNA, 19 nt, Artificial Sequence
  Description of Artificial Sequence: Synthetic oligonucleotide
  Antisense strand to SEQ ID NO: 154040
gucuagaauaaacaauaac

SEQ ID NO: 154042 - RNA, 19 nt, Artificial Sequence
  Description of Artificial Sequence: Synthetic oligonucleotide
  Sense strand starting at position 2771 of SEQ ID NO: 1979
cgccucuugccagaaaguu

SEQ ID NO: 154043 - RNA, 19 nt, Artificial Sequence
  Description of Artificial Sequence: Synthetic oligonucleotide
  Antisense strand to SEQ ID NO: 154042
aacuuucuggcaagaggcg

SEQ ID NO: 154044 - RNA, 19 nt, Artificial Sequence
  Description of Artificial Sequence: Synthetic oligonucleotide
  Sense strand starting at position 2768 of SEQ ID NO: 1979
acucgccucuugccagaaa

SEQ ID NO: 154045 - RNA, 19 nt, Artificial Sequence
  Description of Artificial Sequence: Synthetic oligonucleotide
  Antisense strand to SEQ ID NO: 154044
uuucuggcaagaggcgagu

SEQ ID NO: 154046 - RNA, 19 nt, Artificial Sequence
  Description of Artificial Sequence: Synthetic oligonucleotide
  Sense strand starting at position 2614 of SEQ ID NO: 1979
gguguucugcuggaucuuu

SEQ ID NO: 154047 - RNA, 19 nt, Artificial Sequence
  Description of Artificial Sequence: Synthetic oligonucleotide
  Antisense strand to SEQ ID NO: 154046
aaagauccagcagaacacc

SEQ ID NO: 154048 - RNA, 19 nt, Artificial Sequence
  Description of Artificial Sequence: Synthetic oligonucleotide
  Sense strand starting at position 2595 of SEQ ID NO: 1979
ccucgaaacuuuguaacaa

SEQ ID NO: 154049 - RNA, 19 nt, Artificial Sequence
  Description of Artificial Sequence: Synthetic oligonucleotide
  Antisense strand to SEQ ID NO: 154048
uuguuacaaaguuucgagg

SEQ ID NO: 154050 - RNA, 19 nt, Artificial Sequence
  Description of Artificial Sequence: Synthetic oligonucleotide
  Sense strand starting at position 2533 of SEQ ID NO: 1979
ucccuauugcuggaaguuu

SEQ ID NO: 154051 - RNA, 19 nt, Artificial Sequence
  Description of Artificial Sequence: Synthetic oligonucleotide
  Antisense strand to SEQ ID NO: 154050
aaacuuccagcaauaggga

SEQ ID NO: 154052 - RNA, 19 nt, Artificial Sequence
  Description of Artificial Sequence: Synthetic oligonucleotide
  Sense strand starting at position 2532 of SEQ ID NO: 1979
aucccuauugcuggaaguu

SEQ ID NO: 154053 - RNA, 19 nt, Artificial Sequence
  Description of Artificial Sequence: Synthetic oligonucleotide
  Antisense strand to SEQ ID NO: 154052
aacuuccagcaauagggau

SEQ ID NO: 154054 - RNA, 19 nt, Artificial Sequence
  Description of Artificial Sequence: Synthetic oligonucleotide
  Sense strand starting at position 2497 of SEQ ID NO: 1979
uugaaaugucauugguaac

SEQ ID NO: 154055 - RNA, 19 nt, Artificial Sequence
  Description of Artificial Sequence: Synthetic oligonucleotide
  Antisense strand to SEQ ID NO: 154054
guuaccaaugacauuucaa

SEQ ID NO: 154056 - RNA, 19 nt, Artificial Sequence
  Description of Artificial Sequence: Synthetic oligonucleotide
  Sense strand starting at position 2496 of SEQ ID NO: 1979
cuugaaaugucauugguaa

SEQ ID NO: 154057 - RNA, 19 nt, Artificial Sequence
  Description of Artificial Sequence: Synthetic oligonucleotide
  Antisense strand to SEQ ID NO: 154056
uuaccaaugacauuucaag

SEQ ID NO: 154058 - RNA, 19 nt, Artificial Sequence
  Description of Artificial Sequence: Synthetic oligonucleotide
  Sense strand starting at position 2377 of SEQ ID NO: 1979
cccagauauuuagagguca

SEQ ID NO: 154059 - RNA, 19 nt, Artificial Sequence
  Description of Artificial Sequence: Synthetic oligonucleotide
  Antisense strand to SEQ ID NO: 154058
ugaccucuaaauaucuggg

SEQ ID NO: 154060 - RNA, 19 nt, Artificial Sequence
  Description of Artificial Sequence: Synthetic oligonucleotide
  Sense strand starting at position 2351 of SEQ ID NO: 1979
cggugcugcuaauuauaga

SEQ ID NO: 154061 - RNA, 19 nt, Artificial Sequence
  Description of Artificial Sequence: Synthetic oligonucleotide
  Antisense strand to SEQ ID NO: 154060
ucuauaauuagcagcaccg

SEQ ID NO: 154062 - RNA, 19 nt, Artificial Sequence
  Description of Artificial Sequence: Synthetic oligonucleotide
  Sense strand starting at position 2201 of SEQ ID NO: 1979
cccuaagagucauuagggu

SEQ ID NO: 154063 - RNA, 19 nt, Artificial Sequence
  Description of Artificial Sequence: Synthetic oligonucleotide
  Antisense strand to SEQ ID NO: 154062
acccuaaugacucuuaggg

SEQ ID NO: 154064 - RNA, 19 nt, Artificial Sequence
  Description of Artificial Sequence: Synthetic oligonucleotide
  Sense strand starting at position 2192 of SEQ ID NO: 1979
cagugacagcccuaagagu

SEQ ID NO: 154065 - RNA, 19 nt, Artificial Sequence
  Description of Artificial Sequence: Synthetic oligonucleotide
  Antisense strand to SEQ ID NO: 154064
acucuuagggcugucacug

SEQ ID NO: 154066 - RNA, 19 nt, Artificial Sequence
  Description of Artificial Sequence: Synthetic oligonucleotide
  Sense strand starting at position 2164 of SEQ ID NO: 1979
uagucagaucccuggcaac

SEQ ID NO: 154067 - RNA, 19 nt, Artificial Sequence
  Description of Artificial Sequence: Synthetic oligonucleotide
  Antisense strand to SEQ ID NO: 154066
guugccagggaucugacua

SEQ ID NO: 154068 - RNA, 19 nt, Artificial Sequence
  Description of Artificial Sequence: Synthetic oligonucleotide
  Sense strand starting at position 2163 of SEQ ID NO: 1979
uuagucagaucccuggcaa

SEQ ID NO: 154069 - RNA, 19 nt, Artificial Sequence
  Description of Artificial Sequence: Synthetic oligonucleotide
  Antisense strand to SEQ ID NO: 154068
uugccagggaucugacuaa

SEQ ID NO: 154070 - RNA, 19 nt, Artificial Sequence
  Description of Artificial Sequence: Synthetic oligonucleotide
  Sense strand starting at position 2132 of SEQ ID NO: 1979
gggugaaugcugcaaacuu

SEQ ID NO: 154071 - RNA, 19 nt, Artificial Sequence
  Description of Artificial Sequence: Synthetic oligonucleotide
  Antisense strand to SEQ ID NO: 154070
aaguuugcagcauucaccc

SEQ ID NO: 154072 - RNA, 19 nt, Artificial Sequence
  Description of Artificial Sequence: Synthetic oligonucleotide
  Sense strand starting at position 2102 of SEQ ID NO: 1979
cccggaauucugggaguug

SEQ ID NO: 154073 - RNA, 19 nt, Artificial Sequence
  Description of Artificial Sequence: Synthetic oligonucleotide
  Antisense strand to SEQ ID NO: 154072
caacucccagaauuccggg

SEQ ID NO: 154074 - RNA, 19 nt, Artificial Sequence
  Description of Artificial Sequence: Synthetic oligonucleotide
  Sense strand starting at position 1145 of SEQ ID NO: 1979
ccgggauuugccuggacuu

SEQ ID NO: 154075 - RNA, 19 nt, Artificial Sequence
  Description of Artificial Sequence: Synthetic oligonucleotide
  Antisense strand to SEQ ID NO: 154074
aaguccaggcaaaucccgg

SEQ ID NO: 154076 - RNA, 19 nt, Artificial Sequence
  Description of Artificial Sequence: Synthetic oligonucleotide
  Sense strand starting at position 651 of SEQ ID NO: 1979
gggagugcgaacugucagu

SEQ ID NO: 154077 - RNA, 19 nt, Artificial Sequence
  Description of Artificial Sequence: Synthetic oligonucleotide
  Antisense strand to SEQ ID NO: 154076
acugacaguucgcacuccc

SEQ ID NO: 154078 - RNA, 19 nt, Artificial Sequence
  Description of Artificial Sequence: Synthetic oligonucleotide
  Sense strand starting at position 615 of SEQ ID NO: 1979
uaagauguccauuaucgcu

SEQ ID NO: 154079 - RNA, 19 nt, Artificial Sequence
  Description of Artificial Sequence: Synthetic oligonucleotide
  Antisense strand to SEQ ID NO: 154078
agcgauaauggacaucuua

SEQ ID NO: 154080 - RNA, 19 nt, Artificial Sequence
  Description of Artificial Sequence: Synthetic oligonucleotide
  Sense strand starting at position 611 of SEQ ID NO: 1979
augauaagauguccauuau

SEQ ID NO: 154081 - RNA, 19 nt, Artificial Sequence
  Description of Artificial Sequence: Synthetic oligonucleotide
  Antisense strand to SEQ ID NO: 154080
auaauggacaucuuaucau

SEQ ID NO: 154082 - RNA, 19 nt, Artificial Sequence
  Description of Artificial Sequence: Synthetic oligonucleotide
  Sense strand starting at position 593 of SEQ ID NO: 1979
cuaguaggugcauaauaaa

SEQ ID NO: 154083 - RNA, 19 nt, Artificial Sequence
  Description of Artificial Sequence: Synthetic oligonucleotide
  Antisense strand to SEQ ID NO: 154082
uuuauuaugcaccuacuag

SEQ ID NO: 154084 - RNA, 19 nt, Artificial Sequence
  Description of Artificial Sequence: Synthetic oligonucleotide
  Sense strand starting at position 589 of SEQ ID NO: 1979
guaucuaguaggugcauaa

SEQ ID NO: 154085 - RNA, 19 nt, Artificial Sequence
  Description of Artificial Sequence: Synthetic oligonucleotide
  Antisense strand to SEQ ID NO: 154084
uuaugcaccuacuagauac

SEQ ID NO: 154086 - RNA, 19 nt, Artificial Sequence
  Description of Artificial Sequence: Synthetic oligonucleotide
  Sense strand starting at position 588 of SEQ ID NO: 1979
gguaucuaguaggugcaua

SEQ ID NO: 154087 - RNA, 19 nt, Artificial Sequence
  Description of Artificial Sequence: Synthetic oligonucleotide
  Antisense strand to SEQ ID NO: 154086
uaugcaccuacuagauacc

SEQ ID NO: 154088 - RNA, 19 nt, Artificial Sequence
  Description of Artificial Sequence: Synthetic oligonucleotide
  Sense strand starting at position 539 of SEQ ID NO: 1979
ugguuuaguccugaggacu

SEQ ID NO: 154089 - RNA, 19 nt, Artificial Sequence
  Description of Artificial Sequence: Synthetic oligonucleotide
  Antisense strand to SEQ ID NO: 154088
aguccucaggacuaaacca

SEQ ID NO: 154090 - RNA, 19 nt, Artificial Sequence
  Description of Artificial Sequence: Synthetic oligonucleotide
  Sense strand starting at position 491 of SEQ ID NO: 1979
ccucaauguucuuccugua

SEQ ID NO: 154091 - RNA, 19 nt, Artificial Sequence
  Description of Artificial Sequence: Synthetic oligonucleotide
  Antisense strand to SEQ ID NO: 154090
uacaggaagaacauugagg

SEQ ID NO: 154092 - RNA, 19 nt, Artificial Sequence
  Description of Artificial Sequence: Synthetic oligonucleotide
  Sense strand starting at position 403 of SEQ ID NO: 1979
ugccgugcaaucuccgaaa

SEQ ID NO: 154093 - RNA, 19 nt, Artificial Sequence
  Description of Artificial Sequence: Synthetic oligonucleotide
  Antisense strand to SEQ ID NO: 154092
uuucggagauugcacggca

SEQ ID NO: 154094 - RNA, 19 nt, Artificial Sequence
  Description of Artificial Sequence: Synthetic oligonucleotide
  Sense strand starting at position 364 of SEQ ID NO: 1979
acucuaggccuguaaacua

SEQ ID NO: 154095 - RNA, 19 nt, Artificial Sequence
  Description of Artificial Sequence: Synthetic oligonucleotide
  Antisense strand to SEQ ID NO: 154094
uaguuuacaggccuagagu

SEQ ID NO: 154096 - RNA, 19 nt, Artificial Sequence
  Description of Artificial Sequence: Synthetic oligonucleotide
  Sense strand starting at position 103 of SEQ ID NO: 1979
agguguucucaauaguaac

SEQ ID NO: 154097 - RNA, 19 nt, Artificial Sequence
  Description of Artificial Sequence: Synthetic oligonucleotide
  Antisense strand to SEQ ID NO: 154096
guuacuauugagaacaccu

SEQ ID NO: 154098 - RNA, 19 nt, Artificial Sequence
  Description of Artificial Sequence: Synthetic oligonucleotide
  Sense strand starting at position 97 of SEQ ID NO: 1979
guguucagguguucucaau

SEQ ID NO: 154099 - RNA, 19 nt, Artificial Sequence
  Description of Artificial Sequence: Synthetic oligonucleotide
  Antisense strand to SEQ ID NO: 154098
auugagaacaccugaacac

SEQ ID NO: 154100 - RNA, 19 nt, Artificial Sequence
  Description of Artificial Sequence: Synthetic oligonucleotide
  Sense strand starting at position 83 of SEQ ID NO: 1979
acucuugcucucuaguguu

SEQ ID NO: 154101 - RNA, 19 nt, Artificial Sequence
  Description of Artificial Sequence: Synthetic oligonucleotide
  Antisense strand to SEQ ID NO: 154100
aacacuagagagcaagagu

SEQ ID NO: 154102 - RNA, 19 nt, Artificial Sequence
  Description of Artificial Sequence: Synthetic oligonucleotide
  Sense strand starting at position 23 of SEQ ID NO: 1979
gugauuacuggcuaagcca

SEQ ID NO: 154103 - RNA, 19 nt, Artificial Sequence
  Description of Artificial Sequence: Synthetic oligonucleotide
  Antisense strand to SEQ ID NO: 154102
uggcuuagccaguaaucac

SEQ ID NO: 154104 - RNA, 19 nt, Artificial Sequence
  Description of Artificial Sequence: Synthetic oligonucleotide
  Sense strand starting at position 3160 of SEQ ID NO: 1980
aggcuucagugagaggaga

SEQ ID NO: 154105 - RNA, 19 nt, Artificial Sequence
  Description of Artificial Sequence: Synthetic oligonucleotide
  Antisense strand to SEQ ID NO: 154104
ucuccucucacugaagccu

SEQ ID NO: 154106 - RNA, 19 nt, Artificial Sequence
  Description of Artificial Sequence: Synthetic oligonucleotide
  Sense strand starting at position 2882 of SEQ ID NO: 1980
cgacaaauagcgcaacaau

SEQ ID NO: 154107 - RNA, 19 nt, Artificial Sequence
  Description of Artificial Sequence: Synthetic oligonucleotide
  Antisense strand to SEQ ID NO: 154106
auuguugcgcuauuugucg

SEQ ID NO: 154108 - RNA, 19 nt, Artificial Sequence
  Description of Artificial Sequence: Synthetic oligonucleotide
  Sense strand starting at position 2839 of SEQ ID NO: 1980
cugaauaguuuagauuguu

SEQ ID NO: 154109 - RNA, 19 nt, Artificial Sequence
  Description of Artificial Sequence: Synthetic oligonucleotide
  Antisense strand to SEQ ID NO: 154108
aacaaucuaaacuauucag

SEQ ID NO: 154110 - RNA, 19 nt, Artificial Sequence
  Description of Artificial Sequence: Synthetic oligonucleotide
  Sense strand starting at position 2420 of SEQ ID NO: 1980
guacgaguuucuguauuug

SEQ ID NO: 154111 - RNA, 19 nt, Artificial Sequence
  Description of Artificial Sequence: Synthetic oligonucleotide
  Antisense strand to SEQ ID NO: 154110
caaauacagaaacucguac

SEQ ID NO: 154112 - RNA, 19 nt, Artificial Sequence
  Description of Artificial Sequence: Synthetic oligonucleotide
  Sense strand starting at position 2418 of SEQ ID NO: 1980
auguacgaguuucuguauu

SEQ ID NO: 154113 - RNA, 19 nt, Artificial Sequence
  Description of Artificial Sequence: Synthetic oligonucleotide
  Antisense strand to SEQ ID NO: 154112
aauacagaaacucguacau

SEQ ID NO: 154114 - RNA, 19 nt, Artificial Sequence
  Description of Artificial Sequence: Synthetic oligonucleotide
  Sense strand starting at position 2409 of SEQ ID NO: 1980
cagucuuguauguacgagu

SEQ ID NO: 154115 - RNA, 19 nt, Artificial Sequence
  Description of Artificial Sequence: Synthetic oligonucleotide
  Antisense strand to SEQ ID NO: 154114
acucguacauacaagacug

SEQ ID NO: 154116 - RNA, 19 nt, Artificial Sequence
  Description of Artificial Sequence: Synthetic oligonucleotide
  Sense strand starting at position 2407 of SEQ ID NO: 1980
uccagucuuguauguacga

SEQ ID NO: 154117 - RNA, 19 nt, Artificial Sequence
  Description of Artificial Sequence: Synthetic oligonucleotide
  Antisense strand to SEQ ID NO: 154116
ucguacauacaagacugga

SEQ ID NO: 154118 - RNA, 19 nt, Artificial Sequence
  Description of Artificial Sequence: Synthetic oligonucleotide
  Sense strand starting at position 2345 of SEQ ID NO: 1980
gugauaauauucucucuug

SEQ ID NO: 154119 - RNA, 19 nt, Artificial Sequence
  Description of Artificial Sequence: Synthetic oligonucleotide
  Antisense strand to SEQ ID NO: 154118
caagagagaauauuaucac

SEQ ID NO: 154120 - RNA, 19 nt, Artificial Sequence
  Description of Artificial Sequence: Synthetic oligonucleotide
  Sense strand starting at position 2343 of SEQ ID NO: 1980
acgugauaauauucucucu

SEQ ID NO: 154121 - RNA, 19 nt, Artificial Sequence
  Description of Artificial Sequence: Synthetic oligonucleotide
  Antisense strand to SEQ ID NO: 154120
agagagaauauuaucacgu

SEQ ID NO: 154122 - RNA, 19 nt, Artificial Sequence
  Description of Artificial Sequence: Synthetic oligonucleotide
  Sense strand starting at position 2313 of SEQ ID NO: 1980
uguaaaggcuaucaagaug

SEQ ID NO: 154123 - RNA, 19 nt, Artificial Sequence
  Description of Artificial Sequence: Synthetic oligonucleotide
  Antisense strand to SEQ ID NO: 154122
caucuugauagccuuuaca

SEQ ID NO: 154124 - RNA, 19 nt, Artificial Sequence
  Description of Artificial Sequence: Synthetic oligonucleotide
  Sense strand starting at position 2256 of SEQ ID NO: 1980
agagcuuuauucucucagu

SEQ ID NO: 154125 - RNA, 19 nt, Artificial Sequence
  Description of Artificial Sequence: Synthetic oligonucleotide
  Antisense strand to SEQ ID NO: 154124
acugagagaauaaagcucu

SEQ ID NO: 154126 - RNA, 19 nt, Artificial Sequence
  Description of Artificial Sequence: Synthetic oligonucleotide
  Sense strand starting at position 2235 of SEQ ID NO: 1980
uagggaaacgcucauaggu

SEQ ID NO: 154127 - RNA, 19 nt, Artificial Sequence
  Description of Artificial Sequence: Synthetic oligonucleotide
  Antisense strand to SEQ ID NO: 154126
accuaugagcguuucccua

SEQ ID NO: 154128 - RNA, 19 nt, Artificial Sequence
  Description of Artificial Sequence: Synthetic oligonucleotide
  Sense strand starting at position 2149 of SEQ ID NO: 1980
aggcguggccaguauauua

SEQ ID NO: 154129 - RNA, 19 nt, Artificial Sequence
  Description of Artificial Sequence: Synthetic oligonucleotide
  Antisense strand to SEQ ID NO: 154128
uaauauacuggccacgccu

SEQ ID NO: 154130 - RNA, 19 nt, Artificial Sequence
  Description of Artificial Sequence: Synthetic oligonucleotide
  Sense strand starting at position 2147 of SEQ ID NO: 1980
guaggcguggccaguauau

SEQ ID NO: 154131 - RNA, 19 nt, Artificial Sequence
  Description of Artificial Sequence: Synthetic oligonucleotide
  Antisense strand to SEQ ID NO: 154130
auauacuggccacgccuac

SEQ ID NO: 154132 - RNA, 19 nt, Artificial Sequence
  Description of Artificial Sequence: Synthetic oligonucleotide
  Sense strand starting at position 2081 of SEQ ID NO: 1980
guaacuacgcaugcguuaa

SEQ ID NO: 154133 - RNA, 19 nt, Artificial Sequence
  Description of Artificial Sequence: Synthetic oligonucleotide
  Antisense strand to SEQ ID NO: 154132
uuaacgcaugcguaguuac

SEQ ID NO: 154134 - RNA, 19 nt, Artificial Sequence
  Description of Artificial Sequence: Synthetic oligonucleotide
  Sense strand starting at position 1784 of SEQ ID NO: 1980
gccuuuggucaccaaauaa

SEQ ID NO: 154135 - RNA, 19 nt, Artificial Sequence
  Description of Artificial Sequence: Synthetic oligonucleotide
  Antisense strand to SEQ ID NO: 154134
uuauuuggugaccaaaggc

SEQ ID NO: 154136 - RNA, 19 nt, Artificial Sequence
  Description of Artificial Sequence: Synthetic oligonucleotide
  Sense strand starting at position 1783 of SEQ ID NO: 1980
agccuuuggucaccaaaua

SEQ ID NO: 154137 - RNA, 19 nt, Artificial Sequence
  Description of Artificial Sequence: Synthetic oligonucleotide
  Antisense strand to SEQ ID NO: 154136
uauuuggugaccaaaggcu

SEQ ID NO: 154138 - RNA, 19 nt, Artificial Sequence
  Description of Artificial Sequence: Synthetic oligonucleotide
  Sense strand starting at position 1777 of SEQ ID NO: 1980
cagauaagccuuuggucac

SEQ ID NO: 154139 - RNA, 19 nt, Artificial Sequence
  Description of Artificial Sequence: Synthetic oligonucleotide
  Antisense strand to SEQ ID NO: 154138
gugaccaaaggcuuaucug

SEQ ID NO: 154140 - RNA, 19 nt, Artificial Sequence
  Description of Artificial Sequence: Synthetic oligonucleotide
  Sense strand starting at position 1556 of SEQ ID NO: 1980
cacacauucgugugaacug

SEQ ID NO: 154141 - RNA, 19 nt, Artificial Sequence
  Description of Artificial Sequence: Synthetic oligonucleotide
  Antisense strand to SEQ ID NO: 154140
caguucacacgaaugugug

SEQ ID NO: 154142 - RNA, 19 nt, Artificial Sequence
  Description of Artificial Sequence: Synthetic oligonucleotide
  Sense strand starting at position 1520 of SEQ ID NO: 1980
aaacguggguaccuaauau

SEQ ID NO: 154143 - RNA, 19 nt, Artificial Sequence
  Description of Artificial Sequence: Synthetic oligonucleotide
  Antisense strand to SEQ ID NO: 154142
auauuagguacccacguuu

SEQ ID NO: 154144 - RNA, 19 nt, Artificial Sequence
  Description of Artificial Sequence: Synthetic oligonucleotide
  Sense strand starting at position 1500 of SEQ ID NO: 1980
aguaaagcaaccugggaau

SEQ ID NO: 154145 - RNA, 19 nt, Artificial Sequence
  Description of Artificial Sequence: Synthetic oligonucleotide
  Antisense strand to SEQ ID NO: 154144
auucccagguugcuuuacu

SEQ ID NO: 154146 - RNA, 19 nt, Artificial Sequence
  Description of Artificial Sequence: Synthetic oligonucleotide
  Sense strand starting at position 1407 of SEQ ID NO: 1980
uugcuuccauguggaauuu

SEQ ID NO: 154147 - RNA, 19 nt, Artificial Sequence
  Description of Artificial Sequence: Synthetic oligonucleotide
  Antisense strand to SEQ ID NO: 154146
aaauuccacauggaagcaa

SEQ ID NO: 154148 - RNA, 19 nt, Artificial Sequence
  Description of Artificial Sequence: Synthetic oligonucleotide
  Sense strand starting at position 1342 of SEQ ID NO: 1980
ggaguugauuuggaacuca

SEQ ID NO: 154149 - RNA, 19 nt, Artificial Sequence
  Description of Artificial Sequence: Synthetic oligonucleotide
  Antisense strand to SEQ ID NO: 154148
ugaguuccaaaucaacucc

SEQ ID NO: 154150 - RNA, 19 nt, Artificial Sequence
  Description of Artificial Sequence: Synthetic oligonucleotide
  Sense strand starting at position 1299 of SEQ ID NO: 1980
uuuguaugcuaugccuaau

SEQ ID NO: 154151 - RNA, 19 nt, Artificial Sequence
  Description of Artificial Sequence: Synthetic oligonucleotide
  Antisense strand to SEQ ID NO: 154150
auuaggcauagcauacaaa

SEQ ID NO: 154152 - RNA, 19 nt, Artificial Sequence
  Description of Artificial Sequence: Synthetic oligonucleotide
  Sense strand starting at position 1298 of SEQ ID NO: 1980
cuuuguaugcuaugccuaa

SEQ ID NO: 154153 - RNA, 19 nt, Artificial Sequence
  Description of Artificial Sequence: Synthetic oligonucleotide
  Antisense strand to SEQ ID NO: 154152
uuaggcauagcauacaaag

SEQ ID NO: 154154 - RNA, 19 nt, Artificial Sequence
  Description of Artificial Sequence: Synthetic oligonucleotide
  Sense strand starting at position 1290 of SEQ ID NO: 1980
ugauaaaucuuuguaugcu

SEQ ID NO: 154155 - RNA, 19 nt, Artificial Sequence
  Description of Artificial Sequence: Synthetic oligonucleotide
  Antisense strand to SEQ ID NO: 154154
agcauacaaagauuuauca

SEQ ID NO: 154156 - RNA, 19 nt, Artificial Sequence
  Description of Artificial Sequence: Synthetic oligonucleotide
  Sense strand starting at position 1289 of SEQ ID NO: 1980
gugauaaaucuuuguaugc

SEQ ID NO: 154157 - RNA, 19 nt, Artificial Sequence
  Description of Artificial Sequence: Synthetic oligonucleotide
  Antisense strand to SEQ ID NO: 154156
gcauacaaagauuuaucac

SEQ ID NO: 154158 - RNA, 19 nt, Artificial Sequence
  Description of Artificial Sequence: Synthetic oligonucleotide
  Sense strand starting at position 1288 of SEQ ID NO: 1980
ugugauaaaucuuuguaug

SEQ ID NO: 154159 - RNA, 19 nt, Artificial Sequence
  Description of Artificial Sequence: Synthetic oligonucleotide
  Antisense strand to SEQ ID NO: 154158
cauacaaagauuuaucaca

SEQ ID NO: 154160 - RNA, 19 nt, Artificial Sequence
  Description of Artificial Sequence: Synthetic oligonucleotide
  Sense strand starting at position 1272 of SEQ ID NO: 1980
uguguuccuuaacuaaugu

SEQ ID NO: 154161 - RNA, 19 nt, Artificial Sequence
  Description of Artificial Sequence: Synthetic oligonucleotide
  Antisense strand to SEQ ID NO: 154160
acauuaguuaaggaacaca

SEQ ID NO: 154162 - RNA, 19 nt, Artificial Sequence
  Description of Artificial Sequence: Synthetic oligonucleotide
  Sense strand starting at position 1269 of SEQ ID NO: 1980
auauguguuccuuaacuaa

SEQ ID NO: 154163 - RNA, 19 nt, Artificial Sequence
  Description of Artificial Sequence: Synthetic oligonucleotide
  Antisense strand to SEQ ID NO: 154162
uuaguuaaggaacacauau

SEQ ID NO: 154164 - RNA, 19 nt, Artificial Sequence
  Description of Artificial Sequence: Synthetic oligonucleotide
  Sense strand starting at position 1267 of SEQ ID NO: 1980
cuauauguguuccuuaacu

SEQ ID NO: 154165 - RNA, 19 nt, Artificial Sequence
  Description of Artificial Sequence: Synthetic oligonucleotide
  Antisense strand to SEQ ID NO: 154164
aguuaaggaacacauauag

SEQ ID NO: 154166 - RNA, 19 nt, Artificial Sequence
  Description of Artificial Sequence: Synthetic oligonucleotide
  Sense strand starting at position 1265 of SEQ ID NO: 1980
gucuauauguguuccuuaa

SEQ ID NO: 154167 - RNA, 19 nt, Artificial Sequence
  Description of Artificial Sequence: Synthetic oligonucleotide
  Antisense strand to SEQ ID NO: 154166
uuaaggaacacauauagac

SEQ ID NO: 154168 - RNA, 19 nt, Artificial Sequence
  Description of Artificial Sequence: Synthetic oligonucleotide
  Sense strand starting at position 1131 of SEQ ID NO: 1980
ugcuguagugagcuauguu

SEQ ID NO: 154169 - RNA, 19 nt, Artificial Sequence
  Description of Artificial Sequence: Synthetic oligonucleotide
  Antisense strand to SEQ ID NO: 154168
aacauagcucacuacagca

SEQ ID NO: 154170 - RNA, 19 nt, Artificial Sequence
  Description of Artificial Sequence: Synthetic oligonucleotide
  Sense strand starting at position 1014 of SEQ ID NO: 1980
uggcaagacucgucuuuac

SEQ ID NO: 154171 - RNA, 19 nt, Artificial Sequence
  Description of Artificial Sequence: Synthetic oligonucleotide
  Antisense strand to SEQ ID NO: 154170
guaaagacgagucuugcca

SEQ ID NO: 154172 - RNA, 19 nt, Artificial Sequence
  Description of Artificial Sequence: Synthetic oligonucleotide
  Sense strand starting at position 885 of SEQ ID NO: 1980
gcaguagagagcuacugaa

SEQ ID NO: 154173 - RNA, 19 nt, Artificial Sequence
  Description of Artificial Sequence: Synthetic oligonucleotide
  Antisense strand to SEQ ID NO: 154172
uucaguagcucucuacugc

SEQ ID NO: 154174 - RNA, 19 nt, Artificial Sequence
  Description of Artificial Sequence: Synthetic oligonucleotide
  Sense strand starting at position 782 of SEQ ID NO: 1980
agaaucugaugcugagauu

SEQ ID NO: 154175 - RNA, 19 nt, Artificial Sequence
  Description of Artificial Sequence: Synthetic oligonucleotide
  Antisense strand to SEQ ID NO: 154174
aaucucagcaucagauucu

SEQ ID NO: 154176 - RNA, 19 nt, Artificial Sequence
  Description of Artificial Sequence: Synthetic oligonucleotide
  Sense strand starting at position 357 of SEQ ID NO: 1980
aguucucaccuggaugcau

SEQ ID NO: 154177 - RNA, 19 nt, Artificial Sequence
  Description of Artificial Sequence: Synthetic oligonucleotide
  Antisense strand to SEQ ID NO: 154176
augcauccaggugagaacu

SEQ ID NO: 154178 - RNA, 19 nt, Artificial Sequence
  Description of Artificial Sequence: Synthetic oligonucleotide
  Sense strand starting at position 356 of SEQ ID NO: 1980
gaguucucaccuggaugca

SEQ ID NO: 154179 - RNA, 19 nt, Artificial Sequence
  Description of Artificial Sequence: Synthetic oligonucleotide
  Antisense strand to SEQ ID NO: 154178
ugcauccaggugagaacuc

SEQ ID NO: 154180 - RNA, 19 nt, Artificial Sequence
  Description of Artificial Sequence: Synthetic oligonucleotide
  Sense strand starting at position 15 of SEQ ID NO: 1980
agaguaagguucuaaacau

SEQ ID NO: 154181 - RNA, 19 nt, Artificial Sequence
  Description of Artificial Sequence: Synthetic oligonucleotide
  Antisense strand to SEQ ID NO: 154180
auguuuagaaccuuacucu

SEQ ID NO: 154182 - RNA, 19 nt, Artificial Sequence
  Description of Artificial Sequence: Synthetic oligonucleotide
  Sense strand starting at position 10 of SEQ ID NO: 1980
gaggaagaguaagguucua

SEQ ID NO: 154183 - RNA, 19 nt, Artificial Sequence
  Description of Artificial Sequence: Synthetic oligonucleotide
  Antisense strand to SEQ ID NO: 154182
uagaaccuuacucuuccuc

SEQ ID NO: 154184 - RNA, 19 nt, Artificial Sequence
  Description of Artificial Sequence: Synthetic oligonucleotide
  Sense strand starting at position 83 of SEQ ID NO: 1981
aauggcagcugagugaaau

SEQ ID NO: 154185 - RNA, 19 nt, Artificial Sequence
  Description of Artificial Sequence: Synthetic oligonucleotide
  Antisense strand to SEQ ID NO: 154184
auuucacucagcugccauu

SEQ ID NO: 154186 - RNA, 19 nt, Artificial Sequence
  Description of Artificial Sequence: Synthetic oligonucleotide
  Sense strand starting at position 95 of SEQ ID NO: 1981
gugaaauguaguggaauug

SEQ ID NO: 154187 - RNA, 19 nt, Artificial Sequence
  Description of Artificial Sequence: Synthetic oligonucleotide
  Antisense strand to SEQ ID NO: 154186
caauuccacuacauuucac

SEQ ID NO: 154188 - RNA, 19 nt, Artificial Sequence
  Description of Artificial Sequence: Synthetic oligonucleotide
  Sense strand starting at position 106 of SEQ ID NO: 1981
uggaauugccgucauaaua

SEQ ID NO: 154189 - RNA, 19 nt, Artificial Sequence
  Description of Artificial Sequence: Synthetic oligonucleotide
  Antisense strand to SEQ ID NO: 154188
uauuaugacggcaauucca

SEQ ID NO: 154190 - RNA, 19 nt, Artificial Sequence
  Description of Artificial Sequence: Synthetic oligonucleotide
  Sense strand starting at position 142 of SEQ ID NO: 1981
ccugcauucguauggcaua

SEQ ID NO: 154191 - RNA, 19 nt, Artificial Sequence
  Description of Artificial Sequence: Synthetic oligonucleotide
  Antisense strand to SEQ ID NO: 154190
uaugccauacgaaugcagg

SEQ ID NO: 154192 - RNA, 19 nt, Artificial Sequence
  Description of Artificial Sequence: Synthetic oligonucleotide
  Sense strand starting at position 156 of SEQ ID NO: 1981
gcauaaccucuaggauaua

SEQ ID NO: 154193 - RNA, 19 nt, Artificial Sequence
  Description of Artificial Sequence: Synthetic oligonucleotide
  Antisense strand to SEQ ID NO: 154192
uauauccuagagguuaugc

SEQ ID NO: 154194 - RNA, 19 nt, Artificial Sequence
  Description of Artificial Sequence: Synthetic oligonucleotide
  Sense strand starting at position 270 of SEQ ID NO: 1981
uucccuuuccagcgaaaca

SEQ ID NO: 154195 - RNA, 19 nt, Artificial Sequence
  Description of Artificial Sequence: Synthetic oligonucleotide
  Antisense strand to SEQ ID NO: 154194
uguuucgcuggaaagggaa

SEQ ID NO: 154196 - RNA, 19 nt, Artificial Sequence
  Description of Artificial Sequence: Synthetic oligonucleotide
  Sense strand starting at position 394 of SEQ ID NO: 1981
aagucaucauuaggaggga

SEQ ID NO: 154197 - RNA, 19 nt, Artificial Sequence
  Description of Artificial Sequence: Synthetic oligonucleotide
  Antisense strand to SEQ ID NO: 154196
ucccuccuaaugaugacuu

SEQ ID NO: 154198 - RNA, 19 nt, Artificial Sequence
  Description of Artificial Sequence: Synthetic oligonucleotide
  Sense strand starting at position 395 of SEQ ID NO: 1981
agucaucauuaggagggaa

SEQ ID NO: 154199 - RNA, 19 nt, Artificial Sequence
  Description of Artificial Sequence: Synthetic oligonucleotide
  Antisense strand to SEQ ID NO: 154198
uucccuccuaaugaugacu

SEQ ID NO: 154200 - RNA, 19 nt, Artificial Sequence
  Description of Artificial Sequence: Synthetic oligonucleotide
  Sense strand starting at position 605 of SEQ ID NO: 1981
cagauauguguugguaaau

SEQ ID NO: 154201 - RNA, 19 nt, Artificial Sequence
  Description of Artificial Sequence: Synthetic oligonucleotide
  Antisense strand to SEQ ID NO: 154200
auuuaccaacacauaucug

SEQ ID NO: 154202 - RNA, 19 nt, Artificial Sequence
  Description of Artificial Sequence: Synthetic oligonucleotide
  Sense strand starting at position 606 of SEQ ID NO: 1981
agauauguguugguaaaug

SEQ ID NO: 154203 - RNA, 19 nt, Artificial Sequence
  Description of Artificial Sequence: Synthetic oligonucleotide
  Antisense strand to SEQ ID NO: 154202
cauuuaccaacacauaucu

SEQ ID NO: 154204 - RNA, 19 nt, Artificial Sequence
  Description of Artificial Sequence: Synthetic oligonucleotide
  Sense strand starting at position 922 of SEQ ID NO: 1981
aguugagaaccauggagua

SEQ ID NO: 154205 - RNA, 19 nt, Artificial Sequence
  Description of Artificial Sequence: Synthetic oligonucleotide
  Antisense strand to SEQ ID NO: 154204
uacuccaugguucucaacu

SEQ ID NO: 154206 - RNA, 19 nt, Artificial Sequence
  Description of Artificial Sequence: Synthetic oligonucleotide
  Sense strand starting at position 1039 of SEQ ID NO: 1981
guuggaguccaucaguguu

SEQ ID NO: 154207 - RNA, 19 nt, Artificial Sequence
  Description of Artificial Sequence: Synthetic oligonucleotide
  Antisense strand to SEQ ID NO: 154206
aacacugauggacuccaac

SEQ ID NO: 154208 - RNA, 19 nt, Artificial Sequence
  Description of Artificial Sequence: Synthetic oligonucleotide
  Sense strand starting at position 1042 of SEQ ID NO: 1981
ggaguccaucaguguucua

SEQ ID NO: 154209 - RNA, 19 nt, Artificial Sequence
  Description of Artificial Sequence: Synthetic oligonucleotide
  Antisense strand to SEQ ID NO: 154208
uagaacacugauggacucc

SEQ ID NO: 154210 - RNA, 19 nt, Artificial Sequence
  Description of Artificial Sequence: Synthetic oligonucleotide
  Sense strand starting at position 1045 of SEQ ID NO: 1981
guccaucaguguucuauua

SEQ ID NO: 154211 - RNA, 19 nt, Artificial Sequence
  Description of Artificial Sequence: Synthetic oligonucleotide
  Antisense strand to SEQ ID NO: 154210
uaauagaacacugauggac

SEQ ID NO: 154212 - RNA, 19 nt, Artificial Sequence
  Description of Artificial Sequence: Synthetic oligonucleotide
  Sense strand starting at position 1299 of SEQ ID NO: 1981
gcaccugcaucagaaugau

SEQ ID NO: 154213 - RNA, 19 nt, Artificial Sequence
  Description of Artificial Sequence: Synthetic oligonucleotide
  Antisense strand to SEQ ID NO: 154212
aucauucugaugcaggugc

SEQ ID NO: 154214 - RNA, 19 nt, Artificial Sequence
  Description of Artificial Sequence: Synthetic oligonucleotide
  Sense strand starting at position 1305 of SEQ ID NO: 1981
gcaucagaaugaucaguaa

SEQ ID NO: 154215 - RNA, 19 nt, Artificial Sequence
  Description of Artificial Sequence: Synthetic oligonucleotide
  Antisense strand to SEQ ID NO: 154214
uuacugaucauucugaugc

SEQ ID NO: 154216 - RNA, 19 nt, Artificial Sequence
  Description of Artificial Sequence: Synthetic oligonucleotide
  Sense strand starting at position 1389 of SEQ ID NO: 1981
cuugaacguuucgucacau

SEQ ID NO: 154217 - RNA, 19 nt, Artificial Sequence
  Description of Artificial Sequence: Synthetic oligonucleotide
  Antisense strand to SEQ ID NO: 154216
augugacgaaacguucaag

SEQ ID NO: 154218 - RNA, 19 nt, Artificial Sequence
  Description of Artificial Sequence: Synthetic oligonucleotide
  Sense strand starting at position 1390 of SEQ ID NO: 1981
uugaacguuucgucacauc

SEQ ID NO: 154219 - RNA, 19 nt, Artificial Sequence
  Description of Artificial Sequence: Synthetic oligonucleotide
  Antisense strand to SEQ ID NO: 154218
gaugugacgaaacguucaa

SEQ ID NO: 154220 - RNA, 19 nt, Artificial Sequence
  Description of Artificial Sequence: Synthetic oligonucleotide
  Sense strand starting at position 1430 of SEQ ID NO: 1981
uuugguggacuuugaagau

SEQ ID NO: 154221 - RNA, 19 nt, Artificial Sequence
  Description of Artificial Sequence: Synthetic oligonucleotide
  Antisense strand to SEQ ID NO: 154220
aucuucaaaguccaccaaa

SEQ ID NO: 154222 - RNA, 19 nt, Artificial Sequence
  Description of Artificial Sequence: Synthetic oligonucleotide
  Sense strand starting at position 1469 of SEQ ID NO: 1981
augaaauucuuuggagaaa

SEQ ID NO: 154223 - RNA, 19 nt, Artificial Sequence
  Description of Artificial Sequence: Synthetic oligonucleotide
  Antisense strand to SEQ ID NO: 154222
uuucuccaaagaauuucau

SEQ ID NO: 154224 - RNA, 19 nt, Artificial Sequence
  Description of Artificial Sequence: Synthetic oligonucleotide
  Sense strand starting at position 1617 of SEQ ID NO: 1981
agugaagacacuuguggau

SEQ ID NO: 154225 - RNA, 19 nt, Artificial Sequence
  Description of Artificial Sequence: Synthetic oligonucleotide
  Antisense strand to SEQ ID NO: 154224
auccacaagugucuucacu

SEQ ID NO: 154226 - RNA, 19 nt, Artificial Sequence
  Description of Artificial Sequence: Synthetic oligonucleotide
  Sense strand starting at position 1973 of SEQ ID NO: 1981
ucuccuugcucgucuggaa

SEQ ID NO: 154227 - RNA, 19 nt, Artificial Sequence
  Description of Artificial Sequence: Synthetic oligonucleotide
  Antisense strand to SEQ ID NO: 154226
uuccagacgagcaaggaga

SEQ ID NO: 154228 - RNA, 19 nt, Artificial Sequence
  Description of Artificial Sequence: Synthetic oligonucleotide
  Sense strand starting at position 2012 of SEQ ID NO: 1981
uguacuguuaaaugaggaa

SEQ ID NO: 154229 - RNA, 19 nt, Artificial Sequence
  Description of Artificial Sequence: Synthetic oligonucleotide
  Antisense strand to SEQ ID NO: 154228
uuccucauuuaacaguaca

SEQ ID NO: 154230 - RNA, 19 nt, Artificial Sequence
  Description of Artificial Sequence: Synthetic oligonucleotide
  Sense strand starting at position 2065 of SEQ ID NO: 1981
guuaccuuauguuuaagaa

SEQ ID NO: 154231 - RNA, 19 nt, Artificial Sequence
  Description of Artificial Sequence: Synthetic oligonucleotide
  Antisense strand to SEQ ID NO: 154230
uucuuaaacauaagguaac

SEQ ID NO: 154232 - RNA, 19 nt, Artificial Sequence
  Description of Artificial Sequence: Synthetic oligonucleotide
  Sense strand starting at position 2090 of SEQ ID NO: 1981
aucugaguacauggaauau

SEQ ID NO: 154233 - RNA, 19 nt, Artificial Sequence
  Description of Artificial Sequence: Synthetic oligonucleotide
  Antisense strand to SEQ ID NO: 154232
auauuccauguacucagau

SEQ ID NO: 154234 - RNA, 19 nt, Artificial Sequence
  Description of Artificial Sequence: Synthetic oligonucleotide
  Sense strand starting at position 2170 of SEQ ID NO: 1981
ccacuuuauuucuaguagu

SEQ ID NO: 154235 - RNA, 19 nt, Artificial Sequence
  Description of Artificial Sequence: Synthetic oligonucleotide
  Antisense strand to SEQ ID NO: 154234
acuacuagaaauaaagugg

SEQ ID NO: 154236 - RNA, 19 nt, Artificial Sequence
  Description of Artificial Sequence: Synthetic oligonucleotide
  Sense strand starting at position 2210 of SEQ ID NO: 1981
uuagcugucuuauccauua

SEQ ID NO: 154237 - RNA, 19 nt, Artificial Sequence
  Description of Artificial Sequence: Synthetic oligonucleotide
  Antisense strand to SEQ ID NO: 154236
uaauggauaagacagcuaa

SEQ ID NO: 154238 - RNA, 19 nt, Artificial Sequence
  Description of Artificial Sequence: Synthetic oligonucleotide
  Sense strand starting at position 2296 of SEQ ID NO: 1981
agugcaguagguugauaau

SEQ ID NO: 154239 - RNA, 19 nt, Artificial Sequence
  Description of Artificial Sequence: Synthetic oligonucleotide
  Antisense strand to SEQ ID NO: 154238
auuaucaaccuacugcacu

SEQ ID NO: 154240 - RNA, 19 nt, Artificial Sequence
  Description of Artificial Sequence: Synthetic oligonucleotide
  Sense strand starting at position 2305 of SEQ ID NO: 1981
gguugauaaucggcucacu

SEQ ID NO: 154241 - RNA, 19 nt, Artificial Sequence
  Description of Artificial Sequence: Synthetic oligonucleotide
  Antisense strand to SEQ ID NO: 154240
agugagccgauuaucaacc

SEQ ID NO: 154242 - RNA, 19 nt, Artificial Sequence
  Description of Artificial Sequence: Synthetic oligonucleotide
  Sense strand starting at position 2531 of SEQ ID NO: 1981
ccaccauggucagcgaauu

SEQ ID NO: 154243 - RNA, 19 nt, Artificial Sequence
  Description of Artificial Sequence: Synthetic oligonucleotide
  Antisense strand to SEQ ID NO: 154242
aauucgcugaccauggugg

SEQ ID NO: 154244 - RNA, 19 nt, Artificial Sequence
  Description of Artificial Sequence: Synthetic oligonucleotide
  Sense strand starting at position 2532 of SEQ ID NO: 1981
caccauggucagcgaauuu

SEQ ID NO: 154245 - RNA, 19 nt, Artificial Sequence
  Description of Artificial Sequence: Synthetic oligonucleotide
  Antisense strand to SEQ ID NO: 154244
aaauucgcugaccauggug

SEQ ID NO: 154246 - RNA, 19 nt, Artificial Sequence
  Description of Artificial Sequence: Synthetic oligonucleotide
  Sense strand starting at position 3401 of SEQ ID NO: 1981
uuaggaguuuagccacguu

SEQ ID NO: 154247 - RNA, 19 nt, Artificial Sequence
  Description of Artificial Sequence: Synthetic oligonucleotide
  Antisense strand to SEQ ID NO: 154246
aacguggcuaaacuccuaa

SEQ ID NO: 154248 - RNA, 19 nt, Artificial Sequence
  Description of Artificial Sequence: Synthetic oligonucleotide
  Sense strand starting at position 3404 of SEQ ID NO: 1981
ggaguuuagccacguuuac

SEQ ID NO: 154249 - RNA, 19 nt, Artificial Sequence
  Description of Artificial Sequence: Synthetic oligonucleotide
  Antisense strand to SEQ ID NO: 154248
guaaacguggcuaaacucc

SEQ ID NO: 154250 - RNA, 19 nt, Artificial Sequence
  Description of Artificial Sequence: Synthetic oligonucleotide
  Sense strand starting at position 3436 of SEQ ID NO: 1981
accgcuaguuccuuaaacu

SEQ ID NO: 154251 - RNA, 19 nt, Artificial Sequence
  Description of Artificial Sequence: Synthetic oligonucleotide
  Antisense strand to SEQ ID NO: 154250
aguuuaaggaacuagcggu

SEQ ID NO: 154252 - RNA, 19 nt, Artificial Sequence
  Description of Artificial Sequence: Synthetic oligonucleotide
  Sense strand starting at position 3437 of SEQ ID NO: 1981
ccgcuaguuccuuaaacuc

SEQ ID NO: 154253 - RNA, 19 nt, Artificial Sequence
  Description of Artificial Sequence: Synthetic oligonucleotide
  Antisense strand to SEQ ID NO: 154252
gaguuuaaggaacuagcgg

SEQ ID NO: 154254 - RNA, 19 nt, Artificial Sequence
  Description of Artificial Sequence: Synthetic oligonucleotide
  Sense strand starting at position 3569 of SEQ ID NO: 1981
auuaucuaaugguagaaug

SEQ ID NO: 154255 - RNA, 19 nt, Artificial Sequence
  Description of Artificial Sequence: Synthetic oligonucleotide
  Antisense strand to SEQ ID NO: 154254
cauucuaccauuagauaau

SEQ ID NO: 154256 - RNA, 19 nt, Artificial Sequence
  Description of Artificial Sequence: Synthetic oligonucleotide
  Sense strand starting at position 3577 of SEQ ID NO: 1981
augguagaaugugaagcau

SEQ ID NO: 154257 - RNA, 19 nt, Artificial Sequence
  Description of Artificial Sequence: Synthetic oligonucleotide
  Antisense strand to SEQ ID NO: 154256
augcuucacauucuaccau

SEQ ID NO: 154258 - RNA, 19 nt, Artificial Sequence
  Description of Artificial Sequence: Synthetic oligonucleotide
  Sense strand starting at position 3665 of SEQ ID NO: 1981
agugcugcgaugugaucau

SEQ ID NO: 154259 - RNA, 19 nt, Artificial Sequence
  Description of Artificial Sequence: Synthetic oligonucleotide
  Antisense strand to SEQ ID NO: 154258
augaucacaucgcagcacu

SEQ ID NO: 154260 - RNA, 19 nt, Artificial Sequence
  Description of Artificial Sequence: Synthetic oligonucleotide
  Sense strand starting at position 3669 of SEQ ID NO: 1981
cugcgaugugaucauaacu

SEQ ID NO: 154261 - RNA, 19 nt, Artificial Sequence
  Description of Artificial Sequence: Synthetic oligonucleotide
  Antisense strand to SEQ ID NO: 154260
aguuaugaucacaucgcag

SEQ ID NO: 154262 - RNA, 19 nt, Artificial Sequence
  Description of Artificial Sequence: Synthetic oligonucleotide
  Sense strand starting at position 3937 of SEQ ID NO: 1981
caaccucugcagugaaaug

SEQ ID NO: 154263 - RNA, 19 nt, Artificial Sequence
  Description of Artificial Sequence: Synthetic oligonucleotide
  Antisense strand to SEQ ID NO: 154262
cauuucacugcagagguug

SEQ ID NO: 154264 - RNA, 19 nt, Artificial Sequence
  Description of Artificial Sequence: Synthetic oligonucleotide
  Sense strand starting at position 9 of SEQ ID NO: 1982
gguggcuccuaucuuuaca

SEQ ID NO: 154265 - RNA, 19 nt, Artificial Sequence
  Description of Artificial Sequence: Synthetic oligonucleotide
  Antisense strand to SEQ ID NO: 154264
uguaaagauaggagccacc

SEQ ID NO: 154266 - RNA, 19 nt, Artificial Sequence
  Description of Artificial Sequence: Synthetic oligonucleotide
  Sense strand starting at position 177 of SEQ ID NO: 1982
cuuccuuuguagucaaagu

SEQ ID NO: 154267 - RNA, 19 nt, Artificial Sequence
  Description of Artificial Sequence: Synthetic oligonucleotide
  Antisense strand to SEQ ID NO: 154266
acuuugacuacaaaggaag

SEQ ID NO: 154268 - RNA, 19 nt, Artificial Sequence
  Description of Artificial Sequence: Synthetic oligonucleotide
  Sense strand starting at position 185 of SEQ ID NO: 1982
guagucaaaguauacuaau

SEQ ID NO: 154269 - RNA, 19 nt, Artificial Sequence
  Description of Artificial Sequence: Synthetic oligonucleotide
  Antisense strand to SEQ ID NO: 154268
auuaguauacuuugacuac

SEQ ID NO: 154270 - RNA, 19 nt, Artificial Sequence
  Description of Artificial Sequence: Synthetic oligonucleotide
  Sense strand starting at position 303 of SEQ ID NO: 1982
auguaacaucccuagugga

SEQ ID NO: 154271 - RNA, 19 nt, Artificial Sequence
  Description of Artificial Sequence: Synthetic oligonucleotide
  Antisense strand to SEQ ID NO: 154270
uccacuagggauguuacau

SEQ ID NO: 154272 - RNA, 19 nt, Artificial Sequence
  Description of Artificial Sequence: Synthetic oligonucleotide
  Sense strand starting at position 333 of SEQ ID NO: 1982
acaguucugcaguaaaccu

SEQ ID NO: 154273 - RNA, 19 nt, Artificial Sequence
  Description of Artificial Sequence: Synthetic oligonucleotide
  Antisense strand to SEQ ID NO: 154272
agguuuacugcagaacugu

SEQ ID NO: 154274 - RNA, 19 nt, Artificial Sequence
  Description of Artificial Sequence: Synthetic oligonucleotide
  Sense strand starting at position 514 of SEQ ID NO: 1982
gagggcuuguaaucugaua

SEQ ID NO: 154275 - RNA, 19 nt, Artificial Sequence
  Description of Artificial Sequence: Synthetic oligonucleotide
  Antisense strand to SEQ ID NO: 154274
uaucagauuacaagcccuc

SEQ ID NO: 154276 - RNA, 19 nt, Artificial Sequence
  Description of Artificial Sequence: Synthetic oligonucleotide
  Sense strand starting at position 516 of SEQ ID NO: 1982
gggcuuguaaucugauaau

SEQ ID NO: 154277 - RNA, 19 nt, Artificial Sequence
  Description of Artificial Sequence: Synthetic oligonucleotide
  Antisense strand to SEQ ID NO: 154276
auuaucagauuacaagccc

SEQ ID NO: 154278 - RNA, 19 nt, Artificial Sequence
  Description of Artificial Sequence: Synthetic oligonucleotide
  Sense strand starting at position 600 of SEQ ID NO: 1982
aagaguaaggaacguagua

SEQ ID NO: 154279 - RNA, 19 nt, Artificial Sequence
  Description of Artificial Sequence: Synthetic oligonucleotide
  Antisense strand to SEQ ID NO: 154278
uacuacguuccuuacucuu

SEQ ID NO: 154280 - RNA, 19 nt, Artificial Sequence
  Description of Artificial Sequence: Synthetic oligonucleotide
  Sense strand starting at position 602 of SEQ ID NO: 1982
gaguaaggaacguaguaaa

SEQ ID NO: 154281 - RNA, 19 nt, Artificial Sequence
  Description of Artificial Sequence: Synthetic oligonucleotide
  Antisense strand to SEQ ID NO: 154280
uuuacuacguuccuuacuc

SEQ ID NO: 154282 - RNA, 19 nt, Artificial Sequence
  Description of Artificial Sequence: Synthetic oligonucleotide
  Sense strand starting at position 728 of SEQ ID NO: 1982
aguaguauccugggagaaa

SEQ ID NO: 154283 - RNA, 19 nt, Artificial Sequence
  Description of Artificial Sequence: Synthetic oligonucleotide
  Antisense strand to SEQ ID NO: 154282
uuucucccaggauacuacu

SEQ ID NO: 154284 - RNA, 19 nt, Artificial Sequence
  Description of Artificial Sequence: Synthetic oligonucleotide
  Sense strand starting at position 826 of SEQ ID NO: 1982
gaaggauuguagcuaugca

SEQ ID NO: 154285 - RNA, 19 nt, Artificial Sequence
  Description of Artificial Sequence: Synthetic oligonucleotide
  Antisense strand to SEQ ID NO: 154284
ugcauagcuacaauccuuc

SEQ ID NO: 154286 - RNA, 19 nt, Artificial Sequence
  Description of Artificial Sequence: Synthetic oligonucleotide
  Sense strand starting at position 836 of SEQ ID NO: 1982
agcuaugcaccugagucau

SEQ ID NO: 154287 - RNA, 19 nt, Artificial Sequence
  Description of Artificial Sequence: Synthetic oligonucleotide
  Antisense strand to SEQ ID NO: 154286
augacucaggugcauagcu

SEQ ID NO: 154288 - RNA, 19 nt, Artificial Sequence
  Description of Artificial Sequence: Synthetic oligonucleotide
  Sense strand starting at position 903 of SEQ ID NO: 1982
uaagaaugggcacguguaa

SEQ ID NO: 154289 - RNA, 19 nt, Artificial Sequence
  Description of Artificial Sequence: Synthetic oligonucleotide
  Antisense strand to SEQ ID NO: 154288
uuacacgugcccauucuua

SEQ ID NO: 154290 - RNA, 19 nt, Artificial Sequence
  Description of Artificial Sequence: Synthetic oligonucleotide
  Sense strand starting at position 1012 of SEQ ID NO: 1982
ccaacauguuuaguagaaa

SEQ ID NO: 154291 - RNA, 19 nt, Artificial Sequence
  Description of Artificial Sequence: Synthetic oligonucleotide
  Antisense strand to SEQ ID NO: 154290
uuucuacuaaacauguugg

SEQ ID NO: 154292 - RNA, 19 nt, Artificial Sequence
  Description of Artificial Sequence: Synthetic oligonucleotide
  Sense strand starting at position 1023 of SEQ ID NO: 1982
aguagaaacuccgucucua

SEQ ID NO: 154293 - RNA, 19 nt, Artificial Sequence
  Description of Artificial Sequence: Synthetic oligonucleotide
  Antisense strand to SEQ ID NO: 154292
uagagacggaguuucuacu

SEQ ID NO: 154294 - RNA, 19 nt, Artificial Sequence
  Description of Artificial Sequence: Synthetic oligonucleotide
  Sense strand starting at position 1235 of SEQ ID NO: 1982
gcaccuuucugauuaauga

SEQ ID NO: 154295 - RNA, 19 nt, Artificial Sequence
  Description of Artificial Sequence: Synthetic oligonucleotide
  Antisense strand to SEQ ID NO: 154294
ucauuaaucagaaaggugc

SEQ ID NO: 154296 - RNA, 19 nt, Artificial Sequence
  Description of Artificial Sequence: Synthetic oligonucleotide
  Sense strand starting at position 1347 of SEQ ID NO: 1982
ggccaauccgguuaccuuu

SEQ ID NO: 154297 - RNA, 19 nt, Artificial Sequence
  Description of Artificial Sequence: Synthetic oligonucleotide
  Antisense strand to SEQ ID NO: 154296
aaagguaaccggauuggcc

SEQ ID NO: 154298 - RNA, 19 nt, Artificial Sequence
  Description of Artificial Sequence: Synthetic oligonucleotide
  Sense strand starting at position 1536 of SEQ ID NO: 1982
guuaguuugcguucuggag

SEQ ID NO: 154299 - RNA, 19 nt, Artificial Sequence
  Description of Artificial Sequence: Synthetic oligonucleotide
  Antisense strand to SEQ ID NO: 154298
cuccagaacgcaaacuaac

SEQ ID NO: 154300 - RNA, 19 nt, Artificial Sequence
  Description of Artificial Sequence: Synthetic oligonucleotide
  Sense strand starting at position 1537 of SEQ ID NO: 1982
uuaguuugcguucuggagu

SEQ ID NO: 154301 - RNA, 19 nt, Artificial Sequence
  Description of Artificial Sequence: Synthetic oligonucleotide
  Antisense strand to SEQ ID NO: 154300
acuccagaacgcaaacuaa

SEQ ID NO: 154302 - RNA, 19 nt, Artificial Sequence
  Description of Artificial Sequence: Synthetic oligonucleotide
  Sense strand starting at position 1540 of SEQ ID NO: 1982
guuugcguucuggaguaga

SEQ ID NO: 154303 - RNA, 19 nt, Artificial Sequence
  Description of Artificial Sequence: Synthetic oligonucleotide
  Antisense strand to SEQ ID NO: 154302
ucuacuccagaacgcaaac

SEQ ID NO: 154304 - RNA, 19 nt, Artificial Sequence
  Description of Artificial Sequence: Synthetic oligonucleotide
  Sense strand starting at position 1689 of SEQ ID NO: 1982
ggagguucugagggccaaa

SEQ ID NO: 154305 - RNA, 19 nt, Artificial Sequence
  Description of Artificial Sequence: Synthetic oligonucleotide
  Antisense strand to SEQ ID NO: 154304
uuuggcccucagaaccucc

SEQ ID NO: 154306 - RNA, 19 nt, Artificial Sequence
  Description of Artificial Sequence: Synthetic oligonucleotide
  Sense strand starting at position 1782 of SEQ ID NO: 1982
guggacuucuuggugagca

SEQ ID NO: 154307 - RNA, 19 nt, Artificial Sequence
  Description of Artificial Sequence: Synthetic oligonucleotide
  Antisense strand to SEQ ID NO: 154306
ugcucaccaagaaguccac

SEQ ID NO: 154308 - RNA, 19 nt, Artificial Sequence
  Description of Artificial Sequence: Synthetic oligonucleotide
  Sense strand starting at position 1784 of SEQ ID NO: 1982
ggacuucuuggugagcauc

SEQ ID NO: 154309 - RNA, 19 nt, Artificial Sequence
  Description of Artificial Sequence: Synthetic oligonucleotide
  Antisense strand to SEQ ID NO: 154308
gaugcucaccaagaagucc

SEQ ID NO: 154310 - RNA, 19 nt, Artificial Sequence
  Description of Artificial Sequence: Synthetic oligonucleotide
  Sense strand starting at position 1795 of SEQ ID NO: 1982
ugagcaucucuuuagccau

SEQ ID NO: 154311 - RNA, 19 nt, Artificial Sequence
  Description of Artificial Sequence: Synthetic oligonucleotide
  Antisense strand to SEQ ID NO: 154310
auggcuaaagagaugcuca

SEQ ID NO: 154312 - RNA, 19 nt, Artificial Sequence
  Description of Artificial Sequence: Synthetic oligonucleotide
  Sense strand starting at position 1828 of SEQ ID NO: 1982
guuccuucuccucaugaua

SEQ ID NO: 154313 - RNA, 19 nt, Artificial Sequence
  Description of Artificial Sequence: Synthetic oligonucleotide
  Antisense strand to SEQ ID NO: 154312
uaucaugaggagaaggaac

SEQ ID NO: 154314 - RNA, 19 nt, Artificial Sequence
  Description of Artificial Sequence: Synthetic oligonucleotide
  Sense strand starting at position 2047 of SEQ ID NO: 1982
ccauguuauggagauggca

SEQ ID NO: 154315 - RNA, 19 nt, Artificial Sequence
  Description of Artificial Sequence: Synthetic oligonucleotide
  Antisense strand to SEQ ID NO: 154314
ugccaucuccauaacaugg

SEQ ID NO: 154316 - RNA, 19 nt, Artificial Sequence
  Description of Artificial Sequence: Synthetic oligonucleotide
  Sense strand starting at position 2204 of SEQ ID NO: 1982
cagguauccuguguggacu

SEQ ID NO: 154317 - RNA, 19 nt, Artificial Sequence
  Description of Artificial Sequence: Synthetic oligonucleotide
  Antisense strand to SEQ ID NO: 154316
aguccacacaggauaccug

SEQ ID NO: 154318 - RNA, 19 nt, Artificial Sequence
  Description of Artificial Sequence: Synthetic oligonucleotide
  Sense strand starting at position 2713 of SEQ ID NO: 1982
guagaaacgacuugucuau

SEQ ID NO: 154319 - RNA, 19 nt, Artificial Sequence
  Description of Artificial Sequence: Synthetic oligonucleotide
  Antisense strand to SEQ ID NO: 154318
auagacaagucguuucuac

SEQ ID NO: 154320 - RNA, 19 nt, Artificial Sequence
  Description of Artificial Sequence: Synthetic oligonucleotide
  Sense strand starting at position 2733 of SEQ ID NO: 1982
ggcagcgaauauguuaaau

SEQ ID NO: 154321 - RNA, 19 nt, Artificial Sequence
  Description of Artificial Sequence: Synthetic oligonucleotide
  Antisense strand to SEQ ID NO: 154320
auuuaacauauucgcugcc

SEQ ID NO: 154322 - RNA, 19 nt, Artificial Sequence
  Description of Artificial Sequence: Synthetic oligonucleotide
  Sense strand starting at position 3276 of SEQ ID NO: 1982
ccaugaaagcaucaugcua

SEQ ID NO: 154323 - RNA, 19 nt, Artificial Sequence
  Description of Artificial Sequence: Synthetic oligonucleotide
  Antisense strand to SEQ ID NO: 154322
uagcaugaugcuuucaugg

SEQ ID NO: 154324 - RNA, 19 nt, Artificial Sequence
  Description of Artificial Sequence: Synthetic oligonucleotide
  Sense strand starting at position 3506 of SEQ ID NO: 1982
cauaguuugccauguuuga

SEQ ID NO: 154325 - RNA, 19 nt, Artificial Sequence
  Description of Artificial Sequence: Synthetic oligonucleotide
  Antisense strand to SEQ ID NO: 154324
ucaaacauggcaaacuaug

SEQ ID NO: 154326 - RNA, 19 nt, Artificial Sequence
  Description of Artificial Sequence: Synthetic oligonucleotide
  Sense strand starting at position 3642 of SEQ ID NO: 1982
gcagcuuuaggcuacaauu

SEQ ID NO: 154327 - RNA, 19 nt, Artificial Sequence
  Description of Artificial Sequence: Synthetic oligonucleotide
  Antisense strand to SEQ ID NO: 154326
aauuguagccuaaagcugc

SEQ ID NO: 154328 - RNA, 19 nt, Artificial Sequence
  Description of Artificial Sequence: Synthetic oligonucleotide
  Sense strand starting at position 3644 of SEQ ID NO: 1982
agcuuuaggcuacaauuga

SEQ ID NO: 154329 - RNA, 19 nt, Artificial Sequence
  Description of Artificial Sequence: Synthetic oligonucleotide
  Antisense strand to SEQ ID NO: 154328
ucaauuguagccuaaagcu

SEQ ID NO: 154330 - RNA, 19 nt, Artificial Sequence
  Description of Artificial Sequence: Synthetic oligonucleotide
  Sense strand starting at position 3651 of SEQ ID NO: 1982
ggcuacaauugaguuaaca

SEQ ID NO: 154331 - RNA, 19 nt, Artificial Sequence
  Description of Artificial Sequence: Synthetic oligonucleotide
  Antisense strand to SEQ ID NO: 154330
uguuaacucaauuguagcc

SEQ ID NO: 154332 - RNA, 19 nt, Artificial Sequence
  Description of Artificial Sequence: Synthetic oligonucleotide
  Sense strand starting at position 3687 of SEQ ID NO: 1982
gcagaaauaugagugguug

SEQ ID NO: 154333 - RNA, 19 nt, Artificial Sequence
  Description of Artificial Sequence: Synthetic oligonucleotide
  Antisense strand to SEQ ID NO: 154332
caaccacucauauuucugc

SEQ ID NO: 154334 - RNA, 19 nt, Artificial Sequence
  Description of Artificial Sequence: Synthetic oligonucleotide
  Sense strand starting at position 3689 of SEQ ID NO: 1982
agaaauaugagugguugcu

SEQ ID NO: 154335 - RNA, 19 nt, Artificial Sequence
  Description of Artificial Sequence: Synthetic oligonucleotide
  Antisense strand to SEQ ID NO: 154334
agcaaccacucauauuucu

SEQ ID NO: 154336 - RNA, 19 nt, Artificial Sequence
  Description of Artificial Sequence: Synthetic oligonucleotide
  Sense strand starting at position 3717 of SEQ ID NO: 1982
aggugagauuggaagugau

SEQ ID NO: 154337 - RNA, 19 nt, Artificial Sequence
  Description of Artificial Sequence: Synthetic oligonucleotide
  Antisense strand to SEQ ID NO: 154336
aucacuuccaaucucaccu

SEQ ID NO: 154338 - RNA, 19 nt, Artificial Sequence
  Description of Artificial Sequence: Synthetic oligonucleotide
  Sense strand starting at position 3911 of SEQ ID NO: 1982
augaacucauauggagaga

SEQ ID NO: 154339 - RNA, 19 nt, Artificial Sequence
  Description of Artificial Sequence: Synthetic oligonucleotide
  Antisense strand to SEQ ID NO: 154338
ucucuccauaugaguucau

SEQ ID NO: 154340 - RNA, 19 nt, Artificial Sequence
  Description of Artificial Sequence: Synthetic oligonucleotide
  Sense strand starting at position 3955 of SEQ ID NO: 1982
gaugcacaaguguguauaa

SEQ ID NO: 154341 - RNA, 19 nt, Artificial Sequence
  Description of Artificial Sequence: Synthetic oligonucleotide
  Antisense strand to SEQ ID NO: 154340
uuauacacacuugugcauc

SEQ ID NO: 154342 - RNA, 19 nt, Artificial Sequence
  Description of Artificial Sequence: Synthetic oligonucleotide
  Sense strand starting at position 3956 of SEQ ID NO: 1982
augcacaaguguguauaaa

SEQ ID NO: 154343 - RNA, 19 nt, Artificial Sequence
  Description of Artificial Sequence: Synthetic oligonucleotide
  Antisense strand to SEQ ID NO: 154342
uuuauacacacuugugcau

SEQ ID NO: 154344 - RNA, 19 nt, Artificial Sequence
  Description of Artificial Sequence: Synthetic oligonucleotide
  Sense strand starting at position 210 of SEQ ID NO: 1983
gggcgaucagccugggaga

SEQ ID NO: 154345 - RNA, 19 nt, Artificial Sequence
  Description of Artificial Sequence: Synthetic oligonucleotide
  Antisense strand to SEQ ID NO: 154344
ucucccaggcugaucgccc

SEQ ID NO: 154346 - RNA, 19 nt, Artificial Sequence
  Description of Artificial Sequence: Synthetic oligonucleotide
  Sense strand starting at position 287 of SEQ ID NO: 1983
guccuucuugaaggcauaa

SEQ ID NO: 154347 - RNA, 19 nt, Artificial Sequence
  Description of Artificial Sequence: Synthetic oligonucleotide
  Antisense strand to SEQ ID NO: 154346
uuaugccuucaagaaggac

SEQ ID NO: 154348 - RNA, 19 nt, Artificial Sequence
  Description of Artificial Sequence: Synthetic oligonucleotide
  Sense strand starting at position 394 of SEQ ID NO: 1983
aggcauaaccuuuggaguu

SEQ ID NO: 154349 - RNA, 19 nt, Artificial Sequence
  Description of Artificial Sequence: Synthetic oligonucleotide
  Antisense strand to SEQ ID NO: 154348
aacuccaaagguuaugccu

SEQ ID NO: 154350 - RNA, 19 nt, Artificial Sequence
  Description of Artificial Sequence: Synthetic oligonucleotide
  Sense strand starting at position 463 of SEQ ID NO: 1983
aggcgcugaaaguaucaua

SEQ ID NO: 154351 - RNA, 19 nt, Artificial Sequence
  Description of Artificial Sequence: Synthetic oligonucleotide
  Antisense strand to SEQ ID NO: 154350
uaugauacuuucagcgccu

SEQ ID NO: 154352 - RNA, 19 nt, Artificial Sequence
  Description of Artificial Sequence: Synthetic oligonucleotide
  Sense strand starting at position 579 of SEQ ID NO: 1983
auuggcuucccauagaguu

SEQ ID NO: 154353 - RNA, 19 nt, Artificial Sequence
  Description of Artificial Sequence: Synthetic oligonucleotide
  Antisense strand to SEQ ID NO: 154352
aacucuaugggaagccaau

SEQ ID NO: 154354 - RNA, 19 nt, Artificial Sequence
  Description of Artificial Sequence: Synthetic oligonucleotide
  Sense strand starting at position 586 of SEQ ID NO: 1983
ucccauagaguuugaucau

SEQ ID NO: 154355 - RNA, 19 nt, Artificial Sequence
  Description of Artificial Sequence: Synthetic oligonucleotide
  Antisense strand to SEQ ID NO: 154354
augaucaaacucuauggga

SEQ ID NO: 154356 - RNA, 19 nt, Artificial Sequence
  Description of Artificial Sequence: Synthetic oligonucleotide
  Sense strand starting at position 589 of SEQ ID NO: 1983
cauagaguuugaucauguu

SEQ ID NO: 154357 - RNA, 19 nt, Artificial Sequence
  Description of Artificial Sequence: Synthetic oligonucleotide
  Antisense strand to SEQ ID NO: 154356
aacaugaucaaacucuaug

SEQ ID NO: 154358 - RNA, 19 nt, Artificial Sequence
  Description of Artificial Sequence: Synthetic oligonucleotide
  Sense strand starting at position 685 of SEQ ID NO: 1983
ggagguuaacaacguaagu

SEQ ID NO: 154359 - RNA, 19 nt, Artificial Sequence
  Description of Artificial Sequence: Synthetic oligonucleotide
  Antisense strand to SEQ ID NO: 154358
acuuacguuguuaaccucc

SEQ ID NO: 154360 - RNA, 19 nt, Artificial Sequence
  Description of Artificial Sequence: Synthetic oligonucleotide
  Sense strand starting at position 687 of SEQ ID NO: 1983
agguuaacaacguaaguaa

SEQ ID NO: 154361 - RNA, 19 nt, Artificial Sequence
  Description of Artificial Sequence: Synthetic oligonucleotide
  Antisense strand to SEQ ID NO: 154360
uuacuuacguuguuaaccu

SEQ ID NO: 154362 - RNA, 19 nt, Artificial Sequence
  Description of Artificial Sequence: Synthetic oligonucleotide
  Sense strand starting at position 777 of SEQ ID NO: 1983
acuuaagaaugguuccaga

SEQ ID NO: 154363 - RNA, 19 nt, Artificial Sequence
  Description of Artificial Sequence: Synthetic oligonucleotide
  Antisense strand to SEQ ID NO: 154362
ucuggaaccauucuuaagu

SEQ ID NO: 154364 - RNA, 19 nt, Artificial Sequence
  Description of Artificial Sequence: Synthetic oligonucleotide
  Sense strand starting at position 1206 of SEQ ID NO: 1983
ucgggaauccucugaaguc

SEQ ID NO: 154365 - RNA, 19 nt, Artificial Sequence
  Description of Artificial Sequence: Synthetic oligonucleotide
  Antisense strand to SEQ ID NO: 154364
gacuucagaggauucccga

SEQ ID NO: 154366 - RNA, 19 nt, Artificial Sequence
  Description of Artificial Sequence: Synthetic oligonucleotide
  Sense strand starting at position 1228 of SEQ ID NO: 1983
uuuaguauugugagugggu

SEQ ID NO: 154367 - RNA, 19 nt, Artificial Sequence
  Description of Artificial Sequence: Synthetic oligonucleotide
  Antisense strand to SEQ ID NO: 154366
acccacucacaauacuaaa

SEQ ID NO: 154368 - RNA, 19 nt, Artificial Sequence
  Description of Artificial Sequence: Synthetic oligonucleotide
  Sense strand starting at position 1712 of SEQ ID NO: 1983
cugcuaguugucuuagcga

SEQ ID NO: 154369 - RNA, 19 nt, Artificial Sequence
  Description of Artificial Sequence: Synthetic oligonucleotide
  Antisense strand to SEQ ID NO: 154368
ucgcuaagacaacuagcag

SEQ ID NO: 154370 - RNA, 19 nt, Artificial Sequence
  Description of Artificial Sequence: Synthetic oligonucleotide
  Sense strand starting at position 1714 of SEQ ID NO: 1983
gcuaguugucuuagcgagg

SEQ ID NO: 154371 - RNA, 19 nt, Artificial Sequence
  Description of Artificial Sequence: Synthetic oligonucleotide
  Antisense strand to SEQ ID NO: 154370
ccucgcuaagacaacuagc

SEQ ID NO: 154372 - RNA, 19 nt, Artificial Sequence
  Description of Artificial Sequence: Synthetic oligonucleotide
  Sense strand starting at position 1857 of SEQ ID NO: 1983
gacagugauucuucuucug

SEQ ID NO: 154373 - RNA, 19 nt, Artificial Sequence
  Description of Artificial Sequence: Synthetic oligonucleotide
  Antisense strand to SEQ ID NO: 154372
cagaagaagaaucacuguc

SEQ ID NO: 154374 - RNA, 19 nt, Artificial Sequence
  Description of Artificial Sequence: Synthetic oligonucleotide
  Sense strand starting at position 1869 of SEQ ID NO: 1983
ucuucuguuguccagagaa

SEQ ID NO: 154375 - RNA, 19 nt, Artificial Sequence
  Description of Artificial Sequence: Synthetic oligonucleotide
  Antisense strand to SEQ ID NO: 154374
uucucuggacaacagaaga

SEQ ID NO: 154376 - RNA, 19 nt, Artificial Sequence
  Description of Artificial Sequence: Synthetic oligonucleotide
  Sense strand starting at position 1871 of SEQ ID NO: 1983
uucuguuguccagagaagg

SEQ ID NO: 154377 - RNA, 19 nt, Artificial Sequence
  Description of Artificial Sequence: Synthetic oligonucleotide
  Antisense strand to SEQ ID NO: 154376
ccuucucuggacaacagaa

SEQ ID NO: 154378 - RNA, 19 nt, Artificial Sequence
  Description of Artificial Sequence: Synthetic oligonucleotide
  Sense strand starting at position 1881 of SEQ ID NO: 1983
cagagaaggaugugcugaa

SEQ ID NO: 154379 - RNA, 19 nt, Artificial Sequence
  Description of Artificial Sequence: Synthetic oligonucleotide
  Antisense strand to SEQ ID NO: 154378
uucagcacauccuucucug

SEQ ID NO: 154380 - RNA, 19 nt, Artificial Sequence
  Description of Artificial Sequence: Synthetic oligonucleotide
  Sense strand starting at position 1885 of SEQ ID NO: 1983
gaaggaugugcugaagagu

SEQ ID NO: 154381 - RNA, 19 nt, Artificial Sequence
  Description of Artificial Sequence: Synthetic oligonucleotide
  Antisense strand to SEQ ID NO: 154380
acucuucagcacauccuuc

SEQ ID NO: 154382 - RNA, 19 nt, Artificial Sequence
  Description of Artificial Sequence: Synthetic oligonucleotide
  Sense strand starting at position 2034 of SEQ ID NO: 1983
gagacugcgaaaugucuga

SEQ ID NO: 154383 - RNA, 19 nt, Artificial Sequence
  Description of Artificial Sequence: Synthetic oligonucleotide
  Antisense strand to SEQ ID NO: 154382
ucagacauuucgcagucuc

SEQ ID NO: 154384 - RNA, 19 nt, Artificial Sequence
  Description of Artificial Sequence: Synthetic oligonucleotide
  Sense strand starting at position 2041 of SEQ ID NO: 1983
cgaaaugucugagcuuaga

SEQ ID NO: 154385 - RNA, 19 nt, Artificial Sequence
  Description of Artificial Sequence: Synthetic oligonucleotide
  Antisense strand to SEQ ID NO: 154384
ucuaagcucagacauuucg

SEQ ID NO: 154386 - RNA, 19 nt, Artificial Sequence
  Description of Artificial Sequence: Synthetic oligonucleotide
  Sense strand starting at position 2070 of SEQ ID NO: 1983
cgcucaccucguccuaauu

SEQ ID NO: 154387 - RNA, 19 nt, Artificial Sequence
  Description of Artificial Sequence: Synthetic oligonucleotide
  Antisense strand to SEQ ID NO: 154386
aauuaggacgaggugagcg

SEQ ID NO: 154388 - RNA, 19 nt, Artificial Sequence
  Description of Artificial Sequence: Synthetic oligonucleotide
  Sense strand starting at position 2162 of SEQ ID NO: 1983
gagucuggaucucuagaac

SEQ ID NO: 154389 - RNA, 19 nt, Artificial Sequence
  Description of Artificial Sequence: Synthetic oligonucleotide
  Antisense strand to SEQ ID NO: 154388
guucuagagauccagacuc

SEQ ID NO: 154390 - RNA, 19 nt, Artificial Sequence
  Description of Artificial Sequence: Synthetic oligonucleotide
  Sense strand starting at position 2347 of SEQ ID NO: 1983
cuuuccuaccuaggagaau

SEQ ID NO: 154391 - RNA, 19 nt, Artificial Sequence
  Description of Artificial Sequence: Synthetic oligonucleotide
  Antisense strand to SEQ ID NO: 154390
auucuccuagguaggaaag

SEQ ID NO: 154392 - RNA, 19 nt, Artificial Sequence
  Description of Artificial Sequence: Synthetic oligonucleotide
  Sense strand starting at position 2391 of SEQ ID NO: 1983
gccagcaauguguauaaau

SEQ ID NO: 154393 - RNA, 19 nt, Artificial Sequence
  Description of Artificial Sequence: Synthetic oligonucleotide
  Antisense strand to SEQ ID NO: 154392
auuuauacacauugcuggc

SEQ ID NO: 154394 - RNA, 19 nt, Artificial Sequence
  Description of Artificial Sequence: Synthetic oligonucleotide
  Sense strand starting at position 2575 of SEQ ID NO: 1983
ucuuguugggacugaugaa

SEQ ID NO: 154395 - RNA, 19 nt, Artificial Sequence
  Description of Artificial Sequence: Synthetic oligonucleotide
  Antisense strand to SEQ ID NO: 154394
uucaucagucccaacaaga

SEQ ID NO: 154396 - RNA, 19 nt, Artificial Sequence
  Description of Artificial Sequence: Synthetic oligonucleotide
  Sense strand starting at position 2928 of SEQ ID NO: 1983
gggauugagaaugguaugu

SEQ ID NO: 154397 - RNA, 19 nt, Artificial Sequence
  Description of Artificial Sequence: Synthetic oligonucleotide
  Antisense strand to SEQ ID NO: 154396
acauaccauucucaauccc

SEQ ID NO: 154398 - RNA, 19 nt, Artificial Sequence
  Description of Artificial Sequence: Synthetic oligonucleotide
  Sense strand starting at position 2932 of SEQ ID NO: 1983
uugagaaugguauguggau

SEQ ID NO: 154399 - RNA, 19 nt, Artificial Sequence
  Description of Artificial Sequence: Synthetic oligonucleotide
  Antisense strand to SEQ ID NO: 154398
auccacauaccauucucaa

SEQ ID NO: 154400 - RNA, 19 nt, Artificial Sequence
  Description of Artificial Sequence: Synthetic oligonucleotide
  Sense strand starting at position 2933 of SEQ ID NO: 1983
ugagaaugguauguggauc

SEQ ID NO: 154401 - RNA, 19 nt, Artificial Sequence
  Description of Artificial Sequence: Synthetic oligonucleotide
  Antisense strand to SEQ ID NO: 154400
gauccacauaccauucuca

SEQ ID NO: 154402 - RNA, 19 nt, Artificial Sequence
  Description of Artificial Sequence: Synthetic oligonucleotide
  Sense strand starting at position 2934 of SEQ ID NO: 1983
gagaaugguauguggaucu

SEQ ID NO: 154403 - RNA, 19 nt, Artificial Sequence
  Description of Artificial Sequence: Synthetic oligonucleotide
  Antisense strand to SEQ ID NO: 154402
agauccacauaccauucuc

SEQ ID NO: 154404 - RNA, 19 nt, Artificial Sequence
  Description of Artificial Sequence: Synthetic oligonucleotide
  Sense strand starting at position 2975 of SEQ ID NO: 1983
gagauauucuuggugucca

SEQ ID NO: 154405 - RNA, 19 nt, Artificial Sequence
  Description of Artificial Sequence: Synthetic oligonucleotide
  Antisense strand to SEQ ID NO: 154404
uggacaccaagaauaucuc

SEQ ID NO: 154406 - RNA, 19 nt, Artificial Sequence
  Description of Artificial Sequence: Synthetic oligonucleotide
  Sense strand starting at position 2985 of SEQ ID NO: 1983
ugguguccauuuccguaau

SEQ ID NO: 154407 - RNA, 19 nt, Artificial Sequence
  Description of Artificial Sequence: Synthetic oligonucleotide
  Antisense strand to SEQ ID NO: 154406
auuacggaaauggacacca

SEQ ID NO: 154408 - RNA, 19 nt, Artificial Sequence
  Description of Artificial Sequence: Synthetic oligonucleotide
  Sense strand starting at position 2987 of SEQ ID NO: 1983
guguccauuuccguaauaa

SEQ ID NO: 154409 - RNA, 19 nt, Artificial Sequence
  Description of Artificial Sequence: Synthetic oligonucleotide
  Antisense strand to SEQ ID NO: 154408
uuauuacggaaauggacac

SEQ ID NO: 154410 - RNA, 19 nt, Artificial Sequence
  Description of Artificial Sequence: Synthetic oligonucleotide
  Sense strand starting at position 3016 of SEQ ID NO: 1983
ugggauagcucauccugga

SEQ ID NO: 154411 - RNA, 19 nt, Artificial Sequence
  Description of Artificial Sequence: Synthetic oligonucleotide
  Antisense strand to SEQ ID NO: 154410
uccaggaugagcuauccca

SEQ ID NO: 154412 - RNA, 19 nt, Artificial Sequence
  Description of Artificial Sequence: Synthetic oligonucleotide
  Sense strand starting at position 3224 of SEQ ID NO: 1983
ucccaaaccuuguuugaug

SEQ ID NO: 154413 - RNA, 19 nt, Artificial Sequence
  Description of Artificial Sequence: Synthetic oligonucleotide
  Antisense strand to SEQ ID NO: 154412
caucaaacaagguuuggga

SEQ ID NO: 154414 - RNA, 19 nt, Artificial Sequence
  Description of Artificial Sequence: Synthetic oligonucleotide
  Sense strand starting at position 3235 of SEQ ID NO: 1983
guuugaugccaagaggagu

SEQ ID NO: 154415 - RNA, 19 nt, Artificial Sequence
  Description of Artificial Sequence: Synthetic oligonucleotide
  Antisense strand to SEQ ID NO: 154414
acuccucuuggcaucaaac

SEQ ID NO: 154416 - RNA, 19 nt, Artificial Sequence
  Description of Artificial Sequence: Synthetic oligonucleotide
  Sense strand starting at position 3602 of SEQ ID NO: 1983
ggucaaugcuccucuagag

SEQ ID NO: 154417 - RNA, 19 nt, Artificial Sequence
  Description of Artificial Sequence: Synthetic oligonucleotide
  Antisense strand to SEQ ID NO: 154416
cucuagaggagcauugacc

SEQ ID NO: 154418 - RNA, 19 nt, Artificial Sequence
  Description of Artificial Sequence: Synthetic oligonucleotide
  Sense strand starting at position 3831 of SEQ ID NO: 1983
aggccucgggacugauuaa

SEQ ID NO: 154419 - RNA, 19 nt, Artificial Sequence
  Description of Artificial Sequence: Synthetic oligonucleotide
  Antisense strand to SEQ ID NO: 154418
uuaaucagucccgaggccu

SEQ ID NO: 154420 - RNA, 19 nt, Artificial Sequence
  Description of Artificial Sequence: Synthetic oligonucleotide
  Sense strand starting at position 3946 of SEQ ID NO: 1983
ucuucugucuuccuaggga

SEQ ID NO: 154421 - RNA, 19 nt, Artificial Sequence
  Description of Artificial Sequence: Synthetic oligonucleotide
  Antisense strand to SEQ ID NO: 154420
ucccuaggaagacagaaga

SEQ ID NO: 154422 - RNA, 19 nt, Artificial Sequence
  Description of Artificial Sequence: Synthetic oligonucleotide
  Sense strand starting at position 3977 of SEQ ID NO: 1983
auaagugacagcugcagaa

SEQ ID NO: 154423 - RNA, 19 nt, Artificial Sequence
  Description of Artificial Sequence: Synthetic oligonucleotide
  Antisense strand to SEQ ID NO: 154422
uucugcagcugucacuuau

SEQ ID NO: 154424 - RNA, 19 nt, Artificial Sequence
  Description of Artificial Sequence: Synthetic oligonucleotide
  Sense strand starting at position 3942 of SEQ ID NO: 1984
gguagugagagugagugau

SEQ ID NO: 154425 - RNA, 19 nt, Artificial Sequence
  Description of Artificial Sequence: Synthetic oligonucleotide
  Antisense strand to SEQ ID NO: 154424
aucacucacucucacuacc

SEQ ID NO: 154426 - RNA, 19 nt, Artificial Sequence
  Description of Artificial Sequence: Synthetic oligonucleotide
  Sense strand starting at position 3816 of SEQ ID NO: 1984
caggguuuccaaggaagua

SEQ ID NO: 154427 - RNA, 19 nt, Artificial Sequence
  Description of Artificial Sequence: Synthetic oligonucleotide
  Antisense strand to SEQ ID NO: 154426
uacuuccuuggaaacccug

SEQ ID NO: 154428 - RNA, 19 nt, Artificial Sequence
  Description of Artificial Sequence: Synthetic oligonucleotide
  Sense strand starting at position 3794 of SEQ ID NO: 1984
ggacaugucugggcuaaug

SEQ ID NO: 154429 - RNA, 19 nt, Artificial Sequence
  Description of Artificial Sequence: Synthetic oligonucleotide
  Antisense strand to SEQ ID NO: 154428
cauuagcccagacaugucc

SEQ ID NO: 154430 - RNA, 19 nt, Artificial Sequence
  Description of Artificial Sequence: Synthetic oligonucleotide
  Sense strand starting at position 3793 of SEQ ID NO: 1984
gggacaugucugggcuaau

SEQ ID NO: 154431 - RNA, 19 nt, Artificial Sequence
  Description of Artificial Sequence: Synthetic oligonucleotide
  Antisense strand to SEQ ID NO: 154430
auuagcccagacauguccc

SEQ ID NO: 154432 - RNA, 19 nt, Artificial Sequence
  Description of Artificial Sequence: Synthetic oligonucleotide
  Sense strand starting at position 3792 of SEQ ID NO: 1984
agggacaugucugggcuaa

SEQ ID NO: 154433 - RNA, 19 nt, Artificial Sequence
  Description of Artificial Sequence: Synthetic oligonucleotide
  Antisense strand to SEQ ID NO: 154432
uuagcccagacaugucccu

SEQ ID NO: 154434 - RNA, 19 nt, Artificial Sequence
  Description of Artificial Sequence: Synthetic oligonucleotide
  Sense strand starting at position 3791 of SEQ ID NO: 1984
uagggacaugucugggcua

SEQ ID NO: 154435 - RNA, 19 nt, Artificial Sequence
  Description of Artificial Sequence: Synthetic oligonucleotide
  Antisense strand to SEQ ID NO: 154434
uagcccagacaugucccua

SEQ ID NO: 154436 - RNA, 19 nt, Artificial Sequence
  Description of Artificial Sequence: Synthetic oligonucleotide
  Sense strand starting at position 3692 of SEQ ID NO: 1984
cucugagugucugaacacu

SEQ ID NO: 154437 - RNA, 19 nt, Artificial Sequence
  Description of Artificial Sequence: Synthetic oligonucleotide
  Antisense strand to SEQ ID NO: 154436
aguguucagacacucagag

SEQ ID NO: 154438 - RNA, 19 nt, Artificial Sequence
  Description of Artificial Sequence: Synthetic oligonucleotide
  Sense strand starting at position 3646 of SEQ ID NO: 1984
auaguugagccaggauaau

SEQ ID NO: 154439 - RNA, 19 nt, Artificial Sequence
  Description of Artificial Sequence: Synthetic oligonucleotide
  Antisense strand to SEQ ID NO: 154438
auuauccuggcucaacuau

SEQ ID NO: 154440 - RNA, 19 nt, Artificial Sequence
  Description of Artificial Sequence: Synthetic oligonucleotide
  Sense strand starting at position 3628 of SEQ ID NO: 1984
ugggauucugccgaccuaa

SEQ ID NO: 154441 - RNA, 19 nt, Artificial Sequence
  Description of Artificial Sequence: Synthetic oligonucleotide
  Antisense strand to SEQ ID NO: 154440
uuaggucggcagaauccca

SEQ ID NO: 154442 - RNA, 19 nt, Artificial Sequence
  Description of Artificial Sequence: Synthetic oligonucleotide
  Sense strand starting at position 3553 of SEQ ID NO: 1984
agggauggauuccugcuua

SEQ ID NO: 154443 - RNA, 19 nt, Artificial Sequence
  Description of Artificial Sequence: Synthetic oligonucleotide
  Antisense strand to SEQ ID NO: 154442
uaagcaggaauccaucccu

SEQ ID NO: 154444 - RNA, 19 nt, Artificial Sequence
  Description of Artificial Sequence: Synthetic oligonucleotide
  Sense strand starting at position 3436 of SEQ ID NO: 1984
cuggcagaguccucagaga

SEQ ID NO: 154445 - RNA, 19 nt, Artificial Sequence
  Description of Artificial Sequence: Synthetic oligonucleotide
  Antisense strand to SEQ ID NO: 154444
ucucugaggacucugccag

SEQ ID NO: 154446 - RNA, 19 nt, Artificial Sequence
  Description of Artificial Sequence: Synthetic oligonucleotide
  Sense strand starting at position 3286 of SEQ ID NO: 1984
agcagaucucacuacauug

SEQ ID NO: 154447 - RNA, 19 nt, Artificial Sequence
  Description of Artificial Sequence: Synthetic oligonucleotide
  Antisense strand to SEQ ID NO: 154446
caauguagugagaucugcu

SEQ ID NO: 154448 - RNA, 19 nt, Artificial Sequence
  Description of Artificial Sequence: Synthetic oligonucleotide
  Sense strand starting at position 3283 of SEQ ID NO: 1984
gagagcagaucucacuaca

SEQ ID NO: 154449 - RNA, 19 nt, Artificial Sequence
  Description of Artificial Sequence: Synthetic oligonucleotide
  Antisense strand to SEQ ID NO: 154448
uguagugagaucugcucuc

SEQ ID NO: 154450 - RNA, 19 nt, Artificial Sequence
  Description of Artificial Sequence: Synthetic oligonucleotide
  Sense strand starting at position 3241 of SEQ ID NO: 1984
ucagaaguuuacuuguucu

SEQ ID NO: 154451 - RNA, 19 nt, Artificial Sequence
  Description of Artificial Sequence: Synthetic oligonucleotide
  Antisense strand to SEQ ID NO: 154450
agaacaaguaaacuucuga

SEQ ID NO: 154452 - RNA, 19 nt, Artificial Sequence
  Description of Artificial Sequence: Synthetic oligonucleotide
  Sense strand starting at position 3072 of SEQ ID NO: 1984
cagacugcucucugucuga

SEQ ID NO: 154453 - RNA, 19 nt, Artificial Sequence
  Description of Artificial Sequence: Synthetic oligonucleotide
  Antisense strand to SEQ ID NO: 154452
ucagacagagagcagucug

SEQ ID NO: 154454 - RNA, 19 nt, Artificial Sequence
  Description of Artificial Sequence: Synthetic oligonucleotide
  Sense strand starting at position 2935 of SEQ ID NO: 1984
ccacuuguuugaggauuua

SEQ ID NO: 154455 - RNA, 19 nt, Artificial Sequence
  Description of Artificial Sequence: Synthetic oligonucleotide
  Antisense strand to SEQ ID NO: 154454
uaaauccucaaacaagugg

SEQ ID NO: 154456 - RNA, 19 nt, Artificial Sequence
  Description of Artificial Sequence: Synthetic oligonucleotide
  Sense strand starting at position 2933 of SEQ ID NO: 1984
ugccacuuguuugaggauu

SEQ ID NO: 154457 - RNA, 19 nt, Artificial Sequence
  Description of Artificial Sequence: Synthetic oligonucleotide
  Antisense strand to SEQ ID NO: 154456
aauccucaaacaaguggca

SEQ ID NO: 154458 - RNA, 19 nt, Artificial Sequence
  Description of Artificial Sequence: Synthetic oligonucleotide
  Sense strand starting at position 2932 of SEQ ID NO: 1984
uugccacuuguuugaggau

SEQ ID NO: 154459 - RNA, 19 nt, Artificial Sequence
  Description of Artificial Sequence: Synthetic oligonucleotide
  Antisense strand to SEQ ID NO: 154458
auccucaaacaaguggcaa

SEQ ID NO: 154460 - RNA, 19 nt, Artificial Sequence
  Description of Artificial Sequence: Synthetic oligonucleotide
  Sense strand starting at position 2868 of SEQ ID NO: 1984
ccaguagguuuguuggaca

SEQ ID NO: 154461 - RNA, 19 nt, Artificial Sequence
  Description of Artificial Sequence: Synthetic oligonucleotide
  Antisense strand to SEQ ID NO: 154460
uguccaacaaaccuacugg

SEQ ID NO: 154462 - RNA, 19 nt, Artificial Sequence
  Description of Artificial Sequence: Synthetic oligonucleotide
  Sense strand starting at position 2855 of SEQ ID NO: 1984
uguaauuagucacccagua

SEQ ID NO: 154463 - RNA, 19 nt, Artificial Sequence
  Description of Artificial Sequence: Synthetic oligonucleotide
  Antisense strand to SEQ ID NO: 154462
uacugggugacuaauuaca

SEQ ID NO: 154464 - RNA, 19 nt, Artificial Sequence
  Description of Artificial Sequence: Synthetic oligonucleotide
  Sense strand starting at position 2852 of SEQ ID NO: 1984
cuuuguaauuagucaccca

SEQ ID NO: 154465 - RNA, 19 nt, Artificial Sequence
  Description of Artificial Sequence: Synthetic oligonucleotide
  Antisense strand to SEQ ID NO: 154464
ugggugacuaauuacaaag

SEQ ID NO: 154466 - RNA, 19 nt, Artificial Sequence
  Description of Artificial Sequence: Synthetic oligonucleotide
  Sense strand starting at position 2844 of SEQ ID NO: 1984
agcccagccuuuguaauua

SEQ ID NO: 154467 - RNA, 19 nt, Artificial Sequence
  Description of Artificial Sequence: Synthetic oligonucleotide
  Antisense strand to SEQ ID NO: 154466
uaauuacaaaggcugggcu

SEQ ID NO: 154468 - RNA, 19 nt, Artificial Sequence
  Description of Artificial Sequence: Synthetic oligonucleotide
  Sense strand starting at position 2805 of SEQ ID NO: 1984
cgcuuaaugaaguguuuaa

SEQ ID NO: 154469 - RNA, 19 nt, Artificial Sequence
  Description of Artificial Sequence: Synthetic oligonucleotide
  Antisense strand to SEQ ID NO: 154468
uuaaacacuucauuaagcg

SEQ ID NO: 154470 - RNA, 19 nt, Artificial Sequence
  Description of Artificial Sequence: Synthetic oligonucleotide
  Sense strand starting at position 2705 of SEQ ID NO: 1984
uucucagucuaccugaaga

SEQ ID NO: 154471 - RNA, 19 nt, Artificial Sequence
  Description of Artificial Sequence: Synthetic oligonucleotide
  Antisense strand to SEQ ID NO: 154470
ucuucagguagacugagaa

SEQ ID NO: 154472 - RNA, 19 nt, Artificial Sequence
  Description of Artificial Sequence: Synthetic oligonucleotide
  Sense strand starting at position 2678 of SEQ ID NO: 1984
uguguuuggaagugagauc

SEQ ID NO: 154473 - RNA, 19 nt, Artificial Sequence
  Description of Artificial Sequence: Synthetic oligonucleotide
  Antisense strand to SEQ ID NO: 154472
gaucucacuuccaaacaca

SEQ ID NO: 154474 - RNA, 19 nt, Artificial Sequence
  Description of Artificial Sequence: Synthetic oligonucleotide
  Sense strand starting at position 2672 of SEQ ID NO: 1984
ccagacuguguuuggaagu

SEQ ID NO: 154475 - RNA, 19 nt, Artificial Sequence
  Description of Artificial Sequence: Synthetic oligonucleotide
  Antisense strand to SEQ ID NO: 154474
acuuccaaacacagucugg

SEQ ID NO: 154476 - RNA, 19 nt, Artificial Sequence
  Description of Artificial Sequence: Synthetic oligonucleotide
  Sense strand starting at position 2647 of SEQ ID NO: 1984
cauugaggccucugaccua

SEQ ID NO: 154477 - RNA, 19 nt, Artificial Sequence
  Description of Artificial Sequence: Synthetic oligonucleotide
  Antisense strand to SEQ ID NO: 154476
uaggucagaggccucaaug

SEQ ID NO: 154478 - RNA, 19 nt, Artificial Sequence
  Description of Artificial Sequence: Synthetic oligonucleotide
  Sense strand starting at position 2508 of SEQ ID NO: 1984
ccaccaugucucugugaca

SEQ ID NO: 154479 - RNA, 19 nt, Artificial Sequence
  Description of Artificial Sequence: Synthetic oligonucleotide
  Antisense strand to SEQ ID NO: 154478
ugucacagagacauggugg

SEQ ID NO: 154480 - RNA, 19 nt, Artificial Sequence
  Description of Artificial Sequence: Synthetic oligonucleotide
  Sense strand starting at position 2439 of SEQ ID NO: 1984
gauaacucauguuuaggua

SEQ ID NO: 154481 - RNA, 19 nt, Artificial Sequence
  Description of Artificial Sequence: Synthetic oligonucleotide
  Antisense strand to SEQ ID NO: 154480
uaccuaaacaugaguuauc

SEQ ID NO: 154482 - RNA, 19 nt, Artificial Sequence
  Description of Artificial Sequence: Synthetic oligonucleotide
  Sense strand starting at position 2436 of SEQ ID NO: 1984
gaggauaacucauguuuag

SEQ ID NO: 154483 - RNA, 19 nt, Artificial Sequence
  Description of Artificial Sequence: Synthetic oligonucleotide
  Antisense strand to SEQ ID NO: 154482
cuaaacaugaguuauccuc

SEQ ID NO: 154484 - RNA, 19 nt, Artificial Sequence
  Description of Artificial Sequence: Synthetic oligonucleotide
  Sense strand starting at position 2424 of SEQ ID NO: 1984
cuugguucaggugaggaua

SEQ ID NO: 154485 - RNA, 19 nt, Artificial Sequence
  Description of Artificial Sequence: Synthetic oligonucleotide
  Antisense strand to SEQ ID NO: 154484
uauccucaccugaaccaag

SEQ ID NO: 154486 - RNA, 19 nt, Artificial Sequence
  Description of Artificial Sequence: Synthetic oligonucleotide
  Sense strand starting at position 2397 of SEQ ID NO: 1984
uccuaauccugccagguaa

SEQ ID NO: 154487 - RNA, 19 nt, Artificial Sequence
  Description of Artificial Sequence: Synthetic oligonucleotide
  Antisense strand to SEQ ID NO: 154486
uuaccuggcaggauuagga

SEQ ID NO: 154488 - RNA, 19 nt, Artificial Sequence
  Description of Artificial Sequence: Synthetic oligonucleotide
  Sense strand starting at position 2279 of SEQ ID NO: 1984
ggaaacggcuucucaaauc

SEQ ID NO: 154489 - RNA, 19 nt, Artificial Sequence
  Description of Artificial Sequence: Synthetic oligonucleotide
  Antisense strand to SEQ ID NO: 154488
gauuugagaagccguuucc

SEQ ID NO: 154490 - RNA, 19 nt, Artificial Sequence
  Description of Artificial Sequence: Synthetic oligonucleotide
  Sense strand starting at position 2156 of SEQ ID NO: 1984
ggugaaucaucagaacagu

SEQ ID NO: 154491 - RNA, 19 nt, Artificial Sequence
  Description of Artificial Sequence: Synthetic oligonucleotide
  Antisense strand to SEQ ID NO: 154490
acuguucugaugauucacc

SEQ ID NO: 154492 - RNA, 19 nt, Artificial Sequence
  Description of Artificial Sequence: Synthetic oligonucleotide
  Sense strand starting at position 623 of SEQ ID NO: 1984
gucucuaagucagauucca

SEQ ID NO: 154493 - RNA, 19 nt, Artificial Sequence
  Description of Artificial Sequence: Synthetic oligonucleotide
  Antisense strand to SEQ ID NO: 154492
uggaaucugacuuagagac

SEQ ID NO: 154494 - RNA, 19 nt, Artificial Sequence
  Description of Artificial Sequence: Synthetic oligonucleotide
  Sense strand starting at position 619 of SEQ ID NO: 1984
cagggucucuaagucagau

SEQ ID NO: 154495 - RNA, 19 nt, Artificial Sequence
  Description of Artificial Sequence: Synthetic oligonucleotide
  Antisense strand to SEQ ID NO: 154494
aucugacuuagagacccug

SEQ ID NO: 154496 - RNA, 19 nt, Artificial Sequence
  Description of Artificial Sequence: Synthetic oligonucleotide
  Sense strand starting at position 334 of SEQ ID NO: 1984
cggcgcuguccuuagaucu

SEQ ID NO: 154497 - RNA, 19 nt, Artificial Sequence
  Description of Artificial Sequence: Synthetic oligonucleotide
  Antisense strand to SEQ ID NO: 154496
agaucuaaggacagcgccg

SEQ ID NO: 154498 - RNA, 19 nt, Artificial Sequence
  Description of Artificial Sequence: Synthetic oligonucleotide
  Sense strand starting at position 289 of SEQ ID NO: 1984
cugugacccgccugcaaau

SEQ ID NO: 154499 - RNA, 19 nt, Artificial Sequence
  Description of Artificial Sequence: Synthetic oligonucleotide
  Antisense strand to SEQ ID NO: 154498
auuugcaggcgggucacag

SEQ ID NO: 154500 - RNA, 19 nt, Artificial Sequence
  Description of Artificial Sequence: Synthetic oligonucleotide
  Sense strand starting at position 272 of SEQ ID NO: 1984
cugagcccuugaugaaacu

SEQ ID NO: 154501 - RNA, 19 nt, Artificial Sequence
  Description of Artificial Sequence: Synthetic oligonucleotide
  Antisense strand to SEQ ID NO: 154500
aguuucaucaagggcucag

SEQ ID NO: 154502 - RNA, 19 nt, Artificial Sequence
  Description of Artificial Sequence: Synthetic oligonucleotide
  Sense strand starting at position 193 of SEQ ID NO: 1984
acgugacccucuccuaaga

SEQ ID NO: 154503 - RNA, 19 nt, Artificial Sequence
  Description of Artificial Sequence: Synthetic oligonucleotide
  Antisense strand to SEQ ID NO: 154502
ucuuaggagagggucacgu

SEQ ID NO: 154504 - RNA, 19 nt, Artificial Sequence
  Description of Artificial Sequence: Synthetic oligonucleotide
  Sense strand starting at position 42 of SEQ ID NO: 1985
ugcauuauaccgcaagcau

SEQ ID NO: 154505 - RNA, 19 nt, Artificial Sequence
  Description of Artificial Sequence: Synthetic oligonucleotide
  Antisense strand to SEQ ID NO: 154504
augcuugcgguauaaugca

SEQ ID NO: 154506 - RNA, 19 nt, Artificial Sequence
  Description of Artificial Sequence: Synthetic oligonucleotide
  Sense strand starting at position 64 of SEQ ID NO: 1985
uccuguaagaauggugaaa

SEQ ID NO: 154507 - RNA, 19 nt, Artificial Sequence
  Description of Artificial Sequence: Synthetic oligonucleotide
  Antisense strand to SEQ ID NO: 154506
uuucaccauucuuacagga

SEQ ID NO: 154508 - RNA, 19 nt, Artificial Sequence
  Description of Artificial Sequence: Synthetic oligonucleotide
  Sense strand starting at position 210 of SEQ ID NO: 1985
auccgaauccuuugccuuu

SEQ ID NO: 154509 - RNA, 19 nt, Artificial Sequence
  Description of Artificial Sequence: Synthetic oligonucleotide
  Antisense strand to SEQ ID NO: 154508
aaaggcaaaggauucggau

SEQ ID NO: 154510 - RNA, 19 nt, Artificial Sequence
  Description of Artificial Sequence: Synthetic oligonucleotide
  Sense strand starting at position 216 of SEQ ID NO: 1985
auccuuugccuuuguugau

SEQ ID NO: 154511 - RNA, 19 nt, Artificial Sequence
  Description of Artificial Sequence: Synthetic oligonucleotide
  Antisense strand to SEQ ID NO: 154510
aucaacaaaggcaaaggau

SEQ ID NO: 154512 - RNA, 19 nt, Artificial Sequence
  Description of Artificial Sequence: Synthetic oligonucleotide
  Sense strand starting at position 217 of SEQ ID NO: 1985
uccuuugccuuuguugaua

SEQ ID NO: 154513 - RNA, 19 nt, Artificial Sequence
  Description of Artificial Sequence: Synthetic oligonucleotide
  Antisense strand to SEQ ID NO: 154512
uaucaacaaaggcaaagga

SEQ ID NO: 154514 - RNA, 19 nt, Artificial Sequence
  Description of Artificial Sequence: Synthetic oligonucleotide
  Sense strand starting at position 242 of SEQ ID NO: 1985
ucuccugguucuccauauu

SEQ ID NO: 154515 - RNA, 19 nt, Artificial Sequence
  Description of Artificial Sequence: Synthetic oligonucleotide
  Antisense strand to SEQ ID NO: 154514
aauauggagaaccaggaga

SEQ ID NO: 154516 - RNA, 19 nt, Artificial Sequence
  Description of Artificial Sequence: Synthetic oligonucleotide
  Sense strand starting at position 288 of SEQ ID NO: 1985
ccgugauaucagcagguag

SEQ ID NO: 154517 - RNA, 19 nt, Artificial Sequence
  Description of Artificial Sequence: Synthetic oligonucleotide
  Antisense strand to SEQ ID NO: 154516
cuaccugcugauaucacgg

SEQ ID NO: 154518 - RNA, 19 nt, Artificial Sequence
  Description of Artificial Sequence: Synthetic oligonucleotide
  Sense strand starting at position 299 of SEQ ID NO: 1985
gcagguagauucccaacaa

SEQ ID NO: 154519 - RNA, 19 nt, Artificial Sequence
  Description of Artificial Sequence: Synthetic oligonucleotide
  Antisense strand to SEQ ID NO: 154518
uuguugggaaucuaccugc

SEQ ID NO: 154520 - RNA, 19 nt, Artificial Sequence
  Description of Artificial Sequence: Synthetic oligonucleotide
  Sense strand starting at position 321 of SEQ ID NO: 1985
accgacaucgcugugugua

SEQ ID NO: 154521 - RNA, 19 nt, Artificial Sequence
  Description of Artificial Sequence: Synthetic oligonucleotide
  Antisense strand to SEQ ID NO: 154520
uacacacagcgaugucggu

SEQ ID NO: 154522 - RNA, 19 nt, Artificial Sequence
  Description of Artificial Sequence: Synthetic oligonucleotide
  Sense strand starting at position 417 of SEQ ID NO: 1985
accagagaccucugcaagu

SEQ ID NO: 154523 - RNA, 19 nt, Artificial Sequence
  Description of Artificial Sequence: Synthetic oligonucleotide
  Antisense strand to SEQ ID NO: 154522
acuugcagaggucucuggu

SEQ ID NO: 154524 - RNA, 19 nt, Artificial Sequence
  Description of Artificial Sequence: Synthetic oligonucleotide
  Sense strand starting at position 512 of SEQ ID NO: 1985
uuuacuaugugagauuucu

SEQ ID NO: 154525 - RNA, 19 nt, Artificial Sequence
  Description of Artificial Sequence: Synthetic oligonucleotide
  Antisense strand to SEQ ID NO: 154524
agaaaucucacauaguaaa

SEQ ID NO: 154526 - RNA, 19 nt, Artificial Sequence
  Description of Artificial Sequence: Synthetic oligonucleotide
  Sense strand starting at position 518 of SEQ ID NO: 1985
augugagauuucuaacaug

SEQ ID NO: 154527 - RNA, 19 nt, Artificial Sequence
  Description of Artificial Sequence: Synthetic oligonucleotide
  Antisense strand to SEQ ID NO: 154526
cauguuagaaaucucacau

SEQ ID NO: 154528 - RNA, 19 nt, Artificial Sequence
  Description of Artificial Sequence: Synthetic oligonucleotide
  Sense strand starting at position 521 of SEQ ID NO: 1985
ugagauuucuaacaugagc

SEQ ID NO: 154529 - RNA, 19 nt, Artificial Sequence
  Description of Artificial Sequence: Synthetic oligonucleotide
  Antisense strand to SEQ ID NO: 154528
gcucauguuagaaaucuca

SEQ ID NO: 154530 - RNA, 19 nt, Artificial Sequence
  Description of Artificial Sequence: Synthetic oligonucleotide
  Sense strand starting at position 570 of SEQ ID NO: 1985
cauccagaauguucgagaa

SEQ ID NO: 154531 - RNA, 19 nt, Artificial Sequence
  Description of Artificial Sequence: Synthetic oligonucleotide
  Antisense strand to SEQ ID NO: 154530
uucucgaacauucuggaug

SEQ ID NO: 154532 - RNA, 19 nt, Artificial Sequence
  Description of Artificial Sequence: Synthetic oligonucleotide
  Sense strand starting at position 572 of SEQ ID NO: 1985
uccagaauguucgagaaua

SEQ ID NO: 154533 - RNA, 19 nt, Artificial Sequence
  Description of Artificial Sequence: Synthetic oligonucleotide
  Antisense strand to SEQ ID NO: 154532
uauucucgaacauucugga

SEQ ID NO: 154534 - RNA, 19 nt, Artificial Sequence
  Description of Artificial Sequence: Synthetic oligonucleotide
  Sense strand starting at position 639 of SEQ ID NO: 1985
uauguugagugucccuaaa

SEQ ID NO: 154535 - RNA, 19 nt, Artificial Sequence
  Description of Artificial Sequence: Synthetic oligonucleotide
  Antisense strand to SEQ ID NO: 154534
uuuagggacacucaacaua

SEQ ID NO: 154536 - RNA, 19 nt, Artificial Sequence
  Description of Artificial Sequence: Synthetic oligonucleotide
  Sense strand starting at position 1088 of SEQ ID NO: 1985
ccgagaucuucuccucgcu

SEQ ID NO: 154537 - RNA, 19 nt, Artificial Sequence
  Description of Artificial Sequence: Synthetic oligonucleotide
  Antisense strand to SEQ ID NO: 154536
agcgaggagaagaucucgg

SEQ ID NO: 154538 - RNA, 19 nt, Artificial Sequence
  Description of Artificial Sequence: Synthetic oligonucleotide
  Sense strand starting at position 1891 of SEQ ID NO: 1985
aaccgaucccgagacaugu

SEQ ID NO: 154539 - RNA, 19 nt, Artificial Sequence
  Description of Artificial Sequence: Synthetic oligonucleotide
  Antisense strand to SEQ ID NO: 154538
acaugucucgggaucgguu

SEQ ID NO: 154540 - RNA, 19 nt, Artificial Sequence
  Description of Artificial Sequence: Synthetic oligonucleotide
  Sense strand starting at position 1900 of SEQ ID NO: 1985
cgagacaugucugugguca

SEQ ID NO: 154541 - RNA, 19 nt, Artificial Sequence
  Description of Artificial Sequence: Synthetic oligonucleotide
  Antisense strand to SEQ ID NO: 154540
ugaccacagacaugucucg

SEQ ID NO: 154542 - RNA, 19 nt, Artificial Sequence
  Description of Artificial Sequence: Synthetic oligonucleotide
  Sense strand starting at position 1901 of SEQ ID NO: 1985
gagacaugucuguggucaa

SEQ ID NO: 154543 - RNA, 19 nt, Artificial Sequence
  Description of Artificial Sequence: Synthetic oligonucleotide
  Antisense strand to SEQ ID NO: 154542
uugaccacagacaugucuc

SEQ ID NO: 154544 - RNA, 19 nt, Artificial Sequence
  Description of Artificial Sequence: Synthetic oligonucleotide
  Sense strand starting at position 2012 of SEQ ID NO: 1985
gccuuuguccucgucuuau

SEQ ID NO: 154545 - RNA, 19 nt, Artificial Sequence
  Description of Artificial Sequence: Synthetic oligonucleotide
  Antisense strand to SEQ ID NO: 154544
auaagacgaggacaaaggc

SEQ ID NO: 154546 - RNA, 19 nt, Artificial Sequence
  Description of Artificial Sequence: Synthetic oligonucleotide
  Sense strand starting at position 2086 of SEQ ID NO: 1985
uugcaauuacuaugcuuga

SEQ ID NO: 154547 - RNA, 19 nt, Artificial Sequence
  Description of Artificial Sequence: Synthetic oligonucleotide
  Antisense strand to SEQ ID NO: 154546
ucaagcauaguaauugcaa

SEQ ID NO: 154548 - RNA, 19 nt, Artificial Sequence
  Description of Artificial Sequence: Synthetic oligonucleotide
  Sense strand starting at position 2087 of SEQ ID NO: 1985
ugcaauuacuaugcuugau

SEQ ID NO: 154549 - RNA, 19 nt, Artificial Sequence
  Description of Artificial Sequence: Synthetic oligonucleotide
  Antisense strand to SEQ ID NO: 154548
aucaagcauaguaauugca

SEQ ID NO: 154550 - RNA, 19 nt, Artificial Sequence
  Description of Artificial Sequence: Synthetic oligonucleotide
  Sense strand starting at position 2091 of SEQ ID NO: 1985
auuacuaugcuugaugaca

SEQ ID NO: 154551 - RNA, 19 nt, Artificial Sequence
  Description of Artificial Sequence: Synthetic oligonucleotide
  Antisense strand to SEQ ID NO: 154550
ugucaucaagcauaguaau

SEQ ID NO: 154552 - RNA, 19 nt, Artificial Sequence
  Description of Artificial Sequence: Synthetic oligonucleotide
  Sense strand starting at position 2099 of SEQ ID NO: 1985
gcuugaugacacuaaguug

SEQ ID NO: 154553 - RNA, 19 nt, Artificial Sequence
  Description of Artificial Sequence: Synthetic oligonucleotide
  Antisense strand to SEQ ID NO: 154552
caacuuagugucaucaagc

SEQ ID NO: 154554 - RNA, 19 nt, Artificial Sequence
  Description of Artificial Sequence: Synthetic oligonucleotide
  Sense strand starting at position 2213 of SEQ ID NO: 1985
gcuguaggccacuaugauu

SEQ ID NO: 154555 - RNA, 19 nt, Artificial Sequence
  Description of Artificial Sequence: Synthetic oligonucleotide
  Antisense strand to SEQ ID NO: 154554
aaucauaguggccuacagc

SEQ ID NO: 154556 - RNA, 19 nt, Artificial Sequence
  Description of Artificial Sequence: Synthetic oligonucleotide
  Sense strand starting at position 2226 of SEQ ID NO: 1985
augauuugcuaggagaaau

SEQ ID NO: 154557 - RNA, 19 nt, Artificial Sequence
  Description of Artificial Sequence: Synthetic oligonucleotide
  Antisense strand to SEQ ID NO: 154556
auuucuccuagcaaaucau

SEQ ID NO: 154558 - RNA, 19 nt, Artificial Sequence
  Description of Artificial Sequence: Synthetic oligonucleotide
  Sense strand starting at position 2249 of SEQ ID NO: 1985
auggguaugccagggcaau

SEQ ID NO: 154559 - RNA, 19 nt, Artificial Sequence
  Description of Artificial Sequence: Synthetic oligonucleotide
  Antisense strand to SEQ ID NO: 154558
auugcccuggcauacccau

SEQ ID NO: 154560 - RNA, 19 nt, Artificial Sequence
  Description of Artificial Sequence: Synthetic oligonucleotide
  Sense strand starting at position 2250 of SEQ ID NO: 1985
uggguaugccagggcaauu

SEQ ID NO: 154561 - RNA, 19 nt, Artificial Sequence
  Description of Artificial Sequence: Synthetic oligonucleotide
  Antisense strand to SEQ ID NO: 154560
aauugcccuggcauaccca

SEQ ID NO: 154562 - RNA, 19 nt, Artificial Sequence
  Description of Artificial Sequence: Synthetic oligonucleotide
  Sense strand starting at position 2280 of SEQ ID NO: 1985
gcaaauaaccagggcucua

SEQ ID NO: 154563 - RNA, 19 nt, Artificial Sequence
  Description of Artificial Sequence: Synthetic oligonucleotide
  Antisense strand to SEQ ID NO: 154562
uagagcccugguuauuugc

SEQ ID NO: 154564 - RNA, 19 nt, Artificial Sequence
  Description of Artificial Sequence: Synthetic oligonucleotide
  Sense strand starting at position 2337 of SEQ ID NO: 1985
ucuugauugucccuaggag

SEQ ID NO: 154565 - RNA, 19 nt, Artificial Sequence
  Description of Artificial Sequence: Synthetic oligonucleotide
  Antisense strand to SEQ ID NO: 154564
cuccuagggacaaucaaga

SEQ ID NO: 154566 - RNA, 19 nt, Artificial Sequence
  Description of Artificial Sequence: Synthetic oligonucleotide
  Sense strand starting at position 2363 of SEQ ID NO: 1985
cugauauccuugcccagaa

SEQ ID NO: 154567 - RNA, 19 nt, Artificial Sequence
  Description of Artificial Sequence: Synthetic oligonucleotide
  Antisense strand to SEQ ID NO: 154566
uucugggcaaggauaucag

SEQ ID NO: 154568 - RNA, 19 nt, Artificial Sequence
  Description of Artificial Sequence: Synthetic oligonucleotide
  Sense strand starting at position 2364 of SEQ ID NO: 1985
ugauauccuugcccagaaa

SEQ ID NO: 154569 - RNA, 19 nt, Artificial Sequence
  Description of Artificial Sequence: Synthetic oligonucleotide
  Antisense strand to SEQ ID NO: 154568
uuucugggcaaggauauca

SEQ ID NO: 154570 - RNA, 19 nt, Artificial Sequence
  Description of Artificial Sequence: Synthetic oligonucleotide
  Sense strand starting at position 2440 of SEQ ID NO: 1985
gugccaacucaaugaaagu

SEQ ID NO: 154571 - RNA, 19 nt, Artificial Sequence
  Description of Artificial Sequence: Synthetic oligonucleotide
  Antisense strand to SEQ ID NO: 154570
acuuucauugaguuggcac

SEQ ID NO: 154572 - RNA, 19 nt, Artificial Sequence
  Description of Artificial Sequence: Synthetic oligonucleotide
  Sense strand starting at position 2534 of SEQ ID NO: 1985
gauuuauuguagcagcaua

SEQ ID NO: 154573 - RNA, 19 nt, Artificial Sequence
  Description of Artificial Sequence: Synthetic oligonucleotide
  Antisense strand to SEQ ID NO: 154572
uaugcugcuacaauaaauc

SEQ ID NO: 154574 - RNA, 19 nt, Artificial Sequence
  Description of Artificial Sequence: Synthetic oligonucleotide
  Sense strand starting at position 3154 of SEQ ID NO: 1985
aauugcugagcuugauagu

SEQ ID NO: 154575 - RNA, 19 nt, Artificial Sequence
  Description of Artificial Sequence: Synthetic oligonucleotide
  Antisense strand to SEQ ID NO: 154574
acuaucaagcucagcaauu

SEQ ID NO: 154576 - RNA, 19 nt, Artificial Sequence
  Description of Artificial Sequence: Synthetic oligonucleotide
  Sense strand starting at position 3164 of SEQ ID NO: 1985
cuugauagugcacaccuau

SEQ ID NO: 154577 - RNA, 19 nt, Artificial Sequence
  Description of Artificial Sequence: Synthetic oligonucleotide
  Antisense strand to SEQ ID NO: 154576
auaggugugcacuaucaag

SEQ ID NO: 154578 - RNA, 19 nt, Artificial Sequence
  Description of Artificial Sequence: Synthetic oligonucleotide
  Sense strand starting at position 3332 of SEQ ID NO: 1985
uuacaaugucuauagggua

SEQ ID NO: 154579 - RNA, 19 nt, Artificial Sequence
  Description of Artificial Sequence: Synthetic oligonucleotide
  Antisense strand to SEQ ID NO: 154578
uacccuauagacauuguaa

SEQ ID NO: 154580 - RNA, 19 nt, Artificial Sequence
  Description of Artificial Sequence: Synthetic oligonucleotide
  Sense strand starting at position 3667 of SEQ ID NO: 1985
ggauuaugggagugagcaa

SEQ ID NO: 154581 - RNA, 19 nt, Artificial Sequence
  Description of Artificial Sequence: Synthetic oligonucleotide
  Antisense strand to SEQ ID NO: 154580
uugcucacucccauaaucc

SEQ ID NO: 154582 - RNA, 19 nt, Artificial Sequence
  Description of Artificial Sequence: Synthetic oligonucleotide
  Sense strand starting at position 3743 of SEQ ID NO: 1985
cggaauaauuccucccuca

SEQ ID NO: 154583 - RNA, 19 nt, Artificial Sequence
  Description of Artificial Sequence: Synthetic oligonucleotide
  Antisense strand to SEQ ID NO: 154582
ugagggaggaauuauuccg

SEQ ID NO: 154584 - RNA, 19 nt, Artificial Sequence
  Description of Artificial Sequence: Synthetic oligonucleotide
  Sense strand starting at position 3978 of SEQ ID NO: 1986
ggcccauuacaaggugauu

SEQ ID NO: 154585 - RNA, 19 nt, Artificial Sequence
  Description of Artificial Sequence: Synthetic oligonucleotide
  Antisense strand to SEQ ID NO: 154584
aaucaccuuguaaugggcc

SEQ ID NO: 154586 - RNA, 19 nt, Artificial Sequence
  Description of Artificial Sequence: Synthetic oligonucleotide
  Sense strand starting at position 3970 of SEQ ID NO: 1986
gugcaauuggcccauuaca

SEQ ID NO: 154587 - RNA, 19 nt, Artificial Sequence
  Description of Artificial Sequence: Synthetic oligonucleotide
  Antisense strand to SEQ ID NO: 154586
uguaaugggccaauugcac

SEQ ID NO: 154588 - RNA, 19 nt, Artificial Sequence
  Description of Artificial Sequence: Synthetic oligonucleotide
  Sense strand starting at position 3905 of SEQ ID NO: 1986
caaugugucugagucugaa

SEQ ID NO: 154589 - RNA, 19 nt, Artificial Sequence
  Description of Artificial Sequence: Synthetic oligonucleotide
  Antisense strand to SEQ ID NO: 154588
uucagacucagacacauug

SEQ ID NO: 154590 - RNA, 19 nt, Artificial Sequence
  Description of Artificial Sequence: Synthetic oligonucleotide
  Sense strand starting at position 3822 of SEQ ID NO: 1986
uagaacagugcucaguaua

SEQ ID NO: 154591 - RNA, 19 nt, Artificial Sequence
  Description of Artificial Sequence: Synthetic oligonucleotide
  Antisense strand to SEQ ID NO: 154590
uauacugagcacuguucua

SEQ ID NO: 154592 - RNA, 19 nt, Artificial Sequence
  Description of Artificial Sequence: Synthetic oligonucleotide
  Sense strand starting at position 3821 of SEQ ID NO: 1986
uuagaacagugcucaguau

SEQ ID NO: 154593 - RNA, 19 nt, Artificial Sequence
  Description of Artificial Sequence: Synthetic oligonucleotide
  Antisense strand to SEQ ID NO: 154592
auacugagcacuguucuaa

SEQ ID NO: 154594 - RNA, 19 nt, Artificial Sequence
  Description of Artificial Sequence: Synthetic oligonucleotide
  Sense strand starting at position 3767 of SEQ ID NO: 1986
gaauuaacuguauggcaua

SEQ ID NO: 154595 - RNA, 19 nt, Artificial Sequence
  Description of Artificial Sequence: Synthetic oligonucleotide
  Antisense strand to SEQ ID NO: 154594
uaugccauacaguuaauuc

SEQ ID NO: 154596 - RNA, 19 nt, Artificial Sequence
  Description of Artificial Sequence: Synthetic oligonucleotide
  Sense strand starting at position 3765 of SEQ ID NO: 1986
uugaauuaacuguauggca

SEQ ID NO: 154597 - RNA, 19 nt, Artificial Sequence
  Description of Artificial Sequence: Synthetic oligonucleotide
  Antisense strand to SEQ ID NO: 154596
ugccauacaguuaauucaa

SEQ ID NO: 154598 - RNA, 19 nt, Artificial Sequence
  Description of Artificial Sequence: Synthetic oligonucleotide
  Sense strand starting at position 3435 of SEQ ID NO: 1986
cagugauaacuuugaauag

SEQ ID NO: 154599 - RNA, 19 nt, Artificial Sequence
  Description of Artificial Sequence: Synthetic oligonucleotide
  Antisense strand to SEQ ID NO: 154598
cuauucaaaguuaucacug

SEQ ID NO: 154600 - RNA, 19 nt, Artificial Sequence
  Description of Artificial Sequence: Synthetic oligonucleotide
  Sense strand starting at position 3426 of SEQ ID NO: 1986
cagugaacacagugauaac

SEQ ID NO: 154601 - RNA, 19 nt, Artificial Sequence
  Description of Artificial Sequence: Synthetic oligonucleotide
  Antisense strand to SEQ ID NO: 154600
guuaucacuguguucacug

SEQ ID NO: 154602 - RNA, 19 nt, Artificial Sequence
  Description of Artificial Sequence: Synthetic oligonucleotide
  Sense strand starting at position 3265 of SEQ ID NO: 1986
auugguuguguuuggaaag

SEQ ID NO: 154603 - RNA, 19 nt, Artificial Sequence
  Description of Artificial Sequence: Synthetic oligonucleotide
  Antisense strand to SEQ ID NO: 154602
cuuuccaaacacaaccaau

SEQ ID NO: 154604 - RNA, 19 nt, Artificial Sequence
  Description of Artificial Sequence: Synthetic oligonucleotide
  Sense strand starting at position 3243 of SEQ ID NO: 1986
cgucaauauguguaagaag

SEQ ID NO: 154605 - RNA, 19 nt, Artificial Sequence
  Description of Artificial Sequence: Synthetic oligonucleotide
  Antisense strand to SEQ ID NO: 154604
cuucuuacacauauugacg

SEQ ID NO: 154606 - RNA, 19 nt, Artificial Sequence
  Description of Artificial Sequence: Synthetic oligonucleotide
  Sense strand starting at position 3242 of SEQ ID NO: 1986
ccgucaauauguguaagaa

SEQ ID NO: 154607 - RNA, 19 nt, Artificial Sequence
  Description of Artificial Sequence: Synthetic oligonucleotide
  Antisense strand to SEQ ID NO: 154606
uucuuacacauauugacgg

SEQ ID NO: 154608 - RNA, 19 nt, Artificial Sequence
  Description of Artificial Sequence: Synthetic oligonucleotide
  Sense strand starting at position 3234 of SEQ ID NO: 1986
ugaggcauccgucaauaug

SEQ ID NO: 154609 - RNA, 19 nt, Artificial Sequence
  Description of Artificial Sequence: Synthetic oligonucleotide
  Antisense strand to SEQ ID NO: 154608
cauauugacggaugccuca

SEQ ID NO: 154610 - RNA, 19 nt, Artificial Sequence
  Description of Artificial Sequence: Synthetic oligonucleotide
  Sense strand starting at position 3231 of SEQ ID NO: 1986
acaugaggcauccgucaau

SEQ ID NO: 154611 - RNA, 19 nt, Artificial Sequence
  Description of Artificial Sequence: Synthetic oligonucleotide
  Antisense strand to SEQ ID NO: 154610
auugacggaugccucaugu

SEQ ID NO: 154612 - RNA, 19 nt, Artificial Sequence
  Description of Artificial Sequence: Synthetic oligonucleotide
  Sense strand starting at position 3105 of SEQ ID NO: 1986
ucaguuaaccaggaaguuu

SEQ ID NO: 154613 - RNA, 19 nt, Artificial Sequence
  Description of Artificial Sequence: Synthetic oligonucleotide
  Antisense strand to SEQ ID NO: 154612
aaacuuccugguuaacuga

SEQ ID NO: 154614 - RNA, 19 nt, Artificial Sequence
  Description of Artificial Sequence: Synthetic oligonucleotide
  Sense strand starting at position 3104 of SEQ ID NO: 1986
cucaguuaaccaggaaguu

SEQ ID NO: 154615 - RNA, 19 nt, Artificial Sequence
  Description of Artificial Sequence: Synthetic oligonucleotide
  Antisense strand to SEQ ID NO: 154614
aacuuccugguuaacugag

SEQ ID NO: 154616 - RNA, 19 nt, Artificial Sequence
  Description of Artificial Sequence: Synthetic oligonucleotide
  Sense strand starting at position 3101 of SEQ ID NO: 1986
ggucucaguuaaccaggaa

SEQ ID NO: 154617 - RNA, 19 nt, Artificial Sequence
  Description of Artificial Sequence: Synthetic oligonucleotide
  Antisense strand to SEQ ID NO: 154616
uuccugguuaacugagacc

SEQ ID NO: 154618 - RNA, 19 nt, Artificial Sequence
  Description of Artificial Sequence: Synthetic oligonucleotide
  Sense strand starting at position 2987 of SEQ ID NO: 1986
gugacauacccaugcaaua

SEQ ID NO: 154619 - RNA, 19 nt, Artificial Sequence
  Description of Artificial Sequence: Synthetic oligonucleotide
  Antisense strand to SEQ ID NO: 154618
uauugcauggguaugucac

SEQ ID NO: 154620 - RNA, 19 nt, Artificial Sequence
  Description of Artificial Sequence: Synthetic oligonucleotide
  Sense strand starting at position 2892 of SEQ ID NO: 1986
caugauugucaguacagua

SEQ ID NO: 154621 - RNA, 19 nt, Artificial Sequence
  Description of Artificial Sequence: Synthetic oligonucleotide
  Antisense strand to SEQ ID NO: 154620
uacuguacugacaaucaug

SEQ ID NO: 154622 - RNA, 19 nt, Artificial Sequence
  Description of Artificial Sequence: Synthetic oligonucleotide
  Sense strand starting at position 2891 of SEQ ID NO: 1986
ccaugauugucaguacagu

SEQ ID NO: 154623 - RNA, 19 nt, Artificial Sequence
  Description of Artificial Sequence: Synthetic oligonucleotide
  Antisense strand to SEQ ID NO: 154622
acuguacugacaaucaugg

SEQ ID NO: 154624 - RNA, 19 nt, Artificial Sequence
  Description of Artificial Sequence: Synthetic oligonucleotide
  Sense strand starting at position 2883 of SEQ ID NO: 1986
gcaguaagccaugauuguc

SEQ ID NO: 154625 - RNA, 19 nt, Artificial Sequence
  Description of Artificial Sequence: Synthetic oligonucleotide
  Antisense strand to SEQ ID NO: 154624
gacaaucauggcuuacugc

SEQ ID NO: 154626 - RNA, 19 nt, Artificial Sequence
  Description of Artificial Sequence: Synthetic oligonucleotide
  Sense strand starting at position 2851 of SEQ ID NO: 1986
gaagaauggcuuggacuca

SEQ ID NO: 154627 - RNA, 19 nt, Artificial Sequence
  Description of Artificial Sequence: Synthetic oligonucleotide
  Antisense strand to SEQ ID NO: 154626
ugaguccaagccauucuuc

SEQ ID NO: 154628 - RNA, 19 nt, Artificial Sequence
  Description of Artificial Sequence: Synthetic oligonucleotide
  Sense strand starting at position 2850 of SEQ ID NO: 1986
ggaagaauggcuuggacuc

SEQ ID NO: 154629 - RNA, 19 nt, Artificial Sequence
  Description of Artificial Sequence: Synthetic oligonucleotide
  Antisense strand to SEQ ID NO: 154628
gaguccaagccauucuucc

SEQ ID NO: 154630 - RNA, 19 nt, Artificial Sequence
  Description of Artificial Sequence: Synthetic oligonucleotide
  Sense strand starting at position 2503 of SEQ ID NO: 1986
gagcuaugaccaggauacu

SEQ ID NO: 154631 - RNA, 19 nt, Artificial Sequence
  Description of Artificial Sequence: Synthetic oligonucleotide
  Antisense strand to SEQ ID NO: 154630
aguauccuggucauagcuc

SEQ ID NO: 154632 - RNA, 19 nt, Artificial Sequence
  Description of Artificial Sequence: Synthetic oligonucleotide
  Sense strand starting at position 855 of SEQ ID NO: 1986
gacauuaguggccagguuu

SEQ ID NO: 154633 - RNA, 19 nt, Artificial Sequence
  Description of Artificial Sequence: Synthetic oligonucleotide
  Antisense strand to SEQ ID NO: 154632
aaaccuggccacuaauguc

SEQ ID NO: 154634 - RNA, 19 nt, Artificial Sequence
  Description of Artificial Sequence: Synthetic oligonucleotide
  Sense strand starting at position 854 of SEQ ID NO: 1986
ggacauuaguggccagguu

SEQ ID NO: 154635 - RNA, 19 nt, Artificial Sequence
  Description of Artificial Sequence: Synthetic oligonucleotide
  Antisense strand to SEQ ID NO: 154634
aaccuggccacuaaugucc

SEQ ID NO: 154636 - RNA, 19 nt, Artificial Sequence
  Description of Artificial Sequence: Synthetic oligonucleotide
  Sense strand starting at position 758 of SEQ ID NO: 1986
agcgaagagaaacguuauu

SEQ ID NO: 154637 - RNA, 19 nt, Artificial Sequence
  Description of Artificial Sequence: Synthetic oligonucleotide
  Antisense strand to SEQ ID NO: 154636
aauaacguuucucuucgcu

SEQ ID NO: 154638 - RNA, 19 nt, Artificial Sequence
  Description of Artificial Sequence: Synthetic oligonucleotide
  Sense strand starting at position 687 of SEQ ID NO: 1986
uccaguuggccauaucauc

SEQ ID NO: 154639 - RNA, 19 nt, Artificial Sequence
  Description of Artificial Sequence: Synthetic oligonucleotide
  Antisense strand to SEQ ID NO: 154638
gaugauauggccaacugga

SEQ ID NO: 154640 - RNA, 19 nt, Artificial Sequence
  Description of Artificial Sequence: Synthetic oligonucleotide
  Sense strand starting at position 627 of SEQ ID NO: 1986
gaaagcagcuugcugagaa

SEQ ID NO: 154641 - RNA, 19 nt, Artificial Sequence
  Description of Artificial Sequence: Synthetic oligonucleotide
  Antisense strand to SEQ ID NO: 154640
uucucagcaagcugcuuuc

SEQ ID NO: 154642 - RNA, 19 nt, Artificial Sequence
  Description of Artificial Sequence: Synthetic oligonucleotide
  Sense strand starting at position 612 of SEQ ID NO: 1986
accacaaacgugggugaaa

SEQ ID NO: 154643 - RNA, 19 nt, Artificial Sequence
  Description of Artificial Sequence: Synthetic oligonucleotide
  Antisense strand to SEQ ID NO: 154642
uuucacccacguuuguggu

SEQ ID NO: 154644 - RNA, 19 nt, Artificial Sequence
  Description of Artificial Sequence: Synthetic oligonucleotide
  Sense strand starting at position 547 of SEQ ID NO: 1986
cuuacauucggagauguca

SEQ ID NO: 154645 - RNA, 19 nt, Artificial Sequence
  Description of Artificial Sequence: Synthetic oligonucleotide
  Antisense strand to SEQ ID NO: 154644
ugacaucuccgaauguaag

SEQ ID NO: 154646 - RNA, 19 nt, Artificial Sequence
  Description of Artificial Sequence: Synthetic oligonucleotide
  Sense strand starting at position 405 of SEQ ID NO: 1986
cugagccuugaccaauuaa

SEQ ID NO: 154647 - RNA, 19 nt, Artificial Sequence
  Description of Artificial Sequence: Synthetic oligonucleotide
  Antisense strand to SEQ ID NO: 154646
uuaauuggucaaggcucag

SEQ ID NO: 154648 - RNA, 19 nt, Artificial Sequence
  Description of Artificial Sequence: Synthetic oligonucleotide
  Sense strand starting at position 394 of SEQ ID NO: 1986
gugaaauuacucugagccu

SEQ ID NO: 154649 - RNA, 19 nt, Artificial Sequence
  Description of Artificial Sequence: Synthetic oligonucleotide
  Antisense strand to SEQ ID NO: 154648
aggcucagaguaauuucac

SEQ ID NO: 154650 - RNA, 19 nt, Artificial Sequence
  Description of Artificial Sequence: Synthetic oligonucleotide
  Sense strand starting at position 340 of SEQ ID NO: 1986
ugagguuccacuugagauu

SEQ ID NO: 154651 - RNA, 19 nt, Artificial Sequence
  Description of Artificial Sequence: Synthetic oligonucleotide
  Antisense strand to SEQ ID NO: 154650
aaucucaaguggaaccuca

SEQ ID NO: 154652 - RNA, 19 nt, Artificial Sequence
  Description of Artificial Sequence: Synthetic oligonucleotide
  Sense strand starting at position 301 of SEQ ID NO: 1986
gucagcuaccuaugaguca

SEQ ID NO: 154653 - RNA, 19 nt, Artificial Sequence
  Description of Artificial Sequence: Synthetic oligonucleotide
  Antisense strand to SEQ ID NO: 154652
ugacucauagguagcugac

SEQ ID NO: 154654 - RNA, 19 nt, Artificial Sequence
  Description of Artificial Sequence: Synthetic oligonucleotide
  Sense strand starting at position 299 of SEQ ID NO: 1986
gggucagcuaccuaugagu

SEQ ID NO: 154655 - RNA, 19 nt, Artificial Sequence
  Description of Artificial Sequence: Synthetic oligonucleotide
  Antisense strand to SEQ ID NO: 154654
acucauagguagcugaccc

SEQ ID NO: 154656 - RNA, 19 nt, Artificial Sequence
  Description of Artificial Sequence: Synthetic oligonucleotide
  Sense strand starting at position 263 of SEQ ID NO: 1986
guugacagucuauggaaau

SEQ ID NO: 154657 - RNA, 19 nt, Artificial Sequence
  Description of Artificial Sequence: Synthetic oligonucleotide
  Antisense strand to SEQ ID NO: 154656
auuuccauagacugucaac

SEQ ID NO: 154658 - RNA, 19 nt, Artificial Sequence
  Description of Artificial Sequence: Synthetic oligonucleotide
  Sense strand starting at position 221 of SEQ ID NO: 1986
gaaagugucugccucuuaa

SEQ ID NO: 154659 - RNA, 19 nt, Artificial Sequence
  Description of Artificial Sequence: Synthetic oligonucleotide
  Antisense strand to SEQ ID NO: 154658
uuaagaggcagacacuuuc

SEQ ID NO: 154660 - RNA, 19 nt, Artificial Sequence
  Description of Artificial Sequence: Synthetic oligonucleotide
  Sense strand starting at position 219 of SEQ ID NO: 1986
gagaaagugucugccucuu

SEQ ID NO: 154661 - RNA, 19 nt, Artificial Sequence
  Description of Artificial Sequence: Synthetic oligonucleotide
  Antisense strand to SEQ ID NO: 154660
aagaggcagacacuuucuc

SEQ ID NO: 154662 - RNA, 19 nt, Artificial Sequence
  Description of Artificial Sequence: Synthetic oligonucleotide
  Sense strand starting at position 218 of SEQ ID NO: 1986
agagaaagugucugccucu

SEQ ID NO: 154663 - RNA, 19 nt, Artificial Sequence
  Description of Artificial Sequence: Synthetic oligonucleotide
  Antisense strand to SEQ ID NO: 154662
agaggcagacacuuucucu

SEQ ID NO: 154664 - RNA, 19 nt, Artificial Sequence
  Description of Artificial Sequence: Synthetic oligonucleotide
  Sense strand starting at position 3954 of SEQ ID NO: 1987
cugccuugaguacaacuua

SEQ ID NO: 154665 - RNA, 19 nt, Artificial Sequence
  Description of Artificial Sequence: Synthetic oligonucleotide
  Antisense strand to SEQ ID NO: 154664
uaaguuguacucaaggcag

SEQ ID NO: 154666 - RNA, 19 nt, Artificial Sequence
  Description of Artificial Sequence: Synthetic oligonucleotide
  Sense strand starting at position 3740 of SEQ ID NO: 1987
acugaaguagcauauuaau

SEQ ID NO: 154667 - RNA, 19 nt, Artificial Sequence
  Description of Artificial Sequence: Synthetic oligonucleotide
  Antisense strand to SEQ ID NO: 154666
auuaauaugcuacuucagu

SEQ ID NO: 154668 - RNA, 19 nt, Artificial Sequence
  Description of Artificial Sequence: Synthetic oligonucleotide
  Sense strand starting at position 3716 of SEQ ID NO: 1987
gcaaauaugacguacuggu

SEQ ID NO: 154669 - RNA, 19 nt, Artificial Sequence
  Description of Artificial Sequence: Synthetic oligonucleotide
  Antisense strand to SEQ ID NO: 154668
accaguacgucauauuugc

SEQ ID NO: 154670 - RNA, 19 nt, Artificial Sequence
  Description of Artificial Sequence: Synthetic oligonucleotide
  Sense strand starting at position 3591 of SEQ ID NO: 1987
gaagaagaugcaugguaug

SEQ ID NO: 154671 - RNA, 19 nt, Artificial Sequence
  Description of Artificial Sequence: Synthetic oligonucleotide
  Antisense strand to SEQ ID NO: 154670
cauaccaugcaucuucuuc

SEQ ID NO: 154672 - RNA, 19 nt, Artificial Sequence
  Description of Artificial Sequence: Synthetic oligonucleotide
  Sense strand starting at position 3549 of SEQ ID NO: 1987
agcaauugugagcauccaa

SEQ ID NO: 154673 - RNA, 19 nt, Artificial Sequence
  Description of Artificial Sequence: Synthetic oligonucleotide
  Antisense strand to SEQ ID NO: 154672
uuggaugcucacaauugcu

SEQ ID NO: 154674 - RNA, 19 nt, Artificial Sequence
  Description of Artificial Sequence: Synthetic oligonucleotide
  Sense strand starting at position 3491 of SEQ ID NO: 1987
ggcauuucucccuguauaa

SEQ ID NO: 154675 - RNA, 19 nt, Artificial Sequence
  Description of Artificial Sequence: Synthetic oligonucleotide
  Antisense strand to SEQ ID NO: 154674
uuauacagggagaaaugcc

SEQ ID NO: 154676 - RNA, 19 nt, Artificial Sequence
  Description of Artificial Sequence: Synthetic oligonucleotide
  Sense strand starting at position 3490 of SEQ ID NO: 1987
gggcauuucucccuguaua

SEQ ID NO: 154677 - RNA, 19 nt, Artificial Sequence
  Description of Artificial Sequence: Synthetic oligonucleotide
  Antisense strand to SEQ ID NO: 154676
uauacagggagaaaugccc

SEQ ID NO: 154678 - RNA, 19 nt, Artificial Sequence
  Description of Artificial Sequence: Synthetic oligonucleotide
  Sense strand starting at position 3488 of SEQ ID NO: 1987
gugggcauuucucccugua

SEQ ID NO: 154679 - RNA, 19 nt, Artificial Sequence
  Description of Artificial Sequence: Synthetic oligonucleotide
  Antisense strand to SEQ ID NO: 154678
uacagggagaaaugcccac

SEQ ID NO: 154680 - RNA, 19 nt, Artificial Sequence
  Description of Artificial Sequence: Synthetic oligonucleotide
  Sense strand starting at position 3447 of SEQ ID NO: 1987
gggaacgccuucuuuagaa

SEQ ID NO: 154681 - RNA, 19 nt, Artificial Sequence
  Description of Artificial Sequence: Synthetic oligonucleotide
  Antisense strand to SEQ ID NO: 154680
uucuaaagaaggcguuccc

SEQ ID NO: 154682 - RNA, 19 nt, Artificial Sequence
  Description of Artificial Sequence: Synthetic oligonucleotide
  Sense strand starting at position 3285 of SEQ ID NO: 1987
gacugcucuccagagacca

SEQ ID NO: 154683 - RNA, 19 nt, Artificial Sequence
  Description of Artificial Sequence: Synthetic oligonucleotide
  Antisense strand to SEQ ID NO: 154682
uggucucuggagagcaguc

SEQ ID NO: 154684 - RNA, 19 nt, Artificial Sequence
  Description of Artificial Sequence: Synthetic oligonucleotide
  Sense strand starting at position 3282 of SEQ ID NO: 1987
ccugacugcucuccagaga

SEQ ID NO: 154685 - RNA, 19 nt, Artificial Sequence
  Description of Artificial Sequence: Synthetic oligonucleotide
  Antisense strand to SEQ ID NO: 154684
ucucuggagagcagucagg

SEQ ID NO: 154686 - RNA, 19 nt, Artificial Sequence
  Description of Artificial Sequence: Synthetic oligonucleotide
  Sense strand starting at position 3043 of SEQ ID NO: 1987
gcagucucuguaggaaaca

SEQ ID NO: 154687 - RNA, 19 nt, Artificial Sequence
  Description of Artificial Sequence: Synthetic oligonucleotide
  Antisense strand to SEQ ID NO: 154686
uguuuccuacagagacugc

SEQ ID NO: 154688 - RNA, 19 nt, Artificial Sequence
  Description of Artificial Sequence: Synthetic oligonucleotide
  Sense strand starting at position 2692 of SEQ ID NO: 1987
agggcugggaacugucauu

SEQ ID NO: 154689 - RNA, 19 nt, Artificial Sequence
  Description of Artificial Sequence: Synthetic oligonucleotide
  Antisense strand to SEQ ID NO: 154688
aaugacaguucccagcccu

SEQ ID NO: 154690 - RNA, 19 nt, Artificial Sequence
  Description of Artificial Sequence: Synthetic oligonucleotide
  Sense strand starting at position 2667 of SEQ ID NO: 1987
gaauuaauugcgcaugaca

SEQ ID NO: 154691 - RNA, 19 nt, Artificial Sequence
  Description of Artificial Sequence: Synthetic oligonucleotide
  Antisense strand to SEQ ID NO: 154690
ugucaugcgcaauuaauuc

SEQ ID NO: 154692 - RNA, 19 nt, Artificial Sequence
  Description of Artificial Sequence: Synthetic oligonucleotide
  Sense strand starting at position 2653 of SEQ ID NO: 1987
ucgugagagccagggaauu

SEQ ID NO: 154693 - RNA, 19 nt, Artificial Sequence
  Description of Artificial Sequence: Synthetic oligonucleotide
  Antisense strand to SEQ ID NO: 154692
aauucccuggcucucacga

SEQ ID NO: 154694 - RNA, 19 nt, Artificial Sequence
  Description of Artificial Sequence: Synthetic oligonucleotide
  Sense strand starting at position 2420 of SEQ ID NO: 1987
ccggaaaucuuagcaacac

SEQ ID NO: 154695 - RNA, 19 nt, Artificial Sequence
  Description of Artificial Sequence: Synthetic oligonucleotide
  Antisense strand to SEQ ID NO: 154694
guguugcuaagauuuccgg

SEQ ID NO: 154696 - RNA, 19 nt, Artificial Sequence
  Description of Artificial Sequence: Synthetic oligonucleotide
  Sense strand starting at position 2268 of SEQ ID NO: 1987
gcccgagauuaguuaucaa

SEQ ID NO: 154697 - RNA, 19 nt, Artificial Sequence
  Description of Artificial Sequence: Synthetic oligonucleotide
  Antisense strand to SEQ ID NO: 154696
uugauaacuaaucucgggc

SEQ ID NO: 154698 - RNA, 19 nt, Artificial Sequence
  Description of Artificial Sequence: Synthetic oligonucleotide
  Sense strand starting at position 1745 of SEQ ID NO: 1987
gccagucaaccauagcaga

SEQ ID NO: 154699 - RNA, 19 nt, Artificial Sequence
  Description of Artificial Sequence: Synthetic oligonucleotide
  Antisense strand to SEQ ID NO: 154698
ucugcuaugguugacuggc

SEQ ID NO: 154700 - RNA, 19 nt, Artificial Sequence
  Description of Artificial Sequence: Synthetic oligonucleotide
  Sense strand starting at position 1598 of SEQ ID NO: 1987
guuugauuccauuagucug

SEQ ID NO: 154701 - RNA, 19 nt, Artificial Sequence
  Description of Artificial Sequence: Synthetic oligonucleotide
  Antisense strand to SEQ ID NO: 154700
cagacuaauggaaucaaac

SEQ ID NO: 154702 - RNA, 19 nt, Artificial Sequence
  Description of Artificial Sequence: Synthetic oligonucleotide
  Sense strand starting at position 1404 of SEQ ID NO: 1987
acaaguuuccauuguaaau

SEQ ID NO: 154703 - RNA, 19 nt, Artificial Sequence
  Description of Artificial Sequence: Synthetic oligonucleotide
  Antisense strand to SEQ ID NO: 154702
auuuacaauggaaacuugu

SEQ ID NO: 154704 - RNA, 19 nt, Artificial Sequence
  Description of Artificial Sequence: Synthetic oligonucleotide
  Sense strand starting at position 1355 of SEQ ID NO: 1987
auggauaacucuguuaaug

SEQ ID NO: 154705 - RNA, 19 nt, Artificial Sequence
  Description of Artificial Sequence: Synthetic oligonucleotide
  Antisense strand to SEQ ID NO: 154704
cauuaacagaguuauccau

SEQ ID NO: 154706 - RNA, 19 nt, Artificial Sequence
  Description of Artificial Sequence: Synthetic oligonucleotide
  Sense strand starting at position 1024 of SEQ ID NO: 1987
agggaaaguuccuccuuac

SEQ ID NO: 154707 - RNA, 19 nt, Artificial Sequence
  Description of Artificial Sequence: Synthetic oligonucleotide
  Antisense strand to SEQ ID NO: 154706
guaaggaggaacuuucccu

SEQ ID NO: 154708 - RNA, 19 nt, Artificial Sequence
  Description of Artificial Sequence: Synthetic oligonucleotide
  Sense strand starting at position 1023 of SEQ ID NO: 1987
cagggaaaguuccuccuua

SEQ ID NO: 154709 - RNA, 19 nt, Artificial Sequence
  Description of Artificial Sequence: Synthetic oligonucleotide
  Antisense strand to SEQ ID NO: 154708
uaaggaggaacuuucccug

SEQ ID NO: 154710 - RNA, 19 nt, Artificial Sequence
  Description of Artificial Sequence: Synthetic oligonucleotide
  Sense strand starting at position 1014 of SEQ ID NO: 1987
gcaucucuccagggaaagu

SEQ ID NO: 154711 - RNA, 19 nt, Artificial Sequence
  Description of Artificial Sequence: Synthetic oligonucleotide
  Antisense strand to SEQ ID NO: 154710
acuuucccuggagagaugc

SEQ ID NO: 154712 - RNA, 19 nt, Artificial Sequence
  Description of Artificial Sequence: Synthetic oligonucleotide
  Sense strand starting at position 979 of SEQ ID NO: 1987
aggguaauuuagcagaaua

SEQ ID NO: 154713 - RNA, 19 nt, Artificial Sequence
  Description of Artificial Sequence: Synthetic oligonucleotide
  Antisense strand to SEQ ID NO: 154712
uauucugcuaaauuacccu

SEQ ID NO: 154714 - RNA, 19 nt, Artificial Sequence
  Description of Artificial Sequence: Synthetic oligonucleotide
  Sense strand starting at position 946 of SEQ ID NO: 1987
gacaaucuuggcugucaca

SEQ ID NO: 154715 - RNA, 19 nt, Artificial Sequence
  Description of Artificial Sequence: Synthetic oligonucleotide
  Antisense strand to SEQ ID NO: 154714
ugugacagccaagauuguc

SEQ ID NO: 154716 - RNA, 19 nt, Artificial Sequence
  Description of Artificial Sequence: Synthetic oligonucleotide
  Sense strand starting at position 944 of SEQ ID NO: 1987
gagacaaucuuggcuguca

SEQ ID NO: 154717 - RNA, 19 nt, Artificial Sequence
  Description of Artificial Sequence: Synthetic oligonucleotide
  Antisense strand to SEQ ID NO: 154716
ugacagccaagauugucuc

SEQ ID NO: 154718 - RNA, 19 nt, Artificial Sequence
  Description of Artificial Sequence: Synthetic oligonucleotide
  Sense strand starting at position 789 of SEQ ID NO: 1987
ucaauucugcauugugaaa

SEQ ID NO: 154719 - RNA, 19 nt, Artificial Sequence
  Description of Artificial Sequence: Synthetic oligonucleotide
  Antisense strand to SEQ ID NO: 154718
uuucacaaugcagaauuga

SEQ ID NO: 154720 - RNA, 19 nt, Artificial Sequence
  Description of Artificial Sequence: Synthetic oligonucleotide
  Sense strand starting at position 721 of SEQ ID NO: 1987
ggacaaaccuuggcuuaag

SEQ ID NO: 154721 - RNA, 19 nt, Artificial Sequence
  Description of Artificial Sequence: Synthetic oligonucleotide
  Antisense strand to SEQ ID NO: 154720
cuuaagccaagguuugucc

SEQ ID NO: 154722 - RNA, 19 nt, Artificial Sequence
  Description of Artificial Sequence: Synthetic oligonucleotide
  Sense strand starting at position 720 of SEQ ID NO: 1987
aggacaaaccuuggcuuaa

SEQ ID NO: 154723 - RNA, 19 nt, Artificial Sequence
  Description of Artificial Sequence: Synthetic oligonucleotide
  Antisense strand to SEQ ID NO: 154722
uuaagccaagguuuguccu

SEQ ID NO: 154724 - RNA, 19 nt, Artificial Sequence
  Description of Artificial Sequence: Synthetic oligonucleotide
  Sense strand starting at position 690 of SEQ ID NO: 1987
guaaauuucuaaggaauag

SEQ ID NO: 154725 - RNA, 19 nt, Artificial Sequence
  Description of Artificial Sequence: Synthetic oligonucleotide
  Antisense strand to SEQ ID NO: 154724
cuauuccuuagaaauuuac

SEQ ID NO: 154726 - RNA, 19 nt, Artificial Sequence
  Description of Artificial Sequence: Synthetic oligonucleotide
  Sense strand starting at position 397 of SEQ ID NO: 1987
gauuuaaucugagaguguu

SEQ ID NO: 154727 - RNA, 19 nt, Artificial Sequence
  Description of Artificial Sequence: Synthetic oligonucleotide
  Antisense strand to SEQ ID NO: 154726
aacacucucagauuaaauc

SEQ ID NO: 154728 - RNA, 19 nt, Artificial Sequence
  Description of Artificial Sequence: Synthetic oligonucleotide
  Sense strand starting at position 395 of SEQ ID NO: 1987
augauuuaaucugagagug

SEQ ID NO: 154729 - RNA, 19 nt, Artificial Sequence
  Description of Artificial Sequence: Synthetic oligonucleotide
  Antisense strand to SEQ ID NO: 154728
cacucucagauuaaaucau

SEQ ID NO: 154730 - RNA, 19 nt, Artificial Sequence
  Description of Artificial Sequence: Synthetic oligonucleotide
  Sense strand starting at position 344 of SEQ ID NO: 1987
cucugucuugccuuguuau

SEQ ID NO: 154731 - RNA, 19 nt, Artificial Sequence
  Description of Artificial Sequence: Synthetic oligonucleotide
  Antisense strand to SEQ ID NO: 154730
auaacaaggcaagacagag

SEQ ID NO: 154732 - RNA, 19 nt, Artificial Sequence
  Description of Artificial Sequence: Synthetic oligonucleotide
  Sense strand starting at position 244 of SEQ ID NO: 1987
ugaaguugagcuggagaaa

SEQ ID NO: 154733 - RNA, 19 nt, Artificial Sequence
  Description of Artificial Sequence: Synthetic oligonucleotide
  Antisense strand to SEQ ID NO: 154732
uuucuccagcucaacuuca

SEQ ID NO: 154734 - RNA, 19 nt, Artificial Sequence
  Description of Artificial Sequence: Synthetic oligonucleotide
  Sense strand starting at position 141 of SEQ ID NO: 1987
caugguuugcaaggcaaga

SEQ ID NO: 154735 - RNA, 19 nt, Artificial Sequence
  Description of Artificial Sequence: Synthetic oligonucleotide
  Antisense strand to SEQ ID NO: 154734
ucuugccuugcaaaccaug

SEQ ID NO: 154736 - RNA, 19 nt, Artificial Sequence
  Description of Artificial Sequence: Synthetic oligonucleotide
  Sense strand starting at position 125 of SEQ ID NO: 1987
gaagauacuuuagugccau

SEQ ID NO: 154737 - RNA, 19 nt, Artificial Sequence
  Description of Artificial Sequence: Synthetic oligonucleotide
  Antisense strand to SEQ ID NO: 154736
auggcacuaaaguaucuuc

SEQ ID NO: 154738 - RNA, 19 nt, Artificial Sequence
  Description of Artificial Sequence: Synthetic oligonucleotide
  Sense strand starting at position 47 of SEQ ID NO: 1987
gacauucuuggauggcaca

SEQ ID NO: 154739 - RNA, 19 nt, Artificial Sequence
  Description of Artificial Sequence: Synthetic oligonucleotide
  Antisense strand to SEQ ID NO: 154738
ugugccauccaagaauguc

SEQ ID NO: 154740 - RNA, 19 nt, Artificial Sequence
  Description of Artificial Sequence: Synthetic oligonucleotide
  Sense strand starting at position 18 of SEQ ID NO: 1987
uggauaagcuuaucacaga

SEQ ID NO: 154741 - RNA, 19 nt, Artificial Sequence
  Description of Artificial Sequence: Synthetic oligonucleotide
  Antisense strand to SEQ ID NO: 154740
ucugugauaagcuuaucca

SEQ ID NO: 154742 - RNA, 19 nt, Artificial Sequence
  Description of Artificial Sequence: Synthetic oligonucleotide
  Sense strand starting at position 16 of SEQ ID NO: 1987
ccuggauaagcuuaucaca

SEQ ID NO: 154743 - RNA, 19 nt, Artificial Sequence
  Description of Artificial Sequence: Synthetic oligonucleotide
  Antisense strand to SEQ ID NO: 154742
ugugauaagcuuauccagg

SEQ ID NO: 154744 - RNA, 19 nt, Artificial Sequence
  Description of Artificial Sequence: Synthetic oligonucleotide
  Sense strand starting at position 78 of SEQ ID NO: 1988
cugguuuagccagaaucca

SEQ ID NO: 154745 - RNA, 19 nt, Artificial Sequence
  Description of Artificial Sequence: Synthetic oligonucleotide
  Antisense strand to SEQ ID NO: 154744
uggauucuggcuaaaccag

SEQ ID NO: 154746 - RNA, 19 nt, Artificial Sequence
  Description of Artificial Sequence: Synthetic oligonucleotide
  Sense strand starting at position 413 of SEQ ID NO: 1988
gguuucuagugauuucugu

SEQ ID NO: 154747 - RNA, 19 nt, Artificial Sequence
  Description of Artificial Sequence: Synthetic oligonucleotide
  Antisense strand to SEQ ID NO: 154746
acagaaaucacuagaaacc

SEQ ID NO: 154748 - RNA, 19 nt, Artificial Sequence
  Description of Artificial Sequence: Synthetic oligonucleotide
  Sense strand starting at position 442 of SEQ ID NO: 1988
uuucuaaacugggcauaaa

SEQ ID NO: 154749 - RNA, 19 nt, Artificial Sequence
  Description of Artificial Sequence: Synthetic oligonucleotide
  Antisense strand to SEQ ID NO: 154748
uuuaugcccaguuuagaaa

SEQ ID NO: 154750 - RNA, 19 nt, Artificial Sequence
  Description of Artificial Sequence: Synthetic oligonucleotide
  Sense strand starting at position 1212 of SEQ ID NO: 1988
augaaauggugacugcuua

SEQ ID NO: 154751 - RNA, 19 nt, Artificial Sequence
  Description of Artificial Sequence: Synthetic oligonucleotide
  Antisense strand to SEQ ID NO: 154750
uaagcagucaccauuucau

SEQ ID NO: 154752 - RNA, 19 nt, Artificial Sequence
  Description of Artificial Sequence: Synthetic oligonucleotide
  Sense strand starting at position 1213 of SEQ ID NO: 1988
ugaaauggugacugcuuau

SEQ ID NO: 154753 - RNA, 19 nt, Artificial Sequence
  Description of Artificial Sequence: Synthetic oligonucleotide
  Antisense strand to SEQ ID NO: 154752
auaagcagucaccauuuca

SEQ ID NO: 154754 - RNA, 19 nt, Artificial Sequence
  Description of Artificial Sequence: Synthetic oligonucleotide
  Sense strand starting at position 1229 of SEQ ID NO: 1988
uaugcuugccuugauagac

SEQ ID NO: 154755 - RNA, 19 nt, Artificial Sequence
  Description of Artificial Sequence: Synthetic oligonucleotide
  Antisense strand to SEQ ID NO: 154754
gucuaucaaggcaagcaua

SEQ ID NO: 154756 - RNA, 19 nt, Artificial Sequence
  Description of Artificial Sequence: Synthetic oligonucleotide
  Sense strand starting at position 1663 of SEQ ID NO: 1988
ggauaugaauuccuguacu

SEQ ID NO: 154757 - RNA, 19 nt, Artificial Sequence
  Description of Artificial Sequence: Synthetic oligonucleotide
  Antisense strand to SEQ ID NO: 154756
aguacaggaauucauaucc

SEQ ID NO: 154758 - RNA, 19 nt, Artificial Sequence
  Description of Artificial Sequence: Synthetic oligonucleotide
  Sense strand starting at position 1715 of SEQ ID NO: 1988
gucagaugugugcaagaug

SEQ ID NO: 154759 - RNA, 19 nt, Artificial Sequence
  Description of Artificial Sequence: Synthetic oligonucleotide
  Antisense strand to SEQ ID NO: 154758
caucuugcacacaucugac

SEQ ID NO: 154760 - RNA, 19 nt, Artificial Sequence
  Description of Artificial Sequence: Synthetic oligonucleotide
  Sense strand starting at position 1860 of SEQ ID NO: 1988
gguaguaaggcagauccau

SEQ ID NO: 154761 - RNA, 19 nt, Artificial Sequence
  Description of Artificial Sequence: Synthetic oligonucleotide
  Antisense strand to SEQ ID NO: 154760
auggaucugccuuacuacc

SEQ ID NO: 154762 - RNA, 19 nt, Artificial Sequence
  Description of Artificial Sequence: Synthetic oligonucleotide
  Sense strand starting at position 1905 of SEQ ID NO: 1988
cccuguuggccugaaauuc

SEQ ID NO: 154763 - RNA, 19 nt, Artificial Sequence
  Description of Artificial Sequence: Synthetic oligonucleotide
  Antisense strand to SEQ ID NO: 154762
gaauuucaggccaacaggg

SEQ ID NO: 154764 - RNA, 19 nt, Artificial Sequence
  Description of Artificial Sequence: Synthetic oligonucleotide
  Sense strand starting at position 2194 of SEQ ID NO: 1988
cuguguugcagccuuguau

SEQ ID NO: 154765 - RNA, 19 nt, Artificial Sequence
  Description of Artificial Sequence: Synthetic oligonucleotide
  Antisense strand to SEQ ID NO: 154764
auacaaggcugcaacacag

SEQ ID NO: 154766 - RNA, 19 nt, Artificial Sequence
  Description of Artificial Sequence: Synthetic oligonucleotide
  Sense strand starting at position 2195 of SEQ ID NO: 1988
uguguugcagccuuguaua

SEQ ID NO: 154767 - RNA, 19 nt, Artificial Sequence
  Description of Artificial Sequence: Synthetic oligonucleotide
  Antisense strand to SEQ ID NO: 154766
uauacaaggcugcaacaca

SEQ ID NO: 154768 - RNA, 19 nt, Artificial Sequence
  Description of Artificial Sequence: Synthetic oligonucleotide
  Sense strand starting at position 2197 of SEQ ID NO: 1988
uguugcagccuuguauauu

SEQ ID NO: 154769 - RNA, 19 nt, Artificial Sequence
  Description of Artificial Sequence: Synthetic oligonucleotide
  Antisense strand to SEQ ID NO: 154768
aauauacaaggcugcaaca

SEQ ID NO: 154770 - RNA, 19 nt, Artificial Sequence
  Description of Artificial Sequence: Synthetic oligonucleotide
  Sense strand starting at position 2205 of SEQ ID NO: 1988
ccuuguauauuaccaugga

SEQ ID NO: 154771 - RNA, 19 nt, Artificial Sequence
  Description of Artificial Sequence: Synthetic oligonucleotide
  Antisense strand to SEQ ID NO: 154770
uccaugguaauauacaagg

SEQ ID NO: 154772 - RNA, 19 nt, Artificial Sequence
  Description of Artificial Sequence: Synthetic oligonucleotide
  Sense strand starting at position 2208 of SEQ ID NO: 1988
uguauauuaccauggacua

SEQ ID NO: 154773 - RNA, 19 nt, Artificial Sequence
  Description of Artificial Sequence: Synthetic oligonucleotide
  Antisense strand to SEQ ID NO: 154772
uaguccaugguaauauaca

SEQ ID NO: 154774 - RNA, 19 nt, Artificial Sequence
  Description of Artificial Sequence: Synthetic oligonucleotide
  Sense strand starting at position 2209 of SEQ ID NO: 1988
guauauuaccauggacuau

SEQ ID NO: 154775 - RNA, 19 nt, Artificial Sequence
  Description of Artificial Sequence: Synthetic oligonucleotide
  Antisense strand to SEQ ID NO: 154774
auaguccaugguaauauac

SEQ ID NO: 154776 - RNA, 19 nt, Artificial Sequence
  Description of Artificial Sequence: Synthetic oligonucleotide
  Sense strand starting at position 2246 of SEQ ID NO: 1988
cugguauccuuuccaggaa

SEQ ID NO: 154777 - RNA, 19 nt, Artificial Sequence
  Description of Artificial Sequence: Synthetic oligonucleotide
  Antisense strand to SEQ ID NO: 154776
uuccuggaaaggauaccag

SEQ ID NO: 154778 - RNA, 19 nt, Artificial Sequence
  Description of Artificial Sequence: Synthetic oligonucleotide
  Sense strand starting at position 2314 of SEQ ID NO: 1988
cuaggauugggcuaugcuu

SEQ ID NO: 154779 - RNA, 19 nt, Artificial Sequence
  Description of Artificial Sequence: Synthetic oligonucleotide
  Antisense strand to SEQ ID NO: 154778
aagcauagcccaauccuag

SEQ ID NO: 154780 - RNA, 19 nt, Artificial Sequence
  Description of Artificial Sequence: Synthetic oligonucleotide
  Sense strand starting at position 2365 of SEQ ID NO: 1988
ugcugagagaauugauaug

SEQ ID NO: 154781 - RNA, 19 nt, Artificial Sequence
  Description of Artificial Sequence: Synthetic oligonucleotide
  Antisense strand to SEQ ID NO: 154780
cauaucaauucucucagca

SEQ ID NO: 154782 - RNA, 19 nt, Artificial Sequence
  Description of Artificial Sequence: Synthetic oligonucleotide
  Sense strand starting at position 2370 of SEQ ID NO: 1988
agagaauugauaugcucag

SEQ ID NO: 154783 - RNA, 19 nt, Artificial Sequence
  Description of Artificial Sequence: Synthetic oligonucleotide
  Antisense strand to SEQ ID NO: 154782
cugagcauaucaauucucu

SEQ ID NO: 154784 - RNA, 19 nt, Artificial Sequence
  Description of Artificial Sequence: Synthetic oligonucleotide
  Sense strand starting at position 2371 of SEQ ID NO: 1988
gagaauugauaugcucaga

SEQ ID NO: 154785 - RNA, 19 nt, Artificial Sequence
  Description of Artificial Sequence: Synthetic oligonucleotide
  Antisense strand to SEQ ID NO: 154784
ucugagcauaucaauucuc

SEQ ID NO: 154786 - RNA, 19 nt, Artificial Sequence
  Description of Artificial Sequence: Synthetic oligonucleotide
  Sense strand starting at position 2593 of SEQ ID NO: 1988
gagggauaucuggguauac

SEQ ID NO: 154787 - RNA, 19 nt, Artificial Sequence
  Description of Artificial Sequence: Synthetic oligonucleotide
  Antisense strand to SEQ ID NO: 154786
guauacccagauaucccuc

SEQ ID NO: 154788 - RNA, 19 nt, Artificial Sequence
  Description of Artificial Sequence: Synthetic oligonucleotide
  Sense strand starting at position 2594 of SEQ ID NO: 1988
agggauaucuggguauacu

SEQ ID NO: 154789 - RNA, 19 nt, Artificial Sequence
  Description of Artificial Sequence: Synthetic oligonucleotide
  Antisense strand to SEQ ID NO: 154788
aguauacccagauaucccu

SEQ ID NO: 154790 - RNA, 19 nt, Artificial Sequence
  Description of Artificial Sequence: Synthetic oligonucleotide
  Sense strand starting at position 2735 of SEQ ID NO: 1988
guaguaccuggagaucuua

SEQ ID NO: 154791 - RNA, 19 nt, Artificial Sequence
  Description of Artificial Sequence: Synthetic oligonucleotide
  Antisense strand to SEQ ID NO: 154790
uaagaucuccagguacuac

SEQ ID NO: 154792 - RNA, 19 nt, Artificial Sequence
  Description of Artificial Sequence: Synthetic oligonucleotide
  Sense strand starting at position 2833 of SEQ ID NO: 1988
auggaacuuccuuguaaca

SEQ ID NO: 154793 - RNA, 19 nt, Artificial Sequence
  Description of Artificial Sequence: Synthetic oligonucleotide
  Antisense strand to SEQ ID NO: 154792
uguuacaaggaaguuccau

SEQ ID NO: 154794 - RNA, 19 nt, Artificial Sequence
  Description of Artificial Sequence: Synthetic oligonucleotide
  Sense strand starting at position 2913 of SEQ ID NO: 1988
gggaacucguuaucagaca

SEQ ID NO: 154795 - RNA, 19 nt, Artificial Sequence
  Description of Artificial Sequence: Synthetic oligonucleotide
  Antisense strand to SEQ ID NO: 154794
ugucugauaacgaguuccc

SEQ ID NO: 154796 - RNA, 19 nt, Artificial Sequence
  Description of Artificial Sequence: Synthetic oligonucleotide
  Sense strand starting at position 3009 of SEQ ID NO: 1988
ugaagacagaguuguuaau

SEQ ID NO: 154797 - RNA, 19 nt, Artificial Sequence
  Description of Artificial Sequence: Synthetic oligonucleotide
  Antisense strand to SEQ ID NO: 154796
auuaacaacucugucuuca

SEQ ID NO: 154798 - RNA, 19 nt, Artificial Sequence
  Description of Artificial Sequence: Synthetic oligonucleotide
  Sense strand starting at position 3067 of SEQ ID NO: 1988
acaaucgugguguaaagau

SEQ ID NO: 154799 - RNA, 19 nt, Artificial Sequence
  Description of Artificial Sequence: Synthetic oligonucleotide
  Antisense strand to SEQ ID NO: 154798
aucuuuacaccacgauugu

SEQ ID NO: 154800 - RNA, 19 nt, Artificial Sequence
  Description of Artificial Sequence: Synthetic oligonucleotide
  Sense strand starting at position 3276 of SEQ ID NO: 1988
guuggucauggugaaagaa

SEQ ID NO: 154801 - RNA, 19 nt, Artificial Sequence
  Description of Artificial Sequence: Synthetic oligonucleotide
  Antisense strand to SEQ ID NO: 154800
uucuuucaccaugaccaac

SEQ ID NO: 154802 - RNA, 19 nt, Artificial Sequence
  Description of Artificial Sequence: Synthetic oligonucleotide
  Sense strand starting at position 3307 of SEQ ID NO: 1988
uguauaucauuaguuggaa

SEQ ID NO: 154803 - RNA, 19 nt, Artificial Sequence
  Description of Artificial Sequence: Synthetic oligonucleotide
  Antisense strand to SEQ ID NO: 154802
uuccaacuaaugauauaca

SEQ ID NO: 154804 - RNA, 19 nt, Artificial Sequence
  Description of Artificial Sequence: Synthetic oligonucleotide
  Sense strand starting at position 3308 of SEQ ID NO: 1988
guauaucauuaguuggaau

SEQ ID NO: 154805 - RNA, 19 nt, Artificial Sequence
  Description of Artificial Sequence: Synthetic oligonucleotide
  Antisense strand to SEQ ID NO: 154804
auuccaacuaaugauauac

SEQ ID NO: 154806 - RNA, 19 nt, Artificial Sequence
  Description of Artificial Sequence: Synthetic oligonucleotide
  Sense strand starting at position 3350 of SEQ ID NO: 1988
aaagaugguuuggcaauau

SEQ ID NO: 154807 - RNA, 19 nt, Artificial Sequence
  Description of Artificial Sequence: Synthetic oligonucleotide
  Antisense strand to SEQ ID NO: 154806
auauugccaaaccaucuuu

SEQ ID NO: 154808 - RNA, 19 nt, Artificial Sequence
  Description of Artificial Sequence: Synthetic oligonucleotide
  Sense strand starting at position 3402 of SEQ ID NO: 1988
agaacaaucucaguucuag

SEQ ID NO: 154809 - RNA, 19 nt, Artificial Sequence
  Description of Artificial Sequence: Synthetic oligonucleotide
  Antisense strand to SEQ ID NO: 154808
cuagaacugagauuguucu

SEQ ID NO: 154810 - RNA, 19 nt, Artificial Sequence
  Description of Artificial Sequence: Synthetic oligonucleotide
  Sense strand starting at position 3462 of SEQ ID NO: 1988
uugugaauaagguaguauu

SEQ ID NO: 154811 - RNA, 19 nt, Artificial Sequence
  Description of Artificial Sequence: Synthetic oligonucleotide
  Antisense strand to SEQ ID NO: 154810
aauacuaccuuauucacaa

SEQ ID NO: 154812 - RNA, 19 nt, Artificial Sequence
  Description of Artificial Sequence: Synthetic oligonucleotide
  Sense strand starting at position 3532 of SEQ ID NO: 1988
aggugaauaaacugugauu

SEQ ID NO: 154813 - RNA, 19 nt, Artificial Sequence
  Description of Artificial Sequence: Synthetic oligonucleotide
  Antisense strand to SEQ ID NO: 154812
aaucacaguuuauucaccu

SEQ ID NO: 154814 - RNA, 19 nt, Artificial Sequence
  Description of Artificial Sequence: Synthetic oligonucleotide
  Sense strand starting at position 3600 of SEQ ID NO: 1988
agaucucuauaugcugaua

SEQ ID NO: 154815 - RNA, 19 nt, Artificial Sequence
  Description of Artificial Sequence: Synthetic oligonucleotide
  Antisense strand to SEQ ID NO: 154814
uaucagcauauagagaucu

SEQ ID NO: 154816 - RNA, 19 nt, Artificial Sequence
  Description of Artificial Sequence: Synthetic oligonucleotide
  Sense strand starting at position 3608 of SEQ ID NO: 1988
auaugcugauaugcaauaa

SEQ ID NO: 154817 - RNA, 19 nt, Artificial Sequence
  Description of Artificial Sequence: Synthetic oligonucleotide
  Antisense strand to SEQ ID NO: 154816
uuauugcauaucagcauau

SEQ ID NO: 154818 - RNA, 19 nt, Artificial Sequence
  Description of Artificial Sequence: Synthetic oligonucleotide
  Sense strand starting at position 3612 of SEQ ID NO: 1988
gcugauaugcaauaaucuu

SEQ ID NO: 154819 - RNA, 19 nt, Artificial Sequence
  Description of Artificial Sequence: Synthetic oligonucleotide
  Antisense strand to SEQ ID NO: 154818
aagauuauugcauaucagc

SEQ ID NO: 154820 - RNA, 19 nt, Artificial Sequence
  Description of Artificial Sequence: Synthetic oligonucleotide
  Sense strand starting at position 3654 of SEQ ID NO: 1988
cagcaagaugcacaauagu

SEQ ID NO: 154821 - RNA, 19 nt, Artificial Sequence
  Description of Artificial Sequence: Synthetic oligonucleotide
  Antisense strand to SEQ ID NO: 154820
acuauugugcaucuugcug

SEQ ID NO: 154822 - RNA, 19 nt, Artificial Sequence
  Description of Artificial Sequence: Synthetic oligonucleotide
  Sense strand starting at position 3824 of SEQ ID NO: 1988
aggugagacuucucucagu

SEQ ID NO: 154823 - RNA, 19 nt, Artificial Sequence
  Description of Artificial Sequence: Synthetic oligonucleotide
  Antisense strand to SEQ ID NO: 154822
acugagagaagucucaccu

SEQ ID NO: 154824 - RNA, 19 nt, Artificial Sequence
  Description of Artificial Sequence: Synthetic oligonucleotide
  Sense strand starting at position 12 of SEQ ID NO: 1989
agagaugccucagugaaag

SEQ ID NO: 154825 - RNA, 19 nt, Artificial Sequence
  Description of Artificial Sequence: Synthetic oligonucleotide
  Antisense strand to SEQ ID NO: 154824
cuuucacugaggcaucucu

SEQ ID NO: 154826 - RNA, 19 nt, Artificial Sequence
  Description of Artificial Sequence: Synthetic oligonucleotide
  Sense strand starting at position 247 of SEQ ID NO: 1989
gggccugggucuucuggaa

SEQ ID NO: 154827 - RNA, 19 nt, Artificial Sequence
  Description of Artificial Sequence: Synthetic oligonucleotide
  Antisense strand to SEQ ID NO: 154826
uuccagaagacccaggccc

SEQ ID NO: 154828 - RNA, 19 nt, Artificial Sequence
  Description of Artificial Sequence: Synthetic oligonucleotide
  Sense strand starting at position 328 of SEQ ID NO: 1989
cagcauucccuguguugga

SEQ ID NO: 154829 - RNA, 19 nt, Artificial Sequence
  Description of Artificial Sequence: Synthetic oligonucleotide
  Antisense strand to SEQ ID NO: 154828
uccaacacagggaaugcug

SEQ ID NO: 154830 - RNA, 19 nt, Artificial Sequence
  Description of Artificial Sequence: Synthetic oligonucleotide
  Sense strand starting at position 421 of SEQ ID NO: 1989
gccuucuccugacuuugau

SEQ ID NO: 154831 - RNA, 19 nt, Artificial Sequence
  Description of Artificial Sequence: Synthetic oligonucleotide
  Antisense strand to SEQ ID NO: 154830
aucaaagucaggagaaggc

SEQ ID NO: 154832 - RNA, 19 nt, Artificial Sequence
  Description of Artificial Sequence: Synthetic oligonucleotide
  Sense strand starting at position 489 of SEQ ID NO: 1989
ggguacaauugcccagaaa

SEQ ID NO: 154833 - RNA, 19 nt, Artificial Sequence
  Description of Artificial Sequence: Synthetic oligonucleotide
  Antisense strand to SEQ ID NO: 154832
uuucugggcaauuguaccc

SEQ ID NO: 154834 - RNA, 19 nt, Artificial Sequence
  Description of Artificial Sequence: Synthetic oligonucleotide
  Sense strand starting at position 834 of SEQ ID NO: 1989
guggaaugcacugggcaaa

SEQ ID NO: 154835 - RNA, 19 nt, Artificial Sequence
  Description of Artificial Sequence: Synthetic oligonucleotide
  Antisense strand to SEQ ID NO: 154834
uuugcccagugcauuccac

SEQ ID NO: 154836 - RNA, 19 nt, Artificial Sequence
  Description of Artificial Sequence: Synthetic oligonucleotide
  Sense strand starting at position 847 of SEQ ID NO: 1989
ggcaaauggucacugacac

SEQ ID NO: 154837 - RNA, 19 nt, Artificial Sequence
  Description of Artificial Sequence: Synthetic oligonucleotide
  Antisense strand to SEQ ID NO: 154836
gugucagugaccauuugcc

SEQ ID NO: 154838 - RNA, 19 nt, Artificial Sequence
  Description of Artificial Sequence: Synthetic oligonucleotide
  Sense strand starting at position 848 of SEQ ID NO: 1989
gcaaauggucacugacaca

SEQ ID NO: 154839 - RNA, 19 nt, Artificial Sequence
  Description of Artificial Sequence: Synthetic oligonucleotide
  Antisense strand to SEQ ID NO: 154838
ugugucagugaccauuugc

SEQ ID NO: 154840 - RNA, 19 nt, Artificial Sequence
  Description of Artificial Sequence: Synthetic oligonucleotide
  Sense strand starting at position 1032 of SEQ ID NO: 1989
uuggcagacccggaucauu

SEQ ID NO: 154841 - RNA, 19 nt, Artificial Sequence
  Description of Artificial Sequence: Synthetic oligonucleotide
  Antisense strand to SEQ ID NO: 154840
aaugauccgggucugccaa

SEQ ID NO: 154842 - RNA, 19 nt, Artificial Sequence
  Description of Artificial Sequence: Synthetic oligonucleotide
  Sense strand starting at position 1063 of SEQ ID NO: 1989
uggaguggccuuuguccau

SEQ ID NO: 154843 - RNA, 19 nt, Artificial Sequence
  Description of Artificial Sequence: Synthetic oligonucleotide
  Antisense strand to SEQ ID NO: 154842
auggacaaaggccacucca

SEQ ID NO: 154844 - RNA, 19 nt, Artificial Sequence
  Description of Artificial Sequence: Synthetic oligonucleotide
  Sense strand starting at position 1189 of SEQ ID NO: 1989
cgggucaugucugugaucu

SEQ ID NO: 154845 - RNA, 19 nt, Artificial Sequence
  Description of Artificial Sequence: Synthetic oligonucleotide
  Antisense strand to SEQ ID NO: 154844
agaucacagacaugacccg

SEQ ID NO: 154846 - RNA, 19 nt, Artificial Sequence
  Description of Artificial Sequence: Synthetic oligonucleotide
  Sense strand starting at position 1190 of SEQ ID NO: 1989
gggucaugucugugaucug

SEQ ID NO: 154847 - RNA, 19 nt, Artificial Sequence
  Description of Artificial Sequence: Synthetic oligonucleotide
  Antisense strand to SEQ ID NO: 154846
cagaucacagacaugaccc

SEQ ID NO: 154848 - RNA, 19 nt, Artificial Sequence
  Description of Artificial Sequence: Synthetic oligonucleotide
  Sense strand starting at position 1193 of SEQ ID NO: 1989
ucaugucugugaucuggaa

SEQ ID NO: 154849 - RNA, 19 nt, Artificial Sequence
  Description of Artificial Sequence: Synthetic oligonucleotide
  Antisense strand to SEQ ID NO: 154848
uuccagaucacagacauga

SEQ ID NO: 154850 - RNA, 19 nt, Artificial Sequence
  Description of Artificial Sequence: Synthetic oligonucleotide
  Sense strand starting at position 1197 of SEQ ID NO: 1989
gucugugaucuggaaggug

SEQ ID NO: 154851 - RNA, 19 nt, Artificial Sequence
  Description of Artificial Sequence: Synthetic oligonucleotide
  Antisense strand to SEQ ID NO: 154850
caccuuccagaucacagac

SEQ ID NO: 154852 - RNA, 19 nt, Artificial Sequence
  Description of Artificial Sequence: Synthetic oligonucleotide
  Sense strand starting at position 1273 of SEQ ID NO: 1989
guuucucagagaggaacua

SEQ ID NO: 154853 - RNA, 19 nt, Artificial Sequence
  Description of Artificial Sequence: Synthetic oligonucleotide
  Antisense strand to SEQ ID NO: 154852
uaguuccucucugagaaac

SEQ ID NO: 154854 - RNA, 19 nt, Artificial Sequence
  Description of Artificial Sequence: Synthetic oligonucleotide
  Sense strand starting at position 1390 of SEQ ID NO: 1989
guuucucaggcaugagguu

SEQ ID NO: 154855 - RNA, 19 nt, Artificial Sequence
  Description of Artificial Sequence: Synthetic oligonucleotide
  Antisense strand to SEQ ID NO: 154854
aaccucaugccugagaaac

SEQ ID NO: 154856 - RNA, 19 nt, Artificial Sequence
  Description of Artificial Sequence: Synthetic oligonucleotide
  Sense strand starting at position 1632 of SEQ ID NO: 1989
ucaccuuuauccucaggga

SEQ ID NO: 154857 - RNA, 19 nt, Artificial Sequence
  Description of Artificial Sequence: Synthetic oligonucleotide
  Antisense strand to SEQ ID NO: 154856
ucccugaggauaaagguga

SEQ ID NO: 154858 - RNA, 19 nt, Artificial Sequence
  Description of Artificial Sequence: Synthetic oligonucleotide
  Sense strand starting at position 1899 of SEQ ID NO: 1989
guauguguuccggaaaggu

SEQ ID NO: 154859 - RNA, 19 nt, Artificial Sequence
  Description of Artificial Sequence: Synthetic oligonucleotide
  Antisense strand to SEQ ID NO: 154858
accuuuccggaacacauac

SEQ ID NO: 154860 - RNA, 19 nt, Artificial Sequence
  Description of Artificial Sequence: Synthetic oligonucleotide
  Sense strand starting at position 1992 of SEQ ID NO: 1989
cuuaguucuggcgaggacu

SEQ ID NO: 154861 - RNA, 19 nt, Artificial Sequence
  Description of Artificial Sequence: Synthetic oligonucleotide
  Antisense strand to SEQ ID NO: 154860
aguccucgccagaacuaag

SEQ ID NO: 154862 - RNA, 19 nt, Artificial Sequence
  Description of Artificial Sequence: Synthetic oligonucleotide
  Sense strand starting at position 2063 of SEQ ID NO: 1989
uguagauagcggugguaua

SEQ ID NO: 154863 - RNA, 19 nt, Artificial Sequence
  Description of Artificial Sequence: Synthetic oligonucleotide
  Antisense strand to SEQ ID NO: 154862
uauaccaccgcuaucuaca

SEQ ID NO: 154864 - RNA, 19 nt, Artificial Sequence
  Description of Artificial Sequence: Synthetic oligonucleotide
  Sense strand starting at position 2286 of SEQ ID NO: 1989
uguucugagcagugggaau

SEQ ID NO: 154865 - RNA, 19 nt, Artificial Sequence
  Description of Artificial Sequence: Synthetic oligonucleotide
  Antisense strand to SEQ ID NO: 154864
auucccacugcucagaaca

SEQ ID NO: 154866 - RNA, 19 nt, Artificial Sequence
  Description of Artificial Sequence: Synthetic oligonucleotide
  Sense strand starting at position 2331 of SEQ ID NO: 1989
acacaaggugcuuauggau

SEQ ID NO: 154867 - RNA, 19 nt, Artificial Sequence
  Description of Artificial Sequence: Synthetic oligonucleotide
  Antisense strand to SEQ ID NO: 154866
auccauaagcaccuugugu

SEQ ID NO: 154868 - RNA, 19 nt, Artificial Sequence
  Description of Artificial Sequence: Synthetic oligonucleotide
  Sense strand starting at position 2338 of SEQ ID NO: 1989
gugcuuauggaucaugcuu

SEQ ID NO: 154869 - RNA, 19 nt, Artificial Sequence
  Description of Artificial Sequence: Synthetic oligonucleotide
  Antisense strand to SEQ ID NO: 154868
aagcaugauccauaagcac

SEQ ID NO: 154870 - RNA, 19 nt, Artificial Sequence
  Description of Artificial Sequence: Synthetic oligonucleotide
  Sense strand starting at position 2346 of SEQ ID NO: 1989
ggaucaugcuuugaggaga

SEQ ID NO: 154871 - RNA, 19 nt, Artificial Sequence
  Description of Artificial Sequence: Synthetic oligonucleotide
  Antisense strand to SEQ ID NO: 154870
ucuccucaaagcaugaucc

SEQ ID NO: 154872 - RNA, 19 nt, Artificial Sequence
  Description of Artificial Sequence: Synthetic oligonucleotide
  Sense strand starting at position 2438 of SEQ ID NO: 1989
augugaaaucuaugagucu

SEQ ID NO: 154873 - RNA, 19 nt, Artificial Sequence
  Description of Artificial Sequence: Synthetic oligonucleotide
  Antisense strand to SEQ ID NO: 154872
agacucauagauuucacau

SEQ ID NO: 154874 - RNA, 19 nt, Artificial Sequence
  Description of Artificial Sequence: Synthetic oligonucleotide
  Sense strand starting at position 2444 of SEQ ID NO: 1989
aaucuaugagucugggcau

SEQ ID NO: 154875 - RNA, 19 nt, Artificial Sequence
  Description of Artificial Sequence: Synthetic oligonucleotide
  Antisense strand to SEQ ID NO: 154874
augcccagacucauagauu

SEQ ID NO: 154876 - RNA, 19 nt, Artificial Sequence
  Description of Artificial Sequence: Synthetic oligonucleotide
  Sense strand starting at position 2447 of SEQ ID NO: 1989
cuaugagucugggcauggu

SEQ ID NO: 154877 - RNA, 19 nt, Artificial Sequence
  Description of Artificial Sequence: Synthetic oligonucleotide
  Antisense strand to SEQ ID NO: 154876
accaugcccagacucauag

SEQ ID NO: 154878 - RNA, 19 nt, Artificial Sequence
  Description of Artificial Sequence: Synthetic oligonucleotide
  Sense strand starting at position 2532 of SEQ ID NO: 1989
caugaucagcccuggguaa

SEQ ID NO: 154879 - RNA, 19 nt, Artificial Sequence
  Description of Artificial Sequence: Synthetic oligonucleotide
  Antisense strand to SEQ ID NO: 154878
uuacccagggcugaucaug

SEQ ID NO: 154880 - RNA, 19 nt, Artificial Sequence
  Description of Artificial Sequence: Synthetic oligonucleotide
  Sense strand starting at position 2555 of SEQ ID NO: 1989
gugagagcccaucacuauu

SEQ ID NO: 154881 - RNA, 19 nt, Artificial Sequence
  Description of Artificial Sequence: Synthetic oligonucleotide
  Antisense strand to SEQ ID NO: 154880
aauagugaugggcucucac

SEQ ID NO: 154882 - RNA, 19 nt, Artificial Sequence
  Description of Artificial Sequence: Synthetic oligonucleotide
  Sense strand starting at position 2664 of SEQ ID NO: 1989
agauaauggagcugaguua

SEQ ID NO: 154883 - RNA, 19 nt, Artificial Sequence
  Description of Artificial Sequence: Synthetic oligonucleotide
  Antisense strand to SEQ ID NO: 154882
uaacucagcuccauuaucu

SEQ ID NO: 154884 - RNA, 19 nt, Artificial Sequence
  Description of Artificial Sequence: Synthetic oligonucleotide
  Sense strand starting at position 2727 of SEQ ID NO: 1989
agcuaagcaggucaucauu

SEQ ID NO: 154885 - RNA, 19 nt, Artificial Sequence
  Description of Artificial Sequence: Synthetic oligonucleotide
  Antisense strand to SEQ ID NO: 154884
aaugaugaccugcuuagcu

SEQ ID NO: 154886 - RNA, 19 nt, Artificial Sequence
  Description of Artificial Sequence: Synthetic oligonucleotide
  Sense strand starting at position 2733 of SEQ ID NO: 1989
gcaggucaucauuaguauc

SEQ ID NO: 154887 - RNA, 19 nt, Artificial Sequence
  Description of Artificial Sequence: Synthetic oligonucleotide
  Antisense strand to SEQ ID NO: 154886
gauacuaaugaugaccugc

SEQ ID NO: 154888 - RNA, 19 nt, Artificial Sequence
  Description of Artificial Sequence: Synthetic oligonucleotide
  Sense strand starting at position 2735 of SEQ ID NO: 1989
aggucaucauuaguaucaa

SEQ ID NO: 154889 - RNA, 19 nt, Artificial Sequence
  Description of Artificial Sequence: Synthetic oligonucleotide
  Antisense strand to SEQ ID NO: 154888
uugauacuaaugaugaccu

SEQ ID NO: 154890 - RNA, 19 nt, Artificial Sequence
  Description of Artificial Sequence: Synthetic oligonucleotide
  Sense strand starting at position 2761 of SEQ ID NO: 1989
agcaguugucauuaauaac

SEQ ID NO: 154891 - RNA, 19 nt, Artificial Sequence
  Description of Artificial Sequence: Synthetic oligonucleotide
  Antisense strand to SEQ ID NO: 154890
guuauuaaugacaacugcu

SEQ ID NO: 154892 - RNA, 19 nt, Artificial Sequence
  Description of Artificial Sequence: Synthetic oligonucleotide
  Sense strand starting at position 2772 of SEQ ID NO: 1989
uuaauaacaucaguguuga

SEQ ID NO: 154893 - RNA, 19 nt, Artificial Sequence
  Description of Artificial Sequence: Synthetic oligonucleotide
  Antisense strand to SEQ ID NO: 154892
ucaacacugauguuauuaa

SEQ ID NO: 154894 - RNA, 19 nt, Artificial Sequence
  Description of Artificial Sequence: Synthetic oligonucleotide
  Sense strand starting at position 3243 of SEQ ID NO: 1989
agggucuuucagugucuga

SEQ ID NO: 154895 - RNA, 19 nt, Artificial Sequence
  Description of Artificial Sequence: Synthetic oligonucleotide
  Antisense strand to SEQ ID NO: 154894
ucagacacugaaagacccu

SEQ ID NO: 154896 - RNA, 19 nt, Artificial Sequence
  Description of Artificial Sequence: Synthetic oligonucleotide
  Sense strand starting at position 3256 of SEQ ID NO: 1989
gucugagaaguugguguga

SEQ ID NO: 154897 - RNA, 19 nt, Artificial Sequence
  Description of Artificial Sequence: Synthetic oligonucleotide
  Antisense strand to SEQ ID NO: 154896
ucacaccaacuucucagac

SEQ ID NO: 154898 - RNA, 19 nt, Artificial Sequence
  Description of Artificial Sequence: Synthetic oligonucleotide
  Sense strand starting at position 3268 of SEQ ID NO: 1989
ggugugagugcugggacua

SEQ ID NO: 154899 - RNA, 19 nt, Artificial Sequence
  Description of Artificial Sequence: Synthetic oligonucleotide
  Antisense strand to SEQ ID NO: 154898
uagucccagcacucacacc

SEQ ID NO: 154900 - RNA, 19 nt, Artificial Sequence
  Description of Artificial Sequence: Synthetic oligonucleotide
  Sense strand starting at position 3313 of SEQ ID NO: 1989
cacugugauuuaggccaaa

SEQ ID NO: 154901 - RNA, 19 nt, Artificial Sequence
  Description of Artificial Sequence: Synthetic oligonucleotide
  Antisense strand to SEQ ID NO: 154900
uuuggccuaaaucacagug

SEQ ID NO: 154902 - RNA, 19 nt, Artificial Sequence
  Description of Artificial Sequence: Synthetic oligonucleotide
  Sense strand starting at position 3536 of SEQ ID NO: 1989
ggauaaguuaccuaguggu

SEQ ID NO: 154903 - RNA, 19 nt, Artificial Sequence
  Description of Artificial Sequence: Synthetic oligonucleotide
  Antisense strand to SEQ ID NO: 154902
accacuagguaacuuaucc

SEQ ID NO: 154904 - RNA, 19 nt, Artificial Sequence
  Description of Artificial Sequence: Synthetic oligonucleotide
  Sense strand starting at position 433 of SEQ ID NO: 1990
ugggaaaguaguuggacuu

SEQ ID NO: 154905 - RNA, 19 nt, Artificial Sequence
  Description of Artificial Sequence: Synthetic oligonucleotide
  Antisense strand to SEQ ID NO: 154904
aaguccaacuacuuuccca

SEQ ID NO: 154906 - RNA, 19 nt, Artificial Sequence
  Description of Artificial Sequence: Synthetic oligonucleotide
  Sense strand starting at position 528 of SEQ ID NO: 1990
gggagauucugcaagggug

SEQ ID NO: 154907 - RNA, 19 nt, Artificial Sequence
  Description of Artificial Sequence: Synthetic oligonucleotide
  Antisense strand to SEQ ID NO: 154906
cacccuugcagaaucuccc

SEQ ID NO: 154908 - RNA, 19 nt, Artificial Sequence
  Description of Artificial Sequence: Synthetic oligonucleotide
  Sense strand starting at position 713 of SEQ ID NO: 1990
agagaugccucagugaaag

SEQ ID NO: 154909 - RNA, 19 nt, Artificial Sequence
  Description of Artificial Sequence: Synthetic oligonucleotide
  Antisense strand to SEQ ID NO: 154908
cuuucacugaggcaucucu

SEQ ID NO: 154910 - RNA, 19 nt, Artificial Sequence
  Description of Artificial Sequence: Synthetic oligonucleotide
  Sense strand starting at position 948 of SEQ ID NO: 1990
gggccugggucuucuggaa

SEQ ID NO: 154911 - RNA, 19 nt, Artificial Sequence
  Description of Artificial Sequence: Synthetic oligonucleotide
  Antisense strand to SEQ ID NO: 154910
uuccagaagacccaggccc

SEQ ID NO: 154912 - RNA, 19 nt, Artificial Sequence
  Description of Artificial Sequence: Synthetic oligonucleotide
  Sense strand starting at position 1029 of SEQ ID NO: 1990
cagcauucccuguguugga

SEQ ID NO: 154913 - RNA, 19 nt, Artificial Sequence
  Description of Artificial Sequence: Synthetic oligonucleotide
  Antisense strand to SEQ ID NO: 154912
uccaacacagggaaugcug

SEQ ID NO: 154914 - RNA, 19 nt, Artificial Sequence
  Description of Artificial Sequence: Synthetic oligonucleotide
  Sense strand starting at position 1122 of SEQ ID NO: 1990
gccuucuccugacuuugau

SEQ ID NO: 154915 - RNA, 19 nt, Artificial Sequence
  Description of Artificial Sequence: Synthetic oligonucleotide
  Antisense strand to SEQ ID NO: 154914
aucaaagucaggagaaggc

SEQ ID NO: 154916 - RNA, 19 nt, Artificial Sequence
  Description of Artificial Sequence: Synthetic oligonucleotide
  Sense strand starting at position 1190 of SEQ ID NO: 1990
ggguacaauugcccagaaa

SEQ ID NO: 154917 - RNA, 19 nt, Artificial Sequence
  Description of Artificial Sequence: Synthetic oligonucleotide
  Antisense strand to SEQ ID NO: 154916
uuucugggcaauuguaccc

SEQ ID NO: 154918 - RNA, 19 nt, Artificial Sequence
  Description of Artificial Sequence: Synthetic oligonucleotide
  Sense strand starting at position 1535 of SEQ ID NO: 1990
guggaaugcacugggcaaa

SEQ ID NO: 154919 - RNA, 19 nt, Artificial Sequence
  Description of Artificial Sequence: Synthetic oligonucleotide
  Antisense strand to SEQ ID NO: 154918
uuugcccagugcauuccac

SEQ ID NO: 154920 - RNA, 19 nt, Artificial Sequence
  Description of Artificial Sequence: Synthetic oligonucleotide
  Sense strand starting at position 1548 of SEQ ID NO: 1990
ggcaaauggucacugacac

SEQ ID NO: 154921 - RNA, 19 nt, Artificial Sequence
  Description of Artificial Sequence: Synthetic oligonucleotide
  Antisense strand to SEQ ID NO: 154920
gugucagugaccauuugcc

SEQ ID NO: 154922 - RNA, 19 nt, Artificial Sequence
  Description of Artificial Sequence: Synthetic oligonucleotide
  Sense strand starting at position 1549 of SEQ ID NO: 1990
gcaaauggucacugacaca

SEQ ID NO: 154923 - RNA, 19 nt, Artificial Sequence
  Description of Artificial Sequence: Synthetic oligonucleotide
  Antisense strand to SEQ ID NO: 154922
ugugucagugaccauuugc

SEQ ID NO: 154924 - RNA, 19 nt, Artificial Sequence
  Description of Artificial Sequence: Synthetic oligonucleotide
  Sense strand starting at position 1733 of SEQ ID NO: 1990
uuggcagacccggaucauu

SEQ ID NO: 154925 - RNA, 19 nt, Artificial Sequence
  Description of Artificial Sequence: Synthetic oligonucleotide
  Antisense strand to SEQ ID NO: 154924
aaugauccgggucugccaa

SEQ ID NO: 154926 - RNA, 19 nt, Artificial Sequence
  Description of Artificial Sequence: Synthetic oligonucleotide
  Sense strand starting at position 1764 of SEQ ID NO: 1990
uggaguggccuuuguccau

SEQ ID NO: 154927 - RNA, 19 nt, Artificial Sequence
  Description of Artificial Sequence: Synthetic oligonucleotide
  Antisense strand to SEQ ID NO: 154926
auggacaaaggccacucca

SEQ ID NO: 154928 - RNA, 19 nt, Artificial Sequence
  Description of Artificial Sequence: Synthetic oligonucleotide
  Sense strand starting at position 1890 of SEQ ID NO: 1990
cgggucaugucugugaucu

SEQ ID NO: 154929 - RNA, 19 nt, Artificial Sequence
  Description of Artificial Sequence: Synthetic oligonucleotide
  Antisense strand to SEQ ID NO: 154928
agaucacagacaugacccg

SEQ ID NO: 154930 - RNA, 19 nt, Artificial Sequence
  Description of Artificial Sequence: Synthetic oligonucleotide
  Sense strand starting at position 1891 of SEQ ID NO: 1990
gggucaugucugugaucug

SEQ ID NO: 154931 - RNA, 19 nt, Artificial Sequence
  Description of Artificial Sequence: Synthetic oligonucleotide
  Antisense strand to SEQ ID NO: 154930
cagaucacagacaugaccc

SEQ ID NO: 154932 - RNA, 19 nt, Artificial Sequence
  Description of Artificial Sequence: Synthetic oligonucleotide
  Sense strand starting at position 1894 of SEQ ID NO: 1990
ucaugucugugaucuggaa

SEQ ID NO: 154933 - RNA, 19 nt, Artificial Sequence
  Description of Artificial Sequence: Synthetic oligonucleotide
  Antisense strand to SEQ ID NO: 154932
uuccagaucacagacauga

SEQ ID NO: 154934 - RNA, 19 nt, Artificial Sequence
  Description of Artificial Sequence: Synthetic oligonucleotide
  Sense strand starting at position 1898 of SEQ ID NO: 1990
gucugugaucuggaaggug

SEQ ID NO: 154935 - RNA, 19 nt, Artificial Sequence
  Description of Artificial Sequence: Synthetic oligonucleotide
  Antisense strand to SEQ ID NO: 154934
caccuuccagaucacagac

SEQ ID NO: 154936 - RNA, 19 nt, Artificial Sequence
  Description of Artificial Sequence: Synthetic oligonucleotide
  Sense strand starting at position 1974 of SEQ ID NO: 1990
guuucucagagaggaacua

SEQ ID NO: 154937 - RNA, 19 nt, Artificial Sequence
  Description of Artificial Sequence: Synthetic oligonucleotide
  Antisense strand to SEQ ID NO: 154936
uaguuccucucugagaaac

SEQ ID NO: 154938 - RNA, 19 nt, Artificial Sequence
  Description of Artificial Sequence: Synthetic oligonucleotide
  Sense strand starting at position 2091 of SEQ ID NO: 1990
guuucucaggcaugagguu

SEQ ID NO: 154939 - RNA, 19 nt, Artificial Sequence
  Description of Artificial Sequence: Synthetic oligonucleotide
  Antisense strand to SEQ ID NO: 154938
aaccucaugccugagaaac

SEQ ID NO: 154940 - RNA, 19 nt, Artificial Sequence
  Description of Artificial Sequence: Synthetic oligonucleotide
  Sense strand starting at position 2333 of SEQ ID NO: 1990
ucaccuuuauccucaggga

SEQ ID NO: 154941 - RNA, 19 nt, Artificial Sequence
  Description of Artificial Sequence: Synthetic oligonucleotide
  Antisense strand to SEQ ID NO: 154940
ucccugaggauaaagguga

SEQ ID NO: 154942 - RNA, 19 nt, Artificial Sequence
  Description of Artificial Sequence: Synthetic oligonucleotide
  Sense strand starting at position 2600 of SEQ ID NO: 1990
guauguguuccggaaaggu

SEQ ID NO: 154943 - RNA, 19 nt, Artificial Sequence
  Description of Artificial Sequence: Synthetic oligonucleotide
  Antisense strand to SEQ ID NO: 154942
accuuuccggaacacauac

SEQ ID NO: 154944 - RNA, 19 nt, Artificial Sequence
  Description of Artificial Sequence: Synthetic oligonucleotide
  Sense strand starting at position 2693 of SEQ ID NO: 1990
cuuaguucuggcgaggacu

SEQ ID NO: 154945 - RNA, 19 nt, Artificial Sequence
  Description of Artificial Sequence: Synthetic oligonucleotide
  Antisense strand to SEQ ID NO: 154944
aguccucgccagaacuaag

SEQ ID NO: 154946 - RNA, 19 nt, Artificial Sequence
  Description of Artificial Sequence: Synthetic oligonucleotide
  Sense strand starting at position 2764 of SEQ ID NO: 1990
uguagauagcggugguaua

SEQ ID NO: 154947 - RNA, 19 nt, Artificial Sequence
  Description of Artificial Sequence: Synthetic oligonucleotide
  Antisense strand to SEQ ID NO: 154946
uauaccaccgcuaucuaca

SEQ ID NO: 154948 - RNA, 19 nt, Artificial Sequence
  Description of Artificial Sequence: Synthetic oligonucleotide
  Sense strand starting at position 2987 of SEQ ID NO: 1990
uguucugagcagugggaau

SEQ ID NO: 154949 - RNA, 19 nt, Artificial Sequence
  Description of Artificial Sequence: Synthetic oligonucleotide
  Antisense strand to SEQ ID NO: 154948
auucccacugcucagaaca

SEQ ID NO: 154950 - RNA, 19 nt, Artificial Sequence
  Description of Artificial Sequence: Synthetic oligonucleotide
  Sense strand starting at position 3032 of SEQ ID NO: 1990
acacaaggugcuuauggau

SEQ ID NO: 154951 - RNA, 19 nt, Artificial Sequence
  Description of Artificial Sequence: Synthetic oligonucleotide
  Antisense strand to SEQ ID NO: 154950
auccauaagcaccuugugu

SEQ ID NO: 154952 - RNA, 19 nt, Artificial Sequence
  Description of Artificial Sequence: Synthetic oligonucleotide
  Sense strand starting at position 3039 of SEQ ID NO: 1990
gugcuuauggaucaugcuu

SEQ ID NO: 154953 - RNA, 19 nt, Artificial Sequence
  Description of Artificial Sequence: Synthetic oligonucleotide
  Antisense strand to SEQ ID NO: 154952
aagcaugauccauaagcac

SEQ ID NO: 154954 - RNA, 19 nt, Artificial Sequence
  Description of Artificial Sequence: Synthetic oligonucleotide
  Sense strand starting at position 3047 of SEQ ID NO: 1990
ggaucaugcuuugaggaga

SEQ ID NO: 154955 - RNA, 19 nt, Artificial Sequence
  Description of Artificial Sequence: Synthetic oligonucleotide
  Antisense strand to SEQ ID NO: 154954
ucuccucaaagcaugaucc

SEQ ID NO: 154956 - RNA, 19 nt, Artificial Sequence
  Description of Artificial Sequence: Synthetic oligonucleotide
  Sense strand starting at position 3139 of SEQ ID NO: 1990
augugaaaucuaugagucu

SEQ ID NO: 154957 - RNA, 19 nt, Artificial Sequence
  Description of Artificial Sequence: Synthetic oligonucleotide
  Antisense strand to SEQ ID NO: 154956
agacucauagauuucacau

SEQ ID NO: 154958 - RNA, 19 nt, Artificial Sequence
  Description of Artificial Sequence: Synthetic oligonucleotide
  Sense strand starting at position 3145 of SEQ ID NO: 1990
aaucuaugagucugggcau

SEQ ID NO: 154959 - RNA, 19 nt, Artificial Sequence
  Description of Artificial Sequence: Synthetic oligonucleotide
  Antisense strand to SEQ ID NO: 154958
augcccagacucauagauu

SEQ ID NO: 154960 - RNA, 19 nt, Artificial Sequence
  Description of Artificial Sequence: Synthetic oligonucleotide
  Sense strand starting at position 3148 of SEQ ID NO: 1990
cuaugagucugggcauggu

SEQ ID NO: 154961 - RNA, 19 nt, Artificial Sequence
  Description of Artificial Sequence: Synthetic oligonucleotide
  Antisense strand to SEQ ID NO: 154960
accaugcccagacucauag

SEQ ID NO: 154962 - RNA, 19 nt, Artificial Sequence
  Description of Artificial Sequence: Synthetic oligonucleotide
  Sense strand starting at position 3233 of SEQ ID NO: 1990
caugaucagcccuggguaa

SEQ ID NO: 154963 - RNA, 19 nt, Artificial Sequence
  Description of Artificial Sequence: Synthetic oligonucleotide
  Antisense strand to SEQ ID NO: 154962
uuacccagggcugaucaug

SEQ ID NO: 154964 - RNA, 19 nt, Artificial Sequence
  Description of Artificial Sequence: Synthetic oligonucleotide
  Sense strand starting at position 3256 of SEQ ID NO: 1990
gugagagcccaucacuauu

SEQ ID NO: 154965 - RNA, 19 nt, Artificial Sequence
  Description of Artificial Sequence: Synthetic oligonucleotide
  Antisense strand to SEQ ID NO: 154964
aauagugaugggcucucac

SEQ ID NO: 154966 - RNA, 19 nt, Artificial Sequence
  Description of Artificial Sequence: Synthetic oligonucleotide
  Sense strand starting at position 3365 of SEQ ID NO: 1990
agauaauggagcugaguua

SEQ ID NO: 154967 - RNA, 19 nt, Artificial Sequence
  Description of Artificial Sequence: Synthetic oligonucleotide
  Antisense strand to SEQ ID NO: 154966
uaacucagcuccauuaucu

SEQ ID NO: 154968 - RNA, 19 nt, Artificial Sequence
  Description of Artificial Sequence: Synthetic oligonucleotide
  Sense strand starting at position 3428 of SEQ ID NO: 1990
agcuaagcaggucaucauu

SEQ ID NO: 154969 - RNA, 19 nt, Artificial Sequence
  Description of Artificial Sequence: Synthetic oligonucleotide
  Antisense strand to SEQ ID NO: 154968
aaugaugaccugcuuagcu

SEQ ID NO: 154970 - RNA, 19 nt, Artificial Sequence
  Description of Artificial Sequence: Synthetic oligonucleotide
  Sense strand starting at position 3434 of SEQ ID NO: 1990
gcaggucaucauuaguauc

SEQ ID NO: 154971 - RNA, 19 nt, Artificial Sequence
  Description of Artificial Sequence: Synthetic oligonucleotide
  Antisense strand to SEQ ID NO: 154970
gauacuaaugaugaccugc

SEQ ID NO: 154972 - RNA, 19 nt, Artificial Sequence
  Description of Artificial Sequence: Synthetic oligonucleotide
  Sense strand starting at position 3436 of SEQ ID NO: 1990
aggucaucauuaguaucaa

SEQ ID NO: 154973 - RNA, 19 nt, Artificial Sequence
  Description of Artificial Sequence: Synthetic oligonucleotide
  Antisense strand to SEQ ID NO: 154972
uugauacuaaugaugaccu

SEQ ID NO: 154974 - RNA, 19 nt, Artificial Sequence
  Description of Artificial Sequence: Synthetic oligonucleotide
  Sense strand starting at position 3462 of SEQ ID NO: 1990
agcaguugucauuaauaac

SEQ ID NO: 154975 - RNA, 19 nt, Artificial Sequence
  Description of Artificial Sequence: Synthetic oligonucleotide
  Antisense strand to SEQ ID NO: 154974
guuauuaaugacaacugcu

SEQ ID NO: 154976 - RNA, 19 nt, Artificial Sequence
  Description of Artificial Sequence: Synthetic oligonucleotide
  Sense strand starting at position 3473 of SEQ ID NO: 1990
uuaauaacaucaguguuga

SEQ ID NO: 154977 - RNA, 19 nt, Artificial Sequence
  Description of Artificial Sequence: Synthetic oligonucleotide
  Antisense strand to SEQ ID NO: 154976
ucaacacugauguuauuaa

SEQ ID NO: 154978 - RNA, 19 nt, Artificial Sequence
  Description of Artificial Sequence: Synthetic oligonucleotide
  Sense strand starting at position 3944 of SEQ ID NO: 1990
agggucuuucagugucuga

SEQ ID NO: 154979 - RNA, 19 nt, Artificial Sequence
  Description of Artificial Sequence: Synthetic oligonucleotide
  Antisense strand to SEQ ID NO: 154978
ucagacacugaaagacccu

SEQ ID NO: 154980 - RNA, 19 nt, Artificial Sequence
  Description of Artificial Sequence: Synthetic oligonucleotide
  Sense strand starting at position 3957 of SEQ ID NO: 1990
gucugagaaguugguguga

SEQ ID NO: 154981 - RNA, 19 nt, Artificial Sequence
  Description of Artificial Sequence: Synthetic oligonucleotide
  Antisense strand to SEQ ID NO: 154980
ucacaccaacuucucagac

SEQ ID NO: 154982 - RNA, 19 nt, Artificial Sequence
  Description of Artificial Sequence: Synthetic oligonucleotide
  Sense strand starting at position 3969 of SEQ ID NO: 1990
ggugugagugcugggacua

SEQ ID NO: 154983 - RNA, 19 nt, Artificial Sequence
  Description of Artificial Sequence: Synthetic oligonucleotide
  Antisense strand to SEQ ID NO: 154982
uagucccagcacucacacc

SEQ ID NO: 154984 - RNA, 19 nt, Artificial Sequence
  Description of Artificial Sequence: Synthetic oligonucleotide
  Sense strand starting at position 181 of SEQ ID NO: 1991
ggagcuguccucugagguu

SEQ ID NO: 154985 - RNA, 19 nt, Artificial Sequence
  Description of Artificial Sequence: Synthetic oligonucleotide
  Antisense strand to SEQ ID NO: 154984
aaccucagaggacagcucc

SEQ ID NO: 154986 - RNA, 19 nt, Artificial Sequence
  Description of Artificial Sequence: Synthetic oligonucleotide
  Sense strand starting at position 487 of SEQ ID NO: 1991
gguguccacucuuggaguu

SEQ ID NO: 154987 - RNA, 19 nt, Artificial Sequence
  Description of Artificial Sequence: Synthetic oligonucleotide
  Antisense strand to SEQ ID NO: 154986
aacuccaagaguggacacc

SEQ ID NO: 154988 - RNA, 19 nt, Artificial Sequence
  Description of Artificial Sequence: Synthetic oligonucleotide
  Sense strand starting at position 488 of SEQ ID NO: 1991
guguccacucuuggaguuu

SEQ ID NO: 154989 - RNA, 19 nt, Artificial Sequence
  Description of Artificial Sequence: Synthetic oligonucleotide
  Antisense strand to SEQ ID NO: 154988
aaacuccaagaguggacac

SEQ ID NO: 154990 - RNA, 19 nt, Artificial Sequence
  Description of Artificial Sequence: Synthetic oligonucleotide
  Sense strand starting at position 829 of SEQ ID NO: 1991
ugguccuucuuggaauguu

SEQ ID NO: 154991 - RNA, 19 nt, Artificial Sequence
  Description of Artificial Sequence: Synthetic oligonucleotide
  Antisense strand to SEQ ID NO: 154990
aacauuccaagaaggacca

SEQ ID NO: 154992 - RNA, 19 nt, Artificial Sequence
  Description of Artificial Sequence: Synthetic oligonucleotide
  Sense strand starting at position 838 of SEQ ID NO: 1991
uuggaauguuuccgaggcu

SEQ ID NO: 154993 - RNA, 19 nt, Artificial Sequence
  Description of Artificial Sequence: Synthetic oligonucleotide
  Antisense strand to SEQ ID NO: 154992
agccucggaaacauuccaa

SEQ ID NO: 154994 - RNA, 19 nt, Artificial Sequence
  Description of Artificial Sequence: Synthetic oligonucleotide
  Sense strand starting at position 841 of SEQ ID NO: 1991
gaauguuuccgaggcugac

SEQ ID NO: 154995 - RNA, 19 nt, Artificial Sequence
  Description of Artificial Sequence: Synthetic oligonucleotide
  Antisense strand to SEQ ID NO: 154994
gucagccucggaaacauuc

SEQ ID NO: 154996 - RNA, 19 nt, Artificial Sequence
  Description of Artificial Sequence: Synthetic oligonucleotide
  Sense strand starting at position 1101 of SEQ ID NO: 1991
gugcgaagcgcuccagagu

SEQ ID NO: 154997 - RNA, 19 nt, Artificial Sequence
  Description of Artificial Sequence: Synthetic oligonucleotide
  Antisense strand to SEQ ID NO: 154996
acucuggagcgcuucgcac

SEQ ID NO: 154998 - RNA, 19 nt, Artificial Sequence
  Description of Artificial Sequence: Synthetic oligonucleotide
  Sense strand starting at position 1888 of SEQ ID NO: 1991
cucuuacucgaggacaagu

SEQ ID NO: 154999 - RNA, 19 nt, Artificial Sequence
  Description of Artificial Sequence: Synthetic oligonucleotide
  Antisense strand to SEQ ID NO: 154998
acuuguccucgaguaagag

SEQ ID NO: 155000 - RNA, 19 nt, Artificial Sequence
  Description of Artificial Sequence: Synthetic oligonucleotide
  Sense strand starting at position 1925 of SEQ ID NO: 1991
cuccguucccagugugaag

SEQ ID NO: 155001 - RNA, 19 nt, Artificial Sequence
  Description of Artificial Sequence: Synthetic oligonucleotide
  Antisense strand to SEQ ID NO: 155000
cuucacacugggaacggag

SEQ ID NO: 155002 - RNA, 19 nt, Artificial Sequence
  Description of Artificial Sequence: Synthetic oligonucleotide
  Sense strand starting at position 2084 of SEQ ID NO: 1991
gggcccagcacugagaaau

SEQ ID NO: 155003 - RNA, 19 nt, Artificial Sequence
  Description of Artificial Sequence: Synthetic oligonucleotide
  Antisense strand to SEQ ID NO: 155002
auuucucagugcugggccc

SEQ ID NO: 155004 - RNA, 19 nt, Artificial Sequence
  Description of Artificial Sequence: Synthetic oligonucleotide
  Sense strand starting at position 2095 of SEQ ID NO: 1991
ugagaaaucugggaaggaa

SEQ ID NO: 155005 - RNA, 19 nt, Artificial Sequence
  Description of Artificial Sequence: Synthetic oligonucleotide
  Antisense strand to SEQ ID NO: 155004
uuccuucccagauuucuca

SEQ ID NO: 155006 - RNA, 19 nt, Artificial Sequence
  Description of Artificial Sequence: Synthetic oligonucleotide
  Sense strand starting at position 2208 of SEQ ID NO: 1991
gcgcuaucgucccaggaga

SEQ ID NO: 155007 - RNA, 19 nt, Artificial Sequence
  Description of Artificial Sequence: Synthetic oligonucleotide
  Antisense strand to SEQ ID NO: 155006
ucuccugggacgauagcgc

SEQ ID NO: 155008 - RNA, 19 nt, Artificial Sequence
  Description of Artificial Sequence: Synthetic oligonucleotide
  Sense strand starting at position 2521 of SEQ ID NO: 1991
gggcucuucuucuuacaaa

SEQ ID NO: 155009 - RNA, 19 nt, Artificial Sequence
  Description of Artificial Sequence: Synthetic oligonucleotide
  Antisense strand to SEQ ID NO: 155008
uuuguaagaagaagagccc

SEQ ID NO: 155010 - RNA, 19 nt, Artificial Sequence
  Description of Artificial Sequence: Synthetic oligonucleotide
  Sense strand starting at position 2600 of SEQ ID NO: 1991
gagaguuacuaacgccuga

SEQ ID NO: 155011 - RNA, 19 nt, Artificial Sequence
  Description of Artificial Sequence: Synthetic oligonucleotide
  Antisense strand to SEQ ID NO: 155010
ucaggcguuaguaacucuc

SEQ ID NO: 155012 - RNA, 19 nt, Artificial Sequence
  Description of Artificial Sequence: Synthetic oligonucleotide
  Sense strand starting at position 2604 of SEQ ID NO: 1991
guuacuaacgccugacuca

SEQ ID NO: 155013 - RNA, 19 nt, Artificial Sequence
  Description of Artificial Sequence: Synthetic oligonucleotide
  Antisense strand to SEQ ID NO: 155012
ugagucaggcguuaguaac

SEQ ID NO: 155014 - RNA, 19 nt, Artificial Sequence
  Description of Artificial Sequence: Synthetic oligonucleotide
  Sense strand starting at position 2631 of SEQ ID NO: 1991
ugaggauuccaacgagcaa

SEQ ID NO: 155015 - RNA, 19 nt, Artificial Sequence
  Description of Artificial Sequence: Synthetic oligonucleotide
  Antisense strand to SEQ ID NO: 155014
uugcucguuggaauccuca

SEQ ID NO: 155016 - RNA, 19 nt, Artificial Sequence
  Description of Artificial Sequence: Synthetic oligonucleotide
  Sense strand starting at position 2754 of SEQ ID NO: 1991
acagcaaggguuuguuuaa

SEQ ID NO: 155017 - RNA, 19 nt, Artificial Sequence
  Description of Artificial Sequence: Synthetic oligonucleotide
  Antisense strand to SEQ ID NO: 155016
uuaaacaaacccuugcugu

SEQ ID NO: 155018 - RNA, 19 nt, Artificial Sequence
  Description of Artificial Sequence: Synthetic oligonucleotide
  Sense strand starting at position 2763 of SEQ ID NO: 1991
guuuguuuaagauagggua

SEQ ID NO: 155019 - RNA, 19 nt, Artificial Sequence
  Description of Artificial Sequence: Synthetic oligonucleotide
  Antisense strand to SEQ ID NO: 155018
uacccuaucuuaaacaaac

SEQ ID NO: 155020 - RNA, 19 nt, Artificial Sequence
  Description of Artificial Sequence: Synthetic oligonucleotide
  Sense strand starting at position 2776 of SEQ ID NO: 1991
aggguaugacucugucacu

SEQ ID NO: 155021 - RNA, 19 nt, Artificial Sequence
  Description of Artificial Sequence: Synthetic oligonucleotide
  Antisense strand to SEQ ID NO: 155020
agugacagagucauacccu

SEQ ID NO: 155022 - RNA, 19 nt, Artificial Sequence
  Description of Artificial Sequence: Synthetic oligonucleotide
  Sense strand starting at position 2819 of SEQ ID NO: 1991
ggguuuaagauagggucua

SEQ ID NO: 155023 - RNA, 19 nt, Artificial Sequence
  Description of Artificial Sequence: Synthetic oligonucleotide
  Antisense strand to SEQ ID NO: 155022
uagacccuaucuuaaaccc

SEQ ID NO: 155024 - RNA, 19 nt, Artificial Sequence
  Description of Artificial Sequence: Synthetic oligonucleotide
  Sense strand starting at position 2820 of SEQ ID NO: 1991
gguuuaagauagggucuaa

SEQ ID NO: 155025 - RNA, 19 nt, Artificial Sequence
  Description of Artificial Sequence: Synthetic oligonucleotide
  Antisense strand to SEQ ID NO: 155024
uuagacccuaucuuaaacc

SEQ ID NO: 155026 - RNA, 19 nt, Artificial Sequence
  Description of Artificial Sequence: Synthetic oligonucleotide
  Sense strand starting at position 2873 of SEQ ID NO: 1991
gguuuaagacagcgucuga

SEQ ID NO: 155027 - RNA, 19 nt, Artificial Sequence
  Description of Artificial Sequence: Synthetic oligonucleotide
  Antisense strand to SEQ ID NO: 155026
ucagacgcugucuuaaacc

SEQ ID NO: 155028 - RNA, 19 nt, Artificial Sequence
  Description of Artificial Sequence: Synthetic oligonucleotide
  Sense strand starting at position 2927 of SEQ ID NO: 1991
gguuuaagauagggucuga

SEQ ID NO: 155029 - RNA, 19 nt, Artificial Sequence
  Description of Artificial Sequence: Synthetic oligonucleotide
  Antisense strand to SEQ ID NO: 155028
ucagacccuaucuuaaacc

SEQ ID NO: 155030 - RNA, 19 nt, Artificial Sequence
  Description of Artificial Sequence: Synthetic oligonucleotide
  Sense strand starting at position 3119 of SEQ ID NO: 1991
cuauauugccuaggcugaa

SEQ ID NO: 155031 - RNA, 19 nt, Artificial Sequence
  Description of Artificial Sequence: Synthetic oligonucleotide
  Antisense strand to SEQ ID NO: 155030
uucagccuaggcaauauag

SEQ ID NO: 155032 - RNA, 19 nt, Artificial Sequence
  Description of Artificial Sequence: Synthetic oligonucleotide
  Sense strand starting at position 3145 of SEQ ID NO: 1991
cucuuugacuucuagaugu

SEQ ID NO: 155033 - RNA, 19 nt, Artificial Sequence
  Description of Artificial Sequence: Synthetic oligonucleotide
  Antisense strand to SEQ ID NO: 155032
acaucuagaagucaaagag

SEQ ID NO: 155034 - RNA, 19 nt, Artificial Sequence
  Description of Artificial Sequence: Synthetic oligonucleotide
  Sense strand starting at position 3147 of SEQ ID NO: 1991
cuuugacuucuagauguaa

SEQ ID NO: 155035 - RNA, 19 nt, Artificial Sequence
  Description of Artificial Sequence: Synthetic oligonucleotide
  Antisense strand to SEQ ID NO: 155034
uuacaucuagaagucaaag

SEQ ID NO: 155036 - RNA, 19 nt, Artificial Sequence
  Description of Artificial Sequence: Synthetic oligonucleotide
  Sense strand starting at position 3160 of SEQ ID NO: 1991
auguaagugcucugggcaa

SEQ ID NO: 155037 - RNA, 19 nt, Artificial Sequence
  Description of Artificial Sequence: Synthetic oligonucleotide
  Antisense strand to SEQ ID NO: 155036
uugcccagagcacuuacau

SEQ ID NO: 155038 - RNA, 19 nt, Artificial Sequence
  Description of Artificial Sequence: Synthetic oligonucleotide
  Sense strand starting at position 3162 of SEQ ID NO: 1991
guaagugcucugggcaaca

SEQ ID NO: 155039 - RNA, 19 nt, Artificial Sequence
  Description of Artificial Sequence: Synthetic oligonucleotide
  Antisense strand to SEQ ID NO: 155038
uguugcccagagcacuuac

SEQ ID NO: 155040 - RNA, 19 nt, Artificial Sequence
  Description of Artificial Sequence: Synthetic oligonucleotide
  Sense strand starting at position 3203 of SEQ ID NO: 1991
ccuugaguccagugacaag

SEQ ID NO: 155041 - RNA, 19 nt, Artificial Sequence
  Description of Artificial Sequence: Synthetic oligonucleotide
  Antisense strand to SEQ ID NO: 155040
cuugucacuggacucaagg

SEQ ID NO: 155042 - RNA, 19 nt, Artificial Sequence
  Description of Artificial Sequence: Synthetic oligonucleotide
  Sense strand starting at position 3228 of SEQ ID NO: 1991
caagaugguuuacaaguca

SEQ ID NO: 155043 - RNA, 19 nt, Artificial Sequence
  Description of Artificial Sequence: Synthetic oligonucleotide
  Antisense strand to SEQ ID NO: 155042
ugacuuguaaaccaucuug

SEQ ID NO: 155044 - RNA, 19 nt, Artificial Sequence
  Description of Artificial Sequence: Synthetic oligonucleotide
  Sense strand starting at position 3299 of SEQ ID NO: 1991
acgguuaauuccuagcuuu

SEQ ID NO: 155045 - RNA, 19 nt, Artificial Sequence
  Description of Artificial Sequence: Synthetic oligonucleotide
  Antisense strand to SEQ ID NO: 155044
aaagcuaggaauuaaccgu

SEQ ID NO: 155046 - RNA, 19 nt, Artificial Sequence
  Description of Artificial Sequence: Synthetic oligonucleotide
  Sense strand starting at position 3422 of SEQ ID NO: 1991
cgaggcaagcuccauuaaa

SEQ ID NO: 155047 - RNA, 19 nt, Artificial Sequence
  Description of Artificial Sequence: Synthetic oligonucleotide
  Antisense strand to SEQ ID NO: 155046
uuuaauggagcuugccucg

SEQ ID NO: 155048 - RNA, 19 nt, Artificial Sequence
  Description of Artificial Sequence: Synthetic oligonucleotide
  Sense strand starting at position 3509 of SEQ ID NO: 1991
aggaauuuguuugagguca

SEQ ID NO: 155049 - RNA, 19 nt, Artificial Sequence
  Description of Artificial Sequence: Synthetic oligonucleotide
  Antisense strand to SEQ ID NO: 155048
ugaccucaaacaaauuccu

SEQ ID NO: 155050 - RNA, 19 nt, Artificial Sequence
  Description of Artificial Sequence: Synthetic oligonucleotide
  Sense strand starting at position 3511 of SEQ ID NO: 1991
gaauuuguuugaggucaaa

SEQ ID NO: 155051 - RNA, 19 nt, Artificial Sequence
  Description of Artificial Sequence: Synthetic oligonucleotide
  Antisense strand to SEQ ID NO: 155050
uuugaccucaaacaaauuc

SEQ ID NO: 155052 - RNA, 19 nt, Artificial Sequence
  Description of Artificial Sequence: Synthetic oligonucleotide
  Sense strand starting at position 3572 of SEQ ID NO: 1991
gagggagaauccugcuuuc

SEQ ID NO: 155053 - RNA, 19 nt, Artificial Sequence
  Description of Artificial Sequence: Synthetic oligonucleotide
  Antisense strand to SEQ ID NO: 155052
gaaagcaggauucucccuc

SEQ ID NO: 155054 - RNA, 19 nt, Artificial Sequence
  Description of Artificial Sequence: Synthetic oligonucleotide
  Sense strand starting at position 3575 of SEQ ID NO: 1991
ggagaauccugcuuucuaa

SEQ ID NO: 155055 - RNA, 19 nt, Artificial Sequence
  Description of Artificial Sequence: Synthetic oligonucleotide
  Antisense strand to SEQ ID NO: 155054
uuagaaagcaggauucucc

SEQ ID NO: 155056 - RNA, 19 nt, Artificial Sequence
  Description of Artificial Sequence: Synthetic oligonucleotide
  Sense strand starting at position 3644 of SEQ ID NO: 1991
gcuagaucccagggacaca

SEQ ID NO: 155057 - RNA, 19 nt, Artificial Sequence
  Description of Artificial Sequence: Synthetic oligonucleotide
  Antisense strand to SEQ ID NO: 155056
ugugucccugggaucuagc

SEQ ID NO: 155058 - RNA, 19 nt, Artificial Sequence
  Description of Artificial Sequence: Synthetic oligonucleotide
  Sense strand starting at position 2658 of SEQ ID NO: 1992
ugacaaacuucuguuauga

SEQ ID NO: 155059 - RNA, 19 nt, Artificial Sequence
  Description of Artificial Sequence: Synthetic oligonucleotide
  Antisense strand to SEQ ID NO: 155058
ucauaacagaaguuuguca

SEQ ID NO: 155060 - RNA, 19 nt, Artificial Sequence
  Description of Artificial Sequence: Synthetic oligonucleotide
  Sense strand starting at position 2657 of SEQ ID NO: 1992
gugacaaacuucuguuaug

SEQ ID NO: 155061 - RNA, 19 nt, Artificial Sequence
  Description of Artificial Sequence: Synthetic oligonucleotide
  Antisense strand to SEQ ID NO: 155060
cauaacagaaguuugucac

SEQ ID NO: 155062 - RNA, 19 nt, Artificial Sequence
  Description of Artificial Sequence: Synthetic oligonucleotide
  Sense strand starting at position 2643 of SEQ ID NO: 1992
gcugaaacuuuccagugac

SEQ ID NO: 155063 - RNA, 19 nt, Artificial Sequence
  Description of Artificial Sequence: Synthetic oligonucleotide
  Antisense strand to SEQ ID NO: 155062
gucacuggaaaguuucagc

SEQ ID NO: 155064 - RNA, 19 nt, Artificial Sequence
  Description of Artificial Sequence: Synthetic oligonucleotide
  Sense strand starting at position 2642 of SEQ ID NO: 1992
ugcugaaacuuuccaguga

SEQ ID NO: 155065 - RNA, 19 nt, Artificial Sequence
  Description of Artificial Sequence: Synthetic oligonucleotide
  Antisense strand to SEQ ID NO: 155064
ucacuggaaaguuucagca

SEQ ID NO: 155066 - RNA, 19 nt, Artificial Sequence
  Description of Artificial Sequence: Synthetic oligonucleotide
  Sense strand starting at position 2514 of SEQ ID NO: 1992
acaucaugcuucucagaug

SEQ ID NO: 155067 - RNA, 19 nt, Artificial Sequence
  Description of Artificial Sequence: Synthetic oligonucleotide
  Antisense strand to SEQ ID NO: 155066
caucugagaagcaugaugu

SEQ ID NO: 155068 - RNA, 19 nt, Artificial Sequence
  Description of Artificial Sequence: Synthetic oligonucleotide
  Sense strand starting at position 2496 of SEQ ID NO: 1992
cuagcugucuggcacucaa

SEQ ID NO: 155069 - RNA, 19 nt, Artificial Sequence
  Description of Artificial Sequence: Synthetic oligonucleotide
  Antisense strand to SEQ ID NO: 155068
uugagugccagacagcuag

SEQ ID NO: 155070 - RNA, 19 nt, Artificial Sequence
  Description of Artificial Sequence: Synthetic oligonucleotide
  Sense strand starting at position 2440 of SEQ ID NO: 1992
gcaagaauucagcgguuga

SEQ ID NO: 155071 - RNA, 19 nt, Artificial Sequence
  Description of Artificial Sequence: Synthetic oligonucleotide
  Antisense strand to SEQ ID NO: 155070
ucaaccgcugaauucuugc

SEQ ID NO: 155072 - RNA, 19 nt, Artificial Sequence
  Description of Artificial Sequence: Synthetic oligonucleotide
  Sense strand starting at position 2309 of SEQ ID NO: 1992
agaggaugaugucaggacu

SEQ ID NO: 155073 - RNA, 19 nt, Artificial Sequence
  Description of Artificial Sequence: Synthetic oligonucleotide
  Antisense strand to SEQ ID NO: 155072
aguccugacaucauccucu

SEQ ID NO: 155074 - RNA, 19 nt, Artificial Sequence
  Description of Artificial Sequence: Synthetic oligonucleotide
  Sense strand starting at position 2165 of SEQ ID NO: 1992
agcccaugcuuagagauuu

SEQ ID NO: 155075 - RNA, 19 nt, Artificial Sequence
  Description of Artificial Sequence: Synthetic oligonucleotide
  Antisense strand to SEQ ID NO: 155074
aaaucucuaagcaugggcu

SEQ ID NO: 155076 - RNA, 19 nt, Artificial Sequence
  Description of Artificial Sequence: Synthetic oligonucleotide
  Sense strand starting at position 2163 of SEQ ID NO: 1992
agagcccaugcuuagagau

SEQ ID NO: 155077 - RNA, 19 nt, Artificial Sequence
  Description of Artificial Sequence: Synthetic oligonucleotide
  Antisense strand to SEQ ID NO: 155076
aucucuaagcaugggcucu

SEQ ID NO: 155078 - RNA, 19 nt, Artificial Sequence
  Description of Artificial Sequence: Synthetic oligonucleotide
  Sense strand starting at position 2011 of SEQ ID NO: 1992
gcucuaauagcacagggaa

SEQ ID NO: 155079 - RNA, 19 nt, Artificial Sequence
  Description of Artificial Sequence: Synthetic oligonucleotide
  Antisense strand to SEQ ID NO: 155078
uucccugugcuauuagagc

SEQ ID NO: 155080 - RNA, 19 nt, Artificial Sequence
  Description of Artificial Sequence: Synthetic oligonucleotide
  Sense strand starting at position 1107 of SEQ ID NO: 1992
gaggaugagucaggcuuga

SEQ ID NO: 155081 - RNA, 19 nt, Artificial Sequence
  Description of Artificial Sequence: Synthetic oligonucleotide
  Antisense strand to SEQ ID NO: 155080
ucaagccugacucauccuc

SEQ ID NO: 155082 - RNA, 19 nt, Artificial Sequence
  Description of Artificial Sequence: Synthetic oligonucleotide
  Sense strand starting at position 1085 of SEQ ID NO: 1992
gguucuggccucuaggagu

SEQ ID NO: 155083 - RNA, 19 nt, Artificial Sequence
  Description of Artificial Sequence: Synthetic oligonucleotide
  Antisense strand to SEQ ID NO: 155082
acuccuagaggccagaacc

SEQ ID NO: 155084 - RNA, 19 nt, Artificial Sequence
  Description of Artificial Sequence: Synthetic oligonucleotide
  Sense strand starting at position 1035 of SEQ ID NO: 1992
ggcugugaccaggagcuuu

SEQ ID NO: 155085 - RNA, 19 nt, Artificial Sequence
  Description of Artificial Sequence: Synthetic oligonucleotide
  Antisense strand to SEQ ID NO: 155084
aaagcuccuggucacagcc

SEQ ID NO: 155086 - RNA, 19 nt, Artificial Sequence
  Description of Artificial Sequence: Synthetic oligonucleotide
  Sense strand starting at position 737 of SEQ ID NO: 1992
uggcuagaguccucuucca

SEQ ID NO: 155087 - RNA, 19 nt, Artificial Sequence
  Description of Artificial Sequence: Synthetic oligonucleotide
  Antisense strand to SEQ ID NO: 155086
uggaagaggacucuagcca

SEQ ID NO: 155088 - RNA, 19 nt, Artificial Sequence
  Description of Artificial Sequence: Synthetic oligonucleotide
  Sense strand starting at position 726 of SEQ ID NO: 1992
agauaugacccuggcuaga

SEQ ID NO: 155089 - RNA, 19 nt, Artificial Sequence
  Description of Artificial Sequence: Synthetic oligonucleotide
  Antisense strand to SEQ ID NO: 155088
ucuagccagggucauaucu

SEQ ID NO: 155090 - RNA, 19 nt, Artificial Sequence
  Description of Artificial Sequence: Synthetic oligonucleotide
  Sense strand starting at position 725 of SEQ ID NO: 1992
cagauaugacccuggcuag

SEQ ID NO: 155091 - RNA, 19 nt, Artificial Sequence
  Description of Artificial Sequence: Synthetic oligonucleotide
  Antisense strand to SEQ ID NO: 155090
cuagccagggucauaucug

SEQ ID NO: 155092 - RNA, 19 nt, Artificial Sequence
  Description of Artificial Sequence: Synthetic oligonucleotide
  Sense strand starting at position 715 of SEQ ID NO: 1992
ugcuuuguggcagauauga

SEQ ID NO: 155093 - RNA, 19 nt, Artificial Sequence
  Description of Artificial Sequence: Synthetic oligonucleotide
  Antisense strand to SEQ ID NO: 155092
ucauaucugccacaaagca

SEQ ID NO: 155094 - RNA, 19 nt, Artificial Sequence
  Description of Artificial Sequence: Synthetic oligonucleotide
  Sense strand starting at position 713 of SEQ ID NO: 1992
agugcuuuguggcagauau

SEQ ID NO: 155095 - RNA, 19 nt, Artificial Sequence
  Description of Artificial Sequence: Synthetic oligonucleotide
  Antisense strand to SEQ ID NO: 155094
auaucugccacaaagcacu

SEQ ID NO: 155096 - RNA, 19 nt, Artificial Sequence
  Description of Artificial Sequence: Synthetic oligonucleotide
  Sense strand starting at position 710 of SEQ ID NO: 1992
ccaagugcuuuguggcaga

SEQ ID NO: 155097 - RNA, 19 nt, Artificial Sequence
  Description of Artificial Sequence: Synthetic oligonucleotide
  Antisense strand to SEQ ID NO: 155096
ucugccacaaagcacuugg

SEQ ID NO: 155098 - RNA, 19 nt, Artificial Sequence
  Description of Artificial Sequence: Synthetic oligonucleotide
  Sense strand starting at position 656 of SEQ ID NO: 1992
gcucauaguccuggagaag

SEQ ID NO: 155099 - RNA, 19 nt, Artificial Sequence
  Description of Artificial Sequence: Synthetic oligonucleotide
  Antisense strand to SEQ ID NO: 155098
cuucuccaggacuaugagc

SEQ ID NO: 155100 - RNA, 19 nt, Artificial Sequence
  Description of Artificial Sequence: Synthetic oligonucleotide
  Sense strand starting at position 655 of SEQ ID NO: 1992
agcucauaguccuggagaa

SEQ ID NO: 155101 - RNA, 19 nt, Artificial Sequence
  Description of Artificial Sequence: Synthetic oligonucleotide
  Antisense strand to SEQ ID NO: 155100
uucuccaggacuaugagcu

SEQ ID NO: 155102 - RNA, 19 nt, Artificial Sequence
  Description of Artificial Sequence: Synthetic oligonucleotide
  Sense strand starting at position 35 of SEQ ID NO: 1992
gugugucagacauauccaa

SEQ ID NO: 155103 - RNA, 19 nt, Artificial Sequence
  Description of Artificial Sequence: Synthetic oligonucleotide
  Antisense strand to SEQ ID NO: 155102
uuggauaugucugacacac

SEQ ID NO: 155104 - RNA, 19 nt, Artificial Sequence
  Description of Artificial Sequence: Synthetic oligonucleotide
  Sense strand starting at position 31 of SEQ ID NO: 1992
auuugugugucagacauau

SEQ ID NO: 155105 - RNA, 19 nt, Artificial Sequence
  Description of Artificial Sequence: Synthetic oligonucleotide
  Antisense strand to SEQ ID NO: 155104
auaugucugacacacaaau

SEQ ID NO: 155106 - RNA, 19 nt, Artificial Sequence
  Description of Artificial Sequence: Synthetic oligonucleotide
  Sense strand starting at position 29 of SEQ ID NO: 1992
guauuugugugucagacau

SEQ ID NO: 155107 - RNA, 19 nt, Artificial Sequence
  Description of Artificial Sequence: Synthetic oligonucleotide
  Antisense strand to SEQ ID NO: 155106
augucugacacacaaauac

SEQ ID NO: 155108 - RNA, 19 nt, Artificial Sequence
  Description of Artificial Sequence: Synthetic oligonucleotide
  Sense strand starting at position 27 of SEQ ID NO: 1992
agguauuugugugucagac

SEQ ID NO: 155109 - RNA, 19 nt, Artificial Sequence
  Description of Artificial Sequence: Synthetic oligonucleotide
  Antisense strand to SEQ ID NO: 155108
gucugacacacaaauaccu

SEQ ID NO: 155110 - RNA, 19 nt, Artificial Sequence
  Description of Artificial Sequence: Synthetic oligonucleotide
  Sense strand starting at position 26 of SEQ ID NO: 1992
cagguauuugugugucaga

SEQ ID NO: 155111 - RNA, 19 nt, Artificial Sequence
  Description of Artificial Sequence: Synthetic oligonucleotide
  Antisense strand to SEQ ID NO: 155110
ucugacacacaaauaccug

SEQ ID NO: 155112 - RNA, 19 nt, Artificial Sequence
  Description of Artificial Sequence: Synthetic oligonucleotide
  Sense strand starting at position 41 of SEQ ID NO: 1993
uggucuuccucacugacua

SEQ ID NO: 155113 - RNA, 19 nt, Artificial Sequence
  Description of Artificial Sequence: Synthetic oligonucleotide
  Antisense strand to SEQ ID NO: 155112
uagucagugaggaagacca

SEQ ID NO: 155114 - RNA, 19 nt, Artificial Sequence
  Description of Artificial Sequence: Synthetic oligonucleotide
  Sense strand starting at position 166 of SEQ ID NO: 1993
gggccagguauguauguua

SEQ ID NO: 155115 - RNA, 19 nt, Artificial Sequence
  Description of Artificial Sequence: Synthetic oligonucleotide
  Antisense strand to SEQ ID NO: 155114
uaacauacauaccuggccc

SEQ ID NO: 155116 - RNA, 19 nt, Artificial Sequence
  Description of Artificial Sequence: Synthetic oligonucleotide
  Sense strand starting at position 173 of SEQ ID NO: 1993
guauguauguuacuaagga

SEQ ID NO: 155117 - RNA, 19 nt, Artificial Sequence
  Description of Artificial Sequence: Synthetic oligonucleotide
  Antisense strand to SEQ ID NO: 155116
uccuuaguaacauacauac

SEQ ID NO: 155118 - RNA, 19 nt, Artificial Sequence
  Description of Artificial Sequence: Synthetic oligonucleotide
  Sense strand starting at position 249 of SEQ ID NO: 1993
aguugaugcuaccuuuaua

SEQ ID NO: 155119 - RNA, 19 nt, Artificial Sequence
  Description of Artificial Sequence: Synthetic oligonucleotide
  Antisense strand to SEQ ID NO: 155118
uauaaagguagcaucaacu

SEQ ID NO: 155120 - RNA, 19 nt, Artificial Sequence
  Description of Artificial Sequence: Synthetic oligonucleotide
  Sense strand starting at position 283 of SEQ ID NO: 1993
cacuguuuacaagggugaa

SEQ ID NO: 155121 - RNA, 19 nt, Artificial Sequence
  Description of Artificial Sequence: Synthetic oligonucleotide
  Antisense strand to SEQ ID NO: 155120
uucacccuuguaaacagug

SEQ ID NO: 155122 - RNA, 19 nt, Artificial Sequence
  Description of Artificial Sequence: Synthetic oligonucleotide
  Sense strand starting at position 284 of SEQ ID NO: 1993
acuguuuacaagggugaaa

SEQ ID NO: 155123 - RNA, 19 nt, Artificial Sequence
  Description of Artificial Sequence: Synthetic oligonucleotide
  Antisense strand to SEQ ID NO: 155122
uuucacccuuguaaacagu

SEQ ID NO: 155124 - RNA, 19 nt, Artificial Sequence
  Description of Artificial Sequence: Synthetic oligonucleotide
  Sense strand starting at position 286 of SEQ ID NO: 1993
uguuuacaagggugaaaca

SEQ ID NO: 155125 - RNA, 19 nt, Artificial Sequence
  Description of Artificial Sequence: Synthetic oligonucleotide
  Antisense strand to SEQ ID NO: 155124
uguuucacccuuguaaaca

SEQ ID NO: 155126 - RNA, 19 nt, Artificial Sequence
  Description of Artificial Sequence: Synthetic oligonucleotide
  Sense strand starting at position 304 of SEQ ID NO: 1993
acauuaucagagcaaugug

SEQ ID NO: 155127 - RNA, 19 nt, Artificial Sequence
  Description of Artificial Sequence: Synthetic oligonucleotide
  Antisense strand to SEQ ID NO: 155126
cacauugcucugauaaugu

SEQ ID NO: 155128 - RNA, 19 nt, Artificial Sequence
  Description of Artificial Sequence: Synthetic oligonucleotide
  Sense strand starting at position 326 of SEQ ID NO: 1993
cgcacaucccuggaaggua

SEQ ID NO: 155129 - RNA, 19 nt, Artificial Sequence
  Description of Artificial Sequence: Synthetic oligonucleotide
  Antisense strand to SEQ ID NO: 155128
uaccuuccagggaugugcg

SEQ ID NO: 155130 - RNA, 19 nt, Artificial Sequence
  Description of Artificial Sequence: Synthetic oligonucleotide
  Sense strand starting at position 454 of SEQ ID NO: 1993
cccucugcuuaucuggaaa

SEQ ID NO: 155131 - RNA, 19 nt, Artificial Sequence
  Description of Artificial Sequence: Synthetic oligonucleotide
  Antisense strand to SEQ ID NO: 155130
uuuccagauaagcagaggg

SEQ ID NO: 155132 - RNA, 19 nt, Artificial Sequence
  Description of Artificial Sequence: Synthetic oligonucleotide
  Sense strand starting at position 658 of SEQ ID NO: 1993
augauuuguugacaaacuu

SEQ ID NO: 155133 - RNA, 19 nt, Artificial Sequence
  Description of Artificial Sequence: Synthetic oligonucleotide
  Antisense strand to SEQ ID NO: 155132
aaguuugucaacaaaucau

SEQ ID NO: 155134 - RNA, 19 nt, Artificial Sequence
  Description of Artificial Sequence: Synthetic oligonucleotide
  Sense strand starting at position 796 of SEQ ID NO: 1993
accuguauucuaggaucca

SEQ ID NO: 155135 - RNA, 19 nt, Artificial Sequence
  Description of Artificial Sequence: Synthetic oligonucleotide
  Antisense strand to SEQ ID NO: 155134
uggauccuagaauacaggu

SEQ ID NO: 155136 - RNA, 19 nt, Artificial Sequence
  Description of Artificial Sequence: Synthetic oligonucleotide
  Sense strand starting at position 999 of SEQ ID NO: 1993
gagcccuaugcacaagaga

SEQ ID NO: 155137 - RNA, 19 nt, Artificial Sequence
  Description of Artificial Sequence: Synthetic oligonucleotide
  Antisense strand to SEQ ID NO: 155136
ucucuugugcauagggcuc

SEQ ID NO: 155138 - RNA, 19 nt, Artificial Sequence
  Description of Artificial Sequence: Synthetic oligonucleotide
  Sense strand starting at position 1076 of SEQ ID NO: 1993
ggagaagaguuucucuucu

SEQ ID NO: 155139 - RNA, 19 nt, Artificial Sequence
  Description of Artificial Sequence: Synthetic oligonucleotide
  Antisense strand to SEQ ID NO: 155138
agaagagaaacucuucucc

SEQ ID NO: 155140 - RNA, 19 nt, Artificial Sequence
  Description of Artificial Sequence: Synthetic oligonucleotide
  Sense strand starting at position 1078 of SEQ ID NO: 1993
agaagaguuucucuucuca

SEQ ID NO: 155141 - RNA, 19 nt, Artificial Sequence
  Description of Artificial Sequence: Synthetic oligonucleotide
  Antisense strand to SEQ ID NO: 155140
ugagaagagaaacucuucu

SEQ ID NO: 155142 - RNA, 19 nt, Artificial Sequence
  Description of Artificial Sequence: Synthetic oligonucleotide
  Sense strand starting at position 1134 of SEQ ID NO: 1993
uagguuagagguugagauu

SEQ ID NO: 155143 - RNA, 19 nt, Artificial Sequence
  Description of Artificial Sequence: Synthetic oligonucleotide
  Antisense strand to SEQ ID NO: 155142
aaucucaaccucuaaccua

SEQ ID NO: 155144 - RNA, 19 nt, Artificial Sequence
  Description of Artificial Sequence: Synthetic oligonucleotide
  Sense strand starting at position 1218 of SEQ ID NO: 1993
cagggaguccacugugaca

SEQ ID NO: 155145 - RNA, 19 nt, Artificial Sequence
  Description of Artificial Sequence: Synthetic oligonucleotide
  Antisense strand to SEQ ID NO: 155144
ugucacaguggacucccug

SEQ ID NO: 155146 - RNA, 19 nt, Artificial Sequence
  Description of Artificial Sequence: Synthetic oligonucleotide
  Sense strand starting at position 1220 of SEQ ID NO: 1993
gggaguccacugugacaaa

SEQ ID NO: 155147 - RNA, 19 nt, Artificial Sequence
  Description of Artificial Sequence: Synthetic oligonucleotide
  Antisense strand to SEQ ID NO: 155146
uuugucacaguggacuccc

SEQ ID NO: 155148 - RNA, 19 nt, Artificial Sequence
  Description of Artificial Sequence: Synthetic oligonucleotide
  Sense strand starting at position 1430 of SEQ ID NO: 1993
caaguauauggucauguca

SEQ ID NO: 155149 - RNA, 19 nt, Artificial Sequence
  Description of Artificial Sequence: Synthetic oligonucleotide
  Antisense strand to SEQ ID NO: 155148
ugacaugaccauauacuug

SEQ ID NO: 155150 - RNA, 19 nt, Artificial Sequence
  Description of Artificial Sequence: Synthetic oligonucleotide
  Sense strand starting at position 1438 of SEQ ID NO: 1993
uggucaugucagcaucaaa

SEQ ID NO: 155151 - RNA, 19 nt, Artificial Sequence
  Description of Artificial Sequence: Synthetic oligonucleotide
  Antisense strand to SEQ ID NO: 155150
uuugaugcugacaugacca

SEQ ID NO: 155152 - RNA, 19 nt, Artificial Sequence
  Description of Artificial Sequence: Synthetic oligonucleotide
  Sense strand starting at position 1988 of SEQ ID NO: 1993
gaaauacaucaucggugaa

SEQ ID NO: 155153 - RNA, 19 nt, Artificial Sequence
  Description of Artificial Sequence: Synthetic oligonucleotide
  Antisense strand to SEQ ID NO: 155152
uucaccgaugauguauuuc

SEQ ID NO: 155154 - RNA, 19 nt, Artificial Sequence
  Description of Artificial Sequence: Synthetic oligonucleotide
  Sense strand starting at position 1990 of SEQ ID NO: 1993
aauacaucaucggugaaca

SEQ ID NO: 155155 - RNA, 19 nt, Artificial Sequence
  Description of Artificial Sequence: Synthetic oligonucleotide
  Antisense strand to SEQ ID NO: 155154
uguucaccgaugauguauu

SEQ ID NO: 155156 - RNA, 19 nt, Artificial Sequence
  Description of Artificial Sequence: Synthetic oligonucleotide
  Sense strand starting at position 1991 of SEQ ID NO: 1993
auacaucaucggugaacaa

SEQ ID NO: 155157 - RNA, 19 nt, Artificial Sequence
  Description of Artificial Sequence: Synthetic oligonucleotide
  Antisense strand to SEQ ID NO: 155156
uuguucaccgaugauguau

SEQ ID NO: 155158 - RNA, 19 nt, Artificial Sequence
  Description of Artificial Sequence: Synthetic oligonucleotide
  Sense strand starting at position 2176 of SEQ ID NO: 1993
gaauguggugcugaagaaa

SEQ ID NO: 155159 - RNA, 19 nt, Artificial Sequence
  Description of Artificial Sequence: Synthetic oligonucleotide
  Antisense strand to SEQ ID NO: 155158
uuucuucagcaccacauuc

SEQ ID NO: 155160 - RNA, 19 nt, Artificial Sequence
  Description of Artificial Sequence: Synthetic oligonucleotide
  Sense strand starting at position 2215 of SEQ ID NO: 1993
ucgagaguaacuggugaga

SEQ ID NO: 155161 - RNA, 19 nt, Artificial Sequence
  Description of Artificial Sequence: Synthetic oligonucleotide
  Antisense strand to SEQ ID NO: 155160
ucucaccaguuacucucga

SEQ ID NO: 155162 - RNA, 19 nt, Artificial Sequence
  Description of Artificial Sequence: Synthetic oligonucleotide
  Sense strand starting at position 2255 of SEQ ID NO: 1993
cggagauaauagccucaga

SEQ ID NO: 155163 - RNA, 19 nt, Artificial Sequence
  Description of Artificial Sequence: Synthetic oligonucleotide
  Antisense strand to SEQ ID NO: 155162
ucugaggcuauuaucuccg

SEQ ID NO: 155164 - RNA, 19 nt, Artificial Sequence
  Description of Artificial Sequence: Synthetic oligonucleotide
  Sense strand starting at position 2602 of SEQ ID NO: 1993
cgugaauacuaaccaggaa

SEQ ID NO: 155165 - RNA, 19 nt, Artificial Sequence
  Description of Artificial Sequence: Synthetic oligonucleotide
  Antisense strand to SEQ ID NO: 155164
uuccugguuaguauucacg

SEQ ID NO: 155166 - RNA, 19 nt, Artificial Sequence
  Description of Artificial Sequence: Synthetic oligonucleotide
  Sense strand starting at position 2614 of SEQ ID NO: 1993
ccaggaacuuagucaacau

SEQ ID NO: 155167 - RNA, 19 nt, Artificial Sequence
  Description of Artificial Sequence: Synthetic oligonucleotide
  Antisense strand to SEQ ID NO: 155166
auguugacuaaguuccugg

SEQ ID NO: 155168 - RNA, 19 nt, Artificial Sequence
  Description of Artificial Sequence: Synthetic oligonucleotide
  Sense strand starting at position 2928 of SEQ ID NO: 1993
ccagcuagacauugaagca

SEQ ID NO: 155169 - RNA, 19 nt, Artificial Sequence
  Description of Artificial Sequence: Synthetic oligonucleotide
  Antisense strand to SEQ ID NO: 155168
ugcuucaaugucuagcugg

SEQ ID NO: 155170 - RNA, 19 nt, Artificial Sequence
  Description of Artificial Sequence: Synthetic oligonucleotide
  Sense strand starting at position 3053 of SEQ ID NO: 1993
gaaggugaucagggcucaa

SEQ ID NO: 155171 - RNA, 19 nt, Artificial Sequence
  Description of Artificial Sequence: Synthetic oligonucleotide
  Antisense strand to SEQ ID NO: 155170
uugagcccugaucaccuuc

SEQ ID NO: 155172 - RNA, 19 nt, Artificial Sequence
  Description of Artificial Sequence: Synthetic oligonucleotide
  Sense strand starting at position 3057 of SEQ ID NO: 1993
gugaucagggcucaauagu

SEQ ID NO: 155173 - RNA, 19 nt, Artificial Sequence
  Description of Artificial Sequence: Synthetic oligonucleotide
  Antisense strand to SEQ ID NO: 155172
acuauugagcccugaucac

SEQ ID NO: 155174 - RNA, 19 nt, Artificial Sequence
  Description of Artificial Sequence: Synthetic oligonucleotide
  Sense strand starting at position 3067 of SEQ ID NO: 1993
cucaauaguguuggagaag

SEQ ID NO: 155175 - RNA, 19 nt, Artificial Sequence
  Description of Artificial Sequence: Synthetic oligonucleotide
  Antisense strand to SEQ ID NO: 155174
cuucuccaacacuauugag

SEQ ID NO: 155176 - RNA, 19 nt, Artificial Sequence
  Description of Artificial Sequence: Synthetic oligonucleotide
  Sense strand starting at position 3097 of SEQ ID NO: 1993
agauuugauuggcauagau

SEQ ID NO: 155177 - RNA, 19 nt, Artificial Sequence
  Description of Artificial Sequence: Synthetic oligonucleotide
  Antisense strand to SEQ ID NO: 155176
aucuaugccaaucaaaucu

SEQ ID NO: 155178 - RNA, 19 nt, Artificial Sequence
  Description of Artificial Sequence: Synthetic oligonucleotide
  Sense strand starting at position 3490 of SEQ ID NO: 1993
cuauucuugcacugagauu

SEQ ID NO: 155179 - RNA, 19 nt, Artificial Sequence
  Description of Artificial Sequence: Synthetic oligonucleotide
  Antisense strand to SEQ ID NO: 155178
aaucucagugcaagaauag

SEQ ID NO: 155180 - RNA, 19 nt, Artificial Sequence
  Description of Artificial Sequence: Synthetic oligonucleotide
  Sense strand starting at position 3525 of SEQ ID NO: 1993
gcccuucuugacgaucaau

SEQ ID NO: 155181 - RNA, 19 nt, Artificial Sequence
  Description of Artificial Sequence: Synthetic oligonucleotide
  Antisense strand to SEQ ID NO: 155180
auugaucgucaagaagggc

SEQ ID NO: 155182 - RNA, 19 nt, Artificial Sequence
  Description of Artificial Sequence: Synthetic oligonucleotide
  Sense strand starting at position 3572 of SEQ ID NO: 1993
gaaggaccucuugaguugu

SEQ ID NO: 155183 - RNA, 19 nt, Artificial Sequence
  Description of Artificial Sequence: Synthetic oligonucleotide
  Antisense strand to SEQ ID NO: 155182
acaacucaagagguccuuc

SEQ ID NO: 155184 - RNA, 19 nt, Artificial Sequence
  Description of Artificial Sequence: Synthetic oligonucleotide
  Sense strand starting at position 3706 of SEQ ID NO: 1993
auaguaaauucuccuggua

SEQ ID NO: 155185 - RNA, 19 nt, Artificial Sequence
  Description of Artificial Sequence: Synthetic oligonucleotide
  Antisense strand to SEQ ID NO: 155184
uaccaggagaauuuacuau

SEQ ID NO: 155186 - RNA, 19 nt, Artificial Sequence
  Description of Artificial Sequence: Synthetic oligonucleotide
  Sense strand starting at position 3782 of SEQ ID NO: 1993
augaucugacacugcuaga

SEQ ID NO: 155187 - RNA, 19 nt, Artificial Sequence
  Description of Artificial Sequence: Synthetic oligonucleotide
  Antisense strand to SEQ ID NO: 155186
ucuagcagugucagaucau

SEQ ID NO: 155188 - RNA, 19 nt, Artificial Sequence
  Description of Artificial Sequence: Synthetic oligonucleotide
  Sense strand starting at position 3841 of SEQ ID NO: 1993
gauggagucaugugccaag

SEQ ID NO: 155189 - RNA, 19 nt, Artificial Sequence
  Description of Artificial Sequence: Synthetic oligonucleotide
  Antisense strand to SEQ ID NO: 155188
cuuggcacaugacuccauc

SEQ ID NO: 155190 - RNA, 19 nt, Artificial Sequence
  Description of Artificial Sequence: Synthetic oligonucleotide
  Sense strand starting at position 3855 of SEQ ID NO: 1993
ccaagaguucuacaguucu

SEQ ID NO: 155191 - RNA, 19 nt, Artificial Sequence
  Description of Artificial Sequence: Synthetic oligonucleotide
  Antisense strand to SEQ ID NO: 155190
agaacuguagaacucuugg

SEQ ID NO: 155192 - RNA, 19 nt, Artificial Sequence
  Description of Artificial Sequence: Synthetic oligonucleotide
  Sense strand starting at position 2812 of SEQ ID NO: 1995
agccaaaguccuugccuau

SEQ ID NO: 155193 - RNA, 19 nt, Artificial Sequence
  Description of Artificial Sequence: Synthetic oligonucleotide
  Antisense strand to SEQ ID NO: 155192
auaggcaaggacuuuggcu

SEQ ID NO: 155194 - RNA, 19 nt, Artificial Sequence
  Description of Artificial Sequence: Synthetic oligonucleotide
  Sense strand starting at position 2734 of SEQ ID NO: 1995
gggauaggcucuuucaggu

SEQ ID NO: 155195 - RNA, 19 nt, Artificial Sequence
  Description of Artificial Sequence: Synthetic oligonucleotide
  Antisense strand to SEQ ID NO: 155194
accugaaagagccuauccc

SEQ ID NO: 155196 - RNA, 19 nt, Artificial Sequence
  Description of Artificial Sequence: Synthetic oligonucleotide
  Sense strand starting at position 2690 of SEQ ID NO: 1995
gcaggagucugaagguuag

SEQ ID NO: 155197 - RNA, 19 nt, Artificial Sequence
  Description of Artificial Sequence: Synthetic oligonucleotide
  Antisense strand to SEQ ID NO: 155196
cuaaccuucagacuccugc

SEQ ID NO: 155198 - RNA, 19 nt, Artificial Sequence
  Description of Artificial Sequence: Synthetic oligonucleotide
  Sense strand starting at position 2660 of SEQ ID NO: 1995
gauuucugcucacaguuga

SEQ ID NO: 155199 - RNA, 19 nt, Artificial Sequence
  Description of Artificial Sequence: Synthetic oligonucleotide
  Antisense strand to SEQ ID NO: 155198
ucaacugugagcagaaauc

SEQ ID NO: 155200 - RNA, 19 nt, Artificial Sequence
  Description of Artificial Sequence: Synthetic oligonucleotide
  Sense strand starting at position 2623 of SEQ ID NO: 1995
gaguuaggccgggagaaug

SEQ ID NO: 155201 - RNA, 19 nt, Artificial Sequence
  Description of Artificial Sequence: Synthetic oligonucleotide
  Antisense strand to SEQ ID NO: 155200
cauucucccggccuaacuc

SEQ ID NO: 155202 - RNA, 19 nt, Artificial Sequence
  Description of Artificial Sequence: Synthetic oligonucleotide
  Sense strand starting at position 2622 of SEQ ID NO: 1995
ggaguuaggccgggagaau

SEQ ID NO: 155203 - RNA, 19 nt, Artificial Sequence
  Description of Artificial Sequence: Synthetic oligonucleotide
  Antisense strand to SEQ ID NO: 155202
auucucccggccuaacucc

SEQ ID NO: 155204 - RNA, 19 nt, Artificial Sequence
  Description of Artificial Sequence: Synthetic oligonucleotide
  Sense strand starting at position 2621 of SEQ ID NO: 1995
gggaguuaggccgggagaa

SEQ ID NO: 155205 - RNA, 19 nt, Artificial Sequence
  Description of Artificial Sequence: Synthetic oligonucleotide
  Antisense strand to SEQ ID NO: 155204
uucucccggccuaacuccc

SEQ ID NO: 155206 - RNA, 19 nt, Artificial Sequence
  Description of Artificial Sequence: Synthetic oligonucleotide
  Sense strand starting at position 2581 of SEQ ID NO: 1995
ggucuaguuugguuucaga

SEQ ID NO: 155207 - RNA, 19 nt, Artificial Sequence
  Description of Artificial Sequence: Synthetic oligonucleotide
  Antisense strand to SEQ ID NO: 155206
ucugaaaccaaacuagacc

SEQ ID NO: 155208 - RNA, 19 nt, Artificial Sequence
  Description of Artificial Sequence: Synthetic oligonucleotide
  Sense strand starting at position 2420 of SEQ ID NO: 1995
ccggccuugagugaaugaa

SEQ ID NO: 155209 - RNA, 19 nt, Artificial Sequence
  Description of Artificial Sequence: Synthetic oligonucleotide
  Antisense strand to SEQ ID NO: 155208
uucauucacucaaggccgg

SEQ ID NO: 155210 - RNA, 19 nt, Artificial Sequence
  Description of Artificial Sequence: Synthetic oligonucleotide
  Sense strand starting at position 1906 of SEQ ID NO: 1995
uggugugggcucuugcuau

SEQ ID NO: 155211 - RNA, 19 nt, Artificial Sequence
  Description of Artificial Sequence: Synthetic oligonucleotide
  Antisense strand to SEQ ID NO: 155210
auagcaagagcccacacca

SEQ ID NO: 155212 - RNA, 19 nt, Artificial Sequence
  Description of Artificial Sequence: Synthetic oligonucleotide
  Sense strand starting at position 1816 of SEQ ID NO: 1995
ccggcgugcggcucagaaa

SEQ ID NO: 155213 - RNA, 19 nt, Artificial Sequence
  Description of Artificial Sequence: Synthetic oligonucleotide
  Antisense strand to SEQ ID NO: 155212
uuucugagccgcacgccgg

SEQ ID NO: 155214 - RNA, 19 nt, Artificial Sequence
  Description of Artificial Sequence: Synthetic oligonucleotide
  Sense strand starting at position 1790 of SEQ ID NO: 1995
aggacuucugcgggcggaa

SEQ ID NO: 155215 - RNA, 19 nt, Artificial Sequence
  Description of Artificial Sequence: Synthetic oligonucleotide
  Antisense strand to SEQ ID NO: 155214
uuccgcccgcagaaguccu

SEQ ID NO: 155216 - RNA, 19 nt, Artificial Sequence
  Description of Artificial Sequence: Synthetic oligonucleotide
  Sense strand starting at position 1543 of SEQ ID NO: 1995
cugggaucuccugggaauc

SEQ ID NO: 155217 - RNA, 19 nt, Artificial Sequence
  Description of Artificial Sequence: Synthetic oligonucleotide
  Antisense strand to SEQ ID NO: 155216
gauucccaggagaucccag

SEQ ID NO: 155218 - RNA, 19 nt, Artificial Sequence
  Description of Artificial Sequence: Synthetic oligonucleotide
  Sense strand starting at position 929 of SEQ ID NO: 1995
aggauaaucugccacccuu

SEQ ID NO: 155219 - RNA, 19 nt, Artificial Sequence
  Description of Artificial Sequence: Synthetic oligonucleotide
  Antisense strand to SEQ ID NO: 155218
aaggguggcagauuauccu

SEQ ID NO: 155220 - RNA, 19 nt, Artificial Sequence
  Description of Artificial Sequence: Synthetic oligonucleotide
  Sense strand starting at position 919 of SEQ ID NO: 1995
aagagucccuaggauaauc

SEQ ID NO: 155221 - RNA, 19 nt, Artificial Sequence
  Description of Artificial Sequence: Synthetic oligonucleotide
  Antisense strand to SEQ ID NO: 155220
gauuauccuagggacucuu

SEQ ID NO: 155222 - RNA, 19 nt, Artificial Sequence
  Description of Artificial Sequence: Synthetic oligonucleotide
  Sense strand starting at position 699 of SEQ ID NO: 1995
agggucaggauaugugaau

SEQ ID NO: 155223 - RNA, 19 nt, Artificial Sequence
  Description of Artificial Sequence: Synthetic oligonucleotide
  Antisense strand to SEQ ID NO: 155222
auucacauauccugacccu

SEQ ID NO: 155224 - RNA, 19 nt, Artificial Sequence
  Description of Artificial Sequence: Synthetic oligonucleotide
  Sense strand starting at position 664 of SEQ ID NO: 1995
cagguuaggucaugggaga

SEQ ID NO: 155225 - RNA, 19 nt, Artificial Sequence
  Description of Artificial Sequence: Synthetic oligonucleotide
  Antisense strand to SEQ ID NO: 155224
ucucccaugaccuaaccug

SEQ ID NO: 155226 - RNA, 19 nt, Artificial Sequence
  Description of Artificial Sequence: Synthetic oligonucleotide
  Sense strand starting at position 3526 of SEQ ID NO: 1994
agccaaaguccuugccuau

SEQ ID NO: 155227 - RNA, 19 nt, Artificial Sequence
  Description of Artificial Sequence: Synthetic oligonucleotide
  Antisense strand to SEQ ID NO: 155226
auaggcaaggacuuuggcu

SEQ ID NO: 155228 - RNA, 19 nt, Artificial Sequence
  Description of Artificial Sequence: Synthetic oligonucleotide
  Sense strand starting at position 3448 of SEQ ID NO: 1994
gggauaggcucuuucaggu

SEQ ID NO: 155229 - RNA, 19 nt, Artificial Sequence
  Description of Artificial Sequence: Synthetic oligonucleotide
  Antisense strand to SEQ ID NO: 155228
accugaaagagccuauccc

SEQ ID NO: 155230 - RNA, 19 nt, Artificial Sequence
  Description of Artificial Sequence: Synthetic oligonucleotide
  Sense strand starting at position 3404 of SEQ ID NO: 1994
gcaggagucugaagguuag

SEQ ID NO: 155231 - RNA, 19 nt, Artificial Sequence
  Description of Artificial Sequence: Synthetic oligonucleotide
  Antisense strand to SEQ ID NO: 155230
cuaaccuucagacuccugc

SEQ ID NO: 155232 - RNA, 19 nt, Artificial Sequence
  Description of Artificial Sequence: Synthetic oligonucleotide
  Sense strand starting at position 3374 of SEQ ID NO: 1994
gauuucugcucacaguuga

SEQ ID NO: 155233 - RNA, 19 nt, Artificial Sequence
  Description of Artificial Sequence: Synthetic oligonucleotide
  Antisense strand to SEQ ID NO: 155232
ucaacugugagcagaaauc

SEQ ID NO: 155234 - RNA, 19 nt, Artificial Sequence
  Description of Artificial Sequence: Synthetic oligonucleotide
  Sense strand starting at position 3337 of SEQ ID NO: 1994
gaguuaggccgggagaaug

SEQ ID NO: 155235 - RNA, 19 nt, Artificial Sequence
  Description of Artificial Sequence: Synthetic oligonucleotide
  Antisense strand to SEQ ID NO: 155234
cauucucccggccuaacuc

SEQ ID NO: 155236 - RNA, 19 nt, Artificial Sequence
  Description of Artificial Sequence: Synthetic oligonucleotide
  Sense strand starting at position 3336 of SEQ ID NO: 1994
ggaguuaggccgggagaau

SEQ ID NO: 155237 - RNA, 19 nt, Artificial Sequence
  Description of Artificial Sequence: Synthetic oligonucleotide
  Antisense strand to SEQ ID NO: 155236
auucucccggccuaacucc

SEQ ID NO: 155238 - RNA, 19 nt, Artificial Sequence
  Description of Artificial Sequence: Synthetic oligonucleotide
  Sense strand starting at position 3335 of SEQ ID NO: 1994
gggaguuaggccgggagaa

SEQ ID NO: 155239 - RNA, 19 nt, Artificial Sequence
  Description of Artificial Sequence: Synthetic oligonucleotide
  Antisense strand to SEQ ID NO: 155238
uucucccggccuaacuccc

SEQ ID NO: 155240 - RNA, 19 nt, Artificial Sequence
  Description of Artificial Sequence: Synthetic oligonucleotide
  Sense strand starting at position 3295 of SEQ ID NO: 1994
ggucuaguuugguuucaga

SEQ ID NO: 155241 - RNA, 19 nt, Artificial Sequence
  Description of Artificial Sequence: Synthetic oligonucleotide
  Antisense strand to SEQ ID NO: 155240
ucugaaaccaaacuagacc

SEQ ID NO: 155242 - RNA, 19 nt, Artificial Sequence
  Description of Artificial Sequence: Synthetic oligonucleotide
  Sense strand starting at position 3134 of SEQ ID NO: 1994
ccggccuugagugaaugaa

SEQ ID NO: 155243 - RNA, 19 nt, Artificial Sequence
  Description of Artificial Sequence: Synthetic oligonucleotide
  Antisense strand to SEQ ID NO: 155242
uucauucacucaaggccgg

SEQ ID NO: 155244 - RNA, 19 nt, Artificial Sequence
  Description of Artificial Sequence: Synthetic oligonucleotide
  Sense strand starting at position 2620 of SEQ ID NO: 1994
uggugugggcucuugcuau

SEQ ID NO: 155245 - RNA, 19 nt, Artificial Sequence
  Description of Artificial Sequence: Synthetic oligonucleotide
  Antisense strand to SEQ ID NO: 155244
auagcaagagcccacacca

SEQ ID NO: 155246 - RNA, 19 nt, Artificial Sequence
  Description of Artificial Sequence: Synthetic oligonucleotide
  Sense strand starting at position 2530 of SEQ ID NO: 1994
ccggcgugcggcucagaaa

SEQ ID NO: 155247 - RNA, 19 nt, Artificial Sequence
  Description of Artificial Sequence: Synthetic oligonucleotide
  Antisense strand to SEQ ID NO: 155246
uuucugagccgcacgccgg

SEQ ID NO: 155248 - RNA, 19 nt, Artificial Sequence
  Description of Artificial Sequence: Synthetic oligonucleotide
  Sense strand starting at position 2504 of SEQ ID NO: 1994
aggacuucugcgggcggaa

SEQ ID NO: 155249 - RNA, 19 nt, Artificial Sequence
  Description of Artificial Sequence: Synthetic oligonucleotide
  Antisense strand to SEQ ID NO: 155248
uuccgcccgcagaaguccu

SEQ ID NO: 155250 - RNA, 19 nt, Artificial Sequence
  Description of Artificial Sequence: Synthetic oligonucleotide
  Sense strand starting at position 2257 of SEQ ID NO: 1994
cugggaucuccugggaauc

SEQ ID NO: 155251 - RNA, 19 nt, Artificial Sequence
  Description of Artificial Sequence: Synthetic oligonucleotide
  Antisense strand to SEQ ID NO: 155250
gauucccaggagaucccag

SEQ ID NO: 155252 - RNA, 19 nt, Artificial Sequence
  Description of Artificial Sequence: Synthetic oligonucleotide
  Sense strand starting at position 1643 of SEQ ID NO: 1994
aggauaaucugccacccuu

SEQ ID NO: 155253 - RNA, 19 nt, Artificial Sequence
  Description of Artificial Sequence: Synthetic oligonucleotide
  Antisense strand to SEQ ID NO: 155252
aaggguggcagauuauccu

SEQ ID NO: 155254 - RNA, 19 nt, Artificial Sequence
  Description of Artificial Sequence: Synthetic oligonucleotide
  Sense strand starting at position 1633 of SEQ ID NO: 1994
aagagucccuaggauaauc

SEQ ID NO: 155255 - RNA, 19 nt, Artificial Sequence
  Description of Artificial Sequence: Synthetic oligonucleotide
  Antisense strand to SEQ ID NO: 155254
gauuauccuagggacucuu

SEQ ID NO: 155256 - RNA, 19 nt, Artificial Sequence
  Description of Artificial Sequence: Synthetic oligonucleotide
  Sense strand starting at position 1413 of SEQ ID NO: 1994
agggucaggauaugugaau

SEQ ID NO: 155257 - RNA, 19 nt, Artificial Sequence
  Description of Artificial Sequence: Synthetic oligonucleotide
  Antisense strand to SEQ ID NO: 155256
auucacauauccugacccu

SEQ ID NO: 155258 - RNA, 19 nt, Artificial Sequence
  Description of Artificial Sequence: Synthetic oligonucleotide
  Sense strand starting at position 1378 of SEQ ID NO: 1994
cagguuaggucaugggaga

SEQ ID NO: 155259 - RNA, 19 nt, Artificial Sequence
  Description of Artificial Sequence: Synthetic oligonucleotide
  Antisense strand to SEQ ID NO: 155258
ucucccaugaccuaaccug

SEQ ID NO: 155260 - RNA, 19 nt, Artificial Sequence
  Description of Artificial Sequence: Synthetic oligonucleotide
  Sense strand starting at position 707 of SEQ ID NO: 1994
uauccucuguggucuggaa

SEQ ID NO: 155261 - RNA, 19 nt, Artificial Sequence
  Description of Artificial Sequence: Synthetic oligonucleotide
  Antisense strand to SEQ ID NO: 155260
uuccagaccacagaggaua

SEQ ID NO: 155262 - RNA, 19 nt, Artificial Sequence
  Description of Artificial Sequence: Synthetic oligonucleotide
  Sense strand starting at position 476 of SEQ ID NO: 1994
auacucaaccgguauuaga

SEQ ID NO: 155263 - RNA, 19 nt, Artificial Sequence
  Description of Artificial Sequence: Synthetic oligonucleotide
  Antisense strand to SEQ ID NO: 155262
ucuaauaccgguugaguau

SEQ ID NO: 155264 - RNA, 19 nt, Artificial Sequence
  Description of Artificial Sequence: Synthetic oligonucleotide
  Sense strand starting at position 474 of SEQ ID NO: 1994
cgauacucaaccgguauua

SEQ ID NO: 155265 - RNA, 19 nt, Artificial Sequence
  Description of Artificial Sequence: Synthetic oligonucleotide
  Antisense strand to SEQ ID NO: 155264
uaauaccgguugaguaucg

SEQ ID NO: 155266 - RNA, 19 nt, Artificial Sequence
  Description of Artificial Sequence: Synthetic oligonucleotide
  Sense strand starting at position 473 of SEQ ID NO: 1994
gcgauacucaaccgguauu

SEQ ID NO: 155267 - RNA, 19 nt, Artificial Sequence
  Description of Artificial Sequence: Synthetic oligonucleotide
  Antisense strand to SEQ ID NO: 155266
aauaccgguugaguaucgc

SEQ ID NO: 155268 - RNA, 19 nt, Artificial Sequence
  Description of Artificial Sequence: Synthetic oligonucleotide
  Sense strand starting at position 404 of SEQ ID NO: 1994
gcagcuaucucauguauau

SEQ ID NO: 155269 - RNA, 19 nt, Artificial Sequence
  Description of Artificial Sequence: Synthetic oligonucleotide
  Antisense strand to SEQ ID NO: 155268
auauacaugagauagcugc

SEQ ID NO: 155270 - RNA, 19 nt, Artificial Sequence
  Description of Artificial Sequence: Synthetic oligonucleotide
  Sense strand starting at position 97 of SEQ ID NO: 1994
ugaauuucguguuuagguu

SEQ ID NO: 155271 - RNA, 19 nt, Artificial Sequence
  Description of Artificial Sequence: Synthetic oligonucleotide
  Antisense strand to SEQ ID NO: 155270
aaccuaaacacgaaauuca

SEQ ID NO: 155272 - RNA, 19 nt, Artificial Sequence
  Description of Artificial Sequence: Synthetic oligonucleotide
  Sense strand starting at position 72 of SEQ ID NO: 1994
gcuuaagguguauaugaaa

SEQ ID NO: 155273 - RNA, 19 nt, Artificial Sequence
  Description of Artificial Sequence: Synthetic oligonucleotide
  Antisense strand to SEQ ID NO: 155272
uuucauauacaccuuaagc

SEQ ID NO: 155274 - RNA, 19 nt, Artificial Sequence
  Description of Artificial Sequence: Synthetic oligonucleotide
  Sense strand starting at position 70 of SEQ ID NO: 1994
uggcuuaagguguauauga

SEQ ID NO: 155275 - RNA, 19 nt, Artificial Sequence
  Description of Artificial Sequence: Synthetic oligonucleotide
  Antisense strand to SEQ ID NO: 155274
ucauauacaccuuaagcca

SEQ ID NO: 155276 - RNA, 19 nt, Artificial Sequence
  Description of Artificial Sequence: Synthetic oligonucleotide
  Sense strand starting at position 3975 of SEQ ID NO: 1996
guucuuaaugugugaccaa

SEQ ID NO: 155277 - RNA, 19 nt, Artificial Sequence
  Description of Artificial Sequence: Synthetic oligonucleotide
  Antisense strand to SEQ ID NO: 155276
uuggucacacauuaagaac

SEQ ID NO: 155278 - RNA, 19 nt, Artificial Sequence
  Description of Artificial Sequence: Synthetic oligonucleotide
  Sense strand starting at position 3882 of SEQ ID NO: 1996
gcaucaccuggagaguuua

SEQ ID NO: 155279 - RNA, 19 nt, Artificial Sequence
  Description of Artificial Sequence: Synthetic oligonucleotide
  Antisense strand to SEQ ID NO: 155278
uaaacucuccaggugaugc

SEQ ID NO: 155280 - RNA, 19 nt, Artificial Sequence
  Description of Artificial Sequence: Synthetic oligonucleotide
  Sense strand starting at position 3880 of SEQ ID NO: 1996
cagcaucaccuggagaguu

SEQ ID NO: 155281 - RNA, 19 nt, Artificial Sequence
  Description of Artificial Sequence: Synthetic oligonucleotide
  Antisense strand to SEQ ID NO: 155280
aacucuccaggugaugcug

SEQ ID NO: 155282 - RNA, 19 nt, Artificial Sequence
  Description of Artificial Sequence: Synthetic oligonucleotide
  Sense strand starting at position 3721 of SEQ ID NO: 1996
caucacucuguuuggcaga

SEQ ID NO: 155283 - RNA, 19 nt, Artificial Sequence
  Description of Artificial Sequence: Synthetic oligonucleotide
  Antisense strand to SEQ ID NO: 155282
ucugccaaacagagugaug

SEQ ID NO: 155284 - RNA, 19 nt, Artificial Sequence
  Description of Artificial Sequence: Synthetic oligonucleotide
  Sense strand starting at position 3230 of SEQ ID NO: 1996
aguggugucccugaauccu

SEQ ID NO: 155285 - RNA, 19 nt, Artificial Sequence
  Description of Artificial Sequence: Synthetic oligonucleotide
  Antisense strand to SEQ ID NO: 155284
aggauucagggacaccacu

SEQ ID NO: 155286 - RNA, 19 nt, Artificial Sequence
  Description of Artificial Sequence: Synthetic oligonucleotide
  Sense strand starting at position 3212 of SEQ ID NO: 1996
uucuuuaaugguggacaca

SEQ ID NO: 155287 - RNA, 19 nt, Artificial Sequence
  Description of Artificial Sequence: Synthetic oligonucleotide
  Antisense strand to SEQ ID NO: 155286
uguguccaccauuaaagaa

SEQ ID NO: 155288 - RNA, 19 nt, Artificial Sequence
  Description of Artificial Sequence: Synthetic oligonucleotide
  Sense strand starting at position 3083 of SEQ ID NO: 1996
uuagaucuuuauguggaaa

SEQ ID NO: 155289 - RNA, 19 nt, Artificial Sequence
  Description of Artificial Sequence: Synthetic oligonucleotide
  Antisense strand to SEQ ID NO: 155288
uuuccacauaaagaucuaa

SEQ ID NO: 155290 - RNA, 19 nt, Artificial Sequence
  Description of Artificial Sequence: Synthetic oligonucleotide
  Sense strand starting at position 2996 of SEQ ID NO: 1996
ugaaauacuccaugucugu

SEQ ID NO: 155291 - RNA, 19 nt, Artificial Sequence
  Description of Artificial Sequence: Synthetic oligonucleotide
  Antisense strand to SEQ ID NO: 155290
acagacauggaguauuuca

SEQ ID NO: 155292 - RNA, 19 nt, Artificial Sequence
  Description of Artificial Sequence: Synthetic oligonucleotide
  Sense strand starting at position 2837 of SEQ ID NO: 1996
agaugcaguagauguuaaa

SEQ ID NO: 155293 - RNA, 19 nt, Artificial Sequence
  Description of Artificial Sequence: Synthetic oligonucleotide
  Antisense strand to SEQ ID NO: 155292
uuuaacaucuacugcaucu

SEQ ID NO: 155294 - RNA, 19 nt, Artificial Sequence
  Description of Artificial Sequence: Synthetic oligonucleotide
  Sense strand starting at position 2606 of SEQ ID NO: 1996
aaaugagaauaugauguga

SEQ ID NO: 155295 - RNA, 19 nt, Artificial Sequence
  Description of Artificial Sequence: Synthetic oligonucleotide
  Antisense strand to SEQ ID NO: 155294
ucacaucauauucucauuu

SEQ ID NO: 155296 - RNA, 19 nt, Artificial Sequence
  Description of Artificial Sequence: Synthetic oligonucleotide
  Sense strand starting at position 2578 of SEQ ID NO: 1996
acaauuaagcgugacuaau

SEQ ID NO: 155297 - RNA, 19 nt, Artificial Sequence
  Description of Artificial Sequence: Synthetic oligonucleotide
  Antisense strand to SEQ ID NO: 155296
auuagucacgcuuaauugu

SEQ ID NO: 155298 - RNA, 19 nt, Artificial Sequence
  Description of Artificial Sequence: Synthetic oligonucleotide
  Sense strand starting at position 2431 of SEQ ID NO: 1996
ucaagugucggagacaaug

SEQ ID NO: 155299 - RNA, 19 nt, Artificial Sequence
  Description of Artificial Sequence: Synthetic oligonucleotide
  Antisense strand to SEQ ID NO: 155298
cauugucuccgacacuuga

SEQ ID NO: 155300 - RNA, 19 nt, Artificial Sequence
  Description of Artificial Sequence: Synthetic oligonucleotide
  Sense strand starting at position 2428 of SEQ ID NO: 1996
gaaucaagugucggagaca

SEQ ID NO: 155301 - RNA, 19 nt, Artificial Sequence
  Description of Artificial Sequence: Synthetic oligonucleotide
  Antisense strand to SEQ ID NO: 155300
ugucuccgacacuugauuc

SEQ ID NO: 155302 - RNA, 19 nt, Artificial Sequence
  Description of Artificial Sequence: Synthetic oligonucleotide
  Sense strand starting at position 2342 of SEQ ID NO: 1996
cggaauaggguuggguuua

SEQ ID NO: 155303 - RNA, 19 nt, Artificial Sequence
  Description of Artificial Sequence: Synthetic oligonucleotide
  Antisense strand to SEQ ID NO: 155302
uaaacccaacccuauuccg

SEQ ID NO: 155304 - RNA, 19 nt, Artificial Sequence
  Description of Artificial Sequence: Synthetic oligonucleotide
  Sense strand starting at position 2026 of SEQ ID NO: 1996
gagguuaucgcgggaacag

SEQ ID NO: 155305 - RNA, 19 nt, Artificial Sequence
  Description of Artificial Sequence: Synthetic oligonucleotide
  Antisense strand to SEQ ID NO: 155304
cuguucccgcgauaaccuc

SEQ ID NO: 155306 - RNA, 19 nt, Artificial Sequence
  Description of Artificial Sequence: Synthetic oligonucleotide
  Sense strand starting at position 2014 of SEQ ID NO: 1996
ggagccuuucucgagguua

SEQ ID NO: 155307 - RNA, 19 nt, Artificial Sequence
  Description of Artificial Sequence: Synthetic oligonucleotide
  Antisense strand to SEQ ID NO: 155306
uaaccucgagaaaggcucc

SEQ ID NO: 155308 - RNA, 19 nt, Artificial Sequence
  Description of Artificial Sequence: Synthetic oligonucleotide
  Sense strand starting at position 868 of SEQ ID NO: 1996
ucgagagguagucaacuuu

SEQ ID NO: 155309 - RNA, 19 nt, Artificial Sequence
  Description of Artificial Sequence: Synthetic oligonucleotide
  Antisense strand to SEQ ID NO: 155308
aaaguugacuaccucucga

SEQ ID NO: 155310 - RNA, 19 nt, Artificial Sequence
  Description of Artificial Sequence: Synthetic oligonucleotide
  Sense strand starting at position 862 of SEQ ID NO: 1996
agaauaucgagagguaguc

SEQ ID NO: 155311 - RNA, 19 nt, Artificial Sequence
  Description of Artificial Sequence: Synthetic oligonucleotide
  Antisense strand to SEQ ID NO: 155310
gacuaccucucgauauucu

SEQ ID NO: 155312 - RNA, 19 nt, Artificial Sequence
  Description of Artificial Sequence: Synthetic oligonucleotide
  Sense strand starting at position 846 of SEQ ID NO: 1996
acacuuccuugauuguaga

SEQ ID NO: 155313 - RNA, 19 nt, Artificial Sequence
  Description of Artificial Sequence: Synthetic oligonucleotide
  Antisense strand to SEQ ID NO: 155312
ucuacaaucaaggaagugu

SEQ ID NO: 155314 - RNA, 19 nt, Artificial Sequence
  Description of Artificial Sequence: Synthetic oligonucleotide
  Sense strand starting at position 844 of SEQ ID NO: 1996
ugacacuuccuugauugua

SEQ ID NO: 155315 - RNA, 19 nt, Artificial Sequence
  Description of Artificial Sequence: Synthetic oligonucleotide
  Antisense strand to SEQ ID NO: 155314
uacaaucaaggaaguguca

SEQ ID NO: 155316 - RNA, 19 nt, Artificial Sequence
  Description of Artificial Sequence: Synthetic oligonucleotide
  Sense strand starting at position 843 of SEQ ID NO: 1996
cugacacuuccuugauugu

SEQ ID NO: 155317 - RNA, 19 nt, Artificial Sequence
  Description of Artificial Sequence: Synthetic oligonucleotide
  Antisense strand to SEQ ID NO: 155316
acaaucaaggaagugucag

SEQ ID NO: 155318 - RNA, 19 nt, Artificial Sequence
  Description of Artificial Sequence: Synthetic oligonucleotide
  Sense strand starting at position 828 of SEQ ID NO: 1996
ccaaguuccuuaguacuga

SEQ ID NO: 155319 - RNA, 19 nt, Artificial Sequence
  Description of Artificial Sequence: Synthetic oligonucleotide
  Antisense strand to SEQ ID NO: 155318
ucaguacuaaggaacuugg

SEQ ID NO: 155320 - RNA, 19 nt, Artificial Sequence
  Description of Artificial Sequence: Synthetic oligonucleotide
  Sense strand starting at position 826 of SEQ ID NO: 1996
gcccaaguuccuuaguacu

SEQ ID NO: 155321 - RNA, 19 nt, Artificial Sequence
  Description of Artificial Sequence: Synthetic oligonucleotide
  Antisense strand to SEQ ID NO: 155320
aguacuaaggaacuugggc

SEQ ID NO: 155322 - RNA, 19 nt, Artificial Sequence
  Description of Artificial Sequence: Synthetic oligonucleotide
  Sense strand starting at position 805 of SEQ ID NO: 1996
gggugaugacugugggaaa

SEQ ID NO: 155323 - RNA, 19 nt, Artificial Sequence
  Description of Artificial Sequence: Synthetic oligonucleotide
  Antisense strand to SEQ ID NO: 155322
uuucccacagucaucaccc

SEQ ID NO: 155324 - RNA, 19 nt, Artificial Sequence
  Description of Artificial Sequence: Synthetic oligonucleotide
  Sense strand starting at position 795 of SEQ ID NO: 1996
ggcauaacaugggugauga

SEQ ID NO: 155325 - RNA, 19 nt, Artificial Sequence
  Description of Artificial Sequence: Synthetic oligonucleotide
  Antisense strand to SEQ ID NO: 155324
ucaucacccauguuaugcc

SEQ ID NO: 155326 - RNA, 19 nt, Artificial Sequence
  Description of Artificial Sequence: Synthetic oligonucleotide
  Sense strand starting at position 728 of SEQ ID NO: 1996
ccguaaacaccagauuguu

SEQ ID NO: 155327 - RNA, 19 nt, Artificial Sequence
  Description of Artificial Sequence: Synthetic oligonucleotide
  Antisense strand to SEQ ID NO: 155326
aacaaucugguguuuacgg

SEQ ID NO: 155328 - RNA, 19 nt, Artificial Sequence
  Description of Artificial Sequence: Synthetic oligonucleotide
  Sense strand starting at position 704 of SEQ ID NO: 1996
aagagaauguuguugcuac

SEQ ID NO: 155329 - RNA, 19 nt, Artificial Sequence
  Description of Artificial Sequence: Synthetic oligonucleotide
  Antisense strand to SEQ ID NO: 155328
guagcaacaacauucucuu

SEQ ID NO: 155330 - RNA, 19 nt, Artificial Sequence
  Description of Artificial Sequence: Synthetic oligonucleotide
  Sense strand starting at position 621 of SEQ ID NO: 1996
guaguaaagccacagaaca

SEQ ID NO: 155331 - RNA, 19 nt, Artificial Sequence
  Description of Artificial Sequence: Synthetic oligonucleotide
  Antisense strand to SEQ ID NO: 155330
uguucuguggcuuuacuac

SEQ ID NO: 155332 - RNA, 19 nt, Artificial Sequence
  Description of Artificial Sequence: Synthetic oligonucleotide
  Sense strand starting at position 564 of SEQ ID NO: 1996
gggauagugcaauguagga

SEQ ID NO: 155333 - RNA, 19 nt, Artificial Sequence
  Description of Artificial Sequence: Synthetic oligonucleotide
  Antisense strand to SEQ ID NO: 155332
uccuacauugcacuauccc

SEQ ID NO: 155334 - RNA, 19 nt, Artificial Sequence
  Description of Artificial Sequence: Synthetic oligonucleotide
  Sense strand starting at position 479 of SEQ ID NO: 1996
ugucaaaugcauuacaaag

SEQ ID NO: 155335 - RNA, 19 nt, Artificial Sequence
  Description of Artificial Sequence: Synthetic oligonucleotide
  Antisense strand to SEQ ID NO: 155334
cuuuguaaugcauuugaca

SEQ ID NO: 155336 - RNA, 19 nt, Artificial Sequence
  Description of Artificial Sequence: Synthetic oligonucleotide
  Sense strand starting at position 386 of SEQ ID NO: 1996
guuucuuaaccucaguaag

SEQ ID NO: 155337 - RNA, 19 nt, Artificial Sequence
  Description of Artificial Sequence: Synthetic oligonucleotide
  Antisense strand to SEQ ID NO: 155336
cuuacugagguuaagaaac

SEQ ID NO: 155338 - RNA, 19 nt, Artificial Sequence
  Description of Artificial Sequence: Synthetic oligonucleotide
  Sense strand starting at position 366 of SEQ ID NO: 1996
guuauuuacuaguugugca

SEQ ID NO: 155339 - RNA, 19 nt, Artificial Sequence
  Description of Artificial Sequence: Synthetic oligonucleotide
  Antisense strand to SEQ ID NO: 155338
ugcacaacuaguaaauaac

SEQ ID NO: 155340 - RNA, 19 nt, Artificial Sequence
  Description of Artificial Sequence: Synthetic oligonucleotide
  Sense strand starting at position 353 of SEQ ID NO: 1996
cagacagcaccugguuauu

SEQ ID NO: 155341 - RNA, 19 nt, Artificial Sequence
  Description of Artificial Sequence: Synthetic oligonucleotide
  Antisense strand to SEQ ID NO: 155340
aauaaccaggugcugucug

SEQ ID NO: 155342 - RNA, 19 nt, Artificial Sequence
  Description of Artificial Sequence: Synthetic oligonucleotide
  Sense strand starting at position 338 of SEQ ID NO: 1996
cugggaguacuaggucaga

SEQ ID NO: 155343 - RNA, 19 nt, Artificial Sequence
  Description of Artificial Sequence: Synthetic oligonucleotide
  Antisense strand to SEQ ID NO: 155342
ucugaccuaguacucccag

SEQ ID NO: 155344 - RNA, 19 nt, Artificial Sequence
  Description of Artificial Sequence: Synthetic oligonucleotide
  Sense strand starting at position 313 of SEQ ID NO: 1996
augcuuaucccggaagaaa

SEQ ID NO: 155345 - RNA, 19 nt, Artificial Sequence
  Description of Artificial Sequence: Synthetic oligonucleotide
  Antisense strand to SEQ ID NO: 155344
uuucuuccgggauaagcau

SEQ ID NO: 155346 - RNA, 19 nt, Artificial Sequence
  Description of Artificial Sequence: Synthetic oligonucleotide
  Sense strand starting at position 312 of SEQ ID NO: 1996
aaugcuuaucccggaagaa

SEQ ID NO: 155347 - RNA, 19 nt, Artificial Sequence
  Description of Artificial Sequence: Synthetic oligonucleotide
  Antisense strand to SEQ ID NO: 155346
uucuuccgggauaagcauu

SEQ ID NO: 155348 - RNA, 19 nt, Artificial Sequence
  Description of Artificial Sequence: Synthetic oligonucleotide
  Sense strand starting at position 302 of SEQ ID NO: 1996
uuaaaucuggaaugcuuau

SEQ ID NO: 155349 - RNA, 19 nt, Artificial Sequence
  Description of Artificial Sequence: Synthetic oligonucleotide
  Antisense strand to SEQ ID NO: 155348
auaagcauuccagauuuaa

SEQ ID NO: 155350 - RNA, 19 nt, Artificial Sequence
  Description of Artificial Sequence: Synthetic oligonucleotide
  Sense strand starting at position 299 of SEQ ID NO: 1996
aucuuaaaucuggaaugcu

SEQ ID NO: 155351 - RNA, 19 nt, Artificial Sequence
  Description of Artificial Sequence: Synthetic oligonucleotide
  Antisense strand to SEQ ID NO: 155350
agcauuccagauuuaagau

SEQ ID NO: 155352 - RNA, 19 nt, Artificial Sequence
  Description of Artificial Sequence: Synthetic oligonucleotide
  Sense strand starting at position 77 of SEQ ID NO: 1996
gcucaacgucuacaauaua

SEQ ID NO: 155353 - RNA, 19 nt, Artificial Sequence
  Description of Artificial Sequence: Synthetic oligonucleotide
  Antisense strand to SEQ ID NO: 155352
uauauuguagacguugagc

SEQ ID NO: 155354 - RNA, 19 nt, Artificial Sequence
  Description of Artificial Sequence: Synthetic oligonucleotide
  Sense strand starting at position 75 of SEQ ID NO: 1996
aggcucaacgucuacaaua

SEQ ID NO: 155355 - RNA, 19 nt, Artificial Sequence
  Description of Artificial Sequence: Synthetic oligonucleotide
  Antisense strand to SEQ ID NO: 155354
uauuguagacguugagccu

SEQ ID NO: 155356 - RNA, 19 nt, Artificial Sequence
  Description of Artificial Sequence: Synthetic oligonucleotide
  Sense strand starting at position 202 of SEQ ID NO: 1997
gcucuuugucaugguggau

SEQ ID NO: 155357 - RNA, 19 nt, Artificial Sequence
  Description of Artificial Sequence: Synthetic oligonucleotide
  Antisense strand to SEQ ID NO: 155356
auccaccaugacaaagagc

SEQ ID NO: 155358 - RNA, 19 nt, Artificial Sequence
  Description of Artificial Sequence: Synthetic oligonucleotide
  Sense strand starting at position 205 of SEQ ID NO: 1997
cuuugucaugguggauuga

SEQ ID NO: 155359 - RNA, 19 nt, Artificial Sequence
  Description of Artificial Sequence: Synthetic oligonucleotide
  Antisense strand to SEQ ID NO: 155358
ucaauccaccaugacaaag

SEQ ID NO: 155360 - RNA, 19 nt, Artificial Sequence
  Description of Artificial Sequence: Synthetic oligonucleotide
  Sense strand starting at position 206 of SEQ ID NO: 1997
uuugucaugguggauugaa

SEQ ID NO: 155361 - RNA, 19 nt, Artificial Sequence
  Description of Artificial Sequence: Synthetic oligonucleotide
  Antisense strand to SEQ ID NO: 155360
uucaauccaccaugacaaa

SEQ ID NO: 155362 - RNA, 19 nt, Artificial Sequence
  Description of Artificial Sequence: Synthetic oligonucleotide
  Sense strand starting at position 771 of SEQ ID NO: 1997
ggacuuuacccauaugguc

SEQ ID NO: 155363 - RNA, 19 nt, Artificial Sequence
  Description of Artificial Sequence: Synthetic oligonucleotide
  Antisense strand to SEQ ID NO: 155362
gaccauauggguaaagucc

SEQ ID NO: 155364 - RNA, 19 nt, Artificial Sequence
  Description of Artificial Sequence: Synthetic oligonucleotide
  Sense strand starting at position 807 of SEQ ID NO: 1997
ggaagaaguucugcccacu

SEQ ID NO: 155365 - RNA, 19 nt, Artificial Sequence
  Description of Artificial Sequence: Synthetic oligonucleotide
  Antisense strand to SEQ ID NO: 155364
agugggcagaacuucuucc

SEQ ID NO: 155366 - RNA, 19 nt, Artificial Sequence
  Description of Artificial Sequence: Synthetic oligonucleotide
  Sense strand starting at position 1308 of SEQ ID NO: 1997
gucccaugacuuugucguu

SEQ ID NO: 155367 - RNA, 19 nt, Artificial Sequence
  Description of Artificial Sequence: Synthetic oligonucleotide
  Antisense strand to SEQ ID NO: 155366
aacgacaaagucaugggac

SEQ ID NO: 155368 - RNA, 19 nt, Artificial Sequence
  Description of Artificial Sequence: Synthetic oligonucleotide
  Sense strand starting at position 1313 of SEQ ID NO: 1997
augacuuugucguugggau

SEQ ID NO: 155369 - RNA, 19 nt, Artificial Sequence
  Description of Artificial Sequence: Synthetic oligonucleotide
  Antisense strand to SEQ ID NO: 155368
aucccaacgacaaagucau

SEQ ID NO: 155370 - RNA, 19 nt, Artificial Sequence
  Description of Artificial Sequence: Synthetic oligonucleotide
  Sense strand starting at position 1314 of SEQ ID NO: 1997
ugacuuugucguugggaug

SEQ ID NO: 155371 - RNA, 19 nt, Artificial Sequence
  Description of Artificial Sequence: Synthetic oligonucleotide
  Antisense strand to SEQ ID NO: 155370
caucccaacgacaaaguca

SEQ ID NO: 155372 - RNA, 19 nt, Artificial Sequence
  Description of Artificial Sequence: Synthetic oligonucleotide
  Sense strand starting at position 1724 of SEQ ID NO: 1997
gacagagacucauuccgga

SEQ ID NO: 155373 - RNA, 19 nt, Artificial Sequence
  Description of Artificial Sequence: Synthetic oligonucleotide
  Antisense strand to SEQ ID NO: 155372
uccggaaugagucucuguc

SEQ ID NO: 155374 - RNA, 19 nt, Artificial Sequence
  Description of Artificial Sequence: Synthetic oligonucleotide
  Sense strand starting at position 1729 of SEQ ID NO: 1997
agacucauuccggagugga

SEQ ID NO: 155375 - RNA, 19 nt, Artificial Sequence
  Description of Artificial Sequence: Synthetic oligonucleotide
  Antisense strand to SEQ ID NO: 155374
uccacuccggaaugagucu

SEQ ID NO: 155376 - RNA, 19 nt, Artificial Sequence
  Description of Artificial Sequence: Synthetic oligonucleotide
  Sense strand starting at position 1770 of SEQ ID NO: 1997
ggagauccauaguugaggu

SEQ ID NO: 155377 - RNA, 19 nt, Artificial Sequence
  Description of Artificial Sequence: Synthetic oligonucleotide
  Antisense strand to SEQ ID NO: 155376
accucaacuauggaucucc

SEQ ID NO: 155378 - RNA, 19 nt, Artificial Sequence
  Description of Artificial Sequence: Synthetic oligonucleotide
  Sense strand starting at position 1991 of SEQ ID NO: 1997
ccucuucucuggcugagaa

SEQ ID NO: 155379 - RNA, 19 nt, Artificial Sequence
  Description of Artificial Sequence: Synthetic oligonucleotide
  Antisense strand to SEQ ID NO: 155378
uucucagccagagaagagg

SEQ ID NO: 155380 - RNA, 19 nt, Artificial Sequence
  Description of Artificial Sequence: Synthetic oligonucleotide
  Sense strand starting at position 1992 of SEQ ID NO: 1997
cucuucucuggcugagaag

SEQ ID NO: 155381 - RNA, 19 nt, Artificial Sequence
  Description of Artificial Sequence: Synthetic oligonucleotide
  Antisense strand to SEQ ID NO: 155380
cuucucagccagagaagag

SEQ ID NO: 155382 - RNA, 19 nt, Artificial Sequence
  Description of Artificial Sequence: Synthetic oligonucleotide
  Sense strand starting at position 2268 of SEQ ID NO: 1997
ggaggucugggucacucaa

SEQ ID NO: 155383 - RNA, 19 nt, Artificial Sequence
  Description of Artificial Sequence: Synthetic oligonucleotide
  Antisense strand to SEQ ID NO: 155382
uugagugacccagaccucc

SEQ ID NO: 155384 - RNA, 19 nt, Artificial Sequence
  Description of Artificial Sequence: Synthetic oligonucleotide
  Sense strand starting at position 2384 of SEQ ID NO: 1997
gaucucagagcucagcauu

SEQ ID NO: 155385 - RNA, 19 nt, Artificial Sequence
  Description of Artificial Sequence: Synthetic oligonucleotide
  Antisense strand to SEQ ID NO: 155384
aaugcugagcucugagauc

SEQ ID NO: 155386 - RNA, 19 nt, Artificial Sequence
  Description of Artificial Sequence: Synthetic oligonucleotide
  Sense strand starting at position 2442 of SEQ ID NO: 1997
cucucuaugcccgaaagcu

SEQ ID NO: 155387 - RNA, 19 nt, Artificial Sequence
  Description of Artificial Sequence: Synthetic oligonucleotide
  Antisense strand to SEQ ID NO: 155386
agcuuucgggcauagagag

SEQ ID NO: 155388 - RNA, 19 nt, Artificial Sequence
  Description of Artificial Sequence: Synthetic oligonucleotide
  Sense strand starting at position 2501 of SEQ ID NO: 1997
acaguaagccugggccauu

SEQ ID NO: 155389 - RNA, 19 nt, Artificial Sequence
  Description of Artificial Sequence: Synthetic oligonucleotide
  Antisense strand to SEQ ID NO: 155388
aauggcccaggcuuacugu

SEQ ID NO: 155390 - RNA, 19 nt, Artificial Sequence
  Description of Artificial Sequence: Synthetic oligonucleotide
  Sense strand starting at position 2502 of SEQ ID NO: 1997
caguaagccugggccauua

SEQ ID NO: 155391 - RNA, 19 nt, Artificial Sequence
  Description of Artificial Sequence: Synthetic oligonucleotide
  Antisense strand to SEQ ID NO: 155390
uaauggcccaggcuuacug

SEQ ID NO: 155392 - RNA, 19 nt, Artificial Sequence
  Description of Artificial Sequence: Synthetic oligonucleotide
  Sense strand starting at position 2570 of SEQ ID NO: 1997
ggaaguaaguggucccaau

SEQ ID NO: 155393 - RNA, 19 nt, Artificial Sequence
  Description of Artificial Sequence: Synthetic oligonucleotide
  Antisense strand to SEQ ID NO: 155392
auugggaccacuuacuucc

SEQ ID NO: 155394 - RNA, 19 nt, Artificial Sequence
  Description of Artificial Sequence: Synthetic oligonucleotide
  Sense strand starting at position 2709 of SEQ ID NO: 1997
cggcuuguucucuacguau

SEQ ID NO: 155395 - RNA, 19 nt, Artificial Sequence
  Description of Artificial Sequence: Synthetic oligonucleotide
  Antisense strand to SEQ ID NO: 155394
auacguagagaacaagccg

SEQ ID NO: 155396 - RNA, 19 nt, Artificial Sequence
  Description of Artificial Sequence: Synthetic oligonucleotide
  Sense strand starting at position 2809 of SEQ ID NO: 1997
cacugucaagggugagaau

SEQ ID NO: 155397 - RNA, 19 nt, Artificial Sequence
  Description of Artificial Sequence: Synthetic oligonucleotide
  Antisense strand to SEQ ID NO: 155396
auucucacccuugacagug

SEQ ID NO: 155398 - RNA, 19 nt, Artificial Sequence
  Description of Artificial Sequence: Synthetic oligonucleotide
  Sense strand starting at position 3016 of SEQ ID NO: 1997
aagacacaucugcgucaau

SEQ ID NO: 155399 - RNA, 19 nt, Artificial Sequence
  Description of Artificial Sequence: Synthetic oligonucleotide
  Antisense strand to SEQ ID NO: 155398
auugacgcagaugugucuu

SEQ ID NO: 155400 - RNA, 19 nt, Artificial Sequence
  Description of Artificial Sequence: Synthetic oligonucleotide
  Sense strand starting at position 3017 of SEQ ID NO: 1997
agacacaucugcgucaaua

SEQ ID NO: 155401 - RNA, 19 nt, Artificial Sequence
  Description of Artificial Sequence: Synthetic oligonucleotide
  Antisense strand to SEQ ID NO: 155400
uauugacgcagaugugucu

SEQ ID NO: 155402 - RNA, 19 nt, Artificial Sequence
  Description of Artificial Sequence: Synthetic oligonucleotide
  Sense strand starting at position 3019 of SEQ ID NO: 1997
acacaucugcgucaauaag

SEQ ID NO: 155403 - RNA, 19 nt, Artificial Sequence
  Description of Artificial Sequence: Synthetic oligonucleotide
  Antisense strand to SEQ ID NO: 155402
cuuauugacgcagaugugu

SEQ ID NO: 155404 - RNA, 19 nt, Artificial Sequence
  Description of Artificial Sequence: Synthetic oligonucleotide
  Sense strand starting at position 3146 of SEQ ID NO: 1997
acugcucuuccggagaaug

SEQ ID NO: 155405 - RNA, 19 nt, Artificial Sequence
  Description of Artificial Sequence: Synthetic oligonucleotide
  Antisense strand to SEQ ID NO: 155404
cauucuccggaagagcagu

SEQ ID NO: 155406 - RNA, 19 nt, Artificial Sequence
  Description of Artificial Sequence: Synthetic oligonucleotide
  Sense strand starting at position 3156 of SEQ ID NO: 1997
cggagaaugccacaggcaa

SEQ ID NO: 155407 - RNA, 19 nt, Artificial Sequence
  Description of Artificial Sequence: Synthetic oligonucleotide
  Antisense strand to SEQ ID NO: 155406
uugccuguggcauucuccg

SEQ ID NO: 155408 - RNA, 19 nt, Artificial Sequence
  Description of Artificial Sequence: Synthetic oligonucleotide
  Sense strand starting at position 3523 of SEQ ID NO: 1997
cccagcucaccuuggaauu

SEQ ID NO: 155409 - RNA, 19 nt, Artificial Sequence
  Description of Artificial Sequence: Synthetic oligonucleotide
  Antisense strand to SEQ ID NO: 155408
aauuccaaggugagcuggg

SEQ ID NO: 155410 - RNA, 19 nt, Artificial Sequence
  Description of Artificial Sequence: Synthetic oligonucleotide
  Sense strand starting at position 3524 of SEQ ID NO: 1997
ccagcucaccuuggaauua

SEQ ID NO: 155411 - RNA, 19 nt, Artificial Sequence
  Description of Artificial Sequence: Synthetic oligonucleotide
  Antisense strand to SEQ ID NO: 155410
uaauuccaaggugagcugg

SEQ ID NO: 155412 - RNA, 19 nt, Artificial Sequence
  Description of Artificial Sequence: Synthetic oligonucleotide
  Sense strand starting at position 3599 of SEQ ID NO: 1997
acauuaacacuugaagugu

SEQ ID NO: 155413 - RNA, 19 nt, Artificial Sequence
  Description of Artificial Sequence: Synthetic oligonucleotide
  Antisense strand to SEQ ID NO: 155412
acacuucaaguguuaaugu

SEQ ID NO: 155414 - RNA, 19 nt, Artificial Sequence
  Description of Artificial Sequence: Synthetic oligonucleotide
  Sense strand starting at position 3605 of SEQ ID NO: 1997
acacuugaaguguguuaga

SEQ ID NO: 155415 - RNA, 19 nt, Artificial Sequence
  Description of Artificial Sequence: Synthetic oligonucleotide
  Antisense strand to SEQ ID NO: 155414
ucuaacacacuucaagugu

SEQ ID NO: 155416 - RNA, 19 nt, Artificial Sequence
  Description of Artificial Sequence: Synthetic oligonucleotide
  Sense strand starting at position 3616 of SEQ ID NO: 1997
guguuagaugcugugcuua

SEQ ID NO: 155417 - RNA, 19 nt, Artificial Sequence
  Description of Artificial Sequence: Synthetic oligonucleotide
  Antisense strand to SEQ ID NO: 155416
uaagcacagcaucuaacac

SEQ ID NO: 155418 - RNA, 19 nt, Artificial Sequence
  Description of Artificial Sequence: Synthetic oligonucleotide
  Sense strand starting at position 3618 of SEQ ID NO: 1997
guuagaugcugugcuuaac

SEQ ID NO: 155419 - RNA, 19 nt, Artificial Sequence
  Description of Artificial Sequence: Synthetic oligonucleotide
  Antisense strand to SEQ ID NO: 155418
guuaagcacagcaucuaac

SEQ ID NO: 155420 - RNA, 19 nt, Artificial Sequence
  Description of Artificial Sequence: Synthetic oligonucleotide
  Sense strand starting at position 3663 of SEQ ID NO: 1997
ccagaagagcuuugucacu

SEQ ID NO: 155421 - RNA, 19 nt, Artificial Sequence
  Description of Artificial Sequence: Synthetic oligonucleotide
  Antisense strand to SEQ ID NO: 155420
agugacaaagcucuucugg

SEQ ID NO: 155422 - RNA, 19 nt, Artificial Sequence
  Description of Artificial Sequence: Synthetic oligonucleotide
  Sense strand starting at position 3665 of SEQ ID NO: 1997
agaagagcuuugucacucu

SEQ ID NO: 155423 - RNA, 19 nt, Artificial Sequence
  Description of Artificial Sequence: Synthetic oligonucleotide
  Antisense strand to SEQ ID NO: 155422
agagugacaaagcucuucu

SEQ ID NO: 155424 - RNA, 19 nt, Artificial Sequence
  Description of Artificial Sequence: Synthetic oligonucleotide
  Sense strand starting at position 3687 of SEQ ID NO: 1997
agccaauccugagaaggaa

SEQ ID NO: 155425 - RNA, 19 nt, Artificial Sequence
  Description of Artificial Sequence: Synthetic oligonucleotide
  Antisense strand to SEQ ID NO: 155424
uuccuucucaggauuggcu

SEQ ID NO: 155426 - RNA, 19 nt, Artificial Sequence
  Description of Artificial Sequence: Synthetic oligonucleotide
  Sense strand starting at position 3751 of SEQ ID NO: 1997
aggaaaggauuccaccaua

SEQ ID NO: 155427 - RNA, 19 nt, Artificial Sequence
  Description of Artificial Sequence: Synthetic oligonucleotide
  Antisense strand to SEQ ID NO: 155426
uaugguggaauccuuuccu

SEQ ID NO: 155428 - RNA, 19 nt, Artificial Sequence
  Description of Artificial Sequence: Synthetic oligonucleotide
  Sense strand starting at position 3807 of SEQ ID NO: 1997
ugucccucaucuguagaga

SEQ ID NO: 155429 - RNA, 19 nt, Artificial Sequence
  Description of Artificial Sequence: Synthetic oligonucleotide
  Antisense strand to SEQ ID NO: 155428
ucucuacagaugagggaca

SEQ ID NO: 155430 - RNA, 19 nt, Artificial Sequence
  Description of Artificial Sequence: Synthetic oligonucleotide
  Sense strand starting at position 3808 of SEQ ID NO: 1997
gucccucaucuguagagau

SEQ ID NO: 155431 - RNA, 19 nt, Artificial Sequence
  Description of Artificial Sequence: Synthetic oligonucleotide
  Antisense strand to SEQ ID NO: 155430
aucucuacagaugagggac

SEQ ID NO: 155432 - RNA, 19 nt, Artificial Sequence
  Description of Artificial Sequence: Synthetic oligonucleotide
  Sense strand starting at position 3823 of SEQ ID NO: 1997
agaugauguucugugggag

SEQ ID NO: 155433 - RNA, 19 nt, Artificial Sequence
  Description of Artificial Sequence: Synthetic oligonucleotide
  Antisense strand to SEQ ID NO: 155432
cucccacagaacaucaucu

SEQ ID NO: 155434 - RNA, 19 nt, Artificial Sequence
  Description of Artificial Sequence: Synthetic oligonucleotide
  Sense strand starting at position 3946 of SEQ ID NO: 1997
acuggaaguccaggugauu

SEQ ID NO: 155435 - RNA, 19 nt, Artificial Sequence
  Description of Artificial Sequence: Synthetic oligonucleotide
  Antisense strand to SEQ ID NO: 155434
aaucaccuggacuuccagu

SEQ ID NO: 155436 - RNA, 19 nt, Artificial Sequence
  Description of Artificial Sequence: Synthetic oligonucleotide
  Sense strand starting at position 71 of SEQ ID NO: 1998
ugucccucaucuguagaga

SEQ ID NO: 155437 - RNA, 19 nt, Artificial Sequence
  Description of Artificial Sequence: Synthetic oligonucleotide
  Antisense strand to SEQ ID NO: 155436
ucucuacagaugagggaca

SEQ ID NO: 155438 - RNA, 19 nt, Artificial Sequence
  Description of Artificial Sequence: Synthetic oligonucleotide
  Sense strand starting at position 72 of SEQ ID NO: 1998
gucccucaucuguagagau

SEQ ID NO: 155439 - RNA, 19 nt, Artificial Sequence
  Description of Artificial Sequence: Synthetic oligonucleotide
  Antisense strand to SEQ ID NO: 155438
aucucuacagaugagggac

SEQ ID NO: 155440 - RNA, 19 nt, Artificial Sequence
  Description of Artificial Sequence: Synthetic oligonucleotide
  Sense strand starting at position 87 of SEQ ID NO: 1998
agaugauguucugugggag

SEQ ID NO: 155441 - RNA, 19 nt, Artificial Sequence
  Description of Artificial Sequence: Synthetic oligonucleotide
  Antisense strand to SEQ ID NO: 155440
cucccacagaacaucaucu

SEQ ID NO: 155442 - RNA, 19 nt, Artificial Sequence
  Description of Artificial Sequence: Synthetic oligonucleotide
  Sense strand starting at position 210 of SEQ ID NO: 1998
acuggaaguccaggugauu

SEQ ID NO: 155443 - RNA, 19 nt, Artificial Sequence
  Description of Artificial Sequence: Synthetic oligonucleotide
  Antisense strand to SEQ ID NO: 155442
aaucaccuggacuuccagu

SEQ ID NO: 155444 - RNA, 19 nt, Artificial Sequence
  Description of Artificial Sequence: Synthetic oligonucleotide
  Sense strand starting at position 305 of SEQ ID NO: 1998
uggcgaaagccucaggaau

SEQ ID NO: 155445 - RNA, 19 nt, Artificial Sequence
  Description of Artificial Sequence: Synthetic oligonucleotide
  Antisense strand to SEQ ID NO: 155444
auuccugaggcuuucgcca

SEQ ID NO: 155446 - RNA, 19 nt, Artificial Sequence
  Description of Artificial Sequence: Synthetic oligonucleotide
  Sense strand starting at position 563 of SEQ ID NO: 1998
auccacuuaugucuaggaa

SEQ ID NO: 155447 - RNA, 19 nt, Artificial Sequence
  Description of Artificial Sequence: Synthetic oligonucleotide
  Antisense strand to SEQ ID NO: 155446
uuccuagacauaaguggau

SEQ ID NO: 155448 - RNA, 19 nt, Artificial Sequence
  Description of Artificial Sequence: Synthetic oligonucleotide
  Sense strand starting at position 591 of SEQ ID NO: 1998
cuacuucugggaugagguu

SEQ ID NO: 155449 - RNA, 19 nt, Artificial Sequence
  Description of Artificial Sequence: Synthetic oligonucleotide
  Antisense strand to SEQ ID NO: 155448
aaccucaucccagaaguag

SEQ ID NO: 155450 - RNA, 19 nt, Artificial Sequence
  Description of Artificial Sequence: Synthetic oligonucleotide
  Sense strand starting at position 706 of SEQ ID NO: 1998
uaguucuacccuuggagga

SEQ ID NO: 155451 - RNA, 19 nt, Artificial Sequence
  Description of Artificial Sequence: Synthetic oligonucleotide
  Antisense strand to SEQ ID NO: 155450
uccuccaaggguagaacua

SEQ ID NO: 155452 - RNA, 19 nt, Artificial Sequence
  Description of Artificial Sequence: Synthetic oligonucleotide
  Sense strand starting at position 1331 of SEQ ID NO: 1998
gacagucagacguggauua

SEQ ID NO: 155453 - RNA, 19 nt, Artificial Sequence
  Description of Artificial Sequence: Synthetic oligonucleotide
  Antisense strand to SEQ ID NO: 155452
uaauccacgucugacuguc

SEQ ID NO: 155454 - RNA, 19 nt, Artificial Sequence
  Description of Artificial Sequence: Synthetic oligonucleotide
  Sense strand starting at position 1392 of SEQ ID NO: 1998
cgaaucguucuuugaagag

SEQ ID NO: 155455 - RNA, 19 nt, Artificial Sequence
  Description of Artificial Sequence: Synthetic oligonucleotide
  Antisense strand to SEQ ID NO: 155454
cucuucaaagaacgauucg

SEQ ID NO: 155456 - RNA, 19 nt, Artificial Sequence
  Description of Artificial Sequence: Synthetic oligonucleotide
  Sense strand starting at position 1445 of SEQ ID NO: 1998
acaggaguuagccgaggau

SEQ ID NO: 155457 - RNA, 19 nt, Artificial Sequence
  Description of Artificial Sequence: Synthetic oligonucleotide
  Antisense strand to SEQ ID NO: 155456
auccucggcuaacuccugu

SEQ ID NO: 155458 - RNA, 19 nt, Artificial Sequence
  Description of Artificial Sequence: Synthetic oligonucleotide
  Sense strand starting at position 1477 of SEQ ID NO: 1998
cggaguuucggagaaugga

SEQ ID NO: 155459 - RNA, 19 nt, Artificial Sequence
  Description of Artificial Sequence: Synthetic oligonucleotide
  Antisense strand to SEQ ID NO: 155458
uccauucuccgaaacuccg

SEQ ID NO: 155460 - RNA, 19 nt, Artificial Sequence
  Description of Artificial Sequence: Synthetic oligonucleotide
  Sense strand starting at position 1497 of SEQ ID NO: 1998
ggaguaacgaaggguuucu

SEQ ID NO: 155461 - RNA, 19 nt, Artificial Sequence
  Description of Artificial Sequence: Synthetic oligonucleotide
  Antisense strand to SEQ ID NO: 155460
agaaacccuucguuacucc

SEQ ID NO: 155462 - RNA, 19 nt, Artificial Sequence
  Description of Artificial Sequence: Synthetic oligonucleotide
  Sense strand starting at position 1862 of SEQ ID NO: 1998
cccugccucccuggagaaa

SEQ ID NO: 155463 - RNA, 19 nt, Artificial Sequence
  Description of Artificial Sequence: Synthetic oligonucleotide
  Antisense strand to SEQ ID NO: 155462
uuucuccagggaggcaggg

SEQ ID NO: 155464 - RNA, 19 nt, Artificial Sequence
  Description of Artificial Sequence: Synthetic oligonucleotide
  Sense strand starting at position 1976 of SEQ ID NO: 1998
gcgcgagaucgcgcacaaa

SEQ ID NO: 155465 - RNA, 19 nt, Artificial Sequence
  Description of Artificial Sequence: Synthetic oligonucleotide
  Antisense strand to SEQ ID NO: 155464
uuugugcgcgaucucgcgc

SEQ ID NO: 155466 - RNA, 19 nt, Artificial Sequence
  Description of Artificial Sequence: Synthetic oligonucleotide
  Sense strand starting at position 2156 of SEQ ID NO: 1998
gcgggcggcguguuugaaa

SEQ ID NO: 155467 - RNA, 19 nt, Artificial Sequence
  Description of Artificial Sequence: Synthetic oligonucleotide
  Antisense strand to SEQ ID NO: 155466
uuucaaacacgccgcccgc

SEQ ID NO: 155468 - RNA, 19 nt, Artificial Sequence
  Description of Artificial Sequence: Synthetic oligonucleotide
  Sense strand starting at position 2500 of SEQ ID NO: 1998
aaacaaagugguugcgaau

SEQ ID NO: 155469 - RNA, 19 nt, Artificial Sequence
  Description of Artificial Sequence: Synthetic oligonucleotide
  Antisense strand to SEQ ID NO: 155468
auucgcaaccacuuuguuu

SEQ ID NO: 155470 - RNA, 19 nt, Artificial Sequence
  Description of Artificial Sequence: Synthetic oligonucleotide
  Sense strand starting at position 2584 of SEQ ID NO: 1998
ccaugaggcuuucuggauc

SEQ ID NO: 155471 - RNA, 19 nt, Artificial Sequence
  Description of Artificial Sequence: Synthetic oligonucleotide
  Antisense strand to SEQ ID NO: 155470
gauccagaaagccucaugg

SEQ ID NO: 155472 - RNA, 19 nt, Artificial Sequence
  Description of Artificial Sequence: Synthetic oligonucleotide
  Sense strand starting at position 2587 of SEQ ID NO: 1998
ugaggcuuucuggaucauu

SEQ ID NO: 155473 - RNA, 19 nt, Artificial Sequence
  Description of Artificial Sequence: Synthetic oligonucleotide
  Antisense strand to SEQ ID NO: 155472
aaugauccagaaagccuca

SEQ ID NO: 155474 - RNA, 19 nt, Artificial Sequence
  Description of Artificial Sequence: Synthetic oligonucleotide
  Sense strand starting at position 2595 of SEQ ID NO: 1998
ucuggaucauucucugaac

SEQ ID NO: 155475 - RNA, 19 nt, Artificial Sequence
  Description of Artificial Sequence: Synthetic oligonucleotide
  Antisense strand to SEQ ID NO: 155474
guucagagaaugauccaga

SEQ ID NO: 155476 - RNA, 19 nt, Artificial Sequence
  Description of Artificial Sequence: Synthetic oligonucleotide
  Sense strand starting at position 2596 of SEQ ID NO: 1998
cuggaucauucucugaacu

SEQ ID NO: 155477 - RNA, 19 nt, Artificial Sequence
  Description of Artificial Sequence: Synthetic oligonucleotide
  Antisense strand to SEQ ID NO: 155476
aguucagagaaugauccag

SEQ ID NO: 155478 - RNA, 19 nt, Artificial Sequence
  Description of Artificial Sequence: Synthetic oligonucleotide
  Sense strand starting at position 2597 of SEQ ID NO: 1998
uggaucauucucugaacuu

SEQ ID NO: 155479 - RNA, 19 nt, Artificial Sequence
  Description of Artificial Sequence: Synthetic oligonucleotide
  Antisense strand to SEQ ID NO: 155478
aaguucagagaaugaucca

SEQ ID NO: 155480 - RNA, 19 nt, Artificial Sequence
  Description of Artificial Sequence: Synthetic oligonucleotide
  Sense strand starting at position 2654 of SEQ ID NO: 1998
acaguaaucuugucgaauc

SEQ ID NO: 155481 - RNA, 19 nt, Artificial Sequence
  Description of Artificial Sequence: Synthetic oligonucleotide
  Antisense strand to SEQ ID NO: 155480
gauucgacaagauuacugu

SEQ ID NO: 155482 - RNA, 19 nt, Artificial Sequence
  Description of Artificial Sequence: Synthetic oligonucleotide
  Sense strand starting at position 2656 of SEQ ID NO: 1998
aguaaucuugucgaaucca

SEQ ID NO: 155483 - RNA, 19 nt, Artificial Sequence
  Description of Artificial Sequence: Synthetic oligonucleotide
  Antisense strand to SEQ ID NO: 155482
uggauucgacaagauuacu

SEQ ID NO: 155484 - RNA, 19 nt, Artificial Sequence
  Description of Artificial Sequence: Synthetic oligonucleotide
  Sense strand starting at position 2664 of SEQ ID NO: 1998
ugucgaauccagugggaga

SEQ ID NO: 155485 - RNA, 19 nt, Artificial Sequence
  Description of Artificial Sequence: Synthetic oligonucleotide
  Antisense strand to SEQ ID NO: 155484
ucucccacuggauucgaca

SEQ ID NO: 155486 - RNA, 19 nt, Artificial Sequence
  Description of Artificial Sequence: Synthetic oligonucleotide
  Sense strand starting at position 2665 of SEQ ID NO: 1998
gucgaauccagugggagaa

SEQ ID NO: 155487 - RNA, 19 nt, Artificial Sequence
  Description of Artificial Sequence: Synthetic oligonucleotide
  Antisense strand to SEQ ID NO: 155486
uucucccacuggauucgac

SEQ ID NO: 155488 - RNA, 19 nt, Artificial Sequence
  Description of Artificial Sequence: Synthetic oligonucleotide
  Sense strand starting at position 2726 of SEQ ID NO: 1998
ggagaguagcgcugagaga

SEQ ID NO: 155489 - RNA, 19 nt, Artificial Sequence
  Description of Artificial Sequence: Synthetic oligonucleotide
  Antisense strand to SEQ ID NO: 155488
ucucucagcgcuacucucc

SEQ ID NO: 155490 - RNA, 19 nt, Artificial Sequence
  Description of Artificial Sequence: Synthetic oligonucleotide
  Sense strand starting at position 2735 of SEQ ID NO: 1998
cgcugagagaguugaauau

SEQ ID NO: 155491 - RNA, 19 nt, Artificial Sequence
  Description of Artificial Sequence: Synthetic oligonucleotide
  Antisense strand to SEQ ID NO: 155490
auauucaacucucucagcg

SEQ ID NO: 155492 - RNA, 19 nt, Artificial Sequence
  Description of Artificial Sequence: Synthetic oligonucleotide
  Sense strand starting at position 2819 of SEQ ID NO: 1998
uugggacugcaauggaaua

SEQ ID NO: 155493 - RNA, 19 nt, Artificial Sequence
  Description of Artificial Sequence: Synthetic oligonucleotide
  Antisense strand to SEQ ID NO: 155492
uauuccauugcagucccaa

SEQ ID NO: 155494 - RNA, 19 nt, Artificial Sequence
  Description of Artificial Sequence: Synthetic oligonucleotide
  Sense strand starting at position 2873 of SEQ ID NO: 1998
gggucuaauagaugcccuu

SEQ ID NO: 155495 - RNA, 19 nt, Artificial Sequence
  Description of Artificial Sequence: Synthetic oligonucleotide
  Antisense strand to SEQ ID NO: 155494
aagggcaucuauuagaccc

SEQ ID NO: 155496 - RNA, 19 nt, Artificial Sequence
  Description of Artificial Sequence: Synthetic oligonucleotide
  Sense strand starting at position 3043 of SEQ ID NO: 1998
gagccauuacaggguguga

SEQ ID NO: 155497 - RNA, 19 nt, Artificial Sequence
  Description of Artificial Sequence: Synthetic oligonucleotide
  Antisense strand to SEQ ID NO: 155496
ucacacccuguaauggcuc

SEQ ID NO: 155498 - RNA, 19 nt, Artificial Sequence
  Description of Artificial Sequence: Synthetic oligonucleotide
  Sense strand starting at position 3376 of SEQ ID NO: 1998
auuuauaugucggagauaa

SEQ ID NO: 155499 - RNA, 19 nt, Artificial Sequence
  Description of Artificial Sequence: Synthetic oligonucleotide
  Antisense strand to SEQ ID NO: 155498
uuaucuccgacauauaaau

SEQ ID NO: 155500 - RNA, 19 nt, Artificial Sequence
  Description of Artificial Sequence: Synthetic oligonucleotide
  Sense strand starting at position 3639 of SEQ ID NO: 1998
gaaagcuuccuagagggca

SEQ ID NO: 155501 - RNA, 19 nt, Artificial Sequence
  Description of Artificial Sequence: Synthetic oligonucleotide
  Antisense strand to SEQ ID NO: 155500
ugcccucuaggaagcuuuc

SEQ ID NO: 155502 - RNA, 19 nt, Artificial Sequence
  Description of Artificial Sequence: Synthetic oligonucleotide
  Sense strand starting at position 3699 of SEQ ID NO: 1998
agcaccucuugacugaaau

SEQ ID NO: 155503 - RNA, 19 nt, Artificial Sequence
  Description of Artificial Sequence: Synthetic oligonucleotide
  Antisense strand to SEQ ID NO: 155502
auuucagucaagaggugcu

SEQ ID NO: 155504 - RNA, 19 nt, Artificial Sequence
  Description of Artificial Sequence: Synthetic oligonucleotide
  Sense strand starting at position 3700 of SEQ ID NO: 1998
gcaccucuugacugaaauu

SEQ ID NO: 155505 - RNA, 19 nt, Artificial Sequence
  Description of Artificial Sequence: Synthetic oligonucleotide
  Antisense strand to SEQ ID NO: 155504
aauuucagucaagaggugc

SEQ ID NO: 155506 - RNA, 19 nt, Artificial Sequence
  Description of Artificial Sequence: Synthetic oligonucleotide
  Sense strand starting at position 3784 of SEQ ID NO: 1998
gcauucgggcuugauaaau

SEQ ID NO: 155507 - RNA, 19 nt, Artificial Sequence
  Description of Artificial Sequence: Synthetic oligonucleotide
  Antisense strand to SEQ ID NO: 155506
auuuaucaagcccgaaugc

SEQ ID NO: 155508 - RNA, 19 nt, Artificial Sequence
  Description of Artificial Sequence: Synthetic oligonucleotide
  Sense strand starting at position 3804 of SEQ ID NO: 1998
uuaagugcauaaucuagau

SEQ ID NO: 155509 - RNA, 19 nt, Artificial Sequence
  Description of Artificial Sequence: Synthetic oligonucleotide
  Antisense strand to SEQ ID NO: 155508
aucuagauuaugcacuuaa

SEQ ID NO: 155510 - RNA, 19 nt, Artificial Sequence
  Description of Artificial Sequence: Synthetic oligonucleotide
  Sense strand starting at position 3814 of SEQ ID NO: 1998
aaucuagauugggaauaag

SEQ ID NO: 155511 - RNA, 19 nt, Artificial Sequence
  Description of Artificial Sequence: Synthetic oligonucleotide
  Antisense strand to SEQ ID NO: 155510
cuuauucccaaucuagauu

SEQ ID NO: 155512 - RNA, 19 nt, Artificial Sequence
  Description of Artificial Sequence: Synthetic oligonucleotide
  Sense strand starting at position 3848 of SEQ ID NO: 1998
ccacaaauguuggcauuau

SEQ ID NO: 155513 - RNA, 19 nt, Artificial Sequence
  Description of Artificial Sequence: Synthetic oligonucleotide
  Antisense strand to SEQ ID NO: 155512
auaaugccaacauuugugg

SEQ ID NO: 155514 - RNA, 19 nt, Artificial Sequence
  Description of Artificial Sequence: Synthetic oligonucleotide
  Sense strand starting at position 3917 of SEQ ID NO: 1998
ugucuccucaguuggagaa

SEQ ID NO: 155515 - RNA, 19 nt, Artificial Sequence
  Description of Artificial Sequence: Synthetic oligonucleotide
  Antisense strand to SEQ ID NO: 155514
uucuccaacugaggagaca

SEQ ID NO: 155516 - RNA, 19 nt, Artificial Sequence
  Description of Artificial Sequence: Synthetic oligonucleotide
  Sense strand starting at position 39 of SEQ ID NO: 1999
gcaucuucugccuaacaag

SEQ ID NO: 155517 - RNA, 19 nt, Artificial Sequence
  Description of Artificial Sequence: Synthetic oligonucleotide
  Antisense strand to SEQ ID NO: 155516
cuuguuaggcagaagaugc

SEQ ID NO: 155518 - RNA, 19 nt, Artificial Sequence
  Description of Artificial Sequence: Synthetic oligonucleotide
  Sense strand starting at position 279 of SEQ ID NO: 1999
uaagacagcuaguuauugu

SEQ ID NO: 155519 - RNA, 19 nt, Artificial Sequence
  Description of Artificial Sequence: Synthetic oligonucleotide
  Antisense strand to SEQ ID NO: 155518
acaauaacuagcugucuua

SEQ ID NO: 155520 - RNA, 19 nt, Artificial Sequence
  Description of Artificial Sequence: Synthetic oligonucleotide
  Sense strand starting at position 282 of SEQ ID NO: 1999
gacagcuaguuauuguuua

SEQ ID NO: 155521 - RNA, 19 nt, Artificial Sequence
  Description of Artificial Sequence: Synthetic oligonucleotide
  Antisense strand to SEQ ID NO: 155520
uaaacaauaacuagcuguc

SEQ ID NO: 155522 - RNA, 19 nt, Artificial Sequence
  Description of Artificial Sequence: Synthetic oligonucleotide
  Sense strand starting at position 287 of SEQ ID NO: 1999
cuaguuauuguuuaugucu

SEQ ID NO: 155523 - RNA, 19 nt, Artificial Sequence
  Description of Artificial Sequence: Synthetic oligonucleotide
  Antisense strand to SEQ ID NO: 155522
agacauaaacaauaacuag

SEQ ID NO: 155524 - RNA, 19 nt, Artificial Sequence
  Description of Artificial Sequence: Synthetic oligonucleotide
  Sense strand starting at position 326 of SEQ ID NO: 1999
auaucacugcagugaauau

SEQ ID NO: 155525 - RNA, 19 nt, Artificial Sequence
  Description of Artificial Sequence: Synthetic oligonucleotide
  Antisense strand to SEQ ID NO: 155524
auauucacugcagugauau

SEQ ID NO: 155526 - RNA, 19 nt, Artificial Sequence
  Description of Artificial Sequence: Synthetic oligonucleotide
  Sense strand starting at position 956 of SEQ ID NO: 1999
ucuuacucauguuuggaca

SEQ ID NO: 155527 - RNA, 19 nt, Artificial Sequence
  Description of Artificial Sequence: Synthetic oligonucleotide
  Antisense strand to SEQ ID NO: 155526
uguccaaacaugaguaaga

SEQ ID NO: 155528 - RNA, 19 nt, Artificial Sequence
  Description of Artificial Sequence: Synthetic oligonucleotide
  Sense strand starting at position 957 of SEQ ID NO: 1999
cuuacucauguuuggacau

SEQ ID NO: 155529 - RNA, 19 nt, Artificial Sequence
  Description of Artificial Sequence: Synthetic oligonucleotide
  Antisense strand to SEQ ID NO: 155528
auguccaaacaugaguaag

SEQ ID NO: 155530 - RNA, 19 nt, Artificial Sequence
  Description of Artificial Sequence: Synthetic oligonucleotide
  Sense strand starting at position 1004 of SEQ ID NO: 1999
augccugugcaaugauaag

SEQ ID NO: 155531 - RNA, 19 nt, Artificial Sequence
  Description of Artificial Sequence: Synthetic oligonucleotide
  Antisense strand to SEQ ID NO: 155530
cuuaucauugcacaggcau

SEQ ID NO: 155532 - RNA, 19 nt, Artificial Sequence
  Description of Artificial Sequence: Synthetic oligonucleotide
  Sense strand starting at position 1150 of SEQ ID NO: 1999
aggugaacgcucuauacau

SEQ ID NO: 155533 - RNA, 19 nt, Artificial Sequence
  Description of Artificial Sequence: Synthetic oligonucleotide
  Antisense strand to SEQ ID NO: 155532
auguauagagcguucaccu

SEQ ID NO: 155534 - RNA, 19 nt, Artificial Sequence
  Description of Artificial Sequence: Synthetic oligonucleotide
  Sense strand starting at position 1152 of SEQ ID NO: 1999
gugaacgcucuauacaugu

SEQ ID NO: 155535 - RNA, 19 nt, Artificial Sequence
  Description of Artificial Sequence: Synthetic oligonucleotide
  Antisense strand to SEQ ID NO: 155534
acauguauagagcguucac

SEQ ID NO: 155536 - RNA, 19 nt, Artificial Sequence
  Description of Artificial Sequence: Synthetic oligonucleotide
  Sense strand starting at position 2159 of SEQ ID NO: 1999
gggugauuaugagucaccu

SEQ ID NO: 155537 - RNA, 19 nt, Artificial Sequence
  Description of Artificial Sequence: Synthetic oligonucleotide
  Antisense strand to SEQ ID NO: 155536
aggugacucauaaucaccc

SEQ ID NO: 155538 - RNA, 19 nt, Artificial Sequence
  Description of Artificial Sequence: Synthetic oligonucleotide
  Sense strand starting at position 2296 of SEQ ID NO: 1999
aggaaacccuagugacaaa

SEQ ID NO: 155539 - RNA, 19 nt, Artificial Sequence
  Description of Artificial Sequence: Synthetic oligonucleotide
  Antisense strand to SEQ ID NO: 155538
uuugucacuaggguuuccu

SEQ ID NO: 155540 - RNA, 19 nt, Artificial Sequence
  Description of Artificial Sequence: Synthetic oligonucleotide
  Sense strand starting at position 2409 of SEQ ID NO: 1999
ccaagauguggucauacca

SEQ ID NO: 155541 - RNA, 19 nt, Artificial Sequence
  Description of Artificial Sequence: Synthetic oligonucleotide
  Antisense strand to SEQ ID NO: 155540
ugguaugaccacaucuugg

SEQ ID NO: 155542 - RNA, 19 nt, Artificial Sequence
  Description of Artificial Sequence: Synthetic oligonucleotide
  Sense strand starting at position 2428 of SEQ ID NO: 1999
aggagaaguuagucuguuu

SEQ ID NO: 155543 - RNA, 19 nt, Artificial Sequence
  Description of Artificial Sequence: Synthetic oligonucleotide
  Antisense strand to SEQ ID NO: 155542
aaacagacuaacuucuccu

SEQ ID NO: 155544 - RNA, 19 nt, Artificial Sequence
  Description of Artificial Sequence: Synthetic oligonucleotide
  Sense strand starting at position 2527 of SEQ ID NO: 1999
cugggagugaugugugcaa

SEQ ID NO: 155545 - RNA, 19 nt, Artificial Sequence
  Description of Artificial Sequence: Synthetic oligonucleotide
  Antisense strand to SEQ ID NO: 155544
uugcacacaucacucccag

SEQ ID NO: 155546 - RNA, 19 nt, Artificial Sequence
  Description of Artificial Sequence: Synthetic oligonucleotide
  Sense strand starting at position 2529 of SEQ ID NO: 1999
gggagugaugugugcaaac

SEQ ID NO: 155547 - RNA, 19 nt, Artificial Sequence
  Description of Artificial Sequence: Synthetic oligonucleotide
  Antisense strand to SEQ ID NO: 155546
guuugcacacaucacuccc

SEQ ID NO: 155548 - RNA, 19 nt, Artificial Sequence
  Description of Artificial Sequence: Synthetic oligonucleotide
  Sense strand starting at position 2531 of SEQ ID NO: 1999
gagugaugugugcaaacua

SEQ ID NO: 155549 - RNA, 19 nt, Artificial Sequence
  Description of Artificial Sequence: Synthetic oligonucleotide
  Antisense strand to SEQ ID NO: 155548
uaguuugcacacaucacuc

SEQ ID NO: 155550 - RNA, 19 nt, Artificial Sequence
  Description of Artificial Sequence: Synthetic oligonucleotide
  Sense strand starting at position 2571 of SEQ ID NO: 1999
ucuguuccagaucauacau

SEQ ID NO: 155551 - RNA, 19 nt, Artificial Sequence
  Description of Artificial Sequence: Synthetic oligonucleotide
  Antisense strand to SEQ ID NO: 155550
auguaugaucuggaacaga

SEQ ID NO: 155552 - RNA, 19 nt, Artificial Sequence
  Description of Artificial Sequence: Synthetic oligonucleotide
  Sense strand starting at position 2573 of SEQ ID NO: 1999
uguuccagaucauacauuu

SEQ ID NO: 155553 - RNA, 19 nt, Artificial Sequence
  Description of Artificial Sequence: Synthetic oligonucleotide
  Antisense strand to SEQ ID NO: 155552
aaauguaugaucuggaaca

SEQ ID NO: 155554 - RNA, 19 nt, Artificial Sequence
  Description of Artificial Sequence: Synthetic oligonucleotide
  Sense strand starting at position 2608 of SEQ ID NO: 1999
ccacucacuucugguauuu

SEQ ID NO: 155555 - RNA, 19 nt, Artificial Sequence
  Description of Artificial Sequence: Synthetic oligonucleotide
  Antisense strand to SEQ ID NO: 155554
aaauaccagaagugagugg

SEQ ID NO: 155556 - RNA, 19 nt, Artificial Sequence
  Description of Artificial Sequence: Synthetic oligonucleotide
  Sense strand starting at position 2647 of SEQ ID NO: 1999
gccaauuggaauuaacguu

SEQ ID NO: 155557 - RNA, 19 nt, Artificial Sequence
  Description of Artificial Sequence: Synthetic oligonucleotide
  Antisense strand to SEQ ID NO: 155556
aacguuaauuccaauuggc

SEQ ID NO: 155558 - RNA, 19 nt, Artificial Sequence
  Description of Artificial Sequence: Synthetic oligonucleotide
  Sense strand starting at position 2681 of SEQ ID NO: 1999
ugugaaauacugcacugaa

SEQ ID NO: 155559 - RNA, 19 nt, Artificial Sequence
  Description of Artificial Sequence: Synthetic oligonucleotide
  Antisense strand to SEQ ID NO: 155558
uucagugcaguauuucaca

SEQ ID NO: 155560 - RNA, 19 nt, Artificial Sequence
  Description of Artificial Sequence: Synthetic oligonucleotide
  Sense strand starting at position 3129 of SEQ ID NO: 1999
guuacuguaguuuagggaa

SEQ ID NO: 155561 - RNA, 19 nt, Artificial Sequence
  Description of Artificial Sequence: Synthetic oligonucleotide
  Antisense strand to SEQ ID NO: 155560
uucccuaaacuacaguaac

SEQ ID NO: 155562 - RNA, 19 nt, Artificial Sequence
  Description of Artificial Sequence: Synthetic oligonucleotide
  Sense strand starting at position 3186 of SEQ ID NO: 1999
uuuauuccuuucguugagu

SEQ ID NO: 155563 - RNA, 19 nt, Artificial Sequence
  Description of Artificial Sequence: Synthetic oligonucleotide
  Antisense strand to SEQ ID NO: 155562
acucaacgaaaggaauaaa

SEQ ID NO: 155564 - RNA, 19 nt, Artificial Sequence
  Description of Artificial Sequence: Synthetic oligonucleotide
  Sense strand starting at position 3197 of SEQ ID NO: 1999
cguugaguccuggacuuug

SEQ ID NO: 155565 - RNA, 19 nt, Artificial Sequence
  Description of Artificial Sequence: Synthetic oligonucleotide
  Antisense strand to SEQ ID NO: 155564
caaaguccaggacucaacg

SEQ ID NO: 155566 - RNA, 19 nt, Artificial Sequence
  Description of Artificial Sequence: Synthetic oligonucleotide
  Sense strand starting at position 3205 of SEQ ID NO: 1999
ccuggacuuuguuuauaac

SEQ ID NO: 155567 - RNA, 19 nt, Artificial Sequence
  Description of Artificial Sequence: Synthetic oligonucleotide
  Antisense strand to SEQ ID NO: 155566
guuauaaacaaaguccagg

SEQ ID NO: 155568 - RNA, 19 nt, Artificial Sequence
  Description of Artificial Sequence: Synthetic oligonucleotide
  Sense strand starting at position 3206 of SEQ ID NO: 1999
cuggacuuuguuuauaaca

SEQ ID NO: 155569 - RNA, 19 nt, Artificial Sequence
  Description of Artificial Sequence: Synthetic oligonucleotide
  Antisense strand to SEQ ID NO: 155568
uguuauaaacaaaguccag

SEQ ID NO: 155570 - RNA, 19 nt, Artificial Sequence
  Description of Artificial Sequence: Synthetic oligonucleotide
  Sense strand starting at position 3316 of SEQ ID NO: 1999
uuuaauucuuagguucuga

SEQ ID NO: 155571 - RNA, 19 nt, Artificial Sequence
  Description of Artificial Sequence: Synthetic oligonucleotide
  Antisense strand to SEQ ID NO: 155570
ucagaaccuaagaauuaaa

SEQ ID NO: 155572 - RNA, 19 nt, Artificial Sequence
  Description of Artificial Sequence: Synthetic oligonucleotide
  Sense strand starting at position 3327 of SEQ ID NO: 1999
gguucugaauaauaaagac

SEQ ID NO: 155573 - RNA, 19 nt, Artificial Sequence
  Description of Artificial Sequence: Synthetic oligonucleotide
  Antisense strand to SEQ ID NO: 155572
gucuuuauuauucagaacc

SEQ ID NO: 155574 - RNA, 19 nt, Artificial Sequence
  Description of Artificial Sequence: Synthetic oligonucleotide
  Sense strand starting at position 3400 of SEQ ID NO: 1999
ggcaaauacuuguuagaaa

SEQ ID NO: 155575 - RNA, 19 nt, Artificial Sequence
  Description of Artificial Sequence: Synthetic oligonucleotide
  Antisense strand to SEQ ID NO: 155574
uuucuaacaaguauuugcc

SEQ ID NO: 155576 - RNA, 19 nt, Artificial Sequence
  Description of Artificial Sequence: Synthetic oligonucleotide
  Sense strand starting at position 3447 of SEQ ID NO: 1999
gccacaguuauagagguaa

SEQ ID NO: 155577 - RNA, 19 nt, Artificial Sequence
  Description of Artificial Sequence: Synthetic oligonucleotide
  Antisense strand to SEQ ID NO: 155576
uuaccucuauaacuguggc

SEQ ID NO: 155578 - RNA, 19 nt, Artificial Sequence
  Description of Artificial Sequence: Synthetic oligonucleotide
  Sense strand starting at position 3485 of SEQ ID NO: 1999
cguaauccuagugaaagau

SEQ ID NO: 155579 - RNA, 19 nt, Artificial Sequence
  Description of Artificial Sequence: Synthetic oligonucleotide
  Antisense strand to SEQ ID NO: 155578
aucuuucacuaggauuacg

SEQ ID NO: 155580 - RNA, 19 nt, Artificial Sequence
  Description of Artificial Sequence: Synthetic oligonucleotide
  Sense strand starting at position 3512 of SEQ ID NO: 1999
gucaguagaugauuguguu

SEQ ID NO: 155581 - RNA, 19 nt, Artificial Sequence
  Description of Artificial Sequence: Synthetic oligonucleotide
  Antisense strand to SEQ ID NO: 155580
aacacaaucaucuacugac

SEQ ID NO: 155582 - RNA, 19 nt, Artificial Sequence
  Description of Artificial Sequence: Synthetic oligonucleotide
  Sense strand starting at position 3518 of SEQ ID NO: 1999
agaugauuguguuugguaa

SEQ ID NO: 155583 - RNA, 19 nt, Artificial Sequence
  Description of Artificial Sequence: Synthetic oligonucleotide
  Antisense strand to SEQ ID NO: 155582
uuaccaaacacaaucaucu

SEQ ID NO: 155584 - RNA, 19 nt, Artificial Sequence
  Description of Artificial Sequence: Synthetic oligonucleotide
  Sense strand starting at position 3519 of SEQ ID NO: 1999
gaugauuguguuugguaag

SEQ ID NO: 155585 - RNA, 19 nt, Artificial Sequence
  Description of Artificial Sequence: Synthetic oligonucleotide
  Antisense strand to SEQ ID NO: 155584
cuuaccaaacacaaucauc

SEQ ID NO: 155586 - RNA, 19 nt, Artificial Sequence
  Description of Artificial Sequence: Synthetic oligonucleotide
  Sense strand starting at position 3678 of SEQ ID NO: 1999
uuccacauuguaggagaaa

SEQ ID NO: 155587 - RNA, 19 nt, Artificial Sequence
  Description of Artificial Sequence: Synthetic oligonucleotide
  Antisense strand to SEQ ID NO: 155586
uuucuccuacaauguggaa

SEQ ID NO: 155588 - RNA, 19 nt, Artificial Sequence
  Description of Artificial Sequence: Synthetic oligonucleotide
  Sense strand starting at position 3698 of SEQ ID NO: 1999
ggaccuuucuucuccaaag

SEQ ID NO: 155589 - RNA, 19 nt, Artificial Sequence
  Description of Artificial Sequence: Synthetic oligonucleotide
  Antisense strand to SEQ ID NO: 155588
cuuuggagaagaaaggucc

SEQ ID NO: 155590 - RNA, 19 nt, Artificial Sequence
  Description of Artificial Sequence: Synthetic oligonucleotide
  Sense strand starting at position 3718 of SEQ ID NO: 1999
agggauacuuaagcugagu

SEQ ID NO: 155591 - RNA, 19 nt, Artificial Sequence
  Description of Artificial Sequence: Synthetic oligonucleotide
  Antisense strand to SEQ ID NO: 155590
acucagcuuaaguaucccu

SEQ ID NO: 155592 - RNA, 19 nt, Artificial Sequence
  Description of Artificial Sequence: Synthetic oligonucleotide
  Sense strand starting at position 3954 of SEQ ID NO: 1999
gggucuuuguguucucaac

SEQ ID NO: 155593 - RNA, 19 nt, Artificial Sequence
  Description of Artificial Sequence: Synthetic oligonucleotide
  Antisense strand to SEQ ID NO: 155592
guugagaacacaaagaccc

SEQ ID NO: 155594 - RNA, 19 nt, Artificial Sequence
  Description of Artificial Sequence: Synthetic oligonucleotide
  Sense strand starting at position 3956 of SEQ ID NO: 1999
gucuuuguguucucaaccu

SEQ ID NO: 155595 - RNA, 19 nt, Artificial Sequence
  Description of Artificial Sequence: Synthetic oligonucleotide
  Antisense strand to SEQ ID NO: 155594
agguugagaacacaaagac

SEQ ID NO: 155596 - RNA, 19 nt, Artificial Sequence
  Description of Artificial Sequence: Synthetic oligonucleotide
  Sense strand starting at position 228 of SEQ ID NO: 2000
gcuucaaggugcuugugau

SEQ ID NO: 155597 - RNA, 19 nt, Artificial Sequence
  Description of Artificial Sequence: Synthetic oligonucleotide
  Antisense strand to SEQ ID NO: 155596
aucacaagcaccuugaagc

SEQ ID NO: 155598 - RNA, 19 nt, Artificial Sequence
  Description of Artificial Sequence: Synthetic oligonucleotide
  Sense strand starting at position 236 of SEQ ID NO: 2000
gugcuugugaucuagucac

SEQ ID NO: 155599 - RNA, 19 nt, Artificial Sequence
  Description of Artificial Sequence: Synthetic oligonucleotide
  Antisense strand to SEQ ID NO: 155598
gugacuagaucacaagcac

SEQ ID NO: 155600 - RNA, 19 nt, Artificial Sequence
  Description of Artificial Sequence: Synthetic oligonucleotide
  Sense strand starting at position 452 of SEQ ID NO: 2000
auguuugaagccugggcaa

SEQ ID NO: 155601 - RNA, 19 nt, Artificial Sequence
  Description of Artificial Sequence: Synthetic oligonucleotide
  Antisense strand to SEQ ID NO: 155600
uugcccaggcuucaaacau

SEQ ID NO: 155602 - RNA, 19 nt, Artificial Sequence
  Description of Artificial Sequence: Synthetic oligonucleotide
  Sense strand starting at position 454 of SEQ ID NO: 2000
guuugaagccugggcaaga

SEQ ID NO: 155603 - RNA, 19 nt, Artificial Sequence
  Description of Artificial Sequence: Synthetic oligonucleotide
  Antisense strand to SEQ ID NO: 155602
ucuugcccaggcuucaaac

SEQ ID NO: 155604 - RNA, 19 nt, Artificial Sequence
  Description of Artificial Sequence: Synthetic oligonucleotide
  Sense strand starting at position 619 of SEQ ID NO: 2000
gggagucccuuccuauguu

SEQ ID NO: 155605 - RNA, 19 nt, Artificial Sequence
  Description of Artificial Sequence: Synthetic oligonucleotide
  Antisense strand to SEQ ID NO: 155604
aacauaggaagggacuccc

SEQ ID NO: 155606 - RNA, 19 nt, Artificial Sequence
  Description of Artificial Sequence: Synthetic oligonucleotide
  Sense strand starting at position 741 of SEQ ID NO: 2000
agcauuuccuugucauauu

SEQ ID NO: 155607 - RNA, 19 nt, Artificial Sequence
  Description of Artificial Sequence: Synthetic oligonucleotide
  Antisense strand to SEQ ID NO: 155606
aauaugacaaggaaaugcu

SEQ ID NO: 155608 - RNA, 19 nt, Artificial Sequence
  Description of Artificial Sequence: Synthetic oligonucleotide
  Sense strand starting at position 786 of SEQ ID NO: 2000
cugugcuccuuuccucaua

SEQ ID NO: 155609 - RNA, 19 nt, Artificial Sequence
  Description of Artificial Sequence: Synthetic oligonucleotide
  Antisense strand to SEQ ID NO: 155608
uaugaggaaaggagcacag

SEQ ID NO: 155610 - RNA, 19 nt, Artificial Sequence
  Description of Artificial Sequence: Synthetic oligonucleotide
  Sense strand starting at position 815 of SEQ ID NO: 2000
gcaacaaaugcccauggaa

SEQ ID NO: 155611 - RNA, 19 nt, Artificial Sequence
  Description of Artificial Sequence: Synthetic oligonucleotide
  Antisense strand to SEQ ID NO: 155610
uuccaugggcauuuguugc

SEQ ID NO: 155612 - RNA, 19 nt, Artificial Sequence
  Description of Artificial Sequence: Synthetic oligonucleotide
  Sense strand starting at position 844 of SEQ ID NO: 2000
ggcagcagucuuggagauu

SEQ ID NO: 155613 - RNA, 19 nt, Artificial Sequence
  Description of Artificial Sequence: Synthetic oligonucleotide
  Antisense strand to SEQ ID NO: 155612
aaucuccaagacugcugcc

SEQ ID NO: 155614 - RNA, 19 nt, Artificial Sequence
  Description of Artificial Sequence: Synthetic oligonucleotide
  Sense strand starting at position 845 of SEQ ID NO: 2000
gcagcagucuuggagauuu

SEQ ID NO: 155615 - RNA, 19 nt, Artificial Sequence
  Description of Artificial Sequence: Synthetic oligonucleotide
  Antisense strand to SEQ ID NO: 155614
aaaucuccaagacugcugc

SEQ ID NO: 155616 - RNA, 19 nt, Artificial Sequence
  Description of Artificial Sequence: Synthetic oligonucleotide
  Sense strand starting at position 879 of SEQ ID NO: 2000
agcccuuuacucgguggaa

SEQ ID NO: 155617 - RNA, 19 nt, Artificial Sequence
  Description of Artificial Sequence: Synthetic oligonucleotide
  Antisense strand to SEQ ID NO: 155616
uuccaccgaguaaagggcu

SEQ ID NO: 155618 - RNA, 19 nt, Artificial Sequence
  Description of Artificial Sequence: Synthetic oligonucleotide
  Sense strand starting at position 880 of SEQ ID NO: 2000
gcccuuuacucgguggaac

SEQ ID NO: 155619 - RNA, 19 nt, Artificial Sequence
  Description of Artificial Sequence: Synthetic oligonucleotide
  Antisense strand to SEQ ID NO: 155618
guuccaccgaguaaagggc

SEQ ID NO: 155620 - RNA, 19 nt, Artificial Sequence
  Description of Artificial Sequence: Synthetic oligonucleotide
  Sense strand starting at position 916 of SEQ ID NO: 2000
cuuccaaaucaguggagaa

SEQ ID NO: 155621 - RNA, 19 nt, Artificial Sequence
  Description of Artificial Sequence: Synthetic oligonucleotide
  Antisense strand to SEQ ID NO: 155620
uucuccacugauuuggaag

SEQ ID NO: 155622 - RNA, 19 nt, Artificial Sequence
  Description of Artificial Sequence: Synthetic oligonucleotide
  Sense strand starting at position 931 of SEQ ID NO: 2000
agaagacuguugguuaaac

SEQ ID NO: 155623 - RNA, 19 nt, Artificial Sequence
  Description of Artificial Sequence: Synthetic oligonucleotide
  Antisense strand to SEQ ID NO: 155622
guuuaaccaacagucuucu

SEQ ID NO: 155624 - RNA, 19 nt, Artificial Sequence
  Description of Artificial Sequence: Synthetic oligonucleotide
  Sense strand starting at position 998 of SEQ ID NO: 2000
auuccuuaugcucaagaag

SEQ ID NO: 155625 - RNA, 19 nt, Artificial Sequence
  Description of Artificial Sequence: Synthetic oligonucleotide
  Antisense strand to SEQ ID NO: 155624
cuucuugagcauaaggaau

SEQ ID NO: 155626 - RNA, 19 nt, Artificial Sequence
  Description of Artificial Sequence: Synthetic oligonucleotide
  Sense strand starting at position 1001 of SEQ ID NO: 2000
ccuuaugcucaagaagcau

SEQ ID NO: 155627 - RNA, 19 nt, Artificial Sequence
  Description of Artificial Sequence: Synthetic oligonucleotide
  Antisense strand to SEQ ID NO: 155626
augcuucuugagcauaagg

SEQ ID NO: 155628 - RNA, 19 nt, Artificial Sequence
  Description of Artificial Sequence: Synthetic oligonucleotide
  Sense strand starting at position 1092 of SEQ ID NO: 2000
ggucaaauguaaccaaaca

SEQ ID NO: 155629 - RNA, 19 nt, Artificial Sequence
  Description of Artificial Sequence: Synthetic oligonucleotide
  Antisense strand to SEQ ID NO: 155628
uguuugguuacauuugacc

SEQ ID NO: 155630 - RNA, 19 nt, Artificial Sequence
  Description of Artificial Sequence: Synthetic oligonucleotide
  Sense strand starting at position 1159 of SEQ ID NO: 2000
gcuaguacauuucugcaaa

SEQ ID NO: 155631 - RNA, 19 nt, Artificial Sequence
  Description of Artificial Sequence: Synthetic oligonucleotide
  Antisense strand to SEQ ID NO: 155630
uuugcagaaauguacuagc

SEQ ID NO: 155632 - RNA, 19 nt, Artificial Sequence
  Description of Artificial Sequence: Synthetic oligonucleotide
  Sense strand starting at position 1293 of SEQ ID NO: 2000
acugccucuuaggucuaaa

SEQ ID NO: 155633 - RNA, 19 nt, Artificial Sequence
  Description of Artificial Sequence: Synthetic oligonucleotide
  Antisense strand to SEQ ID NO: 155632
uuuagaccuaagaggcagu

SEQ ID NO: 155634 - RNA, 19 nt, Artificial Sequence
  Description of Artificial Sequence: Synthetic oligonucleotide
  Sense strand starting at position 1296 of SEQ ID NO: 2000
gccucuuaggucuaaagaa

SEQ ID NO: 155635 - RNA, 19 nt, Artificial Sequence
  Description of Artificial Sequence: Synthetic oligonucleotide
  Antisense strand to SEQ ID NO: 155634
uucuuuagaccuaagaggc

SEQ ID NO: 155636 - RNA, 19 nt, Artificial Sequence
  Description of Artificial Sequence: Synthetic oligonucleotide
  Sense strand starting at position 1308 of SEQ ID NO: 2000
uaaagaagccuagggcuua

SEQ ID NO: 155637 - RNA, 19 nt, Artificial Sequence
  Description of Artificial Sequence: Synthetic oligonucleotide
  Antisense strand to SEQ ID NO: 155636
uaagcccuaggcuucuuua

SEQ ID NO: 155638 - RNA, 19 nt, Artificial Sequence
  Description of Artificial Sequence: Synthetic oligonucleotide
  Sense strand starting at position 1385 of SEQ ID NO: 2000
ccgucucuugcugcuuaau

SEQ ID NO: 155639 - RNA, 19 nt, Artificial Sequence
  Description of Artificial Sequence: Synthetic oligonucleotide
  Antisense strand to SEQ ID NO: 155638
auuaagcagcaagagacgg

SEQ ID NO: 155640 - RNA, 19 nt, Artificial Sequence
  Description of Artificial Sequence: Synthetic oligonucleotide
  Sense strand starting at position 1386 of SEQ ID NO: 2000
cgucucuugcugcuuaaua

SEQ ID NO: 155641 - RNA, 19 nt, Artificial Sequence
  Description of Artificial Sequence: Synthetic oligonucleotide
  Antisense strand to SEQ ID NO: 155640
uauuaagcagcaagagacg

SEQ ID NO: 155642 - RNA, 19 nt, Artificial Sequence
  Description of Artificial Sequence: Synthetic oligonucleotide
  Sense strand starting at position 1387 of SEQ ID NO: 2000
gucucuugcugcuuaauaa

SEQ ID NO: 155643 - RNA, 19 nt, Artificial Sequence
  Description of Artificial Sequence: Synthetic oligonucleotide
  Antisense strand to SEQ ID NO: 155642
uuauuaagcagcaagagac

SEQ ID NO: 155644 - RNA, 19 nt, Artificial Sequence
  Description of Artificial Sequence: Synthetic oligonucleotide
  Sense strand starting at position 1520 of SEQ ID NO: 2000
gaguguccaccuugaugag

SEQ ID NO: 155645 - RNA, 19 nt, Artificial Sequence
  Description of Artificial Sequence: Synthetic oligonucleotide
  Antisense strand to SEQ ID NO: 155644
cucaucaagguggacacuc

SEQ ID NO: 155646 - RNA, 19 nt, Artificial Sequence
  Description of Artificial Sequence: Synthetic oligonucleotide
  Sense strand starting at position 1529 of SEQ ID NO: 2000
ccuugaugagccuguugau

SEQ ID NO: 155647 - RNA, 19 nt, Artificial Sequence
  Description of Artificial Sequence: Synthetic oligonucleotide
  Antisense strand to SEQ ID NO: 155646
aucaacaggcucaucaagg

SEQ ID NO: 155648 - RNA, 19 nt, Artificial Sequence
  Description of Artificial Sequence: Synthetic oligonucleotide
  Sense strand starting at position 1767 of SEQ ID NO: 2000
cuccgaguucuugcgcaau

SEQ ID NO: 155649 - RNA, 19 nt, Artificial Sequence
  Description of Artificial Sequence: Synthetic oligonucleotide
  Antisense strand to SEQ ID NO: 155648
auugcgcaagaacucggag

SEQ ID NO: 155650 - RNA, 19 nt, Artificial Sequence
  Description of Artificial Sequence: Synthetic oligonucleotide
  Sense strand starting at position 1769 of SEQ ID NO: 2000
ccgaguucuugcgcaauuu

SEQ ID NO: 155651 - RNA, 19 nt, Artificial Sequence
  Description of Artificial Sequence: Synthetic oligonucleotide
  Antisense strand to SEQ ID NO: 155650
aaauugcgcaagaacucgg

SEQ ID NO: 155652 - RNA, 19 nt, Artificial Sequence
  Description of Artificial Sequence: Synthetic oligonucleotide
  Sense strand starting at position 1770 of SEQ ID NO: 2000
cgaguucuugcgcaauuug

SEQ ID NO: 155653 - RNA, 19 nt, Artificial Sequence
  Description of Artificial Sequence: Synthetic oligonucleotide
  Antisense strand to SEQ ID NO: 155652
caaauugcgcaagaacucg

SEQ ID NO: 155654 - RNA, 19 nt, Artificial Sequence
  Description of Artificial Sequence: Synthetic oligonucleotide
  Sense strand starting at position 3177 of SEQ ID NO: 2000
gcagaacuguggccacuuu

SEQ ID NO: 155655 - RNA, 19 nt, Artificial Sequence
  Description of Artificial Sequence: Synthetic oligonucleotide
  Antisense strand to SEQ ID NO: 155654
aaaguggccacaguucugc

SEQ ID NO: 155656 - RNA, 19 nt, Artificial Sequence
  Description of Artificial Sequence: Synthetic oligonucleotide
  Sense strand starting at position 3601 of SEQ ID NO: 2000
uaguuuacugaacggaaau

SEQ ID NO: 155657 - RNA, 19 nt, Artificial Sequence
  Description of Artificial Sequence: Synthetic oligonucleotide
  Antisense strand to SEQ ID NO: 155656
auuuccguucaguaaacua

SEQ ID NO: 155658 - RNA, 19 nt, Artificial Sequence
  Description of Artificial Sequence: Synthetic oligonucleotide
  Sense strand starting at position 3602 of SEQ ID NO: 2000
aguuuacugaacggaaauc

SEQ ID NO: 155659 - RNA, 19 nt, Artificial Sequence
  Description of Artificial Sequence: Synthetic oligonucleotide
  Antisense strand to SEQ ID NO: 155658
gauuuccguucaguaaacu

SEQ ID NO: 155660 - RNA, 19 nt, Artificial Sequence
  Description of Artificial Sequence: Synthetic oligonucleotide
  Sense strand starting at position 3603 of SEQ ID NO: 2000
guuuacugaacggaaaucu

SEQ ID NO: 155661 - RNA, 19 nt, Artificial Sequence
  Description of Artificial Sequence: Synthetic oligonucleotide
  Antisense strand to SEQ ID NO: 155660
agauuuccguucaguaaac

SEQ ID NO: 155662 - RNA, 19 nt, Artificial Sequence
  Description of Artificial Sequence: Synthetic oligonucleotide
  Sense strand starting at position 3730 of SEQ ID NO: 2000
ugguuugugaggugggaaa

SEQ ID NO: 155663 - RNA, 19 nt, Artificial Sequence
  Description of Artificial Sequence: Synthetic oligonucleotide
  Antisense strand to SEQ ID NO: 155662
uuucccaccucacaaacca

SEQ ID NO: 155664 - RNA, 19 nt, Artificial Sequence
  Description of Artificial Sequence: Synthetic oligonucleotide
  Sense strand starting at position 3756 of SEQ ID NO: 2000
ugaagaaaugcgugcucau

SEQ ID NO: 155665 - RNA, 19 nt, Artificial Sequence
  Description of Artificial Sequence: Synthetic oligonucleotide
  Antisense strand to SEQ ID NO: 155664
augagcacgcauuucuuca

SEQ ID NO: 155666 - RNA, 19 nt, Artificial Sequence
  Description of Artificial Sequence: Synthetic oligonucleotide
  Sense strand starting at position 3759 of SEQ ID NO: 2000
agaaaugcgugcucauacu

SEQ ID NO: 155667 - RNA, 19 nt, Artificial Sequence
  Description of Artificial Sequence: Synthetic oligonucleotide
  Antisense strand to SEQ ID NO: 155666
aguaugagcacgcauuucu

SEQ ID NO: 155668 - RNA, 19 nt, Artificial Sequence
  Description of Artificial Sequence: Synthetic oligonucleotide
  Sense strand starting at position 3880 of SEQ ID NO: 2000
ucaguauauuugguguguu

SEQ ID NO: 155669 - RNA, 19 nt, Artificial Sequence
  Description of Artificial Sequence: Synthetic oligonucleotide
  Antisense strand to SEQ ID NO: 155668
aacacaccaaauauacuga

SEQ ID NO: 155670 - RNA, 19 nt, Artificial Sequence
  Description of Artificial Sequence: Synthetic oligonucleotide
  Sense strand starting at position 3883 of SEQ ID NO: 2000
guauauuugguguguuuac

SEQ ID NO: 155671 - RNA, 19 nt, Artificial Sequence
  Description of Artificial Sequence: Synthetic oligonucleotide
  Antisense strand to SEQ ID NO: 155670
guaaacacaccaaauauac

SEQ ID NO: 155672 - RNA, 19 nt, Artificial Sequence
  Description of Artificial Sequence: Synthetic oligonucleotide
  Sense strand starting at position 3884 of SEQ ID NO: 2000
uauauuugguguguuuaca

SEQ ID NO: 155673 - RNA, 19 nt, Artificial Sequence
  Description of Artificial Sequence: Synthetic oligonucleotide
  Antisense strand to SEQ ID NO: 155672
uguaaacacaccaaauaua

SEQ ID NO: 155674 - RNA, 19 nt, Artificial Sequence
  Description of Artificial Sequence: Synthetic oligonucleotide
  Sense strand starting at position 3954 of SEQ ID NO: 2000
gaaaucucccgucaauuag

SEQ ID NO: 155675 - RNA, 19 nt, Artificial Sequence
  Description of Artificial Sequence: Synthetic oligonucleotide
  Antisense strand to SEQ ID NO: 155674
cuaauugacgggagauuuc

SEQ ID NO: 155676 - RNA, 19 nt, Artificial Sequence
  Description of Artificial Sequence: Synthetic oligonucleotide
  Sense strand starting at position 3960 of SEQ ID NO: 2001
guagauuggccaggaguga

SEQ ID NO: 155677 - RNA, 19 nt, Artificial Sequence
  Description of Artificial Sequence: Synthetic oligonucleotide
  Antisense strand to SEQ ID NO: 155676
ucacuccuggccaaucuac

SEQ ID NO: 155678 - RNA, 19 nt, Artificial Sequence
  Description of Artificial Sequence: Synthetic oligonucleotide
  Sense strand starting at position 3948 of SEQ ID NO: 2001
uugaaagagucuguagauu

SEQ ID NO: 155679 - RNA, 19 nt, Artificial Sequence
  Description of Artificial Sequence: Synthetic oligonucleotide
  Antisense strand to SEQ ID NO: 155678
aaucuacagacucuuucaa

SEQ ID NO: 155680 - RNA, 19 nt, Artificial Sequence
  Description of Artificial Sequence: Synthetic oligonucleotide
  Sense strand starting at position 3947 of SEQ ID NO: 2001
cuugaaagagucuguagau

SEQ ID NO: 155681 - RNA, 19 nt, Artificial Sequence
  Description of Artificial Sequence: Synthetic oligonucleotide
  Antisense strand to SEQ ID NO: 155680
aucuacagacucuuucaag

SEQ ID NO: 155682 - RNA, 19 nt, Artificial Sequence
  Description of Artificial Sequence: Synthetic oligonucleotide
  Sense strand starting at position 3937 of SEQ ID NO: 2001
gaaccugggucuugaaaga

SEQ ID NO: 155683 - RNA, 19 nt, Artificial Sequence
  Description of Artificial Sequence: Synthetic oligonucleotide
  Antisense strand to SEQ ID NO: 155682
ucuuucaagacccagguuc

SEQ ID NO: 155684 - RNA, 19 nt, Artificial Sequence
  Description of Artificial Sequence: Synthetic oligonucleotide
  Sense strand starting at position 3933 of SEQ ID NO: 2001
uaaugaaccugggucuuga

SEQ ID NO: 155685 - RNA, 19 nt, Artificial Sequence
  Description of Artificial Sequence: Synthetic oligonucleotide
  Antisense strand to SEQ ID NO: 155684
ucaagacccagguucauua

SEQ ID NO: 155686 - RNA, 19 nt, Artificial Sequence
  Description of Artificial Sequence: Synthetic oligonucleotide
  Sense strand starting at position 3919 of SEQ ID NO: 2001
agcuuaugucgccauaaug

SEQ ID NO: 155687 - RNA, 19 nt, Artificial Sequence
  Description of Artificial Sequence: Synthetic oligonucleotide
  Antisense strand to SEQ ID NO: 155686
cauuauggcgacauaagcu

SEQ ID NO: 155688 - RNA, 19 nt, Artificial Sequence
  Description of Artificial Sequence: Synthetic oligonucleotide
  Sense strand starting at position 3918 of SEQ ID NO: 2001
uagcuuaugucgccauaau

SEQ ID NO: 155689 - RNA, 19 nt, Artificial Sequence
  Description of Artificial Sequence: Synthetic oligonucleotide
  Antisense strand to SEQ ID NO: 155688
auuauggcgacauaagcua

SEQ ID NO: 155690 - RNA, 19 nt, Artificial Sequence
  Description of Artificial Sequence: Synthetic oligonucleotide
  Sense strand starting at position 3864 of SEQ ID NO: 2001
ggcacuucuuaccuugaca

SEQ ID NO: 155691 - RNA, 19 nt, Artificial Sequence
  Description of Artificial Sequence: Synthetic oligonucleotide
  Antisense strand to SEQ ID NO: 155690
ugucaagguaagaagugcc

SEQ ID NO: 155692 - RNA, 19 nt, Artificial Sequence
  Description of Artificial Sequence: Synthetic oligonucleotide
  Sense strand starting at position 3716 of SEQ ID NO: 2001
gcaccaacaucaucaguga

SEQ ID NO: 155693 - RNA, 19 nt, Artificial Sequence
  Description of Artificial Sequence: Synthetic oligonucleotide
  Antisense strand to SEQ ID NO: 155692
ucacugaugauguuggugc

SEQ ID NO: 155694 - RNA, 19 nt, Artificial Sequence
  Description of Artificial Sequence: Synthetic oligonucleotide
  Sense strand starting at position 3461 of SEQ ID NO: 2001
ucuuuagugucuuuagcuu

SEQ ID NO: 155695 - RNA, 19 nt, Artificial Sequence
  Description of Artificial Sequence: Synthetic oligonucleotide
  Antisense strand to SEQ ID NO: 155694
aagcuaaagacacuaaaga

SEQ ID NO: 155696 - RNA, 19 nt, Artificial Sequence
  Description of Artificial Sequence: Synthetic oligonucleotide
  Sense strand starting at position 3404 of SEQ ID NO: 2001
cugaaucucccauguguac

SEQ ID NO: 155697 - RNA, 19 nt, Artificial Sequence
  Description of Artificial Sequence: Synthetic oligonucleotide
  Antisense strand to SEQ ID NO: 155696
guacacaugggagauucag

SEQ ID NO: 155698 - RNA, 19 nt, Artificial Sequence
  Description of Artificial Sequence: Synthetic oligonucleotide
  Sense strand starting at position 3374 of SEQ ID NO: 2001
cagauaagggacugucuuu

SEQ ID NO: 155699 - RNA, 19 nt, Artificial Sequence
  Description of Artificial Sequence: Synthetic oligonucleotide
  Antisense strand to SEQ ID NO: 155698
aaagacagucccuuaucug

SEQ ID NO: 155700 - RNA, 19 nt, Artificial Sequence
  Description of Artificial Sequence: Synthetic oligonucleotide
  Sense strand starting at position 3351 of SEQ ID NO: 2001
gucauuguugguugaauca

SEQ ID NO: 155701 - RNA, 19 nt, Artificial Sequence
  Description of Artificial Sequence: Synthetic oligonucleotide
  Antisense strand to SEQ ID NO: 155700
ugauucaaccaacaaugac

SEQ ID NO: 155702 - RNA, 19 nt, Artificial Sequence
  Description of Artificial Sequence: Synthetic oligonucleotide
  Sense strand starting at position 3350 of SEQ ID NO: 2001
ugucauuguugguugaauc

SEQ ID NO: 155703 - RNA, 19 nt, Artificial Sequence
  Description of Artificial Sequence: Synthetic oligonucleotide
  Antisense strand to SEQ ID NO: 155702
gauucaaccaacaaugaca

SEQ ID NO: 155704 - RNA, 19 nt, Artificial Sequence
  Description of Artificial Sequence: Synthetic oligonucleotide
  Sense strand starting at position 3349 of SEQ ID NO: 2001
uugucauuguugguugaau

SEQ ID NO: 155705 - RNA, 19 nt, Artificial Sequence
  Description of Artificial Sequence: Synthetic oligonucleotide
  Antisense strand to SEQ ID NO: 155704
auucaaccaacaaugacaa

SEQ ID NO: 155706 - RNA, 19 nt, Artificial Sequence
  Description of Artificial Sequence: Synthetic oligonucleotide
  Sense strand starting at position 3348 of SEQ ID NO: 2001
guugucauuguugguugaa

SEQ ID NO: 155707 - RNA, 19 nt, Artificial Sequence
  Description of Artificial Sequence: Synthetic oligonucleotide
  Antisense strand to SEQ ID NO: 155706
uucaaccaacaaugacaac

SEQ ID NO: 155708 - RNA, 19 nt, Artificial Sequence
  Description of Artificial Sequence: Synthetic oligonucleotide
  Sense strand starting at position 3345 of SEQ ID NO: 2001
aguguugucauuguugguu

SEQ ID NO: 155709 - RNA, 19 nt, Artificial Sequence
  Description of Artificial Sequence: Synthetic oligonucleotide
  Antisense strand to SEQ ID NO: 155708
aaccaacaaugacaacacu

SEQ ID NO: 155710 - RNA, 19 nt, Artificial Sequence
  Description of Artificial Sequence: Synthetic oligonucleotide
  Sense strand starting at position 3344 of SEQ ID NO: 2001
caguguugucauuguuggu

SEQ ID NO: 155711 - RNA, 19 nt, Artificial Sequence
  Description of Artificial Sequence: Synthetic oligonucleotide
  Antisense strand to SEQ ID NO: 155710
accaacaaugacaacacug

SEQ ID NO: 155712 - RNA, 19 nt, Artificial Sequence
  Description of Artificial Sequence: Synthetic oligonucleotide
  Sense strand starting at position 3158 of SEQ ID NO: 2001
aagaguauguccucacgca

SEQ ID NO: 155713 - RNA, 19 nt, Artificial Sequence
  Description of Artificial Sequence: Synthetic oligonucleotide
  Antisense strand to SEQ ID NO: 155712
ugcgugaggacauacucuu

SEQ ID NO: 155714 - RNA, 19 nt, Artificial Sequence
  Description of Artificial Sequence: Synthetic oligonucleotide
  Sense strand starting at position 3011 of SEQ ID NO: 2001
guagaaucuuaguagguua

SEQ ID NO: 155715 - RNA, 19 nt, Artificial Sequence
  Description of Artificial Sequence: Synthetic oligonucleotide
  Antisense strand to SEQ ID NO: 155714
uaaccuacuaagauucuac

SEQ ID NO: 155716 - RNA, 19 nt, Artificial Sequence
  Description of Artificial Sequence: Synthetic oligonucleotide
  Sense strand starting at position 3010 of SEQ ID NO: 2001
aguagaaucuuaguagguu

SEQ ID NO: 155717 - RNA, 19 nt, Artificial Sequence
  Description of Artificial Sequence: Synthetic oligonucleotide
  Antisense strand to SEQ ID NO: 155716
aaccuacuaagauucuacu

SEQ ID NO: 155718 - RNA, 19 nt, Artificial Sequence
  Description of Artificial Sequence: Synthetic oligonucleotide
  Sense strand starting at position 2956 of SEQ ID NO: 2001
gaguauuucuuguguucug

SEQ ID NO: 155719 - RNA, 19 nt, Artificial Sequence
  Description of Artificial Sequence: Synthetic oligonucleotide
  Antisense strand to SEQ ID NO: 155718
cagaacacaagaaauacuc

SEQ ID NO: 155720 - RNA, 19 nt, Artificial Sequence
  Description of Artificial Sequence: Synthetic oligonucleotide
  Sense strand starting at position 2952 of SEQ ID NO: 2001
cagugaguauuucuugugu

SEQ ID NO: 155721 - RNA, 19 nt, Artificial Sequence
  Description of Artificial Sequence: Synthetic oligonucleotide
  Antisense strand to SEQ ID NO: 155720
acacaagaaauacucacug

SEQ ID NO: 155722 - RNA, 19 nt, Artificial Sequence
  Description of Artificial Sequence: Synthetic oligonucleotide
  Sense strand starting at position 2944 of SEQ ID NO: 2001
aguguagacagugaguauu

SEQ ID NO: 155723 - RNA, 19 nt, Artificial Sequence
  Description of Artificial Sequence: Synthetic oligonucleotide
  Antisense strand to SEQ ID NO: 155722
aauacucacugucuacacu

SEQ ID NO: 155724 - RNA, 19 nt, Artificial Sequence
  Description of Artificial Sequence: Synthetic oligonucleotide
  Sense strand starting at position 2943 of SEQ ID NO: 2001
caguguagacagugaguau

SEQ ID NO: 155725 - RNA, 19 nt, Artificial Sequence
  Description of Artificial Sequence: Synthetic oligonucleotide
  Antisense strand to SEQ ID NO: 155724
auacucacugucuacacug

SEQ ID NO: 155726 - RNA, 19 nt, Artificial Sequence
  Description of Artificial Sequence: Synthetic oligonucleotide
  Sense strand starting at position 2905 of SEQ ID NO: 2001
aaucuaaaucaggguugau

SEQ ID NO: 155727 - RNA, 19 nt, Artificial Sequence
  Description of Artificial Sequence: Synthetic oligonucleotide
  Antisense strand to SEQ ID NO: 155726
aucaacccugauuuagauu

SEQ ID NO: 155728 - RNA, 19 nt, Artificial Sequence
  Description of Artificial Sequence: Synthetic oligonucleotide
  Sense strand starting at position 2904 of SEQ ID NO: 2001
aaaucuaaaucaggguuga

SEQ ID NO: 155729 - RNA, 19 nt, Artificial Sequence
  Description of Artificial Sequence: Synthetic oligonucleotide
  Antisense strand to SEQ ID NO: 155728
ucaacccugauuuagauuu

SEQ ID NO: 155730 - RNA, 19 nt, Artificial Sequence
  Description of Artificial Sequence: Synthetic oligonucleotide
  Sense strand starting at position 2822 of SEQ ID NO: 2001
cugagaaacuaggacucau

SEQ ID NO: 155731 - RNA, 19 nt, Artificial Sequence
  Description of Artificial Sequence: Synthetic oligonucleotide
  Antisense strand to SEQ ID NO: 155730
augaguccuaguuucucag

SEQ ID NO: 155732 - RNA, 19 nt, Artificial Sequence
  Description of Artificial Sequence: Synthetic oligonucleotide
  Sense strand starting at position 2642 of SEQ ID NO: 2001
ugagguacccuccgaggaa

SEQ ID NO: 155733 - RNA, 19 nt, Artificial Sequence
  Description of Artificial Sequence: Synthetic oligonucleotide
  Antisense strand to SEQ ID NO: 155732
uuccucggaggguaccuca

SEQ ID NO: 155734 - RNA, 19 nt, Artificial Sequence
  Description of Artificial Sequence: Synthetic oligonucleotide
  Sense strand starting at position 2604 of SEQ ID NO: 2001
guuuauacugagugccagu

SEQ ID NO: 155735 - RNA, 19 nt, Artificial Sequence
  Description of Artificial Sequence: Synthetic oligonucleotide
  Antisense strand to SEQ ID NO: 155734
acuggcacucaguauaaac

SEQ ID NO: 155736 - RNA, 19 nt, Artificial Sequence
  Description of Artificial Sequence: Synthetic oligonucleotide
  Sense strand starting at position 2551 of SEQ ID NO: 2001
guuaauuccagguggagac

SEQ ID NO: 155737 - RNA, 19 nt, Artificial Sequence
  Description of Artificial Sequence: Synthetic oligonucleotide
  Antisense strand to SEQ ID NO: 155736
gucuccaccuggaauuaac

SEQ ID NO: 155738 - RNA, 19 nt, Artificial Sequence
  Description of Artificial Sequence: Synthetic oligonucleotide
  Sense strand starting at position 2549 of SEQ ID NO: 2001
caguuaauuccagguggag

SEQ ID NO: 155739 - RNA, 19 nt, Artificial Sequence
  Description of Artificial Sequence: Synthetic oligonucleotide
  Antisense strand to SEQ ID NO: 155738
cuccaccuggaauuaacug

SEQ ID NO: 155740 - RNA, 19 nt, Artificial Sequence
  Description of Artificial Sequence: Synthetic oligonucleotide
  Sense strand starting at position 928 of SEQ ID NO: 2001
gaguccuggugacucuauu

SEQ ID NO: 155741 - RNA, 19 nt, Artificial Sequence
  Description of Artificial Sequence: Synthetic oligonucleotide
  Antisense strand to SEQ ID NO: 155740
aauagagucaccaggacuc

SEQ ID NO: 155742 - RNA, 19 nt, Artificial Sequence
  Description of Artificial Sequence: Synthetic oligonucleotide
  Sense strand starting at position 926 of SEQ ID NO: 2001
uugaguccuggugacucua

SEQ ID NO: 155743 - RNA, 19 nt, Artificial Sequence
  Description of Artificial Sequence: Synthetic oligonucleotide
  Antisense strand to SEQ ID NO: 155742
uagagucaccaggacucaa

SEQ ID NO: 155744 - RNA, 19 nt, Artificial Sequence
  Description of Artificial Sequence: Synthetic oligonucleotide
  Sense strand starting at position 842 of SEQ ID NO: 2001
agucaaagccuaugaaggu

SEQ ID NO: 155745 - RNA, 19 nt, Artificial Sequence
  Description of Artificial Sequence: Synthetic oligonucleotide
  Antisense strand to SEQ ID NO: 155744
accuucauaggcuuugacu

SEQ ID NO: 155746 - RNA, 19 nt, Artificial Sequence
  Description of Artificial Sequence: Synthetic oligonucleotide
  Sense strand starting at position 748 of SEQ ID NO: 2001
acugucguccggguguuaa

SEQ ID NO: 155747 - RNA, 19 nt, Artificial Sequence
  Description of Artificial Sequence: Synthetic oligonucleotide
  Antisense strand to SEQ ID NO: 155746
uuaacacccggacgacagu

SEQ ID NO: 155748 - RNA, 19 nt, Artificial Sequence
  Description of Artificial Sequence: Synthetic oligonucleotide
  Sense strand starting at position 723 of SEQ ID NO: 2001
gccagagcuucuuccacaa

SEQ ID NO: 155749 - RNA, 19 nt, Artificial Sequence
  Description of Artificial Sequence: Synthetic oligonucleotide
  Antisense strand to SEQ ID NO: 155748
uuguggaagaagcucuggc

SEQ ID NO: 155750 - RNA, 19 nt, Artificial Sequence
  Description of Artificial Sequence: Synthetic oligonucleotide
  Sense strand starting at position 648 of SEQ ID NO: 2001
gcaagugucuucuccaaga

SEQ ID NO: 155751 - RNA, 19 nt, Artificial Sequence
  Description of Artificial Sequence: Synthetic oligonucleotide
  Antisense strand to SEQ ID NO: 155750
ucuuggagaagacacuugc

SEQ ID NO: 155752 - RNA, 19 nt, Artificial Sequence
  Description of Artificial Sequence: Synthetic oligonucleotide
  Sense strand starting at position 646 of SEQ ID NO: 2001
aggcaagugucuucuccaa

SEQ ID NO: 155753 - RNA, 19 nt, Artificial Sequence
  Description of Artificial Sequence: Synthetic oligonucleotide
  Antisense strand to SEQ ID NO: 155752
uuggagaagacacuugccu

SEQ ID NO: 155754 - RNA, 19 nt, Artificial Sequence
  Description of Artificial Sequence: Synthetic oligonucleotide
  Sense strand starting at position 616 of SEQ ID NO: 2001
ccacuaauuuggcaagcaa

SEQ ID NO: 155755 - RNA, 19 nt, Artificial Sequence
  Description of Artificial Sequence: Synthetic oligonucleotide
  Antisense strand to SEQ ID NO: 155754
uugcuugccaaauuagugg

SEQ ID NO: 155756 - RNA, 19 nt, Artificial Sequence
  Description of Artificial Sequence: Synthetic oligonucleotide
  Sense strand starting at position 534 of SEQ ID NO: 2002
uuccgauauuugcucauga

SEQ ID NO: 155757 - RNA, 19 nt, Artificial Sequence
  Description of Artificial Sequence: Synthetic oligonucleotide
  Antisense strand to SEQ ID NO: 155756
ucaugagcaaauaucggaa

SEQ ID NO: 155758 - RNA, 19 nt, Artificial Sequence
  Description of Artificial Sequence: Synthetic oligonucleotide
  Sense strand starting at position 535 of SEQ ID NO: 2002
uccgauauuugcucaugau

SEQ ID NO: 155759 - RNA, 19 nt, Artificial Sequence
  Description of Artificial Sequence: Synthetic oligonucleotide
  Antisense strand to SEQ ID NO: 155758
aucaugagcaaauaucgga

SEQ ID NO: 155760 - RNA, 19 nt, Artificial Sequence
  Description of Artificial Sequence: Synthetic oligonucleotide
  Sense strand starting at position 544 of SEQ ID NO: 2002
ugcucaugauaaguuccaa

SEQ ID NO: 155761 - RNA, 19 nt, Artificial Sequence
  Description of Artificial Sequence: Synthetic oligonucleotide
  Antisense strand to SEQ ID NO: 155760
uuggaacuuaucaugagca

SEQ ID NO: 155762 - RNA, 19 nt, Artificial Sequence
  Description of Artificial Sequence: Synthetic oligonucleotide
  Sense strand starting at position 572 of SEQ ID NO: 2002
guguuccuccaaggaaauc

SEQ ID NO: 155763 - RNA, 19 nt, Artificial Sequence
  Description of Artificial Sequence: Synthetic oligonucleotide
  Antisense strand to SEQ ID NO: 155762
gauuuccuuggaggaacac

SEQ ID NO: 155764 - RNA, 19 nt, Artificial Sequence
  Description of Artificial Sequence: Synthetic oligonucleotide
  Sense strand starting at position 620 of SEQ ID NO: 2002
ggcagugaugucugagaga

SEQ ID NO: 155765 - RNA, 19 nt, Artificial Sequence
  Description of Artificial Sequence: Synthetic oligonucleotide
  Antisense strand to SEQ ID NO: 155764
ucucucagacaucacugcc

SEQ ID NO: 155766 - RNA, 19 nt, Artificial Sequence
  Description of Artificial Sequence: Synthetic oligonucleotide
  Sense strand starting at position 625 of SEQ ID NO: 2002
ugaugucugagagacaguu

SEQ ID NO: 155767 - RNA, 19 nt, Artificial Sequence
  Description of Artificial Sequence: Synthetic oligonucleotide
  Antisense strand to SEQ ID NO: 155766
aacugucucucagacauca

SEQ ID NO: 155768 - RNA, 19 nt, Artificial Sequence
  Description of Artificial Sequence: Synthetic oligonucleotide
  Sense strand starting at position 633 of SEQ ID NO: 2002
gagagacaguucccaaauc

SEQ ID NO: 155769 - RNA, 19 nt, Artificial Sequence
  Description of Artificial Sequence: Synthetic oligonucleotide
  Antisense strand to SEQ ID NO: 155768
gauuugggaacugucucuc

SEQ ID NO: 155770 - RNA, 19 nt, Artificial Sequence
  Description of Artificial Sequence: Synthetic oligonucleotide
  Sense strand starting at position 709 of SEQ ID NO: 2002
guaaaucaauguuuaaguc

SEQ ID NO: 155771 - RNA, 19 nt, Artificial Sequence
  Description of Artificial Sequence: Synthetic oligonucleotide
  Antisense strand to SEQ ID NO: 155770
gacuuaaacauugauuuac

SEQ ID NO: 155772 - RNA, 19 nt, Artificial Sequence
  Description of Artificial Sequence: Synthetic oligonucleotide
  Sense strand starting at position 739 of SEQ ID NO: 2002
acaguuaaagucuauguga

SEQ ID NO: 155773 - RNA, 19 nt, Artificial Sequence
  Description of Artificial Sequence: Synthetic oligonucleotide
  Antisense strand to SEQ ID NO: 155772
ucacauagacuuuaacugu

SEQ ID NO: 155774 - RNA, 19 nt, Artificial Sequence
  Description of Artificial Sequence: Synthetic oligonucleotide
  Sense strand starting at position 741 of SEQ ID NO: 2002
aguuaaagucuaugugaaa

SEQ ID NO: 155775 - RNA, 19 nt, Artificial Sequence
  Description of Artificial Sequence: Synthetic oligonucleotide
  Antisense strand to SEQ ID NO: 155774
uuucacauagacuuuaacu

SEQ ID NO: 155776 - RNA, 19 nt, Artificial Sequence
  Description of Artificial Sequence: Synthetic oligonucleotide
  Sense strand starting at position 742 of SEQ ID NO: 2002
guuaaagucuaugugaaag

SEQ ID NO: 155777 - RNA, 19 nt, Artificial Sequence
  Description of Artificial Sequence: Synthetic oligonucleotide
  Antisense strand to SEQ ID NO: 155776
cuuucacauagacuuuaac

SEQ ID NO: 155778 - RNA, 19 nt, Artificial Sequence
  Description of Artificial Sequence: Synthetic oligonucleotide
  Sense strand starting at position 748 of SEQ ID NO: 2002
gucuaugugaaagguaacu

SEQ ID NO: 155779 - RNA, 19 nt, Artificial Sequence
  Description of Artificial Sequence: Synthetic oligonucleotide
  Antisense strand to SEQ ID NO: 155778
aguuaccuuucacauagac

SEQ ID NO: 155780 - RNA, 19 nt, Artificial Sequence
  Description of Artificial Sequence: Synthetic oligonucleotide
  Sense strand starting at position 753 of SEQ ID NO: 2002
ugugaaagguaacuuucua

SEQ ID NO: 155781 - RNA, 19 nt, Artificial Sequence
  Description of Artificial Sequence: Synthetic oligonucleotide
  Antisense strand to SEQ ID NO: 155780
uagaaaguuaccuuucaca

SEQ ID NO: 155782 - RNA, 19 nt, Artificial Sequence
  Description of Artificial Sequence: Synthetic oligonucleotide
  Sense strand starting at position 757 of SEQ ID NO: 2002
aaagguaacuuucuaggca

SEQ ID NO: 155783 - RNA, 19 nt, Artificial Sequence
  Description of Artificial Sequence: Synthetic oligonucleotide
  Antisense strand to SEQ ID NO: 155782
ugccuagaaaguuaccuuu

SEQ ID NO: 155784 - RNA, 19 nt, Artificial Sequence
  Description of Artificial Sequence: Synthetic oligonucleotide
  Sense strand starting at position 761 of SEQ ID NO: 2002
guaacuuucuaggcagaga

SEQ ID NO: 155785 - RNA, 19 nt, Artificial Sequence
  Description of Artificial Sequence: Synthetic oligonucleotide
  Antisense strand to SEQ ID NO: 155784
ucucugccuagaaaguuac

SEQ ID NO: 155786 - RNA, 19 nt, Artificial Sequence
  Description of Artificial Sequence: Synthetic oligonucleotide
  Sense strand starting at position 815 of SEQ ID NO: 2002
ucagaagacauguguuuga

SEQ ID NO: 155787 - RNA, 19 nt, Artificial Sequence
  Description of Artificial Sequence: Synthetic oligonucleotide
  Antisense strand to SEQ ID NO: 155786
ucaaacacaugucuucuga

SEQ ID NO: 155788 - RNA, 19 nt, Artificial Sequence
  Description of Artificial Sequence: Synthetic oligonucleotide
  Sense strand starting at position 818 of SEQ ID NO: 2002
gaagacauguguuugaguu

SEQ ID NO: 155789 - RNA, 19 nt, Artificial Sequence
  Description of Artificial Sequence: Synthetic oligonucleotide
  Antisense strand to SEQ ID NO: 155788
aacucaaacacaugucuuc

SEQ ID NO: 155790 - RNA, 19 nt, Artificial Sequence
  Description of Artificial Sequence: Synthetic oligonucleotide
  Sense strand starting at position 852 of SEQ ID NO: 2002
cuugguuaauacucauaag

SEQ ID NO: 155791 - RNA, 19 nt, Artificial Sequence
  Description of Artificial Sequence: Synthetic oligonucleotide
  Antisense strand to SEQ ID NO: 155790
cuuaugaguauuaaccaag

SEQ ID NO: 155792 - RNA, 19 nt, Artificial Sequence
  Description of Artificial Sequence: Synthetic oligonucleotide
  Sense strand starting at position 1239 of SEQ ID NO: 2002
cugcaauauuagucagaug

SEQ ID NO: 155793 - RNA, 19 nt, Artificial Sequence
  Description of Artificial Sequence: Synthetic oligonucleotide
  Antisense strand to SEQ ID NO: 155792
caucugacuaauauugcag

SEQ ID NO: 155794 - RNA, 19 nt, Artificial Sequence
  Description of Artificial Sequence: Synthetic oligonucleotide
  Sense strand starting at position 1286 of SEQ ID NO: 2002
uauuguuacugggccagau

SEQ ID NO: 155795 - RNA, 19 nt, Artificial Sequence
  Description of Artificial Sequence: Synthetic oligonucleotide
  Antisense strand to SEQ ID NO: 155794
aucuggcccaguaacaaua

SEQ ID NO: 155796 - RNA, 19 nt, Artificial Sequence
  Description of Artificial Sequence: Synthetic oligonucleotide
  Sense strand starting at position 1335 of SEQ ID NO: 2002
cuggaaauauauguacacu

SEQ ID NO: 155797 - RNA, 19 nt, Artificial Sequence
  Description of Artificial Sequence: Synthetic oligonucleotide
  Antisense strand to SEQ ID NO: 155796
aguguacauauauuuccag

SEQ ID NO: 155798 - RNA, 19 nt, Artificial Sequence
  Description of Artificial Sequence: Synthetic oligonucleotide
  Sense strand starting at position 1655 of SEQ ID NO: 2002
cccucugagaccgggaaua

SEQ ID NO: 155799 - RNA, 19 nt, Artificial Sequence
  Description of Artificial Sequence: Synthetic oligonucleotide
  Antisense strand to SEQ ID NO: 155798
uauucccggucucagaggg

SEQ ID NO: 155800 - RNA, 19 nt, Artificial Sequence
  Description of Artificial Sequence: Synthetic oligonucleotide
  Sense strand starting at position 1721 of SEQ ID NO: 2002
cccagaauccgagagcacu

SEQ ID NO: 155801 - RNA, 19 nt, Artificial Sequence
  Description of Artificial Sequence: Synthetic oligonucleotide
  Antisense strand to SEQ ID NO: 155800
agugcucucggauucuggg

SEQ ID NO: 155802 - RNA, 19 nt, Artificial Sequence
  Description of Artificial Sequence: Synthetic oligonucleotide
  Sense strand starting at position 2076 of SEQ ID NO: 2002
gcggguugacccgcuuuaa

SEQ ID NO: 155803 - RNA, 19 nt, Artificial Sequence
  Description of Artificial Sequence: Synthetic oligonucleotide
  Antisense strand to SEQ ID NO: 155802
uuaaagcgggucaacccgc

SEQ ID NO: 155804 - RNA, 19 nt, Artificial Sequence
  Description of Artificial Sequence: Synthetic oligonucleotide
  Sense strand starting at position 2727 of SEQ ID NO: 2002
acugaaguucuguacucau

SEQ ID NO: 155805 - RNA, 19 nt, Artificial Sequence
  Description of Artificial Sequence: Synthetic oligonucleotide
  Antisense strand to SEQ ID NO: 155804
augaguacagaacuucagu

SEQ ID NO: 155806 - RNA, 19 nt, Artificial Sequence
  Description of Artificial Sequence: Synthetic oligonucleotide
  Sense strand starting at position 2834 of SEQ ID NO: 2002
accugacaugagugaaauc

SEQ ID NO: 155807 - RNA, 19 nt, Artificial Sequence
  Description of Artificial Sequence: Synthetic oligonucleotide
  Antisense strand to SEQ ID NO: 155806
gauuucacucaugucaggu

SEQ ID NO: 155808 - RNA, 19 nt, Artificial Sequence
  Description of Artificial Sequence: Synthetic oligonucleotide
  Sense strand starting at position 2919 of SEQ ID NO: 2002
auaguagcauauguuagaa

SEQ ID NO: 155809 - RNA, 19 nt, Artificial Sequence
  Description of Artificial Sequence: Synthetic oligonucleotide
  Antisense strand to SEQ ID NO: 155808
uucuaacauaugcuacuau

SEQ ID NO: 155810 - RNA, 19 nt, Artificial Sequence
  Description of Artificial Sequence: Synthetic oligonucleotide
  Sense strand starting at position 3101 of SEQ ID NO: 2002
ugagaagugaccuguggug

SEQ ID NO: 155811 - RNA, 19 nt, Artificial Sequence
  Description of Artificial Sequence: Synthetic oligonucleotide
  Antisense strand to SEQ ID NO: 155810
caccacaggucacuucuca

SEQ ID NO: 155812 - RNA, 19 nt, Artificial Sequence
  Description of Artificial Sequence: Synthetic oligonucleotide
  Sense strand starting at position 3103 of SEQ ID NO: 2002
agaagugaccuguggugaa

SEQ ID NO: 155813 - RNA, 19 nt, Artificial Sequence
  Description of Artificial Sequence: Synthetic oligonucleotide
  Antisense strand to SEQ ID NO: 155812
uucaccacaggucacuucu

SEQ ID NO: 155814 - RNA, 19 nt, Artificial Sequence
  Description of Artificial Sequence: Synthetic oligonucleotide
  Sense strand starting at position 3115 of SEQ ID NO: 2002
uggugaaagcuuuacuaau

SEQ ID NO: 155815 - RNA, 19 nt, Artificial Sequence
  Description of Artificial Sequence: Synthetic oligonucleotide
  Antisense strand to SEQ ID NO: 155814
auuaguaaagcuuucacca

SEQ ID NO: 155816 - RNA, 19 nt, Artificial Sequence
  Description of Artificial Sequence: Synthetic oligonucleotide
  Sense strand starting at position 3117 of SEQ ID NO: 2002
gugaaagcuuuacuaauca

SEQ ID NO: 155817 - RNA, 19 nt, Artificial Sequence
  Description of Artificial Sequence: Synthetic oligonucleotide
  Antisense strand to SEQ ID NO: 155816
ugauuaguaaagcuuucac

SEQ ID NO: 155818 - RNA, 19 nt, Artificial Sequence
  Description of Artificial Sequence: Synthetic oligonucleotide
  Sense strand starting at position 3224 of SEQ ID NO: 2002
aguaucaguguccaaacuu

SEQ ID NO: 155819 - RNA, 19 nt, Artificial Sequence
  Description of Artificial Sequence: Synthetic oligonucleotide
  Antisense strand to SEQ ID NO: 155818
aaguuuggacacugauacu

SEQ ID NO: 155820 - RNA, 19 nt, Artificial Sequence
  Description of Artificial Sequence: Synthetic oligonucleotide
  Sense strand starting at position 3346 of SEQ ID NO: 2002
uuaaacguucuaggucaga

SEQ ID NO: 155821 - RNA, 19 nt, Artificial Sequence
  Description of Artificial Sequence: Synthetic oligonucleotide
  Antisense strand to SEQ ID NO: 155820
ucugaccuagaacguuuaa

SEQ ID NO: 155822 - RNA, 19 nt, Artificial Sequence
  Description of Artificial Sequence: Synthetic oligonucleotide
  Sense strand starting at position 3404 of SEQ ID NO: 2002
ccucuuaagcaauguuaag

SEQ ID NO: 155823 - RNA, 19 nt, Artificial Sequence
  Description of Artificial Sequence: Synthetic oligonucleotide
  Antisense strand to SEQ ID NO: 155822
cuuaacauugcuuaagagg

SEQ ID NO: 155824 - RNA, 19 nt, Artificial Sequence
  Description of Artificial Sequence: Synthetic oligonucleotide
  Sense strand starting at position 3553 of SEQ ID NO: 2002
cugugucauccuugauuug

SEQ ID NO: 155825 - RNA, 19 nt, Artificial Sequence
  Description of Artificial Sequence: Synthetic oligonucleotide
  Antisense strand to SEQ ID NO: 155824
caaaucaaggaugacacag

SEQ ID NO: 155826 - RNA, 19 nt, Artificial Sequence
  Description of Artificial Sequence: Synthetic oligonucleotide
  Sense strand starting at position 3554 of SEQ ID NO: 2002
ugugucauccuugauuugu

SEQ ID NO: 155827 - RNA, 19 nt, Artificial Sequence
  Description of Artificial Sequence: Synthetic oligonucleotide
  Antisense strand to SEQ ID NO: 155826
acaaaucaaggaugacaca

SEQ ID NO: 155828 - RNA, 19 nt, Artificial Sequence
  Description of Artificial Sequence: Synthetic oligonucleotide
  Sense strand starting at position 3632 of SEQ ID NO: 2002
uaggcauggcgggauugaa

SEQ ID NO: 155829 - RNA, 19 nt, Artificial Sequence
  Description of Artificial Sequence: Synthetic oligonucleotide
  Antisense strand to SEQ ID NO: 155828
uucaaucccgccaugccua

SEQ ID NO: 155830 - RNA, 19 nt, Artificial Sequence
  Description of Artificial Sequence: Synthetic oligonucleotide
  Sense strand starting at position 3822 of SEQ ID NO: 2002
gaggcagaauuguuaaaug

SEQ ID NO: 155831 - RNA, 19 nt, Artificial Sequence
  Description of Artificial Sequence: Synthetic oligonucleotide
  Antisense strand to SEQ ID NO: 155830
cauuuaacaauucugccuc

SEQ ID NO: 155832 - RNA, 19 nt, Artificial Sequence
  Description of Artificial Sequence: Synthetic oligonucleotide
  Sense strand starting at position 3969 of SEQ ID NO: 2002
ugaugccuucuuuggauga

SEQ ID NO: 155833 - RNA, 19 nt, Artificial Sequence
  Description of Artificial Sequence: Synthetic oligonucleotide
  Antisense strand to SEQ ID NO: 155832
ucauccaaagaaggcauca

SEQ ID NO: 155834 - RNA, 19 nt, Artificial Sequence
  Description of Artificial Sequence: Synthetic oligonucleotide
  Sense strand starting at position 3982 of SEQ ID NO: 2002
ggaugagauauguguaagu

SEQ ID NO: 155835 - RNA, 19 nt, Artificial Sequence
  Description of Artificial Sequence: Synthetic oligonucleotide
  Antisense strand to SEQ ID NO: 155834
acuuacacauaucucaucc

SEQ ID NO: 155836 - RNA, 19 nt, Artificial Sequence
  Description of Artificial Sequence: Synthetic oligonucleotide
  Sense strand starting at position 428 of SEQ ID NO: 2003
acuuucucccugugaauag

SEQ ID NO: 155837 - RNA, 19 nt, Artificial Sequence
  Description of Artificial Sequence: Synthetic oligonucleotide
  Antisense strand to SEQ ID NO: 155836
cuauucacagggagaaagu

SEQ ID NO: 155838 - RNA, 19 nt, Artificial Sequence
  Description of Artificial Sequence: Synthetic oligonucleotide
  Sense strand starting at position 549 of SEQ ID NO: 2003
augaguuggcucgagagag

SEQ ID NO: 155839 - RNA, 19 nt, Artificial Sequence
  Description of Artificial Sequence: Synthetic oligonucleotide
  Antisense strand to SEQ ID NO: 155838
cucucucgagccaacucau

SEQ ID NO: 155840 - RNA, 19 nt, Artificial Sequence
  Description of Artificial Sequence: Synthetic oligonucleotide
  Sense strand starting at position 866 of SEQ ID NO: 2003
ugacaauuccaagggcgaa

SEQ ID NO: 155841 - RNA, 19 nt, Artificial Sequence
  Description of Artificial Sequence: Synthetic oligonucleotide
  Antisense strand to SEQ ID NO: 155840
uucgcccuuggaauuguca

SEQ ID NO: 155842 - RNA, 19 nt, Artificial Sequence
  Description of Artificial Sequence: Synthetic oligonucleotide
  Sense strand starting at position 916 of SEQ ID NO: 2003
agacgugaacuugaaaguu

SEQ ID NO: 155843 - RNA, 19 nt, Artificial Sequence
  Description of Artificial Sequence: Synthetic oligonucleotide
  Antisense strand to SEQ ID NO: 155842
aacuuucaaguucacgucu

SEQ ID NO: 155844 - RNA, 19 nt, Artificial Sequence
  Description of Artificial Sequence: Synthetic oligonucleotide
  Sense strand starting at position 1041 of SEQ ID NO: 2003
gggcacuguccacauaauc

SEQ ID NO: 155845 - RNA, 19 nt, Artificial Sequence
  Description of Artificial Sequence: Synthetic oligonucleotide
  Antisense strand to SEQ ID NO: 155844
gauuauguggacagugccc

SEQ ID NO: 155846 - RNA, 19 nt, Artificial Sequence
  Description of Artificial Sequence: Synthetic oligonucleotide
  Sense strand starting at position 1063 of SEQ ID NO: 2003
uccugagaugcggacaaau

SEQ ID NO: 155847 - RNA, 19 nt, Artificial Sequence
  Description of Artificial Sequence: Synthetic oligonucleotide
  Antisense strand to SEQ ID NO: 155846
auuuguccgcaucucagga

SEQ ID NO: 155848 - RNA, 19 nt, Artificial Sequence
  Description of Artificial Sequence: Synthetic oligonucleotide
  Sense strand starting at position 1065 of SEQ ID NO: 2003
cugagaugcggacaaauuc

SEQ ID NO: 155849 - RNA, 19 nt, Artificial Sequence
  Description of Artificial Sequence: Synthetic oligonucleotide
  Antisense strand to SEQ ID NO: 155848
gaauuuguccgcaucucag

SEQ ID NO: 155850 - RNA, 19 nt, Artificial Sequence
  Description of Artificial Sequence: Synthetic oligonucleotide
  Sense strand starting at position 1106 of SEQ ID NO: 2003
gcaugaaggcucggagaga

SEQ ID NO: 155851 - RNA, 19 nt, Artificial Sequence
  Description of Artificial Sequence: Synthetic oligonucleotide
  Antisense strand to SEQ ID NO: 155850
ucucuccgagccuucaugc

SEQ ID NO: 155852 - RNA, 19 nt, Artificial Sequence
  Description of Artificial Sequence: Synthetic oligonucleotide
  Sense strand starting at position 1119 of SEQ ID NO: 2003
gagagauugcagggucaca

SEQ ID NO: 155853 - RNA, 19 nt, Artificial Sequence
  Description of Artificial Sequence: Synthetic oligonucleotide
  Antisense strand to SEQ ID NO: 155852
ugugacccugcaaucucuc

SEQ ID NO: 155854 - RNA, 19 nt, Artificial Sequence
  Description of Artificial Sequence: Synthetic oligonucleotide
  Sense strand starting at position 1320 of SEQ ID NO: 2003
agacaucuucggcaucaau

SEQ ID NO: 155855 - RNA, 19 nt, Artificial Sequence
  Description of Artificial Sequence: Synthetic oligonucleotide
  Antisense strand to SEQ ID NO: 155854
auugaugccgaagaugucu

SEQ ID NO: 155856 - RNA, 19 nt, Artificial Sequence
  Description of Artificial Sequence: Synthetic oligonucleotide
  Sense strand starting at position 1331 of SEQ ID NO: 2003
gcaucaaugucacugauag

SEQ ID NO: 155857 - RNA, 19 nt, Artificial Sequence
  Description of Artificial Sequence: Synthetic oligonucleotide
  Antisense strand to SEQ ID NO: 155856
cuaucagugacauugaugc

SEQ ID NO: 155858 - RNA, 19 nt, Artificial Sequence
  Description of Artificial Sequence: Synthetic oligonucleotide
  Sense strand starting at position 1404 of SEQ ID NO: 2003
ggacaaagaugucuccgau

SEQ ID NO: 155859 - RNA, 19 nt, Artificial Sequence
  Description of Artificial Sequence: Synthetic oligonucleotide
  Antisense strand to SEQ ID NO: 155858
aucggagacaucuuugucc

SEQ ID NO: 155860 - RNA, 19 nt, Artificial Sequence
  Description of Artificial Sequence: Synthetic oligonucleotide
  Sense strand starting at position 1723 of SEQ ID NO: 2003
ggcuuuaaauuuccgagca

SEQ ID NO: 155861 - RNA, 19 nt, Artificial Sequence
  Description of Artificial Sequence: Synthetic oligonucleotide
  Antisense strand to SEQ ID NO: 155860
ugcucggaaauuuaaagcc

SEQ ID NO: 155862 - RNA, 19 nt, Artificial Sequence
  Description of Artificial Sequence: Synthetic oligonucleotide
  Sense strand starting at position 1747 of SEQ ID NO: 2003
aucaucugacugcaugauu

SEQ ID NO: 155863 - RNA, 19 nt, Artificial Sequence
  Description of Artificial Sequence: Synthetic oligonucleotide
  Antisense strand to SEQ ID NO: 155862
aaucaugcagucagaugau

SEQ ID NO: 155864 - RNA, 19 nt, Artificial Sequence
  Description of Artificial Sequence: Synthetic oligonucleotide
  Sense strand starting at position 1750 of SEQ ID NO: 2003
aucugacugcaugauucua

SEQ ID NO: 155865 - RNA, 19 nt, Artificial Sequence
  Description of Artificial Sequence: Synthetic oligonucleotide
  Antisense strand to SEQ ID NO: 155864
uagaaucaugcagucagau

SEQ ID NO: 155866 - RNA, 19 nt, Artificial Sequence
  Description of Artificial Sequence: Synthetic oligonucleotide
  Sense strand starting at position 1860 of SEQ ID NO: 2003
cuccaagucucaccaggaa

SEQ ID NO: 155867 - RNA, 19 nt, Artificial Sequence
  Description of Artificial Sequence: Synthetic oligonucleotide
  Antisense strand to SEQ ID NO: 155866
uuccuggugagacuuggag

SEQ ID NO: 155868 - RNA, 19 nt, Artificial Sequence
  Description of Artificial Sequence: Synthetic oligonucleotide
  Sense strand starting at position 2127 of SEQ ID NO: 2003
ggaaguagccauuagcaau

SEQ ID NO: 155869 - RNA, 19 nt, Artificial Sequence
  Description of Artificial Sequence: Synthetic oligonucleotide
  Antisense strand to SEQ ID NO: 155868
auugcuaauggcuacuucc

SEQ ID NO: 155870 - RNA, 19 nt, Artificial Sequence
  Description of Artificial Sequence: Synthetic oligonucleotide
  Sense strand starting at position 2312 of SEQ ID NO: 2003
gguauuaacucaucuaaga

SEQ ID NO: 155871 - RNA, 19 nt, Artificial Sequence
  Description of Artificial Sequence: Synthetic oligonucleotide
  Antisense strand to SEQ ID NO: 155870
ucuuagaugaguuaauacc

SEQ ID NO: 155872 - RNA, 19 nt, Artificial Sequence
  Description of Artificial Sequence: Synthetic oligonucleotide
  Sense strand starting at position 2329 of SEQ ID NO: 2003
gaaacuuuccuaggauguc

SEQ ID NO: 155873 - RNA, 19 nt, Artificial Sequence
  Description of Artificial Sequence: Synthetic oligonucleotide
  Antisense strand to SEQ ID NO: 155872
gacauccuaggaaaguuuc

SEQ ID NO: 155874 - RNA, 19 nt, Artificial Sequence
  Description of Artificial Sequence: Synthetic oligonucleotide
  Sense strand starting at position 2496 of SEQ ID NO: 2003
guguaccagcauuaacuau

SEQ ID NO: 155875 - RNA, 19 nt, Artificial Sequence
  Description of Artificial Sequence: Synthetic oligonucleotide
  Antisense strand to SEQ ID NO: 155874
auaguuaaugcugguacac

SEQ ID NO: 155876 - RNA, 19 nt, Artificial Sequence
  Description of Artificial Sequence: Synthetic oligonucleotide
  Sense strand starting at position 2559 of SEQ ID NO: 2003
gcaugaauuggcuacaaga

SEQ ID NO: 155877 - RNA, 19 nt, Artificial Sequence
  Description of Artificial Sequence: Synthetic oligonucleotide
  Antisense strand to SEQ ID NO: 155876
ucuuguagccaauucaugc

SEQ ID NO: 155878 - RNA, 19 nt, Artificial Sequence
  Description of Artificial Sequence: Synthetic oligonucleotide
  Sense strand starting at position 2674 of SEQ ID NO: 2003
acaagacauuaacaagaga

SEQ ID NO: 155879 - RNA, 19 nt, Artificial Sequence
  Description of Artificial Sequence: Synthetic oligonucleotide
  Antisense strand to SEQ ID NO: 155878
ucucuuguuaaugucuugu

SEQ ID NO: 155880 - RNA, 19 nt, Artificial Sequence
  Description of Artificial Sequence: Synthetic oligonucleotide
  Sense strand starting at position 2738 of SEQ ID NO: 2003
ccuccuuuaagugggaaga

SEQ ID NO: 155881 - RNA, 19 nt, Artificial Sequence
  Description of Artificial Sequence: Synthetic oligonucleotide
  Antisense strand to SEQ ID NO: 155880
ucuucccacuuaaaggagg

SEQ ID NO: 155882 - RNA, 19 nt, Artificial Sequence
  Description of Artificial Sequence: Synthetic oligonucleotide
  Sense strand starting at position 2766 of SEQ ID NO: 2003
ggaucugguaucugauaca

SEQ ID NO: 155883 - RNA, 19 nt, Artificial Sequence
  Description of Artificial Sequence: Synthetic oligonucleotide
  Antisense strand to SEQ ID NO: 155882
uguaucagauaccagaucc

SEQ ID NO: 155884 - RNA, 19 nt, Artificial Sequence
  Description of Artificial Sequence: Synthetic oligonucleotide
  Sense strand starting at position 2866 of SEQ ID NO: 2003
uggauuugauaauagccua

SEQ ID NO: 155885 - RNA, 19 nt, Artificial Sequence
  Description of Artificial Sequence: Synthetic oligonucleotide
  Antisense strand to SEQ ID NO: 155884
uaggcuauuaucaaaucca

SEQ ID NO: 155886 - RNA, 19 nt, Artificial Sequence
  Description of Artificial Sequence: Synthetic oligonucleotide
  Sense strand starting at position 2879 of SEQ ID NO: 2003
agccuaaacuguguaggaa

SEQ ID NO: 155887 - RNA, 19 nt, Artificial Sequence
  Description of Artificial Sequence: Synthetic oligonucleotide
  Antisense strand to SEQ ID NO: 155886
uuccuacacaguuuaggcu

SEQ ID NO: 155888 - RNA, 19 nt, Artificial Sequence
  Description of Artificial Sequence: Synthetic oligonucleotide
  Sense strand starting at position 2880 of SEQ ID NO: 2003
gccuaaacuguguaggaaa

SEQ ID NO: 155889 - RNA, 19 nt, Artificial Sequence
  Description of Artificial Sequence: Synthetic oligonucleotide
  Antisense strand to SEQ ID NO: 155888
uuuccuacacaguuuaggc

SEQ ID NO: 155890 - RNA, 19 nt, Artificial Sequence
  Description of Artificial Sequence: Synthetic oligonucleotide
  Sense strand starting at position 2882 of SEQ ID NO: 2003
cuaaacuguguaggaaaua

SEQ ID NO: 155891 - RNA, 19 nt, Artificial Sequence
  Description of Artificial Sequence: Synthetic oligonucleotide
  Antisense strand to SEQ ID NO: 155890
uauuuccuacacaguuuag

SEQ ID NO: 155892 - RNA, 19 nt, Artificial Sequence
  Description of Artificial Sequence: Synthetic oligonucleotide
  Sense strand starting at position 2909 of SEQ ID NO: 2003
ccagucauccuugauccuu

SEQ ID NO: 155893 - RNA, 19 nt, Artificial Sequence
  Description of Artificial Sequence: Synthetic oligonucleotide
  Antisense strand to SEQ ID NO: 155892
aaggaucaaggaugacugg

SEQ ID NO: 155894 - RNA, 19 nt, Artificial Sequence
  Description of Artificial Sequence: Synthetic oligonucleotide
  Sense strand starting at position 2952 of SEQ ID NO: 2003
uuagguaagaugcagucau

SEQ ID NO: 155895 - RNA, 19 nt, Artificial Sequence
  Description of Artificial Sequence: Synthetic oligonucleotide
  Antisense strand to SEQ ID NO: 155894
augacugcaucuuaccuaa

SEQ ID NO: 155896 - RNA, 19 nt, Artificial Sequence
  Description of Artificial Sequence: Synthetic oligonucleotide
  Sense strand starting at position 2962 of SEQ ID NO: 2003
ugcagucauuuaucuuauc

SEQ ID NO: 155897 - RNA, 19 nt, Artificial Sequence
  Description of Artificial Sequence: Synthetic oligonucleotide
  Antisense strand to SEQ ID NO: 155896
gauaagauaaaugacugca

SEQ ID NO: 155898 - RNA, 19 nt, Artificial Sequence
  Description of Artificial Sequence: Synthetic oligonucleotide
  Sense strand starting at position 2963 of SEQ ID NO: 2003
gcagucauuuaucuuaucu

SEQ ID NO: 155899 - RNA, 19 nt, Artificial Sequence
  Description of Artificial Sequence: Synthetic oligonucleotide
  Antisense strand to SEQ ID NO: 155898
agauaagauaaaugacugc

SEQ ID NO: 155900 - RNA, 19 nt, Artificial Sequence
  Description of Artificial Sequence: Synthetic oligonucleotide
  Sense strand starting at position 3026 of SEQ ID NO: 2003
ucaguaucugacuacucau

SEQ ID NO: 155901 - RNA, 19 nt, Artificial Sequence
  Description of Artificial Sequence: Synthetic oligonucleotide
  Antisense strand to SEQ ID NO: 155900
augaguagucagauacuga

SEQ ID NO: 155902 - RNA, 19 nt, Artificial Sequence
  Description of Artificial Sequence: Synthetic oligonucleotide
  Sense strand starting at position 3091 of SEQ ID NO: 2003
auggaacagcucugagagu

SEQ ID NO: 155903 - RNA, 19 nt, Artificial Sequence
  Description of Artificial Sequence: Synthetic oligonucleotide
  Antisense strand to SEQ ID NO: 155902
acucucagagcuguuccau

SEQ ID NO: 155904 - RNA, 19 nt, Artificial Sequence
  Description of Artificial Sequence: Synthetic oligonucleotide
  Sense strand starting at position 3217 of SEQ ID NO: 2003
ucucaaagccauuaggagu

SEQ ID NO: 155905 - RNA, 19 nt, Artificial Sequence
  Description of Artificial Sequence: Synthetic oligonucleotide
  Antisense strand to SEQ ID NO: 155904
acuccuaauggcuuugaga

SEQ ID NO: 155906 - RNA, 19 nt, Artificial Sequence
  Description of Artificial Sequence: Synthetic oligonucleotide
  Sense strand starting at position 3315 of SEQ ID NO: 2003
uuaugcuuuggugaaggau

SEQ ID NO: 155907 - RNA, 19 nt, Artificial Sequence
  Description of Artificial Sequence: Synthetic oligonucleotide
  Antisense strand to SEQ ID NO: 155906
auccuucaccaaagcauaa

SEQ ID NO: 155908 - RNA, 19 nt, Artificial Sequence
  Description of Artificial Sequence: Synthetic oligonucleotide
  Sense strand starting at position 3318 of SEQ ID NO: 2003
ugcuuuggugaaggaugaa

SEQ ID NO: 155909 - RNA, 19 nt, Artificial Sequence
  Description of Artificial Sequence: Synthetic oligonucleotide
  Antisense strand to SEQ ID NO: 155908
uucauccuucaccaaagca

SEQ ID NO: 155910 - RNA, 19 nt, Artificial Sequence
  Description of Artificial Sequence: Synthetic oligonucleotide
  Sense strand starting at position 3394 of SEQ ID NO: 2003
ucugccaaugaguaauaua

SEQ ID NO: 155911 - RNA, 19 nt, Artificial Sequence
  Description of Artificial Sequence: Synthetic oligonucleotide
  Antisense strand to SEQ ID NO: 155910
uauauuacucauuggcaga

SEQ ID NO: 155912 - RNA, 19 nt, Artificial Sequence
  Description of Artificial Sequence: Synthetic oligonucleotide
  Sense strand starting at position 3511 of SEQ ID NO: 2003
gaguaauuagaucaagugu

SEQ ID NO: 155913 - RNA, 19 nt, Artificial Sequence
  Description of Artificial Sequence: Synthetic oligonucleotide
  Antisense strand to SEQ ID NO: 155912
acacuugaucuaauuacuc

SEQ ID NO: 155914 - RNA, 19 nt, Artificial Sequence
  Description of Artificial Sequence: Synthetic oligonucleotide
  Sense strand starting at position 3799 of SEQ ID NO: 2003
uugaaauaccaguaucugu

SEQ ID NO: 155915 - RNA, 19 nt, Artificial Sequence
  Description of Artificial Sequence: Synthetic oligonucleotide
  Antisense strand to SEQ ID NO: 155914
acagauacugguauuucaa

SEQ ID NO: 155916 - RNA, 19 nt, Artificial Sequence
  Description of Artificial Sequence: Synthetic oligonucleotide
  Sense strand starting at position 626 of SEQ ID NO: 2004
gccgcuuucucgggagcau

SEQ ID NO: 155917 - RNA, 19 nt, Artificial Sequence
  Description of Artificial Sequence: Synthetic oligonucleotide
  Antisense strand to SEQ ID NO: 155916
augcucccgagaaagcggc

SEQ ID NO: 155918 - RNA, 19 nt, Artificial Sequence
  Description of Artificial Sequence: Synthetic oligonucleotide
  Sense strand starting at position 144 of SEQ ID NO: 2004
gcguuucagagggagagaa

SEQ ID NO: 155919 - RNA, 19 nt, Artificial Sequence
  Description of Artificial Sequence: Synthetic oligonucleotide
  Antisense strand to SEQ ID NO: 155918
uucucucccucugaaacgc

SEQ ID NO: 155920 - RNA, 19 nt, Artificial Sequence
  Description of Artificial Sequence: Synthetic oligonucleotide
  Sense strand starting at position 143 of SEQ ID NO: 2004
ugcguuucagagggagaga

SEQ ID NO: 155921 - RNA, 19 nt, Artificial Sequence
  Description of Artificial Sequence: Synthetic oligonucleotide
  Antisense strand to SEQ ID NO: 155920
ucucucccucugaaacgca

SEQ ID NO: 155922 - RNA, 19 nt, Artificial Sequence
  Description of Artificial Sequence: Synthetic oligonucleotide
  Sense strand starting at position 30 of SEQ ID NO: 2004
ugaguaauuucggcaccuc

SEQ ID NO: 155923 - RNA, 19 nt, Artificial Sequence
  Description of Artificial Sequence: Synthetic oligonucleotide
  Antisense strand to SEQ ID NO: 155922
gaggugccgaaauuacuca

SEQ ID NO: 155924 - RNA, 19 nt, Artificial Sequence
  Description of Artificial Sequence: Synthetic oligonucleotide
  Sense strand starting at position 29 of SEQ ID NO: 2004
cugaguaauuucggcaccu

SEQ ID NO: 155925 - RNA, 19 nt, Artificial Sequence
  Description of Artificial Sequence: Synthetic oligonucleotide
  Antisense strand to SEQ ID NO: 155924
aggugccgaaauuacucag

SEQ ID NO: 155926 - RNA, 19 nt, Artificial Sequence
  Description of Artificial Sequence: Synthetic oligonucleotide
  Sense strand starting at position 6 of SEQ ID NO: 2004
acggaaaguuccugaggac

SEQ ID NO: 155927 - RNA, 19 nt, Artificial Sequence
  Description of Artificial Sequence: Synthetic oligonucleotide
  Antisense strand to SEQ ID NO: 155926
guccucaggaacuuuccgu

SEQ ID NO: 155928 - RNA, 19 nt, Artificial Sequence
  Description of Artificial Sequence: Synthetic oligonucleotide
  Sense strand starting at position 5 of SEQ ID NO: 2004
aacggaaaguuccugagga

SEQ ID NO: 155929 - RNA, 19 nt, Artificial Sequence
  Description of Artificial Sequence: Synthetic oligonucleotide
  Antisense strand to SEQ ID NO: 155928
uccucaggaacuuuccguu

SEQ ID NO: 155930 - RNA, 19 nt, Artificial Sequence
  Description of Artificial Sequence: Synthetic oligonucleotide
  Sense strand starting at position 151 of SEQ ID NO: 2005
ccucaauaagacgagcuau

SEQ ID NO: 155931 - RNA, 19 nt, Artificial Sequence
  Description of Artificial Sequence: Synthetic oligonucleotide
  Antisense strand to SEQ ID NO: 155930
auagcucgucuuauugagg

SEQ ID NO: 155932 - RNA, 19 nt, Artificial Sequence
  Description of Artificial Sequence: Synthetic oligonucleotide
  Sense strand starting at position 312 of SEQ ID NO: 2005
ucacaaauugguugcaaca

SEQ ID NO: 155933 - RNA, 19 nt, Artificial Sequence
  Description of Artificial Sequence: Synthetic oligonucleotide
  Antisense strand to SEQ ID NO: 155932
uguugcaaccaauuuguga

SEQ ID NO: 155934 - RNA, 19 nt, Artificial Sequence
  Description of Artificial Sequence: Synthetic oligonucleotide
  Sense strand starting at position 420 of SEQ ID NO: 2005
ggaaguacgagccauggau

SEQ ID NO: 155935 - RNA, 19 nt, Artificial Sequence
  Description of Artificial Sequence: Synthetic oligonucleotide
  Antisense strand to SEQ ID NO: 155934
auccauggcucguacuucc

SEQ ID NO: 155936 - RNA, 19 nt, Artificial Sequence
  Description of Artificial Sequence: Synthetic oligonucleotide
  Sense strand starting at position 429 of SEQ ID NO: 2005
agccauggaucugcagauu

SEQ ID NO: 155937 - RNA, 19 nt, Artificial Sequence
  Description of Artificial Sequence: Synthetic oligonucleotide
  Antisense strand to SEQ ID NO: 155936
aaucugcagauccauggcu

SEQ ID NO: 155938 - RNA, 19 nt, Artificial Sequence
  Description of Artificial Sequence: Synthetic oligonucleotide
  Sense strand starting at position 882 of SEQ ID NO: 2005
ggagcuacucucugagggu

SEQ ID NO: 155939 - RNA, 19 nt, Artificial Sequence
  Description of Artificial Sequence: Synthetic oligonucleotide
  Antisense strand to SEQ ID NO: 155938
acccucagagaguagcucc

SEQ ID NO: 155940 - RNA, 19 nt, Artificial Sequence
  Description of Artificial Sequence: Synthetic oligonucleotide
  Sense strand starting at position 976 of SEQ ID NO: 2005
uggaccuucucuuccaaga

SEQ ID NO: 155941 - RNA, 19 nt, Artificial Sequence
  Description of Artificial Sequence: Synthetic oligonucleotide
  Antisense strand to SEQ ID NO: 155940
ucuuggaagagaaggucca

SEQ ID NO: 155942 - RNA, 19 nt, Artificial Sequence
  Description of Artificial Sequence: Synthetic oligonucleotide
  Sense strand starting at position 1112 of SEQ ID NO: 2005
cugguuugucagccugcau

SEQ ID NO: 155943 - RNA, 19 nt, Artificial Sequence
  Description of Artificial Sequence: Synthetic oligonucleotide
  Antisense strand to SEQ ID NO: 155942
augcaggcugacaaaccag

SEQ ID NO: 155944 - RNA, 19 nt, Artificial Sequence
  Description of Artificial Sequence: Synthetic oligonucleotide
  Sense strand starting at position 1163 of SEQ ID NO: 2005
gggcaaaucuucucccaga

SEQ ID NO: 155945 - RNA, 19 nt, Artificial Sequence
  Description of Artificial Sequence: Synthetic oligonucleotide
  Antisense strand to SEQ ID NO: 155944
ucugggagaagauuugccc

SEQ ID NO: 155946 - RNA, 19 nt, Artificial Sequence
  Description of Artificial Sequence: Synthetic oligonucleotide
  Sense strand starting at position 1164 of SEQ ID NO: 2005
ggcaaaucuucucccagag

SEQ ID NO: 155947 - RNA, 19 nt, Artificial Sequence
  Description of Artificial Sequence: Synthetic oligonucleotide
  Antisense strand to SEQ ID NO: 155946
cucugggagaagauuugcc

SEQ ID NO: 155948 - RNA, 19 nt, Artificial Sequence
  Description of Artificial Sequence: Synthetic oligonucleotide
  Sense strand starting at position 1223 of SEQ ID NO: 2005
ccagaagaugcccauguaa

SEQ ID NO: 155949 - RNA, 19 nt, Artificial Sequence
  Description of Artificial Sequence: Synthetic oligonucleotide
  Antisense strand to SEQ ID NO: 155948
uuacaugggcaucuucugg

SEQ ID NO: 155950 - RNA, 19 nt, Artificial Sequence
  Description of Artificial Sequence: Synthetic oligonucleotide
  Sense strand starting at position 1281 of SEQ ID NO: 2005
cccuaagacuggucagaaa

SEQ ID NO: 155951 - RNA, 19 nt, Artificial Sequence
  Description of Artificial Sequence: Synthetic oligonucleotide
  Antisense strand to SEQ ID NO: 155950
uuucugaccagucuuaggg

SEQ ID NO: 155952 - RNA, 19 nt, Artificial Sequence
  Description of Artificial Sequence: Synthetic oligonucleotide
  Sense strand starting at position 1397 of SEQ ID NO: 2005
guuccuuccucuuugaaag

SEQ ID NO: 155953 - RNA, 19 nt, Artificial Sequence
  Description of Artificial Sequence: Synthetic oligonucleotide
  Antisense strand to SEQ ID NO: 155952
cuuucaaagaggaaggaac

SEQ ID NO: 155954 - RNA, 19 nt, Artificial Sequence
  Description of Artificial Sequence: Synthetic oligonucleotide
  Sense strand starting at position 1495 of SEQ ID NO: 2005
cgaagauacgcugauuccu

SEQ ID NO: 155955 - RNA, 19 nt, Artificial Sequence
  Description of Artificial Sequence: Synthetic oligonucleotide
  Antisense strand to SEQ ID NO: 155954
aggaaucagcguaucuucg

SEQ ID NO: 155956 - RNA, 19 nt, Artificial Sequence
  Description of Artificial Sequence: Synthetic oligonucleotide
  Sense strand starting at position 1503 of SEQ ID NO: 2005
cgcugauuccuggcagcua

SEQ ID NO: 155957 - RNA, 19 nt, Artificial Sequence
  Description of Artificial Sequence: Synthetic oligonucleotide
  Antisense strand to SEQ ID NO: 155956
uagcugccaggaaucagcg

SEQ ID NO: 155958 - RNA, 19 nt, Artificial Sequence
  Description of Artificial Sequence: Synthetic oligonucleotide
  Sense strand starting at position 1702 of SEQ ID NO: 2005
gcaagcuucgugucaugca

SEQ ID NO: 155959 - RNA, 19 nt, Artificial Sequence
  Description of Artificial Sequence: Synthetic oligonucleotide
  Antisense strand to SEQ ID NO: 155958
ugcaugacacgaagcuugc

SEQ ID NO: 155960 - RNA, 19 nt, Artificial Sequence
  Description of Artificial Sequence: Synthetic oligonucleotide
  Sense strand starting at position 1720 of SEQ ID NO: 2005
agcagaggcugucugauuu

SEQ ID NO: 155961 - RNA, 19 nt, Artificial Sequence
  Description of Artificial Sequence: Synthetic oligonucleotide
  Antisense strand to SEQ ID NO: 155960
aaaucagacagccucugcu

SEQ ID NO: 155962 - RNA, 19 nt, Artificial Sequence
  Description of Artificial Sequence: Synthetic oligonucleotide
  Sense strand starting at position 1724 of SEQ ID NO: 2005
gaggcugucugauuuaugu

SEQ ID NO: 155963 - RNA, 19 nt, Artificial Sequence
  Description of Artificial Sequence: Synthetic oligonucleotide
  Antisense strand to SEQ ID NO: 155962
acauaaaucagacagccuc

SEQ ID NO: 155964 - RNA, 19 nt, Artificial Sequence
  Description of Artificial Sequence: Synthetic oligonucleotide
  Sense strand starting at position 1733 of SEQ ID NO: 2005
ugauuuauguaucaggaac

SEQ ID NO: 155965 - RNA, 19 nt, Artificial Sequence
  Description of Artificial Sequence: Synthetic oligonucleotide
  Antisense strand to SEQ ID NO: 155964
guuccugauacauaaauca

SEQ ID NO: 155966 - RNA, 19 nt, Artificial Sequence
  Description of Artificial Sequence: Synthetic oligonucleotide
  Sense strand starting at position 1735 of SEQ ID NO: 2005
auuuauguaucaggaacca

SEQ ID NO: 155967 - RNA, 19 nt, Artificial Sequence
  Description of Artificial Sequence: Synthetic oligonucleotide
  Antisense strand to SEQ ID NO: 155966
ugguuccugauacauaaau

SEQ ID NO: 155968 - RNA, 19 nt, Artificial Sequence
  Description of Artificial Sequence: Synthetic oligonucleotide
  Sense strand starting at position 1774 of SEQ ID NO: 2005
ccuguaucacugggacuuu

SEQ ID NO: 155969 - RNA, 19 nt, Artificial Sequence
  Description of Artificial Sequence: Synthetic oligonucleotide
  Antisense strand to SEQ ID NO: 155968
aaagucccagugauacagg

SEQ ID NO: 155970 - RNA, 19 nt, Artificial Sequence
  Description of Artificial Sequence: Synthetic oligonucleotide
  Sense strand starting at position 1802 of SEQ ID NO: 2005
ugucuugaggauugcucau

SEQ ID NO: 155971 - RNA, 19 nt, Artificial Sequence
  Description of Artificial Sequence: Synthetic oligonucleotide
  Antisense strand to SEQ ID NO: 155970
augagcaauccucaagaca

SEQ ID NO: 155972 - RNA, 19 nt, Artificial Sequence
  Description of Artificial Sequence: Synthetic oligonucleotide
  Sense strand starting at position 1808 of SEQ ID NO: 2005
gaggauugcucaucuccca

SEQ ID NO: 155973 - RNA, 19 nt, Artificial Sequence
  Description of Artificial Sequence: Synthetic oligonucleotide
  Antisense strand to SEQ ID NO: 155972
ugggagaugagcaauccuc

SEQ ID NO: 155974 - RNA, 19 nt, Artificial Sequence
  Description of Artificial Sequence: Synthetic oligonucleotide
  Sense strand starting at position 1857 of SEQ ID NO: 2005
gaagcaggcuucucaagaa

SEQ ID NO: 155975 - RNA, 19 nt, Artificial Sequence
  Description of Artificial Sequence: Synthetic oligonucleotide
  Antisense strand to SEQ ID NO: 155974
uucuugagaagccugcuuc

SEQ ID NO: 155976 - RNA, 19 nt, Artificial Sequence
  Description of Artificial Sequence: Synthetic oligonucleotide
  Sense strand starting at position 1936 of SEQ ID NO: 2005
cggcuuugggcagaaacau

SEQ ID NO: 155977 - RNA, 19 nt, Artificial Sequence
  Description of Artificial Sequence: Synthetic oligonucleotide
  Antisense strand to SEQ ID NO: 155976
auguuucugcccaaagccg

SEQ ID NO: 155978 - RNA, 19 nt, Artificial Sequence
  Description of Artificial Sequence: Synthetic oligonucleotide
  Sense strand starting at position 2257 of SEQ ID NO: 2005
augagugcaaugugguaua

SEQ ID NO: 155979 - RNA, 19 nt, Artificial Sequence
  Description of Artificial Sequence: Synthetic oligonucleotide
  Antisense strand to SEQ ID NO: 155978
uauaccacauugcacucau

SEQ ID NO: 155980 - RNA, 19 nt, Artificial Sequence
  Description of Artificial Sequence: Synthetic oligonucleotide
  Sense strand starting at position 2551 of SEQ ID NO: 2005
uguugauagaggcaugcaa

SEQ ID NO: 155981 - RNA, 19 nt, Artificial Sequence
  Description of Artificial Sequence: Synthetic oligonucleotide
  Antisense strand to SEQ ID NO: 155980
uugcaugccucuaucaaca

SEQ ID NO: 155982 - RNA, 19 nt, Artificial Sequence
  Description of Artificial Sequence: Synthetic oligonucleotide
  Sense strand starting at position 2932 of SEQ ID NO: 2005
ccauccaugucauugugaa

SEQ ID NO: 155983 - RNA, 19 nt, Artificial Sequence
  Description of Artificial Sequence: Synthetic oligonucleotide
  Antisense strand to SEQ ID NO: 155982
uucacaaugacauggaugg

SEQ ID NO: 155984 - RNA, 19 nt, Artificial Sequence
  Description of Artificial Sequence: Synthetic oligonucleotide
  Sense strand starting at position 2944 of SEQ ID NO: 2005
uugugaaugacaggaucua

SEQ ID NO: 155985 - RNA, 19 nt, Artificial Sequence
  Description of Artificial Sequence: Synthetic oligonucleotide
  Antisense strand to SEQ ID NO: 155984
uagauccugucauucacaa

SEQ ID NO: 155986 - RNA, 19 nt, Artificial Sequence
  Description of Artificial Sequence: Synthetic oligonucleotide
  Sense strand starting at position 3017 of SEQ ID NO: 2005
uccacucaucggugauaga

SEQ ID NO: 155987 - RNA, 19 nt, Artificial Sequence
  Description of Artificial Sequence: Synthetic oligonucleotide
  Antisense strand to SEQ ID NO: 155986
ucuaucaccgaugagugga

SEQ ID NO: 155988 - RNA, 19 nt, Artificial Sequence
  Description of Artificial Sequence: Synthetic oligonucleotide
  Sense strand starting at position 3018 of SEQ ID NO: 2005
ccacucaucggugauagac

SEQ ID NO: 155989 - RNA, 19 nt, Artificial Sequence
  Description of Artificial Sequence: Synthetic oligonucleotide
  Antisense strand to SEQ ID NO: 155988
gucuaucaccgaugagugg

SEQ ID NO: 155990 - RNA, 19 nt, Artificial Sequence
  Description of Artificial Sequence: Synthetic oligonucleotide
  Sense strand starting at position 3365 of SEQ ID NO: 2005
ggaguuugugucuaacuuu

SEQ ID NO: 155991 - RNA, 19 nt, Artificial Sequence
  Description of Artificial Sequence: Synthetic oligonucleotide
  Antisense strand to SEQ ID NO: 155990
aaaguuagacacaaacucc

SEQ ID NO: 155992 - RNA, 19 nt, Artificial Sequence
  Description of Artificial Sequence: Synthetic oligonucleotide
  Sense strand starting at position 3397 of SEQ ID NO: 2005
ggaacuaguauuggcagaa

SEQ ID NO: 155993 - RNA, 19 nt, Artificial Sequence
  Description of Artificial Sequence: Synthetic oligonucleotide
  Antisense strand to SEQ ID NO: 155992
uucugccaauacuaguucc

SEQ ID NO: 155994 - RNA, 19 nt, Artificial Sequence
  Description of Artificial Sequence: Synthetic oligonucleotide
  Sense strand starting at position 3398 of SEQ ID NO: 2005
gaacuaguauuggcagaag

SEQ ID NO: 155995 - RNA, 19 nt, Artificial Sequence
  Description of Artificial Sequence: Synthetic oligonucleotide
  Antisense strand to SEQ ID NO: 155994
cuucugccaauacuaguuc

SEQ ID NO: 155996 - RNA, 19 nt, Artificial Sequence
  Description of Artificial Sequence: Synthetic oligonucleotide
  Sense strand starting at position 3514 of SEQ ID NO: 2005
uuuagaguccauuguaaca

SEQ ID NO: 155997 - RNA, 19 nt, Artificial Sequence
  Description of Artificial Sequence: Synthetic oligonucleotide
  Antisense strand to SEQ ID NO: 155996
uguuacaauggacucuaaa

SEQ ID NO: 155998 - RNA, 19 nt, Artificial Sequence
  Description of Artificial Sequence: Synthetic oligonucleotide
  Sense strand starting at position 3583 of SEQ ID NO: 2005
gcuggugagauaugugaac

SEQ ID NO: 155999 - RNA, 19 nt, Artificial Sequence
  Description of Artificial Sequence: Synthetic oligonucleotide
  Antisense strand to SEQ ID NO: 155998
guucacauaucucaccagc

SEQ ID NO: 156000 - RNA, 19 nt, Artificial Sequence
  Description of Artificial Sequence: Synthetic oligonucleotide
  Sense strand starting at position 3585 of SEQ ID NO: 2005
uggugagauaugugaacuu

SEQ ID NO: 156001 - RNA, 19 nt, Artificial Sequence
  Description of Artificial Sequence: Synthetic oligonucleotide
  Antisense strand to SEQ ID NO: 156000
aaguucacauaucucacca

SEQ ID NO: 156002 - RNA, 19 nt, Artificial Sequence
  Description of Artificial Sequence: Synthetic oligonucleotide
  Sense strand starting at position 3671 of SEQ ID NO: 2005
gugugugcucgagucagca

SEQ ID NO: 156003 - RNA, 19 nt, Artificial Sequence
  Description of Artificial Sequence: Synthetic oligonucleotide
  Antisense strand to SEQ ID NO: 156002
ugcugacucgagcacacac

SEQ ID NO: 156004 - RNA, 19 nt, Artificial Sequence
  Description of Artificial Sequence: Synthetic oligonucleotide
  Sense strand starting at position 3885 of SEQ ID NO: 2005
aaucuugugaggugcuuga

SEQ ID NO: 156005 - RNA, 19 nt, Artificial Sequence
  Description of Artificial Sequence: Synthetic oligonucleotide
  Antisense strand to SEQ ID NO: 156004
ucaagcaccucacaagauu

SEQ ID NO: 156006 - RNA, 19 nt, Artificial Sequence
  Description of Artificial Sequence: Synthetic oligonucleotide
  Sense strand starting at position 3889 of SEQ ID NO: 2005
uugugaggugcuugaugaa

SEQ ID NO: 156007 - RNA, 19 nt, Artificial Sequence
  Description of Artificial Sequence: Synthetic oligonucleotide
  Antisense strand to SEQ ID NO: 156006
uucaucaagcaccucacaa

SEQ ID NO: 156008 - RNA, 19 nt, Artificial Sequence
  Description of Artificial Sequence: Synthetic oligonucleotide
  Sense strand starting at position 3901 of SEQ ID NO: 2005
ugaugaacauggccauuau

SEQ ID NO: 156009 - RNA, 19 nt, Artificial Sequence
  Description of Artificial Sequence: Synthetic oligonucleotide
  Antisense strand to SEQ ID NO: 156008
auaauggccauguucauca

SEQ ID NO: 156010 - RNA, 19 nt, Artificial Sequence
  Description of Artificial Sequence: Synthetic oligonucleotide
  Sense strand starting at position 43 of SEQ ID NO: 2006
gugagcaaguuacuuuagu

SEQ ID NO: 156011 - RNA, 19 nt, Artificial Sequence
  Description of Artificial Sequence: Synthetic oligonucleotide
  Antisense strand to SEQ ID NO: 156010
acuaaaguaacuugcucac

SEQ ID NO: 156012 - RNA, 19 nt, Artificial Sequence
  Description of Artificial Sequence: Synthetic oligonucleotide
  Sense strand starting at position 80 of SEQ ID NO: 2006
ccaucugugaaguggagau

SEQ ID NO: 156013 - RNA, 19 nt, Artificial Sequence
  Description of Artificial Sequence: Synthetic oligonucleotide
  Antisense strand to SEQ ID NO: 156012
aucuccacuucacagaugg

SEQ ID NO: 156014 - RNA, 19 nt, Artificial Sequence
  Description of Artificial Sequence: Synthetic oligonucleotide
  Sense strand starting at position 92 of SEQ ID NO: 2006
uggagauuggagcacugua

SEQ ID NO: 156015 - RNA, 19 nt, Artificial Sequence
  Description of Artificial Sequence: Synthetic oligonucleotide
  Antisense strand to SEQ ID NO: 156014
uacagugcuccaaucucca

SEQ ID NO: 156016 - RNA, 19 nt, Artificial Sequence
  Description of Artificial Sequence: Synthetic oligonucleotide
  Sense strand starting at position 120 of SEQ ID NO: 2006
gggucauuauaagaaguau

SEQ ID NO: 156017 - RNA, 19 nt, Artificial Sequence
  Description of Artificial Sequence: Synthetic oligonucleotide
  Antisense strand to SEQ ID NO: 156016
auacuucuuauaaugaccc

SEQ ID NO: 156018 - RNA, 19 nt, Artificial Sequence
  Description of Artificial Sequence: Synthetic oligonucleotide
  Sense strand starting at position 193 of SEQ ID NO: 2006
uuauucuagagguggaaau

SEQ ID NO: 156019 - RNA, 19 nt, Artificial Sequence
  Description of Artificial Sequence: Synthetic oligonucleotide
  Antisense strand to SEQ ID NO: 156018
auuuccaccucuagaauaa

SEQ ID NO: 156020 - RNA, 19 nt, Artificial Sequence
  Description of Artificial Sequence: Synthetic oligonucleotide
  Sense strand starting at position 245 of SEQ ID NO: 2006
ucaagauucugcuccuaga

SEQ ID NO: 156021 - RNA, 19 nt, Artificial Sequence
  Description of Artificial Sequence: Synthetic oligonucleotide
  Antisense strand to SEQ ID NO: 156020
ucuaggagcagaaucuuga

SEQ ID NO: 156022 - RNA, 19 nt, Artificial Sequence
  Description of Artificial Sequence: Synthetic oligonucleotide
  Sense strand starting at position 271 of SEQ ID NO: 2006
guggcucuugaaugaagga

SEQ ID NO: 156023 - RNA, 19 nt, Artificial Sequence
  Description of Artificial Sequence: Synthetic oligonucleotide
  Antisense strand to SEQ ID NO: 156022
uccuucauucaagagccac

SEQ ID NO: 156024 - RNA, 19 nt, Artificial Sequence
  Description of Artificial Sequence: Synthetic oligonucleotide
  Sense strand starting at position 325 of SEQ ID NO: 2006
ucccaaaguucuguucuca

SEQ ID NO: 156025 - RNA, 19 nt, Artificial Sequence
  Description of Artificial Sequence: Synthetic oligonucleotide
  Antisense strand to SEQ ID NO: 156024
ugagaacagaacuuuggga

SEQ ID NO: 156026 - RNA, 19 nt, Artificial Sequence
  Description of Artificial Sequence: Synthetic oligonucleotide
  Sense strand starting at position 441 of SEQ ID NO: 2006
acguaacuuccucauguau

SEQ ID NO: 156027 - RNA, 19 nt, Artificial Sequence
  Description of Artificial Sequence: Synthetic oligonucleotide
  Antisense strand to SEQ ID NO: 156026
auacaugaggaaguuacgu

SEQ ID NO: 156028 - RNA, 19 nt, Artificial Sequence
  Description of Artificial Sequence: Synthetic oligonucleotide
  Sense strand starting at position 551 of SEQ ID NO: 2006
uggcuauccugucugaaau

SEQ ID NO: 156029 - RNA, 19 nt, Artificial Sequence
  Description of Artificial Sequence: Synthetic oligonucleotide
  Antisense strand to SEQ ID NO: 156028
auuucagacaggauagcca

SEQ ID NO: 156030 - RNA, 19 nt, Artificial Sequence
  Description of Artificial Sequence: Synthetic oligonucleotide
  Sense strand starting at position 552 of SEQ ID NO: 2006
ggcuauccugucugaaauu

SEQ ID NO: 156031 - RNA, 19 nt, Artificial Sequence
  Description of Artificial Sequence: Synthetic oligonucleotide
  Antisense strand to SEQ ID NO: 156030
aauuucagacaggauagcc

SEQ ID NO: 156032 - RNA, 19 nt, Artificial Sequence
  Description of Artificial Sequence: Synthetic oligonucleotide
  Sense strand starting at position 553 of SEQ ID NO: 2006
gcuauccugucugaaauuu

SEQ ID NO: 156033 - RNA, 19 nt, Artificial Sequence
  Description of Artificial Sequence: Synthetic oligonucleotide
  Antisense strand to SEQ ID NO: 156032
aaauuucagacaggauagc

SEQ ID NO: 156034 - RNA, 19 nt, Artificial Sequence
  Description of Artificial Sequence: Synthetic oligonucleotide
  Sense strand starting at position 824 of SEQ ID NO: 2006
acuccauauugaugggauc

SEQ ID NO: 156035 - RNA, 19 nt, Artificial Sequence
  Description of Artificial Sequence: Synthetic oligonucleotide
  Antisense strand to SEQ ID NO: 156034
gaucccaucaauauggagu

SEQ ID NO: 156036 - RNA, 19 nt, Artificial Sequence
  Description of Artificial Sequence: Synthetic oligonucleotide
  Sense strand starting at position 825 of SEQ ID NO: 2006
cuccauauugaugggaucu

SEQ ID NO: 156037 - RNA, 19 nt, Artificial Sequence
  Description of Artificial Sequence: Synthetic oligonucleotide
  Antisense strand to SEQ ID NO: 156036
agaucccaucaauauggag

SEQ ID NO: 156038 - RNA, 19 nt, Artificial Sequence
  Description of Artificial Sequence: Synthetic oligonucleotide
  Sense strand starting at position 827 of SEQ ID NO: 2006
ccauauugaugggaucucu

SEQ ID NO: 156039 - RNA, 19 nt, Artificial Sequence
  Description of Artificial Sequence: Synthetic oligonucleotide
  Antisense strand to SEQ ID NO: 156038
agagaucccaucaauaugg

SEQ ID NO: 156040 - RNA, 19 nt, Artificial Sequence
  Description of Artificial Sequence: Synthetic oligonucleotide
  Sense strand starting at position 926 of SEQ ID NO: 2006
gucgcaugcuggcuaauga

SEQ ID NO: 156041 - RNA, 19 nt, Artificial Sequence
  Description of Artificial Sequence: Synthetic oligonucleotide
  Antisense strand to SEQ ID NO: 156040
ucauuagccagcaugcgac

SEQ ID NO: 156042 - RNA, 19 nt, Artificial Sequence
  Description of Artificial Sequence: Synthetic oligonucleotide
  Sense strand starting at position 927 of SEQ ID NO: 2006
ucgcaugcuggcuaaugaa

SEQ ID NO: 156043 - RNA, 19 nt, Artificial Sequence
  Description of Artificial Sequence: Synthetic oligonucleotide
  Antisense strand to SEQ ID NO: 156042
uucauuagccagcaugcga

SEQ ID NO: 156044 - RNA, 19 nt, Artificial Sequence
  Description of Artificial Sequence: Synthetic oligonucleotide
  Sense strand starting at position 1020 of SEQ ID NO: 2006
auagaauucucaugagacu

SEQ ID NO: 156045 - RNA, 19 nt, Artificial Sequence
  Description of Artificial Sequence: Synthetic oligonucleotide
  Antisense strand to SEQ ID NO: 156044
agucucaugagaauucuau

SEQ ID NO: 156046 - RNA, 19 nt, Artificial Sequence
  Description of Artificial Sequence: Synthetic oligonucleotide
  Sense strand starting at position 1029 of SEQ ID NO: 2006
ucaugagacucauaacgug

SEQ ID NO: 156047 - RNA, 19 nt, Artificial Sequence
  Description of Artificial Sequence: Synthetic oligonucleotide
  Antisense strand to SEQ ID NO: 156046
cacguuaugagucucauga

SEQ ID NO: 156048 - RNA, 19 nt, Artificial Sequence
  Description of Artificial Sequence: Synthetic oligonucleotide
  Sense strand starting at position 1058 of SEQ ID NO: 2006
cuggcacaauacuugaaau

SEQ ID NO: 156049 - RNA, 19 nt, Artificial Sequence
  Description of Artificial Sequence: Synthetic oligonucleotide
  Antisense strand to SEQ ID NO: 156048
auuucaaguauugugccag

SEQ ID NO: 156050 - RNA, 19 nt, Artificial Sequence
  Description of Artificial Sequence: Synthetic oligonucleotide
  Sense strand starting at position 1076 of SEQ ID NO: 2006
uacaauaagugcucaguga

SEQ ID NO: 156051 - RNA, 19 nt, Artificial Sequence
  Description of Artificial Sequence: Synthetic oligonucleotide
  Antisense strand to SEQ ID NO: 156050
ucacugagcacuuauugua

SEQ ID NO: 156052 - RNA, 19 nt, Artificial Sequence
  Description of Artificial Sequence: Synthetic oligonucleotide
  Sense strand starting at position 1090 of SEQ ID NO: 2006
agugaaugcuuccuacuuu

SEQ ID NO: 156053 - RNA, 19 nt, Artificial Sequence
  Description of Artificial Sequence: Synthetic oligonucleotide
  Antisense strand to SEQ ID NO: 156052
aaaguaggaagcauucacu

SEQ ID NO: 156054 - RNA, 19 nt, Artificial Sequence
  Description of Artificial Sequence: Synthetic oligonucleotide
  Sense strand starting at position 1122 of SEQ ID NO: 2006
gggcuagcucuggacuaga

SEQ ID NO: 156055 - RNA, 19 nt, Artificial Sequence
  Description of Artificial Sequence: Synthetic oligonucleotide
  Antisense strand to SEQ ID NO: 156054
ucuaguccagagcuagccc

SEQ ID NO: 156056 - RNA, 19 nt, Artificial Sequence
  Description of Artificial Sequence: Synthetic oligonucleotide
  Sense strand starting at position 1133 of SEQ ID NO: 2006
ggacuagauuuccauuggu

SEQ ID NO: 156057 - RNA, 19 nt, Artificial Sequence
  Description of Artificial Sequence: Synthetic oligonucleotide
  Antisense strand to SEQ ID NO: 156056
accaauggaaaucuagucc

SEQ ID NO: 156058 - RNA, 19 nt, Artificial Sequence
  Description of Artificial Sequence: Synthetic oligonucleotide
  Sense strand starting at position 1156 of SEQ ID NO: 2006
uggacuaucucugccugaa

SEQ ID NO: 156059 - RNA, 19 nt, Artificial Sequence
  Description of Artificial Sequence: Synthetic oligonucleotide
  Antisense strand to SEQ ID NO: 156058
uucaggcagagauagucca

SEQ ID NO: 156060 - RNA, 19 nt, Artificial Sequence
  Description of Artificial Sequence: Synthetic oligonucleotide
  Sense strand starting at position 1461 of SEQ ID NO: 2006
uaauuuagaugaggauagu

SEQ ID NO: 156061 - RNA, 19 nt, Artificial Sequence
  Description of Artificial Sequence: Synthetic oligonucleotide
  Antisense strand to SEQ ID NO: 156060
acuauccucaucuaaauua

SEQ ID NO: 156062 - RNA, 19 nt, Artificial Sequence
  Description of Artificial Sequence: Synthetic oligonucleotide
  Sense strand starting at position 1495 of SEQ ID NO: 2006
uaaguaaccucccugaggu

SEQ ID NO: 156063 - RNA, 19 nt, Artificial Sequence
  Description of Artificial Sequence: Synthetic oligonucleotide
  Antisense strand to SEQ ID NO: 156062
accucagggagguuacuua

SEQ ID NO: 156064 - RNA, 19 nt, Artificial Sequence
  Description of Artificial Sequence: Synthetic oligonucleotide
  Sense strand starting at position 1496 of SEQ ID NO: 2006
aaguaaccucccugagguu

SEQ ID NO: 156065 - RNA, 19 nt, Artificial Sequence
  Description of Artificial Sequence: Synthetic oligonucleotide
  Antisense strand to SEQ ID NO: 156064
aaccucagggagguuacuu

SEQ ID NO: 156066 - RNA, 19 nt, Artificial Sequence
  Description of Artificial Sequence: Synthetic oligonucleotide
  Sense strand starting at position 1508 of SEQ ID NO: 2006
ugagguucacaguacgaua

SEQ ID NO: 156067 - RNA, 19 nt, Artificial Sequence
  Description of Artificial Sequence: Synthetic oligonucleotide
  Antisense strand to SEQ ID NO: 156066
uaucguacugugaaccuca

SEQ ID NO: 156068 - RNA, 19 nt, Artificial Sequence
  Description of Artificial Sequence: Synthetic oligonucleotide
  Sense strand starting at position 1526 of SEQ ID NO: 2006
aguagauacauugguauga

SEQ ID NO: 156069 - RNA, 19 nt, Artificial Sequence
  Description of Artificial Sequence: Synthetic oligonucleotide
  Antisense strand to SEQ ID NO: 156068
ucauaccaauguaucuacu

SEQ ID NO: 156070 - RNA, 19 nt, Artificial Sequence
  Description of Artificial Sequence: Synthetic oligonucleotide
  Sense strand starting at position 1558 of SEQ ID NO: 2006
uggucuugguacucuuuau

SEQ ID NO: 156071 - RNA, 19 nt, Artificial Sequence
  Description of Artificial Sequence: Synthetic oligonucleotide
  Antisense strand to SEQ ID NO: 156070
auaaagaguaccaagacca

SEQ ID NO: 156072 - RNA, 19 nt, Artificial Sequence
  Description of Artificial Sequence: Synthetic oligonucleotide
  Sense strand starting at position 1578 of SEQ ID NO: 2006
acacaagaugcuggucaua

SEQ ID NO: 156073 - RNA, 19 nt, Artificial Sequence
  Description of Artificial Sequence: Synthetic oligonucleotide
  Antisense strand to SEQ ID NO: 156072
uaugaccagcaucuugugu

SEQ ID NO: 156074 - RNA, 19 nt, Artificial Sequence
  Description of Artificial Sequence: Synthetic oligonucleotide
  Sense strand starting at position 1580 of SEQ ID NO: 2006
acaagaugcuggucauaaa

SEQ ID NO: 156075 - RNA, 19 nt, Artificial Sequence
  Description of Artificial Sequence: Synthetic oligonucleotide
  Antisense strand to SEQ ID NO: 156074
uuuaugaccagcaucuugu

SEQ ID NO: 156076 - RNA, 19 nt, Artificial Sequence
  Description of Artificial Sequence: Synthetic oligonucleotide
  Sense strand starting at position 1840 of SEQ ID NO: 2006
gggagucacucagugacua

SEQ ID NO: 156077 - RNA, 19 nt, Artificial Sequence
  Description of Artificial Sequence: Synthetic oligonucleotide
  Antisense strand to SEQ ID NO: 156076
uagucacugagugacuccc

SEQ ID NO: 156078 - RNA, 19 nt, Artificial Sequence
  Description of Artificial Sequence: Synthetic oligonucleotide
  Sense strand starting at position 1860 of SEQ ID NO: 2006
accgaucuggauugacauu

SEQ ID NO: 156079 - RNA, 19 nt, Artificial Sequence
  Description of Artificial Sequence: Synthetic oligonucleotide
  Antisense strand to SEQ ID NO: 156078
aaugucaauccagaucggu

SEQ ID NO: 156080 - RNA, 19 nt, Artificial Sequence
  Description of Artificial Sequence: Synthetic oligonucleotide
  Sense strand starting at position 1927 of SEQ ID NO: 2006
acaugcuuuccgcggugaa

SEQ ID NO: 156081 - RNA, 19 nt, Artificial Sequence
  Description of Artificial Sequence: Synthetic oligonucleotide
  Antisense strand to SEQ ID NO: 156080
uucaccgcggaaagcaugu

SEQ ID NO: 156082 - RNA, 19 nt, Artificial Sequence
  Description of Artificial Sequence: Synthetic oligonucleotide
  Sense strand starting at position 1961 of SEQ ID NO: 2006
ccuugaggcagucaauguu

SEQ ID NO: 156083 - RNA, 19 nt, Artificial Sequence
  Description of Artificial Sequence: Synthetic oligonucleotide
  Antisense strand to SEQ ID NO: 156082
aacauugacugccucaagg

SEQ ID NO: 156084 - RNA, 19 nt, Artificial Sequence
  Description of Artificial Sequence: Synthetic oligonucleotide
  Sense strand starting at position 2233 of SEQ ID NO: 2006
ugaguucagcaaggugaaa

SEQ ID NO: 156085 - RNA, 19 nt, Artificial Sequence
  Description of Artificial Sequence: Synthetic oligonucleotide
  Antisense strand to SEQ ID NO: 156084
uuucaccuugcugaacuca

SEQ ID NO: 156086 - RNA, 19 nt, Artificial Sequence
  Description of Artificial Sequence: Synthetic oligonucleotide
  Sense strand starting at position 2294 of SEQ ID NO: 2006
acuagcuaugaguaaucca

SEQ ID NO: 156087 - RNA, 19 nt, Artificial Sequence
  Description of Artificial Sequence: Synthetic oligonucleotide
  Antisense strand to SEQ ID NO: 156086
uggauuacucauagcuagu

SEQ ID NO: 156088 - RNA, 19 nt, Artificial Sequence
  Description of Artificial Sequence: Synthetic oligonucleotide
  Sense strand starting at position 3858 of SEQ ID NO: 2006
acaauugucuuggcuauau

SEQ ID NO: 156089 - RNA, 19 nt, Artificial Sequence
  Description of Artificial Sequence: Synthetic oligonucleotide
  Antisense strand to SEQ ID NO: 156088
auauagccaagacaauugu

SEQ ID NO: 156090 - RNA, 19 nt, Artificial Sequence
  Description of Artificial Sequence: Synthetic oligonucleotide
  Sense strand starting at position 3966 of SEQ ID NO: 2007
ucagaagugugauuauaau

SEQ ID NO: 156091 - RNA, 19 nt, Artificial Sequence
  Description of Artificial Sequence: Synthetic oligonucleotide
  Antisense strand to SEQ ID NO: 156090
auuauaaucacacuucuga

SEQ ID NO: 156092 - RNA, 19 nt, Artificial Sequence
  Description of Artificial Sequence: Synthetic oligonucleotide
  Sense strand starting at position 3780 of SEQ ID NO: 2007
ccucauuccuggguauaaa

SEQ ID NO: 156093 - RNA, 19 nt, Artificial Sequence
  Description of Artificial Sequence: Synthetic oligonucleotide
  Antisense strand to SEQ ID NO: 156092
uuuauacccaggaaugagg

SEQ ID NO: 156094 - RNA, 19 nt, Artificial Sequence
  Description of Artificial Sequence: Synthetic oligonucleotide
  Sense strand starting at position 3779 of SEQ ID NO: 2007
cccucauuccuggguauaa

SEQ ID NO: 156095 - RNA, 19 nt, Artificial Sequence
  Description of Artificial Sequence: Synthetic oligonucleotide
  Antisense strand to SEQ ID NO: 156094
uuauacccaggaaugaggg

SEQ ID NO: 156096 - RNA, 19 nt, Artificial Sequence
  Description of Artificial Sequence: Synthetic oligonucleotide
  Sense strand starting at position 3778 of SEQ ID NO: 2007
acccucauuccuggguaua

SEQ ID NO: 156097 - RNA, 19 nt, Artificial Sequence
  Description of Artificial Sequence: Synthetic oligonucleotide
  Antisense strand to SEQ ID NO: 156096
uauacccaggaaugagggu

SEQ ID NO: 156098 - RNA, 19 nt, Artificial Sequence
  Description of Artificial Sequence: Synthetic oligonucleotide
  Sense strand starting at position 3211 of SEQ ID NO: 2007
agaaccauaucgguaagau

SEQ ID NO: 156099 - RNA, 19 nt, Artificial Sequence
  Description of Artificial Sequence: Synthetic oligonucleotide
  Antisense strand to SEQ ID NO: 156098
aucuuaccgauaugguucu

SEQ ID NO: 156100 - RNA, 19 nt, Artificial Sequence
  Description of Artificial Sequence: Synthetic oligonucleotide
  Sense strand starting at position 3206 of SEQ ID NO: 2007
cauugagaaccauaucggu

SEQ ID NO: 156101 - RNA, 19 nt, Artificial Sequence
  Description of Artificial Sequence: Synthetic oligonucleotide
  Antisense strand to SEQ ID NO: 156100
accgauaugguucucaaug

SEQ ID NO: 156102 - RNA, 19 nt, Artificial Sequence
  Description of Artificial Sequence: Synthetic oligonucleotide
  Sense strand starting at position 2821 of SEQ ID NO: 2007
ggguauauucuggagcuau

SEQ ID NO: 156103 - RNA, 19 nt, Artificial Sequence
  Description of Artificial Sequence: Synthetic oligonucleotide
  Antisense strand to SEQ ID NO: 156102
auagcuccagaauauaccc

SEQ ID NO: 156104 - RNA, 19 nt, Artificial Sequence
  Description of Artificial Sequence: Synthetic oligonucleotide
  Sense strand starting at position 2504 of SEQ ID NO: 2007
gguaauaugguugacaguu

SEQ ID NO: 156105 - RNA, 19 nt, Artificial Sequence
  Description of Artificial Sequence: Synthetic oligonucleotide
  Antisense strand to SEQ ID NO: 156104
aacugucaaccauauuacc

SEQ ID NO: 156106 - RNA, 19 nt, Artificial Sequence
  Description of Artificial Sequence: Synthetic oligonucleotide
  Sense strand starting at position 2503 of SEQ ID NO: 2007
agguaauaugguugacagu

SEQ ID NO: 156107 - RNA, 19 nt, Artificial Sequence
  Description of Artificial Sequence: Synthetic oligonucleotide
  Antisense strand to SEQ ID NO: 156106
acugucaaccauauuaccu

SEQ ID NO: 156108 - RNA, 19 nt, Artificial Sequence
  Description of Artificial Sequence: Synthetic oligonucleotide
  Sense strand starting at position 2446 of SEQ ID NO: 2007
gaaguuuagguugagauuc

SEQ ID NO: 156109 - RNA, 19 nt, Artificial Sequence
  Description of Artificial Sequence: Synthetic oligonucleotide
  Antisense strand to SEQ ID NO: 156108
gaaucucaaccuaaacuuc

SEQ ID NO: 156110 - RNA, 19 nt, Artificial Sequence
  Description of Artificial Sequence: Synthetic oligonucleotide
  Sense strand starting at position 2445 of SEQ ID NO: 2007
ugaaguuuagguugagauu

SEQ ID NO: 156111 - RNA, 19 nt, Artificial Sequence
  Description of Artificial Sequence: Synthetic oligonucleotide
  Antisense strand to SEQ ID NO: 156110
aaucucaaccuaaacuuca

SEQ ID NO: 156112 - RNA, 19 nt, Artificial Sequence
  Description of Artificial Sequence: Synthetic oligonucleotide
  Sense strand starting at position 2443 of SEQ ID NO: 2007
ugugaaguuuagguugaga

SEQ ID NO: 156113 - RNA, 19 nt, Artificial Sequence
  Description of Artificial Sequence: Synthetic oligonucleotide
  Antisense strand to SEQ ID NO: 156112
ucucaaccuaaacuucaca

SEQ ID NO: 156114 - RNA, 19 nt, Artificial Sequence
  Description of Artificial Sequence: Synthetic oligonucleotide
  Sense strand starting at position 2431 of SEQ ID NO: 2007
uuuaauguaaggugugaag

SEQ ID NO: 156115 - RNA, 19 nt, Artificial Sequence
  Description of Artificial Sequence: Synthetic oligonucleotide
  Antisense strand to SEQ ID NO: 156114
cuucacaccuuacauuaaa

SEQ ID NO: 156116 - RNA, 19 nt, Artificial Sequence
  Description of Artificial Sequence: Synthetic oligonucleotide
  Sense strand starting at position 2413 of SEQ ID NO: 2007
uuaaauguaugauccuguu

SEQ ID NO: 156117 - RNA, 19 nt, Artificial Sequence
  Description of Artificial Sequence: Synthetic oligonucleotide
  Antisense strand to SEQ ID NO: 156116
aacaggaucauacauuuaa

SEQ ID NO: 156118 - RNA, 19 nt, Artificial Sequence
  Description of Artificial Sequence: Synthetic oligonucleotide
  Sense strand starting at position 2294 of SEQ ID NO: 2007
gggucuuuggcagagcaaa

SEQ ID NO: 156119 - RNA, 19 nt, Artificial Sequence
  Description of Artificial Sequence: Synthetic oligonucleotide
  Antisense strand to SEQ ID NO: 156118
uuugcucugccaaagaccc

SEQ ID NO: 156120 - RNA, 19 nt, Artificial Sequence
  Description of Artificial Sequence: Synthetic oligonucleotide
  Sense strand starting at position 2109 of SEQ ID NO: 2007
ccauauccuccuuggugaa

SEQ ID NO: 156121 - RNA, 19 nt, Artificial Sequence
  Description of Artificial Sequence: Synthetic oligonucleotide
  Antisense strand to SEQ ID NO: 156120
uucaccaaggaggauaugg

SEQ ID NO: 156122 - RNA, 19 nt, Artificial Sequence
  Description of Artificial Sequence: Synthetic oligonucleotide
  Sense strand starting at position 2108 of SEQ ID NO: 2007
uccauauccuccuugguga

SEQ ID NO: 156123 - RNA, 19 nt, Artificial Sequence
  Description of Artificial Sequence: Synthetic oligonucleotide
  Antisense strand to SEQ ID NO: 156122
ucaccaaggaggauaugga

SEQ ID NO: 156124 - RNA, 19 nt, Artificial Sequence
  Description of Artificial Sequence: Synthetic oligonucleotide
  Sense strand starting at position 1578 of SEQ ID NO: 2007
gcaaauguuagaugagaac

SEQ ID NO: 156125 - RNA, 19 nt, Artificial Sequence
  Description of Artificial Sequence: Synthetic oligonucleotide
  Antisense strand to SEQ ID NO: 156124
guucucaucuaacauuugc

SEQ ID NO: 156126 - RNA, 19 nt, Artificial Sequence
  Description of Artificial Sequence: Synthetic oligonucleotide
  Sense strand starting at position 1369 of SEQ ID NO: 2007
guuucugaggcccaggaaa

SEQ ID NO: 156127 - RNA, 19 nt, Artificial Sequence
  Description of Artificial Sequence: Synthetic oligonucleotide
  Antisense strand to SEQ ID NO: 156126
uuuccugggccucagaaac

SEQ ID NO: 156128 - RNA, 19 nt, Artificial Sequence
  Description of Artificial Sequence: Synthetic oligonucleotide
  Sense strand starting at position 1202 of SEQ ID NO: 2007
uacauugcuugaguaagga

SEQ ID NO: 156129 - RNA, 19 nt, Artificial Sequence
  Description of Artificial Sequence: Synthetic oligonucleotide
  Antisense strand to SEQ ID NO: 156128
uccuuacucaagcaaugua

SEQ ID NO: 156130 - RNA, 19 nt, Artificial Sequence
  Description of Artificial Sequence: Synthetic oligonucleotide
  Sense strand starting at position 1200 of SEQ ID NO: 2007
auuacauugcuugaguaag

SEQ ID NO: 156131 - RNA, 19 nt, Artificial Sequence
  Description of Artificial Sequence: Synthetic oligonucleotide
  Antisense strand to SEQ ID NO: 156130
cuuacucaagcaauguaau

SEQ ID NO: 156132 - RNA, 19 nt, Artificial Sequence
  Description of Artificial Sequence: Synthetic oligonucleotide
  Sense strand starting at position 1199 of SEQ ID NO: 2007
gauuacauugcuugaguaa

SEQ ID NO: 156133 - RNA, 19 nt, Artificial Sequence
  Description of Artificial Sequence: Synthetic oligonucleotide
  Antisense strand to SEQ ID NO: 156132
uuacucaagcaauguaauc

SEQ ID NO: 156134 - RNA, 19 nt, Artificial Sequence
  Description of Artificial Sequence: Synthetic oligonucleotide
  Sense strand starting at position 1198 of SEQ ID NO: 2007
ugauuacauugcuugagua

SEQ ID NO: 156135 - RNA, 19 nt, Artificial Sequence
  Description of Artificial Sequence: Synthetic oligonucleotide
  Antisense strand to SEQ ID NO: 156134
uacucaagcaauguaauca

SEQ ID NO: 156136 - RNA, 19 nt, Artificial Sequence
  Description of Artificial Sequence: Synthetic oligonucleotide
  Sense strand starting at position 1195 of SEQ ID NO: 2007
gacugauuacauugcuuga

SEQ ID NO: 156137 - RNA, 19 nt, Artificial Sequence
  Description of Artificial Sequence: Synthetic oligonucleotide
  Antisense strand to SEQ ID NO: 156136
ucaagcaauguaaucaguc

SEQ ID NO: 156138 - RNA, 19 nt, Artificial Sequence
  Description of Artificial Sequence: Synthetic oligonucleotide
  Sense strand starting at position 1189 of SEQ ID NO: 2007
aguagagacugauuacauu

SEQ ID NO: 156139 - RNA, 19 nt, Artificial Sequence
  Description of Artificial Sequence: Synthetic oligonucleotide
  Antisense strand to SEQ ID NO: 156138
aauguaaucagucucuacu

SEQ ID NO: 156140 - RNA, 19 nt, Artificial Sequence
  Description of Artificial Sequence: Synthetic oligonucleotide
  Sense strand starting at position 1178 of SEQ ID NO: 2007
uugguucucuaaguagaga

SEQ ID NO: 156141 - RNA, 19 nt, Artificial Sequence
  Description of Artificial Sequence: Synthetic oligonucleotide
  Antisense strand to SEQ ID NO: 156140
ucucuacuuagagaaccaa

SEQ ID NO: 156142 - RNA, 19 nt, Artificial Sequence
  Description of Artificial Sequence: Synthetic oligonucleotide
  Sense strand starting at position 1155 of SEQ ID NO: 2007
acauaaagugccuauggua

SEQ ID NO: 156143 - RNA, 19 nt, Artificial Sequence
  Description of Artificial Sequence: Synthetic oligonucleotide
  Antisense strand to SEQ ID NO: 156142
uaccauaggcacuuuaugu

SEQ ID NO: 156144 - RNA, 19 nt, Artificial Sequence
  Description of Artificial Sequence: Synthetic oligonucleotide
  Sense strand starting at position 1135 of SEQ ID NO: 2007
ucuguccuccaugggauua

SEQ ID NO: 156145 - RNA, 19 nt, Artificial Sequence
  Description of Artificial Sequence: Synthetic oligonucleotide
  Antisense strand to SEQ ID NO: 156144
uaaucccauggaggacaga

SEQ ID NO: 156146 - RNA, 19 nt, Artificial Sequence
  Description of Artificial Sequence: Synthetic oligonucleotide
  Sense strand starting at position 1057 of SEQ ID NO: 2007
uccugauccuuucugagag

SEQ ID NO: 156147 - RNA, 19 nt, Artificial Sequence
  Description of Artificial Sequence: Synthetic oligonucleotide
  Antisense strand to SEQ ID NO: 156146
cucucagaaaggaucagga

SEQ ID NO: 156148 - RNA, 19 nt, Artificial Sequence
  Description of Artificial Sequence: Synthetic oligonucleotide
  Sense strand starting at position 1017 of SEQ ID NO: 2007
ugagauugaugacagaaga

SEQ ID NO: 156149 - RNA, 19 nt, Artificial Sequence
  Description of Artificial Sequence: Synthetic oligonucleotide
  Antisense strand to SEQ ID NO: 156148
ucuucugucaucaaucuca

SEQ ID NO: 156150 - RNA, 19 nt, Artificial Sequence
  Description of Artificial Sequence: Synthetic oligonucleotide
  Sense strand starting at position 1006 of SEQ ID NO: 2007
guaguacuccaugagauug

SEQ ID NO: 156151 - RNA, 19 nt, Artificial Sequence
  Description of Artificial Sequence: Synthetic oligonucleotide
  Antisense strand to SEQ ID NO: 156150
caaucucauggaguacuac

SEQ ID NO: 156152 - RNA, 19 nt, Artificial Sequence
  Description of Artificial Sequence: Synthetic oligonucleotide
  Sense strand starting at position 1005 of SEQ ID NO: 2007
gguaguacuccaugagauu

SEQ ID NO: 156153 - RNA, 19 nt, Artificial Sequence
  Description of Artificial Sequence: Synthetic oligonucleotide
  Antisense strand to SEQ ID NO: 156152
aaucucauggaguacuacc

SEQ ID NO: 156154 - RNA, 19 nt, Artificial Sequence
  Description of Artificial Sequence: Synthetic oligonucleotide
  Sense strand starting at position 845 of SEQ ID NO: 2007
auucaaaguggguaagagu

SEQ ID NO: 156155 - RNA, 19 nt, Artificial Sequence
  Description of Artificial Sequence: Synthetic oligonucleotide
  Antisense strand to SEQ ID NO: 156154
acucuuacccacuuugaau

SEQ ID NO: 156156 - RNA, 19 nt, Artificial Sequence
  Description of Artificial Sequence: Synthetic oligonucleotide
  Sense strand starting at position 652 of SEQ ID NO: 2007
gauggacaccuguagcuuu

SEQ ID NO: 156157 - RNA, 19 nt, Artificial Sequence
  Description of Artificial Sequence: Synthetic oligonucleotide
  Antisense strand to SEQ ID NO: 156156
aaagcuacagguguccauc

SEQ ID NO: 156158 - RNA, 19 nt, Artificial Sequence
  Description of Artificial Sequence: Synthetic oligonucleotide
  Sense strand starting at position 631 of SEQ ID NO: 2007
cucuuucgcugacugauuu

SEQ ID NO: 156159 - RNA, 19 nt, Artificial Sequence
  Description of Artificial Sequence: Synthetic oligonucleotide
  Antisense strand to SEQ ID NO: 156158
aaaucagucagcgaaagag

SEQ ID NO: 156160 - RNA, 19 nt, Artificial Sequence
  Description of Artificial Sequence: Synthetic oligonucleotide
  Sense strand starting at position 624 of SEQ ID NO: 2007
acuugugcucuuucgcuga

SEQ ID NO: 156161 - RNA, 19 nt, Artificial Sequence
  Description of Artificial Sequence: Synthetic oligonucleotide
  Antisense strand to SEQ ID NO: 156160
ucagcgaaagagcacaagu

SEQ ID NO: 156162 - RNA, 19 nt, Artificial Sequence
  Description of Artificial Sequence: Synthetic oligonucleotide
  Sense strand starting at position 261 of SEQ ID NO: 2007
gacucaugaggagguggua

SEQ ID NO: 156163 - RNA, 19 nt, Artificial Sequence
  Description of Artificial Sequence: Synthetic oligonucleotide
  Antisense strand to SEQ ID NO: 156162
uaccaccuccucaugaguc

SEQ ID NO: 156164 - RNA, 19 nt, Artificial Sequence
  Description of Artificial Sequence: Synthetic oligonucleotide
  Sense strand starting at position 239 of SEQ ID NO: 2007
ggauaaugauaucugucuu

SEQ ID NO: 156165 - RNA, 19 nt, Artificial Sequence
  Description of Artificial Sequence: Synthetic oligonucleotide
  Antisense strand to SEQ ID NO: 156164
aagacagauaucauuaucc

SEQ ID NO: 156166 - RNA, 19 nt, Artificial Sequence
  Description of Artificial Sequence: Synthetic oligonucleotide
  Sense strand starting at position 176 of SEQ ID NO: 2007
uguuaucuugcccaagaag

SEQ ID NO: 156167 - RNA, 19 nt, Artificial Sequence
  Description of Artificial Sequence: Synthetic oligonucleotide
  Antisense strand to SEQ ID NO: 156166
cuucuugggcaagauaaca

SEQ ID NO: 156168 - RNA, 19 nt, Artificial Sequence
  Description of Artificial Sequence: Synthetic oligonucleotide
  Sense strand starting at position 25 of SEQ ID NO: 2007
acugguacucccugaggaa

SEQ ID NO: 156169 - RNA, 19 nt, Artificial Sequence
  Description of Artificial Sequence: Synthetic oligonucleotide
  Antisense strand to SEQ ID NO: 156168
uuccucagggaguaccagu

SEQ ID NO: 156170 - RNA, 19 nt, Artificial Sequence
  Description of Artificial Sequence: Synthetic oligonucleotide
  Sense strand starting at position 3871 of SEQ ID NO: 2008
uuacgacuccauugccaau

SEQ ID NO: 156171 - RNA, 19 nt, Artificial Sequence
  Description of Artificial Sequence: Synthetic oligonucleotide
  Antisense strand to SEQ ID NO: 156170
auuggcaauggagucguaa

SEQ ID NO: 156172 - RNA, 19 nt, Artificial Sequence
  Description of Artificial Sequence: Synthetic oligonucleotide
  Sense strand starting at position 3735 of SEQ ID NO: 2008
agcuguugucuguugugau

SEQ ID NO: 156173 - RNA, 19 nt, Artificial Sequence
  Description of Artificial Sequence: Synthetic oligonucleotide
  Antisense strand to SEQ ID NO: 156172
aucacaacagacaacagcu

SEQ ID NO: 156174 - RNA, 19 nt, Artificial Sequence
  Description of Artificial Sequence: Synthetic oligonucleotide
  Sense strand starting at position 3559 of SEQ ID NO: 2008
ggaaucugugguuguaaca

SEQ ID NO: 156175 - RNA, 19 nt, Artificial Sequence
  Description of Artificial Sequence: Synthetic oligonucleotide
  Antisense strand to SEQ ID NO: 156174
uguuacaaccacagauucc

SEQ ID NO: 156176 - RNA, 19 nt, Artificial Sequence
  Description of Artificial Sequence: Synthetic oligonucleotide
  Sense strand starting at position 3558 of SEQ ID NO: 2008
aggaaucugugguuguaac

SEQ ID NO: 156177 - RNA, 19 nt, Artificial Sequence
  Description of Artificial Sequence: Synthetic oligonucleotide
  Antisense strand to SEQ ID NO: 156176
guuacaaccacagauuccu

SEQ ID NO: 156178 - RNA, 19 nt, Artificial Sequence
  Description of Artificial Sequence: Synthetic oligonucleotide
  Sense strand starting at position 3515 of SEQ ID NO: 2008
gcacuuggauucucagaga

SEQ ID NO: 156179 - RNA, 19 nt, Artificial Sequence
  Description of Artificial Sequence: Synthetic oligonucleotide
  Antisense strand to SEQ ID NO: 156178
ucucugagaauccaagugc

SEQ ID NO: 156180 - RNA, 19 nt, Artificial Sequence
  Description of Artificial Sequence: Synthetic oligonucleotide
  Sense strand starting at position 3487 of SEQ ID NO: 2008
ggagacuaguggcucucaa

SEQ ID NO: 156181 - RNA, 19 nt, Artificial Sequence
  Description of Artificial Sequence: Synthetic oligonucleotide
  Antisense strand to SEQ ID NO: 156180
uugagagccacuagucucc

SEQ ID NO: 156182 - RNA, 19 nt, Artificial Sequence
  Description of Artificial Sequence: Synthetic oligonucleotide
  Sense strand starting at position 3478 of SEQ ID NO: 2008
aguucuucuggagacuagu

SEQ ID NO: 156183 - RNA, 19 nt, Artificial Sequence
  Description of Artificial Sequence: Synthetic oligonucleotide
  Antisense strand to SEQ ID NO: 156182
acuagucuccagaagaacu

SEQ ID NO: 156184 - RNA, 19 nt, Artificial Sequence
  Description of Artificial Sequence: Synthetic oligonucleotide
  Sense strand starting at position 3472 of SEQ ID NO: 2008
ggguuaaguucuucuggag

SEQ ID NO: 156185 - RNA, 19 nt, Artificial Sequence
  Description of Artificial Sequence: Synthetic oligonucleotide
  Antisense strand to SEQ ID NO: 156184
cuccagaagaacuuaaccc

SEQ ID NO: 156186 - RNA, 19 nt, Artificial Sequence
  Description of Artificial Sequence: Synthetic oligonucleotide
  Sense strand starting at position 3471 of SEQ ID NO: 2008
uggguuaaguucuucugga

SEQ ID NO: 156187 - RNA, 19 nt, Artificial Sequence
  Description of Artificial Sequence: Synthetic oligonucleotide
  Antisense strand to SEQ ID NO: 156186
uccagaagaacuuaaccca

SEQ ID NO: 156188 - RNA, 19 nt, Artificial Sequence
  Description of Artificial Sequence: Synthetic oligonucleotide
  Sense strand starting at position 3342 of SEQ ID NO: 2008
gggauguggcugugggaaa

SEQ ID NO: 156189 - RNA, 19 nt, Artificial Sequence
  Description of Artificial Sequence: Synthetic oligonucleotide
  Antisense strand to SEQ ID NO: 156188
uuucccacagccacauccc

SEQ ID NO: 156190 - RNA, 19 nt, Artificial Sequence
  Description of Artificial Sequence: Synthetic oligonucleotide
  Sense strand starting at position 3251 of SEQ ID NO: 2008
ugaagaugggcaugguuua

SEQ ID NO: 156191 - RNA, 19 nt, Artificial Sequence
  Description of Artificial Sequence: Synthetic oligonucleotide
  Antisense strand to SEQ ID NO: 156190
uaaaccaugcccaucuuca

SEQ ID NO: 156192 - RNA, 19 nt, Artificial Sequence
  Description of Artificial Sequence: Synthetic oligonucleotide
  Sense strand starting at position 3218 of SEQ ID NO: 2008
gcuucuugagaagguggaa

SEQ ID NO: 156193 - RNA, 19 nt, Artificial Sequence
  Description of Artificial Sequence: Synthetic oligonucleotide
  Antisense strand to SEQ ID NO: 156192
uuccaccuucucaagaagc

SEQ ID NO: 156194 - RNA, 19 nt, Artificial Sequence
  Description of Artificial Sequence: Synthetic oligonucleotide
  Sense strand starting at position 3171 of SEQ ID NO: 2008
cucagaagugggugggaaa

SEQ ID NO: 156195 - RNA, 19 nt, Artificial Sequence
  Description of Artificial Sequence: Synthetic oligonucleotide
  Antisense strand to SEQ ID NO: 156194
uuucccacccacuucugag

SEQ ID NO: 156196 - RNA, 19 nt, Artificial Sequence
  Description of Artificial Sequence: Synthetic oligonucleotide
  Sense strand starting at position 3161 of SEQ ID NO: 2008
guagucaguccucagaagu

SEQ ID NO: 156197 - RNA, 19 nt, Artificial Sequence
  Description of Artificial Sequence: Synthetic oligonucleotide
  Antisense strand to SEQ ID NO: 156196
acuucugaggacugacuac

SEQ ID NO: 156198 - RNA, 19 nt, Artificial Sequence
  Description of Artificial Sequence: Synthetic oligonucleotide
  Sense strand starting at position 3160 of SEQ ID NO: 2008
gguagucaguccucagaag

SEQ ID NO: 156199 - RNA, 19 nt, Artificial Sequence
  Description of Artificial Sequence: Synthetic oligonucleotide
  Antisense strand to SEQ ID NO: 156198
cuucugaggacugacuacc

SEQ ID NO: 156200 - RNA, 19 nt, Artificial Sequence
  Description of Artificial Sequence: Synthetic oligonucleotide
  Sense strand starting at position 3124 of SEQ ID NO: 2008
ggguuaucugcagacagac

SEQ ID NO: 156201 - RNA, 19 nt, Artificial Sequence
  Description of Artificial Sequence: Synthetic oligonucleotide
  Antisense strand to SEQ ID NO: 156200
gucugucugcagauaaccc

SEQ ID NO: 156202 - RNA, 19 nt, Artificial Sequence
  Description of Artificial Sequence: Synthetic oligonucleotide
  Sense strand starting at position 2862 of SEQ ID NO: 2008
uuucuugccagugaagguu

SEQ ID NO: 156203 - RNA, 19 nt, Artificial Sequence
  Description of Artificial Sequence: Synthetic oligonucleotide
  Antisense strand to SEQ ID NO: 156202
aaccuucacuggcaagaaa

SEQ ID NO: 156204 - RNA, 19 nt, Artificial Sequence
  Description of Artificial Sequence: Synthetic oligonucleotide
  Sense strand starting at position 2789 of SEQ ID NO: 2008
uuugaaguguggucuauuu

SEQ ID NO: 156205 - RNA, 19 nt, Artificial Sequence
  Description of Artificial Sequence: Synthetic oligonucleotide
  Antisense strand to SEQ ID NO: 156204
aaauagaccacacuucaaa

SEQ ID NO: 156206 - RNA, 19 nt, Artificial Sequence
  Description of Artificial Sequence: Synthetic oligonucleotide
  Sense strand starting at position 2689 of SEQ ID NO: 2008
cuuguuaccugguuagaaa

SEQ ID NO: 156207 - RNA, 19 nt, Artificial Sequence
  Description of Artificial Sequence: Synthetic oligonucleotide
  Antisense strand to SEQ ID NO: 156206
uuucuaaccagguaacaag

SEQ ID NO: 156208 - RNA, 19 nt, Artificial Sequence
  Description of Artificial Sequence: Synthetic oligonucleotide
  Sense strand starting at position 2676 of SEQ ID NO: 2008
cugagaggaucaucuuguu

SEQ ID NO: 156209 - RNA, 19 nt, Artificial Sequence
  Description of Artificial Sequence: Synthetic oligonucleotide
  Antisense strand to SEQ ID NO: 156208
aacaagaugauccucucag

SEQ ID NO: 156210 - RNA, 19 nt, Artificial Sequence
  Description of Artificial Sequence: Synthetic oligonucleotide
  Sense strand starting at position 2663 of SEQ ID NO: 2008
uugcaacucuccucugaga

SEQ ID NO: 156211 - RNA, 19 nt, Artificial Sequence
  Description of Artificial Sequence: Synthetic oligonucleotide
  Antisense strand to SEQ ID NO: 156210
ucucagaggagaguugcaa

SEQ ID NO: 156212 - RNA, 19 nt, Artificial Sequence
  Description of Artificial Sequence: Synthetic oligonucleotide
  Sense strand starting at position 2609 of SEQ ID NO: 2008
uuaagugagugaguacauu

SEQ ID NO: 156213 - RNA, 19 nt, Artificial Sequence
  Description of Artificial Sequence: Synthetic oligonucleotide
  Antisense strand to SEQ ID NO: 156212
aauguacucacucacuuaa

SEQ ID NO: 156214 - RNA, 19 nt, Artificial Sequence
  Description of Artificial Sequence: Synthetic oligonucleotide
  Sense strand starting at position 2605 of SEQ ID NO: 2008
uuuguuaagugagugagua

SEQ ID NO: 156215 - RNA, 19 nt, Artificial Sequence
  Description of Artificial Sequence: Synthetic oligonucleotide
  Antisense strand to SEQ ID NO: 156214
uacucacucacuuaacaaa

SEQ ID NO: 156216 - RNA, 19 nt, Artificial Sequence
  Description of Artificial Sequence: Synthetic oligonucleotide
  Sense strand starting at position 2571 of SEQ ID NO: 2008
cagugcuuggcacauuaca

SEQ ID NO: 156217 - RNA, 19 nt, Artificial Sequence
  Description of Artificial Sequence: Synthetic oligonucleotide
  Antisense strand to SEQ ID NO: 156216
uguaaugugccaagcacug

SEQ ID NO: 156218 - RNA, 19 nt, Artificial Sequence
  Description of Artificial Sequence: Synthetic oligonucleotide
  Sense strand starting at position 2498 of SEQ ID NO: 2008
uguguuguugaugacaguu

SEQ ID NO: 156219 - RNA, 19 nt, Artificial Sequence
  Description of Artificial Sequence: Synthetic oligonucleotide
  Antisense strand to SEQ ID NO: 156218
aacugucaucaacaacaca

SEQ ID NO: 156220 - RNA, 19 nt, Artificial Sequence
  Description of Artificial Sequence: Synthetic oligonucleotide
  Sense strand starting at position 1440 of SEQ ID NO: 2008
agccgacuuucucuccaaa

SEQ ID NO: 156221 - RNA, 19 nt, Artificial Sequence
  Description of Artificial Sequence: Synthetic oligonucleotide
  Antisense strand to SEQ ID NO: 156220
uuuggagagaaagucggcu

SEQ ID NO: 156222 - RNA, 19 nt, Artificial Sequence
  Description of Artificial Sequence: Synthetic oligonucleotide
  Sense strand starting at position 1383 of SEQ ID NO: 2008
ccucaaacucugcagaguu

SEQ ID NO: 156223 - RNA, 19 nt, Artificial Sequence
  Description of Artificial Sequence: Synthetic oligonucleotide
  Antisense strand to SEQ ID NO: 156222
aacucugcagaguuugagg

SEQ ID NO: 156224 - RNA, 19 nt, Artificial Sequence
  Description of Artificial Sequence: Synthetic oligonucleotide
  Sense strand starting at position 1382 of SEQ ID NO: 2008
uccucaaacucugcagagu

SEQ ID NO: 156225 - RNA, 19 nt, Artificial Sequence
  Description of Artificial Sequence: Synthetic oligonucleotide
  Antisense strand to SEQ ID NO: 156224
acucugcagaguuugagga

SEQ ID NO: 156226 - RNA, 19 nt, Artificial Sequence
  Description of Artificial Sequence: Synthetic oligonucleotide
  Sense strand starting at position 1109 of SEQ ID NO: 2008
cugcuuguugaccaaggaa

SEQ ID NO: 156227 - RNA, 19 nt, Artificial Sequence
  Description of Artificial Sequence: Synthetic oligonucleotide
  Antisense strand to SEQ ID NO: 156226
uuccuuggucaacaagcag

SEQ ID NO: 156228 - RNA, 19 nt, Artificial Sequence
  Description of Artificial Sequence: Synthetic oligonucleotide
  Sense strand starting at position 936 of SEQ ID NO: 2008
ugaagaaaucugcaggcuu

SEQ ID NO: 156229 - RNA, 19 nt, Artificial Sequence
  Description of Artificial Sequence: Synthetic oligonucleotide
  Antisense strand to SEQ ID NO: 156228
aagccugcagauuucuuca

SEQ ID NO: 156230 - RNA, 19 nt, Artificial Sequence
  Description of Artificial Sequence: Synthetic oligonucleotide
  Sense strand starting at position 915 of SEQ ID NO: 2008
ccugcacauguuuagaaau

SEQ ID NO: 156231 - RNA, 19 nt, Artificial Sequence
  Description of Artificial Sequence: Synthetic oligonucleotide
  Antisense strand to SEQ ID NO: 156230
auuucuaaacaugugcagg

SEQ ID NO: 156232 - RNA, 19 nt, Artificial Sequence
  Description of Artificial Sequence: Synthetic oligonucleotide
  Sense strand starting at position 914 of SEQ ID NO: 2008
uccugcacauguuuagaaa

SEQ ID NO: 156233 - RNA, 19 nt, Artificial Sequence
  Description of Artificial Sequence: Synthetic oligonucleotide
  Antisense strand to SEQ ID NO: 156232
uuucuaaacaugugcagga

SEQ ID NO: 156234 - RNA, 19 nt, Artificial Sequence
  Description of Artificial Sequence: Synthetic oligonucleotide
  Sense strand starting at position 904 of SEQ ID NO: 2008
aggugugauuuccugcaca

SEQ ID NO: 156235 - RNA, 19 nt, Artificial Sequence
  Description of Artificial Sequence: Synthetic oligonucleotide
  Antisense strand to SEQ ID NO: 156234
ugugcaggaaaucacaccu

SEQ ID NO: 156236 - RNA, 19 nt, Artificial Sequence
  Description of Artificial Sequence: Synthetic oligonucleotide
  Sense strand starting at position 684 of SEQ ID NO: 2008
caaacauuagccggguuua

SEQ ID NO: 156237 - RNA, 19 nt, Artificial Sequence
  Description of Artificial Sequence: Synthetic oligonucleotide
  Antisense strand to SEQ ID NO: 156236
uaaacccggcuaauguuug

SEQ ID NO: 156238 - RNA, 19 nt, Artificial Sequence
  Description of Artificial Sequence: Synthetic oligonucleotide
  Sense strand starting at position 363 of SEQ ID NO: 2008
agagaauugcacuggaugu

SEQ ID NO: 156239 - RNA, 19 nt, Artificial Sequence
  Description of Artificial Sequence: Synthetic oligonucleotide
  Antisense strand to SEQ ID NO: 156238
acauccagugcaauucucu

SEQ ID NO: 156240 - RNA, 19 nt, Artificial Sequence
  Description of Artificial Sequence: Synthetic oligonucleotide
  Sense strand starting at position 317 of SEQ ID NO: 2008
uggagaugacuucaguguu

SEQ ID NO: 156241 - RNA, 19 nt, Artificial Sequence
  Description of Artificial Sequence: Synthetic oligonucleotide
  Antisense strand to SEQ ID NO: 156240
aacacugaagucaucucca

SEQ ID NO: 156242 - RNA, 19 nt, Artificial Sequence
  Description of Artificial Sequence: Synthetic oligonucleotide
  Sense strand starting at position 246 of SEQ ID NO: 2008
ucagucggccaugauaauu

SEQ ID NO: 156243 - RNA, 19 nt, Artificial Sequence
  Description of Artificial Sequence: Synthetic oligonucleotide
  Antisense strand to SEQ ID NO: 156242
aauuaucauggccgacuga

SEQ ID NO: 156244 - RNA, 19 nt, Artificial Sequence
  Description of Artificial Sequence: Synthetic oligonucleotide
  Sense strand starting at position 218 of SEQ ID NO: 2008
gucaaugagacaugaucug

SEQ ID NO: 156245 - RNA, 19 nt, Artificial Sequence
  Description of Artificial Sequence: Synthetic oligonucleotide
  Antisense strand to SEQ ID NO: 156244
cagaucaugucucauugac

SEQ ID NO: 156246 - RNA, 19 nt, Artificial Sequence
  Description of Artificial Sequence: Synthetic oligonucleotide
  Sense strand starting at position 105 of SEQ ID NO: 2008
gugggagaagccuaguaaa

SEQ ID NO: 156247 - RNA, 19 nt, Artificial Sequence
  Description of Artificial Sequence: Synthetic oligonucleotide
  Antisense strand to SEQ ID NO: 156246
uuuacuaggcuucucccac

SEQ ID NO: 156248 - RNA, 19 nt, Artificial Sequence
  Description of Artificial Sequence: Synthetic oligonucleotide
  Sense strand starting at position 80 of SEQ ID NO: 2008
gcccaccacuguuuaagaa

SEQ ID NO: 156249 - RNA, 19 nt, Artificial Sequence
  Description of Artificial Sequence: Synthetic oligonucleotide
  Antisense strand to SEQ ID NO: 156248
uucuuaaacaguggugggc

SEQ ID NO: 156250 - RNA, 19 nt, Artificial Sequence
  Description of Artificial Sequence: Synthetic oligonucleotide
  Sense strand starting at position 105 of SEQ ID NO: 2009
ccaggaugugcugaggaca

SEQ ID NO: 156251 - RNA, 19 nt, Artificial Sequence
  Description of Artificial Sequence: Synthetic oligonucleotide
  Antisense strand to SEQ ID NO: 156250
uguccucagcacauccugg

SEQ ID NO: 156252 - RNA, 19 nt, Artificial Sequence
  Description of Artificial Sequence: Synthetic oligonucleotide
  Sense strand starting at position 271 of SEQ ID NO: 2009
gacagccauccuggaugaa

SEQ ID NO: 156253 - RNA, 19 nt, Artificial Sequence
  Description of Artificial Sequence: Synthetic oligonucleotide
  Antisense strand to SEQ ID NO: 156252
uucauccaggauggcuguc

SEQ ID NO: 156254 - RNA, 19 nt, Artificial Sequence
  Description of Artificial Sequence: Synthetic oligonucleotide
  Sense strand starting at position 699 of SEQ ID NO: 2009
auuaguagcccucaucaca

SEQ ID NO: 156255 - RNA, 19 nt, Artificial Sequence
  Description of Artificial Sequence: Synthetic oligonucleotide
  Antisense strand to SEQ ID NO: 156254
ugugaugagggcuacuaau

SEQ ID NO: 156256 - RNA, 19 nt, Artificial Sequence
  Description of Artificial Sequence: Synthetic oligonucleotide
  Sense strand starting at position 868 of SEQ ID NO: 2009
uguugcugcgguucagaua

SEQ ID NO: 156257 - RNA, 19 nt, Artificial Sequence
  Description of Artificial Sequence: Synthetic oligonucleotide
  Antisense strand to SEQ ID NO: 156256
uaucugaaccgcagcaaca

SEQ ID NO: 156258 - RNA, 19 nt, Artificial Sequence
  Description of Artificial Sequence: Synthetic oligonucleotide
  Sense strand starting at position 996 of SEQ ID NO: 2009
gugugagaagcucagaaga

SEQ ID NO: 156259 - RNA, 19 nt, Artificial Sequence
  Description of Artificial Sequence: Synthetic oligonucleotide
  Antisense strand to SEQ ID NO: 156258
ucuucugagcuucucacac

SEQ ID NO: 156260 - RNA, 19 nt, Artificial Sequence
  Description of Artificial Sequence: Synthetic oligonucleotide
  Sense strand starting at position 1083 of SEQ ID NO: 2009
gguagagaucugggauguu

SEQ ID NO: 156261 - RNA, 19 nt, Artificial Sequence
  Description of Artificial Sequence: Synthetic oligonucleotide
  Antisense strand to SEQ ID NO: 156260
aacaucccagaucucuacc

SEQ ID NO: 156262 - RNA, 19 nt, Artificial Sequence
  Description of Artificial Sequence: Synthetic oligonucleotide
  Sense strand starting at position 1108 of SEQ ID NO: 2009
uugacuugagcuugguaaa

SEQ ID NO: 156263 - RNA, 19 nt, Artificial Sequence
  Description of Artificial Sequence: Synthetic oligonucleotide
  Antisense strand to SEQ ID NO: 156262
uuuaccaagcucaagucaa

SEQ ID NO: 156264 - RNA, 19 nt, Artificial Sequence
  Description of Artificial Sequence: Synthetic oligonucleotide
  Sense strand starting at position 1109 of SEQ ID NO: 2009
ugacuugagcuugguaaag

SEQ ID NO: 156265 - RNA, 19 nt, Artificial Sequence
  Description of Artificial Sequence: Synthetic oligonucleotide
  Antisense strand to SEQ ID NO: 156264
cuuuaccaagcucaaguca

SEQ ID NO: 156266 - RNA, 19 nt, Artificial Sequence
  Description of Artificial Sequence: Synthetic oligonucleotide
  Sense strand starting at position 1120 of SEQ ID NO: 2009
ugguaaagcccugaauccu

SEQ ID NO: 156267 - RNA, 19 nt, Artificial Sequence
  Description of Artificial Sequence: Synthetic oligonucleotide
  Antisense strand to SEQ ID NO: 156266
aggauucagggcuuuacca

SEQ ID NO: 156268 - RNA, 19 nt, Artificial Sequence
  Description of Artificial Sequence: Synthetic oligonucleotide
  Sense strand starting at position 1151 of SEQ ID NO: 2009
ugcugauaugcagggaaua

SEQ ID NO: 156269 - RNA, 19 nt, Artificial Sequence
  Description of Artificial Sequence: Synthetic oligonucleotide
  Antisense strand to SEQ ID NO: 156268
uauucccugcauaucagca

SEQ ID NO: 156270 - RNA, 19 nt, Artificial Sequence
  Description of Artificial Sequence: Synthetic oligonucleotide
  Sense strand starting at position 1152 of SEQ ID NO: 2009
gcugauaugcagggaauag

SEQ ID NO: 156271 - RNA, 19 nt, Artificial Sequence
  Description of Artificial Sequence: Synthetic oligonucleotide
  Antisense strand to SEQ ID NO: 156270
cuauucccugcauaucagc

SEQ ID NO: 156272 - RNA, 19 nt, Artificial Sequence
  Description of Artificial Sequence: Synthetic oligonucleotide
  Sense strand starting at position 1205 of SEQ ID NO: 2009
guggauuggucaccaugau

SEQ ID NO: 156273 - RNA, 19 nt, Artificial Sequence
  Description of Artificial Sequence: Synthetic oligonucleotide
  Antisense strand to SEQ ID NO: 156272
aucauggugaccaauccac

SEQ ID NO: 156274 - RNA, 19 nt, Artificial Sequence
  Description of Artificial Sequence: Synthetic oligonucleotide
  Sense strand starting at position 1209 of SEQ ID NO: 2009
auuggucaccaugauggua

SEQ ID NO: 156275 - RNA, 19 nt, Artificial Sequence
  Description of Artificial Sequence: Synthetic oligonucleotide
  Antisense strand to SEQ ID NO: 156274
uaccaucauggugaccaau

SEQ ID NO: 156276 - RNA, 19 nt, Artificial Sequence
  Description of Artificial Sequence: Synthetic oligonucleotide
  Sense strand starting at position 1280 of SEQ ID NO: 2009
accagaugauguucucaac

SEQ ID NO: 156277 - RNA, 19 nt, Artificial Sequence
  Description of Artificial Sequence: Synthetic oligonucleotide
  Antisense strand to SEQ ID NO: 156276
guugagaacaucaucuggu

SEQ ID NO: 156278 - RNA, 19 nt, Artificial Sequence
  Description of Artificial Sequence: Synthetic oligonucleotide
  Sense strand starting at position 1396 of SEQ ID NO: 2009
cugccuaugcaggaagaaa

SEQ ID NO: 156279 - RNA, 19 nt, Artificial Sequence
  Description of Artificial Sequence: Synthetic oligonucleotide
  Antisense strand to SEQ ID NO: 156278
uuucuuccugcauaggcag

SEQ ID NO: 156280 - RNA, 19 nt, Artificial Sequence
  Description of Artificial Sequence: Synthetic oligonucleotide
  Sense strand starting at position 1480 of SEQ ID NO: 2009
gcguaaucucagcugggca

SEQ ID NO: 156281 - RNA, 19 nt, Artificial Sequence
  Description of Artificial Sequence: Synthetic oligonucleotide
  Antisense strand to SEQ ID NO: 156280
ugcccagcugagauuacgc

SEQ ID NO: 156282 - RNA, 19 nt, Artificial Sequence
  Description of Artificial Sequence: Synthetic oligonucleotide
  Sense strand starting at position 1583 of SEQ ID NO: 2009
aaaggaguuugcuuccauc

SEQ ID NO: 156283 - RNA, 19 nt, Artificial Sequence
  Description of Artificial Sequence: Synthetic oligonucleotide
  Antisense strand to SEQ ID NO: 156282
gauggaagcaaacuccuuu

SEQ ID NO: 156284 - RNA, 19 nt, Artificial Sequence
  Description of Artificial Sequence: Synthetic oligonucleotide
  Sense strand starting at position 2096 of SEQ ID NO: 2009
ccugauugucaugacaguu

SEQ ID NO: 156285 - RNA, 19 nt, Artificial Sequence
  Description of Artificial Sequence: Synthetic oligonucleotide
  Antisense strand to SEQ ID NO: 156284
aacugucaugacaaucagg

SEQ ID NO: 156286 - RNA, 19 nt, Artificial Sequence
  Description of Artificial Sequence: Synthetic oligonucleotide
  Sense strand starting at position 2106 of SEQ ID NO: 2009
augacaguuuacucacuga

SEQ ID NO: 156287 - RNA, 19 nt, Artificial Sequence
  Description of Artificial Sequence: Synthetic oligonucleotide
  Antisense strand to SEQ ID NO: 156286
ucagugaguaaacugucau

SEQ ID NO: 156288 - RNA, 19 nt, Artificial Sequence
  Description of Artificial Sequence: Synthetic oligonucleotide
  Sense strand starting at position 2224 of SEQ ID NO: 2009
cccgaacucguagaacauu

SEQ ID NO: 156289 - RNA, 19 nt, Artificial Sequence
  Description of Artificial Sequence: Synthetic oligonucleotide
  Antisense strand to SEQ ID NO: 156288
aauguucuacgaguucggg

SEQ ID NO: 156290 - RNA, 19 nt, Artificial Sequence
  Description of Artificial Sequence: Synthetic oligonucleotide
  Sense strand starting at position 2264 of SEQ ID NO: 2009
ccaggauauucuucccuag

SEQ ID NO: 156291 - RNA, 19 nt, Artificial Sequence
  Description of Artificial Sequence: Synthetic oligonucleotide
  Antisense strand to SEQ ID NO: 156290
cuagggaagaauauccugg

SEQ ID NO: 156292 - RNA, 19 nt, Artificial Sequence
  Description of Artificial Sequence: Synthetic oligonucleotide
  Sense strand starting at position 2266 of SEQ ID NO: 2009
aggauauucuucccuagcu

SEQ ID NO: 156293 - RNA, 19 nt, Artificial Sequence
  Description of Artificial Sequence: Synthetic oligonucleotide
  Antisense strand to SEQ ID NO: 156292
agcuagggaagaauauccu

SEQ ID NO: 156294 - RNA, 19 nt, Artificial Sequence
  Description of Artificial Sequence: Synthetic oligonucleotide
  Sense strand starting at position 2858 of SEQ ID NO: 2009
aaaguaguuugaucagaga

SEQ ID NO: 156295 - RNA, 19 nt, Artificial Sequence
  Description of Artificial Sequence: Synthetic oligonucleotide
  Antisense strand to SEQ ID NO: 156294
ucucugaucaaacuacuuu

SEQ ID NO: 156296 - RNA, 19 nt, Artificial Sequence
  Description of Artificial Sequence: Synthetic oligonucleotide
  Sense strand starting at position 2867 of SEQ ID NO: 2009
ugaucagagaguugaucua

SEQ ID NO: 156297 - RNA, 19 nt, Artificial Sequence
  Description of Artificial Sequence: Synthetic oligonucleotide
  Antisense strand to SEQ ID NO: 156296
uagaucaacucucugauca

SEQ ID NO: 156298 - RNA, 19 nt, Artificial Sequence
  Description of Artificial Sequence: Synthetic oligonucleotide
  Sense strand starting at position 2922 of SEQ ID NO: 2009
gugagaauacaauguugau

SEQ ID NO: 156299 - RNA, 19 nt, Artificial Sequence
  Description of Artificial Sequence: Synthetic oligonucleotide
  Antisense strand to SEQ ID NO: 156298
aucaacauuguauucucac

SEQ ID NO: 156300 - RNA, 19 nt, Artificial Sequence
  Description of Artificial Sequence: Synthetic oligonucleotide
  Sense strand starting at position 3012 of SEQ ID NO: 2009
aaagcuguucuggaugcaa

SEQ ID NO: 156301 - RNA, 19 nt, Artificial Sequence
  Description of Artificial Sequence: Synthetic oligonucleotide
  Antisense strand to SEQ ID NO: 156300
uugcauccagaacagcuuu

SEQ ID NO: 156302 - RNA, 19 nt, Artificial Sequence
  Description of Artificial Sequence: Synthetic oligonucleotide
  Sense strand starting at position 3091 of SEQ ID NO: 2009
cuuggauuaucugcaacau

SEQ ID NO: 156303 - RNA, 19 nt, Artificial Sequence
  Description of Artificial Sequence: Synthetic oligonucleotide
  Antisense strand to SEQ ID NO: 156302
auguugcagauaauccaag

SEQ ID NO: 156304 - RNA, 19 nt, Artificial Sequence
  Description of Artificial Sequence: Synthetic oligonucleotide
  Sense strand starting at position 3092 of SEQ ID NO: 2009
uuggauuaucugcaacauc

SEQ ID NO: 156305 - RNA, 19 nt, Artificial Sequence
  Description of Artificial Sequence: Synthetic oligonucleotide
  Antisense strand to SEQ ID NO: 156304
gauguugcagauaauccaa

SEQ ID NO: 156306 - RNA, 19 nt, Artificial Sequence
  Description of Artificial Sequence: Synthetic oligonucleotide
  Sense strand starting at position 3118 of SEQ ID NO: 2009
ucagauggauucucagacu

SEQ ID NO: 156307 - RNA, 19 nt, Artificial Sequence
  Description of Artificial Sequence: Synthetic oligonucleotide
  Antisense strand to SEQ ID NO: 156306
agucugagaauccaucuga

SEQ ID NO: 156308 - RNA, 19 nt, Artificial Sequence
  Description of Artificial Sequence: Synthetic oligonucleotide
  Sense strand starting at position 3134 of SEQ ID NO: 2009
acuggauaaucuuuaaguu

SEQ ID NO: 156309 - RNA, 19 nt, Artificial Sequence
  Description of Artificial Sequence: Synthetic oligonucleotide
  Antisense strand to SEQ ID NO: 156308
aacuuaaagauuauccagu

SEQ ID NO: 156310 - RNA, 19 nt, Artificial Sequence
  Description of Artificial Sequence: Synthetic oligonucleotide
  Sense strand starting at position 3135 of SEQ ID NO: 2009
cuggauaaucuuuaaguuu

SEQ ID NO: 156311 - RNA, 19 nt, Artificial Sequence
  Description of Artificial Sequence: Synthetic oligonucleotide
  Antisense strand to SEQ ID NO: 156310
aaacuuaaagauuauccag

SEQ ID NO: 156312 - RNA, 19 nt, Artificial Sequence
  Description of Artificial Sequence: Synthetic oligonucleotide
  Sense strand starting at position 3288 of SEQ ID NO: 2009
cuguuaaauguuuauugag

SEQ ID NO: 156313 - RNA, 19 nt, Artificial Sequence
  Description of Artificial Sequence: Synthetic oligonucleotide
  Antisense strand to SEQ ID NO: 156312
cucaauaaacauuuaacag

SEQ ID NO: 156314 - RNA, 19 nt, Artificial Sequence
  Description of Artificial Sequence: Synthetic oligonucleotide
  Sense strand starting at position 3562 of SEQ ID NO: 2009
guagaaucugcuuagugaa

SEQ ID NO: 156315 - RNA, 19 nt, Artificial Sequence
  Description of Artificial Sequence: Synthetic oligonucleotide
  Antisense strand to SEQ ID NO: 156314
uucacuaagcagauucuac

SEQ ID NO: 156316 - RNA, 19 nt, Artificial Sequence
  Description of Artificial Sequence: Synthetic oligonucleotide
  Sense strand starting at position 3564 of SEQ ID NO: 2009
agaaucugcuuagugaaga

SEQ ID NO: 156317 - RNA, 19 nt, Artificial Sequence
  Description of Artificial Sequence: Synthetic oligonucleotide
  Antisense strand to SEQ ID NO: 156316
ucuucacuaagcagauucu

SEQ ID NO: 156318 - RNA, 19 nt, Artificial Sequence
  Description of Artificial Sequence: Synthetic oligonucleotide
  Sense strand starting at position 3586 of SEQ ID NO: 2009
uaaugaagugaguaguucu

SEQ ID NO: 156319 - RNA, 19 nt, Artificial Sequence
  Description of Artificial Sequence: Synthetic oligonucleotide
  Antisense strand to SEQ ID NO: 156318
agaacuacucacuucauua

SEQ ID NO: 156320 - RNA, 19 nt, Artificial Sequence
  Description of Artificial Sequence: Synthetic oligonucleotide
  Sense strand starting at position 3589 of SEQ ID NO: 2009
ugaagugaguaguucuuaa

SEQ ID NO: 156321 - RNA, 19 nt, Artificial Sequence
  Description of Artificial Sequence: Synthetic oligonucleotide
  Antisense strand to SEQ ID NO: 156320
uuaagaacuacucacuuca

SEQ ID NO: 156322 - RNA, 19 nt, Artificial Sequence
  Description of Artificial Sequence: Synthetic oligonucleotide
  Sense strand starting at position 3765 of SEQ ID NO: 2009
ugaaaucaguauguuaaug

SEQ ID NO: 156323 - RNA, 19 nt, Artificial Sequence
  Description of Artificial Sequence: Synthetic oligonucleotide
  Antisense strand to SEQ ID NO: 156322
cauuaacauacugauuuca

SEQ ID NO: 156324 - RNA, 19 nt, Artificial Sequence
  Description of Artificial Sequence: Synthetic oligonucleotide
  Sense strand starting at position 3869 of SEQ ID NO: 2009
guguaaagaaauuguagau

SEQ ID NO: 156325 - RNA, 19 nt, Artificial Sequence
  Description of Artificial Sequence: Synthetic oligonucleotide
  Antisense strand to SEQ ID NO: 156324
aucuacaauuucuuuacac

SEQ ID NO: 156326 - RNA, 19 nt, Artificial Sequence
  Description of Artificial Sequence: Synthetic oligonucleotide
  Sense strand starting at position 3940 of SEQ ID NO: 2009
gggagcucaugccuaugau

SEQ ID NO: 156327 - RNA, 19 nt, Artificial Sequence
  Description of Artificial Sequence: Synthetic oligonucleotide
  Antisense strand to SEQ ID NO: 156326
aucauaggcaugagcuccc

SEQ ID NO: 156328 - RNA, 19 nt, Artificial Sequence
  Description of Artificial Sequence: Synthetic oligonucleotide
  Sense strand starting at position 3941 of SEQ ID NO: 2009
ggagcucaugccuaugauc

SEQ ID NO: 156329 - RNA, 19 nt, Artificial Sequence
  Description of Artificial Sequence: Synthetic oligonucleotide
  Antisense strand to SEQ ID NO: 156328
gaucauaggcaugagcucc

SEQ ID NO: 156330 - RNA, 19 nt, Artificial Sequence
  Description of Artificial Sequence: Synthetic oligonucleotide
  Sense strand starting at position 94 of SEQ ID NO: 2010
acagcuauguaggcauuua

SEQ ID NO: 156331 - RNA, 19 nt, Artificial Sequence
  Description of Artificial Sequence: Synthetic oligonucleotide
  Antisense strand to SEQ ID NO: 156330
uaaaugccuacauagcugu

SEQ ID NO: 156332 - RNA, 19 nt, Artificial Sequence
  Description of Artificial Sequence: Synthetic oligonucleotide
  Sense strand starting at position 102 of SEQ ID NO: 2010
guaggcauuuacgcagaga

SEQ ID NO: 156333 - RNA, 19 nt, Artificial Sequence
  Description of Artificial Sequence: Synthetic oligonucleotide
  Antisense strand to SEQ ID NO: 156332
ucucugcguaaaugccuac

SEQ ID NO: 156334 - RNA, 19 nt, Artificial Sequence
  Description of Artificial Sequence: Synthetic oligonucleotide
  Sense strand starting at position 122 of SEQ ID NO: 2010
cuuaaucuugcauaggagu

SEQ ID NO: 156335 - RNA, 19 nt, Artificial Sequence
  Description of Artificial Sequence: Synthetic oligonucleotide
  Antisense strand to SEQ ID NO: 156334
acuccuaugcaagauuaag

SEQ ID NO: 156336 - RNA, 19 nt, Artificial Sequence
  Description of Artificial Sequence: Synthetic oligonucleotide
  Sense strand starting at position 128 of SEQ ID NO: 2010
cuugcauaggagugagcau

SEQ ID NO: 156337 - RNA, 19 nt, Artificial Sequence
  Description of Artificial Sequence: Synthetic oligonucleotide
  Antisense strand to SEQ ID NO: 156336
augcucacuccuaugcaag

SEQ ID NO: 156338 - RNA, 19 nt, Artificial Sequence
  Description of Artificial Sequence: Synthetic oligonucleotide
  Sense strand starting at position 129 of SEQ ID NO: 2010
uugcauaggagugagcauu

SEQ ID NO: 156339 - RNA, 19 nt, Artificial Sequence
  Description of Artificial Sequence: Synthetic oligonucleotide
  Antisense strand to SEQ ID NO: 156338
aaugcucacuccuaugcaa

SEQ ID NO: 156340 - RNA, 19 nt, Artificial Sequence
  Description of Artificial Sequence: Synthetic oligonucleotide
  Sense strand starting at position 213 of SEQ ID NO: 2010
ugagauaauuuguauccaa

SEQ ID NO: 156341 - RNA, 19 nt, Artificial Sequence
  Description of Artificial Sequence: Synthetic oligonucleotide
  Antisense strand to SEQ ID NO: 156340
uuggauacaaauuaucuca

SEQ ID NO: 156342 - RNA, 19 nt, Artificial Sequence
  Description of Artificial Sequence: Synthetic oligonucleotide
  Sense strand starting at position 324 of SEQ ID NO: 2010
gaccuaagauguuagauca

SEQ ID NO: 156343 - RNA, 19 nt, Artificial Sequence
  Description of Artificial Sequence: Synthetic oligonucleotide
  Antisense strand to SEQ ID NO: 156342
ugaucuaacaucuuagguc

SEQ ID NO: 156344 - RNA, 19 nt, Artificial Sequence
  Description of Artificial Sequence: Synthetic oligonucleotide
  Sense strand starting at position 387 of SEQ ID NO: 2010
uccugaucagcuggucauu

SEQ ID NO: 156345 - RNA, 19 nt, Artificial Sequence
  Description of Artificial Sequence: Synthetic oligonucleotide
  Antisense strand to SEQ ID NO: 156344
aaugaccagcugaucagga

SEQ ID NO: 156346 - RNA, 19 nt, Artificial Sequence
  Description of Artificial Sequence: Synthetic oligonucleotide
  Sense strand starting at position 392 of SEQ ID NO: 2010
aucagcuggucauuaggau

SEQ ID NO: 156347 - RNA, 19 nt, Artificial Sequence
  Description of Artificial Sequence: Synthetic oligonucleotide
  Antisense strand to SEQ ID NO: 156346
auccuaaugaccagcugau

SEQ ID NO: 156348 - RNA, 19 nt, Artificial Sequence
  Description of Artificial Sequence: Synthetic oligonucleotide
  Sense strand starting at position 407 of SEQ ID NO: 2010
ggauccuuuccagggcuaa

SEQ ID NO: 156349 - RNA, 19 nt, Artificial Sequence
  Description of Artificial Sequence: Synthetic oligonucleotide
  Antisense strand to SEQ ID NO: 156348
uuagcccuggaaaggaucc

SEQ ID NO: 156350 - RNA, 19 nt, Artificial Sequence
  Description of Artificial Sequence: Synthetic oligonucleotide
  Sense strand starting at position 411 of SEQ ID NO: 2010
ccuuuccagggcuaauaua

SEQ ID NO: 156351 - RNA, 19 nt, Artificial Sequence
  Description of Artificial Sequence: Synthetic oligonucleotide
  Antisense strand to SEQ ID NO: 156350
uauauuagcccuggaaagg

SEQ ID NO: 156352 - RNA, 19 nt, Artificial Sequence
  Description of Artificial Sequence: Synthetic oligonucleotide
  Sense strand starting at position 419 of SEQ ID NO: 2010
gggcuaauauaugcccuaa

SEQ ID NO: 156353 - RNA, 19 nt, Artificial Sequence
  Description of Artificial Sequence: Synthetic oligonucleotide
  Antisense strand to SEQ ID NO: 156352
uuagggcauauauuagccc

SEQ ID NO: 156354 - RNA, 19 nt, Artificial Sequence
  Description of Artificial Sequence: Synthetic oligonucleotide
  Sense strand starting at position 540 of SEQ ID NO: 2010
agucuaucccguuaagcuu

SEQ ID NO: 156355 - RNA, 19 nt, Artificial Sequence
  Description of Artificial Sequence: Synthetic oligonucleotide
  Antisense strand to SEQ ID NO: 156354
aagcuuaacgggauagacu

SEQ ID NO: 156356 - RNA, 19 nt, Artificial Sequence
  Description of Artificial Sequence: Synthetic oligonucleotide
  Sense strand starting at position 546 of SEQ ID NO: 2010
ucccguuaagcuuacaacu

SEQ ID NO: 156357 - RNA, 19 nt, Artificial Sequence
  Description of Artificial Sequence: Synthetic oligonucleotide
  Antisense strand to SEQ ID NO: 156356
aguuguaagcuuaacggga

SEQ ID NO: 156358 - RNA, 19 nt, Artificial Sequence
  Description of Artificial Sequence: Synthetic oligonucleotide
  Sense strand starting at position 743 of SEQ ID NO: 2010
agugcuaaauaucuugaau

SEQ ID NO: 156359 - RNA, 19 nt, Artificial Sequence
  Description of Artificial Sequence: Synthetic oligonucleotide
  Antisense strand to SEQ ID NO: 156358
auucaagauauuuagcacu

SEQ ID NO: 156360 - RNA, 19 nt, Artificial Sequence
  Description of Artificial Sequence: Synthetic oligonucleotide
  Sense strand starting at position 746 of SEQ ID NO: 2010
gcuaaauaucuugaauugu

SEQ ID NO: 156361 - RNA, 19 nt, Artificial Sequence
  Description of Artificial Sequence: Synthetic oligonucleotide
  Antisense strand to SEQ ID NO: 156360
acaauucaagauauuuagc

SEQ ID NO: 156362 - RNA, 19 nt, Artificial Sequence
  Description of Artificial Sequence: Synthetic oligonucleotide
  Sense strand starting at position 754 of SEQ ID NO: 2010
ucuugaauuguuggucauu

SEQ ID NO: 156363 - RNA, 19 nt, Artificial Sequence
  Description of Artificial Sequence: Synthetic oligonucleotide
  Antisense strand to SEQ ID NO: 156362
aaugaccaacaauucaaga

SEQ ID NO: 156364 - RNA, 19 nt, Artificial Sequence
  Description of Artificial Sequence: Synthetic oligonucleotide
  Sense strand starting at position 815 of SEQ ID NO: 2010
acuugaauuuauggguacu

SEQ ID NO: 156365 - RNA, 19 nt, Artificial Sequence
  Description of Artificial Sequence: Synthetic oligonucleotide
  Antisense strand to SEQ ID NO: 156364
aguacccauaaauucaagu

SEQ ID NO: 156366 - RNA, 19 nt, Artificial Sequence
  Description of Artificial Sequence: Synthetic oligonucleotide
  Sense strand starting at position 861 of SEQ ID NO: 2010
auacauagucuuugcauca

SEQ ID NO: 156367 - RNA, 19 nt, Artificial Sequence
  Description of Artificial Sequence: Synthetic oligonucleotide
  Antisense strand to SEQ ID NO: 156366
ugaugcaaagacuauguau

SEQ ID NO: 156368 - RNA, 19 nt, Artificial Sequence
  Description of Artificial Sequence: Synthetic oligonucleotide
  Sense strand starting at position 1000 of SEQ ID NO: 2010
aauaaaguagcguguaaac

SEQ ID NO: 156369 - RNA, 19 nt, Artificial Sequence
  Description of Artificial Sequence: Synthetic oligonucleotide
  Antisense strand to SEQ ID NO: 156368
guuuacacgcuacuuuauu

SEQ ID NO: 156370 - RNA, 19 nt, Artificial Sequence
  Description of Artificial Sequence: Synthetic oligonucleotide
  Sense strand starting at position 1002 of SEQ ID NO: 2010
uaaaguagcguguaaacau

SEQ ID NO: 156371 - RNA, 19 nt, Artificial Sequence
  Description of Artificial Sequence: Synthetic oligonucleotide
  Antisense strand to SEQ ID NO: 156370
auguuuacacgcuacuuua

SEQ ID NO: 156372 - RNA, 19 nt, Artificial Sequence
  Description of Artificial Sequence: Synthetic oligonucleotide
  Sense strand starting at position 1090 of SEQ ID NO: 2010
acaaguuugucuccugguu

SEQ ID NO: 156373 - RNA, 19 nt, Artificial Sequence
  Description of Artificial Sequence: Synthetic oligonucleotide
  Antisense strand to SEQ ID NO: 156372
aaccaggagacaaacuugu

SEQ ID NO: 156374 - RNA, 19 nt, Artificial Sequence
  Description of Artificial Sequence: Synthetic oligonucleotide
  Sense strand starting at position 1095 of SEQ ID NO: 2010
uuugucuccugguuuagau

SEQ ID NO: 156375 - RNA, 19 nt, Artificial Sequence
  Description of Artificial Sequence: Synthetic oligonucleotide
  Antisense strand to SEQ ID NO: 156374
aucuaaaccaggagacaaa

SEQ ID NO: 156376 - RNA, 19 nt, Artificial Sequence
  Description of Artificial Sequence: Synthetic oligonucleotide
  Sense strand starting at position 1097 of SEQ ID NO: 2010
ugucuccugguuuagauua

SEQ ID NO: 156377 - RNA, 19 nt, Artificial Sequence
  Description of Artificial Sequence: Synthetic oligonucleotide
  Antisense strand to SEQ ID NO: 156376
uaaucuaaaccaggagaca

SEQ ID NO: 156378 - RNA, 19 nt, Artificial Sequence
  Description of Artificial Sequence: Synthetic oligonucleotide
  Sense strand starting at position 1102 of SEQ ID NO: 2010
ccugguuuagauuaauuac

SEQ ID NO: 156379 - RNA, 19 nt, Artificial Sequence
  Description of Artificial Sequence: Synthetic oligonucleotide
  Antisense strand to SEQ ID NO: 156378
guaauuaaucuaaaccagg

SEQ ID NO: 156380 - RNA, 19 nt, Artificial Sequence
  Description of Artificial Sequence: Synthetic oligonucleotide
  Sense strand starting at position 1256 of SEQ ID NO: 2010
ccagauuucucucaacagg

SEQ ID NO: 156381 - RNA, 19 nt, Artificial Sequence
  Description of Artificial Sequence: Synthetic oligonucleotide
  Antisense strand to SEQ ID NO: 156380
ccuguugagagaaaucugg

SEQ ID NO: 156382 - RNA, 19 nt, Artificial Sequence
  Description of Artificial Sequence: Synthetic oligonucleotide
  Sense strand starting at position 1276 of SEQ ID NO: 2010
ccgccuuaaguccaugagu

SEQ ID NO: 156383 - RNA, 19 nt, Artificial Sequence
  Description of Artificial Sequence: Synthetic oligonucleotide
  Antisense strand to SEQ ID NO: 156382
acucauggacuuaaggcgg

SEQ ID NO: 156384 - RNA, 19 nt, Artificial Sequence
  Description of Artificial Sequence: Synthetic oligonucleotide
  Sense strand starting at position 1278 of SEQ ID NO: 2010
gccuuaaguccaugaguag

SEQ ID NO: 156385 - RNA, 19 nt, Artificial Sequence
  Description of Artificial Sequence: Synthetic oligonucleotide
  Antisense strand to SEQ ID NO: 156384
cuacucauggacuuaaggc

SEQ ID NO: 156386 - RNA, 19 nt, Artificial Sequence
  Description of Artificial Sequence: Synthetic oligonucleotide
  Sense strand starting at position 1279 of SEQ ID NO: 2010
ccuuaaguccaugaguaga

SEQ ID NO: 156387 - RNA, 19 nt, Artificial Sequence
  Description of Artificial Sequence: Synthetic oligonucleotide
  Antisense strand to SEQ ID NO: 156386
ucuacucauggacuuaagg

SEQ ID NO: 156388 - RNA, 19 nt, Artificial Sequence
  Description of Artificial Sequence: Synthetic oligonucleotide
  Sense strand starting at position 1631 of SEQ ID NO: 2010
gcaucucucgaggagccua

SEQ ID NO: 156389 - RNA, 19 nt, Artificial Sequence
  Description of Artificial Sequence: Synthetic oligonucleotide
  Antisense strand to SEQ ID NO: 156388
uaggcuccucgagagaugc

SEQ ID NO: 156390 - RNA, 19 nt, Artificial Sequence
  Description of Artificial Sequence: Synthetic oligonucleotide
  Sense strand starting at position 1636 of SEQ ID NO: 2010
ucucgaggagccuauugaa

SEQ ID NO: 156391 - RNA, 19 nt, Artificial Sequence
  Description of Artificial Sequence: Synthetic oligonucleotide
  Antisense strand to SEQ ID NO: 156390
uucaauaggcuccucgaga

SEQ ID NO: 156392 - RNA, 19 nt, Artificial Sequence
  Description of Artificial Sequence: Synthetic oligonucleotide
  Sense strand starting at position 2145 of SEQ ID NO: 2010
cagcgaggcugccuuauaa

SEQ ID NO: 156393 - RNA, 19 nt, Artificial Sequence
  Description of Artificial Sequence: Synthetic oligonucleotide
  Antisense strand to SEQ ID NO: 156392
uuauaaggcagccucgcug

SEQ ID NO: 156394 - RNA, 19 nt, Artificial Sequence
  Description of Artificial Sequence: Synthetic oligonucleotide
  Sense strand starting at position 3650 of SEQ ID NO: 2010
aguacuacuagugaguaau

SEQ ID NO: 156395 - RNA, 19 nt, Artificial Sequence
  Description of Artificial Sequence: Synthetic oligonucleotide
  Antisense strand to SEQ ID NO: 156394
auuacucacuaguaguacu

SEQ ID NO: 156396 - RNA, 19 nt, Artificial Sequence
  Description of Artificial Sequence: Synthetic oligonucleotide
  Sense strand starting at position 3664 of SEQ ID NO: 2010
guaauacaguaauugcuuu

SEQ ID NO: 156397 - RNA, 19 nt, Artificial Sequence
  Description of Artificial Sequence: Synthetic oligonucleotide
  Antisense strand to SEQ ID NO: 156396
aaagcaauuacuguauuac

SEQ ID NO: 156398 - RNA, 19 nt, Artificial Sequence
  Description of Artificial Sequence: Synthetic oligonucleotide
  Sense strand starting at position 3731 of SEQ ID NO: 2010
gcagcuaggacuuauaaga

SEQ ID NO: 156399 - RNA, 19 nt, Artificial Sequence
  Description of Artificial Sequence: Synthetic oligonucleotide
  Antisense strand to SEQ ID NO: 156398
ucuuauaaguccuagcugc

SEQ ID NO: 156400 - RNA, 19 nt, Artificial Sequence
  Description of Artificial Sequence: Synthetic oligonucleotide
  Sense strand starting at position 3838 of SEQ ID NO: 2010
uauauaagggccuguucua

SEQ ID NO: 156401 - RNA, 19 nt, Artificial Sequence
  Description of Artificial Sequence: Synthetic oligonucleotide
  Antisense strand to SEQ ID NO: 156400
uagaacaggcccuuauaua

SEQ ID NO: 156402 - RNA, 19 nt, Artificial Sequence
  Description of Artificial Sequence: Synthetic oligonucleotide
  Sense strand starting at position 3845 of SEQ ID NO: 2010
gggccuguucuauggaaug

SEQ ID NO: 156403 - RNA, 19 nt, Artificial Sequence
  Description of Artificial Sequence: Synthetic oligonucleotide
  Antisense strand to SEQ ID NO: 156402
cauuccauagaacaggccc

SEQ ID NO: 156404 - RNA, 19 nt, Artificial Sequence
  Description of Artificial Sequence: Synthetic oligonucleotide
  Sense strand starting at position 3847 of SEQ ID NO: 2010
gccuguucuauggaaugua

SEQ ID NO: 156405 - RNA, 19 nt, Artificial Sequence
  Description of Artificial Sequence: Synthetic oligonucleotide
  Antisense strand to SEQ ID NO: 156404
uacauuccauagaacaggc

SEQ ID NO: 156406 - RNA, 19 nt, Artificial Sequence
  Description of Artificial Sequence: Synthetic oligonucleotide
  Sense strand starting at position 3862 of SEQ ID NO: 2010
uguagugagaagugguuaa

SEQ ID NO: 156407 - RNA, 19 nt, Artificial Sequence
  Description of Artificial Sequence: Synthetic oligonucleotide
  Antisense strand to SEQ ID NO: 156406
uuaaccacuucucacuaca

SEQ ID NO: 156408 - RNA, 19 nt, Artificial Sequence
  Description of Artificial Sequence: Synthetic oligonucleotide
  Sense strand starting at position 3873 of SEQ ID NO: 2010
gugguuaaauaagaugaau

SEQ ID NO: 156409 - RNA, 19 nt, Artificial Sequence
  Description of Artificial Sequence: Synthetic oligonucleotide
  Antisense strand to SEQ ID NO: 156408
auucaucuuauuuaaccac

SEQ ID NO: 156410 - RNA, 19 nt, Artificial Sequence
  Description of Artificial Sequence: Synthetic oligonucleotide
  Sense strand starting at position 34 of SEQ ID NO: 2011
gaccuaagauguuagauca

SEQ ID NO: 156411 - RNA, 19 nt, Artificial Sequence
  Description of Artificial Sequence: Synthetic oligonucleotide
  Antisense strand to SEQ ID NO: 156410
ugaucuaacaucuuagguc

SEQ ID NO: 156412 - RNA, 19 nt, Artificial Sequence
  Description of Artificial Sequence: Synthetic oligonucleotide
  Sense strand starting at position 97 of SEQ ID NO: 2011
uccugaucagcuggucauu

SEQ ID NO: 156413 - RNA, 19 nt, Artificial Sequence
  Description of Artificial Sequence: Synthetic oligonucleotide
  Antisense strand to SEQ ID NO: 156412
aaugaccagcugaucagga

SEQ ID NO: 156414 - RNA, 19 nt, Artificial Sequence
  Description of Artificial Sequence: Synthetic oligonucleotide
  Sense strand starting at position 102 of SEQ ID NO: 2011
aucagcuggucauuaggau

SEQ ID NO: 156415 - RNA, 19 nt, Artificial Sequence
  Description of Artificial Sequence: Synthetic oligonucleotide
  Antisense strand to SEQ ID NO: 156414
auccuaaugaccagcugau

SEQ ID NO: 156416 - RNA, 19 nt, Artificial Sequence
  Description of Artificial Sequence: Synthetic oligonucleotide
  Sense strand starting at position 117 of SEQ ID NO: 2011
ggauccuuuccagggcuaa

SEQ ID NO: 156417 - RNA, 19 nt, Artificial Sequence
  Description of Artificial Sequence: Synthetic oligonucleotide
  Antisense strand to SEQ ID NO: 156416
uuagcccuggaaaggaucc

SEQ ID NO: 156418 - RNA, 19 nt, Artificial Sequence
  Description of Artificial Sequence: Synthetic oligonucleotide
  Sense strand starting at position 121 of SEQ ID NO: 2011
ccuuuccagggcuaauaua

SEQ ID NO: 156419 - RNA, 19 nt, Artificial Sequence
  Description of Artificial Sequence: Synthetic oligonucleotide
  Antisense strand to SEQ ID NO: 156418
uauauuagcccuggaaagg

SEQ ID NO: 156420 - RNA, 19 nt, Artificial Sequence
  Description of Artificial Sequence: Synthetic oligonucleotide
  Sense strand starting at position 129 of SEQ ID NO: 2011
gggcuaauauaugcccuaa

SEQ ID NO: 156421 - RNA, 19 nt, Artificial Sequence
  Description of Artificial Sequence: Synthetic oligonucleotide
  Antisense strand to SEQ ID NO: 156420
uuagggcauauauuagccc

SEQ ID NO: 156422 - RNA, 19 nt, Artificial Sequence
  Description of Artificial Sequence: Synthetic oligonucleotide
  Sense strand starting at position 199 of SEQ ID NO: 2011
auccuauagugauaugacu

SEQ ID NO: 156423 - RNA, 19 nt, Artificial Sequence
  Description of Artificial Sequence: Synthetic oligonucleotide
  Antisense strand to SEQ ID NO: 156422
agucauaucacuauaggau

SEQ ID NO: 156424 - RNA, 19 nt, Artificial Sequence
  Description of Artificial Sequence: Synthetic oligonucleotide
  Sense strand starting at position 250 of SEQ ID NO: 2011
agucuaucccguuaagcuu

SEQ ID NO: 156425 - RNA, 19 nt, Artificial Sequence
  Description of Artificial Sequence: Synthetic oligonucleotide
  Antisense strand to SEQ ID NO: 156424
aagcuuaacgggauagacu

SEQ ID NO: 156426 - RNA, 19 nt, Artificial Sequence
  Description of Artificial Sequence: Synthetic oligonucleotide
  Sense strand starting at position 256 of SEQ ID NO: 2011
ucccguuaagcuuacaacu

SEQ ID NO: 156427 - RNA, 19 nt, Artificial Sequence
  Description of Artificial Sequence: Synthetic oligonucleotide
  Antisense strand to SEQ ID NO: 156426
aguuguaagcuuaacggga

SEQ ID NO: 156428 - RNA, 19 nt, Artificial Sequence
  Description of Artificial Sequence: Synthetic oligonucleotide
  Sense strand starting at position 453 of SEQ ID NO: 2011
agugcuaaauaucuugaau

SEQ ID NO: 156429 - RNA, 19 nt, Artificial Sequence
  Description of Artificial Sequence: Synthetic oligonucleotide
  Antisense strand to SEQ ID NO: 156428
auucaagauauuuagcacu

SEQ ID NO: 156430 - RNA, 19 nt, Artificial Sequence
  Description of Artificial Sequence: Synthetic oligonucleotide
  Sense strand starting at position 456 of SEQ ID NO: 2011
gcuaaauaucuugaauugu

SEQ ID NO: 156431 - RNA, 19 nt, Artificial Sequence
  Description of Artificial Sequence: Synthetic oligonucleotide
  Antisense strand to SEQ ID NO: 156430
acaauucaagauauuuagc

SEQ ID NO: 156432 - RNA, 19 nt, Artificial Sequence
  Description of Artificial Sequence: Synthetic oligonucleotide
  Sense strand starting at position 464 of SEQ ID NO: 2011
ucuugaauuguuggucauu

SEQ ID NO: 156433 - RNA, 19 nt, Artificial Sequence
  Description of Artificial Sequence: Synthetic oligonucleotide
  Antisense strand to SEQ ID NO: 156432
aaugaccaacaauucaaga

SEQ ID NO: 156434 - RNA, 19 nt, Artificial Sequence
  Description of Artificial Sequence: Synthetic oligonucleotide
  Sense strand starting at position 476 of SEQ ID NO: 2011
ggucauuucuauggcaauc

SEQ ID NO: 156435 - RNA, 19 nt, Artificial Sequence
  Description of Artificial Sequence: Synthetic oligonucleotide
  Antisense strand to SEQ ID NO: 156434
gauugccauagaaaugacc

SEQ ID NO: 156436 - RNA, 19 nt, Artificial Sequence
  Description of Artificial Sequence: Synthetic oligonucleotide
  Sense strand starting at position 525 of SEQ ID NO: 2011
acuugaauuuauggguacu

SEQ ID NO: 156437 - RNA, 19 nt, Artificial Sequence
  Description of Artificial Sequence: Synthetic oligonucleotide
  Antisense strand to SEQ ID NO: 156436
aguacccauaaauucaagu

SEQ ID NO: 156438 - RNA, 19 nt, Artificial Sequence
  Description of Artificial Sequence: Synthetic oligonucleotide
  Sense strand starting at position 571 of SEQ ID NO: 2011
auacauagucuuugcauca

SEQ ID NO: 156439 - RNA, 19 nt, Artificial Sequence
  Description of Artificial Sequence: Synthetic oligonucleotide
  Antisense strand to SEQ ID NO: 156438
ugaugcaaagacuauguau

SEQ ID NO: 156440 - RNA, 19 nt, Artificial Sequence
  Description of Artificial Sequence: Synthetic oligonucleotide
  Sense strand starting at position 710 of SEQ ID NO: 2011
aauaaaguagcguguaaac

SEQ ID NO: 156441 - RNA, 19 nt, Artificial Sequence
  Description of Artificial Sequence: Synthetic oligonucleotide
  Antisense strand to SEQ ID NO: 156440
guuuacacgcuacuuuauu

SEQ ID NO: 156442 - RNA, 19 nt, Artificial Sequence
  Description of Artificial Sequence: Synthetic oligonucleotide
  Sense strand starting at position 712 of SEQ ID NO: 2011
uaaaguagcguguaaacau

SEQ ID NO: 156443 - RNA, 19 nt, Artificial Sequence
  Description of Artificial Sequence: Synthetic oligonucleotide
  Antisense strand to SEQ ID NO: 156442
auguuuacacgcuacuuua

SEQ ID NO: 156444 - RNA, 19 nt, Artificial Sequence
  Description of Artificial Sequence: Synthetic oligonucleotide
  Sense strand starting at position 800 of SEQ ID NO: 2011
acaaguuugucuccugguu

SEQ ID NO: 156445 - RNA, 19 nt, Artificial Sequence
  Description of Artificial Sequence: Synthetic oligonucleotide
  Antisense strand to SEQ ID NO: 156444
aaccaggagacaaacuugu

SEQ ID NO: 156446 - RNA, 19 nt, Artificial Sequence
  Description of Artificial Sequence: Synthetic oligonucleotide
  Sense strand starting at position 805 of SEQ ID NO: 2011
uuugucuccugguuuagau

SEQ ID NO: 156447 - RNA, 19 nt, Artificial Sequence
  Description of Artificial Sequence: Synthetic oligonucleotide
  Antisense strand to SEQ ID NO: 156446
aucuaaaccaggagacaaa

SEQ ID NO: 156448 - RNA, 19 nt, Artificial Sequence
  Description of Artificial Sequence: Synthetic oligonucleotide
  Sense strand starting at position 807 of SEQ ID NO: 2011
ugucuccugguuuagauua

SEQ ID NO: 156449 - RNA, 19 nt, Artificial Sequence
  Description of Artificial Sequence: Synthetic oligonucleotide
  Antisense strand to SEQ ID NO: 156448
uaaucuaaaccaggagaca

SEQ ID NO: 156450 - RNA, 19 nt, Artificial Sequence
  Description of Artificial Sequence: Synthetic oligonucleotide
  Sense strand starting at position 812 of SEQ ID NO: 2011
ccugguuuagauuaauuac

SEQ ID NO: 156451 - RNA, 19 nt, Artificial Sequence
  Description of Artificial Sequence: Synthetic oligonucleotide
  Antisense strand to SEQ ID NO: 156450
guaauuaaucuaaaccagg

SEQ ID NO: 156452 - RNA, 19 nt, Artificial Sequence
  Description of Artificial Sequence: Synthetic oligonucleotide
  Sense strand starting at position 966 of SEQ ID NO: 2011
ccagauuucucucaacagg

SEQ ID NO: 156453 - RNA, 19 nt, Artificial Sequence
  Description of Artificial Sequence: Synthetic oligonucleotide
  Antisense strand to SEQ ID NO: 156452
ccuguugagagaaaucugg

SEQ ID NO: 156454 - RNA, 19 nt, Artificial Sequence
  Description of Artificial Sequence: Synthetic oligonucleotide
  Sense strand starting at position 986 of SEQ ID NO: 2011
ccgccuuaaguccaugagu

SEQ ID NO: 156455 - RNA, 19 nt, Artificial Sequence
  Description of Artificial Sequence: Synthetic oligonucleotide
  Antisense strand to SEQ ID NO: 156454
acucauggacuuaaggcgg

SEQ ID NO: 156456 - RNA, 19 nt, Artificial Sequence
  Description of Artificial Sequence: Synthetic oligonucleotide
  Sense strand starting at position 988 of SEQ ID NO: 2011
gccuuaaguccaugaguag

SEQ ID NO: 156457 - RNA, 19 nt, Artificial Sequence
  Description of Artificial Sequence: Synthetic oligonucleotide
  Antisense strand to SEQ ID NO: 156456
cuacucauggacuuaaggc

SEQ ID NO: 156458 - RNA, 19 nt, Artificial Sequence
  Description of Artificial Sequence: Synthetic oligonucleotide
  Sense strand starting at position 989 of SEQ ID NO: 2011
ccuuaaguccaugaguaga

SEQ ID NO: 156459 - RNA, 19 nt, Artificial Sequence
  Description of Artificial Sequence: Synthetic oligonucleotide
  Antisense strand to SEQ ID NO: 156458
ucuacucauggacuuaagg

SEQ ID NO: 156460 - RNA, 19 nt, Artificial Sequence
  Description of Artificial Sequence: Synthetic oligonucleotide
  Sense strand starting at position 1225 of SEQ ID NO: 2011
ugucacgaaucauaaauaa

SEQ ID NO: 156461 - RNA, 19 nt, Artificial Sequence
  Description of Artificial Sequence: Synthetic oligonucleotide
  Antisense strand to SEQ ID NO: 156460
uuauuuaugauucgugaca

SEQ ID NO: 156462 - RNA, 19 nt, Artificial Sequence
  Description of Artificial Sequence: Synthetic oligonucleotide
  Sense strand starting at position 1341 of SEQ ID NO: 2011
gcaucucucgaggagccua

SEQ ID NO: 156463 - RNA, 19 nt, Artificial Sequence
  Description of Artificial Sequence: Synthetic oligonucleotide
  Antisense strand to SEQ ID NO: 156462
uaggcuccucgagagaugc

SEQ ID NO: 156464 - RNA, 19 nt, Artificial Sequence
  Description of Artificial Sequence: Synthetic oligonucleotide
  Sense strand starting at position 1346 of SEQ ID NO: 2011
ucucgaggagccuauugaa

SEQ ID NO: 156465 - RNA, 19 nt, Artificial Sequence
  Description of Artificial Sequence: Synthetic oligonucleotide
  Antisense strand to SEQ ID NO: 156464
uucaauaggcuccucgaga

SEQ ID NO: 156466 - RNA, 19 nt, Artificial Sequence
  Description of Artificial Sequence: Synthetic oligonucleotide
  Sense strand starting at position 1855 of SEQ ID NO: 2011
cagcgaggcugccuuauaa

SEQ ID NO: 156467 - RNA, 19 nt, Artificial Sequence
  Description of Artificial Sequence: Synthetic oligonucleotide
  Antisense strand to SEQ ID NO: 156466
uuauaaggcagccucgcug

SEQ ID NO: 156468 - RNA, 19 nt, Artificial Sequence
  Description of Artificial Sequence: Synthetic oligonucleotide
  Sense strand starting at position 3360 of SEQ ID NO: 2011
aguacuacuagugaguaau

SEQ ID NO: 156469 - RNA, 19 nt, Artificial Sequence
  Description of Artificial Sequence: Synthetic oligonucleotide
  Antisense strand to SEQ ID NO: 156468
auuacucacuaguaguacu

SEQ ID NO: 156470 - RNA, 19 nt, Artificial Sequence
  Description of Artificial Sequence: Synthetic oligonucleotide
  Sense strand starting at position 3374 of SEQ ID NO: 2011
guaauacaguaauugcuuu

SEQ ID NO: 156471 - RNA, 19 nt, Artificial Sequence
  Description of Artificial Sequence: Synthetic oligonucleotide
  Antisense strand to SEQ ID NO: 156470
aaagcaauuacuguauuac

SEQ ID NO: 156472 - RNA, 19 nt, Artificial Sequence
  Description of Artificial Sequence: Synthetic oligonucleotide
  Sense strand starting at position 3441 of SEQ ID NO: 2011
gcagcuaggacuuauaaga

SEQ ID NO: 156473 - RNA, 19 nt, Artificial Sequence
  Description of Artificial Sequence: Synthetic oligonucleotide
  Antisense strand to SEQ ID NO: 156472
ucuuauaaguccuagcugc

SEQ ID NO: 156474 - RNA, 19 nt, Artificial Sequence
  Description of Artificial Sequence: Synthetic oligonucleotide
  Sense strand starting at position 3548 of SEQ ID NO: 2011
uauauaagggccuguucua

SEQ ID NO: 156475 - RNA, 19 nt, Artificial Sequence
  Description of Artificial Sequence: Synthetic oligonucleotide
  Antisense strand to SEQ ID NO: 156474
uagaacaggcccuuauaua

SEQ ID NO: 156476 - RNA, 19 nt, Artificial Sequence
  Description of Artificial Sequence: Synthetic oligonucleotide
  Sense strand starting at position 3555 of SEQ ID NO: 2011
gggccuguucuauggaaug

SEQ ID NO: 156477 - RNA, 19 nt, Artificial Sequence
  Description of Artificial Sequence: Synthetic oligonucleotide
  Antisense strand to SEQ ID NO: 156476
cauuccauagaacaggccc

SEQ ID NO: 156478 - RNA, 19 nt, Artificial Sequence
  Description of Artificial Sequence: Synthetic oligonucleotide
  Sense strand starting at position 3557 of SEQ ID NO: 2011
gccuguucuauggaaugua

SEQ ID NO: 156479 - RNA, 19 nt, Artificial Sequence
  Description of Artificial Sequence: Synthetic oligonucleotide
  Antisense strand to SEQ ID NO: 156478
uacauuccauagaacaggc

SEQ ID NO: 156480 - RNA, 19 nt, Artificial Sequence
  Description of Artificial Sequence: Synthetic oligonucleotide
  Sense strand starting at position 3572 of SEQ ID NO: 2011
uguagugagaagugguuaa

SEQ ID NO: 156481 - RNA, 19 nt, Artificial Sequence
  Description of Artificial Sequence: Synthetic oligonucleotide
  Antisense strand to SEQ ID NO: 156480
uuaaccacuucucacuaca

SEQ ID NO: 156482 - RNA, 19 nt, Artificial Sequence
  Description of Artificial Sequence: Synthetic oligonucleotide
  Sense strand starting at position 3583 of SEQ ID NO: 2011
gugguuaaauaagaugaau

SEQ ID NO: 156483 - RNA, 19 nt, Artificial Sequence
  Description of Artificial Sequence: Synthetic oligonucleotide
  Antisense strand to SEQ ID NO: 156482
auucaucuuauuuaaccac

SEQ ID NO: 156484 - RNA, 19 nt, Artificial Sequence
  Description of Artificial Sequence: Synthetic oligonucleotide
  Sense strand starting at position 3786 of SEQ ID NO: 2011
accucaggguuauuaugau

SEQ ID NO: 156485 - RNA, 19 nt, Artificial Sequence
  Description of Artificial Sequence: Synthetic oligonucleotide
  Antisense strand to SEQ ID NO: 156484
aucauaauaacccugaggu

SEQ ID NO: 156486 - RNA, 19 nt, Artificial Sequence
  Description of Artificial Sequence: Synthetic oligonucleotide
  Sense strand starting at position 3790 of SEQ ID NO: 2011
caggguuauuaugauaaua

SEQ ID NO: 156487 - RNA, 19 nt, Artificial Sequence
  Description of Artificial Sequence: Synthetic oligonucleotide
  Antisense strand to SEQ ID NO: 156486
uauuaucauaauaacccug

SEQ ID NO: 156488 - RNA, 19 nt, Artificial Sequence
  Description of Artificial Sequence: Synthetic oligonucleotide
  Sense strand starting at position 3963 of SEQ ID NO: 2011
ccaugcguaaugcauagua

SEQ ID NO: 156489 - RNA, 19 nt, Artificial Sequence
  Description of Artificial Sequence: Synthetic oligonucleotide
  Antisense strand to SEQ ID NO: 156488
uacuaugcauuacgcaugg

SEQ ID NO: 156490 - RNA, 19 nt, Artificial Sequence
  Description of Artificial Sequence: Synthetic oligonucleotide
  Sense strand starting at position 88 of SEQ ID NO: 2012
cucugagccuuucuccaga

SEQ ID NO: 156491 - RNA, 19 nt, Artificial Sequence
  Description of Artificial Sequence: Synthetic oligonucleotide
  Antisense strand to SEQ ID NO: 156490
ucuggagaaaggcucagag

SEQ ID NO: 156492 - RNA, 19 nt, Artificial Sequence
  Description of Artificial Sequence: Synthetic oligonucleotide
  Sense strand starting at position 90 of SEQ ID NO: 2012
cugagccuuucuccagaaa

SEQ ID NO: 156493 - RNA, 19 nt, Artificial Sequence
  Description of Artificial Sequence: Synthetic oligonucleotide
  Antisense strand to SEQ ID NO: 156492
uuucuggagaaaggcucag

SEQ ID NO: 156494 - RNA, 19 nt, Artificial Sequence
  Description of Artificial Sequence: Synthetic oligonucleotide
  Sense strand starting at position 91 of SEQ ID NO: 2012
ugagccuuucuccagaaag

SEQ ID NO: 156495 - RNA, 19 nt, Artificial Sequence
  Description of Artificial Sequence: Synthetic oligonucleotide
  Antisense strand to SEQ ID NO: 156494
cuuucuggagaaaggcuca

SEQ ID NO: 156496 - RNA, 19 nt, Artificial Sequence
  Description of Artificial Sequence: Synthetic oligonucleotide
  Sense strand starting at position 142 of SEQ ID NO: 2012
agugaauucuuaccaggaa

SEQ ID NO: 156497 - RNA, 19 nt, Artificial Sequence
  Description of Artificial Sequence: Synthetic oligonucleotide
  Antisense strand to SEQ ID NO: 156496
uuccugguaagaauucacu

SEQ ID NO: 156498 - RNA, 19 nt, Artificial Sequence
  Description of Artificial Sequence: Synthetic oligonucleotide
  Sense strand starting at position 262 of SEQ ID NO: 2012
ugcagaagaucccugugau

SEQ ID NO: 156499 - RNA, 19 nt, Artificial Sequence
  Description of Artificial Sequence: Synthetic oligonucleotide
  Antisense strand to SEQ ID NO: 156498
aucacagggaucuucugca

SEQ ID NO: 156500 - RNA, 19 nt, Artificial Sequence
  Description of Artificial Sequence: Synthetic oligonucleotide
  Sense strand starting at position 263 of SEQ ID NO: 2012
gcagaagaucccugugaua

SEQ ID NO: 156501 - RNA, 19 nt, Artificial Sequence
  Description of Artificial Sequence: Synthetic oligonucleotide
  Antisense strand to SEQ ID NO: 156500
uaucacagggaucuucugc

SEQ ID NO: 156502 - RNA, 19 nt, Artificial Sequence
  Description of Artificial Sequence: Synthetic oligonucleotide
  Sense strand starting at position 293 of SEQ ID NO: 2012
guugauucaguggaccaga

SEQ ID NO: 156503 - RNA, 19 nt, Artificial Sequence
  Description of Artificial Sequence: Synthetic oligonucleotide
  Antisense strand to SEQ ID NO: 156502
ucugguccacugaaucaac

SEQ ID NO: 156504 - RNA, 19 nt, Artificial Sequence
  Description of Artificial Sequence: Synthetic oligonucleotide
  Sense strand starting at position 1051 of SEQ ID NO: 2012
ugaagucugccugaugcaa

SEQ ID NO: 156505 - RNA, 19 nt, Artificial Sequence
  Description of Artificial Sequence: Synthetic oligonucleotide
  Antisense strand to SEQ ID NO: 156504
uugcaucaggcagacuuca

SEQ ID NO: 156506 - RNA, 19 nt, Artificial Sequence
  Description of Artificial Sequence: Synthetic oligonucleotide
  Sense strand starting at position 1073 of SEQ ID NO: 2012
aggacuuaguuaccuggaa

SEQ ID NO: 156507 - RNA, 19 nt, Artificial Sequence
  Description of Artificial Sequence: Synthetic oligonucleotide
  Antisense strand to SEQ ID NO: 156506
uuccagguaacuaaguccu

SEQ ID NO: 156508 - RNA, 19 nt, Artificial Sequence
  Description of Artificial Sequence: Synthetic oligonucleotide
  Sense strand starting at position 1074 of SEQ ID NO: 2012
ggacuuaguuaccuggaaa

SEQ ID NO: 156509 - RNA, 19 nt, Artificial Sequence
  Description of Artificial Sequence: Synthetic oligonucleotide
  Antisense strand to SEQ ID NO: 156508
uuuccagguaacuaagucc

SEQ ID NO: 156510 - RNA, 19 nt, Artificial Sequence
  Description of Artificial Sequence: Synthetic oligonucleotide
  Sense strand starting at position 1085 of SEQ ID NO: 2012
ccuggaaagccugaucuca

SEQ ID NO: 156511 - RNA, 19 nt, Artificial Sequence
  Description of Artificial Sequence: Synthetic oligonucleotide
  Antisense strand to SEQ ID NO: 156510
ugagaucaggcuuuccagg

SEQ ID NO: 156512 - RNA, 19 nt, Artificial Sequence
  Description of Artificial Sequence: Synthetic oligonucleotide
  Sense strand starting at position 1125 of SEQ ID NO: 2012
cuagaacuguacucagugu

SEQ ID NO: 156513 - RNA, 19 nt, Artificial Sequence
  Description of Artificial Sequence: Synthetic oligonucleotide
  Antisense strand to SEQ ID NO: 156512
acacugaguacaguucuag

SEQ ID NO: 156514 - RNA, 19 nt, Artificial Sequence
  Description of Artificial Sequence: Synthetic oligonucleotide
  Sense strand starting at position 1241 of SEQ ID NO: 2012
gagccuugaguuuaggaau

SEQ ID NO: 156515 - RNA, 19 nt, Artificial Sequence
  Description of Artificial Sequence: Synthetic oligonucleotide
  Antisense strand to SEQ ID NO: 156514
auuccuaaacucaaggcuc

SEQ ID NO: 156516 - RNA, 19 nt, Artificial Sequence
  Description of Artificial Sequence: Synthetic oligonucleotide
  Sense strand starting at position 1324 of SEQ ID NO: 2012
gcgauacccgcuuauugaa

SEQ ID NO: 156517 - RNA, 19 nt, Artificial Sequence
  Description of Artificial Sequence: Synthetic oligonucleotide
  Antisense strand to SEQ ID NO: 156516
uucaauaagcggguaucgc

SEQ ID NO: 156518 - RNA, 19 nt, Artificial Sequence
  Description of Artificial Sequence: Synthetic oligonucleotide
  Sense strand starting at position 1467 of SEQ ID NO: 2012
agagaauauucuuaggaga

SEQ ID NO: 156519 - RNA, 19 nt, Artificial Sequence
  Description of Artificial Sequence: Synthetic oligonucleotide
  Antisense strand to SEQ ID NO: 156518
ucuccuaagaauauucucu

SEQ ID NO: 156520 - RNA, 19 nt, Artificial Sequence
  Description of Artificial Sequence: Synthetic oligonucleotide
  Sense strand starting at position 1507 of SEQ ID NO: 2012
guaacaugacacuaugcua

SEQ ID NO: 156521 - RNA, 19 nt, Artificial Sequence
  Description of Artificial Sequence: Synthetic oligonucleotide
  Antisense strand to SEQ ID NO: 156520
uagcauagugucauguuac

SEQ ID NO: 156522 - RNA, 19 nt, Artificial Sequence
  Description of Artificial Sequence: Synthetic oligonucleotide
  Sense strand starting at position 1649 of SEQ ID NO: 2012
gacuguuucuaacuggaaa

SEQ ID NO: 156523 - RNA, 19 nt, Artificial Sequence
  Description of Artificial Sequence: Synthetic oligonucleotide
  Antisense strand to SEQ ID NO: 156522
uuuccaguuagaaacaguc

SEQ ID NO: 156524 - RNA, 19 nt, Artificial Sequence
  Description of Artificial Sequence: Synthetic oligonucleotide
  Sense strand starting at position 1786 of SEQ ID NO: 2012
ugaugugguguucagcaaa

SEQ ID NO: 156525 - RNA, 19 nt, Artificial Sequence
  Description of Artificial Sequence: Synthetic oligonucleotide
  Antisense strand to SEQ ID NO: 156524
uuugcugaacaccacauca

SEQ ID NO: 156526 - RNA, 19 nt, Artificial Sequence
  Description of Artificial Sequence: Synthetic oligonucleotide
  Sense strand starting at position 1789 of SEQ ID NO: 2012
ugugguguucagcaaagaa

SEQ ID NO: 156527 - RNA, 19 nt, Artificial Sequence
  Description of Artificial Sequence: Synthetic oligonucleotide
  Antisense strand to SEQ ID NO: 156526
uucuuugcugaacaccaca

SEQ ID NO: 156528 - RNA, 19 nt, Artificial Sequence
  Description of Artificial Sequence: Synthetic oligonucleotide
  Sense strand starting at position 1908 of SEQ ID NO: 2012
acaagugagcauuguaaga

SEQ ID NO: 156529 - RNA, 19 nt, Artificial Sequence
  Description of Artificial Sequence: Synthetic oligonucleotide
  Antisense strand to SEQ ID NO: 156528
ucuuacaaugcucacuugu

SEQ ID NO: 156530 - RNA, 19 nt, Artificial Sequence
  Description of Artificial Sequence: Synthetic oligonucleotide
  Sense strand starting at position 1999 of SEQ ID NO: 2012
gugauuugaugucaucuca

SEQ ID NO: 156531 - RNA, 19 nt, Artificial Sequence
  Description of Artificial Sequence: Synthetic oligonucleotide
  Antisense strand to SEQ ID NO: 156530
ugagaugacaucaaaucac

SEQ ID NO: 156532 - RNA, 19 nt, Artificial Sequence
  Description of Artificial Sequence: Synthetic oligonucleotide
  Sense strand starting at position 2559 of SEQ ID NO: 2012
augggaaauugucuuucgu

SEQ ID NO: 156533 - RNA, 19 nt, Artificial Sequence
  Description of Artificial Sequence: Synthetic oligonucleotide
  Antisense strand to SEQ ID NO: 156532
acgaaagacaauuucccau

SEQ ID NO: 156534 - RNA, 19 nt, Artificial Sequence
  Description of Artificial Sequence: Synthetic oligonucleotide
  Sense strand starting at position 2561 of SEQ ID NO: 2012
gggaaauugucuuucgucu

SEQ ID NO: 156535 - RNA, 19 nt, Artificial Sequence
  Description of Artificial Sequence: Synthetic oligonucleotide
  Antisense strand to SEQ ID NO: 156534
agacgaaagacaauuuccc

SEQ ID NO: 156536 - RNA, 19 nt, Artificial Sequence
  Description of Artificial Sequence: Synthetic oligonucleotide
  Sense strand starting at position 2659 of SEQ ID NO: 2012
gcacauauuuaugcauguu

SEQ ID NO: 156537 - RNA, 19 nt, Artificial Sequence
  Description of Artificial Sequence: Synthetic oligonucleotide
  Antisense strand to SEQ ID NO: 156536
aacaugcauaaauaugugc

SEQ ID NO: 156538 - RNA, 19 nt, Artificial Sequence
  Description of Artificial Sequence: Synthetic oligonucleotide
  Sense strand starting at position 2736 of SEQ ID NO: 2012
ugauuaaagugcuugcaga

SEQ ID NO: 156539 - RNA, 19 nt, Artificial Sequence
  Description of Artificial Sequence: Synthetic oligonucleotide
  Antisense strand to SEQ ID NO: 156538
ucugcaagcacuuuaauca

SEQ ID NO: 156540 - RNA, 19 nt, Artificial Sequence
  Description of Artificial Sequence: Synthetic oligonucleotide
  Sense strand starting at position 2737 of SEQ ID NO: 2012
gauuaaagugcuugcagaa

SEQ ID NO: 156541 - RNA, 19 nt, Artificial Sequence
  Description of Artificial Sequence: Synthetic oligonucleotide
  Antisense strand to SEQ ID NO: 156540
uucugcaagcacuuuaauc

SEQ ID NO: 156542 - RNA, 19 nt, Artificial Sequence
  Description of Artificial Sequence: Synthetic oligonucleotide
  Sense strand starting at position 2788 of SEQ ID NO: 2012
aaguguaagcauggaagga

SEQ ID NO: 156543 - RNA, 19 nt, Artificial Sequence
  Description of Artificial Sequence: Synthetic oligonucleotide
  Antisense strand to SEQ ID NO: 156542
uccuuccaugcuuacacuu

SEQ ID NO: 156544 - RNA, 19 nt, Artificial Sequence
  Description of Artificial Sequence: Synthetic oligonucleotide
  Sense strand starting at position 2789 of SEQ ID NO: 2012
aguguaagcauggaaggau

SEQ ID NO: 156545 - RNA, 19 nt, Artificial Sequence
  Description of Artificial Sequence: Synthetic oligonucleotide
  Antisense strand to SEQ ID NO: 156544
auccuuccaugcuuacacu

SEQ ID NO: 156546 - RNA, 19 nt, Artificial Sequence
  Description of Artificial Sequence: Synthetic oligonucleotide
  Sense strand starting at position 2792 of SEQ ID NO: 2012
guaagcauggaaggauuau

SEQ ID NO: 156547 - RNA, 19 nt, Artificial Sequence
  Description of Artificial Sequence: Synthetic oligonucleotide
  Antisense strand to SEQ ID NO: 156546
auaauccuuccaugcuuac

SEQ ID NO: 156548 - RNA, 19 nt, Artificial Sequence
  Description of Artificial Sequence: Synthetic oligonucleotide
  Sense strand starting at position 2804 of SEQ ID NO: 2012
ggauuaugcaguuacauga

SEQ ID NO: 156549 - RNA, 19 nt, Artificial Sequence
  Description of Artificial Sequence: Synthetic oligonucleotide
  Antisense strand to SEQ ID NO: 156548
ucauguaacugcauaaucc

SEQ ID NO: 156550 - RNA, 19 nt, Artificial Sequence
  Description of Artificial Sequence: Synthetic oligonucleotide
  Sense strand starting at position 2824 of SEQ ID NO: 2012
gcugguggcaaggaucaaa

SEQ ID NO: 156551 - RNA, 19 nt, Artificial Sequence
  Description of Artificial Sequence: Synthetic oligonucleotide
  Antisense strand to SEQ ID NO: 156550
uuugauccuugccaccagc

SEQ ID NO: 156552 - RNA, 19 nt, Artificial Sequence
  Description of Artificial Sequence: Synthetic oligonucleotide
  Sense strand starting at position 2897 of SEQ ID NO: 2012
cagagagcuguuuguaauu

SEQ ID NO: 156553 - RNA, 19 nt, Artificial Sequence
  Description of Artificial Sequence: Synthetic oligonucleotide
  Antisense strand to SEQ ID NO: 156552
aauuacaaacagcucucug

SEQ ID NO: 156554 - RNA, 19 nt, Artificial Sequence
  Description of Artificial Sequence: Synthetic oligonucleotide
  Sense strand starting at position 2902 of SEQ ID NO: 2012
agcuguuuguaauuaugaa

SEQ ID NO: 156555 - RNA, 19 nt, Artificial Sequence
  Description of Artificial Sequence: Synthetic oligonucleotide
  Antisense strand to SEQ ID NO: 156554
uucauaauuacaaacagcu

SEQ ID NO: 156556 - RNA, 19 nt, Artificial Sequence
  Description of Artificial Sequence: Synthetic oligonucleotide
  Sense strand starting at position 3302 of SEQ ID NO: 2012
agggcuaucuaugauuucu

SEQ ID NO: 156557 - RNA, 19 nt, Artificial Sequence
  Description of Artificial Sequence: Synthetic oligonucleotide
  Antisense strand to SEQ ID NO: 156556
agaaaucauagauagcccu

SEQ ID NO: 156558 - RNA, 19 nt, Artificial Sequence
  Description of Artificial Sequence: Synthetic oligonucleotide
  Sense strand starting at position 3608 of SEQ ID NO: 2012
ggagccagcuauccauaau

SEQ ID NO: 156559 - RNA, 19 nt, Artificial Sequence
  Description of Artificial Sequence: Synthetic oligonucleotide
  Antisense strand to SEQ ID NO: 156558
auuauggauagcuggcucc

SEQ ID NO: 156560 - RNA, 19 nt, Artificial Sequence
  Description of Artificial Sequence: Synthetic oligonucleotide
  Sense strand starting at position 3784 of SEQ ID NO: 2012
gugaaucauugugccuaac

SEQ ID NO: 156561 - RNA, 19 nt, Artificial Sequence
  Description of Artificial Sequence: Synthetic oligonucleotide
  Antisense strand to SEQ ID NO: 156560
guuaggcacaaugauucac

SEQ ID NO: 156562 - RNA, 19 nt, Artificial Sequence
  Description of Artificial Sequence: Synthetic oligonucleotide
  Sense strand starting at position 3794 of SEQ ID NO: 2012
gugccuaaccuauguaaac

SEQ ID NO: 156563 - RNA, 19 nt, Artificial Sequence
  Description of Artificial Sequence: Synthetic oligonucleotide
  Antisense strand to SEQ ID NO: 156562
guuuacauagguuaggcac

SEQ ID NO: 156564 - RNA, 19 nt, Artificial Sequence
  Description of Artificial Sequence: Synthetic oligonucleotide
  Sense strand starting at position 3853 of SEQ ID NO: 2012
gucuuauaauaggcuuuau

SEQ ID NO: 156565 - RNA, 19 nt, Artificial Sequence
  Description of Artificial Sequence: Synthetic oligonucleotide
  Antisense strand to SEQ ID NO: 156564
auaaagccuauuauaagac

SEQ ID NO: 156566 - RNA, 19 nt, Artificial Sequence
  Description of Artificial Sequence: Synthetic oligonucleotide
  Sense strand starting at position 3875 of SEQ ID NO: 2012
gauagagaacucugaugcu

SEQ ID NO: 156567 - RNA, 19 nt, Artificial Sequence
  Description of Artificial Sequence: Synthetic oligonucleotide
  Antisense strand to SEQ ID NO: 156566
agcaucagaguucucuauc

SEQ ID NO: 156568 - RNA, 19 nt, Artificial Sequence
  Description of Artificial Sequence: Synthetic oligonucleotide
  Sense strand starting at position 3910 of SEQ ID NO: 2012
uuugaaaugcggcagaaca

SEQ ID NO: 156569 - RNA, 19 nt, Artificial Sequence
  Description of Artificial Sequence: Synthetic oligonucleotide
  Antisense strand to SEQ ID NO: 156568
uguucugccgcauuucaaa

SEQ ID NO: 156570 - RNA, 19 nt, Artificial Sequence
  Description of Artificial Sequence: Synthetic oligonucleotide
  Sense strand starting at position 59 of SEQ ID NO: 2013
uguuacggucgcuuaugua

SEQ ID NO: 156571 - RNA, 19 nt, Artificial Sequence
  Description of Artificial Sequence: Synthetic oligonucleotide
  Antisense strand to SEQ ID NO: 156570
uacauaagcgaccguaaca

SEQ ID NO: 156572 - RNA, 19 nt, Artificial Sequence
  Description of Artificial Sequence: Synthetic oligonucleotide
  Sense strand starting at position 163 of SEQ ID NO: 2013
cagugauacuugcuagaag

SEQ ID NO: 156573 - RNA, 19 nt, Artificial Sequence
  Description of Artificial Sequence: Synthetic oligonucleotide
  Antisense strand to SEQ ID NO: 156572
cuucuagcaaguaucacug

SEQ ID NO: 156574 - RNA, 19 nt, Artificial Sequence
  Description of Artificial Sequence: Synthetic oligonucleotide
  Sense strand starting at position 166 of SEQ ID NO: 2013
ugauacuugcuagaaguga

SEQ ID NO: 156575 - RNA, 19 nt, Artificial Sequence
  Description of Artificial Sequence: Synthetic oligonucleotide
  Antisense strand to SEQ ID NO: 156574
ucacuucuagcaaguauca

SEQ ID NO: 156576 - RNA, 19 nt, Artificial Sequence
  Description of Artificial Sequence: Synthetic oligonucleotide
  Sense strand starting at position 174 of SEQ ID NO: 2013
gcuagaagugaacaaaugu

SEQ ID NO: 156577 - RNA, 19 nt, Artificial Sequence
  Description of Artificial Sequence: Synthetic oligonucleotide
  Antisense strand to SEQ ID NO: 156576
acauuuguucacuucuagc

SEQ ID NO: 156578 - RNA, 19 nt, Artificial Sequence
  Description of Artificial Sequence: Synthetic oligonucleotide
  Sense strand starting at position 217 of SEQ ID NO: 2013
uacguaagucaauacugau

SEQ ID NO: 156579 - RNA, 19 nt, Artificial Sequence
  Description of Artificial Sequence: Synthetic oligonucleotide
  Antisense strand to SEQ ID NO: 156578
aucaguauugacuuacgua

SEQ ID NO: 156580 - RNA, 19 nt, Artificial Sequence
  Description of Artificial Sequence: Synthetic oligonucleotide
  Sense strand starting at position 438 of SEQ ID NO: 2013
guuuaaaugggaggaguau

SEQ ID NO: 156581 - RNA, 19 nt, Artificial Sequence
  Description of Artificial Sequence: Synthetic oligonucleotide
  Antisense strand to SEQ ID NO: 156580
auacuccucccauuuaaac

SEQ ID NO: 156582 - RNA, 19 nt, Artificial Sequence
  Description of Artificial Sequence: Synthetic oligonucleotide
  Sense strand starting at position 580 of SEQ ID NO: 2013
uguuguauucaaggaagag

SEQ ID NO: 156583 - RNA, 19 nt, Artificial Sequence
  Description of Artificial Sequence: Synthetic oligonucleotide
  Antisense strand to SEQ ID NO: 156582
cucuuccuugaauacaaca

SEQ ID NO: 156584 - RNA, 19 nt, Artificial Sequence
  Description of Artificial Sequence: Synthetic oligonucleotide
  Sense strand starting at position 630 of SEQ ID NO: 2013
gaaguacuuuggguuuaau

SEQ ID NO: 156585 - RNA, 19 nt, Artificial Sequence
  Description of Artificial Sequence: Synthetic oligonucleotide
  Antisense strand to SEQ ID NO: 156584
auuaaacccaaaguacuuc

SEQ ID NO: 156586 - RNA, 19 nt, Artificial Sequence
  Description of Artificial Sequence: Synthetic oligonucleotide
  Sense strand starting at position 713 of SEQ ID NO: 2013
uuaaauaggucagcacauu

SEQ ID NO: 156587 - RNA, 19 nt, Artificial Sequence
  Description of Artificial Sequence: Synthetic oligonucleotide
  Antisense strand to SEQ ID NO: 156586
aaugugcugaccuauuuaa

SEQ ID NO: 156588 - RNA, 19 nt, Artificial Sequence
  Description of Artificial Sequence: Synthetic oligonucleotide
  Sense strand starting at position 869 of SEQ ID NO: 2013
aucaccuuguaucugagaa

SEQ ID NO: 156589 - RNA, 19 nt, Artificial Sequence
  Description of Artificial Sequence: Synthetic oligonucleotide
  Antisense strand to SEQ ID NO: 156588
uucucagauacaaggugau

SEQ ID NO: 156590 - RNA, 19 nt, Artificial Sequence
  Description of Artificial Sequence: Synthetic oligonucleotide
  Sense strand starting at position 975 of SEQ ID NO: 2013
ccuggagguuggucuuaag

SEQ ID NO: 156591 - RNA, 19 nt, Artificial Sequence
  Description of Artificial Sequence: Synthetic oligonucleotide
  Antisense strand to SEQ ID NO: 156590
cuuaagaccaaccuccagg

SEQ ID NO: 156592 - RNA, 19 nt, Artificial Sequence
  Description of Artificial Sequence: Synthetic oligonucleotide
  Sense strand starting at position 1004 of SEQ ID NO: 2013
gcaggauauccuuggacac

SEQ ID NO: 156593 - RNA, 19 nt, Artificial Sequence
  Description of Artificial Sequence: Synthetic oligonucleotide
  Antisense strand to SEQ ID NO: 156592
guguccaaggauauccugc

SEQ ID NO: 156594 - RNA, 19 nt, Artificial Sequence
  Description of Artificial Sequence: Synthetic oligonucleotide
  Sense strand starting at position 1479 of SEQ ID NO: 2013
ucagaaaucucugccgaga

SEQ ID NO: 156595 - RNA, 19 nt, Artificial Sequence
  Description of Artificial Sequence: Synthetic oligonucleotide
  Antisense strand to SEQ ID NO: 156594
ucucggcagagauuucuga

SEQ ID NO: 156596 - RNA, 19 nt, Artificial Sequence
  Description of Artificial Sequence: Synthetic oligonucleotide
  Sense strand starting at position 1482 of SEQ ID NO: 2013
gaaaucucugccgagaaug

SEQ ID NO: 156597 - RNA, 19 nt, Artificial Sequence
  Description of Artificial Sequence: Synthetic oligonucleotide
  Antisense strand to SEQ ID NO: 156596
cauucucggcagagauuuc

SEQ ID NO: 156598 - RNA, 19 nt, Artificial Sequence
  Description of Artificial Sequence: Synthetic oligonucleotide
  Sense strand starting at position 2302 of SEQ ID NO: 2013
aguccuccgcuggaagaaa

SEQ ID NO: 156599 - RNA, 19 nt, Artificial Sequence
  Description of Artificial Sequence: Synthetic oligonucleotide
  Antisense strand to SEQ ID NO: 156598
uuucuuccagcggaggacu

SEQ ID NO: 156600 - RNA, 19 nt, Artificial Sequence
  Description of Artificial Sequence: Synthetic oligonucleotide
  Sense strand starting at position 2683 of SEQ ID NO: 2013
cuacgcuacgguuuauagu

SEQ ID NO: 156601 - RNA, 19 nt, Artificial Sequence
  Description of Artificial Sequence: Synthetic oligonucleotide
  Antisense strand to SEQ ID NO: 156600
acuauaaaccguagcguag

SEQ ID NO: 156602 - RNA, 19 nt, Artificial Sequence
  Description of Artificial Sequence: Synthetic oligonucleotide
  Sense strand starting at position 2712 of SEQ ID NO: 2013
guggaagauccugagucau

SEQ ID NO: 156603 - RNA, 19 nt, Artificial Sequence
  Description of Artificial Sequence: Synthetic oligonucleotide
  Antisense strand to SEQ ID NO: 156602
augacucaggaucuuccac

SEQ ID NO: 156604 - RNA, 19 nt, Artificial Sequence
  Description of Artificial Sequence: Synthetic oligonucleotide
  Sense strand starting at position 2714 of SEQ ID NO: 2013
ggaagauccugagucauua

SEQ ID NO: 156605 - RNA, 19 nt, Artificial Sequence
  Description of Artificial Sequence: Synthetic oligonucleotide
  Antisense strand to SEQ ID NO: 156604
uaaugacucaggaucuucc

SEQ ID NO: 156606 - RNA, 19 nt, Artificial Sequence
  Description of Artificial Sequence: Synthetic oligonucleotide
  Sense strand starting at position 2931 of SEQ ID NO: 2013
cugugcaguauuuguagaa

SEQ ID NO: 156607 - RNA, 19 nt, Artificial Sequence
  Description of Artificial Sequence: Synthetic oligonucleotide
  Antisense strand to SEQ ID NO: 156606
uucuacaaauacugcacag

SEQ ID NO: 156608 - RNA, 19 nt, Artificial Sequence
  Description of Artificial Sequence: Synthetic oligonucleotide
  Sense strand starting at position 2932 of SEQ ID NO: 2013
ugugcaguauuuguagaau

SEQ ID NO: 156609 - RNA, 19 nt, Artificial Sequence
  Description of Artificial Sequence: Synthetic oligonucleotide
  Antisense strand to SEQ ID NO: 156608
auucuacaaauacugcaca

SEQ ID NO: 156610 - RNA, 19 nt, Artificial Sequence
  Description of Artificial Sequence: Synthetic oligonucleotide
  Sense strand starting at position 2962 of SEQ ID NO: 2013
ccagaagcucuuggaaaca

SEQ ID NO: 156611 - RNA, 19 nt, Artificial Sequence
  Description of Artificial Sequence: Synthetic oligonucleotide
  Antisense strand to SEQ ID NO: 156610
uguuuccaagagcuucugg

SEQ ID NO: 156612 - RNA, 19 nt, Artificial Sequence
  Description of Artificial Sequence: Synthetic oligonucleotide
  Sense strand starting at position 3159 of SEQ ID NO: 2013
cugugaguugauuaaucug

SEQ ID NO: 156613 - RNA, 19 nt, Artificial Sequence
  Description of Artificial Sequence: Synthetic oligonucleotide
  Antisense strand to SEQ ID NO: 156612
cagauuaaucaacucacag

SEQ ID NO: 156614 - RNA, 19 nt, Artificial Sequence
  Description of Artificial Sequence: Synthetic oligonucleotide
  Sense strand starting at position 3162 of SEQ ID NO: 2013
ugaguugauuaaucuguga

SEQ ID NO: 156615 - RNA, 19 nt, Artificial Sequence
  Description of Artificial Sequence: Synthetic oligonucleotide
  Antisense strand to SEQ ID NO: 156614
ucacagauuaaucaacuca

SEQ ID NO: 156616 - RNA, 19 nt, Artificial Sequence
  Description of Artificial Sequence: Synthetic oligonucleotide
  Sense strand starting at position 3164 of SEQ ID NO: 2013
aguugauuaaucugugaag

SEQ ID NO: 156617 - RNA, 19 nt, Artificial Sequence
  Description of Artificial Sequence: Synthetic oligonucleotide
  Antisense strand to SEQ ID NO: 156616
cuucacagauuaaucaacu

SEQ ID NO: 156618 - RNA, 19 nt, Artificial Sequence
  Description of Artificial Sequence: Synthetic oligonucleotide
  Sense strand starting at position 3165 of SEQ ID NO: 2013
guugauuaaucugugaaga

SEQ ID NO: 156619 - RNA, 19 nt, Artificial Sequence
  Description of Artificial Sequence: Synthetic oligonucleotide
  Antisense strand to SEQ ID NO: 156618
ucuucacagauuaaucaac

SEQ ID NO: 156620 - RNA, 19 nt, Artificial Sequence
  Description of Artificial Sequence: Synthetic oligonucleotide
  Sense strand starting at position 3166 of SEQ ID NO: 2013
uugauuaaucugugaagaa

SEQ ID NO: 156621 - RNA, 19 nt, Artificial Sequence
  Description of Artificial Sequence: Synthetic oligonucleotide
  Antisense strand to SEQ ID NO: 156620
uucuucacagauuaaucaa

SEQ ID NO: 156622 - RNA, 19 nt, Artificial Sequence
  Description of Artificial Sequence: Synthetic oligonucleotide
  Sense strand starting at position 3334 of SEQ ID NO: 2013
gcuauauaaugucugauga

SEQ ID NO: 156623 - RNA, 19 nt, Artificial Sequence
  Description of Artificial Sequence: Synthetic oligonucleotide
  Antisense strand to SEQ ID NO: 156622
ucaucagacauuauauagc

SEQ ID NO: 156624 - RNA, 19 nt, Artificial Sequence
  Description of Artificial Sequence: Synthetic oligonucleotide
  Sense strand starting at position 3335 of SEQ ID NO: 2013
cuauauaaugucugaugac

SEQ ID NO: 156625 - RNA, 19 nt, Artificial Sequence
  Description of Artificial Sequence: Synthetic oligonucleotide
  Antisense strand to SEQ ID NO: 156624
gucaucagacauuauauag

SEQ ID NO: 156626 - RNA, 19 nt, Artificial Sequence
  Description of Artificial Sequence: Synthetic oligonucleotide
  Sense strand starting at position 3352 of SEQ ID NO: 2013
acaucaucgcuuuauagga

SEQ ID NO: 156627 - RNA, 19 nt, Artificial Sequence
  Description of Artificial Sequence: Synthetic oligonucleotide
  Antisense strand to SEQ ID NO: 156626
uccuauaaagcgaugaugu

SEQ ID NO: 156628 - RNA, 19 nt, Artificial Sequence
  Description of Artificial Sequence: Synthetic oligonucleotide
  Sense strand starting at position 3359 of SEQ ID NO: 2013
cgcuuuauaggaugagaga

SEQ ID NO: 156629 - RNA, 19 nt, Artificial Sequence
  Description of Artificial Sequence: Synthetic oligonucleotide
  Antisense strand to SEQ ID NO: 156628
ucucucauccuauaaagcg

SEQ ID NO: 156630 - RNA, 19 nt, Artificial Sequence
  Description of Artificial Sequence: Synthetic oligonucleotide
  Sense strand starting at position 3519 of SEQ ID NO: 2013
gaggacugcuaaucgauau

SEQ ID NO: 156631 - RNA, 19 nt, Artificial Sequence
  Description of Artificial Sequence: Synthetic oligonucleotide
  Antisense strand to SEQ ID NO: 156630
auaucgauuagcaguccuc

SEQ ID NO: 156632 - RNA, 19 nt, Artificial Sequence
  Description of Artificial Sequence: Synthetic oligonucleotide
  Sense strand starting at position 3523 of SEQ ID NO: 2013
acugcuaaucgauauuauu

SEQ ID NO: 156633 - RNA, 19 nt, Artificial Sequence
  Description of Artificial Sequence: Synthetic oligonucleotide
  Antisense strand to SEQ ID NO: 156632
aauaauaucgauuagcagu

SEQ ID NO: 156634 - RNA, 19 nt, Artificial Sequence
  Description of Artificial Sequence: Synthetic oligonucleotide
  Sense strand starting at position 3599 of SEQ ID NO: 2013
gguggucuucuugacaauc

SEQ ID NO: 156635 - RNA, 19 nt, Artificial Sequence
  Description of Artificial Sequence: Synthetic oligonucleotide
  Antisense strand to SEQ ID NO: 156634
gauugucaagaagaccacc

SEQ ID NO: 156636 - RNA, 19 nt, Artificial Sequence
  Description of Artificial Sequence: Synthetic oligonucleotide
  Sense strand starting at position 3610 of SEQ ID NO: 2013
ugacaaucgcuuuguauuu

SEQ ID NO: 156637 - RNA, 19 nt, Artificial Sequence
  Description of Artificial Sequence: Synthetic oligonucleotide
  Antisense strand to SEQ ID NO: 156636
aaauacaaagcgauuguca

SEQ ID NO: 156638 - RNA, 19 nt, Artificial Sequence
  Description of Artificial Sequence: Synthetic oligonucleotide
  Sense strand starting at position 3611 of SEQ ID NO: 2013
gacaaucgcuuuguauuua

SEQ ID NO: 156639 - RNA, 19 nt, Artificial Sequence
  Description of Artificial Sequence: Synthetic oligonucleotide
  Antisense strand to SEQ ID NO: 156638
uaaauacaaagcgauuguc

SEQ ID NO: 156640 - RNA, 19 nt, Artificial Sequence
  Description of Artificial Sequence: Synthetic oligonucleotide
  Sense strand starting at position 3615 of SEQ ID NO: 2013
aucgcuuuguauuuacauu

SEQ ID NO: 156641 - RNA, 19 nt, Artificial Sequence
  Description of Artificial Sequence: Synthetic oligonucleotide
  Antisense strand to SEQ ID NO: 156640
aauguaaauacaaagcgau

SEQ ID NO: 156642 - RNA, 19 nt, Artificial Sequence
  Description of Artificial Sequence: Synthetic oligonucleotide
  Sense strand starting at position 3635 of SEQ ID NO: 2013
agugcuuuaguagaagaga

SEQ ID NO: 156643 - RNA, 19 nt, Artificial Sequence
  Description of Artificial Sequence: Synthetic oligonucleotide
  Antisense strand to SEQ ID NO: 156642
ucucuucuacuaaagcacu

SEQ ID NO: 156644 - RNA, 19 nt, Artificial Sequence
  Description of Artificial Sequence: Synthetic oligonucleotide
  Sense strand starting at position 3675 of SEQ ID NO: 2013
cagagaggccucggaaaga

SEQ ID NO: 156645 - RNA, 19 nt, Artificial Sequence
  Description of Artificial Sequence: Synthetic oligonucleotide
  Antisense strand to SEQ ID NO: 156644
ucuuuccgaggccucucug

SEQ ID NO: 156646 - RNA, 19 nt, Artificial Sequence
  Description of Artificial Sequence: Synthetic oligonucleotide
  Sense strand starting at position 3691 of SEQ ID NO: 2013
agagaagccuacuuauuaa

SEQ ID NO: 156647 - RNA, 19 nt, Artificial Sequence
  Description of Artificial Sequence: Synthetic oligonucleotide
  Antisense strand to SEQ ID NO: 156646
uuaauaaguaggcuucucu

SEQ ID NO: 156648 - RNA, 19 nt, Artificial Sequence
  Description of Artificial Sequence: Synthetic oligonucleotide
  Sense strand starting at position 3966 of SEQ ID NO: 2013
ucgcgaguacucgucucaa

SEQ ID NO: 156649 - RNA, 19 nt, Artificial Sequence
  Description of Artificial Sequence: Synthetic oligonucleotide
  Antisense strand to SEQ ID NO: 156648
uugagacgaguacucgcga

SEQ ID NO: 156650 - RNA, 19 nt, Artificial Sequence
  Description of Artificial Sequence: Synthetic oligonucleotide
  Sense strand starting at position 20 of SEQ ID NO: 2014
ggaaguaacacguaguaag

SEQ ID NO: 156651 - RNA, 19 nt, Artificial Sequence
  Description of Artificial Sequence: Synthetic oligonucleotide
  Antisense strand to SEQ ID NO: 156650
cuuacuacguguuacuucc

SEQ ID NO: 156652 - RNA, 19 nt, Artificial Sequence
  Description of Artificial Sequence: Synthetic oligonucleotide
  Sense strand starting at position 48 of SEQ ID NO: 2014
uaugcugggcauugaugaa

SEQ ID NO: 156653 - RNA, 19 nt, Artificial Sequence
  Description of Artificial Sequence: Synthetic oligonucleotide
  Antisense strand to SEQ ID NO: 156652
uucaucaaugcccagcaua

SEQ ID NO: 156654 - RNA, 19 nt, Artificial Sequence
  Description of Artificial Sequence: Synthetic oligonucleotide
  Sense strand starting at position 58 of SEQ ID NO: 2014
auugaugaauccuugguuu

SEQ ID NO: 156655 - RNA, 19 nt, Artificial Sequence
  Description of Artificial Sequence: Synthetic oligonucleotide
  Antisense strand to SEQ ID NO: 156654
aaaccaaggauucaucaau

SEQ ID NO: 156656 - RNA, 19 nt, Artificial Sequence
  Description of Artificial Sequence: Synthetic oligonucleotide
  Sense strand starting at position 60 of SEQ ID NO: 2014
ugaugaauccuugguuuau

SEQ ID NO: 156657 - RNA, 19 nt, Artificial Sequence
  Description of Artificial Sequence: Synthetic oligonucleotide
  Antisense strand to SEQ ID NO: 156656
auaaaccaaggauucauca

SEQ ID NO: 156658 - RNA, 19 nt, Artificial Sequence
  Description of Artificial Sequence: Synthetic oligonucleotide
  Sense strand starting at position 61 of SEQ ID NO: 2014
gaugaauccuugguuuauu

SEQ ID NO: 156659 - RNA, 19 nt, Artificial Sequence
  Description of Artificial Sequence: Synthetic oligonucleotide
  Antisense strand to SEQ ID NO: 156658
aauaaaccaaggauucauc

SEQ ID NO: 156660 - RNA, 19 nt, Artificial Sequence
  Description of Artificial Sequence: Synthetic oligonucleotide
  Sense strand starting at position 234 of SEQ ID NO: 2014
aaauaacugcucgaggcuu

SEQ ID NO: 156661 - RNA, 19 nt, Artificial Sequence
  Description of Artificial Sequence: Synthetic oligonucleotide
  Antisense strand to SEQ ID NO: 156660
aagccucgagcaguuauuu

SEQ ID NO: 156662 - RNA, 19 nt, Artificial Sequence
  Description of Artificial Sequence: Synthetic oligonucleotide
  Sense strand starting at position 249 of SEQ ID NO: 2014
gcuuaacagggucacuaua

SEQ ID NO: 156663 - RNA, 19 nt, Artificial Sequence
  Description of Artificial Sequence: Synthetic oligonucleotide
  Antisense strand to SEQ ID NO: 156662
uauagugacccuguuaagc

SEQ ID NO: 156664 - RNA, 19 nt, Artificial Sequence
  Description of Artificial Sequence: Synthetic oligonucleotide
  Sense strand starting at position 273 of SEQ ID NO: 2014
ggcucaguucuccaggagu

SEQ ID NO: 156665 - RNA, 19 nt, Artificial Sequence
  Description of Artificial Sequence: Synthetic oligonucleotide
  Antisense strand to SEQ ID NO: 156664
acuccuggagaacugagcc

SEQ ID NO: 156666 - RNA, 19 nt, Artificial Sequence
  Description of Artificial Sequence: Synthetic oligonucleotide
  Sense strand starting at position 334 of SEQ ID NO: 2014
cccaguuguagagauggca

SEQ ID NO: 156667 - RNA, 19 nt, Artificial Sequence
  Description of Artificial Sequence: Synthetic oligonucleotide
  Antisense strand to SEQ ID NO: 156666
ugccaucucuacaacuggg

SEQ ID NO: 156668 - RNA, 19 nt, Artificial Sequence
  Description of Artificial Sequence: Synthetic oligonucleotide
  Sense strand starting at position 337 of SEQ ID NO: 2014
aguuguagagauggcauua

SEQ ID NO: 156669 - RNA, 19 nt, Artificial Sequence
  Description of Artificial Sequence: Synthetic oligonucleotide
  Antisense strand to SEQ ID NO: 156668
uaaugccaucucuacaacu

SEQ ID NO: 156670 - RNA, 19 nt, Artificial Sequence
  Description of Artificial Sequence: Synthetic oligonucleotide
  Sense strand starting at position 404 of SEQ ID NO: 2014
ccaggagcccauugacaaa

SEQ ID NO: 156671 - RNA, 19 nt, Artificial Sequence
  Description of Artificial Sequence: Synthetic oligonucleotide
  Antisense strand to SEQ ID NO: 156670
uuugucaaugggcuccugg

SEQ ID NO: 156672 - RNA, 19 nt, Artificial Sequence
  Description of Artificial Sequence: Synthetic oligonucleotide
  Sense strand starting at position 600 of SEQ ID NO: 2014
ccagaucaaugucugauca

SEQ ID NO: 156673 - RNA, 19 nt, Artificial Sequence
  Description of Artificial Sequence: Synthetic oligonucleotide
  Antisense strand to SEQ ID NO: 156672
ugaucagacauugaucugg

SEQ ID NO: 156674 - RNA, 19 nt, Artificial Sequence
  Description of Artificial Sequence: Synthetic oligonucleotide
  Sense strand starting at position 653 of SEQ ID NO: 2014
ugaugucuccuguagucau

SEQ ID NO: 156675 - RNA, 19 nt, Artificial Sequence
  Description of Artificial Sequence: Synthetic oligonucleotide
  Antisense strand to SEQ ID NO: 156674
augacuacaggagacauca

SEQ ID NO: 156676 - RNA, 19 nt, Artificial Sequence
  Description of Artificial Sequence: Synthetic oligonucleotide
  Sense strand starting at position 704 of SEQ ID NO: 2014
ggcuauaaaucuccagcca

SEQ ID NO: 156677 - RNA, 19 nt, Artificial Sequence
  Description of Artificial Sequence: Synthetic oligonucleotide
  Antisense strand to SEQ ID NO: 156676
uggcuggagauuuauagcc

SEQ ID NO: 156678 - RNA, 19 nt, Artificial Sequence
  Description of Artificial Sequence: Synthetic oligonucleotide
  Sense strand starting at position 820 of SEQ ID NO: 2014
aguuuaacuaguggcagaa

SEQ ID NO: 156679 - RNA, 19 nt, Artificial Sequence
  Description of Artificial Sequence: Synthetic oligonucleotide
  Antisense strand to SEQ ID NO: 156678
uucugccacuaguuaaacu

SEQ ID NO: 156680 - RNA, 19 nt, Artificial Sequence
  Description of Artificial Sequence: Synthetic oligonucleotide
  Sense strand starting at position 847 of SEQ ID NO: 2014
uccuuaacaccaugggaau

SEQ ID NO: 156681 - RNA, 19 nt, Artificial Sequence
  Description of Artificial Sequence: Synthetic oligonucleotide
  Antisense strand to SEQ ID NO: 156680
auucccaugguguuaagga

SEQ ID NO: 156682 - RNA, 19 nt, Artificial Sequence
  Description of Artificial Sequence: Synthetic oligonucleotide
  Sense strand starting at position 870 of SEQ ID NO: 2014
cucccucuccuguaggaga

SEQ ID NO: 156683 - RNA, 19 nt, Artificial Sequence
  Description of Artificial Sequence: Synthetic oligonucleotide
  Antisense strand to SEQ ID NO: 156682
ucuccuacaggagagggag

SEQ ID NO: 156684 - RNA, 19 nt, Artificial Sequence
  Description of Artificial Sequence: Synthetic oligonucleotide
  Sense strand starting at position 1507 of SEQ ID NO: 2014
cugcaaaguguuuaucaca

SEQ ID NO: 156685 - RNA, 19 nt, Artificial Sequence
  Description of Artificial Sequence: Synthetic oligonucleotide
  Antisense strand to SEQ ID NO: 156684
ugugauaaacacuuugcag

SEQ ID NO: 156686 - RNA, 19 nt, Artificial Sequence
  Description of Artificial Sequence: Synthetic oligonucleotide
  Sense strand starting at position 2031 of SEQ ID NO: 2014
cagauuagggccugggaaa

SEQ ID NO: 156687 - RNA, 19 nt, Artificial Sequence
  Description of Artificial Sequence: Synthetic oligonucleotide
  Antisense strand to SEQ ID NO: 156686
uuucccaggcccuaaucug

SEQ ID NO: 156688 - RNA, 19 nt, Artificial Sequence
  Description of Artificial Sequence: Synthetic oligonucleotide
  Sense strand starting at position 2032 of SEQ ID NO: 2014
agauuagggccugggaaau

SEQ ID NO: 156689 - RNA, 19 nt, Artificial Sequence
  Description of Artificial Sequence: Synthetic oligonucleotide
  Antisense strand to SEQ ID NO: 156688
auuucccaggcccuaaucu

SEQ ID NO: 156690 - RNA, 19 nt, Artificial Sequence
  Description of Artificial Sequence: Synthetic oligonucleotide
  Sense strand starting at position 2258 of SEQ ID NO: 2014
ggugccauucuagaagagu

SEQ ID NO: 156691 - RNA, 19 nt, Artificial Sequence
  Description of Artificial Sequence: Synthetic oligonucleotide
  Antisense strand to SEQ ID NO: 156690
acucuucuagaauggcacc

SEQ ID NO: 156692 - RNA, 19 nt, Artificial Sequence
  Description of Artificial Sequence: Synthetic oligonucleotide
  Sense strand starting at position 2261 of SEQ ID NO: 2014
gccauucuagaagaguguu

SEQ ID NO: 156693 - RNA, 19 nt, Artificial Sequence
  Description of Artificial Sequence: Synthetic oligonucleotide
  Antisense strand to SEQ ID NO: 156692
aacacucuucuagaauggc

SEQ ID NO: 156694 - RNA, 19 nt, Artificial Sequence
  Description of Artificial Sequence: Synthetic oligonucleotide
  Sense strand starting at position 2264 of SEQ ID NO: 2014
auucuagaagaguguuaca

SEQ ID NO: 156695 - RNA, 19 nt, Artificial Sequence
  Description of Artificial Sequence: Synthetic oligonucleotide
  Antisense strand to SEQ ID NO: 156694
uguaacacucuucuagaau

SEQ ID NO: 156696 - RNA, 19 nt, Artificial Sequence
  Description of Artificial Sequence: Synthetic oligonucleotide
  Sense strand starting at position 2417 of SEQ ID NO: 2014
gccaaucauagggaauugu

SEQ ID NO: 156697 - RNA, 19 nt, Artificial Sequence
  Description of Artificial Sequence: Synthetic oligonucleotide
  Antisense strand to SEQ ID NO: 156696
acaauucccuaugauuggc

SEQ ID NO: 156698 - RNA, 19 nt, Artificial Sequence
  Description of Artificial Sequence: Synthetic oligonucleotide
  Sense strand starting at position 2544 of SEQ ID NO: 2014
gucuguuuccaccacauga

SEQ ID NO: 156699 - RNA, 19 nt, Artificial Sequence
  Description of Artificial Sequence: Synthetic oligonucleotide
  Antisense strand to SEQ ID NO: 156698
ucaugugguggaaacagac

SEQ ID NO: 156700 - RNA, 19 nt, Artificial Sequence
  Description of Artificial Sequence: Synthetic oligonucleotide
  Sense strand starting at position 2566 of SEQ ID NO: 2014
ggcagauagguucaagggu

SEQ ID NO: 156701 - RNA, 19 nt, Artificial Sequence
  Description of Artificial Sequence: Synthetic oligonucleotide
  Antisense strand to SEQ ID NO: 156700
acccuugaaccuaucugcc

SEQ ID NO: 156702 - RNA, 19 nt, Artificial Sequence
  Description of Artificial Sequence: Synthetic oligonucleotide
  Sense strand starting at position 2658 of SEQ ID NO: 2014
cgggaaaugggacguagau

SEQ ID NO: 156703 - RNA, 19 nt, Artificial Sequence
  Description of Artificial Sequence: Synthetic oligonucleotide
  Antisense strand to SEQ ID NO: 156702
aucuacgucccauuucccg

SEQ ID NO: 156704 - RNA, 19 nt, Artificial Sequence
  Description of Artificial Sequence: Synthetic oligonucleotide
  Sense strand starting at position 2959 of SEQ ID NO: 2014
gacucuuagggucauuauc

SEQ ID NO: 156705 - RNA, 19 nt, Artificial Sequence
  Description of Artificial Sequence: Synthetic oligonucleotide
  Antisense strand to SEQ ID NO: 156704
gauaaugacccuaagaguc

SEQ ID NO: 156706 - RNA, 19 nt, Artificial Sequence
  Description of Artificial Sequence: Synthetic oligonucleotide
  Sense strand starting at position 2979 of SEQ ID NO: 2014
cacuuagugcuuuggagaa

SEQ ID NO: 156707 - RNA, 19 nt, Artificial Sequence
  Description of Artificial Sequence: Synthetic oligonucleotide
  Antisense strand to SEQ ID NO: 156706
uucuccaaagcacuaagug

SEQ ID NO: 156708 - RNA, 19 nt, Artificial Sequence
  Description of Artificial Sequence: Synthetic oligonucleotide
  Sense strand starting at position 3055 of SEQ ID NO: 2014
ggaauuaacccucgucuau

SEQ ID NO: 156709 - RNA, 19 nt, Artificial Sequence
  Description of Artificial Sequence: Synthetic oligonucleotide
  Antisense strand to SEQ ID NO: 156708
auagacgaggguuaauucc

SEQ ID NO: 156710 - RNA, 19 nt, Artificial Sequence
  Description of Artificial Sequence: Synthetic oligonucleotide
  Sense strand starting at position 3080 of SEQ ID NO: 2014
agagaucuguaaucucauu

SEQ ID NO: 156711 - RNA, 19 nt, Artificial Sequence
  Description of Artificial Sequence: Synthetic oligonucleotide
  Antisense strand to SEQ ID NO: 156710
aaugagauuacagaucucu

SEQ ID NO: 156712 - RNA, 19 nt, Artificial Sequence
  Description of Artificial Sequence: Synthetic oligonucleotide
  Sense strand starting at position 3085 of SEQ ID NO: 2014
ucuguaaucucauuaggag

SEQ ID NO: 156713 - RNA, 19 nt, Artificial Sequence
  Description of Artificial Sequence: Synthetic oligonucleotide
  Antisense strand to SEQ ID NO: 156712
cuccuaaugagauuacaga

SEQ ID NO: 156714 - RNA, 19 nt, Artificial Sequence
  Description of Artificial Sequence: Synthetic oligonucleotide
  Sense strand starting at position 3297 of SEQ ID NO: 2014
cagagcuccugacugagaa

SEQ ID NO: 156715 - RNA, 19 nt, Artificial Sequence
  Description of Artificial Sequence: Synthetic oligonucleotide
  Antisense strand to SEQ ID NO: 156714
uucucagucaggagcucug

SEQ ID NO: 156716 - RNA, 19 nt, Artificial Sequence
  Description of Artificial Sequence: Synthetic oligonucleotide
  Sense strand starting at position 3400 of SEQ ID NO: 2014
ccagguaccuuugucaaag

SEQ ID NO: 156717 - RNA, 19 nt, Artificial Sequence
  Description of Artificial Sequence: Synthetic oligonucleotide
  Antisense strand to SEQ ID NO: 156716
cuuugacaaagguaccugg

SEQ ID NO: 156718 - RNA, 19 nt, Artificial Sequence
  Description of Artificial Sequence: Synthetic oligonucleotide
  Sense strand starting at position 3490 of SEQ ID NO: 2014
ugaauacaagucugagagu

SEQ ID NO: 156719 - RNA, 19 nt, Artificial Sequence
  Description of Artificial Sequence: Synthetic oligonucleotide
  Antisense strand to SEQ ID NO: 156718
acucucagacuuguauuca

SEQ ID NO: 156720 - RNA, 19 nt, Artificial Sequence
  Description of Artificial Sequence: Synthetic oligonucleotide
  Sense strand starting at position 3587 of SEQ ID NO: 2014
aaauaaucaggugguuagu

SEQ ID NO: 156721 - RNA, 19 nt, Artificial Sequence
  Description of Artificial Sequence: Synthetic oligonucleotide
  Antisense strand to SEQ ID NO: 156720
acuaaccaccugauuauuu

SEQ ID NO: 156722 - RNA, 19 nt, Artificial Sequence
  Description of Artificial Sequence: Synthetic oligonucleotide
  Sense strand starting at position 3589 of SEQ ID NO: 2014
auaaucaggugguuaguua

SEQ ID NO: 156723 - RNA, 19 nt, Artificial Sequence
  Description of Artificial Sequence: Synthetic oligonucleotide
  Antisense strand to SEQ ID NO: 156722
uaacuaaccaccugauuau

SEQ ID NO: 156724 - RNA, 19 nt, Artificial Sequence
  Description of Artificial Sequence: Synthetic oligonucleotide
  Sense strand starting at position 3600 of SEQ ID NO: 2014
guuaguuacuucccagaag

SEQ ID NO: 156725 - RNA, 19 nt, Artificial Sequence
  Description of Artificial Sequence: Synthetic oligonucleotide
  Antisense strand to SEQ ID NO: 156724
cuucugggaaguaacuaac

SEQ ID NO: 156726 - RNA, 19 nt, Artificial Sequence
  Description of Artificial Sequence: Synthetic oligonucleotide
  Sense strand starting at position 3760 of SEQ ID NO: 2014
ccaugauauaggugagucu

SEQ ID NO: 156727 - RNA, 19 nt, Artificial Sequence
  Description of Artificial Sequence: Synthetic oligonucleotide
  Antisense strand to SEQ ID NO: 156726
agacucaccuauaucaugg

SEQ ID NO: 156728 - RNA, 19 nt, Artificial Sequence
  Description of Artificial Sequence: Synthetic oligonucleotide
  Sense strand starting at position 3761 of SEQ ID NO: 2014
caugauauaggugagucuu

SEQ ID NO: 156729 - RNA, 19 nt, Artificial Sequence
  Description of Artificial Sequence: Synthetic oligonucleotide
  Antisense strand to SEQ ID NO: 156728
aagacucaccuauaucaug

SEQ ID NO: 156730 - RNA, 19 nt, Artificial Sequence
  Description of Artificial Sequence: Synthetic oligonucleotide
  Sense strand starting at position 3870 of SEQ ID NO: 2015
gccacaugacuugaaguuu

SEQ ID NO: 156731 - RNA, 19 nt, Artificial Sequence
  Description of Artificial Sequence: Synthetic oligonucleotide
  Antisense strand to SEQ ID NO: 156730
aaacuucaagucauguggc

SEQ ID NO: 156732 - RNA, 19 nt, Artificial Sequence
  Description of Artificial Sequence: Synthetic oligonucleotide
  Sense strand starting at position 3530 of SEQ ID NO: 2015
agguguguauaacuagaua

SEQ ID NO: 156733 - RNA, 19 nt, Artificial Sequence
  Description of Artificial Sequence: Synthetic oligonucleotide
  Antisense strand to SEQ ID NO: 156732
uaucuaguuauacacaccu

SEQ ID NO: 156734 - RNA, 19 nt, Artificial Sequence
  Description of Artificial Sequence: Synthetic oligonucleotide
  Sense strand starting at position 3525 of SEQ ID NO: 2015
uaaauagguguguauaacu

SEQ ID NO: 156735 - RNA, 19 nt, Artificial Sequence
  Description of Artificial Sequence: Synthetic oligonucleotide
  Antisense strand to SEQ ID NO: 156734
aguuauacacaccuauuua

SEQ ID NO: 156736 - RNA, 19 nt, Artificial Sequence
  Description of Artificial Sequence: Synthetic oligonucleotide
  Sense strand starting at position 3523 of SEQ ID NO: 2015
gauaaauagguguguauaa

SEQ ID NO: 156737 - RNA, 19 nt, Artificial Sequence
  Description of Artificial Sequence: Synthetic oligonucleotide
  Antisense strand to SEQ ID NO: 156736
uuauacacaccuauuuauc

SEQ ID NO: 156738 - RNA, 19 nt, Artificial Sequence
  Description of Artificial Sequence: Synthetic oligonucleotide
  Sense strand starting at position 3520 of SEQ ID NO: 2015
aaagauaaauaggugugua

SEQ ID NO: 156739 - RNA, 19 nt, Artificial Sequence
  Description of Artificial Sequence: Synthetic oligonucleotide
  Antisense strand to SEQ ID NO: 156738
uacacaccuauuuaucuuu

SEQ ID NO: 156740 - RNA, 19 nt, Artificial Sequence
  Description of Artificial Sequence: Synthetic oligonucleotide
  Sense strand starting at position 3485 of SEQ ID NO: 2015
ggagccucuuuauuacaga

SEQ ID NO: 156741 - RNA, 19 nt, Artificial Sequence
  Description of Artificial Sequence: Synthetic oligonucleotide
  Antisense strand to SEQ ID NO: 156740
ucuguaauaaagaggcucc

SEQ ID NO: 156742 - RNA, 19 nt, Artificial Sequence
  Description of Artificial Sequence: Synthetic oligonucleotide
  Sense strand starting at position 3342 of SEQ ID NO: 2015
gcgaacuaggccuauaauu

SEQ ID NO: 156743 - RNA, 19 nt, Artificial Sequence
  Description of Artificial Sequence: Synthetic oligonucleotide
  Antisense strand to SEQ ID NO: 156742
aauuauaggccuaguucgc

SEQ ID NO: 156744 - RNA, 19 nt, Artificial Sequence
  Description of Artificial Sequence: Synthetic oligonucleotide
  Sense strand starting at position 3328 of SEQ ID NO: 2015
uacaucugugacuagcgaa

SEQ ID NO: 156745 - RNA, 19 nt, Artificial Sequence
  Description of Artificial Sequence: Synthetic oligonucleotide
  Antisense strand to SEQ ID NO: 156744
uucgcuagucacagaugua

SEQ ID NO: 156746 - RNA, 19 nt, Artificial Sequence
  Description of Artificial Sequence: Synthetic oligonucleotide
  Sense strand starting at position 3324 of SEQ ID NO: 2015
acuuuacaucugugacuag

SEQ ID NO: 156747 - RNA, 19 nt, Artificial Sequence
  Description of Artificial Sequence: Synthetic oligonucleotide
  Antisense strand to SEQ ID NO: 156746
cuagucacagauguaaagu

SEQ ID NO: 156748 - RNA, 19 nt, Artificial Sequence
  Description of Artificial Sequence: Synthetic oligonucleotide
  Sense strand starting at position 3260 of SEQ ID NO: 2015
uuaauacuugcucacgaua

SEQ ID NO: 156749 - RNA, 19 nt, Artificial Sequence
  Description of Artificial Sequence: Synthetic oligonucleotide
  Antisense strand to SEQ ID NO: 156748
uaucgugagcaaguauuaa

SEQ ID NO: 156750 - RNA, 19 nt, Artificial Sequence
  Description of Artificial Sequence: Synthetic oligonucleotide
  Sense strand starting at position 3196 of SEQ ID NO: 2015
cugauaaucggguacauua

SEQ ID NO: 156751 - RNA, 19 nt, Artificial Sequence
  Description of Artificial Sequence: Synthetic oligonucleotide
  Antisense strand to SEQ ID NO: 156750
uaauguacccgauuaucag

SEQ ID NO: 156752 - RNA, 19 nt, Artificial Sequence
  Description of Artificial Sequence: Synthetic oligonucleotide
  Sense strand starting at position 2982 of SEQ ID NO: 2015
uuaucaguggguuggaaac

SEQ ID NO: 156753 - RNA, 19 nt, Artificial Sequence
  Description of Artificial Sequence: Synthetic oligonucleotide
  Antisense strand to SEQ ID NO: 156752
guuuccaacccacugauaa

SEQ ID NO: 156754 - RNA, 19 nt, Artificial Sequence
  Description of Artificial Sequence: Synthetic oligonucleotide
  Sense strand starting at position 2961 of SEQ ID NO: 2015
gaaugcucacuguaauuga

SEQ ID NO: 156755 - RNA, 19 nt, Artificial Sequence
  Description of Artificial Sequence: Synthetic oligonucleotide
  Antisense strand to SEQ ID NO: 156754
ucaauuacagugagcauuc

SEQ ID NO: 156756 - RNA, 19 nt, Artificial Sequence
  Description of Artificial Sequence: Synthetic oligonucleotide
  Sense strand starting at position 2802 of SEQ ID NO: 2015
cuaguuuaacauugaauag

SEQ ID NO: 156757 - RNA, 19 nt, Artificial Sequence
  Description of Artificial Sequence: Synthetic oligonucleotide
  Antisense strand to SEQ ID NO: 156756
cuauucaauguuaaacuag

SEQ ID NO: 156758 - RNA, 19 nt, Artificial Sequence
  Description of Artificial Sequence: Synthetic oligonucleotide
  Sense strand starting at position 2635 of SEQ ID NO: 2015
guuugucagguggaaauua

SEQ ID NO: 156759 - RNA, 19 nt, Artificial Sequence
  Description of Artificial Sequence: Synthetic oligonucleotide
  Antisense strand to SEQ ID NO: 156758
uaauuuccaccugacaaac

SEQ ID NO: 156760 - RNA, 19 nt, Artificial Sequence
  Description of Artificial Sequence: Synthetic oligonucleotide
  Sense strand starting at position 2530 of SEQ ID NO: 2015
gucggauacauuugcuuau

SEQ ID NO: 156761 - RNA, 19 nt, Artificial Sequence
  Description of Artificial Sequence: Synthetic oligonucleotide
  Antisense strand to SEQ ID NO: 156760
auaagcaaauguauccgac

SEQ ID NO: 156762 - RNA, 19 nt, Artificial Sequence
  Description of Artificial Sequence: Synthetic oligonucleotide
  Sense strand starting at position 2367 of SEQ ID NO: 2015
ucagcaaugccugucguuu

SEQ ID NO: 156763 - RNA, 19 nt, Artificial Sequence
  Description of Artificial Sequence: Synthetic oligonucleotide
  Antisense strand to SEQ ID NO: 156762
aaacgacaggcauugcuga

SEQ ID NO: 156764 - RNA, 19 nt, Artificial Sequence
  Description of Artificial Sequence: Synthetic oligonucleotide
  Sense strand starting at position 2237 of SEQ ID NO: 2015
gcgccuuaaagugaggaaa

SEQ ID NO: 156765 - RNA, 19 nt, Artificial Sequence
  Description of Artificial Sequence: Synthetic oligonucleotide
  Antisense strand to SEQ ID NO: 156764
uuuccucacuuuaaggcgc

SEQ ID NO: 156766 - RNA, 19 nt, Artificial Sequence
  Description of Artificial Sequence: Synthetic oligonucleotide
  Sense strand starting at position 2230 of SEQ ID NO: 2015
gcugucugcgccuuaaagu

SEQ ID NO: 156767 - RNA, 19 nt, Artificial Sequence
  Description of Artificial Sequence: Synthetic oligonucleotide
  Antisense strand to SEQ ID NO: 156766
acuuuaaggcgcagacagc

SEQ ID NO: 156768 - RNA, 19 nt, Artificial Sequence
  Description of Artificial Sequence: Synthetic oligonucleotide
  Sense strand starting at position 1375 of SEQ ID NO: 2015
ccuagauuccaaggugaca

SEQ ID NO: 156769 - RNA, 19 nt, Artificial Sequence
  Description of Artificial Sequence: Synthetic oligonucleotide
  Antisense strand to SEQ ID NO: 156768
ugucaccuuggaaucuagg

SEQ ID NO: 156770 - RNA, 19 nt, Artificial Sequence
  Description of Artificial Sequence: Synthetic oligonucleotide
  Sense strand starting at position 1367 of SEQ ID NO: 2015
gacuguguccuagauucca

SEQ ID NO: 156771 - RNA, 19 nt, Artificial Sequence
  Description of Artificial Sequence: Synthetic oligonucleotide
  Antisense strand to SEQ ID NO: 156770
uggaaucuaggacacaguc

SEQ ID NO: 156772 - RNA, 19 nt, Artificial Sequence
  Description of Artificial Sequence: Synthetic oligonucleotide
  Sense strand starting at position 1363 of SEQ ID NO: 2015
ucaagacuguguccuagau

SEQ ID NO: 156773 - RNA, 19 nt, Artificial Sequence
  Description of Artificial Sequence: Synthetic oligonucleotide
  Antisense strand to SEQ ID NO: 156772
aucuaggacacagucuuga

SEQ ID NO: 156774 - RNA, 19 nt, Artificial Sequence
  Description of Artificial Sequence: Synthetic oligonucleotide
  Sense strand starting at position 1054 of SEQ ID NO: 2015
ugaccuuucgcauauggaa

SEQ ID NO: 156775 - RNA, 19 nt, Artificial Sequence
  Description of Artificial Sequence: Synthetic oligonucleotide
  Antisense strand to SEQ ID NO: 156774
uuccauaugcgaaagguca

SEQ ID NO: 156776 - RNA, 19 nt, Artificial Sequence
  Description of Artificial Sequence: Synthetic oligonucleotide
  Sense strand starting at position 969 of SEQ ID NO: 2015
ggcauauugagagaagcga

SEQ ID NO: 156777 - RNA, 19 nt, Artificial Sequence
  Description of Artificial Sequence: Synthetic oligonucleotide
  Antisense strand to SEQ ID NO: 156776
ucgcuucucucaauaugcc

SEQ ID NO: 156778 - RNA, 19 nt, Artificial Sequence
  Description of Artificial Sequence: Synthetic oligonucleotide
  Sense strand starting at position 883 of SEQ ID NO: 2015
cguauuaaaccugaugacu

SEQ ID NO: 156779 - RNA, 19 nt, Artificial Sequence
  Description of Artificial Sequence: Synthetic oligonucleotide
  Antisense strand to SEQ ID NO: 156778
agucaucagguuuaauacg

SEQ ID NO: 156780 - RNA, 19 nt, Artificial Sequence
  Description of Artificial Sequence: Synthetic oligonucleotide
  Sense strand starting at position 736 of SEQ ID NO: 2015
guacuuccugcagaauaac

SEQ ID NO: 156781 - RNA, 19 nt, Artificial Sequence
  Description of Artificial Sequence: Synthetic oligonucleotide
  Antisense strand to SEQ ID NO: 156780
guuauucugcaggaaguac

SEQ ID NO: 156782 - RNA, 19 nt, Artificial Sequence
  Description of Artificial Sequence: Synthetic oligonucleotide
  Sense strand starting at position 734 of SEQ ID NO: 2015
cuguacuuccugcagaaua

SEQ ID NO: 156783 - RNA, 19 nt, Artificial Sequence
  Description of Artificial Sequence: Synthetic oligonucleotide
  Antisense strand to SEQ ID NO: 156782
uauucugcaggaaguacag

SEQ ID NO: 156784 - RNA, 19 nt, Artificial Sequence
  Description of Artificial Sequence: Synthetic oligonucleotide
  Sense strand starting at position 715 of SEQ ID NO: 2015
ggcuauauccaugaccacu

SEQ ID NO: 156785 - RNA, 19 nt, Artificial Sequence
  Description of Artificial Sequence: Synthetic oligonucleotide
  Antisense strand to SEQ ID NO: 156784
aguggucauggauauagcc

SEQ ID NO: 156786 - RNA, 19 nt, Artificial Sequence
  Description of Artificial Sequence: Synthetic oligonucleotide
  Sense strand starting at position 714 of SEQ ID NO: 2015
uggcuauauccaugaccac

SEQ ID NO: 156787 - RNA, 19 nt, Artificial Sequence
  Description of Artificial Sequence: Synthetic oligonucleotide
  Antisense strand to SEQ ID NO: 156786
guggucauggauauagcca

SEQ ID NO: 156788 - RNA, 19 nt, Artificial Sequence
  Description of Artificial Sequence: Synthetic oligonucleotide
  Sense strand starting at position 445 of SEQ ID NO: 2015
uaucauuuagcuugaacgu

SEQ ID NO: 156789 - RNA, 19 nt, Artificial Sequence
  Description of Artificial Sequence: Synthetic oligonucleotide
  Antisense strand to SEQ ID NO: 156788
acguucaagcuaaaugaua

SEQ ID NO: 156790 - RNA, 19 nt, Artificial Sequence
  Description of Artificial Sequence: Synthetic oligonucleotide
  Sense strand starting at position 420 of SEQ ID NO: 2015
cuucuuucucgguauuaaa

SEQ ID NO: 156791 - RNA, 19 nt, Artificial Sequence
  Description of Artificial Sequence: Synthetic oligonucleotide
  Antisense strand to SEQ ID NO: 156790
uuuaauaccgagaaagaag

SEQ ID NO: 156792 - RNA, 19 nt, Artificial Sequence
  Description of Artificial Sequence: Synthetic oligonucleotide
  Sense strand starting at position 325 of SEQ ID NO: 2015
ggauguauguuccuggaau

SEQ ID NO: 156793 - RNA, 19 nt, Artificial Sequence
  Description of Artificial Sequence: Synthetic oligonucleotide
  Antisense strand to SEQ ID NO: 156792
auuccaggaacauacaucc

SEQ ID NO: 156794 - RNA, 19 nt, Artificial Sequence
  Description of Artificial Sequence: Synthetic oligonucleotide
  Sense strand starting at position 323 of SEQ ID NO: 2015
aaggauguauguuccugga

SEQ ID NO: 156795 - RNA, 19 nt, Artificial Sequence
  Description of Artificial Sequence: Synthetic oligonucleotide
  Antisense strand to SEQ ID NO: 156794
uccaggaacauacauccuu

SEQ ID NO: 156796 - RNA, 19 nt, Artificial Sequence
  Description of Artificial Sequence: Synthetic oligonucleotide
  Sense strand starting at position 302 of SEQ ID NO: 2015
gggagcugggauuguucaa

SEQ ID NO: 156797 - RNA, 19 nt, Artificial Sequence
  Description of Artificial Sequence: Synthetic oligonucleotide
  Antisense strand to SEQ ID NO: 156796
uugaacaaucccagcuccc

SEQ ID NO: 156798 - RNA, 19 nt, Artificial Sequence
  Description of Artificial Sequence: Synthetic oligonucleotide
  Sense strand starting at position 241 of SEQ ID NO: 2015
auacuuggcuaggcaaaua

SEQ ID NO: 156799 - RNA, 19 nt, Artificial Sequence
  Description of Artificial Sequence: Synthetic oligonucleotide
  Antisense strand to SEQ ID NO: 156798
uauuugccuagccaaguau

SEQ ID NO: 156800 - RNA, 19 nt, Artificial Sequence
  Description of Artificial Sequence: Synthetic oligonucleotide
  Sense strand starting at position 240 of SEQ ID NO: 2015
gauacuuggcuaggcaaau

SEQ ID NO: 156801 - RNA, 19 nt, Artificial Sequence
  Description of Artificial Sequence: Synthetic oligonucleotide
  Antisense strand to SEQ ID NO: 156800
auuugccuagccaaguauc

SEQ ID NO: 156802 - RNA, 19 nt, Artificial Sequence
  Description of Artificial Sequence: Synthetic oligonucleotide
  Sense strand starting at position 238 of SEQ ID NO: 2015
uggauacuuggcuaggcaa

SEQ ID NO: 156803 - RNA, 19 nt, Artificial Sequence
  Description of Artificial Sequence: Synthetic oligonucleotide
  Antisense strand to SEQ ID NO: 156802
uugccuagccaaguaucca

SEQ ID NO: 156804 - RNA, 19 nt, Artificial Sequence
  Description of Artificial Sequence: Synthetic oligonucleotide
  Sense strand starting at position 170 of SEQ ID NO: 2015
guccuaaaccgagaacacu

SEQ ID NO: 156805 - RNA, 19 nt, Artificial Sequence
  Description of Artificial Sequence: Synthetic oligonucleotide
  Antisense strand to SEQ ID NO: 156804
aguguucucgguuuaggac

SEQ ID NO: 156806 - RNA, 19 nt, Artificial Sequence
  Description of Artificial Sequence: Synthetic oligonucleotide
  Sense strand starting at position 60 of SEQ ID NO: 2015
ucauccaagguuuagugaa

SEQ ID NO: 156807 - RNA, 19 nt, Artificial Sequence
  Description of Artificial Sequence: Synthetic oligonucleotide
  Antisense strand to SEQ ID NO: 156806
uucacuaaaccuuggauga

SEQ ID NO: 156808 - RNA, 19 nt, Artificial Sequence
  Description of Artificial Sequence: Synthetic oligonucleotide
  Sense strand starting at position 41 of SEQ ID NO: 2015
cgcaaauacugaccauaaa

SEQ ID NO: 156809 - RNA, 19 nt, Artificial Sequence
  Description of Artificial Sequence: Synthetic oligonucleotide
  Antisense strand to SEQ ID NO: 156808
uuuauggucaguauuugcg

SEQ ID NO: 156810 - RNA, 19 nt, Artificial Sequence
  Description of Artificial Sequence: Synthetic oligonucleotide
  Sense strand starting at position 2 of SEQ ID NO: 2016
agguuuccgaaaggcaaua

SEQ ID NO: 156811 - RNA, 19 nt, Artificial Sequence
  Description of Artificial Sequence: Synthetic oligonucleotide
  Antisense strand to SEQ ID NO: 156810
uauugccuuucggaaaccu

SEQ ID NO: 156812 - RNA, 19 nt, Artificial Sequence
  Description of Artificial Sequence: Synthetic oligonucleotide
  Sense strand starting at position 233 of SEQ ID NO: 2016
auaugaugcaguuacguaa

SEQ ID NO: 156813 - RNA, 19 nt, Artificial Sequence
  Description of Artificial Sequence: Synthetic oligonucleotide
  Antisense strand to SEQ ID NO: 156812
uuacguaacugcaucauau

SEQ ID NO: 156814 - RNA, 19 nt, Artificial Sequence
  Description of Artificial Sequence: Synthetic oligonucleotide
  Sense strand starting at position 352 of SEQ ID NO: 2016
ggaccauggaguuguacca

SEQ ID NO: 156815 - RNA, 19 nt, Artificial Sequence
  Description of Artificial Sequence: Synthetic oligonucleotide
  Antisense strand to SEQ ID NO: 156814
ugguacaacuccauggucc

SEQ ID NO: 156816 - RNA, 19 nt, Artificial Sequence
  Description of Artificial Sequence: Synthetic oligonucleotide
  Sense strand starting at position 527 of SEQ ID NO: 2016
ggccauuucugggacaauc

SEQ ID NO: 156817 - RNA, 19 nt, Artificial Sequence
  Description of Artificial Sequence: Synthetic oligonucleotide
  Antisense strand to SEQ ID NO: 156816
gauugucccagaaauggcc

SEQ ID NO: 156818 - RNA, 19 nt, Artificial Sequence
  Description of Artificial Sequence: Synthetic oligonucleotide
  Sense strand starting at position 623 of SEQ ID NO: 2016
aaggauagauaugaggaau

SEQ ID NO: 156819 - RNA, 19 nt, Artificial Sequence
  Description of Artificial Sequence: Synthetic oligonucleotide
  Antisense strand to SEQ ID NO: 156818
auuccucauaucuauccuu

SEQ ID NO: 156820 - RNA, 19 nt, Artificial Sequence
  Description of Artificial Sequence: Synthetic oligonucleotide
  Sense strand starting at position 685 of SEQ ID NO: 2016
aaucaucggugaguauuau

SEQ ID NO: 156821 - RNA, 19 nt, Artificial Sequence
  Description of Artificial Sequence: Synthetic oligonucleotide
  Antisense strand to SEQ ID NO: 156820
auaauacucaccgaugauu

SEQ ID NO: 156822 - RNA, 19 nt, Artificial Sequence
  Description of Artificial Sequence: Synthetic oligonucleotide
  Sense strand starting at position 1049 of SEQ ID NO: 2016
ggcauuaaccuaggaaugu

SEQ ID NO: 156823 - RNA, 19 nt, Artificial Sequence
  Description of Artificial Sequence: Synthetic oligonucleotide
  Antisense strand to SEQ ID NO: 156822
acauuccuagguuaaugcc

SEQ ID NO: 156824 - RNA, 19 nt, Artificial Sequence
  Description of Artificial Sequence: Synthetic oligonucleotide
  Sense strand starting at position 1053 of SEQ ID NO: 2016
uuaaccuaggaaugucuua

SEQ ID NO: 156825 - RNA, 19 nt, Artificial Sequence
  Description of Artificial Sequence: Synthetic oligonucleotide
  Antisense strand to SEQ ID NO: 156824
uaagacauuccuagguuaa

SEQ ID NO: 156826 - RNA, 19 nt, Artificial Sequence
  Description of Artificial Sequence: Synthetic oligonucleotide
  Sense strand starting at position 1065 of SEQ ID NO: 2016
ugucuuaaacaauggaaug

SEQ ID NO: 156827 - RNA, 19 nt, Artificial Sequence
  Description of Artificial Sequence: Synthetic oligonucleotide
  Antisense strand to SEQ ID NO: 156826
cauuccauuguuuaagaca

SEQ ID NO: 156828 - RNA, 19 nt, Artificial Sequence
  Description of Artificial Sequence: Synthetic oligonucleotide
  Sense strand starting at position 1184 of SEQ ID NO: 2016
uucgaaagagaucgaaugu

SEQ ID NO: 156829 - RNA, 19 nt, Artificial Sequence
  Description of Artificial Sequence: Synthetic oligonucleotide
  Antisense strand to SEQ ID NO: 156828
acauucgaucucuuucgaa

SEQ ID NO: 156830 - RNA, 19 nt, Artificial Sequence
  Description of Artificial Sequence: Synthetic oligonucleotide
  Sense strand starting at position 1197 of SEQ ID NO: 2016
gaaugugugcgccuuuaua

SEQ ID NO: 156831 - RNA, 19 nt, Artificial Sequence
  Description of Artificial Sequence: Synthetic oligonucleotide
  Antisense strand to SEQ ID NO: 156830
uauaaaggcgcacacauuc

SEQ ID NO: 156832 - RNA, 19 nt, Artificial Sequence
  Description of Artificial Sequence: Synthetic oligonucleotide
  Sense strand starting at position 1199 of SEQ ID NO: 2016
augugugcgccuuuauaca

SEQ ID NO: 156833 - RNA, 19 nt, Artificial Sequence
  Description of Artificial Sequence: Synthetic oligonucleotide
  Antisense strand to SEQ ID NO: 156832
uguauaaaggcgcacacau

SEQ ID NO: 156834 - RNA, 19 nt, Artificial Sequence
  Description of Artificial Sequence: Synthetic oligonucleotide
  Sense strand starting at position 1255 of SEQ ID NO: 2016
auuacaugucugcaaggua

SEQ ID NO: 156835 - RNA, 19 nt, Artificial Sequence
  Description of Artificial Sequence: Synthetic oligonucleotide
  Antisense strand to SEQ ID NO: 156834
uaccuugcagacauguaau

SEQ ID NO: 156836 - RNA, 19 nt, Artificial Sequence
  Description of Artificial Sequence: Synthetic oligonucleotide
  Sense strand starting at position 1287 of SEQ ID NO: 2016
caaagaaccugggauggau

SEQ ID NO: 156837 - RNA, 19 nt, Artificial Sequence
  Description of Artificial Sequence: Synthetic oligonucleotide
  Antisense strand to SEQ ID NO: 156836
auccaucccagguucuuug

SEQ ID NO: 156838 - RNA, 19 nt, Artificial Sequence
  Description of Artificial Sequence: Synthetic oligonucleotide
  Sense strand starting at position 1807 of SEQ ID NO: 2016
cgaggaagucacgggagau

SEQ ID NO: 156839 - RNA, 19 nt, Artificial Sequence
  Description of Artificial Sequence: Synthetic oligonucleotide
  Antisense strand to SEQ ID NO: 156838
aucucccgugacuuccucg

SEQ ID NO: 156840 - RNA, 19 nt, Artificial Sequence
  Description of Artificial Sequence: Synthetic oligonucleotide
  Sense strand starting at position 1808 of SEQ ID NO: 2016
gaggaagucacgggagauc

SEQ ID NO: 156841 - RNA, 19 nt, Artificial Sequence
  Description of Artificial Sequence: Synthetic oligonucleotide
  Antisense strand to SEQ ID NO: 156840
gaucucccgugacuuccuc

SEQ ID NO: 156842 - RNA, 19 nt, Artificial Sequence
  Description of Artificial Sequence: Synthetic oligonucleotide
  Sense strand starting at position 2443 of SEQ ID NO: 2016
aggagaaacuccuggauuu

SEQ ID NO: 156843 - RNA, 19 nt, Artificial Sequence
  Description of Artificial Sequence: Synthetic oligonucleotide
  Antisense strand to SEQ ID NO: 156842
aaauccaggaguuucuccu

SEQ ID NO: 156844 - RNA, 19 nt, Artificial Sequence
  Description of Artificial Sequence: Synthetic oligonucleotide
  Sense strand starting at position 2534 of SEQ ID NO: 2016
cuaggauuugcccgugauu

SEQ ID NO: 156845 - RNA, 19 nt, Artificial Sequence
  Description of Artificial Sequence: Synthetic oligonucleotide
  Antisense strand to SEQ ID NO: 156844
aaucacgggcaaauccuag

SEQ ID NO: 156846 - RNA, 19 nt, Artificial Sequence
  Description of Artificial Sequence: Synthetic oligonucleotide
  Sense strand starting at position 2546 of SEQ ID NO: 2016
cgugauuaagcguauagag

SEQ ID NO: 156847 - RNA, 19 nt, Artificial Sequence
  Description of Artificial Sequence: Synthetic oligonucleotide
  Antisense strand to SEQ ID NO: 156846
cucuauacgcuuaaucacg

SEQ ID NO: 156848 - RNA, 19 nt, Artificial Sequence
  Description of Artificial Sequence: Synthetic oligonucleotide
  Sense strand starting at position 2634 of SEQ ID NO: 2016
agguuuggagcuuauuacu

SEQ ID NO: 156849 - RNA, 19 nt, Artificial Sequence
  Description of Artificial Sequence: Synthetic oligonucleotide
  Antisense strand to SEQ ID NO: 156848
aguaauaagcuccaaaccu

SEQ ID NO: 156850 - RNA, 19 nt, Artificial Sequence
  Description of Artificial Sequence: Synthetic oligonucleotide
  Sense strand starting at position 2640 of SEQ ID NO: 2016
ggagcuuauuacucaggca

SEQ ID NO: 156851 - RNA, 19 nt, Artificial Sequence
  Description of Artificial Sequence: Synthetic oligonucleotide
  Antisense strand to SEQ ID NO: 156850
ugccugaguaauaagcucc

SEQ ID NO: 156852 - RNA, 19 nt, Artificial Sequence
  Description of Artificial Sequence: Synthetic oligonucleotide
  Sense strand starting at position 2694 of SEQ ID NO: 2016
gaaggaacauuggacuuaa

SEQ ID NO: 156853 - RNA, 19 nt, Artificial Sequence
  Description of Artificial Sequence: Synthetic oligonucleotide
  Antisense strand to SEQ ID NO: 156852
uuaaguccaauguuccuuc

SEQ ID NO: 156854 - RNA, 19 nt, Artificial Sequence
  Description of Artificial Sequence: Synthetic oligonucleotide
  Sense strand starting at position 2757 of SEQ ID NO: 2016
guagucucucaucaguaaa

SEQ ID NO: 156855 - RNA, 19 nt, Artificial Sequence
  Description of Artificial Sequence: Synthetic oligonucleotide
  Antisense strand to SEQ ID NO: 156854
uuuacugaugagagacuac

SEQ ID NO: 156856 - RNA, 19 nt, Artificial Sequence
  Description of Artificial Sequence: Synthetic oligonucleotide
  Sense strand starting at position 2809 of SEQ ID NO: 2016
uuguauauuaggugugaaa

SEQ ID NO: 156857 - RNA, 19 nt, Artificial Sequence
  Description of Artificial Sequence: Synthetic oligonucleotide
  Antisense strand to SEQ ID NO: 156856
uuucacaccuaauauacaa

SEQ ID NO: 156858 - RNA, 19 nt, Artificial Sequence
  Description of Artificial Sequence: Synthetic oligonucleotide
  Sense strand starting at position 2811 of SEQ ID NO: 2016
guauauuaggugugaaagg

SEQ ID NO: 156859 - RNA, 19 nt, Artificial Sequence
  Description of Artificial Sequence: Synthetic oligonucleotide
  Antisense strand to SEQ ID NO: 156858
ccuuucacaccuaauauac

SEQ ID NO: 156860 - RNA, 19 nt, Artificial Sequence
  Description of Artificial Sequence: Synthetic oligonucleotide
  Sense strand starting at position 2816 of SEQ ID NO: 2016
uuaggugugaaaggucuua

SEQ ID NO: 156861 - RNA, 19 nt, Artificial Sequence
  Description of Artificial Sequence: Synthetic oligonucleotide
  Antisense strand to SEQ ID NO: 156860
uaagaccuuucacaccuaa

SEQ ID NO: 156862 - RNA, 19 nt, Artificial Sequence
  Description of Artificial Sequence: Synthetic oligonucleotide
  Sense strand starting at position 2904 of SEQ ID NO: 2016
gaggaacuauuguuguacu

SEQ ID NO: 156863 - RNA, 19 nt, Artificial Sequence
  Description of Artificial Sequence: Synthetic oligonucleotide
  Antisense strand to SEQ ID NO: 156862
aguacaacaauaguuccuc

SEQ ID NO: 156864 - RNA, 19 nt, Artificial Sequence
  Description of Artificial Sequence: Synthetic oligonucleotide
  Sense strand starting at position 2937 of SEQ ID NO: 2016
agaagauaccucuguacuu

SEQ ID NO: 156865 - RNA, 19 nt, Artificial Sequence
  Description of Artificial Sequence: Synthetic oligonucleotide
  Antisense strand to SEQ ID NO: 156864
aaguacagagguaucuucu

SEQ ID NO: 156866 - RNA, 19 nt, Artificial Sequence
  Description of Artificial Sequence: Synthetic oligonucleotide
  Sense strand starting at position 2938 of SEQ ID NO: 2016
gaagauaccucuguacuug

SEQ ID NO: 156867 - RNA, 19 nt, Artificial Sequence
  Description of Artificial Sequence: Synthetic oligonucleotide
  Antisense strand to SEQ ID NO: 156866
caaguacagagguaucuuc

SEQ ID NO: 156868 - RNA, 19 nt, Artificial Sequence
  Description of Artificial Sequence: Synthetic oligonucleotide
  Sense strand starting at position 2942 of SEQ ID NO: 2016
auaccucuguacuuguaaa

SEQ ID NO: 156869 - RNA, 19 nt, Artificial Sequence
  Description of Artificial Sequence: Synthetic oligonucleotide
  Antisense strand to SEQ ID NO: 156868
uuuacaaguacagagguau

SEQ ID NO: 156870 - RNA, 19 nt, Artificial Sequence
  Description of Artificial Sequence: Synthetic oligonucleotide
  Sense strand starting at position 2955 of SEQ ID NO: 2016
uguaaauuagggugucuca

SEQ ID NO: 156871 - RNA, 19 nt, Artificial Sequence
  Description of Artificial Sequence: Synthetic oligonucleotide
  Antisense strand to SEQ ID NO: 156870
ugagacacccuaauuuaca

SEQ ID NO: 156872 - RNA, 19 nt, Artificial Sequence
  Description of Artificial Sequence: Synthetic oligonucleotide
  Sense strand starting at position 2958 of SEQ ID NO: 2016
aaauuagggugucucacau

SEQ ID NO: 156873 - RNA, 19 nt, Artificial Sequence
  Description of Artificial Sequence: Synthetic oligonucleotide
  Antisense strand to SEQ ID NO: 156872
augugagacacccuaauuu

SEQ ID NO: 156874 - RNA, 19 nt, Artificial Sequence
  Description of Artificial Sequence: Synthetic oligonucleotide
  Sense strand starting at position 3250 of SEQ ID NO: 2016
ucugaauacucuguacuug

SEQ ID NO: 156875 - RNA, 19 nt, Artificial Sequence
  Description of Artificial Sequence: Synthetic oligonucleotide
  Antisense strand to SEQ ID NO: 156874
caaguacagaguauucaga

SEQ ID NO: 156876 - RNA, 19 nt, Artificial Sequence
  Description of Artificial Sequence: Synthetic oligonucleotide
  Sense strand starting at position 3251 of SEQ ID NO: 2016
cugaauacucuguacuuga

SEQ ID NO: 156877 - RNA, 19 nt, Artificial Sequence
  Description of Artificial Sequence: Synthetic oligonucleotide
  Antisense strand to SEQ ID NO: 156876
ucaaguacagaguauucag

SEQ ID NO: 156878 - RNA, 19 nt, Artificial Sequence
  Description of Artificial Sequence: Synthetic oligonucleotide
  Sense strand starting at position 3269 of SEQ ID NO: 2016
aagagagguugcuugaacu

SEQ ID NO: 156879 - RNA, 19 nt, Artificial Sequence
  Description of Artificial Sequence: Synthetic oligonucleotide
  Antisense strand to SEQ ID NO: 156878
aguucaagcaaccucucuu

SEQ ID NO: 156880 - RNA, 19 nt, Artificial Sequence
  Description of Artificial Sequence: Synthetic oligonucleotide
  Sense strand starting at position 3275 of SEQ ID NO: 2016
gguugcuugaacuagucau

SEQ ID NO: 156881 - RNA, 19 nt, Artificial Sequence
  Description of Artificial Sequence: Synthetic oligonucleotide
  Antisense strand to SEQ ID NO: 156880
augacuaguucaagcaacc

SEQ ID NO: 156882 - RNA, 19 nt, Artificial Sequence
  Description of Artificial Sequence: Synthetic oligonucleotide
  Sense strand starting at position 3618 of SEQ ID NO: 2016
auguucuuuaacgggugaa

SEQ ID NO: 156883 - RNA, 19 nt, Artificial Sequence
  Description of Artificial Sequence: Synthetic oligonucleotide
  Antisense strand to SEQ ID NO: 156882
uucacccguuaaagaacau

SEQ ID NO: 156884 - RNA, 19 nt, Artificial Sequence
  Description of Artificial Sequence: Synthetic oligonucleotide
  Sense strand starting at position 3667 of SEQ ID NO: 2016
gugagauaguaauuagcaa

SEQ ID NO: 156885 - RNA, 19 nt, Artificial Sequence
  Description of Artificial Sequence: Synthetic oligonucleotide
  Antisense strand to SEQ ID NO: 156884
uugcuaauuacuaucucac

SEQ ID NO: 156886 - RNA, 19 nt, Artificial Sequence
  Description of Artificial Sequence: Synthetic oligonucleotide
  Sense strand starting at position 3905 of SEQ ID NO: 2016
acacuaacauggguuaauu

SEQ ID NO: 156887 - RNA, 19 nt, Artificial Sequence
  Description of Artificial Sequence: Synthetic oligonucleotide
  Antisense strand to SEQ ID NO: 156886
aauuaacccauguuagugu

SEQ ID NO: 156888 - RNA, 19 nt, Artificial Sequence
  Description of Artificial Sequence: Synthetic oligonucleotide
  Sense strand starting at position 3945 of SEQ ID NO: 2016
cugacuuaagcaugaguaa

SEQ ID NO: 156889 - RNA, 19 nt, Artificial Sequence
  Description of Artificial Sequence: Synthetic oligonucleotide
  Antisense strand to SEQ ID NO: 156888
uuacucaugcuuaagucag

SEQ ID NO: 156890 - RNA, 19 nt, Artificial Sequence
  Description of Artificial Sequence: Synthetic oligonucleotide
  Sense strand starting at position 31 of SEQ ID NO: 2017
gaaacagaauguucugugu

SEQ ID NO: 156891 - RNA, 19 nt, Artificial Sequence
  Description of Artificial Sequence: Synthetic oligonucleotide
  Antisense strand to SEQ ID NO: 156890
acacagaacauucuguuuc

SEQ ID NO: 156892 - RNA, 19 nt, Artificial Sequence
  Description of Artificial Sequence: Synthetic oligonucleotide
  Sense strand starting at position 149 of SEQ ID NO: 2017
gcaagacagcucuacaaac

SEQ ID NO: 156893 - RNA, 19 nt, Artificial Sequence
  Description of Artificial Sequence: Synthetic oligonucleotide
  Antisense strand to SEQ ID NO: 156892
guuuguagagcugucuugc

SEQ ID NO: 156894 - RNA, 19 nt, Artificial Sequence
  Description of Artificial Sequence: Synthetic oligonucleotide
  Sense strand starting at position 201 of SEQ ID NO: 2017
aagauucgacuugauagcu

SEQ ID NO: 156895 - RNA, 19 nt, Artificial Sequence
  Description of Artificial Sequence: Synthetic oligonucleotide
  Antisense strand to SEQ ID NO: 156894
agcuaucaagucgaaucuu

SEQ ID NO: 156896 - RNA, 19 nt, Artificial Sequence
  Description of Artificial Sequence: Synthetic oligonucleotide
  Sense strand starting at position 210 of SEQ ID NO: 2017
cuugauagcuaacccagaa

SEQ ID NO: 156897 - RNA, 19 nt, Artificial Sequence
  Description of Artificial Sequence: Synthetic oligonucleotide
  Antisense strand to SEQ ID NO: 156896
uucuggguuagcuaucaag

SEQ ID NO: 156898 - RNA, 19 nt, Artificial Sequence
  Description of Artificial Sequence: Synthetic oligonucleotide
  Sense strand starting at position 235 of SEQ ID NO: 2017
augaaaggcuaguuuguau

SEQ ID NO: 156899 - RNA, 19 nt, Artificial Sequence
  Description of Artificial Sequence: Synthetic oligonucleotide
  Antisense strand to SEQ ID NO: 156898
auacaaacuagccuuucau

SEQ ID NO: 156900 - RNA, 19 nt, Artificial Sequence
  Description of Artificial Sequence: Synthetic oligonucleotide
  Sense strand starting at position 238 of SEQ ID NO: 2017
aaaggcuaguuuguaucaa

SEQ ID NO: 156901 - RNA, 19 nt, Artificial Sequence
  Description of Artificial Sequence: Synthetic oligonucleotide
  Antisense strand to SEQ ID NO: 156900
uugauacaaacuagccuuu

SEQ ID NO: 156902 - RNA, 19 nt, Artificial Sequence
  Description of Artificial Sequence: Synthetic oligonucleotide
  Sense strand starting at position 292 of SEQ ID NO: 2017
auaagagugucuuuaaaca

SEQ ID NO: 156903 - RNA, 19 nt, Artificial Sequence
  Description of Artificial Sequence: Synthetic oligonucleotide
  Antisense strand to SEQ ID NO: 156902
uguuuaaagacacucuuau

SEQ ID NO: 156904 - RNA, 19 nt, Artificial Sequence
  Description of Artificial Sequence: Synthetic oligonucleotide
  Sense strand starting at position 675 of SEQ ID NO: 2017
ccagauaagcuuugcagaa

SEQ ID NO: 156905 - RNA, 19 nt, Artificial Sequence
  Description of Artificial Sequence: Synthetic oligonucleotide
  Antisense strand to SEQ ID NO: 156904
uucugcaaagcuuaucugg

SEQ ID NO: 156906 - RNA, 19 nt, Artificial Sequence
  Description of Artificial Sequence: Synthetic oligonucleotide
  Sense strand starting at position 732 of SEQ ID NO: 2017
aguccaggccucugauaua

SEQ ID NO: 156907 - RNA, 19 nt, Artificial Sequence
  Description of Artificial Sequence: Synthetic oligonucleotide
  Antisense strand to SEQ ID NO: 156906
uauaucagaggccuggacu

SEQ ID NO: 156908 - RNA, 19 nt, Artificial Sequence
  Description of Artificial Sequence: Synthetic oligonucleotide
  Sense strand starting at position 785 of SEQ ID NO: 2017
auagaaugugcucaaacua

SEQ ID NO: 156909 - RNA, 19 nt, Artificial Sequence
  Description of Artificial Sequence: Synthetic oligonucleotide
  Antisense strand to SEQ ID NO: 156908
uaguuugagcacauucuau

SEQ ID NO: 156910 - RNA, 19 nt, Artificial Sequence
  Description of Artificial Sequence: Synthetic oligonucleotide
  Sense strand starting at position 968 of SEQ ID NO: 2017
cccagucuaccgggucaaa

SEQ ID NO: 156911 - RNA, 19 nt, Artificial Sequence
  Description of Artificial Sequence: Synthetic oligonucleotide
  Antisense strand to SEQ ID NO: 156910
uuugacccgguagacuggg

SEQ ID NO: 156912 - RNA, 19 nt, Artificial Sequence
  Description of Artificial Sequence: Synthetic oligonucleotide
  Sense strand starting at position 971 of SEQ ID NO: 2017
agucuaccgggucaaacau

SEQ ID NO: 156913 - RNA, 19 nt, Artificial Sequence
  Description of Artificial Sequence: Synthetic oligonucleotide
  Antisense strand to SEQ ID NO: 156912
auguuugacccgguagacu

SEQ ID NO: 156914 - RNA, 19 nt, Artificial Sequence
  Description of Artificial Sequence: Synthetic oligonucleotide
  Sense strand starting at position 1155 of SEQ ID NO: 2017
uacugauaacuagggucua

SEQ ID NO: 156915 - RNA, 19 nt, Artificial Sequence
  Description of Artificial Sequence: Synthetic oligonucleotide
  Antisense strand to SEQ ID NO: 156914
uagacccuaguuaucagua

SEQ ID NO: 156916 - RNA, 19 nt, Artificial Sequence
  Description of Artificial Sequence: Synthetic oligonucleotide
  Sense strand starting at position 1167 of SEQ ID NO: 2017
gggucuaucaauuaaggca

SEQ ID NO: 156917 - RNA, 19 nt, Artificial Sequence
  Description of Artificial Sequence: Synthetic oligonucleotide
  Antisense strand to SEQ ID NO: 156916
ugccuuaauugauagaccc

SEQ ID NO: 156918 - RNA, 19 nt, Artificial Sequence
  Description of Artificial Sequence: Synthetic oligonucleotide
  Sense strand starting at position 1305 of SEQ ID NO: 2017
caaauacacguagagugau

SEQ ID NO: 156919 - RNA, 19 nt, Artificial Sequence
  Description of Artificial Sequence: Synthetic oligonucleotide
  Antisense strand to SEQ ID NO: 156918
aucacucuacguguauuug

SEQ ID NO: 156920 - RNA, 19 nt, Artificial Sequence
  Description of Artificial Sequence: Synthetic oligonucleotide
  Sense strand starting at position 1308 of SEQ ID NO: 2017
auacacguagagugauuau

SEQ ID NO: 156921 - RNA, 19 nt, Artificial Sequence
  Description of Artificial Sequence: Synthetic oligonucleotide
  Antisense strand to SEQ ID NO: 156920
auaaucacucuacguguau

SEQ ID NO: 156922 - RNA, 19 nt, Artificial Sequence
  Description of Artificial Sequence: Synthetic oligonucleotide
  Sense strand starting at position 1315 of SEQ ID NO: 2017
uagagugauuauuccaguu

SEQ ID NO: 156923 - RNA, 19 nt, Artificial Sequence
  Description of Artificial Sequence: Synthetic oligonucleotide
  Antisense strand to SEQ ID NO: 156922
aacuggaauaaucacucua

SEQ ID NO: 156924 - RNA, 19 nt, Artificial Sequence
  Description of Artificial Sequence: Synthetic oligonucleotide
  Sense strand starting at position 1447 of SEQ ID NO: 2017
uugagagcaaucugaaguu

SEQ ID NO: 156925 - RNA, 19 nt, Artificial Sequence
  Description of Artificial Sequence: Synthetic oligonucleotide
  Antisense strand to SEQ ID NO: 156924
aacuucagauugcucucaa

SEQ ID NO: 156926 - RNA, 19 nt, Artificial Sequence
  Description of Artificial Sequence: Synthetic oligonucleotide
  Sense strand starting at position 1453 of SEQ ID NO: 2017
gcaaucugaaguuggagau

SEQ ID NO: 156927 - RNA, 19 nt, Artificial Sequence
  Description of Artificial Sequence: Synthetic oligonucleotide
  Antisense strand to SEQ ID NO: 156926
aucuccaacuucagauugc

SEQ ID NO: 156928 - RNA, 19 nt, Artificial Sequence
  Description of Artificial Sequence: Synthetic oligonucleotide
  Sense strand starting at position 1454 of SEQ ID NO: 2017
caaucugaaguuggagauu

SEQ ID NO: 156929 - RNA, 19 nt, Artificial Sequence
  Description of Artificial Sequence: Synthetic oligonucleotide
  Antisense strand to SEQ ID NO: 156928
aaucuccaacuucagauug

SEQ ID NO: 156930 - RNA, 19 nt, Artificial Sequence
  Description of Artificial Sequence: Synthetic oligonucleotide
  Sense strand starting at position 1516 of SEQ ID NO: 2017
guguuagcuguguuguuau

SEQ ID NO: 156931 - RNA, 19 nt, Artificial Sequence
  Description of Artificial Sequence: Synthetic oligonucleotide
  Antisense strand to SEQ ID NO: 156930
auaacaacacagcuaacac

SEQ ID NO: 156932 - RNA, 19 nt, Artificial Sequence
  Description of Artificial Sequence: Synthetic oligonucleotide
  Sense strand starting at position 1687 of SEQ ID NO: 2017
cuucgcuuccucuagagau

SEQ ID NO: 156933 - RNA, 19 nt, Artificial Sequence
  Description of Artificial Sequence: Synthetic oligonucleotide
  Antisense strand to SEQ ID NO: 156932
aucucuagaggaagcgaag

SEQ ID NO: 156934 - RNA, 19 nt, Artificial Sequence
  Description of Artificial Sequence: Synthetic oligonucleotide
  Sense strand starting at position 1689 of SEQ ID NO: 2017
ucgcuuccucuagagauug

SEQ ID NO: 156935 - RNA, 19 nt, Artificial Sequence
  Description of Artificial Sequence: Synthetic oligonucleotide
  Antisense strand to SEQ ID NO: 156934
caaucucuagaggaagcga

SEQ ID NO: 156936 - RNA, 19 nt, Artificial Sequence
  Description of Artificial Sequence: Synthetic oligonucleotide
  Sense strand starting at position 1755 of SEQ ID NO: 2017
aggucccauccuuguuaua

SEQ ID NO: 156937 - RNA, 19 nt, Artificial Sequence
  Description of Artificial Sequence: Synthetic oligonucleotide
  Antisense strand to SEQ ID NO: 156936
uauaacaaggaugggaccu

SEQ ID NO: 156938 - RNA, 19 nt, Artificial Sequence
  Description of Artificial Sequence: Synthetic oligonucleotide
  Sense strand starting at position 1767 of SEQ ID NO: 2017
uguuauaguccagguacca

SEQ ID NO: 156939 - RNA, 19 nt, Artificial Sequence
  Description of Artificial Sequence: Synthetic oligonucleotide
  Antisense strand to SEQ ID NO: 156938
ugguaccuggacuauaaca

SEQ ID NO: 156940 - RNA, 19 nt, Artificial Sequence
  Description of Artificial Sequence: Synthetic oligonucleotide
  Sense strand starting at position 2259 of SEQ ID NO: 2017
gcuauugcagcauaaguga

SEQ ID NO: 156941 - RNA, 19 nt, Artificial Sequence
  Description of Artificial Sequence: Synthetic oligonucleotide
  Antisense strand to SEQ ID NO: 156940
ucacuuaugcugcaauagc

SEQ ID NO: 156942 - RNA, 19 nt, Artificial Sequence
  Description of Artificial Sequence: Synthetic oligonucleotide
  Sense strand starting at position 2319 of SEQ ID NO: 2017
gcugcaccugucuaggaau

SEQ ID NO: 156943 - RNA, 19 nt, Artificial Sequence
  Description of Artificial Sequence: Synthetic oligonucleotide
  Antisense strand to SEQ ID NO: 156942
auuccuagacaggugcagc

SEQ ID NO: 156944 - RNA, 19 nt, Artificial Sequence
  Description of Artificial Sequence: Synthetic oligonucleotide
  Sense strand starting at position 2405 of SEQ ID NO: 2017
acaccaucagcuuguuaca

SEQ ID NO: 156945 - RNA, 19 nt, Artificial Sequence
  Description of Artificial Sequence: Synthetic oligonucleotide
  Antisense strand to SEQ ID NO: 156944
uguaacaagcugauggugu

SEQ ID NO: 156946 - RNA, 19 nt, Artificial Sequence
  Description of Artificial Sequence: Synthetic oligonucleotide
  Sense strand starting at position 2423 of SEQ ID NO: 2017
aaggguauacugugugaua

SEQ ID NO: 156947 - RNA, 19 nt, Artificial Sequence
  Description of Artificial Sequence: Synthetic oligonucleotide
  Antisense strand to SEQ ID NO: 156946
uaucacacaguauacccuu

SEQ ID NO: 156948 - RNA, 19 nt, Artificial Sequence
  Description of Artificial Sequence: Synthetic oligonucleotide
  Sense strand starting at position 2424 of SEQ ID NO: 2017
aggguauacugugugauac

SEQ ID NO: 156949 - RNA, 19 nt, Artificial Sequence
  Description of Artificial Sequence: Synthetic oligonucleotide
  Antisense strand to SEQ ID NO: 156948
guaucacacaguauacccu

SEQ ID NO: 156950 - RNA, 19 nt, Artificial Sequence
  Description of Artificial Sequence: Synthetic oligonucleotide
  Sense strand starting at position 2425 of SEQ ID NO: 2017
ggguauacugugugauacu

SEQ ID NO: 156951 - RNA, 19 nt, Artificial Sequence
  Description of Artificial Sequence: Synthetic oligonucleotide
  Antisense strand to SEQ ID NO: 156950
aguaucacacaguauaccc

SEQ ID NO: 156952 - RNA, 19 nt, Artificial Sequence
  Description of Artificial Sequence: Synthetic oligonucleotide
  Sense strand starting at position 2473 of SEQ ID NO: 2017
ccagguugugaacaaagua

SEQ ID NO: 156953 - RNA, 19 nt, Artificial Sequence
  Description of Artificial Sequence: Synthetic oligonucleotide
  Antisense strand to SEQ ID NO: 156952
uacuuuguucacaaccugg

SEQ ID NO: 156954 - RNA, 19 nt, Artificial Sequence
  Description of Artificial Sequence: Synthetic oligonucleotide
  Sense strand starting at position 2639 of SEQ ID NO: 2017
cuacaauaauucguuuaag

SEQ ID NO: 156955 - RNA, 19 nt, Artificial Sequence
  Description of Artificial Sequence: Synthetic oligonucleotide
  Antisense strand to SEQ ID NO: 156954
cuuaaacgaauuauuguag

SEQ ID NO: 156956 - RNA, 19 nt, Artificial Sequence
  Description of Artificial Sequence: Synthetic oligonucleotide
  Sense strand starting at position 2773 of SEQ ID NO: 2017
gcugauggguaccuacauu

SEQ ID NO: 156957 - RNA, 19 nt, Artificial Sequence
  Description of Artificial Sequence: Synthetic oligonucleotide
  Antisense strand to SEQ ID NO: 156956
aauguagguacccaucagc

SEQ ID NO: 156958 - RNA, 19 nt, Artificial Sequence
  Description of Artificial Sequence: Synthetic oligonucleotide
  Sense strand starting at position 2815 of SEQ ID NO: 2017
gguugcagcacuggagaau

SEQ ID NO: 156959 - RNA, 19 nt, Artificial Sequence
  Description of Artificial Sequence: Synthetic oligonucleotide
  Antisense strand to SEQ ID NO: 156958
auucuccagugcugcaacc

SEQ ID NO: 156960 - RNA, 19 nt, Artificial Sequence
  Description of Artificial Sequence: Synthetic oligonucleotide
  Sense strand starting at position 2816 of SEQ ID NO: 2017
guugcagcacuggagaauu

SEQ ID NO: 156961 - RNA, 19 nt, Artificial Sequence
  Description of Artificial Sequence: Synthetic oligonucleotide
  Antisense strand to SEQ ID NO: 156960
aauucuccagugcugcaac

SEQ ID NO: 156962 - RNA, 19 nt, Artificial Sequence
  Description of Artificial Sequence: Synthetic oligonucleotide
  Sense strand starting at position 3043 of SEQ ID NO: 2017
gucagcagauacucauaaa

SEQ ID NO: 156963 - RNA, 19 nt, Artificial Sequence
  Description of Artificial Sequence: Synthetic oligonucleotide
  Antisense strand to SEQ ID NO: 156962
uuuaugaguaucugcugac

SEQ ID NO: 156964 - RNA, 19 nt, Artificial Sequence
  Description of Artificial Sequence: Synthetic oligonucleotide
  Sense strand starting at position 3283 of SEQ ID NO: 2017
agccauuaucuguaagcuc

SEQ ID NO: 156965 - RNA, 19 nt, Artificial Sequence
  Description of Artificial Sequence: Synthetic oligonucleotide
  Antisense strand to SEQ ID NO: 156964
gagcuuacagauaauggcu

SEQ ID NO: 156966 - RNA, 19 nt, Artificial Sequence
  Description of Artificial Sequence: Synthetic oligonucleotide
  Sense strand starting at position 3628 of SEQ ID NO: 2017
gagaaugagccuuggguua

SEQ ID NO: 156967 - RNA, 19 nt, Artificial Sequence
  Description of Artificial Sequence: Synthetic oligonucleotide
  Antisense strand to SEQ ID NO: 156966
uaacccaaggcucauucuc

SEQ ID NO: 156968 - RNA, 19 nt, Artificial Sequence
  Description of Artificial Sequence: Synthetic oligonucleotide
  Sense strand starting at position 3909 of SEQ ID NO: 2017
aaugaagaacgcugucagu

SEQ ID NO: 156969 - RNA, 19 nt, Artificial Sequence
  Description of Artificial Sequence: Synthetic oligonucleotide
  Antisense strand to SEQ ID NO: 156968
acugacagcguucuucauu

SEQ ID NO: 156970 - RNA, 19 nt, Artificial Sequence
  Description of Artificial Sequence: Synthetic oligonucleotide
  Sense strand starting at position 3688 of SEQ ID NO: 2018
ugagucuaguagcucaaga

SEQ ID NO: 156971 - RNA, 19 nt, Artificial Sequence
  Description of Artificial Sequence: Synthetic oligonucleotide
  Antisense strand to SEQ ID NO: 156970
ucuugagcuacuagacuca

SEQ ID NO: 156972 - RNA, 19 nt, Artificial Sequence
  Description of Artificial Sequence: Synthetic oligonucleotide
  Sense strand starting at position 3582 of SEQ ID NO: 2018
cauacuagggcaugagaua

SEQ ID NO: 156973 - RNA, 19 nt, Artificial Sequence
  Description of Artificial Sequence: Synthetic oligonucleotide
  Antisense strand to SEQ ID NO: 156972
uaucucaugcccuaguaug

SEQ ID NO: 156974 - RNA, 19 nt, Artificial Sequence
  Description of Artificial Sequence: Synthetic oligonucleotide
  Sense strand starting at position 3466 of SEQ ID NO: 2018
guauuugauugcugggacu

SEQ ID NO: 156975 - RNA, 19 nt, Artificial Sequence
  Description of Artificial Sequence: Synthetic oligonucleotide
  Antisense strand to SEQ ID NO: 156974
agucccagcaaucaaauac

SEQ ID NO: 156976 - RNA, 19 nt, Artificial Sequence
  Description of Artificial Sequence: Synthetic oligonucleotide
  Sense strand starting at position 3428 of SEQ ID NO: 2018
ggaauuguguggaaacgug

SEQ ID NO: 156977 - RNA, 19 nt, Artificial Sequence
  Description of Artificial Sequence: Synthetic oligonucleotide
  Antisense strand to SEQ ID NO: 156976
cacguuuccacacaauucc

SEQ ID NO: 156978 - RNA, 19 nt, Artificial Sequence
  Description of Artificial Sequence: Synthetic oligonucleotide
  Sense strand starting at position 3427 of SEQ ID NO: 2018
gggaauuguguggaaacgu

SEQ ID NO: 156979 - RNA, 19 nt, Artificial Sequence
  Description of Artificial Sequence: Synthetic oligonucleotide
  Antisense strand to SEQ ID NO: 156978
acguuuccacacaauuccc

SEQ ID NO: 156980 - RNA, 19 nt, Artificial Sequence
  Description of Artificial Sequence: Synthetic oligonucleotide
  Sense strand starting at position 3425 of SEQ ID NO: 2018
gagggaauuguguggaaac

SEQ ID NO: 156981 - RNA, 19 nt, Artificial Sequence
  Description of Artificial Sequence: Synthetic oligonucleotide
  Antisense strand to SEQ ID NO: 156980
guuuccacacaauucccuc

SEQ ID NO: 156982 - RNA, 19 nt, Artificial Sequence
  Description of Artificial Sequence: Synthetic oligonucleotide
  Sense strand starting at position 3415 of SEQ ID NO: 2018
gcuuaaguaggagggaauu

SEQ ID NO: 156983 - RNA, 19 nt, Artificial Sequence
  Description of Artificial Sequence: Synthetic oligonucleotide
  Antisense strand to SEQ ID NO: 156982
aauucccuccuacuuaagc

SEQ ID NO: 156984 - RNA, 19 nt, Artificial Sequence
  Description of Artificial Sequence: Synthetic oligonucleotide
  Sense strand starting at position 3391 of SEQ ID NO: 2018
auguccuguguguaaacau

SEQ ID NO: 156985 - RNA, 19 nt, Artificial Sequence
  Description of Artificial Sequence: Synthetic oligonucleotide
  Antisense strand to SEQ ID NO: 156984
auguuuacacacaggacau

SEQ ID NO: 156986 - RNA, 19 nt, Artificial Sequence
  Description of Artificial Sequence: Synthetic oligonucleotide
  Sense strand starting at position 3390 of SEQ ID NO: 2018
gauguccuguguguaaaca

SEQ ID NO: 156987 - RNA, 19 nt, Artificial Sequence
  Description of Artificial Sequence: Synthetic oligonucleotide
  Antisense strand to SEQ ID NO: 156986
uguuuacacacaggacauc

SEQ ID NO: 156988 - RNA, 19 nt, Artificial Sequence
  Description of Artificial Sequence: Synthetic oligonucleotide
  Sense strand starting at position 3389 of SEQ ID NO: 2018
agauguccuguguguaaac

SEQ ID NO: 156989 - RNA, 19 nt, Artificial Sequence
  Description of Artificial Sequence: Synthetic oligonucleotide
  Antisense strand to SEQ ID NO: 156988
guuuacacacaggacaucu

SEQ ID NO: 156990 - RNA, 19 nt, Artificial Sequence
  Description of Artificial Sequence: Synthetic oligonucleotide
  Sense strand starting at position 3387 of SEQ ID NO: 2018
uuagauguccuguguguaa

SEQ ID NO: 156991 - RNA, 19 nt, Artificial Sequence
  Description of Artificial Sequence: Synthetic oligonucleotide
  Antisense strand to SEQ ID NO: 156990
uuacacacaggacaucuaa

SEQ ID NO: 156992 - RNA, 19 nt, Artificial Sequence
  Description of Artificial Sequence: Synthetic oligonucleotide
  Sense strand starting at position 3376 of SEQ ID NO: 2018
agaacaagcaguuagaugu

SEQ ID NO: 156993 - RNA, 19 nt, Artificial Sequence
  Description of Artificial Sequence: Synthetic oligonucleotide
  Antisense strand to SEQ ID NO: 156992
acaucuaacugcuuguucu

SEQ ID NO: 156994 - RNA, 19 nt, Artificial Sequence
  Description of Artificial Sequence: Synthetic oligonucleotide
  Sense strand starting at position 3254 of SEQ ID NO: 2018
uccuguuaccuuggacuau

SEQ ID NO: 156995 - RNA, 19 nt, Artificial Sequence
  Description of Artificial Sequence: Synthetic oligonucleotide
  Antisense strand to SEQ ID NO: 156994
auaguccaagguaacagga

SEQ ID NO: 156996 - RNA, 19 nt, Artificial Sequence
  Description of Artificial Sequence: Synthetic oligonucleotide
  Sense strand starting at position 3243 of SEQ ID NO: 2018
gccagaagcuuuccuguua

SEQ ID NO: 156997 - RNA, 19 nt, Artificial Sequence
  Description of Artificial Sequence: Synthetic oligonucleotide
  Antisense strand to SEQ ID NO: 156996
uaacaggaaagcuucuggc

SEQ ID NO: 156998 - RNA, 19 nt, Artificial Sequence
  Description of Artificial Sequence: Synthetic oligonucleotide
  Sense strand starting at position 3086 of SEQ ID NO: 2018
acaguuguuccugacacag

SEQ ID NO: 156999 - RNA, 19 nt, Artificial Sequence
  Description of Artificial Sequence: Synthetic oligonucleotide
  Antisense strand to SEQ ID NO: 156998
cugugucaggaacaacugu

SEQ ID NO: 157000 - RNA, 19 nt, Artificial Sequence
  Description of Artificial Sequence: Synthetic oligonucleotide
  Sense strand starting at position 2970 of SEQ ID NO: 2018
cugucacacgacuauagaa

SEQ ID NO: 157001 - RNA, 19 nt, Artificial Sequence
  Description of Artificial Sequence: Synthetic oligonucleotide
  Antisense strand to SEQ ID NO: 157000
uucuauagucgugugacag

SEQ ID NO: 157002 - RNA, 19 nt, Artificial Sequence
  Description of Artificial Sequence: Synthetic oligonucleotide
  Sense strand starting at position 2878 of SEQ ID NO: 2018
gucacugggucauugucau

SEQ ID NO: 157003 - RNA, 19 nt, Artificial Sequence
  Description of Artificial Sequence: Synthetic oligonucleotide
  Antisense strand to SEQ ID NO: 157002
augacaaugacccagugac

SEQ ID NO: 157004 - RNA, 19 nt, Artificial Sequence
  Description of Artificial Sequence: Synthetic oligonucleotide
  Sense strand starting at position 2872 of SEQ ID NO: 2018
gccuaugucacugggucau

SEQ ID NO: 157005 - RNA, 19 nt, Artificial Sequence
  Description of Artificial Sequence: Synthetic oligonucleotide
  Antisense strand to SEQ ID NO: 157004
augacccagugacauaggc

SEQ ID NO: 157006 - RNA, 19 nt, Artificial Sequence
  Description of Artificial Sequence: Synthetic oligonucleotide
  Sense strand starting at position 2783 of SEQ ID NO: 2018
guauaugcugcguauauuu

SEQ ID NO: 157007 - RNA, 19 nt, Artificial Sequence
  Description of Artificial Sequence: Synthetic oligonucleotide
  Antisense strand to SEQ ID NO: 157006
aaauauacgcagcauauac

SEQ ID NO: 157008 - RNA, 19 nt, Artificial Sequence
  Description of Artificial Sequence: Synthetic oligonucleotide
  Sense strand starting at position 2780 of SEQ ID NO: 2018
guaguauaugcugcguaua

SEQ ID NO: 157009 - RNA, 19 nt, Artificial Sequence
  Description of Artificial Sequence: Synthetic oligonucleotide
  Antisense strand to SEQ ID NO: 157008
uauacgcagcauauacuac

SEQ ID NO: 157010 - RNA, 19 nt, Artificial Sequence
  Description of Artificial Sequence: Synthetic oligonucleotide
  Sense strand starting at position 2762 of SEQ ID NO: 2018
uugaucucccuauaaguag

SEQ ID NO: 157011 - RNA, 19 nt, Artificial Sequence
  Description of Artificial Sequence: Synthetic oligonucleotide
  Antisense strand to SEQ ID NO: 157010
cuacuuauagggagaucaa

SEQ ID NO: 157012 - RNA, 19 nt, Artificial Sequence
  Description of Artificial Sequence: Synthetic oligonucleotide
  Sense strand starting at position 2545 of SEQ ID NO: 2018
cggcgaaaccgugucucua

SEQ ID NO: 157013 - RNA, 19 nt, Artificial Sequence
  Description of Artificial Sequence: Synthetic oligonucleotide
  Antisense strand to SEQ ID NO: 157012
uagagacacgguuucgccg

SEQ ID NO: 157014 - RNA, 19 nt, Artificial Sequence
  Description of Artificial Sequence: Synthetic oligonucleotide
  Sense strand starting at position 2424 of SEQ ID NO: 2018
agccuuagauaaucaguga

SEQ ID NO: 157015 - RNA, 19 nt, Artificial Sequence
  Description of Artificial Sequence: Synthetic oligonucleotide
  Antisense strand to SEQ ID NO: 157014
ucacugauuaucuaaggcu

SEQ ID NO: 157016 - RNA, 19 nt, Artificial Sequence
  Description of Artificial Sequence: Synthetic oligonucleotide
  Sense strand starting at position 2335 of SEQ ID NO: 2018
guacaaauuacguguuaca

SEQ ID NO: 157017 - RNA, 19 nt, Artificial Sequence
  Description of Artificial Sequence: Synthetic oligonucleotide
  Antisense strand to SEQ ID NO: 157016
uguaacacguaauuuguac

SEQ ID NO: 157018 - RNA, 19 nt, Artificial Sequence
  Description of Artificial Sequence: Synthetic oligonucleotide
  Sense strand starting at position 2311 of SEQ ID NO: 2018
gugauauuuacgugugcaa

SEQ ID NO: 157019 - RNA, 19 nt, Artificial Sequence
  Description of Artificial Sequence: Synthetic oligonucleotide
  Antisense strand to SEQ ID NO: 157018
uugcacacguaaauaucac

SEQ ID NO: 157020 - RNA, 19 nt, Artificial Sequence
  Description of Artificial Sequence: Synthetic oligonucleotide
  Sense strand starting at position 2310 of SEQ ID NO: 2018
ugugauauuuacgugugca

SEQ ID NO: 157021 - RNA, 19 nt, Artificial Sequence
  Description of Artificial Sequence: Synthetic oligonucleotide
  Antisense strand to SEQ ID NO: 157020
ugcacacguaaauaucaca

SEQ ID NO: 157022 - RNA, 19 nt, Artificial Sequence
  Description of Artificial Sequence: Synthetic oligonucleotide
  Sense strand starting at position 2307 of SEQ ID NO: 2018
cuuugugauauuuacgugu

SEQ ID NO: 157023 - RNA, 19 nt, Artificial Sequence
  Description of Artificial Sequence: Synthetic oligonucleotide
  Antisense strand to SEQ ID NO: 157022
acacguaaauaucacaaag

SEQ ID NO: 157024 - RNA, 19 nt, Artificial Sequence
  Description of Artificial Sequence: Synthetic oligonucleotide
  Sense strand starting at position 2247 of SEQ ID NO: 2018
guccucgcuccucagagaa

SEQ ID NO: 157025 - RNA, 19 nt, Artificial Sequence
  Description of Artificial Sequence: Synthetic oligonucleotide
  Antisense strand to SEQ ID NO: 157024
uucucugaggagcgaggac

SEQ ID NO: 157026 - RNA, 19 nt, Artificial Sequence
  Description of Artificial Sequence: Synthetic oligonucleotide
  Sense strand starting at position 2246 of SEQ ID NO: 2018
gguccucgcuccucagaga

SEQ ID NO: 157027 - RNA, 19 nt, Artificial Sequence
  Description of Artificial Sequence: Synthetic oligonucleotide
  Antisense strand to SEQ ID NO: 157026
ucucugaggagcgaggacc

SEQ ID NO: 157028 - RNA, 19 nt, Artificial Sequence
  Description of Artificial Sequence: Synthetic oligonucleotide
  Sense strand starting at position 2223 of SEQ ID NO: 2018
guggaaacuggcugugacu

SEQ ID NO: 157029 - RNA, 19 nt, Artificial Sequence
  Description of Artificial Sequence: Synthetic oligonucleotide
  Antisense strand to SEQ ID NO: 157028
agucacagccaguuuccac

SEQ ID NO: 157030 - RNA, 19 nt, Artificial Sequence
  Description of Artificial Sequence: Synthetic oligonucleotide
  Sense strand starting at position 2097 of SEQ ID NO: 2018
ccaaauuucgagcgcucau

SEQ ID NO: 157031 - RNA, 19 nt, Artificial Sequence
  Description of Artificial Sequence: Synthetic oligonucleotide
  Antisense strand to SEQ ID NO: 157030
augagcgcucgaaauuugg

SEQ ID NO: 157032 - RNA, 19 nt, Artificial Sequence
  Description of Artificial Sequence: Synthetic oligonucleotide
  Sense strand starting at position 1305 of SEQ ID NO: 2018
ccgagcaucagcgauccua

SEQ ID NO: 157033 - RNA, 19 nt, Artificial Sequence
  Description of Artificial Sequence: Synthetic oligonucleotide
  Antisense strand to SEQ ID NO: 157032
uaggaucgcugaugcucgg

SEQ ID NO: 157034 - RNA, 19 nt, Artificial Sequence
  Description of Artificial Sequence: Synthetic oligonucleotide
  Sense strand starting at position 839 of SEQ ID NO: 2018
cuguaagacuccgaaagga

SEQ ID NO: 157035 - RNA, 19 nt, Artificial Sequence
  Description of Artificial Sequence: Synthetic oligonucleotide
  Antisense strand to SEQ ID NO: 157034
uccuuucggagucuuacag

SEQ ID NO: 157036 - RNA, 19 nt, Artificial Sequence
  Description of Artificial Sequence: Synthetic oligonucleotide
  Sense strand starting at position 807 of SEQ ID NO: 2018
cgaugagguccucaaauua

SEQ ID NO: 157037 - RNA, 19 nt, Artificial Sequence
  Description of Artificial Sequence: Synthetic oligonucleotide
  Antisense strand to SEQ ID NO: 157036
uaauuugaggaccucaucg

SEQ ID NO: 157038 - RNA, 19 nt, Artificial Sequence
  Description of Artificial Sequence: Synthetic oligonucleotide
  Sense strand starting at position 740 of SEQ ID NO: 2018
agaugaucaucccagaaua

SEQ ID NO: 157039 - RNA, 19 nt, Artificial Sequence
  Description of Artificial Sequence: Synthetic oligonucleotide
  Antisense strand to SEQ ID NO: 157038
uauucugggaugaucaucu

SEQ ID NO: 157040 - RNA, 19 nt, Artificial Sequence
  Description of Artificial Sequence: Synthetic oligonucleotide
  Sense strand starting at position 685 of SEQ ID NO: 2018
guuuguuguaaggaacaua

SEQ ID NO: 157041 - RNA, 19 nt, Artificial Sequence
  Description of Artificial Sequence: Synthetic oligonucleotide
  Antisense strand to SEQ ID NO: 157040
uauguuccuuacaacaaac

SEQ ID NO: 157042 - RNA, 19 nt, Artificial Sequence
  Description of Artificial Sequence: Synthetic oligonucleotide
  Sense strand starting at position 676 of SEQ ID NO: 2018
ucaaccauuguuuguugua

SEQ ID NO: 157043 - RNA, 19 nt, Artificial Sequence
  Description of Artificial Sequence: Synthetic oligonucleotide
  Antisense strand to SEQ ID NO: 157042
uacaacaaacaaugguuga

SEQ ID NO: 157044 - RNA, 19 nt, Artificial Sequence
  Description of Artificial Sequence: Synthetic oligonucleotide
  Sense strand starting at position 654 of SEQ ID NO: 2018
gucaucuuccaagauaagu

SEQ ID NO: 157045 - RNA, 19 nt, Artificial Sequence
  Description of Artificial Sequence: Synthetic oligonucleotide
  Antisense strand to SEQ ID NO: 157044
acuuaucuuggaagaugac

SEQ ID NO: 157046 - RNA, 19 nt, Artificial Sequence
  Description of Artificial Sequence: Synthetic oligonucleotide
  Sense strand starting at position 603 of SEQ ID NO: 2018
ggugacugcccacaauaca

SEQ ID NO: 157047 - RNA, 19 nt, Artificial Sequence
  Description of Artificial Sequence: Synthetic oligonucleotide
  Antisense strand to SEQ ID NO: 157046
uguauugugggcagucacc

SEQ ID NO: 157048 - RNA, 19 nt, Artificial Sequence
  Description of Artificial Sequence: Synthetic oligonucleotide
  Sense strand starting at position 600 of SEQ ID NO: 2018
ccuggugacugcccacaau

SEQ ID NO: 157049 - RNA, 19 nt, Artificial Sequence
  Description of Artificial Sequence: Synthetic oligonucleotide
  Antisense strand to SEQ ID NO: 157048
auugugggcagucaccagg

SEQ ID NO: 157050 - RNA, 19 nt, Artificial Sequence
  Description of Artificial Sequence: Synthetic oligonucleotide
  Sense strand starting at position 3537 of SEQ ID NO: 2019
ugacaagccuuggcaauau

SEQ ID NO: 157051 - RNA, 19 nt, Artificial Sequence
  Description of Artificial Sequence: Synthetic oligonucleotide
  Antisense strand to SEQ ID NO: 157050
auauugccaaggcuuguca

SEQ ID NO: 157052 - RNA, 19 nt, Artificial Sequence
  Description of Artificial Sequence: Synthetic oligonucleotide
  Sense strand starting at position 3536 of SEQ ID NO: 2019
gugacaagccuuggcaaua

SEQ ID NO: 157053 - RNA, 19 nt, Artificial Sequence
  Description of Artificial Sequence: Synthetic oligonucleotide
  Antisense strand to SEQ ID NO: 157052
uauugccaaggcuugucac

SEQ ID NO: 157054 - RNA, 19 nt, Artificial Sequence
  Description of Artificial Sequence: Synthetic oligonucleotide
  Sense strand starting at position 3535 of SEQ ID NO: 2019
agugacaagccuuggcaau

SEQ ID NO: 157055 - RNA, 19 nt, Artificial Sequence
  Description of Artificial Sequence: Synthetic oligonucleotide
  Antisense strand to SEQ ID NO: 157054
auugccaaggcuugucacu

SEQ ID NO: 157056 - RNA, 19 nt, Artificial Sequence
  Description of Artificial Sequence: Synthetic oligonucleotide
  Sense strand starting at position 3427 of SEQ ID NO: 2019
ccgugugucccuuguguca

SEQ ID NO: 157057 - RNA, 19 nt, Artificial Sequence
  Description of Artificial Sequence: Synthetic oligonucleotide
  Antisense strand to SEQ ID NO: 157056
ugacacaagggacacacgg

SEQ ID NO: 157058 - RNA, 19 nt, Artificial Sequence
  Description of Artificial Sequence: Synthetic oligonucleotide
  Sense strand starting at position 3170 of SEQ ID NO: 2019
cuuggauucuccuggguuu

SEQ ID NO: 157059 - RNA, 19 nt, Artificial Sequence
  Description of Artificial Sequence: Synthetic oligonucleotide
  Antisense strand to SEQ ID NO: 157058
aaacccaggagaauccaag

SEQ ID NO: 157060 - RNA, 19 nt, Artificial Sequence
  Description of Artificial Sequence: Synthetic oligonucleotide
  Sense strand starting at position 2835 of SEQ ID NO: 2019
cuuugugcccgcugagaag

SEQ ID NO: 157061 - RNA, 19 nt, Artificial Sequence
  Description of Artificial Sequence: Synthetic oligonucleotide
  Antisense strand to SEQ ID NO: 157060
cuucucagcgggcacaaag

SEQ ID NO: 157062 - RNA, 19 nt, Artificial Sequence
  Description of Artificial Sequence: Synthetic oligonucleotide
  Sense strand starting at position 2833 of SEQ ID NO: 2019
cccuuugugcccgcugaga

SEQ ID NO: 157063 - RNA, 19 nt, Artificial Sequence
  Description of Artificial Sequence: Synthetic oligonucleotide
  Antisense strand to SEQ ID NO: 157062
ucucagcgggcacaaaggg

SEQ ID NO: 157064 - RNA, 19 nt, Artificial Sequence
  Description of Artificial Sequence: Synthetic oligonucleotide
  Sense strand starting at position 2785 of SEQ ID NO: 2019
gagugaccuuggcugguaa

SEQ ID NO: 157065 - RNA, 19 nt, Artificial Sequence
  Description of Artificial Sequence: Synthetic oligonucleotide
  Antisense strand to SEQ ID NO: 157064
uuaccagccaaggucacuc

SEQ ID NO: 157066 - RNA, 19 nt, Artificial Sequence
  Description of Artificial Sequence: Synthetic oligonucleotide
  Sense strand starting at position 2776 of SEQ ID NO: 2019
ggacuugaggagugaccuu

SEQ ID NO: 157067 - RNA, 19 nt, Artificial Sequence
  Description of Artificial Sequence: Synthetic oligonucleotide
  Antisense strand to SEQ ID NO: 157066
aaggucacuccucaagucc

SEQ ID NO: 157068 - RNA, 19 nt, Artificial Sequence
  Description of Artificial Sequence: Synthetic oligonucleotide
  Sense strand starting at position 2661 of SEQ ID NO: 2019
gucagugcugcacccgaua

SEQ ID NO: 157069 - RNA, 19 nt, Artificial Sequence
  Description of Artificial Sequence: Synthetic oligonucleotide
  Antisense strand to SEQ ID NO: 157068
uaucgggugcagcacugac

SEQ ID NO: 157070 - RNA, 19 nt, Artificial Sequence
  Description of Artificial Sequence: Synthetic oligonucleotide
  Sense strand starting at position 2010 of SEQ ID NO: 2019
ggucuaucucagcagucca

SEQ ID NO: 157071 - RNA, 19 nt, Artificial Sequence
  Description of Artificial Sequence: Synthetic oligonucleotide
  Antisense strand to SEQ ID NO: 157070
uggacugcugagauagacc

SEQ ID NO: 157072 - RNA, 19 nt, Artificial Sequence
  Description of Artificial Sequence: Synthetic oligonucleotide
  Sense strand starting at position 1998 of SEQ ID NO: 2019
ccuggugucccuggucuau

SEQ ID NO: 157073 - RNA, 19 nt, Artificial Sequence
  Description of Artificial Sequence: Synthetic oligonucleotide
  Antisense strand to SEQ ID NO: 157072
auagaccagggacaccagg

SEQ ID NO: 157074 - RNA, 19 nt, Artificial Sequence
  Description of Artificial Sequence: Synthetic oligonucleotide
  Sense strand starting at position 1134 of SEQ ID NO: 2019
uuauucuuaucguacauga

SEQ ID NO: 157075 - RNA, 19 nt, Artificial Sequence
  Description of Artificial Sequence: Synthetic oligonucleotide
  Antisense strand to SEQ ID NO: 157074
ucauguacgauaagaauaa

SEQ ID NO: 157076 - RNA, 19 nt, Artificial Sequence
  Description of Artificial Sequence: Synthetic oligonucleotide
  Sense strand starting at position 657 of SEQ ID NO: 2019
agacaaugauccuccagca

SEQ ID NO: 157077 - RNA, 19 nt, Artificial Sequence
  Description of Artificial Sequence: Synthetic oligonucleotide
  Antisense strand to SEQ ID NO: 157076
ugcuggaggaucauugucu

SEQ ID NO: 157078 - RNA, 19 nt, Artificial Sequence
  Description of Artificial Sequence: Synthetic oligonucleotide
  Sense strand starting at position 619 of SEQ ID NO: 2019
uucugucacgguuggaaag

SEQ ID NO: 157079 - RNA, 19 nt, Artificial Sequence
  Description of Artificial Sequence: Synthetic oligonucleotide
  Antisense strand to SEQ ID NO: 157078
cuuuccaaccgugacagaa

SEQ ID NO: 157080 - RNA, 19 nt, Artificial Sequence
  Description of Artificial Sequence: Synthetic oligonucleotide
  Sense strand starting at position 616 of SEQ ID NO: 2019
caauucugucacgguugga

SEQ ID NO: 157081 - RNA, 19 nt, Artificial Sequence
  Description of Artificial Sequence: Synthetic oligonucleotide
  Antisense strand to SEQ ID NO: 157080
uccaaccgugacagaauug

SEQ ID NO: 157082 - RNA, 19 nt, Artificial Sequence
  Description of Artificial Sequence: Synthetic oligonucleotide
  Sense strand starting at position 613 of SEQ ID NO: 2019
ccucaauucugucacgguu

SEQ ID NO: 157083 - RNA, 19 nt, Artificial Sequence
  Description of Artificial Sequence: Synthetic oligonucleotide
  Antisense strand to SEQ ID NO: 157082
aaccgugacagaauugagg

SEQ ID NO: 157084 - RNA, 19 nt, Artificial Sequence
  Description of Artificial Sequence: Synthetic oligonucleotide
  Sense strand starting at position 519 of SEQ ID NO: 2019
ggucaagugaaauaggguu

SEQ ID NO: 157085 - RNA, 19 nt, Artificial Sequence
  Description of Artificial Sequence: Synthetic oligonucleotide
  Antisense strand to SEQ ID NO: 157084
aacccuauuucacuugacc

SEQ ID NO: 157086 - RNA, 19 nt, Artificial Sequence
  Description of Artificial Sequence: Synthetic oligonucleotide
  Sense strand starting at position 381 of SEQ ID NO: 2019
uuugaucuaugggagcaga

SEQ ID NO: 157087 - RNA, 19 nt, Artificial Sequence
  Description of Artificial Sequence: Synthetic oligonucleotide
  Antisense strand to SEQ ID NO: 157086
ucugcucccauagaucaaa

SEQ ID NO: 157088 - RNA, 19 nt, Artificial Sequence
  Description of Artificial Sequence: Synthetic oligonucleotide
  Sense strand starting at position 26 of SEQ ID NO: 2019
cggugugucucuguggaua

SEQ ID NO: 157089 - RNA, 19 nt, Artificial Sequence
  Description of Artificial Sequence: Synthetic oligonucleotide
  Antisense strand to SEQ ID NO: 157088
uauccacagagacacaccg

SEQ ID NO: 157090 - RNA, 19 nt, Artificial Sequence
  Description of Artificial Sequence: Synthetic oligonucleotide
  Sense strand starting at position 3845 of SEQ ID NO: 2020
uuuggagccugucuauagu

SEQ ID NO: 157091 - RNA, 19 nt, Artificial Sequence
  Description of Artificial Sequence: Synthetic oligonucleotide
  Antisense strand to SEQ ID NO: 157090
acuauagacaggcuccaaa

SEQ ID NO: 157092 - RNA, 19 nt, Artificial Sequence
  Description of Artificial Sequence: Synthetic oligonucleotide
  Sense strand starting at position 3140 of SEQ ID NO: 2020
uucugcuuaucagagauuu

SEQ ID NO: 157093 - RNA, 19 nt, Artificial Sequence
  Description of Artificial Sequence: Synthetic oligonucleotide
  Antisense strand to SEQ ID NO: 157092
aaaucucugauaagcagaa

SEQ ID NO: 157094 - RNA, 19 nt, Artificial Sequence
  Description of Artificial Sequence: Synthetic oligonucleotide
  Sense strand starting at position 3138 of SEQ ID NO: 2020
auuucugcuuaucagagau

SEQ ID NO: 157095 - RNA, 19 nt, Artificial Sequence
  Description of Artificial Sequence: Synthetic oligonucleotide
  Antisense strand to SEQ ID NO: 157094
aucucugauaagcagaaau

SEQ ID NO: 157096 - RNA, 19 nt, Artificial Sequence
  Description of Artificial Sequence: Synthetic oligonucleotide
  Sense strand starting at position 2710 of SEQ ID NO: 2020
aggaaucacugaggauaca

SEQ ID NO: 157097 - RNA, 19 nt, Artificial Sequence
  Description of Artificial Sequence: Synthetic oligonucleotide
  Antisense strand to SEQ ID NO: 157096
uguauccucagugauuccu

SEQ ID NO: 157098 - RNA, 19 nt, Artificial Sequence
  Description of Artificial Sequence: Synthetic oligonucleotide
  Sense strand starting at position 2304 of SEQ ID NO: 2020
uaaauuagccgggaguaau

SEQ ID NO: 157099 - RNA, 19 nt, Artificial Sequence
  Description of Artificial Sequence: Synthetic oligonucleotide
  Antisense strand to SEQ ID NO: 157098
auuacucccggcuaauuua

SEQ ID NO: 157100 - RNA, 19 nt, Artificial Sequence
  Description of Artificial Sequence: Synthetic oligonucleotide
  Sense strand starting at position 2303 of SEQ ID NO: 2020
auaaauuagccgggaguaa

SEQ ID NO: 157101 - RNA, 19 nt, Artificial Sequence
  Description of Artificial Sequence: Synthetic oligonucleotide
  Antisense strand to SEQ ID NO: 157100
uuacucccggcuaauuuau

SEQ ID NO: 157102 - RNA, 19 nt, Artificial Sequence
  Description of Artificial Sequence: Synthetic oligonucleotide
  Sense strand starting at position 2302 of SEQ ID NO: 2020
aauaaauuagccgggagua

SEQ ID NO: 157103 - RNA, 19 nt, Artificial Sequence
  Description of Artificial Sequence: Synthetic oligonucleotide
  Antisense strand to SEQ ID NO: 157102
uacucccggcuaauuuauu

SEQ ID NO: 157104 - RNA, 19 nt, Artificial Sequence
  Description of Artificial Sequence: Synthetic oligonucleotide
  Sense strand starting at position 2134 of SEQ ID NO: 2020
uguguuugggaguguugga

SEQ ID NO: 157105 - RNA, 19 nt, Artificial Sequence
  Description of Artificial Sequence: Synthetic oligonucleotide
  Antisense strand to SEQ ID NO: 157104
uccaacacucccaaacaca

SEQ ID NO: 157106 - RNA, 19 nt, Artificial Sequence
  Description of Artificial Sequence: Synthetic oligonucleotide
  Sense strand starting at position 2128 of SEQ ID NO: 2020
ucaccuuguguuugggagu

SEQ ID NO: 157107 - RNA, 19 nt, Artificial Sequence
  Description of Artificial Sequence: Synthetic oligonucleotide
  Antisense strand to SEQ ID NO: 157106
acucccaaacacaagguga

SEQ ID NO: 157108 - RNA, 19 nt, Artificial Sequence
  Description of Artificial Sequence: Synthetic oligonucleotide
  Sense strand starting at position 2092 of SEQ ID NO: 2020
accagacgcuuauugaaga

SEQ ID NO: 157109 - RNA, 19 nt, Artificial Sequence
  Description of Artificial Sequence: Synthetic oligonucleotide
  Antisense strand to SEQ ID NO: 157108
ucuucaauaagcgucuggu

SEQ ID NO: 157110 - RNA, 19 nt, Artificial Sequence
  Description of Artificial Sequence: Synthetic oligonucleotide
  Sense strand starting at position 2090 of SEQ ID NO: 2020
ucaccagacgcuuauugaa

SEQ ID NO: 157111 - RNA, 19 nt, Artificial Sequence
  Description of Artificial Sequence: Synthetic oligonucleotide
  Antisense strand to SEQ ID NO: 157110
uucaauaagcgucugguga

SEQ ID NO: 157112 - RNA, 19 nt, Artificial Sequence
  Description of Artificial Sequence: Synthetic oligonucleotide
  Sense strand starting at position 2069 of SEQ ID NO: 2020
uucuaauuggcggaaauug

SEQ ID NO: 157113 - RNA, 19 nt, Artificial Sequence
  Description of Artificial Sequence: Synthetic oligonucleotide
  Antisense strand to SEQ ID NO: 157112
caauuuccgccaauuagaa

SEQ ID NO: 157114 - RNA, 19 nt, Artificial Sequence
  Description of Artificial Sequence: Synthetic oligonucleotide
  Sense strand starting at position 2068 of SEQ ID NO: 2020
uuucuaauuggcggaaauu

SEQ ID NO: 157115 - RNA, 19 nt, Artificial Sequence
  Description of Artificial Sequence: Synthetic oligonucleotide
  Antisense strand to SEQ ID NO: 157114
aauuuccgccaauuagaaa

SEQ ID NO: 157116 - RNA, 19 nt, Artificial Sequence
  Description of Artificial Sequence: Synthetic oligonucleotide
  Sense strand starting at position 2066 of SEQ ID NO: 2020
ucuuucuaauuggcggaaa

SEQ ID NO: 157117 - RNA, 19 nt, Artificial Sequence
  Description of Artificial Sequence: Synthetic oligonucleotide
  Antisense strand to SEQ ID NO: 157116
uuuccgccaauuagaaaga

SEQ ID NO: 157118 - RNA, 19 nt, Artificial Sequence
  Description of Artificial Sequence: Synthetic oligonucleotide
  Sense strand starting at position 1645 of SEQ ID NO: 2020
agaccuuaguugucaggga

SEQ ID NO: 157119 - RNA, 19 nt, Artificial Sequence
  Description of Artificial Sequence: Synthetic oligonucleotide
  Antisense strand to SEQ ID NO: 157118
ucccugacaacuaaggucu

SEQ ID NO: 157120 - RNA, 19 nt, Artificial Sequence
  Description of Artificial Sequence: Synthetic oligonucleotide
  Sense strand starting at position 1629 of SEQ ID NO: 2020
aagugcagauccucagaga

SEQ ID NO: 157121 - RNA, 19 nt, Artificial Sequence
  Description of Artificial Sequence: Synthetic oligonucleotide
  Antisense strand to SEQ ID NO: 157120
ucucugaggaucugcacuu

SEQ ID NO: 157122 - RNA, 19 nt, Artificial Sequence
  Description of Artificial Sequence: Synthetic oligonucleotide
  Sense strand starting at position 1502 of SEQ ID NO: 2020
gcuucuucgcugucagcga

SEQ ID NO: 157123 - RNA, 19 nt, Artificial Sequence
  Description of Artificial Sequence: Synthetic oligonucleotide
  Antisense strand to SEQ ID NO: 157122
ucgcugacagcgaagaagc

SEQ ID NO: 157124 - RNA, 19 nt, Artificial Sequence
  Description of Artificial Sequence: Synthetic oligonucleotide
  Sense strand starting at position 1470 of SEQ ID NO: 2020
aacucugggucuucgaaca

SEQ ID NO: 157125 - RNA, 19 nt, Artificial Sequence
  Description of Artificial Sequence: Synthetic oligonucleotide
  Antisense strand to SEQ ID NO: 157124
uguucgaagacccagaguu

SEQ ID NO: 157126 - RNA, 19 nt, Artificial Sequence
  Description of Artificial Sequence: Synthetic oligonucleotide
  Sense strand starting at position 1412 of SEQ ID NO: 2020
caagauacuccgugggaca

SEQ ID NO: 157127 - RNA, 19 nt, Artificial Sequence
  Description of Artificial Sequence: Synthetic oligonucleotide
  Antisense strand to SEQ ID NO: 157126
ugucccacggaguaucuug

SEQ ID NO: 157128 - RNA, 19 nt, Artificial Sequence
  Description of Artificial Sequence: Synthetic oligonucleotide
  Sense strand starting at position 1374 of SEQ ID NO: 2020
cgugaucccucaucacaga

SEQ ID NO: 157129 - RNA, 19 nt, Artificial Sequence
  Description of Artificial Sequence: Synthetic oligonucleotide
  Antisense strand to SEQ ID NO: 157128
ucugugaugagggaucacg

SEQ ID NO: 157130 - RNA, 19 nt, Artificial Sequence
  Description of Artificial Sequence: Synthetic oligonucleotide
  Sense strand starting at position 1213 of SEQ ID NO: 2020
ugaauauauguacaugcuu

SEQ ID NO: 157131 - RNA, 19 nt, Artificial Sequence
  Description of Artificial Sequence: Synthetic oligonucleotide
  Antisense strand to SEQ ID NO: 157130
aagcauguacauauauuca

SEQ ID NO: 157132 - RNA, 19 nt, Artificial Sequence
  Description of Artificial Sequence: Synthetic oligonucleotide
  Sense strand starting at position 1210 of SEQ ID NO: 2020
acgugaauauauguacaug

SEQ ID NO: 157133 - RNA, 19 nt, Artificial Sequence
  Description of Artificial Sequence: Synthetic oligonucleotide
  Antisense strand to SEQ ID NO: 157132
cauguacauauauucacgu

SEQ ID NO: 157134 - RNA, 19 nt, Artificial Sequence
  Description of Artificial Sequence: Synthetic oligonucleotide
  Sense strand starting at position 1161 of SEQ ID NO: 2020
uucuguucucccuauugca

SEQ ID NO: 157135 - RNA, 19 nt, Artificial Sequence
  Description of Artificial Sequence: Synthetic oligonucleotide
  Antisense strand to SEQ ID NO: 157134
ugcaauagggagaacagaa

SEQ ID NO: 157136 - RNA, 19 nt, Artificial Sequence
  Description of Artificial Sequence: Synthetic oligonucleotide
  Sense strand starting at position 851 of SEQ ID NO: 2020
ugaguuaagaauugugaag

SEQ ID NO: 157137 - RNA, 19 nt, Artificial Sequence
  Description of Artificial Sequence: Synthetic oligonucleotide
  Antisense strand to SEQ ID NO: 157136
cuucacaauucuuaacuca

SEQ ID NO: 157138 - RNA, 19 nt, Artificial Sequence
  Description of Artificial Sequence: Synthetic oligonucleotide
  Sense strand starting at position 458 of SEQ ID NO: 2020
ugagcugucagcgauucca

SEQ ID NO: 157139 - RNA, 19 nt, Artificial Sequence
  Description of Artificial Sequence: Synthetic oligonucleotide
  Antisense strand to SEQ ID NO: 157138
uggaaucgcugacagcuca

SEQ ID NO: 157140 - RNA, 19 nt, Artificial Sequence
  Description of Artificial Sequence: Synthetic oligonucleotide
  Sense strand starting at position 455 of SEQ ID NO: 2020
ggaugagcugucagcgauu

SEQ ID NO: 157141 - RNA, 19 nt, Artificial Sequence
  Description of Artificial Sequence: Synthetic oligonucleotide
  Antisense strand to SEQ ID NO: 157140
aaucgcugacagcucaucc

SEQ ID NO: 157142 - RNA, 19 nt, Artificial Sequence
  Description of Artificial Sequence: Synthetic oligonucleotide
  Sense strand starting at position 300 of SEQ ID NO: 2020
aucaaugcuguauaugaua

SEQ ID NO: 157143 - RNA, 19 nt, Artificial Sequence
  Description of Artificial Sequence: Synthetic oligonucleotide
  Antisense strand to SEQ ID NO: 157142
uaucauauacagcauugau

SEQ ID NO: 157144 - RNA, 19 nt, Artificial Sequence
  Description of Artificial Sequence: Synthetic oligonucleotide
  Sense strand starting at position 298 of SEQ ID NO: 2020
cuaucaaugcuguauauga

SEQ ID NO: 157145 - RNA, 19 nt, Artificial Sequence
  Description of Artificial Sequence: Synthetic oligonucleotide
  Antisense strand to SEQ ID NO: 157144
ucauauacagcauugauag

SEQ ID NO: 157146 - RNA, 19 nt, Artificial Sequence
  Description of Artificial Sequence: Synthetic oligonucleotide
  Sense strand starting at position 277 of SEQ ID NO: 2020
guugaaucgggcuaauaaa

SEQ ID NO: 157147 - RNA, 19 nt, Artificial Sequence
  Description of Artificial Sequence: Synthetic oligonucleotide
  Antisense strand to SEQ ID NO: 157146
uuuauuagcccgauucaac

SEQ ID NO: 157148 - RNA, 19 nt, Artificial Sequence
  Description of Artificial Sequence: Synthetic oligonucleotide
  Sense strand starting at position 273 of SEQ ID NO: 2020
gucuguugaaucgggcuaa

SEQ ID NO: 157149 - RNA, 19 nt, Artificial Sequence
  Description of Artificial Sequence: Synthetic oligonucleotide
  Antisense strand to SEQ ID NO: 157148
uuagcccgauucaacagac

SEQ ID NO: 157150 - RNA, 19 nt, Artificial Sequence
  Description of Artificial Sequence: Synthetic oligonucleotide
  Sense strand starting at position 264 of SEQ ID NO: 2020
aguuuccuugucuguugaa

SEQ ID NO: 157151 - RNA, 19 nt, Artificial Sequence
  Description of Artificial Sequence: Synthetic oligonucleotide
  Antisense strand to SEQ ID NO: 157150
uucaacagacaaggaaacu

SEQ ID NO: 157152 - RNA, 19 nt, Artificial Sequence
  Description of Artificial Sequence: Synthetic oligonucleotide
  Sense strand starting at position 219 of SEQ ID NO: 2020
uacucaguaguguaagacu

SEQ ID NO: 157153 - RNA, 19 nt, Artificial Sequence
  Description of Artificial Sequence: Synthetic oligonucleotide
  Antisense strand to SEQ ID NO: 157152
agucuuacacuacugagua

SEQ ID NO: 157154 - RNA, 19 nt, Artificial Sequence
  Description of Artificial Sequence: Synthetic oligonucleotide
  Sense strand starting at position 214 of SEQ ID NO: 2020
uccauuacucaguagugua

SEQ ID NO: 157155 - RNA, 19 nt, Artificial Sequence
  Description of Artificial Sequence: Synthetic oligonucleotide
  Antisense strand to SEQ ID NO: 157154
uacacuacugaguaaugga

SEQ ID NO: 157156 - RNA, 19 nt, Artificial Sequence
  Description of Artificial Sequence: Synthetic oligonucleotide
  Sense strand starting at position 213 of SEQ ID NO: 2020
uuccauuacucaguagugu

SEQ ID NO: 157157 - RNA, 19 nt, Artificial Sequence
  Description of Artificial Sequence: Synthetic oligonucleotide
  Antisense strand to SEQ ID NO: 157156
acacuacugaguaauggaa

SEQ ID NO: 157158 - RNA, 19 nt, Artificial Sequence
  Description of Artificial Sequence: Synthetic oligonucleotide
  Sense strand starting at position 188 of SEQ ID NO: 2020
ucaggagauccauguugag

SEQ ID NO: 157159 - RNA, 19 nt, Artificial Sequence
  Description of Artificial Sequence: Synthetic oligonucleotide
  Antisense strand to SEQ ID NO: 157158
cucaacauggaucuccuga

SEQ ID NO: 157160 - RNA, 19 nt, Artificial Sequence
  Description of Artificial Sequence: Synthetic oligonucleotide
  Sense strand starting at position 148 of SEQ ID NO: 2020
ccuagaaggcaaggucaua

SEQ ID NO: 157161 - RNA, 19 nt, Artificial Sequence
  Description of Artificial Sequence: Synthetic oligonucleotide
  Antisense strand to SEQ ID NO: 157160
uaugaccuugccuucuagg

SEQ ID NO: 157162 - RNA, 19 nt, Artificial Sequence
  Description of Artificial Sequence: Synthetic oligonucleotide
  Sense strand starting at position 138 of SEQ ID NO: 2020
gguagugucaccuagaagg

SEQ ID NO: 157163 - RNA, 19 nt, Artificial Sequence
  Description of Artificial Sequence: Synthetic oligonucleotide
  Antisense strand to SEQ ID NO: 157162
ccuucuaggugacacuacc

SEQ ID NO: 157164 - RNA, 19 nt, Artificial Sequence
  Description of Artificial Sequence: Synthetic oligonucleotide
  Sense strand starting at position 136 of SEQ ID NO: 2020
aagguagugucaccuagaa

SEQ ID NO: 157165 - RNA, 19 nt, Artificial Sequence
  Description of Artificial Sequence: Synthetic oligonucleotide
  Antisense strand to SEQ ID NO: 157164
uucuaggugacacuaccuu

SEQ ID NO: 157166 - RNA, 19 nt, Artificial Sequence
  Description of Artificial Sequence: Synthetic oligonucleotide
  Sense strand starting at position 118 of SEQ ID NO: 2020
aagauucuggcucgagaga

SEQ ID NO: 157167 - RNA, 19 nt, Artificial Sequence
  Description of Artificial Sequence: Synthetic oligonucleotide
  Antisense strand to SEQ ID NO: 157166
ucucucgagccagaaucuu

SEQ ID NO: 157168 - RNA, 19 nt, Artificial Sequence
  Description of Artificial Sequence: Synthetic oligonucleotide
  Sense strand starting at position 116 of SEQ ID NO: 2020
auaagauucuggcucgaga

SEQ ID NO: 157169 - RNA, 19 nt, Artificial Sequence
  Description of Artificial Sequence: Synthetic oligonucleotide
  Antisense strand to SEQ ID NO: 157168
ucucgagccagaaucuuau

SEQ ID NO: 157170 - RNA, 19 nt, Artificial Sequence
  Description of Artificial Sequence: Synthetic oligonucleotide
  Sense strand starting at position 63 of SEQ ID NO: 2021
gggcaaaucucucccuacu

SEQ ID NO: 157171 - RNA, 19 nt, Artificial Sequence
  Description of Artificial Sequence: Synthetic oligonucleotide
  Antisense strand to SEQ ID NO: 157170
aguagggagagauuugccc

SEQ ID NO: 157172 - RNA, 19 nt, Artificial Sequence
  Description of Artificial Sequence: Synthetic oligonucleotide
  Sense strand starting at position 94 of SEQ ID NO: 2021
cuaauuuccuccucagugu

SEQ ID NO: 157173 - RNA, 19 nt, Artificial Sequence
  Description of Artificial Sequence: Synthetic oligonucleotide
  Antisense strand to SEQ ID NO: 157172
acacugaggaggaaauuag

SEQ ID NO: 157174 - RNA, 19 nt, Artificial Sequence
  Description of Artificial Sequence: Synthetic oligonucleotide
  Sense strand starting at position 121 of SEQ ID NO: 2021
augagaugucccuaaggug

SEQ ID NO: 157175 - RNA, 19 nt, Artificial Sequence
  Description of Artificial Sequence: Synthetic oligonucleotide
  Antisense strand to SEQ ID NO: 157174
caccuuagggacaucucau

SEQ ID NO: 157176 - RNA, 19 nt, Artificial Sequence
  Description of Artificial Sequence: Synthetic oligonucleotide
  Sense strand starting at position 292 of SEQ ID NO: 2021
aaggcuagacuuugagaau

SEQ ID NO: 157177 - RNA, 19 nt, Artificial Sequence
  Description of Artificial Sequence: Synthetic oligonucleotide
  Antisense strand to SEQ ID NO: 157176
auucucaaagucuagccuu

SEQ ID NO: 157178 - RNA, 19 nt, Artificial Sequence
  Description of Artificial Sequence: Synthetic oligonucleotide
  Sense strand starting at position 367 of SEQ ID NO: 2021
guuaaauuccuagaagucu

SEQ ID NO: 157179 - RNA, 19 nt, Artificial Sequence
  Description of Artificial Sequence: Synthetic oligonucleotide
  Antisense strand to SEQ ID NO: 157178
agacuucuaggaauuuaac

SEQ ID NO: 157180 - RNA, 19 nt, Artificial Sequence
  Description of Artificial Sequence: Synthetic oligonucleotide
  Sense strand starting at position 463 of SEQ ID NO: 2021
cccagaaauccaggcgaaa

SEQ ID NO: 157181 - RNA, 19 nt, Artificial Sequence
  Description of Artificial Sequence: Synthetic oligonucleotide
  Antisense strand to SEQ ID NO: 157180
uuucgccuggauuucuggg

SEQ ID NO: 157182 - RNA, 19 nt, Artificial Sequence
  Description of Artificial Sequence: Synthetic oligonucleotide
  Sense strand starting at position 488 of SEQ ID NO: 2021
agaggcauccagugaagau

SEQ ID NO: 157183 - RNA, 19 nt, Artificial Sequence
  Description of Artificial Sequence: Synthetic oligonucleotide
  Antisense strand to SEQ ID NO: 157182
aucuucacuggaugccucu

SEQ ID NO: 157184 - RNA, 19 nt, Artificial Sequence
  Description of Artificial Sequence: Synthetic oligonucleotide
  Sense strand starting at position 658 of SEQ ID NO: 2021
ucuugaauacuggguauau

SEQ ID NO: 157185 - RNA, 19 nt, Artificial Sequence
  Description of Artificial Sequence: Synthetic oligonucleotide
  Antisense strand to SEQ ID NO: 157184
auauacccaguauucaaga

SEQ ID NO: 157186 - RNA, 19 nt, Artificial Sequence
  Description of Artificial Sequence: Synthetic oligonucleotide
  Sense strand starting at position 659 of SEQ ID NO: 2021
cuugaauacuggguauaug

SEQ ID NO: 157187 - RNA, 19 nt, Artificial Sequence
  Description of Artificial Sequence: Synthetic oligonucleotide
  Antisense strand to SEQ ID NO: 157186
cauauacccaguauucaag

SEQ ID NO: 157188 - RNA, 19 nt, Artificial Sequence
  Description of Artificial Sequence: Synthetic oligonucleotide
  Sense strand starting at position 676 of SEQ ID NO: 2021
ugccaaucuccggaagacu

SEQ ID NO: 157189 - RNA, 19 nt, Artificial Sequence
  Description of Artificial Sequence: Synthetic oligonucleotide
  Antisense strand to SEQ ID NO: 157188
agucuuccggagauuggca

SEQ ID NO: 157190 - RNA, 19 nt, Artificial Sequence
  Description of Artificial Sequence: Synthetic oligonucleotide
  Sense strand starting at position 684 of SEQ ID NO: 2021
uccggaagacucugggcau

SEQ ID NO: 157191 - RNA, 19 nt, Artificial Sequence
  Description of Artificial Sequence: Synthetic oligonucleotide
  Antisense strand to SEQ ID NO: 157190
augcccagagucuuccgga

SEQ ID NO: 157192 - RNA, 19 nt, Artificial Sequence
  Description of Artificial Sequence: Synthetic oligonucleotide
  Sense strand starting at position 687 of SEQ ID NO: 2021
ggaagacucugggcauuaa

SEQ ID NO: 157193 - RNA, 19 nt, Artificial Sequence
  Description of Artificial Sequence: Synthetic oligonucleotide
  Antisense strand to SEQ ID NO: 157192
uuaaugcccagagucuucc

SEQ ID NO: 157194 - RNA, 19 nt, Artificial Sequence
  Description of Artificial Sequence: Synthetic oligonucleotide
  Sense strand starting at position 909 of SEQ ID NO: 2021
gguucugagaaagggucau

SEQ ID NO: 157195 - RNA, 19 nt, Artificial Sequence
  Description of Artificial Sequence: Synthetic oligonucleotide
  Antisense strand to SEQ ID NO: 157194
augacccuuucucagaacc

SEQ ID NO: 157196 - RNA, 19 nt, Artificial Sequence
  Description of Artificial Sequence: Synthetic oligonucleotide
  Sense strand starting at position 915 of SEQ ID NO: 2021
gagaaagggucaucugcau

SEQ ID NO: 157197 - RNA, 19 nt, Artificial Sequence
  Description of Artificial Sequence: Synthetic oligonucleotide
  Antisense strand to SEQ ID NO: 157196
augcagaugacccuuucuc

SEQ ID NO: 157198 - RNA, 19 nt, Artificial Sequence
  Description of Artificial Sequence: Synthetic oligonucleotide
  Sense strand starting at position 919 of SEQ ID NO: 2021
aagggucaucugcaugagu

SEQ ID NO: 157199 - RNA, 19 nt, Artificial Sequence
  Description of Artificial Sequence: Synthetic oligonucleotide
  Antisense strand to SEQ ID NO: 157198
acucaugcagaugacccuu

SEQ ID NO: 157200 - RNA, 19 nt, Artificial Sequence
  Description of Artificial Sequence: Synthetic oligonucleotide
  Sense strand starting at position 922 of SEQ ID NO: 2021
ggucaucugcaugagugaa

SEQ ID NO: 157201 - RNA, 19 nt, Artificial Sequence
  Description of Artificial Sequence: Synthetic oligonucleotide
  Antisense strand to SEQ ID NO: 157200
uucacucaugcagaugacc

SEQ ID NO: 157202 - RNA, 19 nt, Artificial Sequence
  Description of Artificial Sequence: Synthetic oligonucleotide
  Sense strand starting at position 1041 of SEQ ID NO: 2021
gcaguugaugcuggaauaa

SEQ ID NO: 157203 - RNA, 19 nt, Artificial Sequence
  Description of Artificial Sequence: Synthetic oligonucleotide
  Antisense strand to SEQ ID NO: 157202
uuauuccagcaucaacugc

SEQ ID NO: 157204 - RNA, 19 nt, Artificial Sequence
  Description of Artificial Sequence: Synthetic oligonucleotide
  Sense strand starting at position 1058 of SEQ ID NO: 2021
aauagaagcuuuguuaggu

SEQ ID NO: 157205 - RNA, 19 nt, Artificial Sequence
  Description of Artificial Sequence: Synthetic oligonucleotide
  Antisense strand to SEQ ID NO: 157204
accuaacaaagcuucuauu

SEQ ID NO: 157206 - RNA, 19 nt, Artificial Sequence
  Description of Artificial Sequence: Synthetic oligonucleotide
  Sense strand starting at position 1379 of SEQ ID NO: 2021
ugggauucuguguagucca

SEQ ID NO: 157207 - RNA, 19 nt, Artificial Sequence
  Description of Artificial Sequence: Synthetic oligonucleotide
  Antisense strand to SEQ ID NO: 157206
uggacuacacagaauccca

SEQ ID NO: 157208 - RNA, 19 nt, Artificial Sequence
  Description of Artificial Sequence: Synthetic oligonucleotide
  Sense strand starting at position 1418 of SEQ ID NO: 2021
uggagaaguacaugaguga

SEQ ID NO: 157209 - RNA, 19 nt, Artificial Sequence
  Description of Artificial Sequence: Synthetic oligonucleotide
  Antisense strand to SEQ ID NO: 157208
ucacucauguacuucucca

SEQ ID NO: 157210 - RNA, 19 nt, Artificial Sequence
  Description of Artificial Sequence: Synthetic oligonucleotide
  Sense strand starting at position 1489 of SEQ ID NO: 2021
uggugagucaagcauuaag

SEQ ID NO: 157211 - RNA, 19 nt, Artificial Sequence
  Description of Artificial Sequence: Synthetic oligonucleotide
  Antisense strand to SEQ ID NO: 157210
cuuaaugcuugacucacca

SEQ ID NO: 157212 - RNA, 19 nt, Artificial Sequence
  Description of Artificial Sequence: Synthetic oligonucleotide
  Sense strand starting at position 1698 of SEQ ID NO: 2021
cuuacauagacgugaagac

SEQ ID NO: 157213 - RNA, 19 nt, Artificial Sequence
  Description of Artificial Sequence: Synthetic oligonucleotide
  Antisense strand to SEQ ID NO: 157212
gucuucacgucuauguaag

SEQ ID NO: 157214 - RNA, 19 nt, Artificial Sequence
  Description of Artificial Sequence: Synthetic oligonucleotide
  Sense strand starting at position 1965 of SEQ ID NO: 2021
aaagguguuccugaggugu

SEQ ID NO: 157215 - RNA, 19 nt, Artificial Sequence
  Description of Artificial Sequence: Synthetic oligonucleotide
  Antisense strand to SEQ ID NO: 157214
acaccucaggaacaccuuu

SEQ ID NO: 157216 - RNA, 19 nt, Artificial Sequence
  Description of Artificial Sequence: Synthetic oligonucleotide
  Sense strand starting at position 2009 of SEQ ID NO: 2021
cagggaggcguuuauaaau

SEQ ID NO: 157217 - RNA, 19 nt, Artificial Sequence
  Description of Artificial Sequence: Synthetic oligonucleotide
  Antisense strand to SEQ ID NO: 157216
auuuauaaacgccucccug

SEQ ID NO: 157218 - RNA, 19 nt, Artificial Sequence
  Description of Artificial Sequence: Synthetic oligonucleotide
  Sense strand starting at position 2440 of SEQ ID NO: 2021
ggaugcuugcuuugaagau

SEQ ID NO: 157219 - RNA, 19 nt, Artificial Sequence
  Description of Artificial Sequence: Synthetic oligonucleotide
  Antisense strand to SEQ ID NO: 157218
aucuucaaagcaagcaucc

SEQ ID NO: 157220 - RNA, 19 nt, Artificial Sequence
  Description of Artificial Sequence: Synthetic oligonucleotide
  Sense strand starting at position 2444 of SEQ ID NO: 2021
gcuugcuuugaagauugga

SEQ ID NO: 157221 - RNA, 19 nt, Artificial Sequence
  Description of Artificial Sequence: Synthetic oligonucleotide
  Antisense strand to SEQ ID NO: 157220
uccaaucuucaaagcaagc

SEQ ID NO: 157222 - RNA, 19 nt, Artificial Sequence
  Description of Artificial Sequence: Synthetic oligonucleotide
  Sense strand starting at position 2447 of SEQ ID NO: 2021
ugcuuugaagauuggagau

SEQ ID NO: 157223 - RNA, 19 nt, Artificial Sequence
  Description of Artificial Sequence: Synthetic oligonucleotide
  Antisense strand to SEQ ID NO: 157222
aucuccaaucuucaaagca

SEQ ID NO: 157224 - RNA, 19 nt, Artificial Sequence
  Description of Artificial Sequence: Synthetic oligonucleotide
  Sense strand starting at position 2481 of SEQ ID NO: 2021
acaguaguccucugaacac

SEQ ID NO: 157225 - RNA, 19 nt, Artificial Sequence
  Description of Artificial Sequence: Synthetic oligonucleotide
  Antisense strand to SEQ ID NO: 157224
guguucagaggacuacugu

SEQ ID NO: 157226 - RNA, 19 nt, Artificial Sequence
  Description of Artificial Sequence: Synthetic oligonucleotide
  Sense strand starting at position 2624 of SEQ ID NO: 2021
uggucuauccaucagugca

SEQ ID NO: 157227 - RNA, 19 nt, Artificial Sequence
  Description of Artificial Sequence: Synthetic oligonucleotide
  Antisense strand to SEQ ID NO: 157226
ugcacugauggauagacca

SEQ ID NO: 157228 - RNA, 19 nt, Artificial Sequence
  Description of Artificial Sequence: Synthetic oligonucleotide
  Sense strand starting at position 3135 of SEQ ID NO: 2021
ggugaaaugagcuagcuuc

SEQ ID NO: 157229 - RNA, 19 nt, Artificial Sequence
  Description of Artificial Sequence: Synthetic oligonucleotide
  Antisense strand to SEQ ID NO: 157228
gaagcuagcucauuucacc

SEQ ID NO: 157230 - RNA, 19 nt, Artificial Sequence
  Description of Artificial Sequence: Synthetic oligonucleotide
  Sense strand starting at position 3196 of SEQ ID NO: 2021
aagagugaauugucugcaa

SEQ ID NO: 157231 - RNA, 19 nt, Artificial Sequence
  Description of Artificial Sequence: Synthetic oligonucleotide
  Antisense strand to SEQ ID NO: 157230
uugcagacaauucacucuu

SEQ ID NO: 157232 - RNA, 19 nt, Artificial Sequence
  Description of Artificial Sequence: Synthetic oligonucleotide
  Sense strand starting at position 3224 of SEQ ID NO: 2021
aagggauaguuuguagaug

SEQ ID NO: 157233 - RNA, 19 nt, Artificial Sequence
  Description of Artificial Sequence: Synthetic oligonucleotide
  Antisense strand to SEQ ID NO: 157232
caucuacaaacuaucccuu

SEQ ID NO: 157234 - RNA, 19 nt, Artificial Sequence
  Description of Artificial Sequence: Synthetic oligonucleotide
  Sense strand starting at position 3279 of SEQ ID NO: 2021
cucagaguugucagggugu

SEQ ID NO: 157235 - RNA, 19 nt, Artificial Sequence
  Description of Artificial Sequence: Synthetic oligonucleotide
  Antisense strand to SEQ ID NO: 157234
acacccugacaacucugag

SEQ ID NO: 157236 - RNA, 19 nt, Artificial Sequence
  Description of Artificial Sequence: Synthetic oligonucleotide
  Sense strand starting at position 3362 of SEQ ID NO: 2021
gagggaaggaugugugcau

SEQ ID NO: 157237 - RNA, 19 nt, Artificial Sequence
  Description of Artificial Sequence: Synthetic oligonucleotide
  Antisense strand to SEQ ID NO: 157236
augcacacauccuucccuc

SEQ ID NO: 157238 - RNA, 19 nt, Artificial Sequence
  Description of Artificial Sequence: Synthetic oligonucleotide
  Sense strand starting at position 3493 of SEQ ID NO: 2021
aaugguaauuauguaugga

SEQ ID NO: 157239 - RNA, 19 nt, Artificial Sequence
  Description of Artificial Sequence: Synthetic oligonucleotide
  Antisense strand to SEQ ID NO: 157238
uccauacauaauuaccauu

SEQ ID NO: 157240 - RNA, 19 nt, Artificial Sequence
  Description of Artificial Sequence: Synthetic oligonucleotide
  Sense strand starting at position 3496 of SEQ ID NO: 2021
gguaauuauguauggaauu

SEQ ID NO: 157241 - RNA, 19 nt, Artificial Sequence
  Description of Artificial Sequence: Synthetic oligonucleotide
  Antisense strand to SEQ ID NO: 157240
aauuccauacauaauuacc

SEQ ID NO: 157242 - RNA, 19 nt, Artificial Sequence
  Description of Artificial Sequence: Synthetic oligonucleotide
  Sense strand starting at position 3688 of SEQ ID NO: 2021
gcgagaauuuguccaugca

SEQ ID NO: 157243 - RNA, 19 nt, Artificial Sequence
  Description of Artificial Sequence: Synthetic oligonucleotide
  Antisense strand to SEQ ID NO: 157242
ugcauggacaaauucucgc

SEQ ID NO: 157244 - RNA, 19 nt, Artificial Sequence
  Description of Artificial Sequence: Synthetic oligonucleotide
  Sense strand starting at position 3746 of SEQ ID NO: 2021
ucuaaacuuugcccaggaa

SEQ ID NO: 157245 - RNA, 19 nt, Artificial Sequence
  Description of Artificial Sequence: Synthetic oligonucleotide
  Antisense strand to SEQ ID NO: 157244
uuccugggcaaaguuuaga

SEQ ID NO: 157246 - RNA, 19 nt, Artificial Sequence
  Description of Artificial Sequence: Synthetic oligonucleotide
  Sense strand starting at position 3870 of SEQ ID NO: 2021
ggaaucuucugguuguaug

SEQ ID NO: 157247 - RNA, 19 nt, Artificial Sequence
  Description of Artificial Sequence: Synthetic oligonucleotide
  Antisense strand to SEQ ID NO: 157246
cauacaaccagaagauucc

SEQ ID NO: 157248 - RNA, 19 nt, Artificial Sequence
  Description of Artificial Sequence: Synthetic oligonucleotide
  Sense strand starting at position 3887 of SEQ ID NO: 2021
uguccuuuagggcagagaa

SEQ ID NO: 157249 - RNA, 19 nt, Artificial Sequence
  Description of Artificial Sequence: Synthetic oligonucleotide
  Antisense strand to SEQ ID NO: 157248
uucucugcccuaaaggaca

SEQ ID NO: 157250 - RNA, 19 nt, Artificial Sequence
  Description of Artificial Sequence: Synthetic oligonucleotide
  Sense strand starting at position 3212 of SEQ ID NO: 2022
aagacauucuggcuuguuu

SEQ ID NO: 157251 - RNA, 19 nt, Artificial Sequence
  Description of Artificial Sequence: Synthetic oligonucleotide
  Antisense strand to SEQ ID NO: 157250
aaacaagccagaaugucuu

SEQ ID NO: 157252 - RNA, 19 nt, Artificial Sequence
  Description of Artificial Sequence: Synthetic oligonucleotide
  Sense strand starting at position 3123 of SEQ ID NO: 2022
auguucugcgguuacaagu

SEQ ID NO: 157253 - RNA, 19 nt, Artificial Sequence
  Description of Artificial Sequence: Synthetic oligonucleotide
  Antisense strand to SEQ ID NO: 157252
acuuguaaccgcagaacau

SEQ ID NO: 157254 - RNA, 19 nt, Artificial Sequence
  Description of Artificial Sequence: Synthetic oligonucleotide
  Sense strand starting at position 2995 of SEQ ID NO: 2022
ugguucugcauagacagau

SEQ ID NO: 157255 - RNA, 19 nt, Artificial Sequence
  Description of Artificial Sequence: Synthetic oligonucleotide
  Antisense strand to SEQ ID NO: 157254
aucugucuaugcagaacca

SEQ ID NO: 157256 - RNA, 19 nt, Artificial Sequence
  Description of Artificial Sequence: Synthetic oligonucleotide
  Sense strand starting at position 2993 of SEQ ID NO: 2022
gaugguucugcauagacag

SEQ ID NO: 157257 - RNA, 19 nt, Artificial Sequence
  Description of Artificial Sequence: Synthetic oligonucleotide
  Antisense strand to SEQ ID NO: 157256
cugucuaugcagaaccauc

SEQ ID NO: 157258 - RNA, 19 nt, Artificial Sequence
  Description of Artificial Sequence: Synthetic oligonucleotide
  Sense strand starting at position 2948 of SEQ ID NO: 2022
cuuguuucuugagaaauga

SEQ ID NO: 157259 - RNA, 19 nt, Artificial Sequence
  Description of Artificial Sequence: Synthetic oligonucleotide
  Antisense strand to SEQ ID NO: 157258
ucauuucucaagaaacaag

SEQ ID NO: 157260 - RNA, 19 nt, Artificial Sequence
  Description of Artificial Sequence: Synthetic oligonucleotide
  Sense strand starting at position 2944 of SEQ ID NO: 2022
gcaucuuguuucuugagaa

SEQ ID NO: 157261 - RNA, 19 nt, Artificial Sequence
  Description of Artificial Sequence: Synthetic oligonucleotide
  Antisense strand to SEQ ID NO: 157260
uucucaagaaacaagaugc

SEQ ID NO: 157262 - RNA, 19 nt, Artificial Sequence
  Description of Artificial Sequence: Synthetic oligonucleotide
  Sense strand starting at position 2941 of SEQ ID NO: 2022
gaagcaucuuguuucuuga

SEQ ID NO: 157263 - RNA, 19 nt, Artificial Sequence
  Description of Artificial Sequence: Synthetic oligonucleotide
  Antisense strand to SEQ ID NO: 157262
ucaagaaacaagaugcuuc

SEQ ID NO: 157264 - RNA, 19 nt, Artificial Sequence
  Description of Artificial Sequence: Synthetic oligonucleotide
  Sense strand starting at position 2831 of SEQ ID NO: 2022
uacaguugucccuggagac

SEQ ID NO: 157265 - RNA, 19 nt, Artificial Sequence
  Description of Artificial Sequence: Synthetic oligonucleotide
  Antisense strand to SEQ ID NO: 157264
gucuccagggacaacugua

SEQ ID NO: 157266 - RNA, 19 nt, Artificial Sequence
  Description of Artificial Sequence: Synthetic oligonucleotide
  Sense strand starting at position 2551 of SEQ ID NO: 2022
ccuccagugguuuagacuu

SEQ ID NO: 157267 - RNA, 19 nt, Artificial Sequence
  Description of Artificial Sequence: Synthetic oligonucleotide
  Antisense strand to SEQ ID NO: 157266
aagucuaaaccacuggagg

SEQ ID NO: 157268 - RNA, 19 nt, Artificial Sequence
  Description of Artificial Sequence: Synthetic oligonucleotide
  Sense strand starting at position 2546 of SEQ ID NO: 2022
agaagccuccagugguuua

SEQ ID NO: 157269 - RNA, 19 nt, Artificial Sequence
  Description of Artificial Sequence: Synthetic oligonucleotide
  Antisense strand to SEQ ID NO: 157268
uaaaccacuggaggcuucu

SEQ ID NO: 157270 - RNA, 19 nt, Artificial Sequence
  Description of Artificial Sequence: Synthetic oligonucleotide
  Sense strand starting at position 2315 of SEQ ID NO: 2022
cccauuugguucugcaagu

SEQ ID NO: 157271 - RNA, 19 nt, Artificial Sequence
  Description of Artificial Sequence: Synthetic oligonucleotide
  Antisense strand to SEQ ID NO: 157270
acuugcagaaccaaauggg

SEQ ID NO: 157272 - RNA, 19 nt, Artificial Sequence
  Description of Artificial Sequence: Synthetic oligonucleotide
  Sense strand starting at position 2169 of SEQ ID NO: 2022
gguuuaggcaucuggcuaa

SEQ ID NO: 157273 - RNA, 19 nt, Artificial Sequence
  Description of Artificial Sequence: Synthetic oligonucleotide
  Antisense strand to SEQ ID NO: 157272
uuagccagaugccuaaacc

SEQ ID NO: 157274 - RNA, 19 nt, Artificial Sequence
  Description of Artificial Sequence: Synthetic oligonucleotide
  Sense strand starting at position 2138 of SEQ ID NO: 2022
ucugucuucuaaguuguuu

SEQ ID NO: 157275 - RNA, 19 nt, Artificial Sequence
  Description of Artificial Sequence: Synthetic oligonucleotide
  Antisense strand to SEQ ID NO: 157274
aaacaacuuagaagacaga

SEQ ID NO: 157276 - RNA, 19 nt, Artificial Sequence
  Description of Artificial Sequence: Synthetic oligonucleotide
  Sense strand starting at position 2133 of SEQ ID NO: 2022
uuaugucugucuucuaagu

SEQ ID NO: 157277 - RNA, 19 nt, Artificial Sequence
  Description of Artificial Sequence: Synthetic oligonucleotide
  Antisense strand to SEQ ID NO: 157276
acuuagaagacagacauaa

SEQ ID NO: 157278 - RNA, 19 nt, Artificial Sequence
  Description of Artificial Sequence: Synthetic oligonucleotide
  Sense strand starting at position 2131 of SEQ ID NO: 2022
gguuaugucugucuucuaa

SEQ ID NO: 157279 - RNA, 19 nt, Artificial Sequence
  Description of Artificial Sequence: Synthetic oligonucleotide
  Antisense strand to SEQ ID NO: 157278
uuagaagacagacauaacc

SEQ ID NO: 157280 - RNA, 19 nt, Artificial Sequence
  Description of Artificial Sequence: Synthetic oligonucleotide
  Sense strand starting at position 2119 of SEQ ID NO: 2022
ccugaaucccaggguuaug

SEQ ID NO: 157281 - RNA, 19 nt, Artificial Sequence
  Description of Artificial Sequence: Synthetic oligonucleotide
  Antisense strand to SEQ ID NO: 157280
cauaacccugggauucagg

SEQ ID NO: 157282 - RNA, 19 nt, Artificial Sequence
  Description of Artificial Sequence: Synthetic oligonucleotide
  Sense strand starting at position 2118 of SEQ ID NO: 2022
cccugaaucccaggguuau

SEQ ID NO: 157283 - RNA, 19 nt, Artificial Sequence
  Description of Artificial Sequence: Synthetic oligonucleotide
  Antisense strand to SEQ ID NO: 157282
auaacccugggauucaggg

SEQ ID NO: 157284 - RNA, 19 nt, Artificial Sequence
  Description of Artificial Sequence: Synthetic oligonucleotide
  Sense strand starting at position 1097 of SEQ ID NO: 2022
ccgccuuagucaguucgga

SEQ ID NO: 157285 - RNA, 19 nt, Artificial Sequence
  Description of Artificial Sequence: Synthetic oligonucleotide
  Antisense strand to SEQ ID NO: 157284
uccgaacugacuaaggcgg

SEQ ID NO: 157286 - RNA, 19 nt, Artificial Sequence
  Description of Artificial Sequence: Synthetic oligonucleotide
  Sense strand starting at position 1013 of SEQ ID NO: 2022
aagggauagucggcuucuu

SEQ ID NO: 157287 - RNA, 19 nt, Artificial Sequence
  Description of Artificial Sequence: Synthetic oligonucleotide
  Antisense strand to SEQ ID NO: 157286
aagaagccgacuaucccuu

SEQ ID NO: 157288 - RNA, 19 nt, Artificial Sequence
  Description of Artificial Sequence: Synthetic oligonucleotide
  Sense strand starting at position 878 of SEQ ID NO: 2022
ggugaaggguauggacauu

SEQ ID NO: 157289 - RNA, 19 nt, Artificial Sequence
  Description of Artificial Sequence: Synthetic oligonucleotide
  Antisense strand to SEQ ID NO: 157288
aauguccauacccuucacc

SEQ ID NO: 157290 - RNA, 19 nt, Artificial Sequence
  Description of Artificial Sequence: Synthetic oligonucleotide
  Sense strand starting at position 877 of SEQ ID NO: 2022
gggugaaggguauggacau

SEQ ID NO: 157291 - RNA, 19 nt, Artificial Sequence
  Description of Artificial Sequence: Synthetic oligonucleotide
  Antisense strand to SEQ ID NO: 157290
auguccauacccuucaccc

SEQ ID NO: 157292 - RNA, 19 nt, Artificial Sequence
  Description of Artificial Sequence: Synthetic oligonucleotide
  Sense strand starting at position 858 of SEQ ID NO: 2022
ccacacugcucuuggauga

SEQ ID NO: 157293 - RNA, 19 nt, Artificial Sequence
  Description of Artificial Sequence: Synthetic oligonucleotide
  Antisense strand to SEQ ID NO: 157292
ucauccaagagcagugugg

SEQ ID NO: 157294 - RNA, 19 nt, Artificial Sequence
  Description of Artificial Sequence: Synthetic oligonucleotide
  Sense strand starting at position 491 of SEQ ID NO: 2022
ggaguggucugggagcaga

SEQ ID NO: 157295 - RNA, 19 nt, Artificial Sequence
  Description of Artificial Sequence: Synthetic oligonucleotide
  Antisense strand to SEQ ID NO: 157294
ucugcucccagaccacucc

SEQ ID NO: 157296 - RNA, 19 nt, Artificial Sequence
  Description of Artificial Sequence: Synthetic oligonucleotide
  Sense strand starting at position 358 of SEQ ID NO: 2022
caggcuguccuggaaauau

SEQ ID NO: 157297 - RNA, 19 nt, Artificial Sequence
  Description of Artificial Sequence: Synthetic oligonucleotide
  Antisense strand to SEQ ID NO: 157296
auauuuccaggacagccug

SEQ ID NO: 157298 - RNA, 19 nt, Artificial Sequence
  Description of Artificial Sequence: Synthetic oligonucleotide
  Sense strand starting at position 242 of SEQ ID NO: 2022
gcaguuaugggacgaucag

SEQ ID NO: 157299 - RNA, 19 nt, Artificial Sequence
  Description of Artificial Sequence: Synthetic oligonucleotide
  Antisense strand to SEQ ID NO: 157298
cugaucgucccauaacugc

SEQ ID NO: 157300 - RNA, 19 nt, Artificial Sequence
  Description of Artificial Sequence: Synthetic oligonucleotide
  Sense strand starting at position 239 of SEQ ID NO: 2022
guggcaguuaugggacgau

SEQ ID NO: 157301 - RNA, 19 nt, Artificial Sequence
  Description of Artificial Sequence: Synthetic oligonucleotide
  Antisense strand to SEQ ID NO: 157300
aucgucccauaacugccac

SEQ ID NO: 157302 - RNA, 19 nt, Artificial Sequence
  Description of Artificial Sequence: Synthetic oligonucleotide
  Sense strand starting at position 28 of SEQ ID NO: 2022
augucuacuggaugaauua

SEQ ID NO: 157303 - RNA, 19 nt, Artificial Sequence
  Description of Artificial Sequence: Synthetic oligonucleotide
  Antisense strand to SEQ ID NO: 157302
uaauucauccaguagacau

SEQ ID NO: 157304 - RNA, 19 nt, Artificial Sequence
  Description of Artificial Sequence: Synthetic oligonucleotide
  Sense strand starting at position 10 of SEQ ID NO: 2022
auaguacgugcuuaauaaa

SEQ ID NO: 157305 - RNA, 19 nt, Artificial Sequence
  Description of Artificial Sequence: Synthetic oligonucleotide
  Antisense strand to SEQ ID NO: 157304
uuuauuaagcacguacuau

SEQ ID NO: 157306 - RNA, 19 nt, Artificial Sequence
  Description of Artificial Sequence: Synthetic oligonucleotide
  Sense strand starting at position 9 of SEQ ID NO: 2022
cauaguacgugcuuaauaa

SEQ ID NO: 157307 - RNA, 19 nt, Artificial Sequence
  Description of Artificial Sequence: Synthetic oligonucleotide
  Antisense strand to SEQ ID NO: 157306
uuauuaagcacguacuaug

SEQ ID NO: 157308 - RNA, 19 nt, Artificial Sequence
  Description of Artificial Sequence: Synthetic oligonucleotide
  Sense strand starting at position 27 of SEQ ID NO: 2023
agaagagcuucucacugaa

SEQ ID NO: 157309 - RNA, 19 nt, Artificial Sequence
  Description of Artificial Sequence: Synthetic oligonucleotide
  Antisense strand to SEQ ID NO: 157308
uucagugagaagcucuucu

SEQ ID NO: 157310 - RNA, 19 nt, Artificial Sequence
  Description of Artificial Sequence: Synthetic oligonucleotide
  Sense strand starting at position 30 of SEQ ID NO: 2023
agagcuucucacugaacuu

SEQ ID NO: 157311 - RNA, 19 nt, Artificial Sequence
  Description of Artificial Sequence: Synthetic oligonucleotide
  Antisense strand to SEQ ID NO: 157310
aaguucagugagaagcucu

SEQ ID NO: 157312 - RNA, 19 nt, Artificial Sequence
  Description of Artificial Sequence: Synthetic oligonucleotide
  Sense strand starting at position 149 of SEQ ID NO: 2023
ugaaccaagucgucuggau

SEQ ID NO: 157313 - RNA, 19 nt, Artificial Sequence
  Description of Artificial Sequence: Synthetic oligonucleotide
  Antisense strand to SEQ ID NO: 157312
auccagacgacuugguuca

SEQ ID NO: 157314 - RNA, 19 nt, Artificial Sequence
  Description of Artificial Sequence: Synthetic oligonucleotide
  Sense strand starting at position 298 of SEQ ID NO: 2023
ccgcgucccagcuaagaaa

SEQ ID NO: 157315 - RNA, 19 nt, Artificial Sequence
  Description of Artificial Sequence: Synthetic oligonucleotide
  Antisense strand to SEQ ID NO: 157314
uuucuuagcugggacgcgg

SEQ ID NO: 157316 - RNA, 19 nt, Artificial Sequence
  Description of Artificial Sequence: Synthetic oligonucleotide
  Sense strand starting at position 564 of SEQ ID NO: 2023
aaauccuaucuagggaguu

SEQ ID NO: 157317 - RNA, 19 nt, Artificial Sequence
  Description of Artificial Sequence: Synthetic oligonucleotide
  Antisense strand to SEQ ID NO: 157316
aacucccuagauaggauuu

SEQ ID NO: 157318 - RNA, 19 nt, Artificial Sequence
  Description of Artificial Sequence: Synthetic oligonucleotide
  Sense strand starting at position 629 of SEQ ID NO: 2023
gcgcgcuucccgcuagacu

SEQ ID NO: 157319 - RNA, 19 nt, Artificial Sequence
  Description of Artificial Sequence: Synthetic oligonucleotide
  Antisense strand to SEQ ID NO: 157318
agucuagcgggaagcgcgc

SEQ ID NO: 157320 - RNA, 19 nt, Artificial Sequence
  Description of Artificial Sequence: Synthetic oligonucleotide
  Sense strand starting at position 735 of SEQ ID NO: 2023
ggaacacaucuccgcgaga

SEQ ID NO: 157321 - RNA, 19 nt, Artificial Sequence
  Description of Artificial Sequence: Synthetic oligonucleotide
  Antisense strand to SEQ ID NO: 157320
ucucgcggagauguguucc

SEQ ID NO: 157322 - RNA, 19 nt, Artificial Sequence
  Description of Artificial Sequence: Synthetic oligonucleotide
  Sense strand starting at position 737 of SEQ ID NO: 2023
aacacaucuccgcgagacu

SEQ ID NO: 157323 - RNA, 19 nt, Artificial Sequence
  Description of Artificial Sequence: Synthetic oligonucleotide
  Antisense strand to SEQ ID NO: 157322
agucucgcggagauguguu

SEQ ID NO: 157324 - RNA, 19 nt, Artificial Sequence
  Description of Artificial Sequence: Synthetic oligonucleotide
  Sense strand starting at position 1708 of SEQ ID NO: 2023
gaccguagcguuuauagga

SEQ ID NO: 157325 - RNA, 19 nt, Artificial Sequence
  Description of Artificial Sequence: Synthetic oligonucleotide
  Antisense strand to SEQ ID NO: 157324
uccuauaaacgcuacgguc

SEQ ID NO: 157326 - RNA, 19 nt, Artificial Sequence
  Description of Artificial Sequence: Synthetic oligonucleotide
  Sense strand starting at position 2405 of SEQ ID NO: 2023
agucuauggugaccuguaa

SEQ ID NO: 157327 - RNA, 19 nt, Artificial Sequence
  Description of Artificial Sequence: Synthetic oligonucleotide
  Antisense strand to SEQ ID NO: 157326
uuacaggucaccauagacu

SEQ ID NO: 157328 - RNA, 19 nt, Artificial Sequence
  Description of Artificial Sequence: Synthetic oligonucleotide
  Sense strand starting at position 2409 of SEQ ID NO: 2023
uauggugaccuguaagugu

SEQ ID NO: 157329 - RNA, 19 nt, Artificial Sequence
  Description of Artificial Sequence: Synthetic oligonucleotide
  Antisense strand to SEQ ID NO: 157328
acacuuacaggucaccaua

SEQ ID NO: 157330 - RNA, 19 nt, Artificial Sequence
  Description of Artificial Sequence: Synthetic oligonucleotide
  Sense strand starting at position 2413 of SEQ ID NO: 2023
gugaccuguaaguguggaa

SEQ ID NO: 157331 - RNA, 19 nt, Artificial Sequence
  Description of Artificial Sequence: Synthetic oligonucleotide
  Antisense strand to SEQ ID NO: 157330
uuccacacuuacaggucac

SEQ ID NO: 157332 - RNA, 19 nt, Artificial Sequence
  Description of Artificial Sequence: Synthetic oligonucleotide
  Sense strand starting at position 2447 of SEQ ID NO: 2023
cuaacugacugacaugaua

SEQ ID NO: 157333 - RNA, 19 nt, Artificial Sequence
  Description of Artificial Sequence: Synthetic oligonucleotide
  Antisense strand to SEQ ID NO: 157332
uaucaugucagucaguuag

SEQ ID NO: 157334 - RNA, 19 nt, Artificial Sequence
  Description of Artificial Sequence: Synthetic oligonucleotide
  Sense strand starting at position 2455 of SEQ ID NO: 2023
cugacaugauaggacauua

SEQ ID NO: 157335 - RNA, 19 nt, Artificial Sequence
  Description of Artificial Sequence: Synthetic oligonucleotide
  Antisense strand to SEQ ID NO: 157334
uaauguccuaucaugucag

SEQ ID NO: 157336 - RNA, 19 nt, Artificial Sequence
  Description of Artificial Sequence: Synthetic oligonucleotide
  Sense strand starting at position 2478 of SEQ ID NO: 2023
caugauagaccucggguuu

SEQ ID NO: 157337 - RNA, 19 nt, Artificial Sequence
  Description of Artificial Sequence: Synthetic oligonucleotide
  Antisense strand to SEQ ID NO: 157336
aaacccgaggucuaucaug

SEQ ID NO: 157338 - RNA, 19 nt, Artificial Sequence
  Description of Artificial Sequence: Synthetic oligonucleotide
  Sense strand starting at position 2868 of SEQ ID NO: 2023
ggccgaggcugucuucuua

SEQ ID NO: 157339 - RNA, 19 nt, Artificial Sequence
  Description of Artificial Sequence: Synthetic oligonucleotide
  Antisense strand to SEQ ID NO: 157338
uaagaagacagccucggcc

SEQ ID NO: 157340 - RNA, 19 nt, Artificial Sequence
  Description of Artificial Sequence: Synthetic oligonucleotide
  Sense strand starting at position 2872 of SEQ ID NO: 2023
gaggcugucuucuuaugag

SEQ ID NO: 157341 - RNA, 19 nt, Artificial Sequence
  Description of Artificial Sequence: Synthetic oligonucleotide
  Antisense strand to SEQ ID NO: 157340
cucauaagaagacagccuc

SEQ ID NO: 157342 - RNA, 19 nt, Artificial Sequence
  Description of Artificial Sequence: Synthetic oligonucleotide
  Sense strand starting at position 2878 of SEQ ID NO: 2023
gucuucuuaugaguaaaug

SEQ ID NO: 157343 - RNA, 19 nt, Artificial Sequence
  Description of Artificial Sequence: Synthetic oligonucleotide
  Antisense strand to SEQ ID NO: 157342
cauuuacucauaagaagac

SEQ ID NO: 157344 - RNA, 19 nt, Artificial Sequence
  Description of Artificial Sequence: Synthetic oligonucleotide
  Sense strand starting at position 2915 of SEQ ID NO: 2023
cauugcuaucaggagaggu

SEQ ID NO: 157345 - RNA, 19 nt, Artificial Sequence
  Description of Artificial Sequence: Synthetic oligonucleotide
  Antisense strand to SEQ ID NO: 157344
accucuccugauagcaaug

SEQ ID NO: 157346 - RNA, 19 nt, Artificial Sequence
  Description of Artificial Sequence: Synthetic oligonucleotide
  Sense strand starting at position 2930 of SEQ ID NO: 2023
aggugcaauuuccagauaa

SEQ ID NO: 157347 - RNA, 19 nt, Artificial Sequence
  Description of Artificial Sequence: Synthetic oligonucleotide
  Antisense strand to SEQ ID NO: 157346
uuaucuggaaauugcaccu

SEQ ID NO: 157348 - RNA, 19 nt, Artificial Sequence
  Description of Artificial Sequence: Synthetic oligonucleotide
  Sense strand starting at position 2943 of SEQ ID NO: 2023
agauaagcucaugaagugu

SEQ ID NO: 157349 - RNA, 19 nt, Artificial Sequence
  Description of Artificial Sequence: Synthetic oligonucleotide
  Antisense strand to SEQ ID NO: 157348
acacuucaugagcuuaucu

SEQ ID NO: 157350 - RNA, 19 nt, Artificial Sequence
  Description of Artificial Sequence: Synthetic oligonucleotide
  Sense strand starting at position 2951 of SEQ ID NO: 2023
ucaugaaguguuuagcaug

SEQ ID NO: 157351 - RNA, 19 nt, Artificial Sequence
  Description of Artificial Sequence: Synthetic oligonucleotide
  Antisense strand to SEQ ID NO: 157350
caugcuaaacacuucauga

SEQ ID NO: 157352 - RNA, 19 nt, Artificial Sequence
  Description of Artificial Sequence: Synthetic oligonucleotide
  Sense strand starting at position 2956 of SEQ ID NO: 2023
aaguguuuagcauggaagu

SEQ ID NO: 157353 - RNA, 19 nt, Artificial Sequence
  Description of Artificial Sequence: Synthetic oligonucleotide
  Antisense strand to SEQ ID NO: 157352
acuuccaugcuaaacacuu

SEQ ID NO: 157354 - RNA, 19 nt, Artificial Sequence
  Description of Artificial Sequence: Synthetic oligonucleotide
  Sense strand starting at position 2957 of SEQ ID NO: 2023
aguguuuagcauggaaguu

SEQ ID NO: 157355 - RNA, 19 nt, Artificial Sequence
  Description of Artificial Sequence: Synthetic oligonucleotide
  Antisense strand to SEQ ID NO: 157354
aacuuccaugcuaaacacu

SEQ ID NO: 157356 - RNA, 19 nt, Artificial Sequence
  Description of Artificial Sequence: Synthetic oligonucleotide
  Sense strand starting at position 2990 of SEQ ID NO: 2023
ggugguauuguugguuuau

SEQ ID NO: 157357 - RNA, 19 nt, Artificial Sequence
  Description of Artificial Sequence: Synthetic oligonucleotide
  Antisense strand to SEQ ID NO: 157356
auaaaccaacaauaccacc

SEQ ID NO: 157358 - RNA, 19 nt, Artificial Sequence
  Description of Artificial Sequence: Synthetic oligonucleotide
  Sense strand starting at position 2991 of SEQ ID NO: 2023
gugguauuguugguuuauu

SEQ ID NO: 157359 - RNA, 19 nt, Artificial Sequence
  Description of Artificial Sequence: Synthetic oligonucleotide
  Antisense strand to SEQ ID NO: 157358
aauaaaccaacaauaccac

SEQ ID NO: 157360 - RNA, 19 nt, Artificial Sequence
  Description of Artificial Sequence: Synthetic oligonucleotide
  Sense strand starting at position 2992 of SEQ ID NO: 2023
ugguauuguugguuuauuu

SEQ ID NO: 157361 - RNA, 19 nt, Artificial Sequence
  Description of Artificial Sequence: Synthetic oligonucleotide
  Antisense strand to SEQ ID NO: 157360
aaauaaaccaacaauacca

SEQ ID NO: 157362 - RNA, 19 nt, Artificial Sequence
  Description of Artificial Sequence: Synthetic oligonucleotide
  Sense strand starting at position 3164 of SEQ ID NO: 2023
agaccagugccuuacuuga

SEQ ID NO: 157363 - RNA, 19 nt, Artificial Sequence
  Description of Artificial Sequence: Synthetic oligonucleotide
  Antisense strand to SEQ ID NO: 157362
ucaaguaaggcacuggucu

SEQ ID NO: 157364 - RNA, 19 nt, Artificial Sequence
  Description of Artificial Sequence: Synthetic oligonucleotide
  Sense strand starting at position 3166 of SEQ ID NO: 2023
accagugccuuacuugaga

SEQ ID NO: 157365 - RNA, 19 nt, Artificial Sequence
  Description of Artificial Sequence: Synthetic oligonucleotide
  Antisense strand to SEQ ID NO: 157364
ucucaaguaaggcacuggu

SEQ ID NO: 157366 - RNA, 19 nt, Artificial Sequence
  Description of Artificial Sequence: Synthetic oligonucleotide
  Sense strand starting at position 3207 of SEQ ID NO: 2023
aguccaaaggucugaucaa

SEQ ID NO: 157367 - RNA, 19 nt, Artificial Sequence
  Description of Artificial Sequence: Synthetic oligonucleotide
  Antisense strand to SEQ ID NO: 157366
uugaucagaccuuuggacu

SEQ ID NO: 157368 - RNA, 19 nt, Artificial Sequence
  Description of Artificial Sequence: Synthetic oligonucleotide
  Sense strand starting at position 3253 of SEQ ID NO: 2023
gggagucauggugggcuua

SEQ ID NO: 157369 - RNA, 19 nt, Artificial Sequence
  Description of Artificial Sequence: Synthetic oligonucleotide
  Antisense strand to SEQ ID NO: 157368
uaagcccaccaugacuccc

SEQ ID NO: 157370 - RNA, 19 nt, Artificial Sequence
  Description of Artificial Sequence: Synthetic oligonucleotide
  Sense strand starting at position 3255 of SEQ ID NO: 2023
gagucauggugggcuuacu

SEQ ID NO: 157371 - RNA, 19 nt, Artificial Sequence
  Description of Artificial Sequence: Synthetic oligonucleotide
  Antisense strand to SEQ ID NO: 157370
aguaagcccaccaugacuc

SEQ ID NO: 157372 - RNA, 19 nt, Artificial Sequence
  Description of Artificial Sequence: Synthetic oligonucleotide
  Sense strand starting at position 3265 of SEQ ID NO: 2023
gggcuuacugucugucgga

SEQ ID NO: 157373 - RNA, 19 nt, Artificial Sequence
  Description of Artificial Sequence: Synthetic oligonucleotide
  Antisense strand to SEQ ID NO: 157372
uccgacagacaguaagccc

SEQ ID NO: 157374 - RNA, 19 nt, Artificial Sequence
  Description of Artificial Sequence: Synthetic oligonucleotide
  Sense strand starting at position 3266 of SEQ ID NO: 2023
ggcuuacugucugucggaa

SEQ ID NO: 157375 - RNA, 19 nt, Artificial Sequence
  Description of Artificial Sequence: Synthetic oligonucleotide
  Antisense strand to SEQ ID NO: 157374
uuccgacagacaguaagcc

SEQ ID NO: 157376 - RNA, 19 nt, Artificial Sequence
  Description of Artificial Sequence: Synthetic oligonucleotide
  Sense strand starting at position 3313 of SEQ ID NO: 2023
ccuggaguucucuggcaau

SEQ ID NO: 157377 - RNA, 19 nt, Artificial Sequence
  Description of Artificial Sequence: Synthetic oligonucleotide
  Antisense strand to SEQ ID NO: 157376
auugccagagaacuccagg

SEQ ID NO: 157378 - RNA, 19 nt, Artificial Sequence
  Description of Artificial Sequence: Synthetic oligonucleotide
  Sense strand starting at position 3610 of SEQ ID NO: 2023
cugcucaucugucugaaau

SEQ ID NO: 157379 - RNA, 19 nt, Artificial Sequence
  Description of Artificial Sequence: Synthetic oligonucleotide
  Antisense strand to SEQ ID NO: 157378
auuucagacagaugagcag

SEQ ID NO: 157380 - RNA, 19 nt, Artificial Sequence
  Description of Artificial Sequence: Synthetic oligonucleotide
  Sense strand starting at position 3611 of SEQ ID NO: 2023
ugcucaucugucugaaauu

SEQ ID NO: 157381 - RNA, 19 nt, Artificial Sequence
  Description of Artificial Sequence: Synthetic oligonucleotide
  Antisense strand to SEQ ID NO: 157380
aauuucagacagaugagca

SEQ ID NO: 157382 - RNA, 19 nt, Artificial Sequence
  Description of Artificial Sequence: Synthetic oligonucleotide
  Sense strand starting at position 3626 of SEQ ID NO: 2023
aauugucauggagggagua

SEQ ID NO: 157383 - RNA, 19 nt, Artificial Sequence
  Description of Artificial Sequence: Synthetic oligonucleotide
  Antisense strand to SEQ ID NO: 157382
uacucccuccaugacaauu

SEQ ID NO: 157384 - RNA, 19 nt, Artificial Sequence
  Description of Artificial Sequence: Synthetic oligonucleotide
  Sense strand starting at position 3829 of SEQ ID NO: 2023
gguucucccaaguggaaau

SEQ ID NO: 157385 - RNA, 19 nt, Artificial Sequence
  Description of Artificial Sequence: Synthetic oligonucleotide
  Antisense strand to SEQ ID NO: 157384
auuuccacuugggagaacc

SEQ ID NO: 157386 - RNA, 19 nt, Artificial Sequence
  Description of Artificial Sequence: Synthetic oligonucleotide
  Sense strand starting at position 3840 of SEQ ID NO: 2023
guggaaaucuuucucuccu

SEQ ID NO: 157387 - RNA, 19 nt, Artificial Sequence
  Description of Artificial Sequence: Synthetic oligonucleotide
  Antisense strand to SEQ ID NO: 157386
aggagagaaagauuuccac

SEQ ID NO: 157388 - RNA, 19 nt, Artificial Sequence
  Description of Artificial Sequence: Synthetic oligonucleotide
  Sense strand starting at position 3 of SEQ ID NO: 2024
gccagugccaaauggaaau

SEQ ID NO: 157389 - RNA, 19 nt, Artificial Sequence
  Description of Artificial Sequence: Synthetic oligonucleotide
  Antisense strand to SEQ ID NO: 157388
auuuccauuuggcacuggc

SEQ ID NO: 157390 - RNA, 19 nt, Artificial Sequence
  Description of Artificial Sequence: Synthetic oligonucleotide
  Sense strand starting at position 1019 of SEQ ID NO: 2024
ugcuauugugaugaauaaa

SEQ ID NO: 157391 - RNA, 19 nt, Artificial Sequence
  Description of Artificial Sequence: Synthetic oligonucleotide
  Antisense strand to SEQ ID NO: 157390
uuuauucaucacaauagca

SEQ ID NO: 157392 - RNA, 19 nt, Artificial Sequence
  Description of Artificial Sequence: Synthetic oligonucleotide
  Sense strand starting at position 1054 of SEQ ID NO: 2024
guguuaauaagucaguguu

SEQ ID NO: 157393 - RNA, 19 nt, Artificial Sequence
  Description of Artificial Sequence: Synthetic oligonucleotide
  Antisense strand to SEQ ID NO: 157392
aacacugacuuauuaacac

SEQ ID NO: 157394 - RNA, 19 nt, Artificial Sequence
  Description of Artificial Sequence: Synthetic oligonucleotide
  Sense strand starting at position 1056 of SEQ ID NO: 2024
guuaauaagucaguguuac

SEQ ID NO: 157395 - RNA, 19 nt, Artificial Sequence
  Description of Artificial Sequence: Synthetic oligonucleotide
  Antisense strand to SEQ ID NO: 157394
guaacacugacuuauuaac

SEQ ID NO: 157396 - RNA, 19 nt, Artificial Sequence
  Description of Artificial Sequence: Synthetic oligonucleotide
  Sense strand starting at position 1057 of SEQ ID NO: 2024
uuaauaagucaguguuacu

SEQ ID NO: 157397 - RNA, 19 nt, Artificial Sequence
  Description of Artificial Sequence: Synthetic oligonucleotide
  Antisense strand to SEQ ID NO: 157396
aguaacacugacuuauuaa

SEQ ID NO: 157398 - RNA, 19 nt, Artificial Sequence
  Description of Artificial Sequence: Synthetic oligonucleotide
  Sense strand starting at position 1134 of SEQ ID NO: 2024
guugcaggaguccaugaaa

SEQ ID NO: 157399 - RNA, 19 nt, Artificial Sequence
  Description of Artificial Sequence: Synthetic oligonucleotide
  Antisense strand to SEQ ID NO: 157398
uuucauggacuccugcaac

SEQ ID NO: 157400 - RNA, 19 nt, Artificial Sequence
  Description of Artificial Sequence: Synthetic oligonucleotide
  Sense strand starting at position 1194 of SEQ ID NO: 2024
gcaggaaaccuacgugaca

SEQ ID NO: 157401 - RNA, 19 nt, Artificial Sequence
  Description of Artificial Sequence: Synthetic oligonucleotide
  Antisense strand to SEQ ID NO: 157400
ugucacguagguuuccugc

SEQ ID NO: 157402 - RNA, 19 nt, Artificial Sequence
  Description of Artificial Sequence: Synthetic oligonucleotide
  Sense strand starting at position 1196 of SEQ ID NO: 2024
aggaaaccuacgugacaga

SEQ ID NO: 157403 - RNA, 19 nt, Artificial Sequence
  Description of Artificial Sequence: Synthetic oligonucleotide
  Antisense strand to SEQ ID NO: 157402
ucugucacguagguuuccu

SEQ ID NO: 157404 - RNA, 19 nt, Artificial Sequence
  Description of Artificial Sequence: Synthetic oligonucleotide
  Sense strand starting at position 1205 of SEQ ID NO: 2024
acgugacagaucugaacua

SEQ ID NO: 157405 - RNA, 19 nt, Artificial Sequence
  Description of Artificial Sequence: Synthetic oligonucleotide
  Antisense strand to SEQ ID NO: 157404
uaguucagaucugucacgu

SEQ ID NO: 157406 - RNA, 19 nt, Artificial Sequence
  Description of Artificial Sequence: Synthetic oligonucleotide
  Sense strand starting at position 1246 of SEQ ID NO: 2024
uucugaguuuaucuugcuu

SEQ ID NO: 157407 - RNA, 19 nt, Artificial Sequence
  Description of Artificial Sequence: Synthetic oligonucleotide
  Antisense strand to SEQ ID NO: 157406
aagcaagauaaacucagaa

SEQ ID NO: 157408 - RNA, 19 nt, Artificial Sequence
  Description of Artificial Sequence: Synthetic oligonucleotide
  Sense strand starting at position 1275 of SEQ ID NO: 2024
cagcuauguuacuugcuga

SEQ ID NO: 157409 - RNA, 19 nt, Artificial Sequence
  Description of Artificial Sequence: Synthetic oligonucleotide
  Antisense strand to SEQ ID NO: 157408
ucagcaaguaacauagcug

SEQ ID NO: 157410 - RNA, 19 nt, Artificial Sequence
  Description of Artificial Sequence: Synthetic oligonucleotide
  Sense strand starting at position 1398 of SEQ ID NO: 2024
aaaugaauccuuugggucu

SEQ ID NO: 157411 - RNA, 19 nt, Artificial Sequence
  Description of Artificial Sequence: Synthetic oligonucleotide
  Antisense strand to SEQ ID NO: 157410
agacccaaaggauucauuu

SEQ ID NO: 157412 - RNA, 19 nt, Artificial Sequence
  Description of Artificial Sequence: Synthetic oligonucleotide
  Sense strand starting at position 1442 of SEQ ID NO: 2024
guuaaaggcuguuccagua

SEQ ID NO: 157413 - RNA, 19 nt, Artificial Sequence
  Description of Artificial Sequence: Synthetic oligonucleotide
  Antisense strand to SEQ ID NO: 157412
uacuggaacagccuuuaac

SEQ ID NO: 157414 - RNA, 19 nt, Artificial Sequence
  Description of Artificial Sequence: Synthetic oligonucleotide
  Sense strand starting at position 1449 of SEQ ID NO: 2024
gcuguuccaguagaaugau

SEQ ID NO: 157415 - RNA, 19 nt, Artificial Sequence
  Description of Artificial Sequence: Synthetic oligonucleotide
  Antisense strand to SEQ ID NO: 157414
aucauucuacuggaacagc

SEQ ID NO: 157416 - RNA, 19 nt, Artificial Sequence
  Description of Artificial Sequence: Synthetic oligonucleotide
  Sense strand starting at position 1703 of SEQ ID NO: 2024
cuccaugcuugcucuggaa

SEQ ID NO: 157417 - RNA, 19 nt, Artificial Sequence
  Description of Artificial Sequence: Synthetic oligonucleotide
  Antisense strand to SEQ ID NO: 157416
uuccagagcaagcauggag

SEQ ID NO: 157418 - RNA, 19 nt, Artificial Sequence
  Description of Artificial Sequence: Synthetic oligonucleotide
  Sense strand starting at position 1781 of SEQ ID NO: 2024
aagacauucugggugcacu

SEQ ID NO: 157419 - RNA, 19 nt, Artificial Sequence
  Description of Artificial Sequence: Synthetic oligonucleotide
  Antisense strand to SEQ ID NO: 157418
agugcacccagaaugucuu

SEQ ID NO: 157420 - RNA, 19 nt, Artificial Sequence
  Description of Artificial Sequence: Synthetic oligonucleotide
  Sense strand starting at position 1782 of SEQ ID NO: 2024
agacauucugggugcacuu

SEQ ID NO: 157421 - RNA, 19 nt, Artificial Sequence
  Description of Artificial Sequence: Synthetic oligonucleotide
  Antisense strand to SEQ ID NO: 157420
aagugcacccagaaugucu

SEQ ID NO: 157422 - RNA, 19 nt, Artificial Sequence
  Description of Artificial Sequence: Synthetic oligonucleotide
  Sense strand starting at position 1835 of SEQ ID NO: 2024
uagccagauuaagucagaa

SEQ ID NO: 157423 - RNA, 19 nt, Artificial Sequence
  Description of Artificial Sequence: Synthetic oligonucleotide
  Antisense strand to SEQ ID NO: 157422
uucugacuuaaucuggcua

SEQ ID NO: 157424 - RNA, 19 nt, Artificial Sequence
  Description of Artificial Sequence: Synthetic oligonucleotide
  Sense strand starting at position 1953 of SEQ ID NO: 2024
cagcauuguccugauggaa

SEQ ID NO: 157425 - RNA, 19 nt, Artificial Sequence
  Description of Artificial Sequence: Synthetic oligonucleotide
  Antisense strand to SEQ ID NO: 157424
uuccaucaggacaaugcug

SEQ ID NO: 157426 - RNA, 19 nt, Artificial Sequence
  Description of Artificial Sequence: Synthetic oligonucleotide
  Sense strand starting at position 1965 of SEQ ID NO: 2024
gauggaacagucuacggua

SEQ ID NO: 157427 - RNA, 19 nt, Artificial Sequence
  Description of Artificial Sequence: Synthetic oligonucleotide
  Antisense strand to SEQ ID NO: 157426
uaccguagacuguuccauc

SEQ ID NO: 157428 - RNA, 19 nt, Artificial Sequence
  Description of Artificial Sequence: Synthetic oligonucleotide
  Sense strand starting at position 1967 of SEQ ID NO: 2024
uggaacagucuacgguauu

SEQ ID NO: 157429 - RNA, 19 nt, Artificial Sequence
  Description of Artificial Sequence: Synthetic oligonucleotide
  Antisense strand to SEQ ID NO: 157428
aauaccguagacuguucca

SEQ ID NO: 157430 - RNA, 19 nt, Artificial Sequence
  Description of Artificial Sequence: Synthetic oligonucleotide
  Sense strand starting at position 1993 of SEQ ID NO: 2024
ugcuaaagucucuaccagu

SEQ ID NO: 157431 - RNA, 19 nt, Artificial Sequence
  Description of Artificial Sequence: Synthetic oligonucleotide
  Antisense strand to SEQ ID NO: 157430
acugguagagacuuuagca

SEQ ID NO: 157432 - RNA, 19 nt, Artificial Sequence
  Description of Artificial Sequence: Synthetic oligonucleotide
  Sense strand starting at position 2022 of SEQ ID NO: 2024
gugaaugacuggaaggguu

SEQ ID NO: 157433 - RNA, 19 nt, Artificial Sequence
  Description of Artificial Sequence: Synthetic oligonucleotide
  Antisense strand to SEQ ID NO: 157432
aacccuuccagucauucac

SEQ ID NO: 157434 - RNA, 19 nt, Artificial Sequence
  Description of Artificial Sequence: Synthetic oligonucleotide
  Sense strand starting at position 2037 of SEQ ID NO: 2024
gguuauuucugucaggaac

SEQ ID NO: 157435 - RNA, 19 nt, Artificial Sequence
  Description of Artificial Sequence: Synthetic oligonucleotide
  Antisense strand to SEQ ID NO: 157434
guuccugacagaaauaacc

SEQ ID NO: 157436 - RNA, 19 nt, Artificial Sequence
  Description of Artificial Sequence: Synthetic oligonucleotide
  Sense strand starting at position 2096 of SEQ ID NO: 2024
agguaaucugagggcaaca

SEQ ID NO: 157437 - RNA, 19 nt, Artificial Sequence
  Description of Artificial Sequence: Synthetic oligonucleotide
  Antisense strand to SEQ ID NO: 157436
uguugcccucagauuaccu

SEQ ID NO: 157438 - RNA, 19 nt, Artificial Sequence
  Description of Artificial Sequence: Synthetic oligonucleotide
  Sense strand starting at position 2169 of SEQ ID NO: 2024
aagugucucuugguggaga

SEQ ID NO: 157439 - RNA, 19 nt, Artificial Sequence
  Description of Artificial Sequence: Synthetic oligonucleotide
  Antisense strand to SEQ ID NO: 157438
ucuccaccaagagacacuu

SEQ ID NO: 157440 - RNA, 19 nt, Artificial Sequence
  Description of Artificial Sequence: Synthetic oligonucleotide
  Sense strand starting at position 2171 of SEQ ID NO: 2024
gugucucuugguggagagu

SEQ ID NO: 157441 - RNA, 19 nt, Artificial Sequence
  Description of Artificial Sequence: Synthetic oligonucleotide
  Antisense strand to SEQ ID NO: 157440
acucuccaccaagagacac

SEQ ID NO: 157442 - RNA, 19 nt, Artificial Sequence
  Description of Artificial Sequence: Synthetic oligonucleotide
  Sense strand starting at position 2200 of SEQ ID NO: 2024
caagucaccguguaauacu

SEQ ID NO: 157443 - RNA, 19 nt, Artificial Sequence
  Description of Artificial Sequence: Synthetic oligonucleotide
  Antisense strand to SEQ ID NO: 157442
aguauuacacggugacuug

SEQ ID NO: 157444 - RNA, 19 nt, Artificial Sequence
  Description of Artificial Sequence: Synthetic oligonucleotide
  Sense strand starting at position 2541 of SEQ ID NO: 2024
ucguguccggccucuuauu

SEQ ID NO: 157445 - RNA, 19 nt, Artificial Sequence
  Description of Artificial Sequence: Synthetic oligonucleotide
  Antisense strand to SEQ ID NO: 157444
aauaagaggccggacacga

SEQ ID NO: 157446 - RNA, 19 nt, Artificial Sequence
  Description of Artificial Sequence: Synthetic oligonucleotide
  Sense strand starting at position 2587 of SEQ ID NO: 2024
uagggauguuacuuucugu

SEQ ID NO: 157447 - RNA, 19 nt, Artificial Sequence
  Description of Artificial Sequence: Synthetic oligonucleotide
  Antisense strand to SEQ ID NO: 157446
acagaaaguaacaucccua

SEQ ID NO: 157448 - RNA, 19 nt, Artificial Sequence
  Description of Artificial Sequence: Synthetic oligonucleotide
  Sense strand starting at position 2590 of SEQ ID NO: 2024
ggauguuacuuucugugua

SEQ ID NO: 157449 - RNA, 19 nt, Artificial Sequence
  Description of Artificial Sequence: Synthetic oligonucleotide
  Antisense strand to SEQ ID NO: 157448
uacacagaaaguaacaucc

SEQ ID NO: 157450 - RNA, 19 nt, Artificial Sequence
  Description of Artificial Sequence: Synthetic oligonucleotide
  Sense strand starting at position 2792 of SEQ ID NO: 2024
ucacaagucccacagguuu

SEQ ID NO: 157451 - RNA, 19 nt, Artificial Sequence
  Description of Artificial Sequence: Synthetic oligonucleotide
  Antisense strand to SEQ ID NO: 157450
aaaccugugggacuuguga

SEQ ID NO: 157452 - RNA, 19 nt, Artificial Sequence
  Description of Artificial Sequence: Synthetic oligonucleotide
  Sense strand starting at position 2836 of SEQ ID NO: 2024
uucuauuugcuguggcgua

SEQ ID NO: 157453 - RNA, 19 nt, Artificial Sequence
  Description of Artificial Sequence: Synthetic oligonucleotide
  Antisense strand to SEQ ID NO: 157452
uacgccacagcaaauagaa

SEQ ID NO: 157454 - RNA, 19 nt, Artificial Sequence
  Description of Artificial Sequence: Synthetic oligonucleotide
  Sense strand starting at position 2862 of SEQ ID NO: 2024
uuacuuuagugauugauuc

SEQ ID NO: 157455 - RNA, 19 nt, Artificial Sequence
  Description of Artificial Sequence: Synthetic oligonucleotide
  Antisense strand to SEQ ID NO: 157454
gaaucaaucacuaaaguaa

SEQ ID NO: 157456 - RNA, 19 nt, Artificial Sequence
  Description of Artificial Sequence: Synthetic oligonucleotide
  Sense strand starting at position 2866 of SEQ ID NO: 2024
uuuagugauugauucugaa

SEQ ID NO: 157457 - RNA, 19 nt, Artificial Sequence
  Description of Artificial Sequence: Synthetic oligonucleotide
  Antisense strand to SEQ ID NO: 157456
uucagaaucaaucacuaaa

SEQ ID NO: 157458 - RNA, 19 nt, Artificial Sequence
  Description of Artificial Sequence: Synthetic oligonucleotide
  Sense strand starting at position 3126 of SEQ ID NO: 2024
cugacuugugacuaacgca

SEQ ID NO: 157459 - RNA, 19 nt, Artificial Sequence
  Description of Artificial Sequence: Synthetic oligonucleotide
  Antisense strand to SEQ ID NO: 157458
ugcguuagucacaagucag

SEQ ID NO: 157460 - RNA, 19 nt, Artificial Sequence
  Description of Artificial Sequence: Synthetic oligonucleotide
  Sense strand starting at position 3613 of SEQ ID NO: 2024
caaaguuuguagucaucag

SEQ ID NO: 157461 - RNA, 19 nt, Artificial Sequence
  Description of Artificial Sequence: Synthetic oligonucleotide
  Antisense strand to SEQ ID NO: 157460
cugaugacuacaaacuuug

SEQ ID NO: 157462 - RNA, 19 nt, Artificial Sequence
  Description of Artificial Sequence: Synthetic oligonucleotide
  Sense strand starting at position 3617 of SEQ ID NO: 2024
guuuguagucaucagucau

SEQ ID NO: 157463 - RNA, 19 nt, Artificial Sequence
  Description of Artificial Sequence: Synthetic oligonucleotide
  Antisense strand to SEQ ID NO: 157462
augacugaugacuacaaac

SEQ ID NO: 157464 - RNA, 19 nt, Artificial Sequence
  Description of Artificial Sequence: Synthetic oligonucleotide
  Sense strand starting at position 3621 of SEQ ID NO: 2024
guagucaucagucauguca

SEQ ID NO: 157465 - RNA, 19 nt, Artificial Sequence
  Description of Artificial Sequence: Synthetic oligonucleotide
  Antisense strand to SEQ ID NO: 157464
ugacaugacugaugacuac

SEQ ID NO: 157466 - RNA, 19 nt, Artificial Sequence
  Description of Artificial Sequence: Synthetic oligonucleotide
  Sense strand starting at position 3630 of SEQ ID NO: 2024
agucaugucaagugcauga

SEQ ID NO: 157467 - RNA, 19 nt, Artificial Sequence
  Description of Artificial Sequence: Synthetic oligonucleotide
  Antisense strand to SEQ ID NO: 157466
ucaugcacuugacaugacu

SEQ ID NO: 157468 - RNA, 19 nt, Artificial Sequence
  Description of Artificial Sequence: Synthetic oligonucleotide
  Sense strand starting at position 39 of SEQ ID NO: 2025
guaauacagugucuguaga

SEQ ID NO: 157469 - RNA, 19 nt, Artificial Sequence
  Description of Artificial Sequence: Synthetic oligonucleotide
  Antisense strand to SEQ ID NO: 157468
ucuacagacacuguauuac

SEQ ID NO: 157470 - RNA, 19 nt, Artificial Sequence
  Description of Artificial Sequence: Synthetic oligonucleotide
  Sense strand starting at position 41 of SEQ ID NO: 2025
aauacagugucuguagaca

SEQ ID NO: 157471 - RNA, 19 nt, Artificial Sequence
  Description of Artificial Sequence: Synthetic oligonucleotide
  Antisense strand to SEQ ID NO: 157470
ugucuacagacacuguauu

SEQ ID NO: 157472 - RNA, 19 nt, Artificial Sequence
  Description of Artificial Sequence: Synthetic oligonucleotide
  Sense strand starting at position 70 of SEQ ID NO: 2025
uguauacaagcguaagcau

SEQ ID NO: 157473 - RNA, 19 nt, Artificial Sequence
  Description of Artificial Sequence: Synthetic oligonucleotide
  Antisense strand to SEQ ID NO: 157472
augcuuacgcuuguauaca

SEQ ID NO: 157474 - RNA, 19 nt, Artificial Sequence
  Description of Artificial Sequence: Synthetic oligonucleotide
  Sense strand starting at position 78 of SEQ ID NO: 2025
agcguaagcauagacguau

SEQ ID NO: 157475 - RNA, 19 nt, Artificial Sequence
  Description of Artificial Sequence: Synthetic oligonucleotide
  Antisense strand to SEQ ID NO: 157474
auacgucuaugcuuacgcu

SEQ ID NO: 157476 - RNA, 19 nt, Artificial Sequence
  Description of Artificial Sequence: Synthetic oligonucleotide
  Sense strand starting at position 90 of SEQ ID NO: 2025
gacguauaccaaggucaag

SEQ ID NO: 157477 - RNA, 19 nt, Artificial Sequence
  Description of Artificial Sequence: Synthetic oligonucleotide
  Antisense strand to SEQ ID NO: 157476
cuugaccuugguauacguc

SEQ ID NO: 157478 - RNA, 19 nt, Artificial Sequence
  Description of Artificial Sequence: Synthetic oligonucleotide
  Sense strand starting at position 270 of SEQ ID NO: 2025
cccuaaaugccacagaguu

SEQ ID NO: 157479 - RNA, 19 nt, Artificial Sequence
  Description of Artificial Sequence: Synthetic oligonucleotide
  Antisense strand to SEQ ID NO: 157478
aacucuguggcauuuaggg

SEQ ID NO: 157480 - RNA, 19 nt, Artificial Sequence
  Description of Artificial Sequence: Synthetic oligonucleotide
  Sense strand starting at position 469 of SEQ ID NO: 2025
gugagcauccaggguacua

SEQ ID NO: 157481 - RNA, 19 nt, Artificial Sequence
  Description of Artificial Sequence: Synthetic oligonucleotide
  Antisense strand to SEQ ID NO: 157480
uaguacccuggaugcucac

SEQ ID NO: 157482 - RNA, 19 nt, Artificial Sequence
  Description of Artificial Sequence: Synthetic oligonucleotide
  Sense strand starting at position 917 of SEQ ID NO: 2025
ucauucccuccuugaggau

SEQ ID NO: 157483 - RNA, 19 nt, Artificial Sequence
  Description of Artificial Sequence: Synthetic oligonucleotide
  Antisense strand to SEQ ID NO: 157482
auccucaaggagggaauga

SEQ ID NO: 157484 - RNA, 19 nt, Artificial Sequence
  Description of Artificial Sequence: Synthetic oligonucleotide
  Sense strand starting at position 929 of SEQ ID NO: 2025
ugaggauguaucugagcau

SEQ ID NO: 157485 - RNA, 19 nt, Artificial Sequence
  Description of Artificial Sequence: Synthetic oligonucleotide
  Antisense strand to SEQ ID NO: 157484
augcucagauacauccuca

SEQ ID NO: 157486 - RNA, 19 nt, Artificial Sequence
  Description of Artificial Sequence: Synthetic oligonucleotide
  Sense strand starting at position 932 of SEQ ID NO: 2025
ggauguaucugagcaucug

SEQ ID NO: 157487 - RNA, 19 nt, Artificial Sequence
  Description of Artificial Sequence: Synthetic oligonucleotide
  Antisense strand to SEQ ID NO: 157486
cagaugcucagauacaucc

SEQ ID NO: 157488 - RNA, 19 nt, Artificial Sequence
  Description of Artificial Sequence: Synthetic oligonucleotide
  Sense strand starting at position 1089 of SEQ ID NO: 2025
agaugauaauuccaaauag

SEQ ID NO: 157489 - RNA, 19 nt, Artificial Sequence
  Description of Artificial Sequence: Synthetic oligonucleotide
  Antisense strand to SEQ ID NO: 157488
cuauuuggaauuaucaucu

SEQ ID NO: 157490 - RNA, 19 nt, Artificial Sequence
  Description of Artificial Sequence: Synthetic oligonucleotide
  Sense strand starting at position 1107 of SEQ ID NO: 2025
gcuagaaugcugugaggac

SEQ ID NO: 157491 - RNA, 19 nt, Artificial Sequence
  Description of Artificial Sequence: Synthetic oligonucleotide
  Antisense strand to SEQ ID NO: 157490
guccucacagcauucuagc

SEQ ID NO: 157492 - RNA, 19 nt, Artificial Sequence
  Description of Artificial Sequence: Synthetic oligonucleotide
  Sense strand starting at position 1155 of SEQ ID NO: 2025
gccugugaggaaugagaga

SEQ ID NO: 157493 - RNA, 19 nt, Artificial Sequence
  Description of Artificial Sequence: Synthetic oligonucleotide
  Antisense strand to SEQ ID NO: 157492
ucucucauuccucacaggc

SEQ ID NO: 157494 - RNA, 19 nt, Artificial Sequence
  Description of Artificial Sequence: Synthetic oligonucleotide
  Sense strand starting at position 1166 of SEQ ID NO: 2025
augagagacuguguucagu

SEQ ID NO: 157495 - RNA, 19 nt, Artificial Sequence
  Description of Artificial Sequence: Synthetic oligonucleotide
  Antisense strand to SEQ ID NO: 157494
acugaacacagucucucau

SEQ ID NO: 157496 - RNA, 19 nt, Artificial Sequence
  Description of Artificial Sequence: Synthetic oligonucleotide
  Sense strand starting at position 1168 of SEQ ID NO: 2025
gagagacuguguucaguag

SEQ ID NO: 157497 - RNA, 19 nt, Artificial Sequence
  Description of Artificial Sequence: Synthetic oligonucleotide
  Antisense strand to SEQ ID NO: 157496
cuacugaacacagucucuc

SEQ ID NO: 157498 - RNA, 19 nt, Artificial Sequence
  Description of Artificial Sequence: Synthetic oligonucleotide
  Sense strand starting at position 1254 of SEQ ID NO: 2025
ggagcagcuguguaagcau

SEQ ID NO: 157499 - RNA, 19 nt, Artificial Sequence
  Description of Artificial Sequence: Synthetic oligonucleotide
  Antisense strand to SEQ ID NO: 157498
augcuuacacagcugcucc

SEQ ID NO: 157500 - RNA, 19 nt, Artificial Sequence
  Description of Artificial Sequence: Synthetic oligonucleotide
  Sense strand starting at position 1462 of SEQ ID NO: 2025
gaccauguccuagagccaa

SEQ ID NO: 157501 - RNA, 19 nt, Artificial Sequence
  Description of Artificial Sequence: Synthetic oligonucleotide
  Antisense strand to SEQ ID NO: 157500
uuggcucuaggacaugguc

SEQ ID NO: 157502 - RNA, 19 nt, Artificial Sequence
  Description of Artificial Sequence: Synthetic oligonucleotide
  Sense strand starting at position 1622 of SEQ ID NO: 2025
gcaggauucgggcauucuu

SEQ ID NO: 157503 - RNA, 19 nt, Artificial Sequence
  Description of Artificial Sequence: Synthetic oligonucleotide
  Antisense strand to SEQ ID NO: 157502
aagaaugcccgaauccugc

SEQ ID NO: 157504 - RNA, 19 nt, Artificial Sequence
  Description of Artificial Sequence: Synthetic oligonucleotide
  Sense strand starting at position 1757 of SEQ ID NO: 2025
gcccaugucugagccauga

SEQ ID NO: 157505 - RNA, 19 nt, Artificial Sequence
  Description of Artificial Sequence: Synthetic oligonucleotide
  Antisense strand to SEQ ID NO: 157504
ucauggcucagacaugggc

SEQ ID NO: 157506 - RNA, 19 nt, Artificial Sequence
  Description of Artificial Sequence: Synthetic oligonucleotide
  Sense strand starting at position 1761 of SEQ ID NO: 2025
augucugagccaugagguu

SEQ ID NO: 157507 - RNA, 19 nt, Artificial Sequence
  Description of Artificial Sequence: Synthetic oligonucleotide
  Antisense strand to SEQ ID NO: 157506
aaccucauggcucagacau

SEQ ID NO: 157508 - RNA, 19 nt, Artificial Sequence
  Description of Artificial Sequence: Synthetic oligonucleotide
  Sense strand starting at position 1768 of SEQ ID NO: 2025
agccaugagguuugagcau

SEQ ID NO: 157509 - RNA, 19 nt, Artificial Sequence
  Description of Artificial Sequence: Synthetic oligonucleotide
  Antisense strand to SEQ ID NO: 157508
augcucaaaccucauggcu

SEQ ID NO: 157510 - RNA, 19 nt, Artificial Sequence
  Description of Artificial Sequence: Synthetic oligonucleotide
  Sense strand starting at position 1930 of SEQ ID NO: 2025
uuccuagucuuggcacuua

SEQ ID NO: 157511 - RNA, 19 nt, Artificial Sequence
  Description of Artificial Sequence: Synthetic oligonucleotide
  Antisense strand to SEQ ID NO: 157510
uaagugccaagacuaggaa

SEQ ID NO: 157512 - RNA, 19 nt, Artificial Sequence
  Description of Artificial Sequence: Synthetic oligonucleotide
  Sense strand starting at position 2001 of SEQ ID NO: 2025
ccuuguucaggugggagaa

SEQ ID NO: 157513 - RNA, 19 nt, Artificial Sequence
  Description of Artificial Sequence: Synthetic oligonucleotide
  Antisense strand to SEQ ID NO: 157512
uucucccaccugaacaagg

SEQ ID NO: 157514 - RNA, 19 nt, Artificial Sequence
  Description of Artificial Sequence: Synthetic oligonucleotide
  Sense strand starting at position 2014 of SEQ ID NO: 2025
ggagaacaggugugcucua

SEQ ID NO: 157515 - RNA, 19 nt, Artificial Sequence
  Description of Artificial Sequence: Synthetic oligonucleotide
  Antisense strand to SEQ ID NO: 157514
uagagcacaccuguucucc

SEQ ID NO: 157516 - RNA, 19 nt, Artificial Sequence
  Description of Artificial Sequence: Synthetic oligonucleotide
  Sense strand starting at position 2145 of SEQ ID NO: 2025
ggagcaaauucuccuugga

SEQ ID NO: 157517 - RNA, 19 nt, Artificial Sequence
  Description of Artificial Sequence: Synthetic oligonucleotide
  Antisense strand to SEQ ID NO: 157516
uccaaggagaauuugcucc

SEQ ID NO: 157518 - RNA, 19 nt, Artificial Sequence
  Description of Artificial Sequence: Synthetic oligonucleotide
  Sense strand starting at position 2147 of SEQ ID NO: 2025
agcaaauucuccuuggaaa

SEQ ID NO: 157519 - RNA, 19 nt, Artificial Sequence
  Description of Artificial Sequence: Synthetic oligonucleotide
  Antisense strand to SEQ ID NO: 157518
uuuccaaggagaauuugcu

SEQ ID NO: 157520 - RNA, 19 nt, Artificial Sequence
  Description of Artificial Sequence: Synthetic oligonucleotide
  Sense strand starting at position 2148 of SEQ ID NO: 2025
gcaaauucuccuuggaaau

SEQ ID NO: 157521 - RNA, 19 nt, Artificial Sequence
  Description of Artificial Sequence: Synthetic oligonucleotide
  Antisense strand to SEQ ID NO: 157520
auuuccaaggagaauuugc

SEQ ID NO: 157522 - RNA, 19 nt, Artificial Sequence
  Description of Artificial Sequence: Synthetic oligonucleotide
  Sense strand starting at position 2160 of SEQ ID NO: 2025
uggaaauguugauaagaca

SEQ ID NO: 157523 - RNA, 19 nt, Artificial Sequence
  Description of Artificial Sequence: Synthetic oligonucleotide
  Antisense strand to SEQ ID NO: 157522
ugucuuaucaacauuucca

SEQ ID NO: 157524 - RNA, 19 nt, Artificial Sequence
  Description of Artificial Sequence: Synthetic oligonucleotide
  Sense strand starting at position 2242 of SEQ ID NO: 2025
gccgaaagcucccuaguug

SEQ ID NO: 157525 - RNA, 19 nt, Artificial Sequence
  Description of Artificial Sequence: Synthetic oligonucleotide
  Antisense strand to SEQ ID NO: 157524
caacuagggagcuuucggc

SEQ ID NO: 157526 - RNA, 19 nt, Artificial Sequence
  Description of Artificial Sequence: Synthetic oligonucleotide
  Sense strand starting at position 2287 of SEQ ID NO: 2025
cugacauugguccgcagaa

SEQ ID NO: 157527 - RNA, 19 nt, Artificial Sequence
  Description of Artificial Sequence: Synthetic oligonucleotide
  Antisense strand to SEQ ID NO: 157526
uucugcggaccaaugucag

SEQ ID NO: 157528 - RNA, 19 nt, Artificial Sequence
  Description of Artificial Sequence: Synthetic oligonucleotide
  Sense strand starting at position 2288 of SEQ ID NO: 2025
ugacauugguccgcagaaa

SEQ ID NO: 157529 - RNA, 19 nt, Artificial Sequence
  Description of Artificial Sequence: Synthetic oligonucleotide
  Antisense strand to SEQ ID NO: 157528
uuucugcggaccaauguca

SEQ ID NO: 157530 - RNA, 19 nt, Artificial Sequence
  Description of Artificial Sequence: Synthetic oligonucleotide
  Sense strand starting at position 2289 of SEQ ID NO: 2025
gacauugguccgcagaaau

SEQ ID NO: 157531 - RNA, 19 nt, Artificial Sequence
  Description of Artificial Sequence: Synthetic oligonucleotide
  Antisense strand to SEQ ID NO: 157530
auuucugcggaccaauguc

SEQ ID NO: 157532 - RNA, 19 nt, Artificial Sequence
  Description of Artificial Sequence: Synthetic oligonucleotide
  Sense strand starting at position 3172 of SEQ ID NO: 2025
caguguuugcuguuccuuu

SEQ ID NO: 157533 - RNA, 19 nt, Artificial Sequence
  Description of Artificial Sequence: Synthetic oligonucleotide
  Antisense strand to SEQ ID NO: 157532
aaaggaacagcaaacacug

SEQ ID NO: 157534 - RNA, 19 nt, Artificial Sequence
  Description of Artificial Sequence: Synthetic oligonucleotide
  Sense strand starting at position 3405 of SEQ ID NO: 2025
ugaauaaauuaggaguaac

SEQ ID NO: 157535 - RNA, 19 nt, Artificial Sequence
  Description of Artificial Sequence: Synthetic oligonucleotide
  Antisense strand to SEQ ID NO: 157534
guuacuccuaauuuauuca

SEQ ID NO: 157536 - RNA, 19 nt, Artificial Sequence
  Description of Artificial Sequence: Synthetic oligonucleotide
  Sense strand starting at position 3419 of SEQ ID NO: 2025
guaacuaauugauuggaau

SEQ ID NO: 157537 - RNA, 19 nt, Artificial Sequence
  Description of Artificial Sequence: Synthetic oligonucleotide
  Antisense strand to SEQ ID NO: 157536
auuccaaucaauuaguuac

SEQ ID NO: 157538 - RNA, 19 nt, Artificial Sequence
  Description of Artificial Sequence: Synthetic oligonucleotide
  Sense strand starting at position 3425 of SEQ ID NO: 2025
aauugauuggaaugccaga

SEQ ID NO: 157539 - RNA, 19 nt, Artificial Sequence
  Description of Artificial Sequence: Synthetic oligonucleotide
  Antisense strand to SEQ ID NO: 157538
ucuggcauuccaaucaauu

SEQ ID NO: 157540 - RNA, 19 nt, Artificial Sequence
  Description of Artificial Sequence: Synthetic oligonucleotide
  Sense strand starting at position 3430 of SEQ ID NO: 2025
auuggaaugccagacuucu

SEQ ID NO: 157541 - RNA, 19 nt, Artificial Sequence
  Description of Artificial Sequence: Synthetic oligonucleotide
  Antisense strand to SEQ ID NO: 157540
agaagucuggcauuccaau

SEQ ID NO: 157542 - RNA, 19 nt, Artificial Sequence
  Description of Artificial Sequence: Synthetic oligonucleotide
  Sense strand starting at position 3464 of SEQ ID NO: 2025
uaugaaaugugggaacaug

SEQ ID NO: 157543 - RNA, 19 nt, Artificial Sequence
  Description of Artificial Sequence: Synthetic oligonucleotide
  Antisense strand to SEQ ID NO: 157542
cauguucccacauuucaua

SEQ ID NO: 157544 - RNA, 19 nt, Artificial Sequence
  Description of Artificial Sequence: Synthetic oligonucleotide
  Sense strand starting at position 3904 of SEQ ID NO: 2025
ugguaacagguggguaaau

SEQ ID NO: 157545 - RNA, 19 nt, Artificial Sequence
  Description of Artificial Sequence: Synthetic oligonucleotide
  Antisense strand to SEQ ID NO: 157544
auuuacccaccuguuacca

SEQ ID NO: 157546 - RNA, 19 nt, Artificial Sequence
  Description of Artificial Sequence: Synthetic oligonucleotide
  Sense strand starting at position 3978 of SEQ ID NO: 2025
gacuauguuguagguauuu

SEQ ID NO: 157547 - RNA, 19 nt, Artificial Sequence
  Description of Artificial Sequence: Synthetic oligonucleotide
  Antisense strand to SEQ ID NO: 157546
aaauaccuacaacauaguc

SEQ ID NO: 157548 - RNA, 19 nt, Artificial Sequence
  Description of Artificial Sequence: Synthetic oligonucleotide
  Sense strand starting at position 381 of SEQ ID NO: 2026
gguaaauaaacguaaguga

SEQ ID NO: 157549 - RNA, 19 nt, Artificial Sequence
  Description of Artificial Sequence: Synthetic oligonucleotide
  Antisense strand to SEQ ID NO: 157548
ucacuuacguuuauuuacc

SEQ ID NO: 157550 - RNA, 19 nt, Artificial Sequence
  Description of Artificial Sequence: Synthetic oligonucleotide
  Sense strand starting at position 389 of SEQ ID NO: 2026
aacguaagugaaggaaaua

SEQ ID NO: 157551 - RNA, 19 nt, Artificial Sequence
  Description of Artificial Sequence: Synthetic oligonucleotide
  Antisense strand to SEQ ID NO: 157550
uauuuccuucacuuacguu

SEQ ID NO: 157552 - RNA, 19 nt, Artificial Sequence
  Description of Artificial Sequence: Synthetic oligonucleotide
  Sense strand starting at position 620 of SEQ ID NO: 2026
ccagacagguccuaaaucu

SEQ ID NO: 157553 - RNA, 19 nt, Artificial Sequence
  Description of Artificial Sequence: Synthetic oligonucleotide
  Antisense strand to SEQ ID NO: 157552
agauuuaggaccugucugg

SEQ ID NO: 157554 - RNA, 19 nt, Artificial Sequence
  Description of Artificial Sequence: Synthetic oligonucleotide
  Sense strand starting at position 635 of SEQ ID NO: 2026
aucuaugauuuccaggauu

SEQ ID NO: 157555 - RNA, 19 nt, Artificial Sequence
  Description of Artificial Sequence: Synthetic oligonucleotide
  Antisense strand to SEQ ID NO: 157554
aauccuggaaaucauagau

SEQ ID NO: 157556 - RNA, 19 nt, Artificial Sequence
  Description of Artificial Sequence: Synthetic oligonucleotide
  Sense strand starting at position 721 of SEQ ID NO: 2026
cugaaugcauauuaugaaa

SEQ ID NO: 157557 - RNA, 19 nt, Artificial Sequence
  Description of Artificial Sequence: Synthetic oligonucleotide
  Antisense strand to SEQ ID NO: 157556
uuucauaauaugcauucag

SEQ ID NO: 157558 - RNA, 19 nt, Artificial Sequence
  Description of Artificial Sequence: Synthetic oligonucleotide
  Sense strand starting at position 842 of SEQ ID NO: 2026
ggaauugaauugggaagca

SEQ ID NO: 157559 - RNA, 19 nt, Artificial Sequence
  Description of Artificial Sequence: Synthetic oligonucleotide
  Antisense strand to SEQ ID NO: 157558
ugcuucccaauucaauucc

SEQ ID NO: 157560 - RNA, 19 nt, Artificial Sequence
  Description of Artificial Sequence: Synthetic oligonucleotide
  Sense strand starting at position 859 of SEQ ID NO: 2026
cauuucugacgcuguuaua

SEQ ID NO: 157561 - RNA, 19 nt, Artificial Sequence
  Description of Artificial Sequence: Synthetic oligonucleotide
  Antisense strand to SEQ ID NO: 157560
uauaacagcgucagaaaug

SEQ ID NO: 157562 - RNA, 19 nt, Artificial Sequence
  Description of Artificial Sequence: Synthetic oligonucleotide
  Sense strand starting at position 885 of SEQ ID NO: 2026
ccagacaagucuccagcaa

SEQ ID NO: 157563 - RNA, 19 nt, Artificial Sequence
  Description of Artificial Sequence: Synthetic oligonucleotide
  Antisense strand to SEQ ID NO: 157562
uugcuggagacuugucugg

SEQ ID NO: 157564 - RNA, 19 nt, Artificial Sequence
  Description of Artificial Sequence: Synthetic oligonucleotide
  Sense strand starting at position 889 of SEQ ID NO: 2026
acaagucuccagcaaaguu

SEQ ID NO: 157565 - RNA, 19 nt, Artificial Sequence
  Description of Artificial Sequence: Synthetic oligonucleotide
  Antisense strand to SEQ ID NO: 157564
aacuuugcuggagacuugu

SEQ ID NO: 157566 - RNA, 19 nt, Artificial Sequence
  Description of Artificial Sequence: Synthetic oligonucleotide
  Sense strand starting at position 2267 of SEQ ID NO: 2026
ccgagaaagcuccgagcau

SEQ ID NO: 157567 - RNA, 19 nt, Artificial Sequence
  Description of Artificial Sequence: Synthetic oligonucleotide
  Antisense strand to SEQ ID NO: 157566
augcucggagcuuucucgg

SEQ ID NO: 157568 - RNA, 19 nt, Artificial Sequence
  Description of Artificial Sequence: Synthetic oligonucleotide
  Sense strand starting at position 2826 of SEQ ID NO: 2026
gcugcaaagucugcaaaca

SEQ ID NO: 157569 - RNA, 19 nt, Artificial Sequence
  Description of Artificial Sequence: Synthetic oligonucleotide
  Antisense strand to SEQ ID NO: 157568
uguuugcagacuuugcagc

SEQ ID NO: 157570 - RNA, 19 nt, Artificial Sequence
  Description of Artificial Sequence: Synthetic oligonucleotide
  Sense strand starting at position 3038 of SEQ ID NO: 2026
aggaguuaguccucccgaa

SEQ ID NO: 157571 - RNA, 19 nt, Artificial Sequence
  Description of Artificial Sequence: Synthetic oligonucleotide
  Antisense strand to SEQ ID NO: 157570
uucgggaggacuaacuccu

SEQ ID NO: 157572 - RNA, 19 nt, Artificial Sequence
  Description of Artificial Sequence: Synthetic oligonucleotide
  Sense strand starting at position 3074 of SEQ ID NO: 2026
gaccgaaucuuuguacaug

SEQ ID NO: 157573 - RNA, 19 nt, Artificial Sequence
  Description of Artificial Sequence: Synthetic oligonucleotide
  Antisense strand to SEQ ID NO: 157572
cauguacaaagauucgguc

SEQ ID NO: 157574 - RNA, 19 nt, Artificial Sequence
  Description of Artificial Sequence: Synthetic oligonucleotide
  Sense strand starting at position 3077 of SEQ ID NO: 2026
cgaaucuuuguacauguuu

SEQ ID NO: 157575 - RNA, 19 nt, Artificial Sequence
  Description of Artificial Sequence: Synthetic oligonucleotide
  Antisense strand to SEQ ID NO: 157574
aaacauguacaaagauucg

SEQ ID NO: 157576 - RNA, 19 nt, Artificial Sequence
  Description of Artificial Sequence: Synthetic oligonucleotide
  Sense strand starting at position 3131 of SEQ ID NO: 2026
uggagaccuugugugaacu

SEQ ID NO: 157577 - RNA, 19 nt, Artificial Sequence
  Description of Artificial Sequence: Synthetic oligonucleotide
  Antisense strand to SEQ ID NO: 157576
aguucacacaaggucucca

SEQ ID NO: 157578 - RNA, 19 nt, Artificial Sequence
  Description of Artificial Sequence: Synthetic oligonucleotide
  Sense strand starting at position 3151 of SEQ ID NO: 2026
aggugucugucacugauua

SEQ ID NO: 157579 - RNA, 19 nt, Artificial Sequence
  Description of Artificial Sequence: Synthetic oligonucleotide
  Antisense strand to SEQ ID NO: 157578
uaaucagugacagacaccu

SEQ ID NO: 157580 - RNA, 19 nt, Artificial Sequence
  Description of Artificial Sequence: Synthetic oligonucleotide
  Sense strand starting at position 3152 of SEQ ID NO: 2026
ggugucugucacugauuau

SEQ ID NO: 157581 - RNA, 19 nt, Artificial Sequence
  Description of Artificial Sequence: Synthetic oligonucleotide
  Antisense strand to SEQ ID NO: 157580
auaaucagugacagacacc

SEQ ID NO: 157582 - RNA, 19 nt, Artificial Sequence
  Description of Artificial Sequence: Synthetic oligonucleotide
  Sense strand starting at position 3153 of SEQ ID NO: 2026
gugucugucacugauuauc

SEQ ID NO: 157583 - RNA, 19 nt, Artificial Sequence
  Description of Artificial Sequence: Synthetic oligonucleotide
  Antisense strand to SEQ ID NO: 157582
gauaaucagugacagacac

SEQ ID NO: 157584 - RNA, 19 nt, Artificial Sequence
  Description of Artificial Sequence: Synthetic oligonucleotide
  Sense strand starting at position 3155 of SEQ ID NO: 2026
gucugucacugauuaucua

SEQ ID NO: 157585 - RNA, 19 nt, Artificial Sequence
  Description of Artificial Sequence: Synthetic oligonucleotide
  Antisense strand to SEQ ID NO: 157584
uagauaaucagugacagac

SEQ ID NO: 157586 - RNA, 19 nt, Artificial Sequence
  Description of Artificial Sequence: Synthetic oligonucleotide
  Sense strand starting at position 3159 of SEQ ID NO: 2026
gucacugauuaucuaagga

SEQ ID NO: 157587 - RNA, 19 nt, Artificial Sequence
  Description of Artificial Sequence: Synthetic oligonucleotide
  Antisense strand to SEQ ID NO: 157586
uccuuagauaaucagugac

SEQ ID NO: 157588 - RNA, 19 nt, Artificial Sequence
  Description of Artificial Sequence: Synthetic oligonucleotide
  Sense strand starting at position 3219 of SEQ ID NO: 2026
ugcuccuugccuugucaau

SEQ ID NO: 157589 - RNA, 19 nt, Artificial Sequence
  Description of Artificial Sequence: Synthetic oligonucleotide
  Antisense strand to SEQ ID NO: 157588
auugacaaggcaaggagca

SEQ ID NO: 157590 - RNA, 19 nt, Artificial Sequence
  Description of Artificial Sequence: Synthetic oligonucleotide
  Sense strand starting at position 3345 of SEQ ID NO: 2026
auucuaaggcucuaugauu

SEQ ID NO: 157591 - RNA, 19 nt, Artificial Sequence
  Description of Artificial Sequence: Synthetic oligonucleotide
  Antisense strand to SEQ ID NO: 157590
aaucauagagccuuagaau

SEQ ID NO: 157592 - RNA, 19 nt, Artificial Sequence
  Description of Artificial Sequence: Synthetic oligonucleotide
  Sense strand starting at position 3390 of SEQ ID NO: 2026
guggaaucuugugcugguu

SEQ ID NO: 157593 - RNA, 19 nt, Artificial Sequence
  Description of Artificial Sequence: Synthetic oligonucleotide
  Antisense strand to SEQ ID NO: 157592
aaccagcacaagauuccac

SEQ ID NO: 157594 - RNA, 19 nt, Artificial Sequence
  Description of Artificial Sequence: Synthetic oligonucleotide
  Sense strand starting at position 3501 of SEQ ID NO: 2026
auggaauacucuugauaaa

SEQ ID NO: 157595 - RNA, 19 nt, Artificial Sequence
  Description of Artificial Sequence: Synthetic oligonucleotide
  Antisense strand to SEQ ID NO: 157594
uuuaucaagaguauuccau

SEQ ID NO: 157596 - RNA, 19 nt, Artificial Sequence
  Description of Artificial Sequence: Synthetic oligonucleotide
  Sense strand starting at position 3550 of SEQ ID NO: 2026
cuguguuguggguggagau

SEQ ID NO: 157597 - RNA, 19 nt, Artificial Sequence
  Description of Artificial Sequence: Synthetic oligonucleotide
  Antisense strand to SEQ ID NO: 157596
aucuccacccacaacacag

SEQ ID NO: 157598 - RNA, 19 nt, Artificial Sequence
  Description of Artificial Sequence: Synthetic oligonucleotide
  Sense strand starting at position 3567 of SEQ ID NO: 2026
augaguugaucuggaaagg

SEQ ID NO: 157599 - RNA, 19 nt, Artificial Sequence
  Description of Artificial Sequence: Synthetic oligonucleotide
  Antisense strand to SEQ ID NO: 157598
ccuuuccagaucaacucau

SEQ ID NO: 157600 - RNA, 19 nt, Artificial Sequence
  Description of Artificial Sequence: Synthetic oligonucleotide
  Sense strand starting at position 3609 of SEQ ID NO: 2026
ggugguggcuggaaucaga

SEQ ID NO: 157601 - RNA, 19 nt, Artificial Sequence
  Description of Artificial Sequence: Synthetic oligonucleotide
  Antisense strand to SEQ ID NO: 157600
ucugauuccagccaccacc

SEQ ID NO: 157602 - RNA, 19 nt, Artificial Sequence
  Description of Artificial Sequence: Synthetic oligonucleotide
  Sense strand starting at position 3617 of SEQ ID NO: 2026
cuggaaucagaguggcuua

SEQ ID NO: 157603 - RNA, 19 nt, Artificial Sequence
  Description of Artificial Sequence: Synthetic oligonucleotide
  Antisense strand to SEQ ID NO: 157602
uaagccacucugauuccag

SEQ ID NO: 157604 - RNA, 19 nt, Artificial Sequence
  Description of Artificial Sequence: Synthetic oligonucleotide
  Sense strand starting at position 3618 of SEQ ID NO: 2026
uggaaucagaguggcuuaa

SEQ ID NO: 157605 - RNA, 19 nt, Artificial Sequence
  Description of Artificial Sequence: Synthetic oligonucleotide
  Antisense strand to SEQ ID NO: 157604
uuaagccacucugauucca

SEQ ID NO: 157606 - RNA, 19 nt, Artificial Sequence
  Description of Artificial Sequence: Synthetic oligonucleotide
  Sense strand starting at position 3696 of SEQ ID NO: 2026
gcccuagauuacuacugga

SEQ ID NO: 157607 - RNA, 19 nt, Artificial Sequence
  Description of Artificial Sequence: Synthetic oligonucleotide
  Antisense strand to SEQ ID NO: 157606
uccaguaguaaucuagggc

SEQ ID NO: 157608 - RNA, 19 nt, Artificial Sequence
  Description of Artificial Sequence: Synthetic oligonucleotide
  Sense strand starting at position 3699 of SEQ ID NO: 2026
cuagauuacuacuggacaa

SEQ ID NO: 157609 - RNA, 19 nt, Artificial Sequence
  Description of Artificial Sequence: Synthetic oligonucleotide
  Antisense strand to SEQ ID NO: 157608
uuguccaguaguaaucuag

SEQ ID NO: 157610 - RNA, 19 nt, Artificial Sequence
  Description of Artificial Sequence: Synthetic oligonucleotide
  Sense strand starting at position 3725 of SEQ ID NO: 2026
gccagcuauugccuggaga

SEQ ID NO: 157611 - RNA, 19 nt, Artificial Sequence
  Description of Artificial Sequence: Synthetic oligonucleotide
  Antisense strand to SEQ ID NO: 157610
ucuccaggcaauagcuggc

SEQ ID NO: 157612 - RNA, 19 nt, Artificial Sequence
  Description of Artificial Sequence: Synthetic oligonucleotide
  Sense strand starting at position 3726 of SEQ ID NO: 2026
ccagcuauugccuggagau

SEQ ID NO: 157613 - RNA, 19 nt, Artificial Sequence
  Description of Artificial Sequence: Synthetic oligonucleotide
  Antisense strand to SEQ ID NO: 157612
aucuccaggcaauagcugg

SEQ ID NO: 157614 - RNA, 19 nt, Artificial Sequence
  Description of Artificial Sequence: Synthetic oligonucleotide
  Sense strand starting at position 3727 of SEQ ID NO: 2026
cagcuauugccuggagaug

SEQ ID NO: 157615 - RNA, 19 nt, Artificial Sequence
  Description of Artificial Sequence: Synthetic oligonucleotide
  Antisense strand to SEQ ID NO: 157614
caucuccaggcaauagcug

SEQ ID NO: 157616 - RNA, 19 nt, Artificial Sequence
  Description of Artificial Sequence: Synthetic oligonucleotide
  Sense strand starting at position 3728 of SEQ ID NO: 2026
agcuauugccuggagaugu

SEQ ID NO: 157617 - RNA, 19 nt, Artificial Sequence
  Description of Artificial Sequence: Synthetic oligonucleotide
  Antisense strand to SEQ ID NO: 157616
acaucuccaggcaauagcu

SEQ ID NO: 157618 - RNA, 19 nt, Artificial Sequence
  Description of Artificial Sequence: Synthetic oligonucleotide
  Sense strand starting at position 3789 of SEQ ID NO: 2026
guauucuuguaauuccuau

SEQ ID NO: 157619 - RNA, 19 nt, Artificial Sequence
  Description of Artificial Sequence: Synthetic oligonucleotide
  Antisense strand to SEQ ID NO: 157618
auaggaauuacaagaauac

SEQ ID NO: 157620 - RNA, 19 nt, Artificial Sequence
  Description of Artificial Sequence: Synthetic oligonucleotide
  Sense strand starting at position 3825 of SEQ ID NO: 2026
uauguaguguguuucuagu

SEQ ID NO: 157621 - RNA, 19 nt, Artificial Sequence
  Description of Artificial Sequence: Synthetic oligonucleotide
  Antisense strand to SEQ ID NO: 157620
acuagaaacacacuacaua

SEQ ID NO: 157622 - RNA, 19 nt, Artificial Sequence
  Description of Artificial Sequence: Synthetic oligonucleotide
  Sense strand starting at position 3922 of SEQ ID NO: 2026
ucaagacauuauuaaggaa

SEQ ID NO: 157623 - RNA, 19 nt, Artificial Sequence
  Description of Artificial Sequence: Synthetic oligonucleotide
  Antisense strand to SEQ ID NO: 157622
uuccuuaauaaugucuuga

SEQ ID NO: 157624 - RNA, 19 nt, Artificial Sequence
  Description of Artificial Sequence: Synthetic oligonucleotide
  Sense strand starting at position 3953 of SEQ ID NO: 2026
uuugaugauuaauugggua

SEQ ID NO: 157625 - RNA, 19 nt, Artificial Sequence
  Description of Artificial Sequence: Synthetic oligonucleotide
  Antisense strand to SEQ ID NO: 157624
uacccaauuaaucaucaaa

SEQ ID NO: 157626 - RNA, 19 nt, Artificial Sequence
  Description of Artificial Sequence: Synthetic oligonucleotide
  Sense strand starting at position 3955 of SEQ ID NO: 2026
ugaugauuaauuggguauu

SEQ ID NO: 157627 - RNA, 19 nt, Artificial Sequence
  Description of Artificial Sequence: Synthetic oligonucleotide
  Antisense strand to SEQ ID NO: 157626
aauacccaauuaaucauca

SEQ ID NO: 157628 - RNA, 19 nt, Artificial Sequence
  Description of Artificial Sequence: Synthetic oligonucleotide
  Sense strand starting at position 81 of SEQ ID NO: 2027
gcaauauccacggaccagu

SEQ ID NO: 157629 - RNA, 19 nt, Artificial Sequence
  Description of Artificial Sequence: Synthetic oligonucleotide
  Antisense strand to SEQ ID NO: 157628
acugguccguggauauugc

SEQ ID NO: 157630 - RNA, 19 nt, Artificial Sequence
  Description of Artificial Sequence: Synthetic oligonucleotide
  Sense strand starting at position 153 of SEQ ID NO: 2027
aguauuagcaugggucuca

SEQ ID NO: 157631 - RNA, 19 nt, Artificial Sequence
  Description of Artificial Sequence: Synthetic oligonucleotide
  Antisense strand to SEQ ID NO: 157630
ugagacccaugcuaauacu

SEQ ID NO: 157632 - RNA, 19 nt, Artificial Sequence
  Description of Artificial Sequence: Synthetic oligonucleotide
  Sense strand starting at position 210 of SEQ ID NO: 2027
ucaggaucaaugcagugau

SEQ ID NO: 157633 - RNA, 19 nt, Artificial Sequence
  Description of Artificial Sequence: Synthetic oligonucleotide
  Antisense strand to SEQ ID NO: 157632
aucacugcauugauccuga

SEQ ID NO: 157634 - RNA, 19 nt, Artificial Sequence
  Description of Artificial Sequence: Synthetic oligonucleotide
  Sense strand starting at position 213 of SEQ ID NO: 2027
ggaucaaugcagugauuac

SEQ ID NO: 157635 - RNA, 19 nt, Artificial Sequence
  Description of Artificial Sequence: Synthetic oligonucleotide
  Antisense strand to SEQ ID NO: 157634
guaaucacugcauugaucc

SEQ ID NO: 157636 - RNA, 19 nt, Artificial Sequence
  Description of Artificial Sequence: Synthetic oligonucleotide
  Sense strand starting at position 217 of SEQ ID NO: 2027
caaugcagugauuacgaaa

SEQ ID NO: 157637 - RNA, 19 nt, Artificial Sequence
  Description of Artificial Sequence: Synthetic oligonucleotide
  Antisense strand to SEQ ID NO: 157636
uuucguaaucacugcauug

SEQ ID NO: 157638 - RNA, 19 nt, Artificial Sequence
  Description of Artificial Sequence: Synthetic oligonucleotide
  Sense strand starting at position 224 of SEQ ID NO: 2027
gugauuacgaaagagaguu

SEQ ID NO: 157639 - RNA, 19 nt, Artificial Sequence
  Description of Artificial Sequence: Synthetic oligonucleotide
  Antisense strand to SEQ ID NO: 157638
aacucucuuucguaaucac

SEQ ID NO: 157640 - RNA, 19 nt, Artificial Sequence
  Description of Artificial Sequence: Synthetic oligonucleotide
  Sense strand starting at position 242 of SEQ ID NO: 2027
ugggucauagucuaugcau

SEQ ID NO: 157641 - RNA, 19 nt, Artificial Sequence
  Description of Artificial Sequence: Synthetic oligonucleotide
  Antisense strand to SEQ ID NO: 157640
augcauagacuaugaccca

SEQ ID NO: 157642 - RNA, 19 nt, Artificial Sequence
  Description of Artificial Sequence: Synthetic oligonucleotide
  Sense strand starting at position 244 of SEQ ID NO: 2027
ggucauagucuaugcaugu

SEQ ID NO: 157643 - RNA, 19 nt, Artificial Sequence
  Description of Artificial Sequence: Synthetic oligonucleotide
  Antisense strand to SEQ ID NO: 157642
acaugcauagacuaugacc

SEQ ID NO: 157644 - RNA, 19 nt, Artificial Sequence
  Description of Artificial Sequence: Synthetic oligonucleotide
  Sense strand starting at position 248 of SEQ ID NO: 2027
auagucuaugcauguaacu

SEQ ID NO: 157645 - RNA, 19 nt, Artificial Sequence
  Description of Artificial Sequence: Synthetic oligonucleotide
  Antisense strand to SEQ ID NO: 157644
aguuacaugcauagacuau

SEQ ID NO: 157646 - RNA, 19 nt, Artificial Sequence
  Description of Artificial Sequence: Synthetic oligonucleotide
  Sense strand starting at position 322 of SEQ ID NO: 2027
acaguccaugugugucaua

SEQ ID NO: 157647 - RNA, 19 nt, Artificial Sequence
  Description of Artificial Sequence: Synthetic oligonucleotide
  Antisense strand to SEQ ID NO: 157646
uaugacacacauggacugu

SEQ ID NO: 157648 - RNA, 19 nt, Artificial Sequence
  Description of Artificial Sequence: Synthetic oligonucleotide
  Sense strand starting at position 427 of SEQ ID NO: 2027
ggcucauucuggguguuga

SEQ ID NO: 157649 - RNA, 19 nt, Artificial Sequence
  Description of Artificial Sequence: Synthetic oligonucleotide
  Antisense strand to SEQ ID NO: 157648
ucaacacccagaaugagcc

SEQ ID NO: 157650 - RNA, 19 nt, Artificial Sequence
  Description of Artificial Sequence: Synthetic oligonucleotide
  Sense strand starting at position 428 of SEQ ID NO: 2027
gcucauucuggguguugaa

SEQ ID NO: 157651 - RNA, 19 nt, Artificial Sequence
  Description of Artificial Sequence: Synthetic oligonucleotide
  Antisense strand to SEQ ID NO: 157650
uucaacacccagaaugagc

SEQ ID NO: 157652 - RNA, 19 nt, Artificial Sequence
  Description of Artificial Sequence: Synthetic oligonucleotide
  Sense strand starting at position 435 of SEQ ID NO: 2027
cuggguguugaaggaauca

SEQ ID NO: 157653 - RNA, 19 nt, Artificial Sequence
  Description of Artificial Sequence: Synthetic oligonucleotide
  Antisense strand to SEQ ID NO: 157652
ugauuccuucaacacccag

SEQ ID NO: 157654 - RNA, 19 nt, Artificial Sequence
  Description of Artificial Sequence: Synthetic oligonucleotide
  Sense strand starting at position 473 of SEQ ID NO: 2027
ccuuguguuguguauaagu

SEQ ID NO: 157655 - RNA, 19 nt, Artificial Sequence
  Description of Artificial Sequence: Synthetic oligonucleotide
  Antisense strand to SEQ ID NO: 157654
acuuauacacaacacaagg

SEQ ID NO: 157656 - RNA, 19 nt, Artificial Sequence
  Description of Artificial Sequence: Synthetic oligonucleotide
  Sense strand starting at position 611 of SEQ ID NO: 2027
uugaaauagccuugugauc

SEQ ID NO: 157657 - RNA, 19 nt, Artificial Sequence
  Description of Artificial Sequence: Synthetic oligonucleotide
  Antisense strand to SEQ ID NO: 157656
gaucacaaggcuauuucaa

SEQ ID NO: 157658 - RNA, 19 nt, Artificial Sequence
  Description of Artificial Sequence: Synthetic oligonucleotide
  Sense strand starting at position 807 of SEQ ID NO: 2027
cugccuguugcccaauaau

SEQ ID NO: 157659 - RNA, 19 nt, Artificial Sequence
  Description of Artificial Sequence: Synthetic oligonucleotide
  Antisense strand to SEQ ID NO: 157658
auuauugggcaacaggcag

SEQ ID NO: 157660 - RNA, 19 nt, Artificial Sequence
  Description of Artificial Sequence: Synthetic oligonucleotide
  Sense strand starting at position 810 of SEQ ID NO: 2027
ccuguugcccaauaauagu

SEQ ID NO: 157661 - RNA, 19 nt, Artificial Sequence
  Description of Artificial Sequence: Synthetic oligonucleotide
  Antisense strand to SEQ ID NO: 157660
acuauuauugggcaacagg

SEQ ID NO: 157662 - RNA, 19 nt, Artificial Sequence
  Description of Artificial Sequence: Synthetic oligonucleotide
  Sense strand starting at position 827 of SEQ ID NO: 2027
gugaccgauuuccaagaaa

SEQ ID NO: 157663 - RNA, 19 nt, Artificial Sequence
  Description of Artificial Sequence: Synthetic oligonucleotide
  Antisense strand to SEQ ID NO: 157662
uuucuuggaaaucggucac

SEQ ID NO: 157664 - RNA, 19 nt, Artificial Sequence
  Description of Artificial Sequence: Synthetic oligonucleotide
  Sense strand starting at position 949 of SEQ ID NO: 2027
agagaaguaaagcgggauu

SEQ ID NO: 157665 - RNA, 19 nt, Artificial Sequence
  Description of Artificial Sequence: Synthetic oligonucleotide
  Antisense strand to SEQ ID NO: 157664
aaucccgcuuuacuucucu

SEQ ID NO: 157666 - RNA, 19 nt, Artificial Sequence
  Description of Artificial Sequence: Synthetic oligonucleotide
  Sense strand starting at position 951 of SEQ ID NO: 2027
agaaguaaagcgggauugu

SEQ ID NO: 157667 - RNA, 19 nt, Artificial Sequence
  Description of Artificial Sequence: Synthetic oligonucleotide
  Antisense strand to SEQ ID NO: 157666
acaaucccgcuuuacuucu

SEQ ID NO: 157668 - RNA, 19 nt, Artificial Sequence
  Description of Artificial Sequence: Synthetic oligonucleotide
  Sense strand starting at position 952 of SEQ ID NO: 2027
gaaguaaagcgggauugua

SEQ ID NO: 157669 - RNA, 19 nt, Artificial Sequence
  Description of Artificial Sequence: Synthetic oligonucleotide
  Antisense strand to SEQ ID NO: 157668
uacaaucccgcuuuacuuc

SEQ ID NO: 157670 - RNA, 19 nt, Artificial Sequence
  Description of Artificial Sequence: Synthetic oligonucleotide
  Sense strand starting at position 960 of SEQ ID NO: 2027
gcgggauuguaaagggaau

SEQ ID NO: 157671 - RNA, 19 nt, Artificial Sequence
  Description of Artificial Sequence: Synthetic oligonucleotide
  Antisense strand to SEQ ID NO: 157670
auucccuuuacaaucccgc

SEQ ID NO: 157672 - RNA, 19 nt, Artificial Sequence
  Description of Artificial Sequence: Synthetic oligonucleotide
  Sense strand starting at position 1376 of SEQ ID NO: 2027
ggcgcaguccuggaagaug

SEQ ID NO: 157673 - RNA, 19 nt, Artificial Sequence
  Description of Artificial Sequence: Synthetic oligonucleotide
  Antisense strand to SEQ ID NO: 157672
caucuuccaggacugcgcc

SEQ ID NO: 157674 - RNA, 19 nt, Artificial Sequence
  Description of Artificial Sequence: Synthetic oligonucleotide
  Sense strand starting at position 1648 of SEQ ID NO: 2027
ggucggagagcauguugaa

SEQ ID NO: 157675 - RNA, 19 nt, Artificial Sequence
  Description of Artificial Sequence: Synthetic oligonucleotide
  Antisense strand to SEQ ID NO: 157674
uucaacaugcucuccgacc

SEQ ID NO: 157676 - RNA, 19 nt, Artificial Sequence
  Description of Artificial Sequence: Synthetic oligonucleotide
  Sense strand starting at position 2085 of SEQ ID NO: 2027
gaugucucucuuuguggga

SEQ ID NO: 157677 - RNA, 19 nt, Artificial Sequence
  Description of Artificial Sequence: Synthetic oligonucleotide
  Antisense strand to SEQ ID NO: 157676
ucccacaaagagagacauc

SEQ ID NO: 157678 - RNA, 19 nt, Artificial Sequence
  Description of Artificial Sequence: Synthetic oligonucleotide
  Sense strand starting at position 2140 of SEQ ID NO: 2027
gggcgugucuggacgucaa

SEQ ID NO: 157679 - RNA, 19 nt, Artificial Sequence
  Description of Artificial Sequence: Synthetic oligonucleotide
  Antisense strand to SEQ ID NO: 157678
uugacguccagacacgccc

SEQ ID NO: 157680 - RNA, 19 nt, Artificial Sequence
  Description of Artificial Sequence: Synthetic oligonucleotide
  Sense strand starting at position 2144 of SEQ ID NO: 2027
gugucuggacgucaaucuu

SEQ ID NO: 157681 - RNA, 19 nt, Artificial Sequence
  Description of Artificial Sequence: Synthetic oligonucleotide
  Antisense strand to SEQ ID NO: 157680
aagauugacguccagacac

SEQ ID NO: 157682 - RNA, 19 nt, Artificial Sequence
  Description of Artificial Sequence: Synthetic oligonucleotide
  Sense strand starting at position 2239 of SEQ ID NO: 2027
ccuguugacucagucauaa

SEQ ID NO: 157683 - RNA, 19 nt, Artificial Sequence
  Description of Artificial Sequence: Synthetic oligonucleotide
  Antisense strand to SEQ ID NO: 157682
uuaugacugagucaacagg

SEQ ID NO: 157684 - RNA, 19 nt, Artificial Sequence
  Description of Artificial Sequence: Synthetic oligonucleotide
  Sense strand starting at position 2422 of SEQ ID NO: 2027
cgugaaaugugaccucauc

SEQ ID NO: 157685 - RNA, 19 nt, Artificial Sequence
  Description of Artificial Sequence: Synthetic oligonucleotide
  Antisense strand to SEQ ID NO: 157684
gaugaggucacauuucacg

SEQ ID NO: 157686 - RNA, 19 nt, Artificial Sequence
  Description of Artificial Sequence: Synthetic oligonucleotide
  Sense strand starting at position 2528 of SEQ ID NO: 2027
gcaggaucguuccuauuac

SEQ ID NO: 157687 - RNA, 19 nt, Artificial Sequence
  Description of Artificial Sequence: Synthetic oligonucleotide
  Antisense strand to SEQ ID NO: 157686
guaauaggaacgauccugc

SEQ ID NO: 157688 - RNA, 19 nt, Artificial Sequence
  Description of Artificial Sequence: Synthetic oligonucleotide
  Sense strand starting at position 2580 of SEQ ID NO: 2027
ucaggaucuucgcugucaa

SEQ ID NO: 157689 - RNA, 19 nt, Artificial Sequence
  Description of Artificial Sequence: Synthetic oligonucleotide
  Antisense strand to SEQ ID NO: 157688
uugacagcgaagauccuga

SEQ ID NO: 157690 - RNA, 19 nt, Artificial Sequence
  Description of Artificial Sequence: Synthetic oligonucleotide
  Sense strand starting at position 2581 of SEQ ID NO: 2027
caggaucuucgcugucaag

SEQ ID NO: 157691 - RNA, 19 nt, Artificial Sequence
  Description of Artificial Sequence: Synthetic oligonucleotide
  Antisense strand to SEQ ID NO: 157690
cuugacagcgaagauccug

SEQ ID NO: 157692 - RNA, 19 nt, Artificial Sequence
  Description of Artificial Sequence: Synthetic oligonucleotide
  Sense strand starting at position 2600 of SEQ ID NO: 2027
gcuuccuucccugggugaa

SEQ ID NO: 157693 - RNA, 19 nt, Artificial Sequence
  Description of Artificial Sequence: Synthetic oligonucleotide
  Antisense strand to SEQ ID NO: 157692
uucacccagggaaggaagc

SEQ ID NO: 157694 - RNA, 19 nt, Artificial Sequence
  Description of Artificial Sequence: Synthetic oligonucleotide
  Sense strand starting at position 2601 of SEQ ID NO: 2027
cuuccuucccugggugaau

SEQ ID NO: 157695 - RNA, 19 nt, Artificial Sequence
  Description of Artificial Sequence: Synthetic oligonucleotide
  Antisense strand to SEQ ID NO: 157694
auucacccagggaaggaag

SEQ ID NO: 157696 - RNA, 19 nt, Artificial Sequence
  Description of Artificial Sequence: Synthetic oligonucleotide
  Sense strand starting at position 2693 of SEQ ID NO: 2027
uacuuugugguagacacaa

SEQ ID NO: 157697 - RNA, 19 nt, Artificial Sequence
  Description of Artificial Sequence: Synthetic oligonucleotide
  Antisense strand to SEQ ID NO: 157696
uugugucuaccacaaagua

SEQ ID NO: 157698 - RNA, 19 nt, Artificial Sequence
  Description of Artificial Sequence: Synthetic oligonucleotide
  Sense strand starting at position 2828 of SEQ ID NO: 2027
aguacaaucgacugaccua

SEQ ID NO: 157699 - RNA, 19 nt, Artificial Sequence
  Description of Artificial Sequence: Synthetic oligonucleotide
  Antisense strand to SEQ ID NO: 157698
uaggucagucgauuguacu

SEQ ID NO: 157700 - RNA, 19 nt, Artificial Sequence
  Description of Artificial Sequence: Synthetic oligonucleotide
  Sense strand starting at position 2841 of SEQ ID NO: 2027
gaccuacaugaagguuuau

SEQ ID NO: 157701 - RNA, 19 nt, Artificial Sequence
  Description of Artificial Sequence: Synthetic oligonucleotide
  Antisense strand to SEQ ID NO: 157700
auaaaccuucauguagguc

SEQ ID NO: 157702 - RNA, 19 nt, Artificial Sequence
  Description of Artificial Sequence: Synthetic oligonucleotide
  Sense strand starting at position 3167 of SEQ ID NO: 2027
ggccaagacucuucuauug

SEQ ID NO: 157703 - RNA, 19 nt, Artificial Sequence
  Description of Artificial Sequence: Synthetic oligonucleotide
  Antisense strand to SEQ ID NO: 157702
caauagaagagucuuggcc

SEQ ID NO: 157704 - RNA, 19 nt, Artificial Sequence
  Description of Artificial Sequence: Synthetic oligonucleotide
  Sense strand starting at position 3210 of SEQ ID NO: 2027
aguuauccagaagguaacu

SEQ ID NO: 157705 - RNA, 19 nt, Artificial Sequence
  Description of Artificial Sequence: Synthetic oligonucleotide
  Antisense strand to SEQ ID NO: 157704
aguuaccuucuggauaacu

SEQ ID NO: 157706 - RNA, 19 nt, Artificial Sequence
  Description of Artificial Sequence: Synthetic oligonucleotide
  Sense strand starting at position 3389 of SEQ ID NO: 2027
gcagucuggucaucucuau

SEQ ID NO: 157707 - RNA, 19 nt, Artificial Sequence
  Description of Artificial Sequence: Synthetic oligonucleotide
  Antisense strand to SEQ ID NO: 157706
auagagaugaccagacugc

SEQ ID NO: 157708 - RNA, 19 nt, Artificial Sequence
  Description of Artificial Sequence: Synthetic oligonucleotide
  Sense strand starting at position 283 of SEQ ID NO: 2028
aggugugcugcgucaguca

SEQ ID NO: 157709 - RNA, 19 nt, Artificial Sequence
  Description of Artificial Sequence: Synthetic oligonucleotide
  Antisense strand to SEQ ID NO: 157708
ugacugacgcagcacaccu

SEQ ID NO: 157710 - RNA, 19 nt, Artificial Sequence
  Description of Artificial Sequence: Synthetic oligonucleotide
  Sense strand starting at position 288 of SEQ ID NO: 2028
ugcugcgucagucaugaca

SEQ ID NO: 157711 - RNA, 19 nt, Artificial Sequence
  Description of Artificial Sequence: Synthetic oligonucleotide
  Antisense strand to SEQ ID NO: 157710
ugucaugacugacgcagca

SEQ ID NO: 157712 - RNA, 19 nt, Artificial Sequence
  Description of Artificial Sequence: Synthetic oligonucleotide
  Sense strand starting at position 418 of SEQ ID NO: 2028
gaggacauucugggcucaa

SEQ ID NO: 157713 - RNA, 19 nt, Artificial Sequence
  Description of Artificial Sequence: Synthetic oligonucleotide
  Antisense strand to SEQ ID NO: 157712
uugagcccagaauguccuc

SEQ ID NO: 157714 - RNA, 19 nt, Artificial Sequence
  Description of Artificial Sequence: Synthetic oligonucleotide
  Sense strand starting at position 498 of SEQ ID NO: 2028
uuccacucucugugaaaug

SEQ ID NO: 157715 - RNA, 19 nt, Artificial Sequence
  Description of Artificial Sequence: Synthetic oligonucleotide
  Antisense strand to SEQ ID NO: 157714
cauuucacagagaguggaa

SEQ ID NO: 157716 - RNA, 19 nt, Artificial Sequence
  Description of Artificial Sequence: Synthetic oligonucleotide
  Sense strand starting at position 508 of SEQ ID NO: 2028
ugugaaaugggccaccaau

SEQ ID NO: 157717 - RNA, 19 nt, Artificial Sequence
  Description of Artificial Sequence: Synthetic oligonucleotide
  Antisense strand to SEQ ID NO: 157716
auugguggcccauuucaca

SEQ ID NO: 157718 - RNA, 19 nt, Artificial Sequence
  Description of Artificial Sequence: Synthetic oligonucleotide
  Sense strand starting at position 527 of SEQ ID NO: 2028
aucuacuuagagggugaau

SEQ ID NO: 157719 - RNA, 19 nt, Artificial Sequence
  Description of Artificial Sequence: Synthetic oligonucleotide
  Antisense strand to SEQ ID NO: 157718
auucacccucuaaguagau

SEQ ID NO: 157720 - RNA, 19 nt, Artificial Sequence
  Description of Artificial Sequence: Synthetic oligonucleotide
  Sense strand starting at position 529 of SEQ ID NO: 2028
cuacuuagagggugaaugu

SEQ ID NO: 157721 - RNA, 19 nt, Artificial Sequence
  Description of Artificial Sequence: Synthetic oligonucleotide
  Antisense strand to SEQ ID NO: 157720
acauucacccucuaaguag

SEQ ID NO: 157722 - RNA, 19 nt, Artificial Sequence
  Description of Artificial Sequence: Synthetic oligonucleotide
  Sense strand starting at position 539 of SEQ ID NO: 2028
ggugaaugugcacaucaag

SEQ ID NO: 157723 - RNA, 19 nt, Artificial Sequence
  Description of Artificial Sequence: Synthetic oligonucleotide
  Antisense strand to SEQ ID NO: 157722
cuugaugugcacauucacc

SEQ ID NO: 157724 - RNA, 19 nt, Artificial Sequence
  Description of Artificial Sequence: Synthetic oligonucleotide
  Sense strand starting at position 637 of SEQ ID NO: 2028
cgaguugugcgugaucuuu

SEQ ID NO: 157725 - RNA, 19 nt, Artificial Sequence
  Description of Artificial Sequence: Synthetic oligonucleotide
  Antisense strand to SEQ ID NO: 157724
aaagaucacgcacaacucg

SEQ ID NO: 157726 - RNA, 19 nt, Artificial Sequence
  Description of Artificial Sequence: Synthetic oligonucleotide
  Sense strand starting at position 643 of SEQ ID NO: 2028
gugcgugaucuuuggcaag

SEQ ID NO: 157727 - RNA, 19 nt, Artificial Sequence
  Description of Artificial Sequence: Synthetic oligonucleotide
  Antisense strand to SEQ ID NO: 157726
cuugccaaagaucacgcac

SEQ ID NO: 157728 - RNA, 19 nt, Artificial Sequence
  Description of Artificial Sequence: Synthetic oligonucleotide
  Sense strand starting at position 708 of SEQ ID NO: 2028
agaauaacgucacccaugu

SEQ ID NO: 157729 - RNA, 19 nt, Artificial Sequence
  Description of Artificial Sequence: Synthetic oligonucleotide
  Antisense strand to SEQ ID NO: 157728
acaugggugacguuauucu

SEQ ID NO: 157730 - RNA, 19 nt, Artificial Sequence
  Description of Artificial Sequence: Synthetic oligonucleotide
  Sense strand starting at position 712 of SEQ ID NO: 2028
uaacgucacccaugugaga

SEQ ID NO: 157731 - RNA, 19 nt, Artificial Sequence
  Description of Artificial Sequence: Synthetic oligonucleotide
  Antisense strand to SEQ ID NO: 157730
ucucacaugggugacguua

SEQ ID NO: 157732 - RNA, 19 nt, Artificial Sequence
  Description of Artificial Sequence: Synthetic oligonucleotide
  Sense strand starting at position 741 of SEQ ID NO: 2028
uuguuagaccugcaucaga

SEQ ID NO: 157733 - RNA, 19 nt, Artificial Sequence
  Description of Artificial Sequence: Synthetic oligonucleotide
  Antisense strand to SEQ ID NO: 157732
ucugaugcaggucuaacaa

SEQ ID NO: 157734 - RNA, 19 nt, Artificial Sequence
  Description of Artificial Sequence: Synthetic oligonucleotide
  Sense strand starting at position 746 of SEQ ID NO: 2028
agaccugcaucagauaaug

SEQ ID NO: 157735 - RNA, 19 nt, Artificial Sequence
  Description of Artificial Sequence: Synthetic oligonucleotide
  Antisense strand to SEQ ID NO: 157734
cauuaucugaugcaggucu

SEQ ID NO: 157736 - RNA, 19 nt, Artificial Sequence
  Description of Artificial Sequence: Synthetic oligonucleotide
  Sense strand starting at position 813 of SEQ ID NO: 2028
gugucaguauugcugggaa

SEQ ID NO: 157737 - RNA, 19 nt, Artificial Sequence
  Description of Artificial Sequence: Synthetic oligonucleotide
  Antisense strand to SEQ ID NO: 157736
uucccagcaauacugacac

SEQ ID NO: 157738 - RNA, 19 nt, Artificial Sequence
  Description of Artificial Sequence: Synthetic oligonucleotide
  Sense strand starting at position 815 of SEQ ID NO: 2028
gucaguauugcugggaaca

SEQ ID NO: 157739 - RNA, 19 nt, Artificial Sequence
  Description of Artificial Sequence: Synthetic oligonucleotide
  Antisense strand to SEQ ID NO: 157738
uguucccagcaauacugac

SEQ ID NO: 157740 - RNA, 19 nt, Artificial Sequence
  Description of Artificial Sequence: Synthetic oligonucleotide
  Sense strand starting at position 816 of SEQ ID NO: 2028
ucaguauugcugggaacau

SEQ ID NO: 157741 - RNA, 19 nt, Artificial Sequence
  Description of Artificial Sequence: Synthetic oligonucleotide
  Antisense strand to SEQ ID NO: 157740
auguucccagcaauacuga

SEQ ID NO: 157742 - RNA, 19 nt, Artificial Sequence
  Description of Artificial Sequence: Synthetic oligonucleotide
  Sense strand starting at position 1095 of SEQ ID NO: 2028
cguguaugaccuggccaga

SEQ ID NO: 157743 - RNA, 19 nt, Artificial Sequence
  Description of Artificial Sequence: Synthetic oligonucleotide
  Antisense strand to SEQ ID NO: 157742
ucuggccaggucauacacg

SEQ ID NO: 157744 - RNA, 19 nt, Artificial Sequence
  Description of Artificial Sequence: Synthetic oligonucleotide
  Sense strand starting at position 1132 of SEQ ID NO: 2028
ucagcucugagaugaggua

SEQ ID NO: 157745 - RNA, 19 nt, Artificial Sequence
  Description of Artificial Sequence: Synthetic oligonucleotide
  Antisense strand to SEQ ID NO: 157744
uaccucaucucagagcuga

SEQ ID NO: 157746 - RNA, 19 nt, Artificial Sequence
  Description of Artificial Sequence: Synthetic oligonucleotide
  Sense strand starting at position 1186 of SEQ ID NO: 2028
ccuuguguccacugggaaa

SEQ ID NO: 157747 - RNA, 19 nt, Artificial Sequence
  Description of Artificial Sequence: Synthetic oligonucleotide
  Antisense strand to SEQ ID NO: 157746
uuucccaguggacacaagg

SEQ ID NO: 157748 - RNA, 19 nt, Artificial Sequence
  Description of Artificial Sequence: Synthetic oligonucleotide
  Sense strand starting at position 1239 of SEQ ID NO: 2028
aggugagaagccuguauuc

SEQ ID NO: 157749 - RNA, 19 nt, Artificial Sequence
  Description of Artificial Sequence: Synthetic oligonucleotide
  Antisense strand to SEQ ID NO: 157748
gaauacaggcuucucaccu

SEQ ID NO: 157750 - RNA, 19 nt, Artificial Sequence
  Description of Artificial Sequence: Synthetic oligonucleotide
  Sense strand starting at position 1823 of SEQ ID NO: 2028
cgccgagugcgcccugaaa

SEQ ID NO: 157751 - RNA, 19 nt, Artificial Sequence
  Description of Artificial Sequence: Synthetic oligonucleotide
  Antisense strand to SEQ ID NO: 157750
uuucagggcgcacucggcg

SEQ ID NO: 157752 - RNA, 19 nt, Artificial Sequence
  Description of Artificial Sequence: Synthetic oligonucleotide
  Sense strand starting at position 2191 of SEQ ID NO: 2028
gcgagaaguuugccagccu

SEQ ID NO: 157753 - RNA, 19 nt, Artificial Sequence
  Description of Artificial Sequence: Synthetic oligonucleotide
  Antisense strand to SEQ ID NO: 157752
aggcuggcaaacuucucgc

SEQ ID NO: 157754 - RNA, 19 nt, Artificial Sequence
  Description of Artificial Sequence: Synthetic oligonucleotide
  Sense strand starting at position 2227 of SEQ ID NO: 2028
ggguguugcugagugagga

SEQ ID NO: 157755 - RNA, 19 nt, Artificial Sequence
  Description of Artificial Sequence: Synthetic oligonucleotide
  Antisense strand to SEQ ID NO: 157754
uccucacucagcaacaccc

SEQ ID NO: 157756 - RNA, 19 nt, Artificial Sequence
  Description of Artificial Sequence: Synthetic oligonucleotide
  Sense strand starting at position 2307 of SEQ ID NO: 2028
ucgacuuuaguuuguagaa

SEQ ID NO: 157757 - RNA, 19 nt, Artificial Sequence
  Description of Artificial Sequence: Synthetic oligonucleotide
  Antisense strand to SEQ ID NO: 157756
uucuacaaacuaaagucga

SEQ ID NO: 157758 - RNA, 19 nt, Artificial Sequence
  Description of Artificial Sequence: Synthetic oligonucleotide
  Sense strand starting at position 2308 of SEQ ID NO: 2028
cgacuuuaguuuguagaaa

SEQ ID NO: 157759 - RNA, 19 nt, Artificial Sequence
  Description of Artificial Sequence: Synthetic oligonucleotide
  Antisense strand to SEQ ID NO: 157758
uuucuacaaacuaaagucg

SEQ ID NO: 157760 - RNA, 19 nt, Artificial Sequence
  Description of Artificial Sequence: Synthetic oligonucleotide
  Sense strand starting at position 2358 of SEQ ID NO: 2028
ggcuccuugccucggaaga

SEQ ID NO: 157761 - RNA, 19 nt, Artificial Sequence
  Description of Artificial Sequence: Synthetic oligonucleotide
  Antisense strand to SEQ ID NO: 157760
ucuuccgaggcaaggagcc

SEQ ID NO: 157762 - RNA, 19 nt, Artificial Sequence
  Description of Artificial Sequence: Synthetic oligonucleotide
  Sense strand starting at position 2666 of SEQ ID NO: 2028
cacagagaacagugucauc

SEQ ID NO: 157763 - RNA, 19 nt, Artificial Sequence
  Description of Artificial Sequence: Synthetic oligonucleotide
  Antisense strand to SEQ ID NO: 157762
gaugacacuguucucugug

SEQ ID NO: 157764 - RNA, 19 nt, Artificial Sequence
  Description of Artificial Sequence: Synthetic oligonucleotide
  Sense strand starting at position 2818 of SEQ ID NO: 2028
guugguaccgcugggagaa

SEQ ID NO: 157765 - RNA, 19 nt, Artificial Sequence
  Description of Artificial Sequence: Synthetic oligonucleotide
  Antisense strand to SEQ ID NO: 157764
uucucccagcgguaccaac

SEQ ID NO: 157766 - RNA, 19 nt, Artificial Sequence
  Description of Artificial Sequence: Synthetic oligonucleotide
  Sense strand starting at position 2944 of SEQ ID NO: 2028
aggugcccucuguguagaa

SEQ ID NO: 157767 - RNA, 19 nt, Artificial Sequence
  Description of Artificial Sequence: Synthetic oligonucleotide
  Antisense strand to SEQ ID NO: 157766
uucuacacagagggcaccu

SEQ ID NO: 157768 - RNA, 19 nt, Artificial Sequence
  Description of Artificial Sequence: Synthetic oligonucleotide
  Sense strand starting at position 2945 of SEQ ID NO: 2028
ggugcccucuguguagaaa

SEQ ID NO: 157769 - RNA, 19 nt, Artificial Sequence
  Description of Artificial Sequence: Synthetic oligonucleotide
  Antisense strand to SEQ ID NO: 157768
uuucuacacagagggcacc

SEQ ID NO: 157770 - RNA, 19 nt, Artificial Sequence
  Description of Artificial Sequence: Synthetic oligonucleotide
  Sense strand starting at position 2948 of SEQ ID NO: 2028
gcccucuguguagaaagaa

SEQ ID NO: 157771 - RNA, 19 nt, Artificial Sequence
  Description of Artificial Sequence: Synthetic oligonucleotide
  Antisense strand to SEQ ID NO: 157770
uucuuucuacacagagggc

SEQ ID NO: 157772 - RNA, 19 nt, Artificial Sequence
  Description of Artificial Sequence: Synthetic oligonucleotide
  Sense strand starting at position 3290 of SEQ ID NO: 2028
ucagcauuaccuggagaag

SEQ ID NO: 157773 - RNA, 19 nt, Artificial Sequence
  Description of Artificial Sequence: Synthetic oligonucleotide
  Antisense strand to SEQ ID NO: 157772
cuucuccagguaaugcuga

SEQ ID NO: 157774 - RNA, 19 nt, Artificial Sequence
  Description of Artificial Sequence: Synthetic oligonucleotide
  Sense strand starting at position 3308 of SEQ ID NO: 2028
gguguuacaacgcagguua

SEQ ID NO: 157775 - RNA, 19 nt, Artificial Sequence
  Description of Artificial Sequence: Synthetic oligonucleotide
  Antisense strand to SEQ ID NO: 157774
uaaccugcguuguaacacc

SEQ ID NO: 157776 - RNA, 19 nt, Artificial Sequence
  Description of Artificial Sequence: Synthetic oligonucleotide
  Sense strand starting at position 3364 of SEQ ID NO: 2028
ggguguggagccugaauau

SEQ ID NO: 157777 - RNA, 19 nt, Artificial Sequence
  Description of Artificial Sequence: Synthetic oligonucleotide
  Antisense strand to SEQ ID NO: 157776
auauucaggcuccacaccc

SEQ ID NO: 157778 - RNA, 19 nt, Artificial Sequence
  Description of Artificial Sequence: Synthetic oligonucleotide
  Sense strand starting at position 3374 of SEQ ID NO: 2028
ccugaauauuuccaggauu

SEQ ID NO: 157779 - RNA, 19 nt, Artificial Sequence
  Description of Artificial Sequence: Synthetic oligonucleotide
  Antisense strand to SEQ ID NO: 157778
aauccuggaaauauucagg

SEQ ID NO: 157780 - RNA, 19 nt, Artificial Sequence
  Description of Artificial Sequence: Synthetic oligonucleotide
  Sense strand starting at position 3697 of SEQ ID NO: 2028
ugguccugagguuaugauu

SEQ ID NO: 157781 - RNA, 19 nt, Artificial Sequence
  Description of Artificial Sequence: Synthetic oligonucleotide
  Antisense strand to SEQ ID NO: 157780
aaucauaaccucaggacca

SEQ ID NO: 157782 - RNA, 19 nt, Artificial Sequence
  Description of Artificial Sequence: Synthetic oligonucleotide
  Sense strand starting at position 3801 of SEQ ID NO: 2028
acgguacugguauagaaga

SEQ ID NO: 157783 - RNA, 19 nt, Artificial Sequence
  Description of Artificial Sequence: Synthetic oligonucleotide
  Antisense strand to SEQ ID NO: 157782
ucuucuauaccaguaccgu

SEQ ID NO: 157784 - RNA, 19 nt, Artificial Sequence
  Description of Artificial Sequence: Synthetic oligonucleotide
  Sense strand starting at position 3836 of SEQ ID NO: 2028
gcuguugaaacugagugau

SEQ ID NO: 157785 - RNA, 19 nt, Artificial Sequence
  Description of Artificial Sequence: Synthetic oligonucleotide
  Antisense strand to SEQ ID NO: 157784
aucacucaguuucaacagc

SEQ ID NO: 157786 - RNA, 19 nt, Artificial Sequence
  Description of Artificial Sequence: Synthetic oligonucleotide
  Sense strand starting at position 3842 of SEQ ID NO: 2028
gaaacugagugauggguaa

SEQ ID NO: 157787 - RNA, 19 nt, Artificial Sequence
  Description of Artificial Sequence: Synthetic oligonucleotide
  Antisense strand to SEQ ID NO: 157786
uuacccaucacucaguuuc

SEQ ID NO: 157788 - RNA, 19 nt, Artificial Sequence
  Description of Artificial Sequence: Synthetic oligonucleotide
  Sense strand starting at position 3898 of SEQ ID NO: 2029
ugauuuaacuugggagaag

SEQ ID NO: 157789 - RNA, 19 nt, Artificial Sequence
  Description of Artificial Sequence: Synthetic oligonucleotide
  Antisense strand to SEQ ID NO: 157788
cuucucccaaguuaaauca

SEQ ID NO: 157790 - RNA, 19 nt, Artificial Sequence
  Description of Artificial Sequence: Synthetic oligonucleotide
  Sense strand starting at position 3853 of SEQ ID NO: 2029
auucuaugguaauuggauu

SEQ ID NO: 157791 - RNA, 19 nt, Artificial Sequence
  Description of Artificial Sequence: Synthetic oligonucleotide
  Antisense strand to SEQ ID NO: 157790
aauccaauuaccauagaau

SEQ ID NO: 157792 - RNA, 19 nt, Artificial Sequence
  Description of Artificial Sequence: Synthetic oligonucleotide
  Sense strand starting at position 3822 of SEQ ID NO: 2029
gggugcaaacuagauaguu

SEQ ID NO: 157793 - RNA, 19 nt, Artificial Sequence
  Description of Artificial Sequence: Synthetic oligonucleotide
  Antisense strand to SEQ ID NO: 157792
aacuaucuaguuugcaccc

SEQ ID NO: 157794 - RNA, 19 nt, Artificial Sequence
  Description of Artificial Sequence: Synthetic oligonucleotide
  Sense strand starting at position 3815 of SEQ ID NO: 2029
auuaauugggugcaaacua

SEQ ID NO: 157795 - RNA, 19 nt, Artificial Sequence
  Description of Artificial Sequence: Synthetic oligonucleotide
  Antisense strand to SEQ ID NO: 157794
uaguuugcacccaauuaau

SEQ ID NO: 157796 - RNA, 19 nt, Artificial Sequence
  Description of Artificial Sequence: Synthetic oligonucleotide
  Sense strand starting at position 3675 of SEQ ID NO: 2029
gccuuuguuagcguauauu

SEQ ID NO: 157797 - RNA, 19 nt, Artificial Sequence
  Description of Artificial Sequence: Synthetic oligonucleotide
  Antisense strand to SEQ ID NO: 157796
aauauacgcuaacaaaggc

SEQ ID NO: 157798 - RNA, 19 nt, Artificial Sequence
  Description of Artificial Sequence: Synthetic oligonucleotide
  Sense strand starting at position 3644 of SEQ ID NO: 2029
aaguaaguucugggaagag

SEQ ID NO: 157799 - RNA, 19 nt, Artificial Sequence
  Description of Artificial Sequence: Synthetic oligonucleotide
  Antisense strand to SEQ ID NO: 157798
cucuucccagaacuuacuu

SEQ ID NO: 157800 - RNA, 19 nt, Artificial Sequence
  Description of Artificial Sequence: Synthetic oligonucleotide
  Sense strand starting at position 3495 of SEQ ID NO: 2029
ugaggauauaugcauguuu

SEQ ID NO: 157801 - RNA, 19 nt, Artificial Sequence
  Description of Artificial Sequence: Synthetic oligonucleotide
  Antisense strand to SEQ ID NO: 157800
aaacaugcauauauccuca

SEQ ID NO: 157802 - RNA, 19 nt, Artificial Sequence
  Description of Artificial Sequence: Synthetic oligonucleotide
  Sense strand starting at position 3124 of SEQ ID NO: 2029
ggaggaaaggauuggcuuu

SEQ ID NO: 157803 - RNA, 19 nt, Artificial Sequence
  Description of Artificial Sequence: Synthetic oligonucleotide
  Antisense strand to SEQ ID NO: 157802
aaagccaauccuuuccucc

SEQ ID NO: 157804 - RNA, 19 nt, Artificial Sequence
  Description of Artificial Sequence: Synthetic oligonucleotide
  Sense strand starting at position 3101 of SEQ ID NO: 2029
aguuguuaccuuggagaag

SEQ ID NO: 157805 - RNA, 19 nt, Artificial Sequence
  Description of Artificial Sequence: Synthetic oligonucleotide
  Antisense strand to SEQ ID NO: 157804
cuucuccaagguaacaacu

SEQ ID NO: 157806 - RNA, 19 nt, Artificial Sequence
  Description of Artificial Sequence: Synthetic oligonucleotide
  Sense strand starting at position 3079 of SEQ ID NO: 2029
guccgucacgugaauguuu

SEQ ID NO: 157807 - RNA, 19 nt, Artificial Sequence
  Description of Artificial Sequence: Synthetic oligonucleotide
  Antisense strand to SEQ ID NO: 157806
aaacauucacgugacggac

SEQ ID NO: 157808 - RNA, 19 nt, Artificial Sequence
  Description of Artificial Sequence: Synthetic oligonucleotide
  Sense strand starting at position 3056 of SEQ ID NO: 2029
aguuguuuggcugagggaa

SEQ ID NO: 157809 - RNA, 19 nt, Artificial Sequence
  Description of Artificial Sequence: Synthetic oligonucleotide
  Antisense strand to SEQ ID NO: 157808
uucccucagccaaacaacu

SEQ ID NO: 157810 - RNA, 19 nt, Artificial Sequence
  Description of Artificial Sequence: Synthetic oligonucleotide
  Sense strand starting at position 3051 of SEQ ID NO: 2029
agggaaguuguuuggcuga

SEQ ID NO: 157811 - RNA, 19 nt, Artificial Sequence
  Description of Artificial Sequence: Synthetic oligonucleotide
  Antisense strand to SEQ ID NO: 157810
ucagccaaacaacuucccu

SEQ ID NO: 157812 - RNA, 19 nt, Artificial Sequence
  Description of Artificial Sequence: Synthetic oligonucleotide
  Sense strand starting at position 2834 of SEQ ID NO: 2029
cuagaauucgugccggucu

SEQ ID NO: 157813 - RNA, 19 nt, Artificial Sequence
  Description of Artificial Sequence: Synthetic oligonucleotide
  Antisense strand to SEQ ID NO: 157812
agaccggcacgaauucuag

SEQ ID NO: 157814 - RNA, 19 nt, Artificial Sequence
  Description of Artificial Sequence: Synthetic oligonucleotide
  Sense strand starting at position 2756 of SEQ ID NO: 2029
agacguguuuguuugauuu

SEQ ID NO: 157815 - RNA, 19 nt, Artificial Sequence
  Description of Artificial Sequence: Synthetic oligonucleotide
  Antisense strand to SEQ ID NO: 157814
aaaucaaacaaacacgucu

SEQ ID NO: 157816 - RNA, 19 nt, Artificial Sequence
  Description of Artificial Sequence: Synthetic oligonucleotide
  Sense strand starting at position 2706 of SEQ ID NO: 2029
ggcuguuaaacguaguaua

SEQ ID NO: 157817 - RNA, 19 nt, Artificial Sequence
  Description of Artificial Sequence: Synthetic oligonucleotide
  Antisense strand to SEQ ID NO: 157816
uauacuacguuuaacagcc

SEQ ID NO: 157818 - RNA, 19 nt, Artificial Sequence
  Description of Artificial Sequence: Synthetic oligonucleotide
  Sense strand starting at position 2678 of SEQ ID NO: 2029
ggcaucaaucaaugucuuu

SEQ ID NO: 157819 - RNA, 19 nt, Artificial Sequence
  Description of Artificial Sequence: Synthetic oligonucleotide
  Antisense strand to SEQ ID NO: 157818
aaagacauugauugaugcc

SEQ ID NO: 157820 - RNA, 19 nt, Artificial Sequence
  Description of Artificial Sequence: Synthetic oligonucleotide
  Sense strand starting at position 2508 of SEQ ID NO: 2029
gcaggaggcgaucaauguu

SEQ ID NO: 157821 - RNA, 19 nt, Artificial Sequence
  Description of Artificial Sequence: Synthetic oligonucleotide
  Antisense strand to SEQ ID NO: 157820
aacauugaucgccuccugc

SEQ ID NO: 157822 - RNA, 19 nt, Artificial Sequence
  Description of Artificial Sequence: Synthetic oligonucleotide
  Sense strand starting at position 2342 of SEQ ID NO: 2029
gguagauaucagugauuaa

SEQ ID NO: 157823 - RNA, 19 nt, Artificial Sequence
  Description of Artificial Sequence: Synthetic oligonucleotide
  Antisense strand to SEQ ID NO: 157822
uuaaucacugauaucuacc

SEQ ID NO: 157824 - RNA, 19 nt, Artificial Sequence
  Description of Artificial Sequence: Synthetic oligonucleotide
  Sense strand starting at position 2336 of SEQ ID NO: 2029
uggugugguagauaucagu

SEQ ID NO: 157825 - RNA, 19 nt, Artificial Sequence
  Description of Artificial Sequence: Synthetic oligonucleotide
  Antisense strand to SEQ ID NO: 157824
acugauaucuaccacacca

SEQ ID NO: 157826 - RNA, 19 nt, Artificial Sequence
  Description of Artificial Sequence: Synthetic oligonucleotide
  Sense strand starting at position 2334 of SEQ ID NO: 2029
ccuggugugguagauauca

SEQ ID NO: 157827 - RNA, 19 nt, Artificial Sequence
  Description of Artificial Sequence: Synthetic oligonucleotide
  Antisense strand to SEQ ID NO: 157826
ugauaucuaccacaccagg

SEQ ID NO: 157828 - RNA, 19 nt, Artificial Sequence
  Description of Artificial Sequence: Synthetic oligonucleotide
  Sense strand starting at position 1510 of SEQ ID NO: 2029
gggaaugauacacguggaa

SEQ ID NO: 157829 - RNA, 19 nt, Artificial Sequence
  Description of Artificial Sequence: Synthetic oligonucleotide
  Antisense strand to SEQ ID NO: 157828
uuccacguguaucauuccc

SEQ ID NO: 157830 - RNA, 19 nt, Artificial Sequence
  Description of Artificial Sequence: Synthetic oligonucleotide
  Sense strand starting at position 1249 of SEQ ID NO: 2029
cagauugguguggguauga

SEQ ID NO: 157831 - RNA, 19 nt, Artificial Sequence
  Description of Artificial Sequence: Synthetic oligonucleotide
  Antisense strand to SEQ ID NO: 157830
ucauacccacaccaaucug

SEQ ID NO: 157832 - RNA, 19 nt, Artificial Sequence
  Description of Artificial Sequence: Synthetic oligonucleotide
  Sense strand starting at position 1247 of SEQ ID NO: 2029
accagauugguguggguau

SEQ ID NO: 157833 - RNA, 19 nt, Artificial Sequence
  Description of Artificial Sequence: Synthetic oligonucleotide
  Antisense strand to SEQ ID NO: 157832
auacccacaccaaucuggu

SEQ ID NO: 157834 - RNA, 19 nt, Artificial Sequence
  Description of Artificial Sequence: Synthetic oligonucleotide
  Sense strand starting at position 1119 of SEQ ID NO: 2029
augaaagauucugcccauc

SEQ ID NO: 157835 - RNA, 19 nt, Artificial Sequence
  Description of Artificial Sequence: Synthetic oligonucleotide
  Antisense strand to SEQ ID NO: 157834
gaugggcagaaucuuucau

SEQ ID NO: 157836 - RNA, 19 nt, Artificial Sequence
  Description of Artificial Sequence: Synthetic oligonucleotide
  Sense strand starting at position 913 of SEQ ID NO: 2029
agaagagaaugacacauau

SEQ ID NO: 157837 - RNA, 19 nt, Artificial Sequence
  Description of Artificial Sequence: Synthetic oligonucleotide
  Antisense strand to SEQ ID NO: 157836
auaugugucauucucuucu

SEQ ID NO: 157838 - RNA, 19 nt, Artificial Sequence
  Description of Artificial Sequence: Synthetic oligonucleotide
  Sense strand starting at position 894 of SEQ ID NO: 2029
caguuucggcauuaaagag

SEQ ID NO: 157839 - RNA, 19 nt, Artificial Sequence
  Description of Artificial Sequence: Synthetic oligonucleotide
  Antisense strand to SEQ ID NO: 157838
cucuuuaaugccgaaacug

SEQ ID NO: 157840 - RNA, 19 nt, Artificial Sequence
  Description of Artificial Sequence: Synthetic oligonucleotide
  Sense strand starting at position 890 of SEQ ID NO: 2029
gagacaguuucggcauuaa

SEQ ID NO: 157841 - RNA, 19 nt, Artificial Sequence
  Description of Artificial Sequence: Synthetic oligonucleotide
  Antisense strand to SEQ ID NO: 157840
uuaaugccgaaacugucuc

SEQ ID NO: 157842 - RNA, 19 nt, Artificial Sequence
  Description of Artificial Sequence: Synthetic oligonucleotide
  Sense strand starting at position 824 of SEQ ID NO: 2029
aagaaauguuguuucuaga

SEQ ID NO: 157843 - RNA, 19 nt, Artificial Sequence
  Description of Artificial Sequence: Synthetic oligonucleotide
  Antisense strand to SEQ ID NO: 157842
ucuagaaacaacauuucuu

SEQ ID NO: 157844 - RNA, 19 nt, Artificial Sequence
  Description of Artificial Sequence: Synthetic oligonucleotide
  Sense strand starting at position 823 of SEQ ID NO: 2029
caagaaauguuguuucuag

SEQ ID NO: 157845 - RNA, 19 nt, Artificial Sequence
  Description of Artificial Sequence: Synthetic oligonucleotide
  Antisense strand to SEQ ID NO: 157844
cuagaaacaacauuucuug

SEQ ID NO: 157846 - RNA, 19 nt, Artificial Sequence
  Description of Artificial Sequence: Synthetic oligonucleotide
  Sense strand starting at position 582 of SEQ ID NO: 2029
guacaauucugaguauugg

SEQ ID NO: 157847 - RNA, 19 nt, Artificial Sequence
  Description of Artificial Sequence: Synthetic oligonucleotide
  Antisense strand to SEQ ID NO: 157846
ccaauacucagaauuguac

SEQ ID NO: 157848 - RNA, 19 nt, Artificial Sequence
  Description of Artificial Sequence: Synthetic oligonucleotide
  Sense strand starting at position 522 of SEQ ID NO: 2029
guucuuaaucuagagucca

SEQ ID NO: 157849 - RNA, 19 nt, Artificial Sequence
  Description of Artificial Sequence: Synthetic oligonucleotide
  Antisense strand to SEQ ID NO: 157848
uggacucuagauuaagaac

SEQ ID NO: 157850 - RNA, 19 nt, Artificial Sequence
  Description of Artificial Sequence: Synthetic oligonucleotide
  Sense strand starting at position 518 of SEQ ID NO: 2029
acagguucuuaaucuagag

SEQ ID NO: 157851 - RNA, 19 nt, Artificial Sequence
  Description of Artificial Sequence: Synthetic oligonucleotide
  Antisense strand to SEQ ID NO: 157850
cucuagauuaagaaccugu

SEQ ID NO: 157852 - RNA, 19 nt, Artificial Sequence
  Description of Artificial Sequence: Synthetic oligonucleotide
  Sense strand starting at position 423 of SEQ ID NO: 2029
gucaauguuugaucucaac

SEQ ID NO: 157853 - RNA, 19 nt, Artificial Sequence
  Description of Artificial Sequence: Synthetic oligonucleotide
  Antisense strand to SEQ ID NO: 157852
guugagaucaaacauugac

SEQ ID NO: 157854 - RNA, 19 nt, Artificial Sequence
  Description of Artificial Sequence: Synthetic oligonucleotide
  Sense strand starting at position 416 of SEQ ID NO: 2029
auuaccugucaauguuuga

SEQ ID NO: 157855 - RNA, 19 nt, Artificial Sequence
  Description of Artificial Sequence: Synthetic oligonucleotide
  Antisense strand to SEQ ID NO: 157854
ucaaacauugacagguaau

SEQ ID NO: 157856 - RNA, 19 nt, Artificial Sequence
  Description of Artificial Sequence: Synthetic oligonucleotide
  Sense strand starting at position 409 of SEQ ID NO: 2029
uggugauauuaccugucaa

SEQ ID NO: 157857 - RNA, 19 nt, Artificial Sequence
  Description of Artificial Sequence: Synthetic oligonucleotide
  Antisense strand to SEQ ID NO: 157856
uugacagguaauaucacca

SEQ ID NO: 157858 - RNA, 19 nt, Artificial Sequence
  Description of Artificial Sequence: Synthetic oligonucleotide
  Sense strand starting at position 346 of SEQ ID NO: 2029
ugaauugacgguugaauug

SEQ ID NO: 157859 - RNA, 19 nt, Artificial Sequence
  Description of Artificial Sequence: Synthetic oligonucleotide
  Antisense strand to SEQ ID NO: 157858
caauucaaccgucaauuca

SEQ ID NO: 157860 - RNA, 19 nt, Artificial Sequence
  Description of Artificial Sequence: Synthetic oligonucleotide
  Sense strand starting at position 343 of SEQ ID NO: 2029
aacugaauugacgguugaa

SEQ ID NO: 157861 - RNA, 19 nt, Artificial Sequence
  Description of Artificial Sequence: Synthetic oligonucleotide
  Antisense strand to SEQ ID NO: 157860
uucaaccgucaauucaguu

SEQ ID NO: 157862 - RNA, 19 nt, Artificial Sequence
  Description of Artificial Sequence: Synthetic oligonucleotide
  Sense strand starting at position 311 of SEQ ID NO: 2029
auaaucugcugguuauuga

SEQ ID NO: 157863 - RNA, 19 nt, Artificial Sequence
  Description of Artificial Sequence: Synthetic oligonucleotide
  Antisense strand to SEQ ID NO: 157862
ucaauaaccagcagauuau

SEQ ID NO: 157864 - RNA, 19 nt, Artificial Sequence
  Description of Artificial Sequence: Synthetic oligonucleotide
  Sense strand starting at position 152 of SEQ ID NO: 2029
guguuaauacuaugggauu

SEQ ID NO: 157865 - RNA, 19 nt, Artificial Sequence
  Description of Artificial Sequence: Synthetic oligonucleotide
  Antisense strand to SEQ ID NO: 157864
aaucccauaguauuaacac

SEQ ID NO: 157866 - RNA, 19 nt, Artificial Sequence
  Description of Artificial Sequence: Synthetic oligonucleotide
  Sense strand starting at position 41 of SEQ ID NO: 2029
ggcauaauuuaggaagaga

SEQ ID NO: 157867 - RNA, 19 nt, Artificial Sequence
  Description of Artificial Sequence: Synthetic oligonucleotide
  Antisense strand to SEQ ID NO: 157866
ucucuuccuaaauuaugcc

SEQ ID NO: 157868 - RNA, 19 nt, Artificial Sequence
  Description of Artificial Sequence: Synthetic oligonucleotide
  Sense strand starting at position 3900 of SEQ ID NO: 2030
ugauuuaacuugggagaag

SEQ ID NO: 157869 - RNA, 19 nt, Artificial Sequence
  Description of Artificial Sequence: Synthetic oligonucleotide
  Antisense strand to SEQ ID NO: 157868
cuucucccaaguuaaauca

SEQ ID NO: 157870 - RNA, 19 nt, Artificial Sequence
  Description of Artificial Sequence: Synthetic oligonucleotide
  Sense strand starting at position 3855 of SEQ ID NO: 2030
auucuaugguaauuggauu

SEQ ID NO: 157871 - RNA, 19 nt, Artificial Sequence
  Description of Artificial Sequence: Synthetic oligonucleotide
  Antisense strand to SEQ ID NO: 157870
aauccaauuaccauagaau

SEQ ID NO: 157872 - RNA, 19 nt, Artificial Sequence
  Description of Artificial Sequence: Synthetic oligonucleotide
  Sense strand starting at position 3824 of SEQ ID NO: 2030
gggugcaaacuagauaguu

SEQ ID NO: 157873 - RNA, 19 nt, Artificial Sequence
  Description of Artificial Sequence: Synthetic oligonucleotide
  Antisense strand to SEQ ID NO: 157872
aacuaucuaguuugcaccc

SEQ ID NO: 157874 - RNA, 19 nt, Artificial Sequence
  Description of Artificial Sequence: Synthetic oligonucleotide
  Sense strand starting at position 3817 of SEQ ID NO: 2030
auuaauugggugcaaacua

SEQ ID NO: 157875 - RNA, 19 nt, Artificial Sequence
  Description of Artificial Sequence: Synthetic oligonucleotide
  Antisense strand to SEQ ID NO: 157874
uaguuugcacccaauuaau

SEQ ID NO: 157876 - RNA, 19 nt, Artificial Sequence
  Description of Artificial Sequence: Synthetic oligonucleotide
  Sense strand starting at position 3677 of SEQ ID NO: 2030
gccuuuguuagcguauauu

SEQ ID NO: 157877 - RNA, 19 nt, Artificial Sequence
  Description of Artificial Sequence: Synthetic oligonucleotide
  Antisense strand to SEQ ID NO: 157876
aauauacgcuaacaaaggc

SEQ ID NO: 157878 - RNA, 19 nt, Artificial Sequence
  Description of Artificial Sequence: Synthetic oligonucleotide
  Sense strand starting at position 3646 of SEQ ID NO: 2030
aaguaaguucugggaagag

SEQ ID NO: 157879 - RNA, 19 nt, Artificial Sequence
  Description of Artificial Sequence: Synthetic oligonucleotide
  Antisense strand to SEQ ID NO: 157878
cucuucccagaacuuacuu

SEQ ID NO: 157880 - RNA, 19 nt, Artificial Sequence
  Description of Artificial Sequence: Synthetic oligonucleotide
  Sense strand starting at position 3497 of SEQ ID NO: 2030
ugaggauauaugcauguuu

SEQ ID NO: 157881 - RNA, 19 nt, Artificial Sequence
  Description of Artificial Sequence: Synthetic oligonucleotide
  Antisense strand to SEQ ID NO: 157880
aaacaugcauauauccuca

SEQ ID NO: 157882 - RNA, 19 nt, Artificial Sequence
  Description of Artificial Sequence: Synthetic oligonucleotide
  Sense strand starting at position 3126 of SEQ ID NO: 2030
ggaggaaaggauuggcuuu

SEQ ID NO: 157883 - RNA, 19 nt, Artificial Sequence
  Description of Artificial Sequence: Synthetic oligonucleotide
  Antisense strand to SEQ ID NO: 157882
aaagccaauccuuuccucc

SEQ ID NO: 157884 - RNA, 19 nt, Artificial Sequence
  Description of Artificial Sequence: Synthetic oligonucleotide
  Sense strand starting at position 3103 of SEQ ID NO: 2030
aguuguuaccuuggagaag

SEQ ID NO: 157885 - RNA, 19 nt, Artificial Sequence
  Description of Artificial Sequence: Synthetic oligonucleotide
  Antisense strand to SEQ ID NO: 157884
cuucuccaagguaacaacu

SEQ ID NO: 157886 - RNA, 19 nt, Artificial Sequence
  Description of Artificial Sequence: Synthetic oligonucleotide
  Sense strand starting at position 3081 of SEQ ID NO: 2030
guccgucacgugaauguuu

SEQ ID NO: 157887 - RNA, 19 nt, Artificial Sequence
  Description of Artificial Sequence: Synthetic oligonucleotide
  Antisense strand to SEQ ID NO: 157886
aaacauucacgugacggac

SEQ ID NO: 157888 - RNA, 19 nt, Artificial Sequence
  Description of Artificial Sequence: Synthetic oligonucleotide
  Sense strand starting at position 3058 of SEQ ID NO: 2030
aguuguuuggcugagggaa

SEQ ID NO: 157889 - RNA, 19 nt, Artificial Sequence
  Description of Artificial Sequence: Synthetic oligonucleotide
  Antisense strand to SEQ ID NO: 157888
uucccucagccaaacaacu

SEQ ID NO: 157890 - RNA, 19 nt, Artificial Sequence
  Description of Artificial Sequence: Synthetic oligonucleotide
  Sense strand starting at position 3053 of SEQ ID NO: 2030
agggaaguuguuuggcuga

SEQ ID NO: 157891 - RNA, 19 nt, Artificial Sequence
  Description of Artificial Sequence: Synthetic oligonucleotide
  Antisense strand to SEQ ID NO: 157890
ucagccaaacaacuucccu

SEQ ID NO: 157892 - RNA, 19 nt, Artificial Sequence
  Description of Artificial Sequence: Synthetic oligonucleotide
  Sense strand starting at position 2836 of SEQ ID NO: 2030
cuagaauucgugccggucu

SEQ ID NO: 157893 - RNA, 19 nt, Artificial Sequence
  Description of Artificial Sequence: Synthetic oligonucleotide
  Antisense strand to SEQ ID NO: 157892
agaccggcacgaauucuag

SEQ ID NO: 157894 - RNA, 19 nt, Artificial Sequence
  Description of Artificial Sequence: Synthetic oligonucleotide
  Sense strand starting at position 2758 of SEQ ID NO: 2030
agacguguuuguuugauuu

SEQ ID NO: 157895 - RNA, 19 nt, Artificial Sequence
  Description of Artificial Sequence: Synthetic oligonucleotide
  Antisense strand to SEQ ID NO: 157894
aaaucaaacaaacacgucu

SEQ ID NO: 157896 - RNA, 19 nt, Artificial Sequence
  Description of Artificial Sequence: Synthetic oligonucleotide
  Sense strand starting at position 2708 of SEQ ID NO: 2030
ggcuguuaaacguaguaua

SEQ ID NO: 157897 - RNA, 19 nt, Artificial Sequence
  Description of Artificial Sequence: Synthetic oligonucleotide
  Antisense strand to SEQ ID NO: 157896
uauacuacguuuaacagcc

SEQ ID NO: 157898 - RNA, 19 nt, Artificial Sequence
  Description of Artificial Sequence: Synthetic oligonucleotide
  Sense strand starting at position 2680 of SEQ ID NO: 2030
ggcaucaaucaaugucuuu

SEQ ID NO: 157899 - RNA, 19 nt, Artificial Sequence
  Description of Artificial Sequence: Synthetic oligonucleotide
  Antisense strand to SEQ ID NO: 157898
aaagacauugauugaugcc

SEQ ID NO: 157900 - RNA, 19 nt, Artificial Sequence
  Description of Artificial Sequence: Synthetic oligonucleotide
  Sense strand starting at position 2510 of SEQ ID NO: 2030
gcaggaggcgaucaauguu

SEQ ID NO: 157901 - RNA, 19 nt, Artificial Sequence
  Description of Artificial Sequence: Synthetic oligonucleotide
  Antisense strand to SEQ ID NO: 157900
aacauugaucgccuccugc

SEQ ID NO: 157902 - RNA, 19 nt, Artificial Sequence
  Description of Artificial Sequence: Synthetic oligonucleotide
  Sense strand starting at position 2344 of SEQ ID NO: 2030
gguagauaucagugauuaa

SEQ ID NO: 157903 - RNA, 19 nt, Artificial Sequence
  Description of Artificial Sequence: Synthetic oligonucleotide
  Antisense strand to SEQ ID NO: 157902
uuaaucacugauaucuacc

SEQ ID NO: 157904 - RNA, 19 nt, Artificial Sequence
  Description of Artificial Sequence: Synthetic oligonucleotide
  Sense strand starting at position 2338 of SEQ ID NO: 2030
uggugugguagauaucagu

SEQ ID NO: 157905 - RNA, 19 nt, Artificial Sequence
  Description of Artificial Sequence: Synthetic oligonucleotide
  Antisense strand to SEQ ID NO: 157904
acugauaucuaccacacca

SEQ ID NO: 157906 - RNA, 19 nt, Artificial Sequence
  Description of Artificial Sequence: Synthetic oligonucleotide
  Sense strand starting at position 2336 of SEQ ID NO: 2030
ccuggugugguagauauca

SEQ ID NO: 157907 - RNA, 19 nt, Artificial Sequence
  Description of Artificial Sequence: Synthetic oligonucleotide
  Antisense strand to SEQ ID NO: 157906
ugauaucuaccacaccagg

SEQ ID NO: 157908 - RNA, 19 nt, Artificial Sequence
  Description of Artificial Sequence: Synthetic oligonucleotide
  Sense strand starting at position 1512 of SEQ ID NO: 2030
gggaaugauacacguggaa

SEQ ID NO: 157909 - RNA, 19 nt, Artificial Sequence
  Description of Artificial Sequence: Synthetic oligonucleotide
  Antisense strand to SEQ ID NO: 157908
uuccacguguaucauuccc

SEQ ID NO: 157910 - RNA, 19 nt, Artificial Sequence
  Description of Artificial Sequence: Synthetic oligonucleotide
  Sense strand starting at position 1251 of SEQ ID NO: 2030
cagauugguguggguauga

SEQ ID NO: 157911 - RNA, 19 nt, Artificial Sequence
  Description of Artificial Sequence: Synthetic oligonucleotide
  Antisense strand to SEQ ID NO: 157910
ucauacccacaccaaucug

SEQ ID NO: 157912 - RNA, 19 nt, Artificial Sequence
  Description of Artificial Sequence: Synthetic oligonucleotide
  Sense strand starting at position 1249 of SEQ ID NO: 2030
accagauugguguggguau

SEQ ID NO: 157913 - RNA, 19 nt, Artificial Sequence
  Description of Artificial Sequence: Synthetic oligonucleotide
  Antisense strand to SEQ ID NO: 157912
auacccacaccaaucuggu

SEQ ID NO: 157914 - RNA, 19 nt, Artificial Sequence
  Description of Artificial Sequence: Synthetic oligonucleotide
  Sense strand starting at position 1121 of SEQ ID NO: 2030
augaaagauucugcccauc

SEQ ID NO: 157915 - RNA, 19 nt, Artificial Sequence
  Description of Artificial Sequence: Synthetic oligonucleotide
  Antisense strand to SEQ ID NO: 157914
gaugggcagaaucuuucau

SEQ ID NO: 157916 - RNA, 19 nt, Artificial Sequence
  Description of Artificial Sequence: Synthetic oligonucleotide
  Sense strand starting at position 915 of SEQ ID NO: 2030
agaagagaaugacacauau

SEQ ID NO: 157917 - RNA, 19 nt, Artificial Sequence
  Description of Artificial Sequence: Synthetic oligonucleotide
  Antisense strand to SEQ ID NO: 157916
auaugugucauucucuucu

SEQ ID NO: 157918 - RNA, 19 nt, Artificial Sequence
  Description of Artificial Sequence: Synthetic oligonucleotide
  Sense strand starting at position 896 of SEQ ID NO: 2030
caguuucggcauuaaagag

SEQ ID NO: 157919 - RNA, 19 nt, Artificial Sequence
  Description of Artificial Sequence: Synthetic oligonucleotide
  Antisense strand to SEQ ID NO: 157918
cucuuuaaugccgaaacug

SEQ ID NO: 157920 - RNA, 19 nt, Artificial Sequence
  Description of Artificial Sequence: Synthetic oligonucleotide
  Sense strand starting at position 892 of SEQ ID NO: 2030
gagacaguuucggcauuaa

SEQ ID NO: 157921 - RNA, 19 nt, Artificial Sequence
  Description of Artificial Sequence: Synthetic oligonucleotide
  Antisense strand to SEQ ID NO: 157920
uuaaugccgaaacugucuc

SEQ ID NO: 157922 - RNA, 19 nt, Artificial Sequence
  Description of Artificial Sequence: Synthetic oligonucleotide
  Sense strand starting at position 826 of SEQ ID NO: 2030
aagaaauguuguuucuaga

SEQ ID NO: 157923 - RNA, 19 nt, Artificial Sequence
  Description of Artificial Sequence: Synthetic oligonucleotide
  Antisense strand to SEQ ID NO: 157922
ucuagaaacaacauuucuu

SEQ ID NO: 157924 - RNA, 19 nt, Artificial Sequence
  Description of Artificial Sequence: Synthetic oligonucleotide
  Sense strand starting at position 825 of SEQ ID NO: 2030
caagaaauguuguuucuag

SEQ ID NO: 157925 - RNA, 19 nt, Artificial Sequence
  Description of Artificial Sequence: Synthetic oligonucleotide
  Antisense strand to SEQ ID NO: 157924
cuagaaacaacauuucuug

SEQ ID NO: 157926 - RNA, 19 nt, Artificial Sequence
  Description of Artificial Sequence: Synthetic oligonucleotide
  Sense strand starting at position 584 of SEQ ID NO: 2030
guacaauucugaguauugg

SEQ ID NO: 157927 - RNA, 19 nt, Artificial Sequence
  Description of Artificial Sequence: Synthetic oligonucleotide
  Antisense strand to SEQ ID NO: 157926
ccaauacucagaauuguac

SEQ ID NO: 157928 - RNA, 19 nt, Artificial Sequence
  Description of Artificial Sequence: Synthetic oligonucleotide
  Sense strand starting at position 524 of SEQ ID NO: 2030
guucuuaaucuagagucca

SEQ ID NO: 157929 - RNA, 19 nt, Artificial Sequence
  Description of Artificial Sequence: Synthetic oligonucleotide
  Antisense strand to SEQ ID NO: 157928
uggacucuagauuaagaac

SEQ ID NO: 157930 - RNA, 19 nt, Artificial Sequence
  Description of Artificial Sequence: Synthetic oligonucleotide
  Sense strand starting at position 520 of SEQ ID NO: 2030
acagguucuuaaucuagag

SEQ ID NO: 157931 - RNA, 19 nt, Artificial Sequence
  Description of Artificial Sequence: Synthetic oligonucleotide
  Antisense strand to SEQ ID NO: 157930
cucuagauuaagaaccugu

SEQ ID NO: 157932 - RNA, 19 nt, Artificial Sequence
  Description of Artificial Sequence: Synthetic oligonucleotide
  Sense strand starting at position 425 of SEQ ID NO: 2030
gucaauguuugaucucaac

SEQ ID NO: 157933 - RNA, 19 nt, Artificial Sequence
  Description of Artificial Sequence: Synthetic oligonucleotide
  Antisense strand to SEQ ID NO: 157932
guugagaucaaacauugac

SEQ ID NO: 157934 - RNA, 19 nt, Artificial Sequence
  Description of Artificial Sequence: Synthetic oligonucleotide
  Sense strand starting at position 418 of SEQ ID NO: 2030
auuaccugucaauguuuga

SEQ ID NO: 157935 - RNA, 19 nt, Artificial Sequence
  Description of Artificial Sequence: Synthetic oligonucleotide
  Antisense strand to SEQ ID NO: 157934
ucaaacauugacagguaau

SEQ ID NO: 157936 - RNA, 19 nt, Artificial Sequence
  Description of Artificial Sequence: Synthetic oligonucleotide
  Sense strand starting at position 411 of SEQ ID NO: 2030
uggugauauuaccugucaa

SEQ ID NO: 157937 - RNA, 19 nt, Artificial Sequence
  Description of Artificial Sequence: Synthetic oligonucleotide
  Antisense strand to SEQ ID NO: 157936
uugacagguaauaucacca

SEQ ID NO: 157938 - RNA, 19 nt, Artificial Sequence
  Description of Artificial Sequence: Synthetic oligonucleotide
  Sense strand starting at position 348 of SEQ ID NO: 2030
ugaauugacgguugaauug

SEQ ID NO: 157939 - RNA, 19 nt, Artificial Sequence
  Description of Artificial Sequence: Synthetic oligonucleotide
  Antisense strand to SEQ ID NO: 157938
caauucaaccgucaauuca

SEQ ID NO: 157940 - RNA, 19 nt, Artificial Sequence
  Description of Artificial Sequence: Synthetic oligonucleotide
  Sense strand starting at position 345 of SEQ ID NO: 2030
aacugaauugacgguugaa

SEQ ID NO: 157941 - RNA, 19 nt, Artificial Sequence
  Description of Artificial Sequence: Synthetic oligonucleotide
  Antisense strand to SEQ ID NO: 157940
uucaaccgucaauucaguu

SEQ ID NO: 157942 - RNA, 19 nt, Artificial Sequence
  Description of Artificial Sequence: Synthetic oligonucleotide
  Sense strand starting at position 313 of SEQ ID NO: 2030
auaaucugcugguuauuga

SEQ ID NO: 157943 - RNA, 19 nt, Artificial Sequence
  Description of Artificial Sequence: Synthetic oligonucleotide
  Antisense strand to SEQ ID NO: 157942
ucaauaaccagcagauuau

SEQ ID NO: 157944 - RNA, 19 nt, Artificial Sequence
  Description of Artificial Sequence: Synthetic oligonucleotide
  Sense strand starting at position 154 of SEQ ID NO: 2030
guguuaauacuaugggauu

SEQ ID NO: 157945 - RNA, 19 nt, Artificial Sequence
  Description of Artificial Sequence: Synthetic oligonucleotide
  Antisense strand to SEQ ID NO: 157944
aaucccauaguauuaacac

SEQ ID NO: 157946 - RNA, 19 nt, Artificial Sequence
  Description of Artificial Sequence: Synthetic oligonucleotide
  Sense strand starting at position 43 of SEQ ID NO: 2030
ggcauaauuuaggaagaga

SEQ ID NO: 157947 - RNA, 19 nt, Artificial Sequence
  Description of Artificial Sequence: Synthetic oligonucleotide
  Antisense strand to SEQ ID NO: 157946
ucucuuccuaaauuaugcc

SEQ ID NO: 157948 - RNA, 19 nt, Artificial Sequence
  Description of Artificial Sequence: Synthetic oligonucleotide
  Sense strand starting at position 3613 of SEQ ID NO: 2031
cuacaauggcuuugaagga

SEQ ID NO: 157949 - RNA, 19 nt, Artificial Sequence
  Description of Artificial Sequence: Synthetic oligonucleotide
  Antisense strand to SEQ ID NO: 157948
uccuucaaagccauuguag

SEQ ID NO: 157950 - RNA, 19 nt, Artificial Sequence
  Description of Artificial Sequence: Synthetic oligonucleotide
  Sense strand starting at position 3248 of SEQ ID NO: 2031
ugaaauccgauggguuuau

SEQ ID NO: 157951 - RNA, 19 nt, Artificial Sequence
  Description of Artificial Sequence: Synthetic oligonucleotide
  Antisense strand to SEQ ID NO: 157950
auaaacccaucggauuuca

SEQ ID NO: 157952 - RNA, 19 nt, Artificial Sequence
  Description of Artificial Sequence: Synthetic oligonucleotide
  Sense strand starting at position 3247 of SEQ ID NO: 2031
augaaauccgauggguuua

SEQ ID NO: 157953 - RNA, 19 nt, Artificial Sequence
  Description of Artificial Sequence: Synthetic oligonucleotide
  Antisense strand to SEQ ID NO: 157952
uaaacccaucggauuucau

SEQ ID NO: 157954 - RNA, 19 nt, Artificial Sequence
  Description of Artificial Sequence: Synthetic oligonucleotide
  Sense strand starting at position 3246 of SEQ ID NO: 2031
caugaaauccgauggguuu

SEQ ID NO: 157955 - RNA, 19 nt, Artificial Sequence
  Description of Artificial Sequence: Synthetic oligonucleotide
  Antisense strand to SEQ ID NO: 157954
aaacccaucggauuucaug

SEQ ID NO: 157956 - RNA, 19 nt, Artificial Sequence
  Description of Artificial Sequence: Synthetic oligonucleotide
  Sense strand starting at position 3047 of SEQ ID NO: 2031
cuuugugaucaaugaucuu

SEQ ID NO: 157957 - RNA, 19 nt, Artificial Sequence
  Description of Artificial Sequence: Synthetic oligonucleotide
  Antisense strand to SEQ ID NO: 157956
aagaucauugaucacaaag

SEQ ID NO: 157958 - RNA, 19 nt, Artificial Sequence
  Description of Artificial Sequence: Synthetic oligonucleotide
  Sense strand starting at position 3044 of SEQ ID NO: 2031
gugcuuugugaucaaugau

SEQ ID NO: 157959 - RNA, 19 nt, Artificial Sequence
  Description of Artificial Sequence: Synthetic oligonucleotide
  Antisense strand to SEQ ID NO: 157958
aucauugaucacaaagcac

SEQ ID NO: 157960 - RNA, 19 nt, Artificial Sequence
  Description of Artificial Sequence: Synthetic oligonucleotide
  Sense strand starting at position 3043 of SEQ ID NO: 2031
agugcuuugugaucaauga

SEQ ID NO: 157961 - RNA, 19 nt, Artificial Sequence
  Description of Artificial Sequence: Synthetic oligonucleotide
  Antisense strand to SEQ ID NO: 157960
ucauugaucacaaagcacu

SEQ ID NO: 157962 - RNA, 19 nt, Artificial Sequence
  Description of Artificial Sequence: Synthetic oligonucleotide
  Sense strand starting at position 2795 of SEQ ID NO: 2031
gugccuguuagaugaugau

SEQ ID NO: 157963 - RNA, 19 nt, Artificial Sequence
  Description of Artificial Sequence: Synthetic oligonucleotide
  Antisense strand to SEQ ID NO: 157962
aucaucaucuaacaggcac

SEQ ID NO: 157964 - RNA, 19 nt, Artificial Sequence
  Description of Artificial Sequence: Synthetic oligonucleotide
  Sense strand starting at position 2586 of SEQ ID NO: 2031
gccuaugucucuuuauauu

SEQ ID NO: 157965 - RNA, 19 nt, Artificial Sequence
  Description of Artificial Sequence: Synthetic oligonucleotide
  Antisense strand to SEQ ID NO: 157964
aauauaaagagacauaggc

SEQ ID NO: 157966 - RNA, 19 nt, Artificial Sequence
  Description of Artificial Sequence: Synthetic oligonucleotide
  Sense strand starting at position 2561 of SEQ ID NO: 2031
uuaacucagggcugcuaua

SEQ ID NO: 157967 - RNA, 19 nt, Artificial Sequence
  Description of Artificial Sequence: Synthetic oligonucleotide
  Antisense strand to SEQ ID NO: 157966
uauagcagcccugaguuaa

SEQ ID NO: 157968 - RNA, 19 nt, Artificial Sequence
  Description of Artificial Sequence: Synthetic oligonucleotide
  Sense strand starting at position 2539 of SEQ ID NO: 2031
cgaauaggauuaucucuuu

SEQ ID NO: 157969 - RNA, 19 nt, Artificial Sequence
  Description of Artificial Sequence: Synthetic oligonucleotide
  Antisense strand to SEQ ID NO: 157968
aaagagauaauccuauucg

SEQ ID NO: 157970 - RNA, 19 nt, Artificial Sequence
  Description of Artificial Sequence: Synthetic oligonucleotide
  Sense strand starting at position 2537 of SEQ ID NO: 2031
agcgaauaggauuaucucu

SEQ ID NO: 157971 - RNA, 19 nt, Artificial Sequence
  Description of Artificial Sequence: Synthetic oligonucleotide
  Antisense strand to SEQ ID NO: 157970
agagauaauccuauucgcu

SEQ ID NO: 157972 - RNA, 19 nt, Artificial Sequence
  Description of Artificial Sequence: Synthetic oligonucleotide
  Sense strand starting at position 2518 of SEQ ID NO: 2031
ucagcuggauuaucaaaua

SEQ ID NO: 157973 - RNA, 19 nt, Artificial Sequence
  Description of Artificial Sequence: Synthetic oligonucleotide
  Antisense strand to SEQ ID NO: 157972
uauuugauaauccagcuga

SEQ ID NO: 157974 - RNA, 19 nt, Artificial Sequence
  Description of Artificial Sequence: Synthetic oligonucleotide
  Sense strand starting at position 2440 of SEQ ID NO: 2031
uccaguagcuguguuggaa

SEQ ID NO: 157975 - RNA, 19 nt, Artificial Sequence
  Description of Artificial Sequence: Synthetic oligonucleotide
  Antisense strand to SEQ ID NO: 157974
uuccaacacagcuacugga

SEQ ID NO: 157976 - RNA, 19 nt, Artificial Sequence
  Description of Artificial Sequence: Synthetic oligonucleotide
  Sense strand starting at position 2328 of SEQ ID NO: 2031
agugucaucaaccgggaga

SEQ ID NO: 157977 - RNA, 19 nt, Artificial Sequence
  Description of Artificial Sequence: Synthetic oligonucleotide
  Antisense strand to SEQ ID NO: 157976
ucucccgguugaugacacu

SEQ ID NO: 157978 - RNA, 19 nt, Artificial Sequence
  Description of Artificial Sequence: Synthetic oligonucleotide
  Sense strand starting at position 2246 of SEQ ID NO: 2031
gaaggcuuguucuuccacu

SEQ ID NO: 157979 - RNA, 19 nt, Artificial Sequence
  Description of Artificial Sequence: Synthetic oligonucleotide
  Antisense strand to SEQ ID NO: 157978
aguggaagaacaagccuuc

SEQ ID NO: 157980 - RNA, 19 nt, Artificial Sequence
  Description of Artificial Sequence: Synthetic oligonucleotide
  Sense strand starting at position 2231 of SEQ ID NO: 2031
accaguggucugcaagaag

SEQ ID NO: 157981 - RNA, 19 nt, Artificial Sequence
  Description of Artificial Sequence: Synthetic oligonucleotide
  Antisense strand to SEQ ID NO: 157980
cuucuugcagaccacuggu

SEQ ID NO: 157982 - RNA, 19 nt, Artificial Sequence
  Description of Artificial Sequence: Synthetic oligonucleotide
  Sense strand starting at position 2229 of SEQ ID NO: 2031
caaccaguggucugcaaga

SEQ ID NO: 157983 - RNA, 19 nt, Artificial Sequence
  Description of Artificial Sequence: Synthetic oligonucleotide
  Antisense strand to SEQ ID NO: 157982
ucuugcagaccacugguug

SEQ ID NO: 157984 - RNA, 19 nt, Artificial Sequence
  Description of Artificial Sequence: Synthetic oligonucleotide
  Sense strand starting at position 2200 of SEQ ID NO: 2031
ccagauuagcuauggcaaa

SEQ ID NO: 157985 - RNA, 19 nt, Artificial Sequence
  Description of Artificial Sequence: Synthetic oligonucleotide
  Antisense strand to SEQ ID NO: 157984
uuugccauagcuaaucugg

SEQ ID NO: 157986 - RNA, 19 nt, Artificial Sequence
  Description of Artificial Sequence: Synthetic oligonucleotide
  Sense strand starting at position 2177 of SEQ ID NO: 2031
gacugucacugaccugaaa

SEQ ID NO: 157987 - RNA, 19 nt, Artificial Sequence
  Description of Artificial Sequence: Synthetic oligonucleotide
  Antisense strand to SEQ ID NO: 157986
uuucaggucagugacaguc

SEQ ID NO: 157988 - RNA, 19 nt, Artificial Sequence
  Description of Artificial Sequence: Synthetic oligonucleotide
  Sense strand starting at position 2077 of SEQ ID NO: 2031
guguccacugcguaaggaa

SEQ ID NO: 157989 - RNA, 19 nt, Artificial Sequence
  Description of Artificial Sequence: Synthetic oligonucleotide
  Antisense strand to SEQ ID NO: 157988
uuccuuacgcaguggacac

SEQ ID NO: 157990 - RNA, 19 nt, Artificial Sequence
  Description of Artificial Sequence: Synthetic oligonucleotide
  Sense strand starting at position 2048 of SEQ ID NO: 2031
gggacugucuguuugcaga

SEQ ID NO: 157991 - RNA, 19 nt, Artificial Sequence
  Description of Artificial Sequence: Synthetic oligonucleotide
  Antisense strand to SEQ ID NO: 157990
ucugcaaacagacaguccc

SEQ ID NO: 157992 - RNA, 19 nt, Artificial Sequence
  Description of Artificial Sequence: Synthetic oligonucleotide
  Sense strand starting at position 976 of SEQ ID NO: 2031
acuaaagucgaauguugau

SEQ ID NO: 157993 - RNA, 19 nt, Artificial Sequence
  Description of Artificial Sequence: Synthetic oligonucleotide
  Antisense strand to SEQ ID NO: 157992
aucaacauucgacuuuagu

SEQ ID NO: 157994 - RNA, 19 nt, Artificial Sequence
  Description of Artificial Sequence: Synthetic oligonucleotide
  Sense strand starting at position 911 of SEQ ID NO: 2031
gaguuuaccagugaaagug

SEQ ID NO: 157995 - RNA, 19 nt, Artificial Sequence
  Description of Artificial Sequence: Synthetic oligonucleotide
  Antisense strand to SEQ ID NO: 157994
cacuuucacugguaaacuc

SEQ ID NO: 157996 - RNA, 19 nt, Artificial Sequence
  Description of Artificial Sequence: Synthetic oligonucleotide
  Sense strand starting at position 910 of SEQ ID NO: 2031
ugaguuuaccagugaaagu

SEQ ID NO: 157997 - RNA, 19 nt, Artificial Sequence
  Description of Artificial Sequence: Synthetic oligonucleotide
  Antisense strand to SEQ ID NO: 157996
acuuucacugguaaacuca

SEQ ID NO: 157998 - RNA, 19 nt, Artificial Sequence
  Description of Artificial Sequence: Synthetic oligonucleotide
  Sense strand starting at position 898 of SEQ ID NO: 2031
cuugaaacacccugaguuu

SEQ ID NO: 157999 - RNA, 19 nt, Artificial Sequence
  Description of Artificial Sequence: Synthetic oligonucleotide
  Antisense strand to SEQ ID NO: 157998
aaacucaggguguuucaag

SEQ ID NO: 158000 - RNA, 19 nt, Artificial Sequence
  Description of Artificial Sequence: Synthetic oligonucleotide
  Sense strand starting at position 882 of SEQ ID NO: 2031
guuuacaagucauucccuu

SEQ ID NO: 158001 - RNA, 19 nt, Artificial Sequence
  Description of Artificial Sequence: Synthetic oligonucleotide
  Antisense strand to SEQ ID NO: 158000
aagggaaugacuuguaaac

SEQ ID NO: 158002 - RNA, 19 nt, Artificial Sequence
  Description of Artificial Sequence: Synthetic oligonucleotide
  Sense strand starting at position 856 of SEQ ID NO: 2031
gaggaaaguuagccucaga

SEQ ID NO: 158003 - RNA, 19 nt, Artificial Sequence
  Description of Artificial Sequence: Synthetic oligonucleotide
  Antisense strand to SEQ ID NO: 158002
ucugaggcuaacuuuccuc

SEQ ID NO: 158004 - RNA, 19 nt, Artificial Sequence
  Description of Artificial Sequence: Synthetic oligonucleotide
  Sense strand starting at position 741 of SEQ ID NO: 2031
auugcuauagugcaaguaa

SEQ ID NO: 158005 - RNA, 19 nt, Artificial Sequence
  Description of Artificial Sequence: Synthetic oligonucleotide
  Antisense strand to SEQ ID NO: 158004
uuacuugcacuauagcaau

SEQ ID NO: 158006 - RNA, 19 nt, Artificial Sequence
  Description of Artificial Sequence: Synthetic oligonucleotide
  Sense strand starting at position 736 of SEQ ID NO: 2031
aaguuauugcuauagugca

SEQ ID NO: 158007 - RNA, 19 nt, Artificial Sequence
  Description of Artificial Sequence: Synthetic oligonucleotide
  Antisense strand to SEQ ID NO: 158006
ugcacuauagcaauaacuu

SEQ ID NO: 158008 - RNA, 19 nt, Artificial Sequence
  Description of Artificial Sequence: Synthetic oligonucleotide
  Sense strand starting at position 680 of SEQ ID NO: 2031
guaauauggaggcaaguga

SEQ ID NO: 158009 - RNA, 19 nt, Artificial Sequence
  Description of Artificial Sequence: Synthetic oligonucleotide
  Antisense strand to SEQ ID NO: 158008
ucacuugccuccauauuac

SEQ ID NO: 158010 - RNA, 19 nt, Artificial Sequence
  Description of Artificial Sequence: Synthetic oligonucleotide
  Sense strand starting at position 659 of SEQ ID NO: 2031
auaagaucuuuggcuuuaa

SEQ ID NO: 158011 - RNA, 19 nt, Artificial Sequence
  Description of Artificial Sequence: Synthetic oligonucleotide
  Antisense strand to SEQ ID NO: 158010
uuaaagccaaagaucuuau

SEQ ID NO: 158012 - RNA, 19 nt, Artificial Sequence
  Description of Artificial Sequence: Synthetic oligonucleotide
  Sense strand starting at position 657 of SEQ ID NO: 2031
ucauaagaucuuuggcuuu

SEQ ID NO: 158013 - RNA, 19 nt, Artificial Sequence
  Description of Artificial Sequence: Synthetic oligonucleotide
  Antisense strand to SEQ ID NO: 158012
aaagccaaagaucuuauga

SEQ ID NO: 158014 - RNA, 19 nt, Artificial Sequence
  Description of Artificial Sequence: Synthetic oligonucleotide
  Sense strand starting at position 656 of SEQ ID NO: 2031
gucauaagaucuuuggcuu

SEQ ID NO: 158015 - RNA, 19 nt, Artificial Sequence
  Description of Artificial Sequence: Synthetic oligonucleotide
  Antisense strand to SEQ ID NO: 158014
aagccaaagaucuuaugac

SEQ ID NO: 158016 - RNA, 19 nt, Artificial Sequence
  Description of Artificial Sequence: Synthetic oligonucleotide
  Sense strand starting at position 511 of SEQ ID NO: 2031
agacucaaauucugaagga

SEQ ID NO: 158017 - RNA, 19 nt, Artificial Sequence
  Description of Artificial Sequence: Synthetic oligonucleotide
  Antisense strand to SEQ ID NO: 158016
uccuucagaauuugagucu

SEQ ID NO: 158018 - RNA, 19 nt, Artificial Sequence
  Description of Artificial Sequence: Synthetic oligonucleotide
  Sense strand starting at position 98 of SEQ ID NO: 2031
uaacgacuaguuuggcuaa

SEQ ID NO: 158019 - RNA, 19 nt, Artificial Sequence
  Description of Artificial Sequence: Synthetic oligonucleotide
  Antisense strand to SEQ ID NO: 158018
uuagccaaacuagucguua

SEQ ID NO: 158020 - RNA, 19 nt, Artificial Sequence
  Description of Artificial Sequence: Synthetic oligonucleotide
  Sense strand starting at position 90 of SEQ ID NO: 2031
cgucuaauuaacgacuagu

SEQ ID NO: 158021 - RNA, 19 nt, Artificial Sequence
  Description of Artificial Sequence: Synthetic oligonucleotide
  Antisense strand to SEQ ID NO: 158020
acuagucguuaauuagacg

SEQ ID NO: 158022 - RNA, 19 nt, Artificial Sequence
  Description of Artificial Sequence: Synthetic oligonucleotide
  Sense strand starting at position 78 of SEQ ID NO: 2031
ucagaaacuggacgucuaa

SEQ ID NO: 158023 - RNA, 19 nt, Artificial Sequence
  Description of Artificial Sequence: Synthetic oligonucleotide
  Antisense strand to SEQ ID NO: 158022
uuagacguccaguuucuga

SEQ ID NO: 158024 - RNA, 19 nt, Artificial Sequence
  Description of Artificial Sequence: Synthetic oligonucleotide
  Sense strand starting at position 14 of SEQ ID NO: 2031
uguuucuucuuuguaggaa

SEQ ID NO: 158025 - RNA, 19 nt, Artificial Sequence
  Description of Artificial Sequence: Synthetic oligonucleotide
  Antisense strand to SEQ ID NO: 158024
uuccuacaaagaagaaaca

SEQ ID NO: 158026 - RNA, 19 nt, Artificial Sequence
  Description of Artificial Sequence: Synthetic oligonucleotide
  Sense strand starting at position 13 of SEQ ID NO: 2031
uuguuucuucuuuguagga

SEQ ID NO: 158027 - RNA, 19 nt, Artificial Sequence
  Description of Artificial Sequence: Synthetic oligonucleotide
  Antisense strand to SEQ ID NO: 158026
uccuacaaagaagaaacaa

SEQ ID NO: 158028 - RNA, 19 nt, Artificial Sequence
  Description of Artificial Sequence: Synthetic oligonucleotide
  Sense strand starting at position 3895 of SEQ ID NO: 2032
ugaaauccgauggguuuau

SEQ ID NO: 158029 - RNA, 19 nt, Artificial Sequence
  Description of Artificial Sequence: Synthetic oligonucleotide
  Antisense strand to SEQ ID NO: 158028
auaaacccaucggauuuca

SEQ ID NO: 158030 - RNA, 19 nt, Artificial Sequence
  Description of Artificial Sequence: Synthetic oligonucleotide
  Sense strand starting at position 3894 of SEQ ID NO: 2032
augaaauccgauggguuua

SEQ ID NO: 158031 - RNA, 19 nt, Artificial Sequence
  Description of Artificial Sequence: Synthetic oligonucleotide
  Antisense strand to SEQ ID NO: 158030
uaaacccaucggauuucau

SEQ ID NO: 158032 - RNA, 19 nt, Artificial Sequence
  Description of Artificial Sequence: Synthetic oligonucleotide
  Sense strand starting at position 3893 of SEQ ID NO: 2032
caugaaauccgauggguuu

SEQ ID NO: 158033 - RNA, 19 nt, Artificial Sequence
  Description of Artificial Sequence: Synthetic oligonucleotide
  Antisense strand to SEQ ID NO: 158032
aaacccaucggauuucaug

SEQ ID NO: 158034 - RNA, 19 nt, Artificial Sequence
  Description of Artificial Sequence: Synthetic oligonucleotide
  Sense strand starting at position 3694 of SEQ ID NO: 2032
cuuugugaucaaugaucuu

SEQ ID NO: 158035 - RNA, 19 nt, Artificial Sequence
  Description of Artificial Sequence: Synthetic oligonucleotide
  Antisense strand to SEQ ID NO: 158034
aagaucauugaucacaaag

SEQ ID NO: 158036 - RNA, 19 nt, Artificial Sequence
  Description of Artificial Sequence: Synthetic oligonucleotide
  Sense strand starting at position 3691 of SEQ ID NO: 2032
gugcuuugugaucaaugau

SEQ ID NO: 158037 - RNA, 19 nt, Artificial Sequence
  Description of Artificial Sequence: Synthetic oligonucleotide
  Antisense strand to SEQ ID NO: 158036
aucauugaucacaaagcac

SEQ ID NO: 158038 - RNA, 19 nt, Artificial Sequence
  Description of Artificial Sequence: Synthetic oligonucleotide
  Sense strand starting at position 3690 of SEQ ID NO: 2032
agugcuuugugaucaauga

SEQ ID NO: 158039 - RNA, 19 nt, Artificial Sequence
  Description of Artificial Sequence: Synthetic oligonucleotide
  Antisense strand to SEQ ID NO: 158038
ucauugaucacaaagcacu

SEQ ID NO: 158040 - RNA, 19 nt, Artificial Sequence
  Description of Artificial Sequence: Synthetic oligonucleotide
  Sense strand starting at position 3442 of SEQ ID NO: 2032
gugccuguuagaugaugau

SEQ ID NO: 158041 - RNA, 19 nt, Artificial Sequence
  Description of Artificial Sequence: Synthetic oligonucleotide
  Antisense strand to SEQ ID NO: 158040
aucaucaucuaacaggcac

SEQ ID NO: 158042 - RNA, 19 nt, Artificial Sequence
  Description of Artificial Sequence: Synthetic oligonucleotide
  Sense strand starting at position 3233 of SEQ ID NO: 2032
gccuaugucucuuuauauu

SEQ ID NO: 158043 - RNA, 19 nt, Artificial Sequence
  Description of Artificial Sequence: Synthetic oligonucleotide
  Antisense strand to SEQ ID NO: 158042
aauauaaagagacauaggc

SEQ ID NO: 158044 - RNA, 19 nt, Artificial Sequence
  Description of Artificial Sequence: Synthetic oligonucleotide
  Sense strand starting at position 3208 of SEQ ID NO: 2032
uuaacucagggcugcuaua

SEQ ID NO: 158045 - RNA, 19 nt, Artificial Sequence
  Description of Artificial Sequence: Synthetic oligonucleotide
  Antisense strand to SEQ ID NO: 158044
uauagcagcccugaguuaa

SEQ ID NO: 158046 - RNA, 19 nt, Artificial Sequence
  Description of Artificial Sequence: Synthetic oligonucleotide
  Sense strand starting at position 3186 of SEQ ID NO: 2032
cgaauaggauuaucucuuu

SEQ ID NO: 158047 - RNA, 19 nt, Artificial Sequence
  Description of Artificial Sequence: Synthetic oligonucleotide
  Antisense strand to SEQ ID NO: 158046
aaagagauaauccuauucg

SEQ ID NO: 158048 - RNA, 19 nt, Artificial Sequence
  Description of Artificial Sequence: Synthetic oligonucleotide
  Sense strand starting at position 3184 of SEQ ID NO: 2032
agcgaauaggauuaucucu

SEQ ID NO: 158049 - RNA, 19 nt, Artificial Sequence
  Description of Artificial Sequence: Synthetic oligonucleotide
  Antisense strand to SEQ ID NO: 158048
agagauaauccuauucgcu

SEQ ID NO: 158050 - RNA, 19 nt, Artificial Sequence
  Description of Artificial Sequence: Synthetic oligonucleotide
  Sense strand starting at position 3165 of SEQ ID NO: 2032
ucagcuggauuaucaaaua

SEQ ID NO: 158051 - RNA, 19 nt, Artificial Sequence
  Description of Artificial Sequence: Synthetic oligonucleotide
  Antisense strand to SEQ ID NO: 158050
uauuugauaauccagcuga

SEQ ID NO: 158052 - RNA, 19 nt, Artificial Sequence
  Description of Artificial Sequence: Synthetic oligonucleotide
  Sense strand starting at position 2975 of SEQ ID NO: 2032
agugucaucaaccgggaga

SEQ ID NO: 158053 - RNA, 19 nt, Artificial Sequence
  Description of Artificial Sequence: Synthetic oligonucleotide
  Antisense strand to SEQ ID NO: 158052
ucucccgguugaugacacu

SEQ ID NO: 158054 - RNA, 19 nt, Artificial Sequence
  Description of Artificial Sequence: Synthetic oligonucleotide
  Sense strand starting at position 2893 of SEQ ID NO: 2032
gaaggcuuguucuuccacu

SEQ ID NO: 158055 - RNA, 19 nt, Artificial Sequence
  Description of Artificial Sequence: Synthetic oligonucleotide
  Antisense strand to SEQ ID NO: 158054
aguggaagaacaagccuuc

SEQ ID NO: 158056 - RNA, 19 nt, Artificial Sequence
  Description of Artificial Sequence: Synthetic oligonucleotide
  Sense strand starting at position 2878 of SEQ ID NO: 2032
accaguggucugcaagaag

SEQ ID NO: 158057 - RNA, 19 nt, Artificial Sequence
  Description of Artificial Sequence: Synthetic oligonucleotide
  Antisense strand to SEQ ID NO: 158056
cuucuugcagaccacuggu

SEQ ID NO: 158058 - RNA, 19 nt, Artificial Sequence
  Description of Artificial Sequence: Synthetic oligonucleotide
  Sense strand starting at position 2876 of SEQ ID NO: 2032
caaccaguggucugcaaga

SEQ ID NO: 158059 - RNA, 19 nt, Artificial Sequence
  Description of Artificial Sequence: Synthetic oligonucleotide
  Antisense strand to SEQ ID NO: 158058
ucuugcagaccacugguug

SEQ ID NO: 158060 - RNA, 19 nt, Artificial Sequence
  Description of Artificial Sequence: Synthetic oligonucleotide
  Sense strand starting at position 2847 of SEQ ID NO: 2032
ccagauuagcuauggcaaa

SEQ ID NO: 158061 - RNA, 19 nt, Artificial Sequence
  Description of Artificial Sequence: Synthetic oligonucleotide
  Antisense strand to SEQ ID NO: 158060
uuugccauagcuaaucugg

SEQ ID NO: 158062 - RNA, 19 nt, Artificial Sequence
  Description of Artificial Sequence: Synthetic oligonucleotide
  Sense strand starting at position 2824 of SEQ ID NO: 2032
gacugucacugaccugaaa

SEQ ID NO: 158063 - RNA, 19 nt, Artificial Sequence
  Description of Artificial Sequence: Synthetic oligonucleotide
  Antisense strand to SEQ ID NO: 158062
uuucaggucagugacaguc

SEQ ID NO: 158064 - RNA, 19 nt, Artificial Sequence
  Description of Artificial Sequence: Synthetic oligonucleotide
  Sense strand starting at position 2724 of SEQ ID NO: 2032
guguccacugcguaaggaa

SEQ ID NO: 158065 - RNA, 19 nt, Artificial Sequence
  Description of Artificial Sequence: Synthetic oligonucleotide
  Antisense strand to SEQ ID NO: 158064
uuccuuacgcaguggacac

SEQ ID NO: 158066 - RNA, 19 nt, Artificial Sequence
  Description of Artificial Sequence: Synthetic oligonucleotide
  Sense strand starting at position 2695 of SEQ ID NO: 2032
gggacugucuguuugcaga

SEQ ID NO: 158067 - RNA, 19 nt, Artificial Sequence
  Description of Artificial Sequence: Synthetic oligonucleotide
  Antisense strand to SEQ ID NO: 158066
ucugcaaacagacaguccc

SEQ ID NO: 158068 - RNA, 19 nt, Artificial Sequence
  Description of Artificial Sequence: Synthetic oligonucleotide
  Sense strand starting at position 1623 of SEQ ID NO: 2032
acuaaagucgaauguugau

SEQ ID NO: 158069 - RNA, 19 nt, Artificial Sequence
  Description of Artificial Sequence: Synthetic oligonucleotide
  Antisense strand to SEQ ID NO: 158068
aucaacauucgacuuuagu

SEQ ID NO: 158070 - RNA, 19 nt, Artificial Sequence
  Description of Artificial Sequence: Synthetic oligonucleotide
  Sense strand starting at position 1558 of SEQ ID NO: 2032
gaguuuaccagugaaagug

SEQ ID NO: 158071 - RNA, 19 nt, Artificial Sequence
  Description of Artificial Sequence: Synthetic oligonucleotide
  Antisense strand to SEQ ID NO: 158070
cacuuucacugguaaacuc

SEQ ID NO: 158072 - RNA, 19 nt, Artificial Sequence
  Description of Artificial Sequence: Synthetic oligonucleotide
  Sense strand starting at position 1557 of SEQ ID NO: 2032
ugaguuuaccagugaaagu

SEQ ID NO: 158073 - RNA, 19 nt, Artificial Sequence
  Description of Artificial Sequence: Synthetic oligonucleotide
  Antisense strand to SEQ ID NO: 158072
acuuucacugguaaacuca

SEQ ID NO: 158074 - RNA, 19 nt, Artificial Sequence
  Description of Artificial Sequence: Synthetic oligonucleotide
  Sense strand starting at position 1545 of SEQ ID NO: 2032
cuugaaacacccugaguuu

SEQ ID NO: 158075 - RNA, 19 nt, Artificial Sequence
  Description of Artificial Sequence: Synthetic oligonucleotide
  Antisense strand to SEQ ID NO: 158074
aaacucaggguguuucaag

SEQ ID NO: 158076 - RNA, 19 nt, Artificial Sequence
  Description of Artificial Sequence: Synthetic oligonucleotide
  Sense strand starting at position 1529 of SEQ ID NO: 2032
guuuacaagucauucccuu

SEQ ID NO: 158077 - RNA, 19 nt, Artificial Sequence
  Description of Artificial Sequence: Synthetic oligonucleotide
  Antisense strand to SEQ ID NO: 158076
aagggaaugacuuguaaac

SEQ ID NO: 158078 - RNA, 19 nt, Artificial Sequence
  Description of Artificial Sequence: Synthetic oligonucleotide
  Sense strand starting at position 1503 of SEQ ID NO: 2032
gaggaaaguuagccucaga

SEQ ID NO: 158079 - RNA, 19 nt, Artificial Sequence
  Description of Artificial Sequence: Synthetic oligonucleotide
  Antisense strand to SEQ ID NO: 158078
ucugaggcuaacuuuccuc

SEQ ID NO: 158080 - RNA, 19 nt, Artificial Sequence
  Description of Artificial Sequence: Synthetic oligonucleotide
  Sense strand starting at position 1388 of SEQ ID NO: 2032
auugcuauagugcaaguaa

SEQ ID NO: 158081 - RNA, 19 nt, Artificial Sequence
  Description of Artificial Sequence: Synthetic oligonucleotide
  Antisense strand to SEQ ID NO: 158080
uuacuugcacuauagcaau

SEQ ID NO: 158082 - RNA, 19 nt, Artificial Sequence
  Description of Artificial Sequence: Synthetic oligonucleotide
  Sense strand starting at position 1383 of SEQ ID NO: 2032
aaguuauugcuauagugca

SEQ ID NO: 158083 - RNA, 19 nt, Artificial Sequence
  Description of Artificial Sequence: Synthetic oligonucleotide
  Antisense strand to SEQ ID NO: 158082
ugcacuauagcaauaacuu

SEQ ID NO: 158084 - RNA, 19 nt, Artificial Sequence
  Description of Artificial Sequence: Synthetic oligonucleotide
  Sense strand starting at position 1327 of SEQ ID NO: 2032
guaauauggaggcaaguga

SEQ ID NO: 158085 - RNA, 19 nt, Artificial Sequence
  Description of Artificial Sequence: Synthetic oligonucleotide
  Antisense strand to SEQ ID NO: 158084
ucacuugccuccauauuac

SEQ ID NO: 158086 - RNA, 19 nt, Artificial Sequence
  Description of Artificial Sequence: Synthetic oligonucleotide
  Sense strand starting at position 1306 of SEQ ID NO: 2032
auaagaucuuuggcuuuaa

SEQ ID NO: 158087 - RNA, 19 nt, Artificial Sequence
  Description of Artificial Sequence: Synthetic oligonucleotide
  Antisense strand to SEQ ID NO: 158086
uuaaagccaaagaucuuau

SEQ ID NO: 158088 - RNA, 19 nt, Artificial Sequence
  Description of Artificial Sequence: Synthetic oligonucleotide
  Sense strand starting at position 1304 of SEQ ID NO: 2032
ucauaagaucuuuggcuuu

SEQ ID NO: 158089 - RNA, 19 nt, Artificial Sequence
  Description of Artificial Sequence: Synthetic oligonucleotide
  Antisense strand to SEQ ID NO: 158088
aaagccaaagaucuuauga

SEQ ID NO: 158090 - RNA, 19 nt, Artificial Sequence
  Description of Artificial Sequence: Synthetic oligonucleotide
  Sense strand starting at position 1303 of SEQ ID NO: 2032
gucauaagaucuuuggcuu

SEQ ID NO: 158091 - RNA, 19 nt, Artificial Sequence
  Description of Artificial Sequence: Synthetic oligonucleotide
  Antisense strand to SEQ ID NO: 158090
aagccaaagaucuuaugac

SEQ ID NO: 158092 - RNA, 19 nt, Artificial Sequence
  Description of Artificial Sequence: Synthetic oligonucleotide
  Sense strand starting at position 745 of SEQ ID NO: 2032
uaacgacuaguuuggcuaa

SEQ ID NO: 158093 - RNA, 19 nt, Artificial Sequence
  Description of Artificial Sequence: Synthetic oligonucleotide
  Antisense strand to SEQ ID NO: 158092
uuagccaaacuagucguua

SEQ ID NO: 158094 - RNA, 19 nt, Artificial Sequence
  Description of Artificial Sequence: Synthetic oligonucleotide
  Sense strand starting at position 737 of SEQ ID NO: 2032
cgucuaauuaacgacuagu

SEQ ID NO: 158095 - RNA, 19 nt, Artificial Sequence
  Description of Artificial Sequence: Synthetic oligonucleotide
  Antisense strand to SEQ ID NO: 158094
acuagucguuaauuagacg

SEQ ID NO: 158096 - RNA, 19 nt, Artificial Sequence
  Description of Artificial Sequence: Synthetic oligonucleotide
  Sense strand starting at position 725 of SEQ ID NO: 2032
ucagaaacuggacgucuaa

SEQ ID NO: 158097 - RNA, 19 nt, Artificial Sequence
  Description of Artificial Sequence: Synthetic oligonucleotide
  Antisense strand to SEQ ID NO: 158096
uuagacguccaguuucuga

SEQ ID NO: 158098 - RNA, 19 nt, Artificial Sequence
  Description of Artificial Sequence: Synthetic oligonucleotide
  Sense strand starting at position 661 of SEQ ID NO: 2032
uguuucuucuuuguaggaa

SEQ ID NO: 158099 - RNA, 19 nt, Artificial Sequence
  Description of Artificial Sequence: Synthetic oligonucleotide
  Antisense strand to SEQ ID NO: 158098
uuccuacaaagaagaaaca

SEQ ID NO: 158100 - RNA, 19 nt, Artificial Sequence
  Description of Artificial Sequence: Synthetic oligonucleotide
  Sense strand starting at position 660 of SEQ ID NO: 2032
uuguuucuucuuuguagga

SEQ ID NO: 158101 - RNA, 19 nt, Artificial Sequence
  Description of Artificial Sequence: Synthetic oligonucleotide
  Antisense strand to SEQ ID NO: 158100
uccuacaaagaagaaacaa

SEQ ID NO: 158102 - RNA, 19 nt, Artificial Sequence
  Description of Artificial Sequence: Synthetic oligonucleotide
  Sense strand starting at position 469 of SEQ ID NO: 2032
ccgagaucgcaacauugaa

SEQ ID NO: 158103 - RNA, 19 nt, Artificial Sequence
  Description of Artificial Sequence: Synthetic oligonucleotide
  Antisense strand to SEQ ID NO: 158102
uucaauguugcgaucucgg

SEQ ID NO: 158104 - RNA, 19 nt, Artificial Sequence
  Description of Artificial Sequence: Synthetic oligonucleotide
  Sense strand starting at position 131 of SEQ ID NO: 2032
ggaagcuuacauuacagua

SEQ ID NO: 158105 - RNA, 19 nt, Artificial Sequence
  Description of Artificial Sequence: Synthetic oligonucleotide
  Antisense strand to SEQ ID NO: 158104
uacuguaauguaagcuucc

SEQ ID NO: 158106 - RNA, 19 nt, Artificial Sequence
  Description of Artificial Sequence: Synthetic oligonucleotide
  Sense strand starting at position 115 of SEQ ID NO: 2032
acaaaugcuuuccuuagga

SEQ ID NO: 158107 - RNA, 19 nt, Artificial Sequence
  Description of Artificial Sequence: Synthetic oligonucleotide
  Antisense strand to SEQ ID NO: 158106
uccuaaggaaagcauuugu

SEQ ID NO: 158108 - RNA, 19 nt, Artificial Sequence
  Description of Artificial Sequence: Synthetic oligonucleotide
  Sense strand starting at position 77 of SEQ ID NO: 2033
gcaggauacacuggcuaga

SEQ ID NO: 158109 - RNA, 19 nt, Artificial Sequence
  Description of Artificial Sequence: Synthetic oligonucleotide
  Antisense strand to SEQ ID NO: 158108
ucuagccaguguauccugc

SEQ ID NO: 158110 - RNA, 19 nt, Artificial Sequence
  Description of Artificial Sequence: Synthetic oligonucleotide
  Sense strand starting at position 79 of SEQ ID NO: 2033
aggauacacuggcuagauu

SEQ ID NO: 158111 - RNA, 19 nt, Artificial Sequence
  Description of Artificial Sequence: Synthetic oligonucleotide
  Antisense strand to SEQ ID NO: 158110
aaucuagccaguguauccu

SEQ ID NO: 158112 - RNA, 19 nt, Artificial Sequence
  Description of Artificial Sequence: Synthetic oligonucleotide
  Sense strand starting at position 132 of SEQ ID NO: 2033
ucaacaagugugcauuaau

SEQ ID NO: 158113 - RNA, 19 nt, Artificial Sequence
  Description of Artificial Sequence: Synthetic oligonucleotide
  Antisense strand to SEQ ID NO: 158112
auuaaugcacacuuguuga

SEQ ID NO: 158114 - RNA, 19 nt, Artificial Sequence
  Description of Artificial Sequence: Synthetic oligonucleotide
  Sense strand starting at position 135 of SEQ ID NO: 2033
acaagugugcauuaauuaa

SEQ ID NO: 158115 - RNA, 19 nt, Artificial Sequence
  Description of Artificial Sequence: Synthetic oligonucleotide
  Antisense strand to SEQ ID NO: 158114
uuaauuaaugcacacuugu

SEQ ID NO: 158116 - RNA, 19 nt, Artificial Sequence
  Description of Artificial Sequence: Synthetic oligonucleotide
  Sense strand starting at position 158 of SEQ ID NO: 2033
agaagaauauuccuagguu

SEQ ID NO: 158117 - RNA, 19 nt, Artificial Sequence
  Description of Artificial Sequence: Synthetic oligonucleotide
  Antisense strand to SEQ ID NO: 158116
aaccuaggaauauucuucu

SEQ ID NO: 158118 - RNA, 19 nt, Artificial Sequence
  Description of Artificial Sequence: Synthetic oligonucleotide
  Sense strand starting at position 161 of SEQ ID NO: 2033
agaauauuccuagguuauu

SEQ ID NO: 158119 - RNA, 19 nt, Artificial Sequence
  Description of Artificial Sequence: Synthetic oligonucleotide
  Antisense strand to SEQ ID NO: 158118
aauaaccuaggaauauucu

SEQ ID NO: 158120 - RNA, 19 nt, Artificial Sequence
  Description of Artificial Sequence: Synthetic oligonucleotide
  Sense strand starting at position 296 of SEQ ID NO: 2033
uacgcaaggcacugauaaa

SEQ ID NO: 158121 - RNA, 19 nt, Artificial Sequence
  Description of Artificial Sequence: Synthetic oligonucleotide
  Antisense strand to SEQ ID NO: 158120
uuuaucagugccuugcgua

SEQ ID NO: 158122 - RNA, 19 nt, Artificial Sequence
  Description of Artificial Sequence: Synthetic oligonucleotide
  Sense strand starting at position 369 of SEQ ID NO: 2033
uuuaccuuucgagguacau

SEQ ID NO: 158123 - RNA, 19 nt, Artificial Sequence
  Description of Artificial Sequence: Synthetic oligonucleotide
  Antisense strand to SEQ ID NO: 158122
auguaccucgaaagguaaa

SEQ ID NO: 158124 - RNA, 19 nt, Artificial Sequence
  Description of Artificial Sequence: Synthetic oligonucleotide
  Sense strand starting at position 452 of SEQ ID NO: 2033
ggccaccaucuguaaacaa

SEQ ID NO: 158125 - RNA, 19 nt, Artificial Sequence
  Description of Artificial Sequence: Synthetic oligonucleotide
  Antisense strand to SEQ ID NO: 158124
uuguuuacagaugguggcc

SEQ ID NO: 158126 - RNA, 19 nt, Artificial Sequence
  Description of Artificial Sequence: Synthetic oligonucleotide
  Sense strand starting at position 531 of SEQ ID NO: 2033
ccacguaauggugaggauu

SEQ ID NO: 158127 - RNA, 19 nt, Artificial Sequence
  Description of Artificial Sequence: Synthetic oligonucleotide
  Antisense strand to SEQ ID NO: 158126
aauccucaccauuacgugg

SEQ ID NO: 158128 - RNA, 19 nt, Artificial Sequence
  Description of Artificial Sequence: Synthetic oligonucleotide
  Sense strand starting at position 932 of SEQ ID NO: 2033
caguguuagcaagggaaua

SEQ ID NO: 158129 - RNA, 19 nt, Artificial Sequence
  Description of Artificial Sequence: Synthetic oligonucleotide
  Antisense strand to SEQ ID NO: 158128
uauucccuugcuaacacug

SEQ ID NO: 158130 - RNA, 19 nt, Artificial Sequence
  Description of Artificial Sequence: Synthetic oligonucleotide
  Sense strand starting at position 933 of SEQ ID NO: 2033
aguguuagcaagggaauaa

SEQ ID NO: 158131 - RNA, 19 nt, Artificial Sequence
  Description of Artificial Sequence: Synthetic oligonucleotide
  Antisense strand to SEQ ID NO: 158130
uuauucccuugcuaacacu

SEQ ID NO: 158132 - RNA, 19 nt, Artificial Sequence
  Description of Artificial Sequence: Synthetic oligonucleotide
  Sense strand starting at position 934 of SEQ ID NO: 2033
guguuagcaagggaauaau

SEQ ID NO: 158133 - RNA, 19 nt, Artificial Sequence
  Description of Artificial Sequence: Synthetic oligonucleotide
  Antisense strand to SEQ ID NO: 158132
auuauucccuugcuaacac

SEQ ID NO: 158134 - RNA, 19 nt, Artificial Sequence
  Description of Artificial Sequence: Synthetic oligonucleotide
  Sense strand starting at position 1068 of SEQ ID NO: 2033
cccugaucgacaggcauaa

SEQ ID NO: 158135 - RNA, 19 nt, Artificial Sequence
  Description of Artificial Sequence: Synthetic oligonucleotide
  Antisense strand to SEQ ID NO: 158134
uuaugccugucgaucaggg

SEQ ID NO: 158136 - RNA, 19 nt, Artificial Sequence
  Description of Artificial Sequence: Synthetic oligonucleotide
  Sense strand starting at position 1544 of SEQ ID NO: 2033
cucggaguguggaggauuu

SEQ ID NO: 158137 - RNA, 19 nt, Artificial Sequence
  Description of Artificial Sequence: Synthetic oligonucleotide
  Antisense strand to SEQ ID NO: 158136
aaauccuccacacuccgag

SEQ ID NO: 158138 - RNA, 19 nt, Artificial Sequence
  Description of Artificial Sequence: Synthetic oligonucleotide
  Sense strand starting at position 2091 of SEQ ID NO: 2033
ccguauucuccggauaacu

SEQ ID NO: 158139 - RNA, 19 nt, Artificial Sequence
  Description of Artificial Sequence: Synthetic oligonucleotide
  Antisense strand to SEQ ID NO: 158138
aguuauccggagaauacgg

SEQ ID NO: 158140 - RNA, 19 nt, Artificial Sequence
  Description of Artificial Sequence: Synthetic oligonucleotide
  Sense strand starting at position 2102 of SEQ ID NO: 2033
ggauaacugccgcaacuaa

SEQ ID NO: 158141 - RNA, 19 nt, Artificial Sequence
  Description of Artificial Sequence: Synthetic oligonucleotide
  Antisense strand to SEQ ID NO: 158140
uuaguugcggcaguuaucc

SEQ ID NO: 158142 - RNA, 19 nt, Artificial Sequence
  Description of Artificial Sequence: Synthetic oligonucleotide
  Sense strand starting at position 2178 of SEQ ID NO: 2033
cgucuagacuaauucugaa

SEQ ID NO: 158143 - RNA, 19 nt, Artificial Sequence
  Description of Artificial Sequence: Synthetic oligonucleotide
  Antisense strand to SEQ ID NO: 158142
uucagaauuagucuagacg

SEQ ID NO: 158144 - RNA, 19 nt, Artificial Sequence
  Description of Artificial Sequence: Synthetic oligonucleotide
  Sense strand starting at position 2456 of SEQ ID NO: 2033
agacuugauuuccaauugu

SEQ ID NO: 158145 - RNA, 19 nt, Artificial Sequence
  Description of Artificial Sequence: Synthetic oligonucleotide
  Antisense strand to SEQ ID NO: 158144
acaauuggaaaucaagucu

SEQ ID NO: 158146 - RNA, 19 nt, Artificial Sequence
  Description of Artificial Sequence: Synthetic oligonucleotide
  Sense strand starting at position 2462 of SEQ ID NO: 2033
gauuuccaauuguaggauu

SEQ ID NO: 158147 - RNA, 19 nt, Artificial Sequence
  Description of Artificial Sequence: Synthetic oligonucleotide
  Antisense strand to SEQ ID NO: 158146
aauccuacaauuggaaauc

SEQ ID NO: 158148 - RNA, 19 nt, Artificial Sequence
  Description of Artificial Sequence: Synthetic oligonucleotide
  Sense strand starting at position 2470 of SEQ ID NO: 2033
auuguaggauuccuagaaa

SEQ ID NO: 158149 - RNA, 19 nt, Artificial Sequence
  Description of Artificial Sequence: Synthetic oligonucleotide
  Antisense strand to SEQ ID NO: 158148
uuucuaggaauccuacaau

SEQ ID NO: 158150 - RNA, 19 nt, Artificial Sequence
  Description of Artificial Sequence: Synthetic oligonucleotide
  Sense strand starting at position 2564 of SEQ ID NO: 2033
accugaucucuguggaugu

SEQ ID NO: 158151 - RNA, 19 nt, Artificial Sequence
  Description of Artificial Sequence: Synthetic oligonucleotide
  Antisense strand to SEQ ID NO: 158150
acauccacagagaucaggu

SEQ ID NO: 158152 - RNA, 19 nt, Artificial Sequence
  Description of Artificial Sequence: Synthetic oligonucleotide
  Sense strand starting at position 2607 of SEQ ID NO: 2033
gguaaaugguagucauuau

SEQ ID NO: 158153 - RNA, 19 nt, Artificial Sequence
  Description of Artificial Sequence: Synthetic oligonucleotide
  Antisense strand to SEQ ID NO: 158152
auaaugacuaccauuuacc

SEQ ID NO: 158154 - RNA, 19 nt, Artificial Sequence
  Description of Artificial Sequence: Synthetic oligonucleotide
  Sense strand starting at position 2611 of SEQ ID NO: 2033
aaugguagucauuauugua

SEQ ID NO: 158155 - RNA, 19 nt, Artificial Sequence
  Description of Artificial Sequence: Synthetic oligonucleotide
  Antisense strand to SEQ ID NO: 158154
uacaauaaugacuaccauu

SEQ ID NO: 158156 - RNA, 19 nt, Artificial Sequence
  Description of Artificial Sequence: Synthetic oligonucleotide
  Sense strand starting at position 2618 of SEQ ID NO: 2033
gucauuauuguauaacaga

SEQ ID NO: 158157 - RNA, 19 nt, Artificial Sequence
  Description of Artificial Sequence: Synthetic oligonucleotide
  Antisense strand to SEQ ID NO: 158156
ucuguuauacaauaaugac

SEQ ID NO: 158158 - RNA, 19 nt, Artificial Sequence
  Description of Artificial Sequence: Synthetic oligonucleotide
  Sense strand starting at position 2640 of SEQ ID NO: 2033
aaaucauuaugaucgguuu

SEQ ID NO: 158159 - RNA, 19 nt, Artificial Sequence
  Description of Artificial Sequence: Synthetic oligonucleotide
  Antisense strand to SEQ ID NO: 158158
aaaccgaucauaaugauuu

SEQ ID NO: 158160 - RNA, 19 nt, Artificial Sequence
  Description of Artificial Sequence: Synthetic oligonucleotide
  Sense strand starting at position 2641 of SEQ ID NO: 2033
aaucauuaugaucgguuua

SEQ ID NO: 158161 - RNA, 19 nt, Artificial Sequence
  Description of Artificial Sequence: Synthetic oligonucleotide
  Antisense strand to SEQ ID NO: 158160
uaaaccgaucauaaugauu

SEQ ID NO: 158162 - RNA, 19 nt, Artificial Sequence
  Description of Artificial Sequence: Synthetic oligonucleotide
  Sense strand starting at position 2643 of SEQ ID NO: 2033
ucauuaugaucgguuuaag

SEQ ID NO: 158163 - RNA, 19 nt, Artificial Sequence
  Description of Artificial Sequence: Synthetic oligonucleotide
  Antisense strand to SEQ ID NO: 158162
cuuaaaccgaucauaauga

SEQ ID NO: 158164 - RNA, 19 nt, Artificial Sequence
  Description of Artificial Sequence: Synthetic oligonucleotide
  Sense strand starting at position 2646 of SEQ ID NO: 2033
uuaugaucgguuuaagcaa

SEQ ID NO: 158165 - RNA, 19 nt, Artificial Sequence
  Description of Artificial Sequence: Synthetic oligonucleotide
  Antisense strand to SEQ ID NO: 158164
uugcuuaaaccgaucauaa

SEQ ID NO: 158166 - RNA, 19 nt, Artificial Sequence
  Description of Artificial Sequence: Synthetic oligonucleotide
  Sense strand starting at position 2662 of SEQ ID NO: 2033
caaagaaauuacguauuga

SEQ ID NO: 158167 - RNA, 19 nt, Artificial Sequence
  Description of Artificial Sequence: Synthetic oligonucleotide
  Antisense strand to SEQ ID NO: 158166
ucaauacguaauuucuuug

SEQ ID NO: 158168 - RNA, 19 nt, Artificial Sequence
  Description of Artificial Sequence: Synthetic oligonucleotide
  Sense strand starting at position 2673 of SEQ ID NO: 2033
cguauugaacuuuaauaga

SEQ ID NO: 158169 - RNA, 19 nt, Artificial Sequence
  Description of Artificial Sequence: Synthetic oligonucleotide
  Antisense strand to SEQ ID NO: 158168
ucuauuaaaguucaauacg

SEQ ID NO: 158170 - RNA, 19 nt, Artificial Sequence
  Description of Artificial Sequence: Synthetic oligonucleotide
  Sense strand starting at position 2782 of SEQ ID NO: 2033
ugguaaaccagguauagug

SEQ ID NO: 158171 - RNA, 19 nt, Artificial Sequence
  Description of Artificial Sequence: Synthetic oligonucleotide
  Antisense strand to SEQ ID NO: 158170
cacuauaccugguuuacca

SEQ ID NO: 158172 - RNA, 19 nt, Artificial Sequence
  Description of Artificial Sequence: Synthetic oligonucleotide
  Sense strand starting at position 3350 of SEQ ID NO: 2033
auuuguccuuucgugauga

SEQ ID NO: 158173 - RNA, 19 nt, Artificial Sequence
  Description of Artificial Sequence: Synthetic oligonucleotide
  Antisense strand to SEQ ID NO: 158172
ucaucacgaaaggacaaau

SEQ ID NO: 158174 - RNA, 19 nt, Artificial Sequence
  Description of Artificial Sequence: Synthetic oligonucleotide
  Sense strand starting at position 3352 of SEQ ID NO: 2033
uuguccuuucgugaugaac

SEQ ID NO: 158175 - RNA, 19 nt, Artificial Sequence
  Description of Artificial Sequence: Synthetic oligonucleotide
  Antisense strand to SEQ ID NO: 158174
guucaucacgaaaggacaa

SEQ ID NO: 158176 - RNA, 19 nt, Artificial Sequence
  Description of Artificial Sequence: Synthetic oligonucleotide
  Sense strand starting at position 3355 of SEQ ID NO: 2033
uccuuucgugaugaacuua

SEQ ID NO: 158177 - RNA, 19 nt, Artificial Sequence
  Description of Artificial Sequence: Synthetic oligonucleotide
  Antisense strand to SEQ ID NO: 158176
uaaguucaucacgaaagga

SEQ ID NO: 158178 - RNA, 19 nt, Artificial Sequence
  Description of Artificial Sequence: Synthetic oligonucleotide
  Sense strand starting at position 3499 of SEQ ID NO: 2033
ugagaacaccuauguucuu

SEQ ID NO: 158179 - RNA, 19 nt, Artificial Sequence
  Description of Artificial Sequence: Synthetic oligonucleotide
  Antisense strand to SEQ ID NO: 158178
aagaacauagguguucuca

SEQ ID NO: 158180 - RNA, 19 nt, Artificial Sequence
  Description of Artificial Sequence: Synthetic oligonucleotide
  Sense strand starting at position 3578 of SEQ ID NO: 2033
uagauaaugugguuccuac

SEQ ID NO: 158181 - RNA, 19 nt, Artificial Sequence
  Description of Artificial Sequence: Synthetic oligonucleotide
  Antisense strand to SEQ ID NO: 158180
guaggaaccacauuaucua

SEQ ID NO: 158182 - RNA, 19 nt, Artificial Sequence
  Description of Artificial Sequence: Synthetic oligonucleotide
  Sense strand starting at position 3631 of SEQ ID NO: 2033
cccuaaggugcagauaaau

SEQ ID NO: 158183 - RNA, 19 nt, Artificial Sequence
  Description of Artificial Sequence: Synthetic oligonucleotide
  Antisense strand to SEQ ID NO: 158182
auuuaucugcaccuuaggg

SEQ ID NO: 158184 - RNA, 19 nt, Artificial Sequence
  Description of Artificial Sequence: Synthetic oligonucleotide
  Sense strand starting at position 3747 of SEQ ID NO: 2033
ucuuacauuuccuuccgua

SEQ ID NO: 158185 - RNA, 19 nt, Artificial Sequence
  Description of Artificial Sequence: Synthetic oligonucleotide
  Antisense strand to SEQ ID NO: 158184
uacggaaggaaauguaaga

SEQ ID NO: 158186 - RNA, 19 nt, Artificial Sequence
  Description of Artificial Sequence: Synthetic oligonucleotide
  Sense strand starting at position 3876 of SEQ ID NO: 2033
cccuuuauagaguguccau

SEQ ID NO: 158187 - RNA, 19 nt, Artificial Sequence
  Description of Artificial Sequence: Synthetic oligonucleotide
  Antisense strand to SEQ ID NO: 158186
auggacacucuauaaaggg

SEQ ID NO: 158188 - RNA, 19 nt, Artificial Sequence
  Description of Artificial Sequence: Synthetic oligonucleotide
  Sense strand starting at position 3405 of SEQ ID NO: 2035
gcuugaaccuuggaguuga

SEQ ID NO: 158189 - RNA, 19 nt, Artificial Sequence
  Description of Artificial Sequence: Synthetic oligonucleotide
  Antisense strand to SEQ ID NO: 158188
ucaacuccaagguucaagc

SEQ ID NO: 158190 - RNA, 19 nt, Artificial Sequence
  Description of Artificial Sequence: Synthetic oligonucleotide
  Sense strand starting at position 3526 of SEQ ID NO: 2035
uuguuaaacuuccacuugu

SEQ ID NO: 158191 - RNA, 19 nt, Artificial Sequence
  Description of Artificial Sequence: Synthetic oligonucleotide
  Antisense strand to SEQ ID NO: 158190
acaaguggaaguuuaacaa

SEQ ID NO: 158192 - RNA, 19 nt, Artificial Sequence
  Description of Artificial Sequence: Synthetic oligonucleotide
  Sense strand starting at position 3559 of SEQ ID NO: 2035
caugaaccuucguaaagcu

SEQ ID NO: 158193 - RNA, 19 nt, Artificial Sequence
  Description of Artificial Sequence: Synthetic oligonucleotide
  Antisense strand to SEQ ID NO: 158192
agcuuuacgaagguucaug

SEQ ID NO: 158194 - RNA, 19 nt, Artificial Sequence
  Description of Artificial Sequence: Synthetic oligonucleotide
  Sense strand starting at position 3810 of SEQ ID NO: 2036
cugagagauacgugucaag

SEQ ID NO: 158195 - RNA, 19 nt, Artificial Sequence
  Description of Artificial Sequence: Synthetic oligonucleotide
  Antisense strand to SEQ ID NO: 158194
cuugacacguaucucucag

SEQ ID NO: 158196 - RNA, 19 nt, Artificial Sequence
  Description of Artificial Sequence: Synthetic oligonucleotide
  Sense strand starting at position 3799 of SEQ ID NO: 2036
uuccaagucagcugagaga

SEQ ID NO: 158197 - RNA, 19 nt, Artificial Sequence
  Description of Artificial Sequence: Synthetic oligonucleotide
  Antisense strand to SEQ ID NO: 158196
ucucucagcugacuuggaa

SEQ ID NO: 158198 - RNA, 19 nt, Artificial Sequence
  Description of Artificial Sequence: Synthetic oligonucleotide
  Sense strand starting at position 3754 of SEQ ID NO: 2036
cucuuacauguuggagaga

SEQ ID NO: 158199 - RNA, 19 nt, Artificial Sequence
  Description of Artificial Sequence: Synthetic oligonucleotide
  Antisense strand to SEQ ID NO: 158198
ucucuccaacauguaagag

SEQ ID NO: 158200 - RNA, 19 nt, Artificial Sequence
  Description of Artificial Sequence: Synthetic oligonucleotide
  Sense strand starting at position 3735 of SEQ ID NO: 2036
uuauaaccaguacguuauu

SEQ ID NO: 158201 - RNA, 19 nt, Artificial Sequence
  Description of Artificial Sequence: Synthetic oligonucleotide
  Antisense strand to SEQ ID NO: 158200
aauaacguacugguuauaa

SEQ ID NO: 158202 - RNA, 19 nt, Artificial Sequence
  Description of Artificial Sequence: Synthetic oligonucleotide
  Sense strand starting at position 3733 of SEQ ID NO: 2036
acuuauaaccaguacguua

SEQ ID NO: 158203 - RNA, 19 nt, Artificial Sequence
  Description of Artificial Sequence: Synthetic oligonucleotide
  Antisense strand to SEQ ID NO: 158202
uaacguacugguuauaagu

SEQ ID NO: 158204 - RNA, 19 nt, Artificial Sequence
  Description of Artificial Sequence: Synthetic oligonucleotide
  Sense strand starting at position 3370 of SEQ ID NO: 2036
ccuucuuuggaauaagcuu

SEQ ID NO: 158205 - RNA, 19 nt, Artificial Sequence
  Description of Artificial Sequence: Synthetic oligonucleotide
  Antisense strand to SEQ ID NO: 158204
aagcuuauuccaaagaagg

SEQ ID NO: 158206 - RNA, 19 nt, Artificial Sequence
  Description of Artificial Sequence: Synthetic oligonucleotide
  Sense strand starting at position 3363 of SEQ ID NO: 2036
gccacuuccuucuuuggaa

SEQ ID NO: 158207 - RNA, 19 nt, Artificial Sequence
  Description of Artificial Sequence: Synthetic oligonucleotide
  Antisense strand to SEQ ID NO: 158206
uuccaaagaaggaaguggc

SEQ ID NO: 158208 - RNA, 19 nt, Artificial Sequence
  Description of Artificial Sequence: Synthetic oligonucleotide
  Sense strand starting at position 3165 of SEQ ID NO: 2036
cuugaacagcuguaaugaa

SEQ ID NO: 158209 - RNA, 19 nt, Artificial Sequence
  Description of Artificial Sequence: Synthetic oligonucleotide
  Antisense strand to SEQ ID NO: 158208
uucauuacagcuguucaag

SEQ ID NO: 158210 - RNA, 19 nt, Artificial Sequence
  Description of Artificial Sequence: Synthetic oligonucleotide
  Sense strand starting at position 3142 of SEQ ID NO: 2036
guuggauucuuauuaauug

SEQ ID NO: 158211 - RNA, 19 nt, Artificial Sequence
  Description of Artificial Sequence: Synthetic oligonucleotide
  Antisense strand to SEQ ID NO: 158210
caauuaauaagaauccaac

SEQ ID NO: 158212 - RNA, 19 nt, Artificial Sequence
  Description of Artificial Sequence: Synthetic oligonucleotide
  Sense strand starting at position 3139 of SEQ ID NO: 2036
cuuguuggauucuuauuaa

SEQ ID NO: 158213 - RNA, 19 nt, Artificial Sequence
  Description of Artificial Sequence: Synthetic oligonucleotide
  Antisense strand to SEQ ID NO: 158212
uuaauaagaauccaacaag

SEQ ID NO: 158214 - RNA, 19 nt, Artificial Sequence
  Description of Artificial Sequence: Synthetic oligonucleotide
  Sense strand starting at position 2904 of SEQ ID NO: 2036
uuagaucuuugcccagaau

SEQ ID NO: 158215 - RNA, 19 nt, Artificial Sequence
  Description of Artificial Sequence: Synthetic oligonucleotide
  Antisense strand to SEQ ID NO: 158214
auucugggcaaagaucuaa

SEQ ID NO: 158216 - RNA, 19 nt, Artificial Sequence
  Description of Artificial Sequence: Synthetic oligonucleotide
  Sense strand starting at position 2903 of SEQ ID NO: 2036
guuagaucuuugcccagaa

SEQ ID NO: 158217 - RNA, 19 nt, Artificial Sequence
  Description of Artificial Sequence: Synthetic oligonucleotide
  Antisense strand to SEQ ID NO: 158216
uucugggcaaagaucuaac

SEQ ID NO: 158218 - RNA, 19 nt, Artificial Sequence
  Description of Artificial Sequence: Synthetic oligonucleotide
  Sense strand starting at position 2901 of SEQ ID NO: 2036
ugguuagaucuuugcccag

SEQ ID NO: 158219 - RNA, 19 nt, Artificial Sequence
  Description of Artificial Sequence: Synthetic oligonucleotide
  Antisense strand to SEQ ID NO: 158218
cugggcaaagaucuaacca

SEQ ID NO: 158220 - RNA, 19 nt, Artificial Sequence
  Description of Artificial Sequence: Synthetic oligonucleotide
  Sense strand starting at position 2893 of SEQ ID NO: 2036
auuauuguugguuagaucu

SEQ ID NO: 158221 - RNA, 19 nt, Artificial Sequence
  Description of Artificial Sequence: Synthetic oligonucleotide
  Antisense strand to SEQ ID NO: 158220
agaucuaaccaacaauaau

SEQ ID NO: 158222 - RNA, 19 nt, Artificial Sequence
  Description of Artificial Sequence: Synthetic oligonucleotide
  Sense strand starting at position 2892 of SEQ ID NO: 2036
uauuauuguugguuagauc

SEQ ID NO: 158223 - RNA, 19 nt, Artificial Sequence
  Description of Artificial Sequence: Synthetic oligonucleotide
  Antisense strand to SEQ ID NO: 158222
gaucuaaccaacaauaaua

SEQ ID NO: 158224 - RNA, 19 nt, Artificial Sequence
  Description of Artificial Sequence: Synthetic oligonucleotide
  Sense strand starting at position 2890 of SEQ ID NO: 2036
guuauuauuguugguuaga

SEQ ID NO: 158225 - RNA, 19 nt, Artificial Sequence
  Description of Artificial Sequence: Synthetic oligonucleotide
  Antisense strand to SEQ ID NO: 158224
ucuaaccaacaauaauaac

SEQ ID NO: 158226 - RNA, 19 nt, Artificial Sequence
  Description of Artificial Sequence: Synthetic oligonucleotide
  Sense strand starting at position 2856 of SEQ ID NO: 2036
ccucaaggaucaguugaga

SEQ ID NO: 158227 - RNA, 19 nt, Artificial Sequence
  Description of Artificial Sequence: Synthetic oligonucleotide
  Antisense strand to SEQ ID NO: 158226
ucucaacugauccuugagg

SEQ ID NO: 158228 - RNA, 19 nt, Artificial Sequence
  Description of Artificial Sequence: Synthetic oligonucleotide
  Sense strand starting at position 2722 of SEQ ID NO: 2036
augacagugcaucaucaga

SEQ ID NO: 158229 - RNA, 19 nt, Artificial Sequence
  Description of Artificial Sequence: Synthetic oligonucleotide
  Antisense strand to SEQ ID NO: 158228
ucugaugaugcacugucau

SEQ ID NO: 158230 - RNA, 19 nt, Artificial Sequence
  Description of Artificial Sequence: Synthetic oligonucleotide
  Sense strand starting at position 2709 of SEQ ID NO: 2036
gggcauuuaucccaugaca

SEQ ID NO: 158231 - RNA, 19 nt, Artificial Sequence
  Description of Artificial Sequence: Synthetic oligonucleotide
  Antisense strand to SEQ ID NO: 158230
ugucaugggauaaaugccc

SEQ ID NO: 158232 - RNA, 19 nt, Artificial Sequence
  Description of Artificial Sequence: Synthetic oligonucleotide
  Sense strand starting at position 2675 of SEQ ID NO: 2036
cagcacaaucccugaguga

SEQ ID NO: 158233 - RNA, 19 nt, Artificial Sequence
  Description of Artificial Sequence: Synthetic oligonucleotide
  Antisense strand to SEQ ID NO: 158232
ucacucagggauugugcug

SEQ ID NO: 158234 - RNA, 19 nt, Artificial Sequence
  Description of Artificial Sequence: Synthetic oligonucleotide
  Sense strand starting at position 2624 of SEQ ID NO: 2036
gccgauggugcucauuaaa

SEQ ID NO: 158235 - RNA, 19 nt, Artificial Sequence
  Description of Artificial Sequence: Synthetic oligonucleotide
  Antisense strand to SEQ ID NO: 158234
uuuaaugagcaccaucggc

SEQ ID NO: 158236 - RNA, 19 nt, Artificial Sequence
  Description of Artificial Sequence: Synthetic oligonucleotide
  Sense strand starting at position 2259 of SEQ ID NO: 2036
ugcggaaguccugaauuau

SEQ ID NO: 158237 - RNA, 19 nt, Artificial Sequence
  Description of Artificial Sequence: Synthetic oligonucleotide
  Antisense strand to SEQ ID NO: 158236
auaauucaggacuuccgca

SEQ ID NO: 158238 - RNA, 19 nt, Artificial Sequence
  Description of Artificial Sequence: Synthetic oligonucleotide
  Sense strand starting at position 2227 of SEQ ID NO: 2036
uugacuuuggauugagagu

SEQ ID NO: 158239 - RNA, 19 nt, Artificial Sequence
  Description of Artificial Sequence: Synthetic oligonucleotide
  Antisense strand to SEQ ID NO: 158238
acucucaauccaaagucaa

SEQ ID NO: 158240 - RNA, 19 nt, Artificial Sequence
  Description of Artificial Sequence: Synthetic oligonucleotide
  Sense strand starting at position 2219 of SEQ ID NO: 2036
ggaagugcuugacuuugga

SEQ ID NO: 158241 - RNA, 19 nt, Artificial Sequence
  Description of Artificial Sequence: Synthetic oligonucleotide
  Antisense strand to SEQ ID NO: 158240
uccaaagucaagcacuucc

SEQ ID NO: 158242 - RNA, 19 nt, Artificial Sequence
  Description of Artificial Sequence: Synthetic oligonucleotide
  Sense strand starting at position 2172 of SEQ ID NO: 2036
gggagacccugagaacuua

SEQ ID NO: 158243 - RNA, 19 nt, Artificial Sequence
  Description of Artificial Sequence: Synthetic oligonucleotide
  Antisense strand to SEQ ID NO: 158242
uaaguucucagggucuccc

SEQ ID NO: 158244 - RNA, 19 nt, Artificial Sequence
  Description of Artificial Sequence: Synthetic oligonucleotide
  Sense strand starting at position 2124 of SEQ ID NO: 2036
gccaccaccucucugagaa

SEQ ID NO: 158245 - RNA, 19 nt, Artificial Sequence
  Description of Artificial Sequence: Synthetic oligonucleotide
  Antisense strand to SEQ ID NO: 158244
uucucagagaggugguggc

SEQ ID NO: 158246 - RNA, 19 nt, Artificial Sequence
  Description of Artificial Sequence: Synthetic oligonucleotide
  Sense strand starting at position 1122 of SEQ ID NO: 2036
ccggaaaggcuucggaaca

SEQ ID NO: 158247 - RNA, 19 nt, Artificial Sequence
  Description of Artificial Sequence: Synthetic oligonucleotide
  Antisense strand to SEQ ID NO: 158246
uguuccgaagccuuuccgg

SEQ ID NO: 158248 - RNA, 19 nt, Artificial Sequence
  Description of Artificial Sequence: Synthetic oligonucleotide
  Sense strand starting at position 1031 of SEQ ID NO: 2036
gaaagagccuguuuacaga

SEQ ID NO: 158249 - RNA, 19 nt, Artificial Sequence
  Description of Artificial Sequence: Synthetic oligonucleotide
  Antisense strand to SEQ ID NO: 158248
ucuguaaacaggcucuuuc

SEQ ID NO: 158250 - RNA, 19 nt, Artificial Sequence
  Description of Artificial Sequence: Synthetic oligonucleotide
  Sense strand starting at position 941 of SEQ ID NO: 2036
ggagcaguuccaggcagaa

SEQ ID NO: 158251 - RNA, 19 nt, Artificial Sequence
  Description of Artificial Sequence: Synthetic oligonucleotide
  Antisense strand to SEQ ID NO: 158250
uucugccuggaacugcucc

SEQ ID NO: 158252 - RNA, 19 nt, Artificial Sequence
  Description of Artificial Sequence: Synthetic oligonucleotide
  Sense strand starting at position 759 of SEQ ID NO: 2036
gggaguuagucauuccacc

SEQ ID NO: 158253 - RNA, 19 nt, Artificial Sequence
  Description of Artificial Sequence: Synthetic oligonucleotide
  Antisense strand to SEQ ID NO: 158252
gguggaaugacuaacuccc

SEQ ID NO: 158254 - RNA, 19 nt, Artificial Sequence
  Description of Artificial Sequence: Synthetic oligonucleotide
  Sense strand starting at position 757 of SEQ ID NO: 2036
gagggaguuagucauucca

SEQ ID NO: 158255 - RNA, 19 nt, Artificial Sequence
  Description of Artificial Sequence: Synthetic oligonucleotide
  Antisense strand to SEQ ID NO: 158254
uggaaugacuaacucccuc

SEQ ID NO: 158256 - RNA, 19 nt, Artificial Sequence
  Description of Artificial Sequence: Synthetic oligonucleotide
  Sense strand starting at position 753 of SEQ ID NO: 2036
ggcagagggaguuagucau

SEQ ID NO: 158257 - RNA, 19 nt, Artificial Sequence
  Description of Artificial Sequence: Synthetic oligonucleotide
  Antisense strand to SEQ ID NO: 158256
augacuaacucccucugcc

SEQ ID NO: 158258 - RNA, 19 nt, Artificial Sequence
  Description of Artificial Sequence: Synthetic oligonucleotide
  Sense strand starting at position 454 of SEQ ID NO: 2036
acagcuaagcuugggauau

SEQ ID NO: 158259 - RNA, 19 nt, Artificial Sequence
  Description of Artificial Sequence: Synthetic oligonucleotide
  Antisense strand to SEQ ID NO: 158258
auaucccaagcuuagcugu

SEQ ID NO: 158260 - RNA, 19 nt, Artificial Sequence
  Description of Artificial Sequence: Synthetic oligonucleotide
  Sense strand starting at position 453 of SEQ ID NO: 2036
gacagcuaagcuugggaua

SEQ ID NO: 158261 - RNA, 19 nt, Artificial Sequence
  Description of Artificial Sequence: Synthetic oligonucleotide
  Antisense strand to SEQ ID NO: 158260
uaucccaagcuuagcuguc

SEQ ID NO: 158262 - RNA, 19 nt, Artificial Sequence
  Description of Artificial Sequence: Synthetic oligonucleotide
  Sense strand starting at position 272 of SEQ ID NO: 2036
gcaaacugauguucuggaa

SEQ ID NO: 158263 - RNA, 19 nt, Artificial Sequence
  Description of Artificial Sequence: Synthetic oligonucleotide
  Antisense strand to SEQ ID NO: 158262
uuccagaacaucaguuugc

SEQ ID NO: 158264 - RNA, 19 nt, Artificial Sequence
  Description of Artificial Sequence: Synthetic oligonucleotide
  Sense strand starting at position 239 of SEQ ID NO: 2036
uguugagaaauagguaagu

SEQ ID NO: 158265 - RNA, 19 nt, Artificial Sequence
  Description of Artificial Sequence: Synthetic oligonucleotide
  Antisense strand to SEQ ID NO: 158264
acuuaccuauuucucaaca

SEQ ID NO: 158266 - RNA, 19 nt, Artificial Sequence
  Description of Artificial Sequence: Synthetic oligonucleotide
  Sense strand starting at position 138 of SEQ ID NO: 2036
gguguagauggcugauauc

SEQ ID NO: 158267 - RNA, 19 nt, Artificial Sequence
  Description of Artificial Sequence: Synthetic oligonucleotide
  Antisense strand to SEQ ID NO: 158266
gauaucagccaucuacacc

SEQ ID NO: 158268 - RNA, 19 nt, Artificial Sequence
  Description of Artificial Sequence: Synthetic oligonucleotide
  Sense strand starting at position 137 of SEQ ID NO: 2036
agguguagauggcugauau

SEQ ID NO: 158269 - RNA, 19 nt, Artificial Sequence
  Description of Artificial Sequence: Synthetic oligonucleotide
  Antisense strand to SEQ ID NO: 158268
auaucagccaucuacaccu

SEQ ID NO: 158270 - RNA, 19 nt, Artificial Sequence
  Description of Artificial Sequence: Synthetic oligonucleotide
  Sense strand starting at position 113 of SEQ ID NO: 2036
agagguagcacuugcacua

SEQ ID NO: 158271 - RNA, 19 nt, Artificial Sequence
  Description of Artificial Sequence: Synthetic oligonucleotide
  Antisense strand to SEQ ID NO: 158270
uagugcaagugcuaccucu

SEQ ID NO: 158272 - RNA, 19 nt, Artificial Sequence
  Description of Artificial Sequence: Synthetic oligonucleotide
  Sense strand starting at position 10 of SEQ ID NO: 2036
cccugcuucccucagagaa

SEQ ID NO: 158273 - RNA, 19 nt, Artificial Sequence
  Description of Artificial Sequence: Synthetic oligonucleotide
  Antisense strand to SEQ ID NO: 158272
uucucugagggaagcaggg

SEQ ID NO: 158274 - RNA, 19 nt, Artificial Sequence
  Description of Artificial Sequence: Synthetic oligonucleotide
  Sense strand starting at position 3952 of SEQ ID NO: 2037
uggguuuguaaaugacauu

SEQ ID NO: 158275 - RNA, 19 nt, Artificial Sequence
  Description of Artificial Sequence: Synthetic oligonucleotide
  Antisense strand to SEQ ID NO: 158274
aaugucauuuacaaaccca

SEQ ID NO: 158276 - RNA, 19 nt, Artificial Sequence
  Description of Artificial Sequence: Synthetic oligonucleotide
  Sense strand starting at position 3946 of SEQ ID NO: 2037
ugaccuuggguuuguaaau

SEQ ID NO: 158277 - RNA, 19 nt, Artificial Sequence
  Description of Artificial Sequence: Synthetic oligonucleotide
  Antisense strand to SEQ ID NO: 158276
auuuacaaacccaagguca

SEQ ID NO: 158278 - RNA, 19 nt, Artificial Sequence
  Description of Artificial Sequence: Synthetic oligonucleotide
  Sense strand starting at position 3943 of SEQ ID NO: 2037
aggugaccuuggguuugua

SEQ ID NO: 158279 - RNA, 19 nt, Artificial Sequence
  Description of Artificial Sequence: Synthetic oligonucleotide
  Antisense strand to SEQ ID NO: 158278
uacaaacccaaggucaccu

SEQ ID NO: 158280 - RNA, 19 nt, Artificial Sequence
  Description of Artificial Sequence: Synthetic oligonucleotide
  Sense strand starting at position 3687 of SEQ ID NO: 2037
agagucaagugaucuuuga

SEQ ID NO: 158281 - RNA, 19 nt, Artificial Sequence
  Description of Artificial Sequence: Synthetic oligonucleotide
  Antisense strand to SEQ ID NO: 158280
ucaaagaucacuugacucu

SEQ ID NO: 158282 - RNA, 19 nt, Artificial Sequence
  Description of Artificial Sequence: Synthetic oligonucleotide
  Sense strand starting at position 3560 of SEQ ID NO: 2037
gaggacugauauugcccaa

SEQ ID NO: 158283 - RNA, 19 nt, Artificial Sequence
  Description of Artificial Sequence: Synthetic oligonucleotide
  Antisense strand to SEQ ID NO: 158282
uugggcaauaucaguccuc

SEQ ID NO: 158284 - RNA, 19 nt, Artificial Sequence
  Description of Artificial Sequence: Synthetic oligonucleotide
  Sense strand starting at position 3554 of SEQ ID NO: 2037
aagucugaggacugauauu

SEQ ID NO: 158285 - RNA, 19 nt, Artificial Sequence
  Description of Artificial Sequence: Synthetic oligonucleotide
  Antisense strand to SEQ ID NO: 158284
aauaucaguccucagacuu

SEQ ID NO: 158286 - RNA, 19 nt, Artificial Sequence
  Description of Artificial Sequence: Synthetic oligonucleotide
  Sense strand starting at position 3548 of SEQ ID NO: 2037
agaacaaagucugaggacu

SEQ ID NO: 158287 - RNA, 19 nt, Artificial Sequence
  Description of Artificial Sequence: Synthetic oligonucleotide
  Antisense strand to SEQ ID NO: 158286
aguccucagacuuuguucu

SEQ ID NO: 158288 - RNA, 19 nt, Artificial Sequence
  Description of Artificial Sequence: Synthetic oligonucleotide
  Sense strand starting at position 3468 of SEQ ID NO: 2037
uugugaauaucacaaacug

SEQ ID NO: 158289 - RNA, 19 nt, Artificial Sequence
  Description of Artificial Sequence: Synthetic oligonucleotide
  Antisense strand to SEQ ID NO: 158288
caguuugugauauucacaa

SEQ ID NO: 158290 - RNA, 19 nt, Artificial Sequence
  Description of Artificial Sequence: Synthetic oligonucleotide
  Sense strand starting at position 3446 of SEQ ID NO: 2037
aucagaaucccaggagguu

SEQ ID NO: 158291 - RNA, 19 nt, Artificial Sequence
  Description of Artificial Sequence: Synthetic oligonucleotide
  Antisense strand to SEQ ID NO: 158290
aaccuccugggauucugau

SEQ ID NO: 158292 - RNA, 19 nt, Artificial Sequence
  Description of Artificial Sequence: Synthetic oligonucleotide
  Sense strand starting at position 3184 of SEQ ID NO: 2037
ucuauauacuagcaacgaa

SEQ ID NO: 158293 - RNA, 19 nt, Artificial Sequence
  Description of Artificial Sequence: Synthetic oligonucleotide
  Antisense strand to SEQ ID NO: 158292
uucguugcuaguauauaga

SEQ ID NO: 158294 - RNA, 19 nt, Artificial Sequence
  Description of Artificial Sequence: Synthetic oligonucleotide
  Sense strand starting at position 3125 of SEQ ID NO: 2037
auaagcaauuaugguaaga

SEQ ID NO: 158295 - RNA, 19 nt, Artificial Sequence
  Description of Artificial Sequence: Synthetic oligonucleotide
  Antisense strand to SEQ ID NO: 158294
ucuuaccauaauugcuuau

SEQ ID NO: 158296 - RNA, 19 nt, Artificial Sequence
  Description of Artificial Sequence: Synthetic oligonucleotide
  Sense strand starting at position 3065 of SEQ ID NO: 2037
agcugacaugacuguugau

SEQ ID NO: 158297 - RNA, 19 nt, Artificial Sequence
  Description of Artificial Sequence: Synthetic oligonucleotide
  Antisense strand to SEQ ID NO: 158296
aucaacagucaugucagcu

SEQ ID NO: 158298 - RNA, 19 nt, Artificial Sequence
  Description of Artificial Sequence: Synthetic oligonucleotide
  Sense strand starting at position 2939 of SEQ ID NO: 2037
guaugucucuacucagcaa

SEQ ID NO: 158299 - RNA, 19 nt, Artificial Sequence
  Description of Artificial Sequence: Synthetic oligonucleotide
  Antisense strand to SEQ ID NO: 158298
uugcugaguagagacauac

SEQ ID NO: 158300 - RNA, 19 nt, Artificial Sequence
  Description of Artificial Sequence: Synthetic oligonucleotide
  Sense strand starting at position 2935 of SEQ ID NO: 2037
gcaaguaugucucuacuca

SEQ ID NO: 158301 - RNA, 19 nt, Artificial Sequence
  Description of Artificial Sequence: Synthetic oligonucleotide
  Antisense strand to SEQ ID NO: 158300
ugaguagagacauacuugc

SEQ ID NO: 158302 - RNA, 19 nt, Artificial Sequence
  Description of Artificial Sequence: Synthetic oligonucleotide
  Sense strand starting at position 2933 of SEQ ID NO: 2037
gggcaaguaugucucuacu

SEQ ID NO: 158303 - RNA, 19 nt, Artificial Sequence
  Description of Artificial Sequence: Synthetic oligonucleotide
  Antisense strand to SEQ ID NO: 158302
aguagagacauacuugccc

SEQ ID NO: 158304 - RNA, 19 nt, Artificial Sequence
  Description of Artificial Sequence: Synthetic oligonucleotide
  Sense strand starting at position 2812 of SEQ ID NO: 2037
gcagcaaacuaugaauaga

SEQ ID NO: 158305 - RNA, 19 nt, Artificial Sequence
  Description of Artificial Sequence: Synthetic oligonucleotide
  Antisense strand to SEQ ID NO: 158304
ucuauucauaguuugcugc

SEQ ID NO: 158306 - RNA, 19 nt, Artificial Sequence
  Description of Artificial Sequence: Synthetic oligonucleotide
  Sense strand starting at position 2469 of SEQ ID NO: 2037
ugaugcaauuacgaaauca

SEQ ID NO: 158307 - RNA, 19 nt, Artificial Sequence
  Description of Artificial Sequence: Synthetic oligonucleotide
  Antisense strand to SEQ ID NO: 158306
ugauuucguaauugcauca

SEQ ID NO: 158308 - RNA, 19 nt, Artificial Sequence
  Description of Artificial Sequence: Synthetic oligonucleotide
  Sense strand starting at position 2438 of SEQ ID NO: 2037
cugguccucagagagcuua

SEQ ID NO: 158309 - RNA, 19 nt, Artificial Sequence
  Description of Artificial Sequence: Synthetic oligonucleotide
  Antisense strand to SEQ ID NO: 158308
uaagcucucugaggaccag

SEQ ID NO: 158310 - RNA, 19 nt, Artificial Sequence
  Description of Artificial Sequence: Synthetic oligonucleotide
  Sense strand starting at position 2433 of SEQ ID NO: 2037
cagaccugguccucagaga

SEQ ID NO: 158311 - RNA, 19 nt, Artificial Sequence
  Description of Artificial Sequence: Synthetic oligonucleotide
  Antisense strand to SEQ ID NO: 158310
ucucugaggaccaggucug

SEQ ID NO: 158312 - RNA, 19 nt, Artificial Sequence
  Description of Artificial Sequence: Synthetic oligonucleotide
  Sense strand starting at position 2326 of SEQ ID NO: 2037
aaagaaaccugguuccaug

SEQ ID NO: 158313 - RNA, 19 nt, Artificial Sequence
  Description of Artificial Sequence: Synthetic oligonucleotide
  Antisense strand to SEQ ID NO: 158312
cauggaaccagguuucuuu

SEQ ID NO: 158314 - RNA, 19 nt, Artificial Sequence
  Description of Artificial Sequence: Synthetic oligonucleotide
  Sense strand starting at position 1438 of SEQ ID NO: 2037
gacugaaacuucccgagca

SEQ ID NO: 158315 - RNA, 19 nt, Artificial Sequence
  Description of Artificial Sequence: Synthetic oligonucleotide
  Antisense strand to SEQ ID NO: 158314
ugcucgggaaguuucaguc

SEQ ID NO: 158316 - RNA, 19 nt, Artificial Sequence
  Description of Artificial Sequence: Synthetic oligonucleotide
  Sense strand starting at position 1244 of SEQ ID NO: 2037
gggauucgugaggagcaga

SEQ ID NO: 158317 - RNA, 19 nt, Artificial Sequence
  Description of Artificial Sequence: Synthetic oligonucleotide
  Antisense strand to SEQ ID NO: 158316
ucugcuccucacgaauccc

SEQ ID NO: 158318 - RNA, 19 nt, Artificial Sequence
  Description of Artificial Sequence: Synthetic oligonucleotide
  Sense strand starting at position 893 of SEQ ID NO: 2037
ugcugugacaaugguaaga

SEQ ID NO: 158319 - RNA, 19 nt, Artificial Sequence
  Description of Artificial Sequence: Synthetic oligonucleotide
  Antisense strand to SEQ ID NO: 158318
ucuuaccauugucacagca

SEQ ID NO: 158320 - RNA, 19 nt, Artificial Sequence
  Description of Artificial Sequence: Synthetic oligonucleotide
  Sense strand starting at position 799 of SEQ ID NO: 2037
gggccucuuccucgaaguu

SEQ ID NO: 158321 - RNA, 19 nt, Artificial Sequence
  Description of Artificial Sequence: Synthetic oligonucleotide
  Antisense strand to SEQ ID NO: 158320
aacuucgaggaagaggccc

SEQ ID NO: 158322 - RNA, 19 nt, Artificial Sequence
  Description of Artificial Sequence: Synthetic oligonucleotide
  Sense strand starting at position 688 of SEQ ID NO: 2037
cguauuuggcaguggagag

SEQ ID NO: 158323 - RNA, 19 nt, Artificial Sequence
  Description of Artificial Sequence: Synthetic oligonucleotide
  Antisense strand to SEQ ID NO: 158322
cucuccacugccaaauacg

SEQ ID NO: 158324 - RNA, 19 nt, Artificial Sequence
  Description of Artificial Sequence: Synthetic oligonucleotide
  Sense strand starting at position 676 of SEQ ID NO: 2037
aggaguguccuccguauuu

SEQ ID NO: 158325 - RNA, 19 nt, Artificial Sequence
  Description of Artificial Sequence: Synthetic oligonucleotide
  Antisense strand to SEQ ID NO: 158324
aaauacggaggacacuccu

SEQ ID NO: 158326 - RNA, 19 nt, Artificial Sequence
  Description of Artificial Sequence: Synthetic oligonucleotide
  Sense strand starting at position 674 of SEQ ID NO: 2037
auaggaguguccuccguau

SEQ ID NO: 158327 - RNA, 19 nt, Artificial Sequence
  Description of Artificial Sequence: Synthetic oligonucleotide
  Antisense strand to SEQ ID NO: 158326
auacggaggacacuccuau

SEQ ID NO: 158328 - RNA, 19 nt, Artificial Sequence
  Description of Artificial Sequence: Synthetic oligonucleotide
  Sense strand starting at position 640 of SEQ ID NO: 2037
uugaguuucugaucuguuu

SEQ ID NO: 158329 - RNA, 19 nt, Artificial Sequence
  Description of Artificial Sequence: Synthetic oligonucleotide
  Antisense strand to SEQ ID NO: 158328
aaacagaucagaaacucaa

SEQ ID NO: 158330 - RNA, 19 nt, Artificial Sequence
  Description of Artificial Sequence: Synthetic oligonucleotide
  Sense strand starting at position 622 of SEQ ID NO: 2037
cacacuguccgggauacuu

SEQ ID NO: 158331 - RNA, 19 nt, Artificial Sequence
  Description of Artificial Sequence: Synthetic oligonucleotide
  Antisense strand to SEQ ID NO: 158330
aaguaucccggacagugug

SEQ ID NO: 158332 - RNA, 19 nt, Artificial Sequence
  Description of Artificial Sequence: Synthetic oligonucleotide
  Sense strand starting at position 621 of SEQ ID NO: 2037
ccacacuguccgggauacu

SEQ ID NO: 158333 - RNA, 19 nt, Artificial Sequence
  Description of Artificial Sequence: Synthetic oligonucleotide
  Antisense strand to SEQ ID NO: 158332
aguaucccggacagugugg

SEQ ID NO: 158334 - RNA, 19 nt, Artificial Sequence
  Description of Artificial Sequence: Synthetic oligonucleotide
  Sense strand starting at position 560 of SEQ ID NO: 2037
ccaucugagccuggugaga

SEQ ID NO: 158335 - RNA, 19 nt, Artificial Sequence
  Description of Artificial Sequence: Synthetic oligonucleotide
  Antisense strand to SEQ ID NO: 158334
ucucaccaggcucagaugg

SEQ ID NO: 158336 - RNA, 19 nt, Artificial Sequence
  Description of Artificial Sequence: Synthetic oligonucleotide
  Sense strand starting at position 533 of SEQ ID NO: 2037
aaauccuggcuauguaagu

SEQ ID NO: 158337 - RNA, 19 nt, Artificial Sequence
  Description of Artificial Sequence: Synthetic oligonucleotide
  Antisense strand to SEQ ID NO: 158336
acuuacauagccaggauuu

SEQ ID NO: 158338 - RNA, 19 nt, Artificial Sequence
  Description of Artificial Sequence: Synthetic oligonucleotide
  Sense strand starting at position 284 of SEQ ID NO: 2037
ugucuaauugaucacagca

SEQ ID NO: 158339 - RNA, 19 nt, Artificial Sequence
  Description of Artificial Sequence: Synthetic oligonucleotide
  Antisense strand to SEQ ID NO: 158338
ugcugugaucaauuagaca

SEQ ID NO: 158340 - RNA, 19 nt, Artificial Sequence
  Description of Artificial Sequence: Synthetic oligonucleotide
  Sense strand starting at position 279 of SEQ ID NO: 2037
augucugucuaauugauca

SEQ ID NO: 158341 - RNA, 19 nt, Artificial Sequence
  Description of Artificial Sequence: Synthetic oligonucleotide
  Antisense strand to SEQ ID NO: 158340
ugaucaauuagacagacau

SEQ ID NO: 158342 - RNA, 19 nt, Artificial Sequence
  Description of Artificial Sequence: Synthetic oligonucleotide
  Sense strand starting at position 275 of SEQ ID NO: 2037
gauaaugucugucuaauug

SEQ ID NO: 158343 - RNA, 19 nt, Artificial Sequence
  Description of Artificial Sequence: Synthetic oligonucleotide
  Antisense strand to SEQ ID NO: 158342
caauuagacagacauuauc

SEQ ID NO: 158344 - RNA, 19 nt, Artificial Sequence
  Description of Artificial Sequence: Synthetic oligonucleotide
  Sense strand starting at position 271 of SEQ ID NO: 2037
auaagauaaugucugucua

SEQ ID NO: 158345 - RNA, 19 nt, Artificial Sequence
  Description of Artificial Sequence: Synthetic oligonucleotide
  Antisense strand to SEQ ID NO: 158344
uagacagacauuaucuuau

SEQ ID NO: 158346 - RNA, 19 nt, Artificial Sequence
  Description of Artificial Sequence: Synthetic oligonucleotide
  Sense strand starting at position 258 of SEQ ID NO: 2037
uaguccuggugacauaaga

SEQ ID NO: 158347 - RNA, 19 nt, Artificial Sequence
  Description of Artificial Sequence: Synthetic oligonucleotide
  Antisense strand to SEQ ID NO: 158346
ucuuaugucaccaggacua

SEQ ID NO: 158348 - RNA, 19 nt, Artificial Sequence
  Description of Artificial Sequence: Synthetic oligonucleotide
  Sense strand starting at position 256 of SEQ ID NO: 2037
auuaguccuggugacauaa

SEQ ID NO: 158349 - RNA, 19 nt, Artificial Sequence
  Description of Artificial Sequence: Synthetic oligonucleotide
  Antisense strand to SEQ ID NO: 158348
uuaugucaccaggacuaau

SEQ ID NO: 158350 - RNA, 19 nt, Artificial Sequence
  Description of Artificial Sequence: Synthetic oligonucleotide
  Sense strand starting at position 253 of SEQ ID NO: 2037
caaauuaguccuggugaca

SEQ ID NO: 158351 - RNA, 19 nt, Artificial Sequence
  Description of Artificial Sequence: Synthetic oligonucleotide
  Antisense strand to SEQ ID NO: 158350
ugucaccaggacuaauuug

SEQ ID NO: 158352 - RNA, 19 nt, Artificial Sequence
  Description of Artificial Sequence: Synthetic oligonucleotide
  Sense strand starting at position 102 of SEQ ID NO: 2037
gcccauuucucauacggac

SEQ ID NO: 158353 - RNA, 19 nt, Artificial Sequence
  Description of Artificial Sequence: Synthetic oligonucleotide
  Antisense strand to SEQ ID NO: 158352
guccguaugagaaaugggc

SEQ ID NO: 158354 - RNA, 19 nt, Artificial Sequence
  Description of Artificial Sequence: Synthetic oligonucleotide
  Sense strand starting at position 41 of SEQ ID NO: 2038
ggcacaauguucccuccau

SEQ ID NO: 158355 - RNA, 19 nt, Artificial Sequence
  Description of Artificial Sequence: Synthetic oligonucleotide
  Antisense strand to SEQ ID NO: 158354
auggagggaacauugugcc

SEQ ID NO: 158356 - RNA, 19 nt, Artificial Sequence
  Description of Artificial Sequence: Synthetic oligonucleotide
  Sense strand starting at position 134 of SEQ ID NO: 2038
cuaguugagagucacugau

SEQ ID NO: 158357 - RNA, 19 nt, Artificial Sequence
  Description of Artificial Sequence: Synthetic oligonucleotide
  Antisense strand to SEQ ID NO: 158356
aucagugacucucaacuag

SEQ ID NO: 158358 - RNA, 19 nt, Artificial Sequence
  Description of Artificial Sequence: Synthetic oligonucleotide
  Sense strand starting at position 138 of SEQ ID NO: 2038
uugagagucacugauguag

SEQ ID NO: 158359 - RNA, 19 nt, Artificial Sequence
  Description of Artificial Sequence: Synthetic oligonucleotide
  Antisense strand to SEQ ID NO: 158358
cuacaucagugacucucaa

SEQ ID NO: 158360 - RNA, 19 nt, Artificial Sequence
  Description of Artificial Sequence: Synthetic oligonucleotide
  Sense strand starting at position 140 of SEQ ID NO: 2038
gagagucacugauguagac

SEQ ID NO: 158361 - RNA, 19 nt, Artificial Sequence
  Description of Artificial Sequence: Synthetic oligonucleotide
  Antisense strand to SEQ ID NO: 158360
gucuacaucagugacucuc

SEQ ID NO: 158362 - RNA, 19 nt, Artificial Sequence
  Description of Artificial Sequence: Synthetic oligonucleotide
  Sense strand starting at position 286 of SEQ ID NO: 2038
ggauacauccaguguuacu

SEQ ID NO: 158363 - RNA, 19 nt, Artificial Sequence
  Description of Artificial Sequence: Synthetic oligonucleotide
  Antisense strand to SEQ ID NO: 158362
aguaacacuggauguaucc

SEQ ID NO: 158364 - RNA, 19 nt, Artificial Sequence
  Description of Artificial Sequence: Synthetic oligonucleotide
  Sense strand starting at position 295 of SEQ ID NO: 2038
caguguuacuuccucaguu

SEQ ID NO: 158365 - RNA, 19 nt, Artificial Sequence
  Description of Artificial Sequence: Synthetic oligonucleotide
  Antisense strand to SEQ ID NO: 158364
aacugaggaaguaacacug

SEQ ID NO: 158366 - RNA, 19 nt, Artificial Sequence
  Description of Artificial Sequence: Synthetic oligonucleotide
  Sense strand starting at position 296 of SEQ ID NO: 2038
aguguuacuuccucaguuu

SEQ ID NO: 158367 - RNA, 19 nt, Artificial Sequence
  Description of Artificial Sequence: Synthetic oligonucleotide
  Antisense strand to SEQ ID NO: 158366
aaacugaggaaguaacacu

SEQ ID NO: 158368 - RNA, 19 nt, Artificial Sequence
  Description of Artificial Sequence: Synthetic oligonucleotide
  Sense strand starting at position 394 of SEQ ID NO: 2038
aguccuaugccguggacuu

SEQ ID NO: 158369 - RNA, 19 nt, Artificial Sequence
  Description of Artificial Sequence: Synthetic oligonucleotide
  Antisense strand to SEQ ID NO: 158368
aaguccacggcauaggacu

SEQ ID NO: 158370 - RNA, 19 nt, Artificial Sequence
  Description of Artificial Sequence: Synthetic oligonucleotide
  Sense strand starting at position 406 of SEQ ID NO: 2038
uggacuugaucauuccuca

SEQ ID NO: 158371 - RNA, 19 nt, Artificial Sequence
  Description of Artificial Sequence: Synthetic oligonucleotide
  Antisense strand to SEQ ID NO: 158370
ugaggaaugaucaagucca

SEQ ID NO: 158372 - RNA, 19 nt, Artificial Sequence
  Description of Artificial Sequence: Synthetic oligonucleotide
  Sense strand starting at position 519 of SEQ ID NO: 2038
ucuccagcccuuuaggaaa

SEQ ID NO: 158373 - RNA, 19 nt, Artificial Sequence
  Description of Artificial Sequence: Synthetic oligonucleotide
  Antisense strand to SEQ ID NO: 158372
uuuccuaaagggcuggaga

SEQ ID NO: 158374 - RNA, 19 nt, Artificial Sequence
  Description of Artificial Sequence: Synthetic oligonucleotide
  Sense strand starting at position 530 of SEQ ID NO: 2038
uuaggaaaguggugagaga

SEQ ID NO: 158375 - RNA, 19 nt, Artificial Sequence
  Description of Artificial Sequence: Synthetic oligonucleotide
  Antisense strand to SEQ ID NO: 158374
ucucucaccacuuuccuaa

SEQ ID NO: 158376 - RNA, 19 nt, Artificial Sequence
  Description of Artificial Sequence: Synthetic oligonucleotide
  Sense strand starting at position 538 of SEQ ID NO: 2038
guggugagagagugaagau

SEQ ID NO: 158377 - RNA, 19 nt, Artificial Sequence
  Description of Artificial Sequence: Synthetic oligonucleotide
  Antisense strand to SEQ ID NO: 158376
aucuucacucucucaccac

SEQ ID NO: 158378 - RNA, 19 nt, Artificial Sequence
  Description of Artificial Sequence: Synthetic oligonucleotide
  Sense strand starting at position 541 of SEQ ID NO: 2038
gugagagagugaagaugau

SEQ ID NO: 158379 - RNA, 19 nt, Artificial Sequence
  Description of Artificial Sequence: Synthetic oligonucleotide
  Antisense strand to SEQ ID NO: 158378
aucaucuucacucucucac

SEQ ID NO: 158380 - RNA, 19 nt, Artificial Sequence
  Description of Artificial Sequence: Synthetic oligonucleotide
  Sense strand starting at position 551 of SEQ ID NO: 2038
gaagaugauucuuggagca

SEQ ID NO: 158381 - RNA, 19 nt, Artificial Sequence
  Description of Artificial Sequence: Synthetic oligonucleotide
  Antisense strand to SEQ ID NO: 158380
ugcuccaagaaucaucuuc

SEQ ID NO: 158382 - RNA, 19 nt, Artificial Sequence
  Description of Artificial Sequence: Synthetic oligonucleotide
  Sense strand starting at position 553 of SEQ ID NO: 2038
agaugauucuuggagcacu

SEQ ID NO: 158383 - RNA, 19 nt, Artificial Sequence
  Description of Artificial Sequence: Synthetic oligonucleotide
  Antisense strand to SEQ ID NO: 158382
agugcuccaagaaucaucu

SEQ ID NO: 158384 - RNA, 19 nt, Artificial Sequence
  Description of Artificial Sequence: Synthetic oligonucleotide
  Sense strand starting at position 633 of SEQ ID NO: 2038
cugucucaacgggaaugua

SEQ ID NO: 158385 - RNA, 19 nt, Artificial Sequence
  Description of Artificial Sequence: Synthetic oligonucleotide
  Antisense strand to SEQ ID NO: 158384
uacauucccguugagacag

SEQ ID NO: 158386 - RNA, 19 nt, Artificial Sequence
  Description of Artificial Sequence: Synthetic oligonucleotide
  Sense strand starting at position 760 of SEQ ID NO: 2038
uggaguggcacaugaauca

SEQ ID NO: 158387 - RNA, 19 nt, Artificial Sequence
  Description of Artificial Sequence: Synthetic oligonucleotide
  Antisense strand to SEQ ID NO: 158386
ugauucaugugccacucca

SEQ ID NO: 158388 - RNA, 19 nt, Artificial Sequence
  Description of Artificial Sequence: Synthetic oligonucleotide
  Sense strand starting at position 796 of SEQ ID NO: 2038
cucccagaggugugugauu

SEQ ID NO: 158389 - RNA, 19 nt, Artificial Sequence
  Description of Artificial Sequence: Synthetic oligonucleotide
  Antisense strand to SEQ ID NO: 158388
aaucacacaccucugggag

SEQ ID NO: 158390 - RNA, 19 nt, Artificial Sequence
  Description of Artificial Sequence: Synthetic oligonucleotide
  Sense strand starting at position 1390 of SEQ ID NO: 2038
agaccagagugguugggaa

SEQ ID NO: 158391 - RNA, 19 nt, Artificial Sequence
  Description of Artificial Sequence: Synthetic oligonucleotide
  Antisense strand to SEQ ID NO: 158390
uucccaaccacucuggucu

SEQ ID NO: 158392 - RNA, 19 nt, Artificial Sequence
  Description of Artificial Sequence: Synthetic oligonucleotide
  Sense strand starting at position 1443 of SEQ ID NO: 2038
gaagcuuggucagcagagu

SEQ ID NO: 158393 - RNA, 19 nt, Artificial Sequence
  Description of Artificial Sequence: Synthetic oligonucleotide
  Antisense strand to SEQ ID NO: 158392
acucugcugaccaagcuuc

SEQ ID NO: 158394 - RNA, 19 nt, Artificial Sequence
  Description of Artificial Sequence: Synthetic oligonucleotide
  Sense strand starting at position 1508 of SEQ ID NO: 2038
ugacucaucuacuccugua

SEQ ID NO: 158395 - RNA, 19 nt, Artificial Sequence
  Description of Artificial Sequence: Synthetic oligonucleotide
  Antisense strand to SEQ ID NO: 158394
uacaggaguagaugaguca

SEQ ID NO: 158396 - RNA, 19 nt, Artificial Sequence
  Description of Artificial Sequence: Synthetic oligonucleotide
  Sense strand starting at position 1565 of SEQ ID NO: 2038
gugacuuauucagggagac

SEQ ID NO: 158397 - RNA, 19 nt, Artificial Sequence
  Description of Artificial Sequence: Synthetic oligonucleotide
  Antisense strand to SEQ ID NO: 158396
gucucccugaauaagucac

SEQ ID NO: 158398 - RNA, 19 nt, Artificial Sequence
  Description of Artificial Sequence: Synthetic oligonucleotide
  Sense strand starting at position 1817 of SEQ ID NO: 2038
gguaaguuugggugcugga

SEQ ID NO: 158399 - RNA, 19 nt, Artificial Sequence
  Description of Artificial Sequence: Synthetic oligonucleotide
  Antisense strand to SEQ ID NO: 158398
uccagcacccaaacuuacc

SEQ ID NO: 158400 - RNA, 19 nt, Artificial Sequence
  Description of Artificial Sequence: Synthetic oligonucleotide
  Sense strand starting at position 1830 of SEQ ID NO: 2038
gcuggaucgcuccaucguu

SEQ ID NO: 158401 - RNA, 19 nt, Artificial Sequence
  Description of Artificial Sequence: Synthetic oligonucleotide
  Antisense strand to SEQ ID NO: 158400
aacgauggagcgauccagc

SEQ ID NO: 158402 - RNA, 19 nt, Artificial Sequence
  Description of Artificial Sequence: Synthetic oligonucleotide
  Sense strand starting at position 2276 of SEQ ID NO: 2038
ggagugacgucaguuagga

SEQ ID NO: 158403 - RNA, 19 nt, Artificial Sequence
  Description of Artificial Sequence: Synthetic oligonucleotide
  Antisense strand to SEQ ID NO: 158402
uccuaacugacgucacucc

SEQ ID NO: 158404 - RNA, 19 nt, Artificial Sequence
  Description of Artificial Sequence: Synthetic oligonucleotide
  Sense strand starting at position 2352 of SEQ ID NO: 2038
agagcaagagcggauauua

SEQ ID NO: 158405 - RNA, 19 nt, Artificial Sequence
  Description of Artificial Sequence: Synthetic oligonucleotide
  Antisense strand to SEQ ID NO: 158404
uaauauccgcucuugcucu

SEQ ID NO: 158406 - RNA, 19 nt, Artificial Sequence
  Description of Artificial Sequence: Synthetic oligonucleotide
  Sense strand starting at position 2446 of SEQ ID NO: 2038
aggcuuugauuauauggau

SEQ ID NO: 158407 - RNA, 19 nt, Artificial Sequence
  Description of Artificial Sequence: Synthetic oligonucleotide
  Antisense strand to SEQ ID NO: 158406
auccauauaaucaaagccu

SEQ ID NO: 158408 - RNA, 19 nt, Artificial Sequence
  Description of Artificial Sequence: Synthetic oligonucleotide
  Sense strand starting at position 2840 of SEQ ID NO: 2038
agcgcauuccaggauaucu

SEQ ID NO: 158409 - RNA, 19 nt, Artificial Sequence
  Description of Artificial Sequence: Synthetic oligonucleotide
  Antisense strand to SEQ ID NO: 158408
agauauccuggaaugcgcu

SEQ ID NO: 158410 - RNA, 19 nt, Artificial Sequence
  Description of Artificial Sequence: Synthetic oligonucleotide
  Sense strand starting at position 2939 of SEQ ID NO: 2038
gcuguuugcuguuccuuga

SEQ ID NO: 158411 - RNA, 19 nt, Artificial Sequence
  Description of Artificial Sequence: Synthetic oligonucleotide
  Antisense strand to SEQ ID NO: 158410
ucaaggaacagcaaacagc

SEQ ID NO: 158412 - RNA, 19 nt, Artificial Sequence
  Description of Artificial Sequence: Synthetic oligonucleotide
  Sense strand starting at position 2942 of SEQ ID NO: 2038
guuugcuguuccuugaaug

SEQ ID NO: 158413 - RNA, 19 nt, Artificial Sequence
  Description of Artificial Sequence: Synthetic oligonucleotide
  Antisense strand to SEQ ID NO: 158412
cauucaaggaacagcaaac

SEQ ID NO: 158414 - RNA, 19 nt, Artificial Sequence
  Description of Artificial Sequence: Synthetic oligonucleotide
  Sense strand starting at position 3009 of SEQ ID NO: 2038
ggauucuuguggcccacaa

SEQ ID NO: 158415 - RNA, 19 nt, Artificial Sequence
  Description of Artificial Sequence: Synthetic oligonucleotide
  Antisense strand to SEQ ID NO: 158414
uugugggccacaagaaucc

SEQ ID NO: 158416 - RNA, 19 nt, Artificial Sequence
  Description of Artificial Sequence: Synthetic oligonucleotide
  Sense strand starting at position 3024 of SEQ ID NO: 2038
acaacucugugccuugaga

SEQ ID NO: 158417 - RNA, 19 nt, Artificial Sequence
  Description of Artificial Sequence: Synthetic oligonucleotide
  Antisense strand to SEQ ID NO: 158416
ucucaaggcacagaguugu

SEQ ID NO: 158418 - RNA, 19 nt, Artificial Sequence
  Description of Artificial Sequence: Synthetic oligonucleotide
  Sense strand starting at position 3026 of SEQ ID NO: 2038
aacucugugccuugagaau

SEQ ID NO: 158419 - RNA, 19 nt, Artificial Sequence
  Description of Artificial Sequence: Synthetic oligonucleotide
  Antisense strand to SEQ ID NO: 158418
auucucaaggcacagaguu

SEQ ID NO: 158420 - RNA, 19 nt, Artificial Sequence
  Description of Artificial Sequence: Synthetic oligonucleotide
  Sense strand starting at position 3157 of SEQ ID NO: 2038
gaucuugcuuccuacagga

SEQ ID NO: 158421 - RNA, 19 nt, Artificial Sequence
  Description of Artificial Sequence: Synthetic oligonucleotide
  Antisense strand to SEQ ID NO: 158420
uccuguaggaagcaagauc

SEQ ID NO: 158422 - RNA, 19 nt, Artificial Sequence
  Description of Artificial Sequence: Synthetic oligonucleotide
  Sense strand starting at position 3213 of SEQ ID NO: 2038
guguaaugcuucucacaag

SEQ ID NO: 158423 - RNA, 19 nt, Artificial Sequence
  Description of Artificial Sequence: Synthetic oligonucleotide
  Antisense strand to SEQ ID NO: 158422
cuugugagaagcauuacac

SEQ ID NO: 158424 - RNA, 19 nt, Artificial Sequence
  Description of Artificial Sequence: Synthetic oligonucleotide
  Sense strand starting at position 3586 of SEQ ID NO: 2038
auucguaauugguaacauu

SEQ ID NO: 158425 - RNA, 19 nt, Artificial Sequence
  Description of Artificial Sequence: Synthetic oligonucleotide
  Antisense strand to SEQ ID NO: 158424
aauguuaccaauuacgaau

SEQ ID NO: 158426 - RNA, 19 nt, Artificial Sequence
  Description of Artificial Sequence: Synthetic oligonucleotide
  Sense strand starting at position 3595 of SEQ ID NO: 2038
ugguaacauuaacaaggaa

SEQ ID NO: 158427 - RNA, 19 nt, Artificial Sequence
  Description of Artificial Sequence: Synthetic oligonucleotide
  Antisense strand to SEQ ID NO: 158426
uuccuuguuaauguuacca

SEQ ID NO: 158428 - RNA, 19 nt, Artificial Sequence
  Description of Artificial Sequence: Synthetic oligonucleotide
  Sense strand starting at position 3637 of SEQ ID NO: 2038
ccuggauucugguccaagu

SEQ ID NO: 158429 - RNA, 19 nt, Artificial Sequence
  Description of Artificial Sequence: Synthetic oligonucleotide
  Antisense strand to SEQ ID NO: 158428
acuuggaccagaauccagg

SEQ ID NO: 158430 - RNA, 19 nt, Artificial Sequence
  Description of Artificial Sequence: Synthetic oligonucleotide
  Sense strand starting at position 3657 of SEQ ID NO: 2038
cuaccuuuauaguugucaa

SEQ ID NO: 158431 - RNA, 19 nt, Artificial Sequence
  Description of Artificial Sequence: Synthetic oligonucleotide
  Antisense strand to SEQ ID NO: 158430
uugacaacuauaaagguag

SEQ ID NO: 158432 - RNA, 19 nt, Artificial Sequence
  Description of Artificial Sequence: Synthetic oligonucleotide
  Sense strand starting at position 3660 of SEQ ID NO: 2038
ccuuuauaguugucaaaua

SEQ ID NO: 158433 - RNA, 19 nt, Artificial Sequence
  Description of Artificial Sequence: Synthetic oligonucleotide
  Antisense strand to SEQ ID NO: 158432
uauuugacaacuauaaagg

SEQ ID NO: 158434 - RNA, 19 nt, Artificial Sequence
  Description of Artificial Sequence: Synthetic oligonucleotide
  Sense strand starting at position 13 of SEQ ID NO: 2039
ggauacauccaguguuacu

SEQ ID NO: 158435 - RNA, 19 nt, Artificial Sequence
  Description of Artificial Sequence: Synthetic oligonucleotide
  Antisense strand to SEQ ID NO: 158434
aguaacacuggauguaucc

SEQ ID NO: 158436 - RNA, 19 nt, Artificial Sequence
  Description of Artificial Sequence: Synthetic oligonucleotide
  Sense strand starting at position 22 of SEQ ID NO: 2039
caguguuacuuccucaguu

SEQ ID NO: 158437 - RNA, 19 nt, Artificial Sequence
  Description of Artificial Sequence: Synthetic oligonucleotide
  Antisense strand to SEQ ID NO: 158436
aacugaggaaguaacacug

SEQ ID NO: 158438 - RNA, 19 nt, Artificial Sequence
  Description of Artificial Sequence: Synthetic oligonucleotide
  Sense strand starting at position 23 of SEQ ID NO: 2039
aguguuacuuccucaguuu

SEQ ID NO: 158439 - RNA, 19 nt, Artificial Sequence
  Description of Artificial Sequence: Synthetic oligonucleotide
  Antisense strand to SEQ ID NO: 158438
aaacugaggaaguaacacu

SEQ ID NO: 158440 - RNA, 19 nt, Artificial Sequence
  Description of Artificial Sequence: Synthetic oligonucleotide
  Sense strand starting at position 121 of SEQ ID NO: 2039
aguccuaugccguggacuu

SEQ ID NO: 158441 - RNA, 19 nt, Artificial Sequence
  Description of Artificial Sequence: Synthetic oligonucleotide
  Antisense strand to SEQ ID NO: 158440
aaguccacggcauaggacu

SEQ ID NO: 158442 - RNA, 19 nt, Artificial Sequence
  Description of Artificial Sequence: Synthetic oligonucleotide
  Sense strand starting at position 133 of SEQ ID NO: 2039
uggacuugaucauuccuca

SEQ ID NO: 158443 - RNA, 19 nt, Artificial Sequence
  Description of Artificial Sequence: Synthetic oligonucleotide
  Antisense strand to SEQ ID NO: 158442
ugaggaaugaucaagucca

SEQ ID NO: 158444 - RNA, 19 nt, Artificial Sequence
  Description of Artificial Sequence: Synthetic oligonucleotide
  Sense strand starting at position 246 of SEQ ID NO: 2039
ucuccagcccuuuaggaaa

SEQ ID NO: 158445 - RNA, 19 nt, Artificial Sequence
  Description of Artificial Sequence: Synthetic oligonucleotide
  Antisense strand to SEQ ID NO: 158444
uuuccuaaagggcuggaga

SEQ ID NO: 158446 - RNA, 19 nt, Artificial Sequence
  Description of Artificial Sequence: Synthetic oligonucleotide
  Sense strand starting at position 257 of SEQ ID NO: 2039
uuaggaaaguggugagaga

SEQ ID NO: 158447 - RNA, 19 nt, Artificial Sequence
  Description of Artificial Sequence: Synthetic oligonucleotide
  Antisense strand to SEQ ID NO: 158446
ucucucaccacuuuccuaa

SEQ ID NO: 158448 - RNA, 19 nt, Artificial Sequence
  Description of Artificial Sequence: Synthetic oligonucleotide
  Sense strand starting at position 265 of SEQ ID NO: 2039
guggugagagagugaagau

SEQ ID NO: 158449 - RNA, 19 nt, Artificial Sequence
  Description of Artificial Sequence: Synthetic oligonucleotide
  Antisense strand to SEQ ID NO: 158448
aucuucacucucucaccac

SEQ ID NO: 158450 - RNA, 19 nt, Artificial Sequence
  Description of Artificial Sequence: Synthetic oligonucleotide
  Sense strand starting at position 268 of SEQ ID NO: 2039
gugagagagugaagaugau

SEQ ID NO: 158451 - RNA, 19 nt, Artificial Sequence
  Description of Artificial Sequence: Synthetic oligonucleotide
  Antisense strand to SEQ ID NO: 158450
aucaucuucacucucucac

SEQ ID NO: 158452 - RNA, 19 nt, Artificial Sequence
  Description of Artificial Sequence: Synthetic oligonucleotide
  Sense strand starting at position 278 of SEQ ID NO: 2039
gaagaugauucuuggagca

SEQ ID NO: 158453 - RNA, 19 nt, Artificial Sequence
  Description of Artificial Sequence: Synthetic oligonucleotide
  Antisense strand to SEQ ID NO: 158452
ugcuccaagaaucaucuuc

SEQ ID NO: 158454 - RNA, 19 nt, Artificial Sequence
  Description of Artificial Sequence: Synthetic oligonucleotide
  Sense strand starting at position 280 of SEQ ID NO: 2039
agaugauucuuggagcacu

SEQ ID NO: 158455 - RNA, 19 nt, Artificial Sequence
  Description of Artificial Sequence: Synthetic oligonucleotide
  Antisense strand to SEQ ID NO: 158454
agugcuccaagaaucaucu

SEQ ID NO: 158456 - RNA, 19 nt, Artificial Sequence
  Description of Artificial Sequence: Synthetic oligonucleotide
  Sense strand starting at position 360 of SEQ ID NO: 2039
cugucucaacgggaaugua

SEQ ID NO: 158457 - RNA, 19 nt, Artificial Sequence
  Description of Artificial Sequence: Synthetic oligonucleotide
  Antisense strand to SEQ ID NO: 158456
uacauucccguugagacag

SEQ ID NO: 158458 - RNA, 19 nt, Artificial Sequence
  Description of Artificial Sequence: Synthetic oligonucleotide
  Sense strand starting at position 487 of SEQ ID NO: 2039
uggaguggcacaugaauca

SEQ ID NO: 158459 - RNA, 19 nt, Artificial Sequence
  Description of Artificial Sequence: Synthetic oligonucleotide
  Antisense strand to SEQ ID NO: 158458
ugauucaugugccacucca

SEQ ID NO: 158460 - RNA, 19 nt, Artificial Sequence
  Description of Artificial Sequence: Synthetic oligonucleotide
  Sense strand starting at position 523 of SEQ ID NO: 2039
cucccagaggugugugauu

SEQ ID NO: 158461 - RNA, 19 nt, Artificial Sequence
  Description of Artificial Sequence: Synthetic oligonucleotide
  Antisense strand to SEQ ID NO: 158460
aaucacacaccucugggag

SEQ ID NO: 158462 - RNA, 19 nt, Artificial Sequence
  Description of Artificial Sequence: Synthetic oligonucleotide
  Sense strand starting at position 1117 of SEQ ID NO: 2039
agaccagagugguugggaa

SEQ ID NO: 158463 - RNA, 19 nt, Artificial Sequence
  Description of Artificial Sequence: Synthetic oligonucleotide
  Antisense strand to SEQ ID NO: 158462
uucccaaccacucuggucu

SEQ ID NO: 158464 - RNA, 19 nt, Artificial Sequence
  Description of Artificial Sequence: Synthetic oligonucleotide
  Sense strand starting at position 1170 of SEQ ID NO: 2039
gaagcuuggucagcagagu

SEQ ID NO: 158465 - RNA, 19 nt, Artificial Sequence
  Description of Artificial Sequence: Synthetic oligonucleotide
  Antisense strand to SEQ ID NO: 158464
acucugcugaccaagcuuc

SEQ ID NO: 158466 - RNA, 19 nt, Artificial Sequence
  Description of Artificial Sequence: Synthetic oligonucleotide
  Sense strand starting at position 1235 of SEQ ID NO: 2039
ugacucaucuacuccugua

SEQ ID NO: 158467 - RNA, 19 nt, Artificial Sequence
  Description of Artificial Sequence: Synthetic oligonucleotide
  Antisense strand to SEQ ID NO: 158466
uacaggaguagaugaguca

SEQ ID NO: 158468 - RNA, 19 nt, Artificial Sequence
  Description of Artificial Sequence: Synthetic oligonucleotide
  Sense strand starting at position 1292 of SEQ ID NO: 2039
gugacuuauucagggagac

SEQ ID NO: 158469 - RNA, 19 nt, Artificial Sequence
  Description of Artificial Sequence: Synthetic oligonucleotide
  Antisense strand to SEQ ID NO: 158468
gucucccugaauaagucac

SEQ ID NO: 158470 - RNA, 19 nt, Artificial Sequence
  Description of Artificial Sequence: Synthetic oligonucleotide
  Sense strand starting at position 1544 of SEQ ID NO: 2039
gguaaguuugggugcugga

SEQ ID NO: 158471 - RNA, 19 nt, Artificial Sequence
  Description of Artificial Sequence: Synthetic oligonucleotide
  Antisense strand to SEQ ID NO: 158470
uccagcacccaaacuuacc

SEQ ID NO: 158472 - RNA, 19 nt, Artificial Sequence
  Description of Artificial Sequence: Synthetic oligonucleotide
  Sense strand starting at position 1557 of SEQ ID NO: 2039
gcuggaucgcuccaucguu

SEQ ID NO: 158473 - RNA, 19 nt, Artificial Sequence
  Description of Artificial Sequence: Synthetic oligonucleotide
  Antisense strand to SEQ ID NO: 158472
aacgauggagcgauccagc

SEQ ID NO: 158474 - RNA, 19 nt, Artificial Sequence
  Description of Artificial Sequence: Synthetic oligonucleotide
  Sense strand starting at position 2003 of SEQ ID NO: 2039
ggagugacgucaguuagga

SEQ ID NO: 158475 - RNA, 19 nt, Artificial Sequence
  Description of Artificial Sequence: Synthetic oligonucleotide
  Antisense strand to SEQ ID NO: 158474
uccuaacugacgucacucc

SEQ ID NO: 158476 - RNA, 19 nt, Artificial Sequence
  Description of Artificial Sequence: Synthetic oligonucleotide
  Sense strand starting at position 2008 of SEQ ID NO: 2039
gacgucaguuaggagcaau

SEQ ID NO: 158477 - RNA, 19 nt, Artificial Sequence
  Description of Artificial Sequence: Synthetic oligonucleotide
  Antisense strand to SEQ ID NO: 158476
auugcuccuaacugacguc

SEQ ID NO: 158478 - RNA, 19 nt, Artificial Sequence
  Description of Artificial Sequence: Synthetic oligonucleotide
  Sense strand starting at position 2079 of SEQ ID NO: 2039
agagcaagagcggauauua

SEQ ID NO: 158479 - RNA, 19 nt, Artificial Sequence
  Description of Artificial Sequence: Synthetic oligonucleotide
  Antisense strand to SEQ ID NO: 158478
uaauauccgcucuugcucu

SEQ ID NO: 158480 - RNA, 19 nt, Artificial Sequence
  Description of Artificial Sequence: Synthetic oligonucleotide
  Sense strand starting at position 2173 of SEQ ID NO: 2039
aggcuuugauuauauggau

SEQ ID NO: 158481 - RNA, 19 nt, Artificial Sequence
  Description of Artificial Sequence: Synthetic oligonucleotide
  Antisense strand to SEQ ID NO: 158480
auccauauaaucaaagccu

SEQ ID NO: 158482 - RNA, 19 nt, Artificial Sequence
  Description of Artificial Sequence: Synthetic oligonucleotide
  Sense strand starting at position 2262 of SEQ ID NO: 2039
gggccaaagucucaucugu

SEQ ID NO: 158483 - RNA, 19 nt, Artificial Sequence
  Description of Artificial Sequence: Synthetic oligonucleotide
  Antisense strand to SEQ ID NO: 158482
acagaugagacuuuggccc

SEQ ID NO: 158484 - RNA, 19 nt, Artificial Sequence
  Description of Artificial Sequence: Synthetic oligonucleotide
  Sense strand starting at position 2567 of SEQ ID NO: 2039
agcgcauuccaggauaucu

SEQ ID NO: 158485 - RNA, 19 nt, Artificial Sequence
  Description of Artificial Sequence: Synthetic oligonucleotide
  Antisense strand to SEQ ID NO: 158484
agauauccuggaaugcgcu

SEQ ID NO: 158486 - RNA, 19 nt, Artificial Sequence
  Description of Artificial Sequence: Synthetic oligonucleotide
  Sense strand starting at position 2666 of SEQ ID NO: 2039
gcuguuugcuguuccuuga

SEQ ID NO: 158487 - RNA, 19 nt, Artificial Sequence
  Description of Artificial Sequence: Synthetic oligonucleotide
  Antisense strand to SEQ ID NO: 158486
ucaaggaacagcaaacagc

SEQ ID NO: 158488 - RNA, 19 nt, Artificial Sequence
  Description of Artificial Sequence: Synthetic oligonucleotide
  Sense strand starting at position 2669 of SEQ ID NO: 2039
guuugcuguuccuugaaug

SEQ ID NO: 158489 - RNA, 19 nt, Artificial Sequence
  Description of Artificial Sequence: Synthetic oligonucleotide
  Antisense strand to SEQ ID NO: 158488
cauucaaggaacagcaaac

SEQ ID NO: 158490 - RNA, 19 nt, Artificial Sequence
  Description of Artificial Sequence: Synthetic oligonucleotide
  Sense strand starting at position 2736 of SEQ ID NO: 2039
ggauucuuguggcccacaa

SEQ ID NO: 158491 - RNA, 19 nt, Artificial Sequence
  Description of Artificial Sequence: Synthetic oligonucleotide
  Antisense strand to SEQ ID NO: 158490
uugugggccacaagaaucc

SEQ ID NO: 158492 - RNA, 19 nt, Artificial Sequence
  Description of Artificial Sequence: Synthetic oligonucleotide
  Sense strand starting at position 2751 of SEQ ID NO: 2039
acaacucugugccuugaga

SEQ ID NO: 158493 - RNA, 19 nt, Artificial Sequence
  Description of Artificial Sequence: Synthetic oligonucleotide
  Antisense strand to SEQ ID NO: 158492
ucucaaggcacagaguugu

SEQ ID NO: 158494 - RNA, 19 nt, Artificial Sequence
  Description of Artificial Sequence: Synthetic oligonucleotide
  Sense strand starting at position 2753 of SEQ ID NO: 2039
aacucugugccuugagaau

SEQ ID NO: 158495 - RNA, 19 nt, Artificial Sequence
  Description of Artificial Sequence: Synthetic oligonucleotide
  Antisense strand to SEQ ID NO: 158494
auucucaaggcacagaguu

SEQ ID NO: 158496 - RNA, 19 nt, Artificial Sequence
  Description of Artificial Sequence: Synthetic oligonucleotide
  Sense strand starting at position 2884 of SEQ ID NO: 2039
gaucuugcuuccuacagga

SEQ ID NO: 158497 - RNA, 19 nt, Artificial Sequence
  Description of Artificial Sequence: Synthetic oligonucleotide
  Antisense strand to SEQ ID NO: 158496
uccuguaggaagcaagauc

SEQ ID NO: 158498 - RNA, 19 nt, Artificial Sequence
  Description of Artificial Sequence: Synthetic oligonucleotide
  Sense strand starting at position 2940 of SEQ ID NO: 2039
guguaaugcuucucacaag

SEQ ID NO: 158499 - RNA, 19 nt, Artificial Sequence
  Description of Artificial Sequence: Synthetic oligonucleotide
  Antisense strand to SEQ ID NO: 158498
cuugugagaagcauuacac

SEQ ID NO: 158500 - RNA, 19 nt, Artificial Sequence
  Description of Artificial Sequence: Synthetic oligonucleotide
  Sense strand starting at position 3313 of SEQ ID NO: 2039
auucguaauugguaacauu

SEQ ID NO: 158501 - RNA, 19 nt, Artificial Sequence
  Description of Artificial Sequence: Synthetic oligonucleotide
  Antisense strand to SEQ ID NO: 158500
aauguuaccaauuacgaau

SEQ ID NO: 158502 - RNA, 19 nt, Artificial Sequence
  Description of Artificial Sequence: Synthetic oligonucleotide
  Sense strand starting at position 3322 of SEQ ID NO: 2039
ugguaacauuaacaaggaa

SEQ ID NO: 158503 - RNA, 19 nt, Artificial Sequence
  Description of Artificial Sequence: Synthetic oligonucleotide
  Antisense strand to SEQ ID NO: 158502
uuccuuguuaauguuacca

SEQ ID NO: 158504 - RNA, 19 nt, Artificial Sequence
  Description of Artificial Sequence: Synthetic oligonucleotide
  Sense strand starting at position 3364 of SEQ ID NO: 2039
ccuggauucugguccaagu

SEQ ID NO: 158505 - RNA, 19 nt, Artificial Sequence
  Description of Artificial Sequence: Synthetic oligonucleotide
  Antisense strand to SEQ ID NO: 158504
acuuggaccagaauccagg

SEQ ID NO: 158506 - RNA, 19 nt, Artificial Sequence
  Description of Artificial Sequence: Synthetic oligonucleotide
  Sense strand starting at position 3384 of SEQ ID NO: 2039
cuaccuuuauaguugucaa

SEQ ID NO: 158507 - RNA, 19 nt, Artificial Sequence
  Description of Artificial Sequence: Synthetic oligonucleotide
  Antisense strand to SEQ ID NO: 158506
uugacaacuauaaagguag

SEQ ID NO: 158508 - RNA, 19 nt, Artificial Sequence
  Description of Artificial Sequence: Synthetic oligonucleotide
  Sense strand starting at position 3387 of SEQ ID NO: 2039
ccuuuauaguugucaaaua

SEQ ID NO: 158509 - RNA, 19 nt, Artificial Sequence
  Description of Artificial Sequence: Synthetic oligonucleotide
  Antisense strand to SEQ ID NO: 158508
uauuugacaacuauaaagg

SEQ ID NO: 158510 - RNA, 19 nt, Artificial Sequence
  Description of Artificial Sequence: Synthetic oligonucleotide
  Sense strand starting at position 3810 of SEQ ID NO: 2039
auauauguacauugcagaa

SEQ ID NO: 158511 - RNA, 19 nt, Artificial Sequence
  Description of Artificial Sequence: Synthetic oligonucleotide
  Antisense strand to SEQ ID NO: 158510
uucugcaauguacauauau

SEQ ID NO: 158512 - RNA, 19 nt, Artificial Sequence
  Description of Artificial Sequence: Synthetic oligonucleotide
  Sense strand starting at position 3866 of SEQ ID NO: 2039
cauauuuauuugugaugag

SEQ ID NO: 158513 - RNA, 19 nt, Artificial Sequence
  Description of Artificial Sequence: Synthetic oligonucleotide
  Antisense strand to SEQ ID NO: 158512
cucaucacaaauaaauaug

SEQ ID NO: 158514 - RNA, 19 nt, Artificial Sequence
  Description of Artificial Sequence: Synthetic oligonucleotide
  Sense strand starting at position 10 of SEQ ID NO: 2041
cuaguugagagucacugau

SEQ ID NO: 158515 - RNA, 19 nt, Artificial Sequence
  Description of Artificial Sequence: Synthetic oligonucleotide
  Antisense strand to SEQ ID NO: 158514
aucagugacucucaacuag

SEQ ID NO: 158516 - RNA, 19 nt, Artificial Sequence
  Description of Artificial Sequence: Synthetic oligonucleotide
  Sense strand starting at position 14 of SEQ ID NO: 2041
uugagagucacugauguag

SEQ ID NO: 158517 - RNA, 19 nt, Artificial Sequence
  Description of Artificial Sequence: Synthetic oligonucleotide
  Antisense strand to SEQ ID NO: 158516
cuacaucagugacucucaa

SEQ ID NO: 158518 - RNA, 19 nt, Artificial Sequence
  Description of Artificial Sequence: Synthetic oligonucleotide
  Sense strand starting at position 16 of SEQ ID NO: 2041
gagagucacugauguagac

SEQ ID NO: 158519 - RNA, 19 nt, Artificial Sequence
  Description of Artificial Sequence: Synthetic oligonucleotide
  Antisense strand to SEQ ID NO: 158518
gucuacaucagugacucuc

SEQ ID NO: 158520 - RNA, 19 nt, Artificial Sequence
  Description of Artificial Sequence: Synthetic oligonucleotide
  Sense strand starting at position 162 of SEQ ID NO: 2041
ggauacauccaguguuacu

SEQ ID NO: 158521 - RNA, 19 nt, Artificial Sequence
  Description of Artificial Sequence: Synthetic oligonucleotide
  Antisense strand to SEQ ID NO: 158520
aguaacacuggauguaucc

SEQ ID NO: 158522 - RNA, 19 nt, Artificial Sequence
  Description of Artificial Sequence: Synthetic oligonucleotide
  Sense strand starting at position 171 of SEQ ID NO: 2041
caguguuacuuccucaguu

SEQ ID NO: 158523 - RNA, 19 nt, Artificial Sequence
  Description of Artificial Sequence: Synthetic oligonucleotide
  Antisense strand to SEQ ID NO: 158522
aacugaggaaguaacacug

SEQ ID NO: 158524 - RNA, 19 nt, Artificial Sequence
  Description of Artificial Sequence: Synthetic oligonucleotide
  Sense strand starting at position 172 of SEQ ID NO: 2041
aguguuacuuccucaguuu

SEQ ID NO: 158525 - RNA, 19 nt, Artificial Sequence
  Description of Artificial Sequence: Synthetic oligonucleotide
  Antisense strand to SEQ ID NO: 158524
aaacugaggaaguaacacu

SEQ ID NO: 158526 - RNA, 19 nt, Artificial Sequence
  Description of Artificial Sequence: Synthetic oligonucleotide
  Sense strand starting at position 270 of SEQ ID NO: 2041
aguccuaugccguggacuu

SEQ ID NO: 158527 - RNA, 19 nt, Artificial Sequence
  Description of Artificial Sequence: Synthetic oligonucleotide
  Antisense strand to SEQ ID NO: 158526
aaguccacggcauaggacu

SEQ ID NO: 158528 - RNA, 19 nt, Artificial Sequence
  Description of Artificial Sequence: Synthetic oligonucleotide
  Sense strand starting at position 282 of SEQ ID NO: 2041
uggacuugaucauuccuca

SEQ ID NO: 158529 - RNA, 19 nt, Artificial Sequence
  Description of Artificial Sequence: Synthetic oligonucleotide
  Antisense strand to SEQ ID NO: 158528
ugaggaaugaucaagucca

SEQ ID NO: 158530 - RNA, 19 nt, Artificial Sequence
  Description of Artificial Sequence: Synthetic oligonucleotide
  Sense strand starting at position 395 of SEQ ID NO: 2041
ucuccagcccuuuaggaaa

SEQ ID NO: 158531 - RNA, 19 nt, Artificial Sequence
  Description of Artificial Sequence: Synthetic oligonucleotide
  Antisense strand to SEQ ID NO: 158530
uuuccuaaagggcuggaga

SEQ ID NO: 158532 - RNA, 19 nt, Artificial Sequence
  Description of Artificial Sequence: Synthetic oligonucleotide
  Sense strand starting at position 406 of SEQ ID NO: 2041
uuaggaaaguggugagaga

SEQ ID NO: 158533 - RNA, 19 nt, Artificial Sequence
  Description of Artificial Sequence: Synthetic oligonucleotide
  Antisense strand to SEQ ID NO: 158532
ucucucaccacuuuccuaa

SEQ ID NO: 158534 - RNA, 19 nt, Artificial Sequence
  Description of Artificial Sequence: Synthetic oligonucleotide
  Sense strand starting at position 414 of SEQ ID NO: 2041
guggugagagagugaagau

SEQ ID NO: 158535 - RNA, 19 nt, Artificial Sequence
  Description of Artificial Sequence: Synthetic oligonucleotide
  Antisense strand to SEQ ID NO: 158534
aucuucacucucucaccac

SEQ ID NO: 158536 - RNA, 19 nt, Artificial Sequence
  Description of Artificial Sequence: Synthetic oligonucleotide
  Sense strand starting at position 417 of SEQ ID NO: 2041
gugagagagugaagaugau

SEQ ID NO: 158537 - RNA, 19 nt, Artificial Sequence
  Description of Artificial Sequence: Synthetic oligonucleotide
  Antisense strand to SEQ ID NO: 158536
aucaucuucacucucucac

SEQ ID NO: 158538 - RNA, 19 nt, Artificial Sequence
  Description of Artificial Sequence: Synthetic oligonucleotide
  Sense strand starting at position 427 of SEQ ID NO: 2041
gaagaugauucuuggagca

SEQ ID NO: 158539 - RNA, 19 nt, Artificial Sequence
  Description of Artificial Sequence: Synthetic oligonucleotide
  Antisense strand to SEQ ID NO: 158538
ugcuccaagaaucaucuuc

SEQ ID NO: 158540 - RNA, 19 nt, Artificial Sequence
  Description of Artificial Sequence: Synthetic oligonucleotide
  Sense strand starting at position 429 of SEQ ID NO: 2041
agaugauucuuggagcacu

SEQ ID NO: 158541 - RNA, 19 nt, Artificial Sequence
  Description of Artificial Sequence: Synthetic oligonucleotide
  Antisense strand to SEQ ID NO: 158540
agugcuccaagaaucaucu

SEQ ID NO: 158542 - RNA, 19 nt, Artificial Sequence
  Description of Artificial Sequence: Synthetic oligonucleotide
  Sense strand starting at position 509 of SEQ ID NO: 2041
cugucucaacgggaaugua

SEQ ID NO: 158543 - RNA, 19 nt, Artificial Sequence
  Description of Artificial Sequence: Synthetic oligonucleotide
  Antisense strand to SEQ ID NO: 158542
uacauucccguugagacag

SEQ ID NO: 158544 - RNA, 19 nt, Artificial Sequence
  Description of Artificial Sequence: Synthetic oligonucleotide
  Sense strand starting at position 636 of SEQ ID NO: 2041
uggaguggcacaugaauca

SEQ ID NO: 158545 - RNA, 19 nt, Artificial Sequence
  Description of Artificial Sequence: Synthetic oligonucleotide
  Antisense strand to SEQ ID NO: 158544
ugauucaugugccacucca

SEQ ID NO: 158546 - RNA, 19 nt, Artificial Sequence
  Description of Artificial Sequence: Synthetic oligonucleotide
  Sense strand starting at position 672 of SEQ ID NO: 2041
cucccagaggugugugauu

SEQ ID NO: 158547 - RNA, 19 nt, Artificial Sequence
  Description of Artificial Sequence: Synthetic oligonucleotide
  Antisense strand to SEQ ID NO: 158546
aaucacacaccucugggag

SEQ ID NO: 158548 - RNA, 19 nt, Artificial Sequence
  Description of Artificial Sequence: Synthetic oligonucleotide
  Sense strand starting at position 1266 of SEQ ID NO: 2041
agaccagagugguugggaa

SEQ ID NO: 158549 - RNA, 19 nt, Artificial Sequence
  Description of Artificial Sequence: Synthetic oligonucleotide
  Antisense strand to SEQ ID NO: 158548
uucccaaccacucuggucu

SEQ ID NO: 158550 - RNA, 19 nt, Artificial Sequence
  Description of Artificial Sequence: Synthetic oligonucleotide
  Sense strand starting at position 1319 of SEQ ID NO: 2041
gaagcuuggucagcagagu

SEQ ID NO: 158551 - RNA, 19 nt, Artificial Sequence
  Description of Artificial Sequence: Synthetic oligonucleotide
  Antisense strand to SEQ ID NO: 158550
acucugcugaccaagcuuc

SEQ ID NO: 158552 - RNA, 19 nt, Artificial Sequence
  Description of Artificial Sequence: Synthetic oligonucleotide
  Sense strand starting at position 1384 of SEQ ID NO: 2041
ugacucaucuacuccugua

SEQ ID NO: 158553 - RNA, 19 nt, Artificial Sequence
  Description of Artificial Sequence: Synthetic oligonucleotide
  Antisense strand to SEQ ID NO: 158552
uacaggaguagaugaguca

SEQ ID NO: 158554 - RNA, 19 nt, Artificial Sequence
  Description of Artificial Sequence: Synthetic oligonucleotide
  Sense strand starting at position 1441 of SEQ ID NO: 2041
gugacuuauucagggagac

SEQ ID NO: 158555 - RNA, 19 nt, Artificial Sequence
  Description of Artificial Sequence: Synthetic oligonucleotide
  Antisense strand to SEQ ID NO: 158554
gucucccugaauaagucac

SEQ ID NO: 158556 - RNA, 19 nt, Artificial Sequence
  Description of Artificial Sequence: Synthetic oligonucleotide
  Sense strand starting at position 1693 of SEQ ID NO: 2041
gguaaguuugggugcugga

SEQ ID NO: 158557 - RNA, 19 nt, Artificial Sequence
  Description of Artificial Sequence: Synthetic oligonucleotide
  Antisense strand to SEQ ID NO: 158556
uccagcacccaaacuuacc

SEQ ID NO: 158558 - RNA, 19 nt, Artificial Sequence
  Description of Artificial Sequence: Synthetic oligonucleotide
  Sense strand starting at position 1706 of SEQ ID NO: 2041
gcuggaucgcuccaucguu

SEQ ID NO: 158559 - RNA, 19 nt, Artificial Sequence
  Description of Artificial Sequence: Synthetic oligonucleotide
  Antisense strand to SEQ ID NO: 158558
aacgauggagcgauccagc

SEQ ID NO: 158560 - RNA, 19 nt, Artificial Sequence
  Description of Artificial Sequence: Synthetic oligonucleotide
  Sense strand starting at position 2152 of SEQ ID NO: 2041
ggagugacgucaguuagga

SEQ ID NO: 158561 - RNA, 19 nt, Artificial Sequence
  Description of Artificial Sequence: Synthetic oligonucleotide
  Antisense strand to SEQ ID NO: 158560
uccuaacugacgucacucc

SEQ ID NO: 158562 - RNA, 19 nt, Artificial Sequence
  Description of Artificial Sequence: Synthetic oligonucleotide
  Sense strand starting at position 2228 of SEQ ID NO: 2041
agagcaagagcggauauua

SEQ ID NO: 158563 - RNA, 19 nt, Artificial Sequence
  Description of Artificial Sequence: Synthetic oligonucleotide
  Antisense strand to SEQ ID NO: 158562
uaauauccgcucuugcucu

SEQ ID NO: 158564 - RNA, 19 nt, Artificial Sequence
  Description of Artificial Sequence: Synthetic oligonucleotide
  Sense strand starting at position 2322 of SEQ ID NO: 2041
aggcuuugauuauauggau

SEQ ID NO: 158565 - RNA, 19 nt, Artificial Sequence
  Description of Artificial Sequence: Synthetic oligonucleotide
  Antisense strand to SEQ ID NO: 158564
auccauauaaucaaagccu

SEQ ID NO: 158566 - RNA, 19 nt, Artificial Sequence
  Description of Artificial Sequence: Synthetic oligonucleotide
  Sense strand starting at position 2716 of SEQ ID NO: 2041
agcgcauuccaggauaucu

SEQ ID NO: 158567 - RNA, 19 nt, Artificial Sequence
  Description of Artificial Sequence: Synthetic oligonucleotide
  Antisense strand to SEQ ID NO: 158566
agauauccuggaaugcgcu

SEQ ID NO: 158568 - RNA, 19 nt, Artificial Sequence
  Description of Artificial Sequence: Synthetic oligonucleotide
  Sense strand starting at position 2815 of SEQ ID NO: 2041
gcuguuugcuguuccuuga

SEQ ID NO: 158569 - RNA, 19 nt, Artificial Sequence
  Description of Artificial Sequence: Synthetic oligonucleotide
  Antisense strand to SEQ ID NO: 158568
ucaaggaacagcaaacagc

SEQ ID NO: 158570 - RNA, 19 nt, Artificial Sequence
  Description of Artificial Sequence: Synthetic oligonucleotide
  Sense strand starting at position 2818 of SEQ ID NO: 2041
guuugcuguuccuugaaug

SEQ ID NO: 158571 - RNA, 19 nt, Artificial Sequence
  Description of Artificial Sequence: Synthetic oligonucleotide
  Antisense strand to SEQ ID NO: 158570
cauucaaggaacagcaaac

SEQ ID NO: 158572 - RNA, 19 nt, Artificial Sequence
  Description of Artificial Sequence: Synthetic oligonucleotide
  Sense strand starting at position 2885 of SEQ ID NO: 2041
ggauucuuguggcccacaa

SEQ ID NO: 158573 - RNA, 19 nt, Artificial Sequence
  Description of Artificial Sequence: Synthetic oligonucleotide
  Antisense strand to SEQ ID NO: 158572
uugugggccacaagaaucc

SEQ ID NO: 158574 - RNA, 19 nt, Artificial Sequence
  Description of Artificial Sequence: Synthetic oligonucleotide
  Sense strand starting at position 2900 of SEQ ID NO: 2041
acaacucugugccuugaga

SEQ ID NO: 158575 - RNA, 19 nt, Artificial Sequence
  Description of Artificial Sequence: Synthetic oligonucleotide
  Antisense strand to SEQ ID NO: 158574
ucucaaggcacagaguugu

SEQ ID NO: 158576 - RNA, 19 nt, Artificial Sequence
  Description of Artificial Sequence: Synthetic oligonucleotide
  Sense strand starting at position 2902 of SEQ ID NO: 2041
aacucugugccuugagaau

SEQ ID NO: 158577 - RNA, 19 nt, Artificial Sequence
  Description of Artificial Sequence: Synthetic oligonucleotide
  Antisense strand to SEQ ID NO: 158576
auucucaaggcacagaguu

SEQ ID NO: 158578 - RNA, 19 nt, Artificial Sequence
  Description of Artificial Sequence: Synthetic oligonucleotide
  Sense strand starting at position 3033 of SEQ ID NO: 2041
gaucuugcuuccuacagga

SEQ ID NO: 158579 - RNA, 19 nt, Artificial Sequence
  Description of Artificial Sequence: Synthetic oligonucleotide
  Antisense strand to SEQ ID NO: 158578
uccuguaggaagcaagauc

SEQ ID NO: 158580 - RNA, 19 nt, Artificial Sequence
  Description of Artificial Sequence: Synthetic oligonucleotide
  Sense strand starting at position 3089 of SEQ ID NO: 2041
guguaaugcuucucacaag

SEQ ID NO: 158581 - RNA, 19 nt, Artificial Sequence
  Description of Artificial Sequence: Synthetic oligonucleotide
  Antisense strand to SEQ ID NO: 158580
cuugugagaagcauuacac

SEQ ID NO: 158582 - RNA, 19 nt, Artificial Sequence
  Description of Artificial Sequence: Synthetic oligonucleotide
  Sense strand starting at position 3462 of SEQ ID NO: 2041
auucguaauugguaacauu

SEQ ID NO: 158583 - RNA, 19 nt, Artificial Sequence
  Description of Artificial Sequence: Synthetic oligonucleotide
  Antisense strand to SEQ ID NO: 158582
aauguuaccaauuacgaau

SEQ ID NO: 158584 - RNA, 19 nt, Artificial Sequence
  Description of Artificial Sequence: Synthetic oligonucleotide
  Sense strand starting at position 3471 of SEQ ID NO: 2041
ugguaacauuaacaaggaa

SEQ ID NO: 158585 - RNA, 19 nt, Artificial Sequence
  Description of Artificial Sequence: Synthetic oligonucleotide
  Antisense strand to SEQ ID NO: 158584
uuccuuguuaauguuacca

SEQ ID NO: 158586 - RNA, 19 nt, Artificial Sequence
  Description of Artificial Sequence: Synthetic oligonucleotide
  Sense strand starting at position 3513 of SEQ ID NO: 2041
ccuggauucugguccaagu

SEQ ID NO: 158587 - RNA, 19 nt, Artificial Sequence
  Description of Artificial Sequence: Synthetic oligonucleotide
  Antisense strand to SEQ ID NO: 158586
acuuggaccagaauccagg

SEQ ID NO: 158588 - RNA, 19 nt, Artificial Sequence
  Description of Artificial Sequence: Synthetic oligonucleotide
  Sense strand starting at position 3533 of SEQ ID NO: 2041
cuaccuuuauaguugucaa

SEQ ID NO: 158589 - RNA, 19 nt, Artificial Sequence
  Description of Artificial Sequence: Synthetic oligonucleotide
  Antisense strand to SEQ ID NO: 158588
uugacaacuauaaagguag

SEQ ID NO: 158590 - RNA, 19 nt, Artificial Sequence
  Description of Artificial Sequence: Synthetic oligonucleotide
  Sense strand starting at position 3536 of SEQ ID NO: 2041
ccuuuauaguugucaaaua

SEQ ID NO: 158591 - RNA, 19 nt, Artificial Sequence
  Description of Artificial Sequence: Synthetic oligonucleotide
  Antisense strand to SEQ ID NO: 158590
uauuugacaacuauaaagg

SEQ ID NO: 158592 - RNA, 19 nt, Artificial Sequence
  Description of Artificial Sequence: Synthetic oligonucleotide
  Sense strand starting at position 3959 of SEQ ID NO: 2041
auauauguacauugcagaa

SEQ ID NO: 158593 - RNA, 19 nt, Artificial Sequence
  Description of Artificial Sequence: Synthetic oligonucleotide
  Antisense strand to SEQ ID NO: 158592
uucugcaauguacauauau

SEQ ID NO: 158594 - RNA, 19 nt, Artificial Sequence
  Description of Artificial Sequence: Synthetic oligonucleotide
  Sense strand starting at position 74 of SEQ ID NO: 2042
cccacaagguggguugaua

SEQ ID NO: 158595 - RNA, 19 nt, Artificial Sequence
  Description of Artificial Sequence: Synthetic oligonucleotide
  Antisense strand to SEQ ID NO: 158594
uaucaacccaccuuguggg

SEQ ID NO: 158596 - RNA, 19 nt, Artificial Sequence
  Description of Artificial Sequence: Synthetic oligonucleotide
  Sense strand starting at position 85 of SEQ ID NO: 2042
gguugauagugugaagaac

SEQ ID NO: 158597 - RNA, 19 nt, Artificial Sequence
  Description of Artificial Sequence: Synthetic oligonucleotide
  Antisense strand to SEQ ID NO: 158596
guucuucacacuaucaacc

SEQ ID NO: 158598 - RNA, 19 nt, Artificial Sequence
  Description of Artificial Sequence: Synthetic oligonucleotide
  Sense strand starting at position 143 of SEQ ID NO: 2042
ggguaaccuugagaaaguu

SEQ ID NO: 158599 - RNA, 19 nt, Artificial Sequence
  Description of Artificial Sequence: Synthetic oligonucleotide
  Antisense strand to SEQ ID NO: 158598
aacuuucucaagguuaccc

SEQ ID NO: 158600 - RNA, 19 nt, Artificial Sequence
  Description of Artificial Sequence: Synthetic oligonucleotide
  Sense strand starting at position 464 of SEQ ID NO: 2042
cuccaucugcuguaagaau

SEQ ID NO: 158601 - RNA, 19 nt, Artificial Sequence
  Description of Artificial Sequence: Synthetic oligonucleotide
  Antisense strand to SEQ ID NO: 158600
auucuuacagcagauggag

SEQ ID NO: 158602 - RNA, 19 nt, Artificial Sequence
  Description of Artificial Sequence: Synthetic oligonucleotide
  Sense strand starting at position 473 of SEQ ID NO: 2042
cuguaagaauuauaugagu

SEQ ID NO: 158603 - RNA, 19 nt, Artificial Sequence
  Description of Artificial Sequence: Synthetic oligonucleotide
  Antisense strand to SEQ ID NO: 158602
acucauauaauucuuacag

SEQ ID NO: 158604 - RNA, 19 nt, Artificial Sequence
  Description of Artificial Sequence: Synthetic oligonucleotide
  Sense strand starting at position 572 of SEQ ID NO: 2042
guuugaguucugggauuca

SEQ ID NO: 158605 - RNA, 19 nt, Artificial Sequence
  Description of Artificial Sequence: Synthetic oligonucleotide
  Antisense strand to SEQ ID NO: 158604
ugaaucccagaacucaaac

SEQ ID NO: 158606 - RNA, 19 nt, Artificial Sequence
  Description of Artificial Sequence: Synthetic oligonucleotide
  Sense strand starting at position 656 of SEQ ID NO: 2042
guaucaguuuaccuccauu

SEQ ID NO: 158607 - RNA, 19 nt, Artificial Sequence
  Description of Artificial Sequence: Synthetic oligonucleotide
  Antisense strand to SEQ ID NO: 158606
aauggagguaaacugauac

SEQ ID NO: 158608 - RNA, 19 nt, Artificial Sequence
  Description of Artificial Sequence: Synthetic oligonucleotide
  Sense strand starting at position 659 of SEQ ID NO: 2042
ucaguuuaccuccauuguu

SEQ ID NO: 158609 - RNA, 19 nt, Artificial Sequence
  Description of Artificial Sequence: Synthetic oligonucleotide
  Antisense strand to SEQ ID NO: 158608
aacaauggagguaaacuga

SEQ ID NO: 158610 - RNA, 19 nt, Artificial Sequence
  Description of Artificial Sequence: Synthetic oligonucleotide
  Sense strand starting at position 685 of SEQ ID NO: 2042
aagugaauuccuggaccau

SEQ ID NO: 158611 - RNA, 19 nt, Artificial Sequence
  Description of Artificial Sequence: Synthetic oligonucleotide
  Antisense strand to SEQ ID NO: 158610
augguccaggaauucacuu

SEQ ID NO: 158612 - RNA, 19 nt, Artificial Sequence
  Description of Artificial Sequence: Synthetic oligonucleotide
  Sense strand starting at position 694 of SEQ ID NO: 2042
ccuggaccaucagacauua

SEQ ID NO: 158613 - RNA, 19 nt, Artificial Sequence
  Description of Artificial Sequence: Synthetic oligonucleotide
  Antisense strand to SEQ ID NO: 158612
uaaugucugaugguccagg

SEQ ID NO: 158614 - RNA, 19 nt, Artificial Sequence
  Description of Artificial Sequence: Synthetic oligonucleotide
  Sense strand starting at position 763 of SEQ ID NO: 2042
acuacuuucuagucaugga

SEQ ID NO: 158615 - RNA, 19 nt, Artificial Sequence
  Description of Artificial Sequence: Synthetic oligonucleotide
  Antisense strand to SEQ ID NO: 158614
uccaugacuagaaaguagu

SEQ ID NO: 158616 - RNA, 19 nt, Artificial Sequence
  Description of Artificial Sequence: Synthetic oligonucleotide
  Sense strand starting at position 821 of SEQ ID NO: 2042
ccgugugugccucagaacu

SEQ ID NO: 158617 - RNA, 19 nt, Artificial Sequence
  Description of Artificial Sequence: Synthetic oligonucleotide
  Antisense strand to SEQ ID NO: 158616
aguucugaggcacacacgg

SEQ ID NO: 158618 - RNA, 19 nt, Artificial Sequence
  Description of Artificial Sequence: Synthetic oligonucleotide
  Sense strand starting at position 827 of SEQ ID NO: 2042
gugccucagaacuguuaug

SEQ ID NO: 158619 - RNA, 19 nt, Artificial Sequence
  Description of Artificial Sequence: Synthetic oligonucleotide
  Antisense strand to SEQ ID NO: 158618
cauaacaguucugaggcac

SEQ ID NO: 158620 - RNA, 19 nt, Artificial Sequence
  Description of Artificial Sequence: Synthetic oligonucleotide
  Sense strand starting at position 833 of SEQ ID NO: 2042
cagaacuguuauggauuaa

SEQ ID NO: 158621 - RNA, 19 nt, Artificial Sequence
  Description of Artificial Sequence: Synthetic oligonucleotide
  Antisense strand to SEQ ID NO: 158620
uuaauccauaacaguucug

SEQ ID NO: 158622 - RNA, 19 nt, Artificial Sequence
  Description of Artificial Sequence: Synthetic oligonucleotide
  Sense strand starting at position 888 of SEQ ID NO: 2042
uauacaagugugggacaua

SEQ ID NO: 158623 - RNA, 19 nt, Artificial Sequence
  Description of Artificial Sequence: Synthetic oligonucleotide
  Antisense strand to SEQ ID NO: 158622
uaugucccacacuuguaua

SEQ ID NO: 158624 - RNA, 19 nt, Artificial Sequence
  Description of Artificial Sequence: Synthetic oligonucleotide
  Sense strand starting at position 889 of SEQ ID NO: 2042
auacaagugugggacauaa

SEQ ID NO: 158625 - RNA, 19 nt, Artificial Sequence
  Description of Artificial Sequence: Synthetic oligonucleotide
  Antisense strand to SEQ ID NO: 158624
uuaugucccacacuuguau

SEQ ID NO: 158626 - RNA, 19 nt, Artificial Sequence
  Description of Artificial Sequence: Synthetic oligonucleotide
  Sense strand starting at position 893 of SEQ ID NO: 2042
aagugugggacauaauguu

SEQ ID NO: 158627 - RNA, 19 nt, Artificial Sequence
  Description of Artificial Sequence: Synthetic oligonucleotide
  Antisense strand to SEQ ID NO: 158626
aacauuaugucccacacuu

SEQ ID NO: 158628 - RNA, 19 nt, Artificial Sequence
  Description of Artificial Sequence: Synthetic oligonucleotide
  Sense strand starting at position 901 of SEQ ID NO: 2042
gacauaauguucccgguaa

SEQ ID NO: 158629 - RNA, 19 nt, Artificial Sequence
  Description of Artificial Sequence: Synthetic oligonucleotide
  Antisense strand to SEQ ID NO: 158628
uuaccgggaacauuauguc

SEQ ID NO: 158630 - RNA, 19 nt, Artificial Sequence
  Description of Artificial Sequence: Synthetic oligonucleotide
  Sense strand starting at position 903 of SEQ ID NO: 2042
cauaauguucccgguaacu

SEQ ID NO: 158631 - RNA, 19 nt, Artificial Sequence
  Description of Artificial Sequence: Synthetic oligonucleotide
  Antisense strand to SEQ ID NO: 158630
aguuaccgggaacauuaug

SEQ ID NO: 158632 - RNA, 19 nt, Artificial Sequence
  Description of Artificial Sequence: Synthetic oligonucleotide
  Sense strand starting at position 905 of SEQ ID NO: 2042
uaauguucccgguaacugu

SEQ ID NO: 158633 - RNA, 19 nt, Artificial Sequence
  Description of Artificial Sequence: Synthetic oligonucleotide
  Antisense strand to SEQ ID NO: 158632
acaguuaccgggaacauua

SEQ ID NO: 158634 - RNA, 19 nt, Artificial Sequence
  Description of Artificial Sequence: Synthetic oligonucleotide
  Sense strand starting at position 984 of SEQ ID NO: 2042
cgugucccuccgugaauga

SEQ ID NO: 158635 - RNA, 19 nt, Artificial Sequence
  Description of Artificial Sequence: Synthetic oligonucleotide
  Antisense strand to SEQ ID NO: 158634
ucauucacggagggacacg

SEQ ID NO: 158636 - RNA, 19 nt, Artificial Sequence
  Description of Artificial Sequence: Synthetic oligonucleotide
  Sense strand starting at position 1029 of SEQ ID NO: 2042
agcugcuguucuccauuaa

SEQ ID NO: 158637 - RNA, 19 nt, Artificial Sequence
  Description of Artificial Sequence: Synthetic oligonucleotide
  Antisense strand to SEQ ID NO: 158636
uuaauggagaacagcagcu

SEQ ID NO: 158638 - RNA, 19 nt, Artificial Sequence
  Description of Artificial Sequence: Synthetic oligonucleotide
  Sense strand starting at position 1030 of SEQ ID NO: 2042
gcugcuguucuccauuaac

SEQ ID NO: 158639 - RNA, 19 nt, Artificial Sequence
  Description of Artificial Sequence: Synthetic oligonucleotide
  Antisense strand to SEQ ID NO: 158638
guuaauggagaacagcagc

SEQ ID NO: 158640 - RNA, 19 nt, Artificial Sequence
  Description of Artificial Sequence: Synthetic oligonucleotide
  Sense strand starting at position 1211 of SEQ ID NO: 2042
caggguuucccggagcuuu

SEQ ID NO: 158641 - RNA, 19 nt, Artificial Sequence
  Description of Artificial Sequence: Synthetic oligonucleotide
  Antisense strand to SEQ ID NO: 158640
aaagcuccgggaaacccug

SEQ ID NO: 158642 - RNA, 19 nt, Artificial Sequence
  Description of Artificial Sequence: Synthetic oligonucleotide
  Sense strand starting at position 1236 of SEQ ID NO: 2042
gcuucccggcgauucauau

SEQ ID NO: 158643 - RNA, 19 nt, Artificial Sequence
  Description of Artificial Sequence: Synthetic oligonucleotide
  Antisense strand to SEQ ID NO: 158642
auaugaaucgccgggaagc

SEQ ID NO: 158644 - RNA, 19 nt, Artificial Sequence
  Description of Artificial Sequence: Synthetic oligonucleotide
  Sense strand starting at position 1640 of SEQ ID NO: 2042
ggacucagcuuugggaaga

SEQ ID NO: 158645 - RNA, 19 nt, Artificial Sequence
  Description of Artificial Sequence: Synthetic oligonucleotide
  Antisense strand to SEQ ID NO: 158644
ucuucccaaagcugagucc

SEQ ID NO: 158646 - RNA, 19 nt, Artificial Sequence
  Description of Artificial Sequence: Synthetic oligonucleotide
  Sense strand starting at position 2142 of SEQ ID NO: 2042
ggccucuuugucuaaaccu

SEQ ID NO: 158647 - RNA, 19 nt, Artificial Sequence
  Description of Artificial Sequence: Synthetic oligonucleotide
  Antisense strand to SEQ ID NO: 158646
agguuuagacaaagaggcc

SEQ ID NO: 158648 - RNA, 19 nt, Artificial Sequence
  Description of Artificial Sequence: Synthetic oligonucleotide
  Sense strand starting at position 2148 of SEQ ID NO: 2042
uuugucuaaaccugaggga

SEQ ID NO: 158649 - RNA, 19 nt, Artificial Sequence
  Description of Artificial Sequence: Synthetic oligonucleotide
  Antisense strand to SEQ ID NO: 158648
ucccucagguuuagacaaa

SEQ ID NO: 158650 - RNA, 19 nt, Artificial Sequence
  Description of Artificial Sequence: Synthetic oligonucleotide
  Sense strand starting at position 2151 of SEQ ID NO: 2042
gucuaaaccugagggauag

SEQ ID NO: 158651 - RNA, 19 nt, Artificial Sequence
  Description of Artificial Sequence: Synthetic oligonucleotide
  Antisense strand to SEQ ID NO: 158650
cuaucccucagguuuagac

SEQ ID NO: 158652 - RNA, 19 nt, Artificial Sequence
  Description of Artificial Sequence: Synthetic oligonucleotide
  Sense strand starting at position 2167 of SEQ ID NO: 2042
uagggcugaaggugaaaua

SEQ ID NO: 158653 - RNA, 19 nt, Artificial Sequence
  Description of Artificial Sequence: Synthetic oligonucleotide
  Antisense strand to SEQ ID NO: 158652
uauuucaccuucagcccua

SEQ ID NO: 158654 - RNA, 19 nt, Artificial Sequence
  Description of Artificial Sequence: Synthetic oligonucleotide
  Sense strand starting at position 2325 of SEQ ID NO: 2042
cgccuuccugcagaagcau

SEQ ID NO: 158655 - RNA, 19 nt, Artificial Sequence
  Description of Artificial Sequence: Synthetic oligonucleotide
  Antisense strand to SEQ ID NO: 158654
augcuucugcaggaaggcg

SEQ ID NO: 158656 - RNA, 19 nt, Artificial Sequence
  Description of Artificial Sequence: Synthetic oligonucleotide
  Sense strand starting at position 2549 of SEQ ID NO: 2042
gagacacaacucugugaua

SEQ ID NO: 158657 - RNA, 19 nt, Artificial Sequence
  Description of Artificial Sequence: Synthetic oligonucleotide
  Antisense strand to SEQ ID NO: 158656
uaucacagaguugugucuc

SEQ ID NO: 158658 - RNA, 19 nt, Artificial Sequence
  Description of Artificial Sequence: Synthetic oligonucleotide
  Sense strand starting at position 2551 of SEQ ID NO: 2042
gacacaacucugugauaag

SEQ ID NO: 158659 - RNA, 19 nt, Artificial Sequence
  Description of Artificial Sequence: Synthetic oligonucleotide
  Antisense strand to SEQ ID NO: 158658
cuuaucacagaguuguguc

SEQ ID NO: 158660 - RNA, 19 nt, Artificial Sequence
  Description of Artificial Sequence: Synthetic oligonucleotide
  Sense strand starting at position 2552 of SEQ ID NO: 2042
acacaacucugugauaaga

SEQ ID NO: 158661 - RNA, 19 nt, Artificial Sequence
  Description of Artificial Sequence: Synthetic oligonucleotide
  Antisense strand to SEQ ID NO: 158660
ucuuaucacagaguugugu

SEQ ID NO: 158662 - RNA, 19 nt, Artificial Sequence
  Description of Artificial Sequence: Synthetic oligonucleotide
  Sense strand starting at position 2620 of SEQ ID NO: 2042
auagacguaaguuguauaa

SEQ ID NO: 158663 - RNA, 19 nt, Artificial Sequence
  Description of Artificial Sequence: Synthetic oligonucleotide
  Antisense strand to SEQ ID NO: 158662
uuauacaacuuacgucuau

SEQ ID NO: 158664 - RNA, 19 nt, Artificial Sequence
  Description of Artificial Sequence: Synthetic oligonucleotide
  Sense strand starting at position 2624 of SEQ ID NO: 2042
acguaaguuguauaauaac

SEQ ID NO: 158665 - RNA, 19 nt, Artificial Sequence
  Description of Artificial Sequence: Synthetic oligonucleotide
  Antisense strand to SEQ ID NO: 158664
guuauuauacaacuuacgu

SEQ ID NO: 158666 - RNA, 19 nt, Artificial Sequence
  Description of Artificial Sequence: Synthetic oligonucleotide
  Sense strand starting at position 2986 of SEQ ID NO: 2042
cagcuaggucaguguucuu

SEQ ID NO: 158667 - RNA, 19 nt, Artificial Sequence
  Description of Artificial Sequence: Synthetic oligonucleotide
  Antisense strand to SEQ ID NO: 158666
aagaacacugaccuagcug

SEQ ID NO: 158668 - RNA, 19 nt, Artificial Sequence
  Description of Artificial Sequence: Synthetic oligonucleotide
  Sense strand starting at position 2993 of SEQ ID NO: 2042
gucaguguucuuuguggga

SEQ ID NO: 158669 - RNA, 19 nt, Artificial Sequence
  Description of Artificial Sequence: Synthetic oligonucleotide
  Antisense strand to SEQ ID NO: 158668
ucccacaaagaacacugac

SEQ ID NO: 158670 - RNA, 19 nt, Artificial Sequence
  Description of Artificial Sequence: Synthetic oligonucleotide
  Sense strand starting at position 3348 of SEQ ID NO: 2042
aauggaaacugaugaugaa

SEQ ID NO: 158671 - RNA, 19 nt, Artificial Sequence
  Description of Artificial Sequence: Synthetic oligonucleotide
  Antisense strand to SEQ ID NO: 158670
uucaucaucaguuuccauu

SEQ ID NO: 158672 - RNA, 19 nt, Artificial Sequence
  Description of Artificial Sequence: Synthetic oligonucleotide
  Sense strand starting at position 3636 of SEQ ID NO: 2042
ggcucaggcuggucuuaau

SEQ ID NO: 158673 - RNA, 19 nt, Artificial Sequence
  Description of Artificial Sequence: Synthetic oligonucleotide
  Antisense strand to SEQ ID NO: 158672
auuaagaccagccugagcc

SEQ ID NO: 158674 - RNA, 19 nt, Artificial Sequence
  Description of Artificial Sequence: Synthetic oligonucleotide
  Sense strand starting at position 172 of SEQ ID NO: 2040
uuuaccuuaccuugaugua

SEQ ID NO: 158675 - RNA, 19 nt, Artificial Sequence
  Description of Artificial Sequence: Synthetic oligonucleotide
  Antisense strand to SEQ ID NO: 158674
uacaucaagguaagguaaa

SEQ ID NO: 158676 - RNA, 19 nt, Artificial Sequence
  Description of Artificial Sequence: Synthetic oligonucleotide
  Sense strand starting at position 173 of SEQ ID NO: 2040
uuaccuuaccuugauguau

SEQ ID NO: 158677 - RNA, 19 nt, Artificial Sequence
  Description of Artificial Sequence: Synthetic oligonucleotide
  Antisense strand to SEQ ID NO: 158676
auacaucaagguaagguaa

SEQ ID NO: 158678 - RNA, 19 nt, Artificial Sequence
  Description of Artificial Sequence: Synthetic oligonucleotide
  Sense strand starting at position 214 of SEQ ID NO: 2040
cucaccagaguuugauaaa

SEQ ID NO: 158679 - RNA, 19 nt, Artificial Sequence
  Description of Artificial Sequence: Synthetic oligonucleotide
  Antisense strand to SEQ ID NO: 158678
uuuaucaaacucuggugag

SEQ ID NO: 158680 - RNA, 19 nt, Artificial Sequence
  Description of Artificial Sequence: Synthetic oligonucleotide
  Sense strand starting at position 215 of SEQ ID NO: 2040
ucaccagaguuugauaaau

SEQ ID NO: 158681 - RNA, 19 nt, Artificial Sequence
  Description of Artificial Sequence: Synthetic oligonucleotide
  Antisense strand to SEQ ID NO: 158680
auuuaucaaacucugguga

SEQ ID NO: 158682 - RNA, 19 nt, Artificial Sequence
  Description of Artificial Sequence: Synthetic oligonucleotide
  Sense strand starting at position 348 of SEQ ID NO: 2040
caggaagcccuuugaaaug

SEQ ID NO: 158683 - RNA, 19 nt, Artificial Sequence
  Description of Artificial Sequence: Synthetic oligonucleotide
  Antisense strand to SEQ ID NO: 158682
cauuucaaagggcuuccug

SEQ ID NO: 158684 - RNA, 19 nt, Artificial Sequence
  Description of Artificial Sequence: Synthetic oligonucleotide
  Sense strand starting at position 389 of SEQ ID NO: 2040
ucagaaugaucucaacaag

SEQ ID NO: 158685 - RNA, 19 nt, Artificial Sequence
  Description of Artificial Sequence: Synthetic oligonucleotide
  Antisense strand to SEQ ID NO: 158684
cuuguugagaucauucuga

SEQ ID NO: 158686 - RNA, 19 nt, Artificial Sequence
  Description of Artificial Sequence: Synthetic oligonucleotide
  Sense strand starting at position 423 of SEQ ID NO: 2040
cuuggagcucugcaucaau

SEQ ID NO: 158687 - RNA, 19 nt, Artificial Sequence
  Description of Artificial Sequence: Synthetic oligonucleotide
  Antisense strand to SEQ ID NO: 158686
auugaugcagagcuccaag

SEQ ID NO: 158688 - RNA, 19 nt, Artificial Sequence
  Description of Artificial Sequence: Synthetic oligonucleotide
  Sense strand starting at position 426 of SEQ ID NO: 2040
ggagcucugcaucaaucua

SEQ ID NO: 158689 - RNA, 19 nt, Artificial Sequence
  Description of Artificial Sequence: Synthetic oligonucleotide
  Antisense strand to SEQ ID NO: 158688
uagauugaugcagagcucc

SEQ ID NO: 158690 - RNA, 19 nt, Artificial Sequence
  Description of Artificial Sequence: Synthetic oligonucleotide
  Sense strand starting at position 526 of SEQ ID NO: 2040
cccacaagguggguugaua

SEQ ID NO: 158691 - RNA, 19 nt, Artificial Sequence
  Description of Artificial Sequence: Synthetic oligonucleotide
  Antisense strand to SEQ ID NO: 158690
uaucaacccaccuuguggg

SEQ ID NO: 158692 - RNA, 19 nt, Artificial Sequence
  Description of Artificial Sequence: Synthetic oligonucleotide
  Sense strand starting at position 916 of SEQ ID NO: 2040
cuccaucugcuguaagaau

SEQ ID NO: 158693 - RNA, 19 nt, Artificial Sequence
  Description of Artificial Sequence: Synthetic oligonucleotide
  Antisense strand to SEQ ID NO: 158692
auucuuacagcagauggag

SEQ ID NO: 158694 - RNA, 19 nt, Artificial Sequence
  Description of Artificial Sequence: Synthetic oligonucleotide
  Sense strand starting at position 1024 of SEQ ID NO: 2040
guuugaguucugggauuca

SEQ ID NO: 158695 - RNA, 19 nt, Artificial Sequence
  Description of Artificial Sequence: Synthetic oligonucleotide
  Antisense strand to SEQ ID NO: 158694
ugaaucccagaacucaaac

SEQ ID NO: 158696 - RNA, 19 nt, Artificial Sequence
  Description of Artificial Sequence: Synthetic oligonucleotide
  Sense strand starting at position 1108 of SEQ ID NO: 2040
guaucaguuuaccuccauu

SEQ ID NO: 158697 - RNA, 19 nt, Artificial Sequence
  Description of Artificial Sequence: Synthetic oligonucleotide
  Antisense strand to SEQ ID NO: 158696
aauggagguaaacugauac

SEQ ID NO: 158698 - RNA, 19 nt, Artificial Sequence
  Description of Artificial Sequence: Synthetic oligonucleotide
  Sense strand starting at position 1111 of SEQ ID NO: 2040
ucaguuuaccuccauuguu

SEQ ID NO: 158699 - RNA, 19 nt, Artificial Sequence
  Description of Artificial Sequence: Synthetic oligonucleotide
  Antisense strand to SEQ ID NO: 158698
aacaauggagguaaacuga

SEQ ID NO: 158700 - RNA, 19 nt, Artificial Sequence
  Description of Artificial Sequence: Synthetic oligonucleotide
  Sense strand starting at position 1137 of SEQ ID NO: 2040
aagugaauuccuggaccau

SEQ ID NO: 158701 - RNA, 19 nt, Artificial Sequence
  Description of Artificial Sequence: Synthetic oligonucleotide
  Antisense strand to SEQ ID NO: 158700
augguccaggaauucacuu

SEQ ID NO: 158702 - RNA, 19 nt, Artificial Sequence
  Description of Artificial Sequence: Synthetic oligonucleotide
  Sense strand starting at position 1146 of SEQ ID NO: 2040
ccuggaccaucagacauua

SEQ ID NO: 158703 - RNA, 19 nt, Artificial Sequence
  Description of Artificial Sequence: Synthetic oligonucleotide
  Antisense strand to SEQ ID NO: 158702
uaaugucugaugguccagg

SEQ ID NO: 158704 - RNA, 19 nt, Artificial Sequence
  Description of Artificial Sequence: Synthetic oligonucleotide
  Sense strand starting at position 1215 of SEQ ID NO: 2040
acuacuuucuagucaugga

SEQ ID NO: 158705 - RNA, 19 nt, Artificial Sequence
  Description of Artificial Sequence: Synthetic oligonucleotide
  Antisense strand to SEQ ID NO: 158704
uccaugacuagaaaguagu

SEQ ID NO: 158706 - RNA, 19 nt, Artificial Sequence
  Description of Artificial Sequence: Synthetic oligonucleotide
  Sense strand starting at position 1273 of SEQ ID NO: 2040
ccgugugugccucagaacu

SEQ ID NO: 158707 - RNA, 19 nt, Artificial Sequence
  Description of Artificial Sequence: Synthetic oligonucleotide
  Antisense strand to SEQ ID NO: 158706
aguucugaggcacacacgg

SEQ ID NO: 158708 - RNA, 19 nt, Artificial Sequence
  Description of Artificial Sequence: Synthetic oligonucleotide
  Sense strand starting at position 1279 of SEQ ID NO: 2040
gugccucagaacuguuaug

SEQ ID NO: 158709 - RNA, 19 nt, Artificial Sequence
  Description of Artificial Sequence: Synthetic oligonucleotide
  Antisense strand to SEQ ID NO: 158708
cauaacaguucugaggcac

SEQ ID NO: 158710 - RNA, 19 nt, Artificial Sequence
  Description of Artificial Sequence: Synthetic oligonucleotide
  Sense strand starting at position 1340 of SEQ ID NO: 2040
uauacaagugugggacaua

SEQ ID NO: 158711 - RNA, 19 nt, Artificial Sequence
  Description of Artificial Sequence: Synthetic oligonucleotide
  Antisense strand to SEQ ID NO: 158710
uaugucccacacuuguaua

SEQ ID NO: 158712 - RNA, 19 nt, Artificial Sequence
  Description of Artificial Sequence: Synthetic oligonucleotide
  Sense strand starting at position 1341 of SEQ ID NO: 2040
auacaagugugggacauaa

SEQ ID NO: 158713 - RNA, 19 nt, Artificial Sequence
  Description of Artificial Sequence: Synthetic oligonucleotide
  Antisense strand to SEQ ID NO: 158712
uuaugucccacacuuguau

SEQ ID NO: 158714 - RNA, 19 nt, Artificial Sequence
  Description of Artificial Sequence: Synthetic oligonucleotide
  Sense strand starting at position 1345 of SEQ ID NO: 2040
aagugugggacauaauguu

SEQ ID NO: 158715 - RNA, 19 nt, Artificial Sequence
  Description of Artificial Sequence: Synthetic oligonucleotide
  Antisense strand to SEQ ID NO: 158714
aacauuaugucccacacuu

SEQ ID NO: 158716 - RNA, 19 nt, Artificial Sequence
  Description of Artificial Sequence: Synthetic oligonucleotide
  Sense strand starting at position 1353 of SEQ ID NO: 2040
gacauaauguucccgguaa

SEQ ID NO: 158717 - RNA, 19 nt, Artificial Sequence
  Description of Artificial Sequence: Synthetic oligonucleotide
  Antisense strand to SEQ ID NO: 158716
uuaccgggaacauuauguc

SEQ ID NO: 158718 - RNA, 19 nt, Artificial Sequence
  Description of Artificial Sequence: Synthetic oligonucleotide
  Sense strand starting at position 1355 of SEQ ID NO: 2040
cauaauguucccgguaacu

SEQ ID NO: 158719 - RNA, 19 nt, Artificial Sequence
  Description of Artificial Sequence: Synthetic oligonucleotide
  Antisense strand to SEQ ID NO: 158718
aguuaccgggaacauuaug

SEQ ID NO: 158720 - RNA, 19 nt, Artificial Sequence
  Description of Artificial Sequence: Synthetic oligonucleotide
  Sense strand starting at position 1357 of SEQ ID NO: 2040
uaauguucccgguaacugu

SEQ ID NO: 158721 - RNA, 19 nt, Artificial Sequence
  Description of Artificial Sequence: Synthetic oligonucleotide
  Antisense strand to SEQ ID NO: 158720
acaguuaccgggaacauua

SEQ ID NO: 158722 - RNA, 19 nt, Artificial Sequence
  Description of Artificial Sequence: Synthetic oligonucleotide
  Sense strand starting at position 1481 of SEQ ID NO: 2040
agcugcuguucuccauuaa

SEQ ID NO: 158723 - RNA, 19 nt, Artificial Sequence
  Description of Artificial Sequence: Synthetic oligonucleotide
  Antisense strand to SEQ ID NO: 158722
uuaauggagaacagcagcu

SEQ ID NO: 158724 - RNA, 19 nt, Artificial Sequence
  Description of Artificial Sequence: Synthetic oligonucleotide
  Sense strand starting at position 1482 of SEQ ID NO: 2040
gcugcuguucuccauuaac

SEQ ID NO: 158725 - RNA, 19 nt, Artificial Sequence
  Description of Artificial Sequence: Synthetic oligonucleotide
  Antisense strand to SEQ ID NO: 158724
guuaauggagaacagcagc

SEQ ID NO: 158726 - RNA, 19 nt, Artificial Sequence
  Description of Artificial Sequence: Synthetic oligonucleotide
  Sense strand starting at position 1663 of SEQ ID NO: 2040
caggguuucccggagcuuu

SEQ ID NO: 158727 - RNA, 19 nt, Artificial Sequence
  Description of Artificial Sequence: Synthetic oligonucleotide
  Antisense strand to SEQ ID NO: 158726
aaagcuccgggaaacccug

SEQ ID NO: 158728 - RNA, 19 nt, Artificial Sequence
  Description of Artificial Sequence: Synthetic oligonucleotide
  Sense strand starting at position 1688 of SEQ ID NO: 2040
gcuucccggcgauucauau

SEQ ID NO: 158729 - RNA, 19 nt, Artificial Sequence
  Description of Artificial Sequence: Synthetic oligonucleotide
  Antisense strand to SEQ ID NO: 158728
auaugaaucgccgggaagc

SEQ ID NO: 158730 - RNA, 19 nt, Artificial Sequence
  Description of Artificial Sequence: Synthetic oligonucleotide
  Sense strand starting at position 2594 of SEQ ID NO: 2040
ggccucuuugucuaaaccu

SEQ ID NO: 158731 - RNA, 19 nt, Artificial Sequence
  Description of Artificial Sequence: Synthetic oligonucleotide
  Antisense strand to SEQ ID NO: 158730
agguuuagacaaagaggcc

SEQ ID NO: 158732 - RNA, 19 nt, Artificial Sequence
  Description of Artificial Sequence: Synthetic oligonucleotide
  Sense strand starting at position 2600 of SEQ ID NO: 2040
uuugucuaaaccugaggga

SEQ ID NO: 158733 - RNA, 19 nt, Artificial Sequence
  Description of Artificial Sequence: Synthetic oligonucleotide
  Antisense strand to SEQ ID NO: 158732
ucccucagguuuagacaaa

SEQ ID NO: 158734 - RNA, 19 nt, Artificial Sequence
  Description of Artificial Sequence: Synthetic oligonucleotide
  Sense strand starting at position 2619 of SEQ ID NO: 2040
uagggcugaaggugaaaua

SEQ ID NO: 158735 - RNA, 19 nt, Artificial Sequence
  Description of Artificial Sequence: Synthetic oligonucleotide
  Antisense strand to SEQ ID NO: 158734
uauuucaccuucagcccua

SEQ ID NO: 158736 - RNA, 19 nt, Artificial Sequence
  Description of Artificial Sequence: Synthetic oligonucleotide
  Sense strand starting at position 2777 of SEQ ID NO: 2040
cgccuuccugcagaagcau

SEQ ID NO: 158737 - RNA, 19 nt, Artificial Sequence
  Description of Artificial Sequence: Synthetic oligonucleotide
  Antisense strand to SEQ ID NO: 158736
augcuucugcaggaaggcg

SEQ ID NO: 158738 - RNA, 19 nt, Artificial Sequence
  Description of Artificial Sequence: Synthetic oligonucleotide
  Sense strand starting at position 3001 of SEQ ID NO: 2040
gagacacaacucugugaua

SEQ ID NO: 158739 - RNA, 19 nt, Artificial Sequence
  Description of Artificial Sequence: Synthetic oligonucleotide
  Antisense strand to SEQ ID NO: 158738
uaucacagaguugugucuc

SEQ ID NO: 158740 - RNA, 19 nt, Artificial Sequence
  Description of Artificial Sequence: Synthetic oligonucleotide
  Sense strand starting at position 3003 of SEQ ID NO: 2040
gacacaacucugugauaag

SEQ ID NO: 158741 - RNA, 19 nt, Artificial Sequence
  Description of Artificial Sequence: Synthetic oligonucleotide
  Antisense strand to SEQ ID NO: 158740
cuuaucacagaguuguguc

SEQ ID NO: 158742 - RNA, 19 nt, Artificial Sequence
  Description of Artificial Sequence: Synthetic oligonucleotide
  Sense strand starting at position 3004 of SEQ ID NO: 2040
acacaacucugugauaaga

SEQ ID NO: 158743 - RNA, 19 nt, Artificial Sequence
  Description of Artificial Sequence: Synthetic oligonucleotide
  Antisense strand to SEQ ID NO: 158742
ucuuaucacagaguugugu

SEQ ID NO: 158744 - RNA, 19 nt, Artificial Sequence
  Description of Artificial Sequence: Synthetic oligonucleotide
  Sense strand starting at position 3072 of SEQ ID NO: 2040
auagacguaaguuguauaa

SEQ ID NO: 158745 - RNA, 19 nt, Artificial Sequence
  Description of Artificial Sequence: Synthetic oligonucleotide
  Antisense strand to SEQ ID NO: 158744
uuauacaacuuacgucuau

SEQ ID NO: 158746 - RNA, 19 nt, Artificial Sequence
  Description of Artificial Sequence: Synthetic oligonucleotide
  Sense strand starting at position 3076 of SEQ ID NO: 2040
acguaaguuguauaauaac

SEQ ID NO: 158747 - RNA, 19 nt, Artificial Sequence
  Description of Artificial Sequence: Synthetic oligonucleotide
  Antisense strand to SEQ ID NO: 158746
guuauuauacaacuuacgu

SEQ ID NO: 158748 - RNA, 19 nt, Artificial Sequence
  Description of Artificial Sequence: Synthetic oligonucleotide
  Sense strand starting at position 3438 of SEQ ID NO: 2040
cagcuaggucaguguucuu

SEQ ID NO: 158749 - RNA, 19 nt, Artificial Sequence
  Description of Artificial Sequence: Synthetic oligonucleotide
  Antisense strand to SEQ ID NO: 158748
aagaacacugaccuagcug

SEQ ID NO: 158750 - RNA, 19 nt, Artificial Sequence
  Description of Artificial Sequence: Synthetic oligonucleotide
  Sense strand starting at position 3445 of SEQ ID NO: 2040
gucaguguucuuuguggga

SEQ ID NO: 158751 - RNA, 19 nt, Artificial Sequence
  Description of Artificial Sequence: Synthetic oligonucleotide
  Antisense strand to SEQ ID NO: 158750
ucccacaaagaacacugac

SEQ ID NO: 158752 - RNA, 19 nt, Artificial Sequence
  Description of Artificial Sequence: Synthetic oligonucleotide
  Sense strand starting at position 3800 of SEQ ID NO: 2040
aauggaaacugaugaugaa

SEQ ID NO: 158753 - RNA, 19 nt, Artificial Sequence
  Description of Artificial Sequence: Synthetic oligonucleotide
  Antisense strand to SEQ ID NO: 158752
uucaucaucaguuuccauu

SEQ ID NO: 158754 - RNA, 19 nt, Artificial Sequence
  Description of Artificial Sequence: Synthetic oligonucleotide
  Sense strand starting at position 21 of SEQ ID NO: 2043
gguccuuaaagucacgaga

SEQ ID NO: 158755 - RNA, 19 nt, Artificial Sequence
  Description of Artificial Sequence: Synthetic oligonucleotide
  Antisense strand to SEQ ID NO: 158754
ucucgugacuuuaaggacc

SEQ ID NO: 158756 - RNA, 19 nt, Artificial Sequence
  Description of Artificial Sequence: Synthetic oligonucleotide
  Sense strand starting at position 24 of SEQ ID NO: 2043
ccuuaaagucacgagaauc

SEQ ID NO: 158757 - RNA, 19 nt, Artificial Sequence
  Description of Artificial Sequence: Synthetic oligonucleotide
  Antisense strand to SEQ ID NO: 158756
gauucucgugacuuuaagg

SEQ ID NO: 158758 - RNA, 19 nt, Artificial Sequence
  Description of Artificial Sequence: Synthetic oligonucleotide
  Sense strand starting at position 35 of SEQ ID NO: 2043
cgagaaucaguguggaaca

SEQ ID NO: 158759 - RNA, 19 nt, Artificial Sequence
  Description of Artificial Sequence: Synthetic oligonucleotide
  Antisense strand to SEQ ID NO: 158758
uguuccacacugauucucg

SEQ ID NO: 158760 - RNA, 19 nt, Artificial Sequence
  Description of Artificial Sequence: Synthetic oligonucleotide
  Sense strand starting at position 107 of SEQ ID NO: 2043
acagcuuguacugggagaa

SEQ ID NO: 158761 - RNA, 19 nt, Artificial Sequence
  Description of Artificial Sequence: Synthetic oligonucleotide
  Antisense strand to SEQ ID NO: 158760
uucucccaguacaagcugu

SEQ ID NO: 158762 - RNA, 19 nt, Artificial Sequence
  Description of Artificial Sequence: Synthetic oligonucleotide
  Sense strand starting at position 108 of SEQ ID NO: 2043
cagcuuguacugggagaau

SEQ ID NO: 158763 - RNA, 19 nt, Artificial Sequence
  Description of Artificial Sequence: Synthetic oligonucleotide
  Antisense strand to SEQ ID NO: 158762
auucucccaguacaagcug

SEQ ID NO: 158764 - RNA, 19 nt, Artificial Sequence
  Description of Artificial Sequence: Synthetic oligonucleotide
  Sense strand starting at position 152 of SEQ ID NO: 2043
aucauauagcuauagaguu

SEQ ID NO: 158765 - RNA, 19 nt, Artificial Sequence
  Description of Artificial Sequence: Synthetic oligonucleotide
  Antisense strand to SEQ ID NO: 158764
aacucuauagcuauaugau

SEQ ID NO: 158766 - RNA, 19 nt, Artificial Sequence
  Description of Artificial Sequence: Synthetic oligonucleotide
  Sense strand starting at position 160 of SEQ ID NO: 2043
gcuauagaguuugcuauuu

SEQ ID NO: 158767 - RNA, 19 nt, Artificial Sequence
  Description of Artificial Sequence: Synthetic oligonucleotide
  Antisense strand to SEQ ID NO: 158766
aaauagcaaacucuauagc

SEQ ID NO: 158768 - RNA, 19 nt, Artificial Sequence
  Description of Artificial Sequence: Synthetic oligonucleotide
  Sense strand starting at position 287 of SEQ ID NO: 2043
caccguggucaccagcaau

SEQ ID NO: 158769 - RNA, 19 nt, Artificial Sequence
  Description of Artificial Sequence: Synthetic oligonucleotide
  Antisense strand to SEQ ID NO: 158768
auugcuggugaccacggug

SEQ ID NO: 158770 - RNA, 19 nt, Artificial Sequence
  Description of Artificial Sequence: Synthetic oligonucleotide
  Sense strand starting at position 495 of SEQ ID NO: 2043
uguauaaagugacugcuua

SEQ ID NO: 158771 - RNA, 19 nt, Artificial Sequence
  Description of Artificial Sequence: Synthetic oligonucleotide
  Antisense strand to SEQ ID NO: 158770
uaagcagucacuuuauaca

SEQ ID NO: 158772 - RNA, 19 nt, Artificial Sequence
  Description of Artificial Sequence: Synthetic oligonucleotide
  Sense strand starting at position 496 of SEQ ID NO: 2043
guauaaagugacugcuuau

SEQ ID NO: 158773 - RNA, 19 nt, Artificial Sequence
  Description of Artificial Sequence: Synthetic oligonucleotide
  Antisense strand to SEQ ID NO: 158772
auaagcagucacuuuauac

SEQ ID NO: 158774 - RNA, 19 nt, Artificial Sequence
  Description of Artificial Sequence: Synthetic oligonucleotide
  Sense strand starting at position 569 of SEQ ID NO: 2043
acugauugcugagugaagu

SEQ ID NO: 158775 - RNA, 19 nt, Artificial Sequence
  Description of Artificial Sequence: Synthetic oligonucleotide
  Antisense strand to SEQ ID NO: 158774
acuucacucagcaaucagu

SEQ ID NO: 158776 - RNA, 19 nt, Artificial Sequence
  Description of Artificial Sequence: Synthetic oligonucleotide
  Sense strand starting at position 570 of SEQ ID NO: 2043
cugauugcugagugaaguc

SEQ ID NO: 158777 - RNA, 19 nt, Artificial Sequence
  Description of Artificial Sequence: Synthetic oligonucleotide
  Antisense strand to SEQ ID NO: 158776
gacuucacucagcaaucag

SEQ ID NO: 158778 - RNA, 19 nt, Artificial Sequence
  Description of Artificial Sequence: Synthetic oligonucleotide
  Sense strand starting at position 699 of SEQ ID NO: 2043
cacuccugcccuugagagu

SEQ ID NO: 158779 - RNA, 19 nt, Artificial Sequence
  Description of Artificial Sequence: Synthetic oligonucleotide
  Antisense strand to SEQ ID NO: 158778
acucucaagggcaggagug

SEQ ID NO: 158780 - RNA, 19 nt, Artificial Sequence
  Description of Artificial Sequence: Synthetic oligonucleotide
  Sense strand starting at position 706 of SEQ ID NO: 2043
gcccuugagagucaacagu

SEQ ID NO: 158781 - RNA, 19 nt, Artificial Sequence
  Description of Artificial Sequence: Synthetic oligonucleotide
  Antisense strand to SEQ ID NO: 158780
acuguugacucucaagggc

SEQ ID NO: 158782 - RNA, 19 nt, Artificial Sequence
  Description of Artificial Sequence: Synthetic oligonucleotide
  Sense strand starting at position 712 of SEQ ID NO: 2043
gagagucaacaguguuaca

SEQ ID NO: 158783 - RNA, 19 nt, Artificial Sequence
  Description of Artificial Sequence: Synthetic oligonucleotide
  Antisense strand to SEQ ID NO: 158782
uguaacacuguugacucuc

SEQ ID NO: 158784 - RNA, 19 nt, Artificial Sequence
  Description of Artificial Sequence: Synthetic oligonucleotide
  Sense strand starting at position 821 of SEQ ID NO: 2043
ggaguuaucucaguuagaa

SEQ ID NO: 158785 - RNA, 19 nt, Artificial Sequence
  Description of Artificial Sequence: Synthetic oligonucleotide
  Antisense strand to SEQ ID NO: 158784
uucuaacugagauaacucc

SEQ ID NO: 158786 - RNA, 19 nt, Artificial Sequence
  Description of Artificial Sequence: Synthetic oligonucleotide
  Sense strand starting at position 861 of SEQ ID NO: 2043
gcuuauuacccacgcauuu

SEQ ID NO: 158787 - RNA, 19 nt, Artificial Sequence
  Description of Artificial Sequence: Synthetic oligonucleotide
  Antisense strand to SEQ ID NO: 158786
aaaugcguggguaauaagc

SEQ ID NO: 158788 - RNA, 19 nt, Artificial Sequence
  Description of Artificial Sequence: Synthetic oligonucleotide
  Sense strand starting at position 910 of SEQ ID NO: 2043
guuacugagaguuggauau

SEQ ID NO: 158789 - RNA, 19 nt, Artificial Sequence
  Description of Artificial Sequence: Synthetic oligonucleotide
  Antisense strand to SEQ ID NO: 158788
auauccaacucucaguaac

SEQ ID NO: 158790 - RNA, 19 nt, Artificial Sequence
  Description of Artificial Sequence: Synthetic oligonucleotide
  Sense strand starting at position 920 of SEQ ID NO: 2043
guuggauauaguggaauuc

SEQ ID NO: 158791 - RNA, 19 nt, Artificial Sequence
  Description of Artificial Sequence: Synthetic oligonucleotide
  Antisense strand to SEQ ID NO: 158790
gaauuccacuauauccaac

SEQ ID NO: 158792 - RNA, 19 nt, Artificial Sequence
  Description of Artificial Sequence: Synthetic oligonucleotide
  Sense strand starting at position 1127 of SEQ ID NO: 2043
aagagcucuuauucguaaa

SEQ ID NO: 158793 - RNA, 19 nt, Artificial Sequence
  Description of Artificial Sequence: Synthetic oligonucleotide
  Antisense strand to SEQ ID NO: 158792
uuuacgaauaagagcucuu

SEQ ID NO: 158794 - RNA, 19 nt, Artificial Sequence
  Description of Artificial Sequence: Synthetic oligonucleotide
  Sense strand starting at position 1160 of SEQ ID NO: 2043
agaguuccaccagguaaga

SEQ ID NO: 158795 - RNA, 19 nt, Artificial Sequence
  Description of Artificial Sequence: Synthetic oligonucleotide
  Antisense strand to SEQ ID NO: 158794
ucuuaccugguggaacucu

SEQ ID NO: 158796 - RNA, 19 nt, Artificial Sequence
  Description of Artificial Sequence: Synthetic oligonucleotide
  Sense strand starting at position 1178 of SEQ ID NO: 2043
aggaacagguccuuaagua

SEQ ID NO: 158797 - RNA, 19 nt, Artificial Sequence
  Description of Artificial Sequence: Synthetic oligonucleotide
  Antisense strand to SEQ ID NO: 158796
uacuuaaggaccuguuccu

SEQ ID NO: 158798 - RNA, 19 nt, Artificial Sequence
  Description of Artificial Sequence: Synthetic oligonucleotide
  Sense strand starting at position 1186 of SEQ ID NO: 2043
guccuuaaguauuccaaac

SEQ ID NO: 158799 - RNA, 19 nt, Artificial Sequence
  Description of Artificial Sequence: Synthetic oligonucleotide
  Antisense strand to SEQ ID NO: 158798
guuuggaauacuuaaggac

SEQ ID NO: 158800 - RNA, 19 nt, Artificial Sequence
  Description of Artificial Sequence: Synthetic oligonucleotide
  Sense strand starting at position 1205 of SEQ ID NO: 2043
acacacaauuagucaaguu

SEQ ID NO: 158801 - RNA, 19 nt, Artificial Sequence
  Description of Artificial Sequence: Synthetic oligonucleotide
  Antisense strand to SEQ ID NO: 158800
aacuugacuaauugugugu

SEQ ID NO: 158802 - RNA, 19 nt, Artificial Sequence
  Description of Artificial Sequence: Synthetic oligonucleotide
  Sense strand starting at position 1265 of SEQ ID NO: 2043
ggagaacuguuuccucuau

SEQ ID NO: 158803 - RNA, 19 nt, Artificial Sequence
  Description of Artificial Sequence: Synthetic oligonucleotide
  Antisense strand to SEQ ID NO: 158802
auagaggaaacaguucucc

SEQ ID NO: 158804 - RNA, 19 nt, Artificial Sequence
  Description of Artificial Sequence: Synthetic oligonucleotide
  Sense strand starting at position 2195 of SEQ ID NO: 2043
uagauucucggauggacaa

SEQ ID NO: 158805 - RNA, 19 nt, Artificial Sequence
  Description of Artificial Sequence: Synthetic oligonucleotide
  Antisense strand to SEQ ID NO: 158804
uuguccauccgagaaucua

SEQ ID NO: 158806 - RNA, 19 nt, Artificial Sequence
  Description of Artificial Sequence: Synthetic oligonucleotide
  Sense strand starting at position 2515 of SEQ ID NO: 2043
ggauguuuccuuggagccu

SEQ ID NO: 158807 - RNA, 19 nt, Artificial Sequence
  Description of Artificial Sequence: Synthetic oligonucleotide
  Antisense strand to SEQ ID NO: 158806
aggcuccaaggaaacaucc

SEQ ID NO: 158808 - RNA, 19 nt, Artificial Sequence
  Description of Artificial Sequence: Synthetic oligonucleotide
  Sense strand starting at position 2700 of SEQ ID NO: 2043
uccagauuccgcguuccuu

SEQ ID NO: 158809 - RNA, 19 nt, Artificial Sequence
  Description of Artificial Sequence: Synthetic oligonucleotide
  Antisense strand to SEQ ID NO: 158808
aaggaacgcggaaucugga

SEQ ID NO: 158810 - RNA, 19 nt, Artificial Sequence
  Description of Artificial Sequence: Synthetic oligonucleotide
  Sense strand starting at position 2911 of SEQ ID NO: 2043
gucaccaucccggacuaaa

SEQ ID NO: 158811 - RNA, 19 nt, Artificial Sequence
  Description of Artificial Sequence: Synthetic oligonucleotide
  Antisense strand to SEQ ID NO: 158810
uuuaguccgggauggugac

SEQ ID NO: 158812 - RNA, 19 nt, Artificial Sequence
  Description of Artificial Sequence: Synthetic oligonucleotide
  Sense strand starting at position 3042 of SEQ ID NO: 2043
gccaguucucuuugggaug

SEQ ID NO: 158813 - RNA, 19 nt, Artificial Sequence
  Description of Artificial Sequence: Synthetic oligonucleotide
  Antisense strand to SEQ ID NO: 158812
caucccaaagagaacuggc

SEQ ID NO: 158814 - RNA, 19 nt, Artificial Sequence
  Description of Artificial Sequence: Synthetic oligonucleotide
  Sense strand starting at position 3404 of SEQ ID NO: 2043
agaucagcucuggagcauu

SEQ ID NO: 158815 - RNA, 19 nt, Artificial Sequence
  Description of Artificial Sequence: Synthetic oligonucleotide
  Antisense strand to SEQ ID NO: 158814
aaugcuccagagcugaucu

SEQ ID NO: 158816 - RNA, 19 nt, Artificial Sequence
  Description of Artificial Sequence: Synthetic oligonucleotide
  Sense strand starting at position 3517 of SEQ ID NO: 2043
aggagaaguagcugcuagu

SEQ ID NO: 158817 - RNA, 19 nt, Artificial Sequence
  Description of Artificial Sequence: Synthetic oligonucleotide
  Antisense strand to SEQ ID NO: 158816
acuagcagcuacuucuccu

SEQ ID NO: 158818 - RNA, 19 nt, Artificial Sequence
  Description of Artificial Sequence: Synthetic oligonucleotide
  Sense strand starting at position 3527 of SEQ ID NO: 2043
gcugcuagucuaggaaaug

SEQ ID NO: 158819 - RNA, 19 nt, Artificial Sequence
  Description of Artificial Sequence: Synthetic oligonucleotide
  Antisense strand to SEQ ID NO: 158818
cauuuccuagacuagcagc

SEQ ID NO: 158820 - RNA, 19 nt, Artificial Sequence
  Description of Artificial Sequence: Synthetic oligonucleotide
  Sense strand starting at position 3536 of SEQ ID NO: 2043
cuaggaaaugcugggacuu

SEQ ID NO: 158821 - RNA, 19 nt, Artificial Sequence
  Description of Artificial Sequence: Synthetic oligonucleotide
  Antisense strand to SEQ ID NO: 158820
aagucccagcauuuccuag

SEQ ID NO: 158822 - RNA, 19 nt, Artificial Sequence
  Description of Artificial Sequence: Synthetic oligonucleotide
  Sense strand starting at position 3554 of SEQ ID NO: 2043
uguccagaaagaugagguu

SEQ ID NO: 158823 - RNA, 19 nt, Artificial Sequence
  Description of Artificial Sequence: Synthetic oligonucleotide
  Antisense strand to SEQ ID NO: 158822
aaccucaucuuucuggaca

SEQ ID NO: 158824 - RNA, 19 nt, Artificial Sequence
  Description of Artificial Sequence: Synthetic oligonucleotide
  Sense strand starting at position 3561 of SEQ ID NO: 2043
aaagaugagguuugugaau

SEQ ID NO: 158825 - RNA, 19 nt, Artificial Sequence
  Description of Artificial Sequence: Synthetic oligonucleotide
  Antisense strand to SEQ ID NO: 158824
auucacaaaccucaucuuu

SEQ ID NO: 158826 - RNA, 19 nt, Artificial Sequence
  Description of Artificial Sequence: Synthetic oligonucleotide
  Sense strand starting at position 3600 of SEQ ID NO: 2043
gggaauuaaggcugaugua

SEQ ID NO: 158827 - RNA, 19 nt, Artificial Sequence
  Description of Artificial Sequence: Synthetic oligonucleotide
  Antisense strand to SEQ ID NO: 158826
uacaucagccuuaauuccc

SEQ ID NO: 158828 - RNA, 19 nt, Artificial Sequence
  Description of Artificial Sequence: Synthetic oligonucleotide
  Sense strand starting at position 3609 of SEQ ID NO: 2043
ggcugauguaucuggagga

SEQ ID NO: 158829 - RNA, 19 nt, Artificial Sequence
  Description of Artificial Sequence: Synthetic oligonucleotide
  Antisense strand to SEQ ID NO: 158828
uccuccagauacaucagcc

SEQ ID NO: 158830 - RNA, 19 nt, Artificial Sequence
  Description of Artificial Sequence: Synthetic oligonucleotide
  Sense strand starting at position 3713 of SEQ ID NO: 2043
ucagcuaccuguguauaaa

SEQ ID NO: 158831 - RNA, 19 nt, Artificial Sequence
  Description of Artificial Sequence: Synthetic oligonucleotide
  Antisense strand to SEQ ID NO: 158830
uuuauacacagguagcuga

SEQ ID NO: 158832 - RNA, 19 nt, Artificial Sequence
  Description of Artificial Sequence: Synthetic oligonucleotide
  Sense strand starting at position 3924 of SEQ ID NO: 2043
acgagaucauuauuggcau

SEQ ID NO: 158833 - RNA, 19 nt, Artificial Sequence
  Description of Artificial Sequence: Synthetic oligonucleotide
  Antisense strand to SEQ ID NO: 158832
augccaauaaugaucucgu

SEQ ID NO: 158834 - RNA, 19 nt, Artificial Sequence
  Description of Artificial Sequence: Synthetic oligonucleotide
  Sense strand starting at position 3898 of SEQ ID NO: 2045
aucucaaaugcauguuaag

SEQ ID NO: 158835 - RNA, 19 nt, Artificial Sequence
  Description of Artificial Sequence: Synthetic oligonucleotide
  Antisense strand to SEQ ID NO: 158834
cuuaacaugcauuugagau

SEQ ID NO: 158836 - RNA, 19 nt, Artificial Sequence
  Description of Artificial Sequence: Synthetic oligonucleotide
  Sense strand starting at position 3827 of SEQ ID NO: 2045
gcaucuauacgaugaaaua

SEQ ID NO: 158837 - RNA, 19 nt, Artificial Sequence
  Description of Artificial Sequence: Synthetic oligonucleotide
  Antisense strand to SEQ ID NO: 158836
uauuucaucguauagaugc

SEQ ID NO: 158838 - RNA, 19 nt, Artificial Sequence
  Description of Artificial Sequence: Synthetic oligonucleotide
  Sense strand starting at position 3808 of SEQ ID NO: 2045
ggcuauacauaacugugau

SEQ ID NO: 158839 - RNA, 19 nt, Artificial Sequence
  Description of Artificial Sequence: Synthetic oligonucleotide
  Antisense strand to SEQ ID NO: 158838
aucacaguuauguauagcc

SEQ ID NO: 158840 - RNA, 19 nt, Artificial Sequence
  Description of Artificial Sequence: Synthetic oligonucleotide
  Sense strand starting at position 3719 of SEQ ID NO: 2045
gcaugagaguggccaaaua

SEQ ID NO: 158841 - RNA, 19 nt, Artificial Sequence
  Description of Artificial Sequence: Synthetic oligonucleotide
  Antisense strand to SEQ ID NO: 158840
uauuuggccacucucaugc

SEQ ID NO: 158842 - RNA, 19 nt, Artificial Sequence
  Description of Artificial Sequence: Synthetic oligonucleotide
  Sense strand starting at position 3710 of SEQ ID NO: 2045
auagauauagcaugagagu

SEQ ID NO: 158843 - RNA, 19 nt, Artificial Sequence
  Description of Artificial Sequence: Synthetic oligonucleotide
  Antisense strand to SEQ ID NO: 158842
acucucaugcuauaucuau

SEQ ID NO: 158844 - RNA, 19 nt, Artificial Sequence
  Description of Artificial Sequence: Synthetic oligonucleotide
  Sense strand starting at position 3592 of SEQ ID NO: 2045
gucauuagaaugugagaau

SEQ ID NO: 158845 - RNA, 19 nt, Artificial Sequence
  Description of Artificial Sequence: Synthetic oligonucleotide
  Antisense strand to SEQ ID NO: 158844
auucucacauucuaaugac

SEQ ID NO: 158846 - RNA, 19 nt, Artificial Sequence
  Description of Artificial Sequence: Synthetic oligonucleotide
  Sense strand starting at position 3393 of SEQ ID NO: 2045
agcuuauaucuaggguaaa

SEQ ID NO: 158847 - RNA, 19 nt, Artificial Sequence
  Description of Artificial Sequence: Synthetic oligonucleotide
  Antisense strand to SEQ ID NO: 158846
uuuacccuagauauaagcu

SEQ ID NO: 158848 - RNA, 19 nt, Artificial Sequence
  Description of Artificial Sequence: Synthetic oligonucleotide
  Sense strand starting at position 3288 of SEQ ID NO: 2045
gaugcagcugacgaugaau

SEQ ID NO: 158849 - RNA, 19 nt, Artificial Sequence
  Description of Artificial Sequence: Synthetic oligonucleotide
  Antisense strand to SEQ ID NO: 158848
auucaucgucagcugcauc

SEQ ID NO: 158850 - RNA, 19 nt, Artificial Sequence
  Description of Artificial Sequence: Synthetic oligonucleotide
  Sense strand starting at position 3266 of SEQ ID NO: 2045
aguaaugugcaauagucua

SEQ ID NO: 158851 - RNA, 19 nt, Artificial Sequence
  Description of Artificial Sequence: Synthetic oligonucleotide
  Antisense strand to SEQ ID NO: 158850
uagacuauugcacauuacu

SEQ ID NO: 158852 - RNA, 19 nt, Artificial Sequence
  Description of Artificial Sequence: Synthetic oligonucleotide
  Sense strand starting at position 3263 of SEQ ID NO: 2045
auuaguaaugugcaauagu

SEQ ID NO: 158853 - RNA, 19 nt, Artificial Sequence
  Description of Artificial Sequence: Synthetic oligonucleotide
  Antisense strand to SEQ ID NO: 158852
acuauugcacauuacuaau

SEQ ID NO: 158854 - RNA, 19 nt, Artificial Sequence
  Description of Artificial Sequence: Synthetic oligonucleotide
  Sense strand starting at position 3100 of SEQ ID NO: 2045
aucugaaacugaucaguag

SEQ ID NO: 158855 - RNA, 19 nt, Artificial Sequence
  Description of Artificial Sequence: Synthetic oligonucleotide
  Antisense strand to SEQ ID NO: 158854
cuacugaucaguuucagau

SEQ ID NO: 158856 - RNA, 19 nt, Artificial Sequence
  Description of Artificial Sequence: Synthetic oligonucleotide
  Sense strand starting at position 2979 of SEQ ID NO: 2045
gaugcauguuuaucagaca

SEQ ID NO: 158857 - RNA, 19 nt, Artificial Sequence
  Description of Artificial Sequence: Synthetic oligonucleotide
  Antisense strand to SEQ ID NO: 158856
ugucugauaaacaugcauc

SEQ ID NO: 158858 - RNA, 19 nt, Artificial Sequence
  Description of Artificial Sequence: Synthetic oligonucleotide
  Sense strand starting at position 2862 of SEQ ID NO: 2045
aggaaagaucuggguaagu

SEQ ID NO: 158859 - RNA, 19 nt, Artificial Sequence
  Description of Artificial Sequence: Synthetic oligonucleotide
  Antisense strand to SEQ ID NO: 158858
acuuacccagaucuuuccu

SEQ ID NO: 158860 - RNA, 19 nt, Artificial Sequence
  Description of Artificial Sequence: Synthetic oligonucleotide
  Sense strand starting at position 2626 of SEQ ID NO: 2045
aaugguaguguccacugaa

SEQ ID NO: 158861 - RNA, 19 nt, Artificial Sequence
  Description of Artificial Sequence: Synthetic oligonucleotide
  Antisense strand to SEQ ID NO: 158860
uucaguggacacuaccauu

SEQ ID NO: 158862 - RNA, 19 nt, Artificial Sequence
  Description of Artificial Sequence: Synthetic oligonucleotide
  Sense strand starting at position 2597 of SEQ ID NO: 2045
ggacaaucauugccugacu

SEQ ID NO: 158863 - RNA, 19 nt, Artificial Sequence
  Description of Artificial Sequence: Synthetic oligonucleotide
  Antisense strand to SEQ ID NO: 158862
agucaggcaaugauugucc

SEQ ID NO: 158864 - RNA, 19 nt, Artificial Sequence
  Description of Artificial Sequence: Synthetic oligonucleotide
  Sense strand starting at position 2396 of SEQ ID NO: 2045
cauuuacugugugcuggau

SEQ ID NO: 158865 - RNA, 19 nt, Artificial Sequence
  Description of Artificial Sequence: Synthetic oligonucleotide
  Antisense strand to SEQ ID NO: 158864
auccagcacacaguaaaug

SEQ ID NO: 158866 - RNA, 19 nt, Artificial Sequence
  Description of Artificial Sequence: Synthetic oligonucleotide
  Sense strand starting at position 2395 of SEQ ID NO: 2045
gcauuuacugugugcugga

SEQ ID NO: 158867 - RNA, 19 nt, Artificial Sequence
  Description of Artificial Sequence: Synthetic oligonucleotide
  Antisense strand to SEQ ID NO: 158866
uccagcacacaguaaaugc

SEQ ID NO: 158868 - RNA, 19 nt, Artificial Sequence
  Description of Artificial Sequence: Synthetic oligonucleotide
  Sense strand starting at position 2240 of SEQ ID NO: 2045
gugcacuuugacgacuaaa

SEQ ID NO: 158869 - RNA, 19 nt, Artificial Sequence
  Description of Artificial Sequence: Synthetic oligonucleotide
  Antisense strand to SEQ ID NO: 158868
uuuagucgucaaagugcac

SEQ ID NO: 158870 - RNA, 19 nt, Artificial Sequence
  Description of Artificial Sequence: Synthetic oligonucleotide
  Sense strand starting at position 1458 of SEQ ID NO: 2045
acccaaaucuacucgaaga

SEQ ID NO: 158871 - RNA, 19 nt, Artificial Sequence
  Description of Artificial Sequence: Synthetic oligonucleotide
  Antisense strand to SEQ ID NO: 158870
ucuucgaguagauuugggu

SEQ ID NO: 158872 - RNA, 19 nt, Artificial Sequence
  Description of Artificial Sequence: Synthetic oligonucleotide
  Sense strand starting at position 1228 of SEQ ID NO: 2045
guuauuuccagacgugcac

SEQ ID NO: 158873 - RNA, 19 nt, Artificial Sequence
  Description of Artificial Sequence: Synthetic oligonucleotide
  Antisense strand to SEQ ID NO: 158872
gugcacgucuggaaauaac

SEQ ID NO: 158874 - RNA, 19 nt, Artificial Sequence
  Description of Artificial Sequence: Synthetic oligonucleotide
  Sense strand starting at position 1226 of SEQ ID NO: 2045
gaguuauuuccagacgugc

SEQ ID NO: 158875 - RNA, 19 nt, Artificial Sequence
  Description of Artificial Sequence: Synthetic oligonucleotide
  Antisense strand to SEQ ID NO: 158874
gcacgucuggaaauaacuc

SEQ ID NO: 158876 - RNA, 19 nt, Artificial Sequence
  Description of Artificial Sequence: Synthetic oligonucleotide
  Sense strand starting at position 1170 of SEQ ID NO: 2045
ggguuaacggcagaagucu

SEQ ID NO: 158877 - RNA, 19 nt, Artificial Sequence
  Description of Artificial Sequence: Synthetic oligonucleotide
  Antisense strand to SEQ ID NO: 158876
agacuucugccguuaaccc

SEQ ID NO: 158878 - RNA, 19 nt, Artificial Sequence
  Description of Artificial Sequence: Synthetic oligonucleotide
  Sense strand starting at position 1146 of SEQ ID NO: 2045
cgaguacaaacugauguuu

SEQ ID NO: 158879 - RNA, 19 nt, Artificial Sequence
  Description of Artificial Sequence: Synthetic oligonucleotide
  Antisense strand to SEQ ID NO: 158878
aaacaucaguuuguacucg

SEQ ID NO: 158880 - RNA, 19 nt, Artificial Sequence
  Description of Artificial Sequence: Synthetic oligonucleotide
  Sense strand starting at position 1135 of SEQ ID NO: 2045
aagaauucucccgaguaca

SEQ ID NO: 158881 - RNA, 19 nt, Artificial Sequence
  Description of Artificial Sequence: Synthetic oligonucleotide
  Antisense strand to SEQ ID NO: 158880
uguacucgggagaauucuu

SEQ ID NO: 158882 - RNA, 19 nt, Artificial Sequence
  Description of Artificial Sequence: Synthetic oligonucleotide
  Sense strand starting at position 1122 of SEQ ID NO: 2045
gcgagucuaggacaagaau

SEQ ID NO: 158883 - RNA, 19 nt, Artificial Sequence
  Description of Artificial Sequence: Synthetic oligonucleotide
  Antisense strand to SEQ ID NO: 158882
auucuuguccuagacucgc

SEQ ID NO: 158884 - RNA, 19 nt, Artificial Sequence
  Description of Artificial Sequence: Synthetic oligonucleotide
  Sense strand starting at position 1088 of SEQ ID NO: 2045
gaacauggccuguagcaaa

SEQ ID NO: 158885 - RNA, 19 nt, Artificial Sequence
  Description of Artificial Sequence: Synthetic oligonucleotide
  Antisense strand to SEQ ID NO: 158884
uuugcuacaggccauguuc

SEQ ID NO: 158886 - RNA, 19 nt, Artificial Sequence
  Description of Artificial Sequence: Synthetic oligonucleotide
  Sense strand starting at position 917 of SEQ ID NO: 2045
uuguuaaaggugcaccaaa

SEQ ID NO: 158887 - RNA, 19 nt, Artificial Sequence
  Description of Artificial Sequence: Synthetic oligonucleotide
  Antisense strand to SEQ ID NO: 158886
uuuggugcaccuuuaacaa

SEQ ID NO: 158888 - RNA, 19 nt, Artificial Sequence
  Description of Artificial Sequence: Synthetic oligonucleotide
  Sense strand starting at position 885 of SEQ ID NO: 2045
aguuuauuucuaggcuuac

SEQ ID NO: 158889 - RNA, 19 nt, Artificial Sequence
  Description of Artificial Sequence: Synthetic oligonucleotide
  Antisense strand to SEQ ID NO: 158888
guaagccuagaaauaaacu

SEQ ID NO: 158890 - RNA, 19 nt, Artificial Sequence
  Description of Artificial Sequence: Synthetic oligonucleotide
  Sense strand starting at position 744 of SEQ ID NO: 2045
ggaguuuaccagcaaucau

SEQ ID NO: 158891 - RNA, 19 nt, Artificial Sequence
  Description of Artificial Sequence: Synthetic oligonucleotide
  Antisense strand to SEQ ID NO: 158890
augauugcugguaaacucc

SEQ ID NO: 158892 - RNA, 19 nt, Artificial Sequence
  Description of Artificial Sequence: Synthetic oligonucleotide
  Sense strand starting at position 718 of SEQ ID NO: 2045
ucaggauuauaaccgcaua

SEQ ID NO: 158893 - RNA, 19 nt, Artificial Sequence
  Description of Artificial Sequence: Synthetic oligonucleotide
  Antisense strand to SEQ ID NO: 158892
uaugcgguuauaauccuga

SEQ ID NO: 158894 - RNA, 19 nt, Artificial Sequence
  Description of Artificial Sequence: Synthetic oligonucleotide
  Sense strand starting at position 522 of SEQ ID NO: 2045
gguaauuacuaucugguag

SEQ ID NO: 158895 - RNA, 19 nt, Artificial Sequence
  Description of Artificial Sequence: Synthetic oligonucleotide
  Antisense strand to SEQ ID NO: 158894
cuaccagauaguaauuacc

SEQ ID NO: 158896 - RNA, 19 nt, Artificial Sequence
  Description of Artificial Sequence: Synthetic oligonucleotide
  Sense strand starting at position 454 of SEQ ID NO: 2045
ccuuucuuacuuggaaaga

SEQ ID NO: 158897 - RNA, 19 nt, Artificial Sequence
  Description of Artificial Sequence: Synthetic oligonucleotide
  Antisense strand to SEQ ID NO: 158896
ucuuuccaaguaagaaagg

SEQ ID NO: 158898 - RNA, 19 nt, Artificial Sequence
  Description of Artificial Sequence: Synthetic oligonucleotide
  Sense strand starting at position 432 of SEQ ID NO: 2045
acgggucauaagugaacaa

SEQ ID NO: 158899 - RNA, 19 nt, Artificial Sequence
  Description of Artificial Sequence: Synthetic oligonucleotide
  Antisense strand to SEQ ID NO: 158898
uuguucacuuaugacccgu

SEQ ID NO: 158900 - RNA, 19 nt, Artificial Sequence
  Description of Artificial Sequence: Synthetic oligonucleotide
  Sense strand starting at position 426 of SEQ ID NO: 2045
ugugaaacgggucauaagu

SEQ ID NO: 158901 - RNA, 19 nt, Artificial Sequence
  Description of Artificial Sequence: Synthetic oligonucleotide
  Antisense strand to SEQ ID NO: 158900
acuuaugacccguuucaca

SEQ ID NO: 158902 - RNA, 19 nt, Artificial Sequence
  Description of Artificial Sequence: Synthetic oligonucleotide
  Sense strand starting at position 342 of SEQ ID NO: 2045
agaguuccaacguaagcaa

SEQ ID NO: 158903 - RNA, 19 nt, Artificial Sequence
  Description of Artificial Sequence: Synthetic oligonucleotide
  Antisense strand to SEQ ID NO: 158902
uugcuuacguuggaacucu

SEQ ID NO: 158904 - RNA, 19 nt, Artificial Sequence
  Description of Artificial Sequence: Synthetic oligonucleotide
  Sense strand starting at position 289 of SEQ ID NO: 2045
cgaaguuaagcagaaggua

SEQ ID NO: 158905 - RNA, 19 nt, Artificial Sequence
  Description of Artificial Sequence: Synthetic oligonucleotide
  Antisense strand to SEQ ID NO: 158904
uaccuucugcuuaacuucg

SEQ ID NO: 158906 - RNA, 19 nt, Artificial Sequence
  Description of Artificial Sequence: Synthetic oligonucleotide
  Sense strand starting at position 234 of SEQ ID NO: 2045
agcugcucccugcauuuau

SEQ ID NO: 158907 - RNA, 19 nt, Artificial Sequence
  Description of Artificial Sequence: Synthetic oligonucleotide
  Antisense strand to SEQ ID NO: 158906
auaaaugcagggagcagcu

SEQ ID NO: 158908 - RNA, 19 nt, Artificial Sequence
  Description of Artificial Sequence: Synthetic oligonucleotide
  Sense strand starting at position 172 of SEQ ID NO: 2045
acggcagaucauuaaauca

SEQ ID NO: 158909 - RNA, 19 nt, Artificial Sequence
  Description of Artificial Sequence: Synthetic oligonucleotide
  Antisense strand to SEQ ID NO: 158908
ugauuuaaugaucugccgu

SEQ ID NO: 158910 - RNA, 19 nt, Artificial Sequence
  Description of Artificial Sequence: Synthetic oligonucleotide
  Sense strand starting at position 117 of SEQ ID NO: 2045
gcuguugggcugagaguuu

SEQ ID NO: 158911 - RNA, 19 nt, Artificial Sequence
  Description of Artificial Sequence: Synthetic oligonucleotide
  Antisense strand to SEQ ID NO: 158910
aaacucucagcccaacagc

SEQ ID NO: 158912 - RNA, 19 nt, Artificial Sequence
  Description of Artificial Sequence: Synthetic oligonucleotide
  Sense strand starting at position 77 of SEQ ID NO: 2045
ugugauaggucaucuacaa

SEQ ID NO: 158913 - RNA, 19 nt, Artificial Sequence
  Description of Artificial Sequence: Synthetic oligonucleotide
  Antisense strand to SEQ ID NO: 158912
uuguagaugaccuaucaca

SEQ ID NO: 158914 - RNA, 19 nt, Artificial Sequence
  Description of Artificial Sequence: Synthetic oligonucleotide
  Sense strand starting at position 3921 of SEQ ID NO: 2044
gcaugagaguggccaaaua

SEQ ID NO: 158915 - RNA, 19 nt, Artificial Sequence
  Description of Artificial Sequence: Synthetic oligonucleotide
  Antisense strand to SEQ ID NO: 158914
uauuuggccacucucaugc

SEQ ID NO: 158916 - RNA, 19 nt, Artificial Sequence
  Description of Artificial Sequence: Synthetic oligonucleotide
  Sense strand starting at position 3912 of SEQ ID NO: 2044
auagauauagcaugagagu

SEQ ID NO: 158917 - RNA, 19 nt, Artificial Sequence
  Description of Artificial Sequence: Synthetic oligonucleotide
  Antisense strand to SEQ ID NO: 158916
acucucaugcuauaucuau

SEQ ID NO: 158918 - RNA, 19 nt, Artificial Sequence
  Description of Artificial Sequence: Synthetic oligonucleotide
  Sense strand starting at position 3794 of SEQ ID NO: 2044
gucauuagaaugugagaau

SEQ ID NO: 158919 - RNA, 19 nt, Artificial Sequence
  Description of Artificial Sequence: Synthetic oligonucleotide
  Antisense strand to SEQ ID NO: 158918
auucucacauucuaaugac

SEQ ID NO: 158920 - RNA, 19 nt, Artificial Sequence
  Description of Artificial Sequence: Synthetic oligonucleotide
  Sense strand starting at position 3786 of SEQ ID NO: 2044
gccauauugucauuagaau

SEQ ID NO: 158921 - RNA, 19 nt, Artificial Sequence
  Description of Artificial Sequence: Synthetic oligonucleotide
  Antisense strand to SEQ ID NO: 158920
auucuaaugacaauauggc

SEQ ID NO: 158922 - RNA, 19 nt, Artificial Sequence
  Description of Artificial Sequence: Synthetic oligonucleotide
  Sense strand starting at position 3595 of SEQ ID NO: 2044
agcuuauaucuaggguaaa

SEQ ID NO: 158923 - RNA, 19 nt, Artificial Sequence
  Description of Artificial Sequence: Synthetic oligonucleotide
  Antisense strand to SEQ ID NO: 158922
uuuacccuagauauaagcu

SEQ ID NO: 158924 - RNA, 19 nt, Artificial Sequence
  Description of Artificial Sequence: Synthetic oligonucleotide
  Sense strand starting at position 3490 of SEQ ID NO: 2044
gaugcagcugacgaugaau

SEQ ID NO: 158925 - RNA, 19 nt, Artificial Sequence
  Description of Artificial Sequence: Synthetic oligonucleotide
  Antisense strand to SEQ ID NO: 158924
auucaucgucagcugcauc

SEQ ID NO: 158926 - RNA, 19 nt, Artificial Sequence
  Description of Artificial Sequence: Synthetic oligonucleotide
  Sense strand starting at position 3468 of SEQ ID NO: 2044
aguaaugugcaauagucua

SEQ ID NO: 158927 - RNA, 19 nt, Artificial Sequence
  Description of Artificial Sequence: Synthetic oligonucleotide
  Antisense strand to SEQ ID NO: 158926
uagacuauugcacauuacu

SEQ ID NO: 158928 - RNA, 19 nt, Artificial Sequence
  Description of Artificial Sequence: Synthetic oligonucleotide
  Sense strand starting at position 3465 of SEQ ID NO: 2044
auuaguaaugugcaauagu

SEQ ID NO: 158929 - RNA, 19 nt, Artificial Sequence
  Description of Artificial Sequence: Synthetic oligonucleotide
  Antisense strand to SEQ ID NO: 158928
acuauugcacauuacuaau

SEQ ID NO: 158930 - RNA, 19 nt, Artificial Sequence
  Description of Artificial Sequence: Synthetic oligonucleotide
  Sense strand starting at position 3302 of SEQ ID NO: 2044
aucugaaacugaucaguag

SEQ ID NO: 158931 - RNA, 19 nt, Artificial Sequence
  Description of Artificial Sequence: Synthetic oligonucleotide
  Antisense strand to SEQ ID NO: 158930
cuacugaucaguuucagau

SEQ ID NO: 158932 - RNA, 19 nt, Artificial Sequence
  Description of Artificial Sequence: Synthetic oligonucleotide
  Sense strand starting at position 3181 of SEQ ID NO: 2044
gaugcauguuuaucagaca

SEQ ID NO: 158933 - RNA, 19 nt, Artificial Sequence
  Description of Artificial Sequence: Synthetic oligonucleotide
  Antisense strand to SEQ ID NO: 158932
ugucugauaaacaugcauc

SEQ ID NO: 158934 - RNA, 19 nt, Artificial Sequence
  Description of Artificial Sequence: Synthetic oligonucleotide
  Sense strand starting at position 3083 of SEQ ID NO: 2044
gggagaaacugggaaugau

SEQ ID NO: 158935 - RNA, 19 nt, Artificial Sequence
  Description of Artificial Sequence: Synthetic oligonucleotide
  Antisense strand to SEQ ID NO: 158934
aucauucccaguuucuccc

SEQ ID NO: 158936 - RNA, 19 nt, Artificial Sequence
  Description of Artificial Sequence: Synthetic oligonucleotide
  Sense strand starting at position 3064 of SEQ ID NO: 2044
aggaaagaucuggguaagu

SEQ ID NO: 158937 - RNA, 19 nt, Artificial Sequence
  Description of Artificial Sequence: Synthetic oligonucleotide
  Antisense strand to SEQ ID NO: 158936
acuuacccagaucuuuccu

SEQ ID NO: 158938 - RNA, 19 nt, Artificial Sequence
  Description of Artificial Sequence: Synthetic oligonucleotide
  Sense strand starting at position 2828 of SEQ ID NO: 2044
aaugguaguguccacugaa

SEQ ID NO: 158939 - RNA, 19 nt, Artificial Sequence
  Description of Artificial Sequence: Synthetic oligonucleotide
  Antisense strand to SEQ ID NO: 158938
uucaguggacacuaccauu

SEQ ID NO: 158940 - RNA, 19 nt, Artificial Sequence
  Description of Artificial Sequence: Synthetic oligonucleotide
  Sense strand starting at position 2799 of SEQ ID NO: 2044
ggacaaucauugccugacu

SEQ ID NO: 158941 - RNA, 19 nt, Artificial Sequence
  Description of Artificial Sequence: Synthetic oligonucleotide
  Antisense strand to SEQ ID NO: 158940
agucaggcaaugauugucc

SEQ ID NO: 158942 - RNA, 19 nt, Artificial Sequence
  Description of Artificial Sequence: Synthetic oligonucleotide
  Sense strand starting at position 2598 of SEQ ID NO: 2044
cauuuacugugugcuggau

SEQ ID NO: 158943 - RNA, 19 nt, Artificial Sequence
  Description of Artificial Sequence: Synthetic oligonucleotide
  Antisense strand to SEQ ID NO: 158942
auccagcacacaguaaaug

SEQ ID NO: 158944 - RNA, 19 nt, Artificial Sequence
  Description of Artificial Sequence: Synthetic oligonucleotide
  Sense strand starting at position 2597 of SEQ ID NO: 2044
gcauuuacugugugcugga

SEQ ID NO: 158945 - RNA, 19 nt, Artificial Sequence
  Description of Artificial Sequence: Synthetic oligonucleotide
  Antisense strand to SEQ ID NO: 158944
uccagcacacaguaaaugc

SEQ ID NO: 158946 - RNA, 19 nt, Artificial Sequence
  Description of Artificial Sequence: Synthetic oligonucleotide
  Sense strand starting at position 2442 of SEQ ID NO: 2044
gugcacuuugacgacuaaa

SEQ ID NO: 158947 - RNA, 19 nt, Artificial Sequence
  Description of Artificial Sequence: Synthetic oligonucleotide
  Antisense strand to SEQ ID NO: 158946
uuuagucgucaaagugcac

SEQ ID NO: 158948 - RNA, 19 nt, Artificial Sequence
  Description of Artificial Sequence: Synthetic oligonucleotide
  Sense strand starting at position 1660 of SEQ ID NO: 2044
acccaaaucuacucgaaga

SEQ ID NO: 158949 - RNA, 19 nt, Artificial Sequence
  Description of Artificial Sequence: Synthetic oligonucleotide
  Antisense strand to SEQ ID NO: 158948
ucuucgaguagauuugggu

SEQ ID NO: 158950 - RNA, 19 nt, Artificial Sequence
  Description of Artificial Sequence: Synthetic oligonucleotide
  Sense strand starting at position 1430 of SEQ ID NO: 2044
guuauuuccagacgugcac

SEQ ID NO: 158951 - RNA, 19 nt, Artificial Sequence
  Description of Artificial Sequence: Synthetic oligonucleotide
  Antisense strand to SEQ ID NO: 158950
gugcacgucuggaaauaac

SEQ ID NO: 158952 - RNA, 19 nt, Artificial Sequence
  Description of Artificial Sequence: Synthetic oligonucleotide
  Sense strand starting at position 1428 of SEQ ID NO: 2044
gaguuauuuccagacgugc

SEQ ID NO: 158953 - RNA, 19 nt, Artificial Sequence
  Description of Artificial Sequence: Synthetic oligonucleotide
  Antisense strand to SEQ ID NO: 158952
gcacgucuggaaauaacuc

SEQ ID NO: 158954 - RNA, 19 nt, Artificial Sequence
  Description of Artificial Sequence: Synthetic oligonucleotide
  Sense strand starting at position 1372 of SEQ ID NO: 2044
ggguuaacggcagaagucu

SEQ ID NO: 158955 - RNA, 19 nt, Artificial Sequence
  Description of Artificial Sequence: Synthetic oligonucleotide
  Antisense strand to SEQ ID NO: 158954
agacuucugccguuaaccc

SEQ ID NO: 158956 - RNA, 19 nt, Artificial Sequence
  Description of Artificial Sequence: Synthetic oligonucleotide
  Sense strand starting at position 1348 of SEQ ID NO: 2044
cgaguacaaacugauguuu

SEQ ID NO: 158957 - RNA, 19 nt, Artificial Sequence
  Description of Artificial Sequence: Synthetic oligonucleotide
  Antisense strand to SEQ ID NO: 158956
aaacaucaguuuguacucg

SEQ ID NO: 158958 - RNA, 19 nt, Artificial Sequence
  Description of Artificial Sequence: Synthetic oligonucleotide
  Sense strand starting at position 1337 of SEQ ID NO: 2044
aagaauucucccgaguaca

SEQ ID NO: 158959 - RNA, 19 nt, Artificial Sequence
  Description of Artificial Sequence: Synthetic oligonucleotide
  Antisense strand to SEQ ID NO: 158958
uguacucgggagaauucuu

SEQ ID NO: 158960 - RNA, 19 nt, Artificial Sequence
  Description of Artificial Sequence: Synthetic oligonucleotide
  Sense strand starting at position 1324 of SEQ ID NO: 2044
gcgagucuaggacaagaau

SEQ ID NO: 158961 - RNA, 19 nt, Artificial Sequence
  Description of Artificial Sequence: Synthetic oligonucleotide
  Antisense strand to SEQ ID NO: 158960
auucuuguccuagacucgc

SEQ ID NO: 158962 - RNA, 19 nt, Artificial Sequence
  Description of Artificial Sequence: Synthetic oligonucleotide
  Sense strand starting at position 1290 of SEQ ID NO: 2044
gaacauggccuguagcaaa

SEQ ID NO: 158963 - RNA, 19 nt, Artificial Sequence
  Description of Artificial Sequence: Synthetic oligonucleotide
  Antisense strand to SEQ ID NO: 158962
uuugcuacaggccauguuc

SEQ ID NO: 158964 - RNA, 19 nt, Artificial Sequence
  Description of Artificial Sequence: Synthetic oligonucleotide
  Sense strand starting at position 1119 of SEQ ID NO: 2044
uuguuaaaggugcaccaaa

SEQ ID NO: 158965 - RNA, 19 nt, Artificial Sequence
  Description of Artificial Sequence: Synthetic oligonucleotide
  Antisense strand to SEQ ID NO: 158964
uuuggugcaccuuuaacaa

SEQ ID NO: 158966 - RNA, 19 nt, Artificial Sequence
  Description of Artificial Sequence: Synthetic oligonucleotide
  Sense strand starting at position 1087 of SEQ ID NO: 2044
aguuuauuucuaggcuuac

SEQ ID NO: 158967 - RNA, 19 nt, Artificial Sequence
  Description of Artificial Sequence: Synthetic oligonucleotide
  Antisense strand to SEQ ID NO: 158966
guaagccuagaaauaaacu

SEQ ID NO: 158968 - RNA, 19 nt, Artificial Sequence
  Description of Artificial Sequence: Synthetic oligonucleotide
  Sense strand starting at position 946 of SEQ ID NO: 2044
ggaguuuaccagcaaucau

SEQ ID NO: 158969 - RNA, 19 nt, Artificial Sequence
  Description of Artificial Sequence: Synthetic oligonucleotide
  Antisense strand to SEQ ID NO: 158968
augauugcugguaaacucc

SEQ ID NO: 158970 - RNA, 19 nt, Artificial Sequence
  Description of Artificial Sequence: Synthetic oligonucleotide
  Sense strand starting at position 920 of SEQ ID NO: 2044
ucaggauuauaaccgcaua

SEQ ID NO: 158971 - RNA, 19 nt, Artificial Sequence
  Description of Artificial Sequence: Synthetic oligonucleotide
  Antisense strand to SEQ ID NO: 158970
uaugcgguuauaauccuga

SEQ ID NO: 158972 - RNA, 19 nt, Artificial Sequence
  Description of Artificial Sequence: Synthetic oligonucleotide
  Sense strand starting at position 724 of SEQ ID NO: 2044
gguaauuacuaucugguag

SEQ ID NO: 158973 - RNA, 19 nt, Artificial Sequence
  Description of Artificial Sequence: Synthetic oligonucleotide
  Antisense strand to SEQ ID NO: 158972
cuaccagauaguaauuacc

SEQ ID NO: 158974 - RNA, 19 nt, Artificial Sequence
  Description of Artificial Sequence: Synthetic oligonucleotide
  Sense strand starting at position 656 of SEQ ID NO: 2044
ccuuucuuacuuggaaaga

SEQ ID NO: 158975 - RNA, 19 nt, Artificial Sequence
  Description of Artificial Sequence: Synthetic oligonucleotide
  Antisense strand to SEQ ID NO: 158974
ucuuuccaaguaagaaagg

SEQ ID NO: 158976 - RNA, 19 nt, Artificial Sequence
  Description of Artificial Sequence: Synthetic oligonucleotide
  Sense strand starting at position 634 of SEQ ID NO: 2044
acgggucauaagugaacaa

SEQ ID NO: 158977 - RNA, 19 nt, Artificial Sequence
  Description of Artificial Sequence: Synthetic oligonucleotide
  Antisense strand to SEQ ID NO: 158976
uuguucacuuaugacccgu

SEQ ID NO: 158978 - RNA, 19 nt, Artificial Sequence
  Description of Artificial Sequence: Synthetic oligonucleotide
  Sense strand starting at position 628 of SEQ ID NO: 2044
ugugaaacgggucauaagu

SEQ ID NO: 158979 - RNA, 19 nt, Artificial Sequence
  Description of Artificial Sequence: Synthetic oligonucleotide
  Antisense strand to SEQ ID NO: 158978
acuuaugacccguuucaca

SEQ ID NO: 158980 - RNA, 19 nt, Artificial Sequence
  Description of Artificial Sequence: Synthetic oligonucleotide
  Sense strand starting at position 625 of SEQ ID NO: 2044
cuaugugaaacgggucaua

SEQ ID NO: 158981 - RNA, 19 nt, Artificial Sequence
  Description of Artificial Sequence: Synthetic oligonucleotide
  Antisense strand to SEQ ID NO: 158980
uaugacccguuucacauag

SEQ ID NO: 158982 - RNA, 19 nt, Artificial Sequence
  Description of Artificial Sequence: Synthetic oligonucleotide
  Sense strand starting at position 544 of SEQ ID NO: 2044
agaguuccaacguaagcaa

SEQ ID NO: 158983 - RNA, 19 nt, Artificial Sequence
  Description of Artificial Sequence: Synthetic oligonucleotide
  Antisense strand to SEQ ID NO: 158982
uugcuuacguuggaacucu

SEQ ID NO: 158984 - RNA, 19 nt, Artificial Sequence
  Description of Artificial Sequence: Synthetic oligonucleotide
  Sense strand starting at position 491 of SEQ ID NO: 2044
cgaaguuaagcagaaggua

SEQ ID NO: 158985 - RNA, 19 nt, Artificial Sequence
  Description of Artificial Sequence: Synthetic oligonucleotide
  Antisense strand to SEQ ID NO: 158984
uaccuucugcuuaacuucg

SEQ ID NO: 158986 - RNA, 19 nt, Artificial Sequence
  Description of Artificial Sequence: Synthetic oligonucleotide
  Sense strand starting at position 436 of SEQ ID NO: 2044
agcugcucccugcauuuau

SEQ ID NO: 158987 - RNA, 19 nt, Artificial Sequence
  Description of Artificial Sequence: Synthetic oligonucleotide
  Antisense strand to SEQ ID NO: 158986
auaaaugcagggagcagcu

SEQ ID NO: 158988 - RNA, 19 nt, Artificial Sequence
  Description of Artificial Sequence: Synthetic oligonucleotide
  Sense strand starting at position 374 of SEQ ID NO: 2044
acggcagaucauuaaauca

SEQ ID NO: 158989 - RNA, 19 nt, Artificial Sequence
  Description of Artificial Sequence: Synthetic oligonucleotide
  Antisense strand to SEQ ID NO: 158988
ugauuuaaugaucugccgu

SEQ ID NO: 158990 - RNA, 19 nt, Artificial Sequence
  Description of Artificial Sequence: Synthetic oligonucleotide
  Sense strand starting at position 319 of SEQ ID NO: 2044
gcuguugggcugagaguuu

SEQ ID NO: 158991 - RNA, 19 nt, Artificial Sequence
  Description of Artificial Sequence: Synthetic oligonucleotide
  Antisense strand to SEQ ID NO: 158990
aaacucucagcccaacagc

SEQ ID NO: 158992 - RNA, 19 nt, Artificial Sequence
  Description of Artificial Sequence: Synthetic oligonucleotide
  Sense strand starting at position 279 of SEQ ID NO: 2044
ugugauaggucaucuacaa

SEQ ID NO: 158993 - RNA, 19 nt, Artificial Sequence
  Description of Artificial Sequence: Synthetic oligonucleotide
  Antisense strand to SEQ ID NO: 158992
uuguagaugaccuaucaca

SEQ ID NO: 158994 - RNA, 19 nt, Artificial Sequence
  Description of Artificial Sequence: Synthetic oligonucleotide
  Sense strand starting at position 377 of SEQ ID NO: 2046
uuuggaggacugugaaauc

SEQ ID NO: 158995 - RNA, 19 nt, Artificial Sequence
  Description of Artificial Sequence: Synthetic oligonucleotide
  Antisense strand to SEQ ID NO: 158994
gauuucacaguccuccaaa

SEQ ID NO: 158996 - RNA, 19 nt, Artificial Sequence
  Description of Artificial Sequence: Synthetic oligonucleotide
  Sense strand starting at position 454 of SEQ ID NO: 2046
ucgguagugcuucaauuug

SEQ ID NO: 158997 - RNA, 19 nt, Artificial Sequence
  Description of Artificial Sequence: Synthetic oligonucleotide
  Antisense strand to SEQ ID NO: 158996
caaauugaagcacuaccga

SEQ ID NO: 158998 - RNA, 19 nt, Artificial Sequence
  Description of Artificial Sequence: Synthetic oligonucleotide
  Sense strand starting at position 469 of SEQ ID NO: 2046
uuuggaaaguaucuucuaa

SEQ ID NO: 158999 - RNA, 19 nt, Artificial Sequence
  Description of Artificial Sequence: Synthetic oligonucleotide
  Antisense strand to SEQ ID NO: 158998
uuagaagauacuuuccaaa

SEQ ID NO: 159000 - RNA, 19 nt, Artificial Sequence
  Description of Artificial Sequence: Synthetic oligonucleotide
  Sense strand starting at position 471 of SEQ ID NO: 2046
uggaaaguaucuucuaaac

SEQ ID NO: 159001 - RNA, 19 nt, Artificial Sequence
  Description of Artificial Sequence: Synthetic oligonucleotide
  Antisense strand to SEQ ID NO: 159000
guuuagaagauacuuucca

SEQ ID NO: 159002 - RNA, 19 nt, Artificial Sequence
  Description of Artificial Sequence: Synthetic oligonucleotide
  Sense strand starting at position 632 of SEQ ID NO: 2046
aagaucaguguuggaacua

SEQ ID NO: 159003 - RNA, 19 nt, Artificial Sequence
  Description of Artificial Sequence: Synthetic oligonucleotide
  Antisense strand to SEQ ID NO: 159002
uaguuccaacacugaucuu

SEQ ID NO: 159004 - RNA, 19 nt, Artificial Sequence
  Description of Artificial Sequence: Synthetic oligonucleotide
  Sense strand starting at position 747 of SEQ ID NO: 2046
agugguuuaagacaagagu

SEQ ID NO: 159005 - RNA, 19 nt, Artificial Sequence
  Description of Artificial Sequence: Synthetic oligonucleotide
  Antisense strand to SEQ ID NO: 159004
acucuugucuuaaaccacu

SEQ ID NO: 159006 - RNA, 19 nt, Artificial Sequence
  Description of Artificial Sequence: Synthetic oligonucleotide
  Sense strand starting at position 909 of SEQ ID NO: 2046
gucuguucccaagauagau

SEQ ID NO: 159007 - RNA, 19 nt, Artificial Sequence
  Description of Artificial Sequence: Synthetic oligonucleotide
  Antisense strand to SEQ ID NO: 159006
aucuaucuugggaacagac

SEQ ID NO: 159008 - RNA, 19 nt, Artificial Sequence
  Description of Artificial Sequence: Synthetic oligonucleotide
  Sense strand starting at position 1060 of SEQ ID NO: 2046
cauagugaagucugaauau

SEQ ID NO: 159009 - RNA, 19 nt, Artificial Sequence
  Description of Artificial Sequence: Synthetic oligonucleotide
  Antisense strand to SEQ ID NO: 159008
auauucagacuucacuaug

SEQ ID NO: 159010 - RNA, 19 nt, Artificial Sequence
  Description of Artificial Sequence: Synthetic oligonucleotide
  Sense strand starting at position 1525 of SEQ ID NO: 2046
ggaguaugaacagguguga

SEQ ID NO: 159011 - RNA, 19 nt, Artificial Sequence
  Description of Artificial Sequence: Synthetic oligonucleotide
  Antisense strand to SEQ ID NO: 159010
ucacaccuguucauacucc

SEQ ID NO: 159012 - RNA, 19 nt, Artificial Sequence
  Description of Artificial Sequence: Synthetic oligonucleotide
  Sense strand starting at position 1539 of SEQ ID NO: 2046
ugugaauaccaguagguaa

SEQ ID NO: 159013 - RNA, 19 nt, Artificial Sequence
  Description of Artificial Sequence: Synthetic oligonucleotide
  Antisense strand to SEQ ID NO: 159012
uuaccuacugguauucaca

SEQ ID NO: 159014 - RNA, 19 nt, Artificial Sequence
  Description of Artificial Sequence: Synthetic oligonucleotide
  Sense strand starting at position 1579 of SEQ ID NO: 2046
acaucucagcccgaaauau

SEQ ID NO: 159015 - RNA, 19 nt, Artificial Sequence
  Description of Artificial Sequence: Synthetic oligonucleotide
  Antisense strand to SEQ ID NO: 159014
auauuucgggcugagaugu

SEQ ID NO: 159016 - RNA, 19 nt, Artificial Sequence
  Description of Artificial Sequence: Synthetic oligonucleotide
  Sense strand starting at position 1772 of SEQ ID NO: 2046
agugcucaguuccuaauuu

SEQ ID NO: 159017 - RNA, 19 nt, Artificial Sequence
  Description of Artificial Sequence: Synthetic oligonucleotide
  Antisense strand to SEQ ID NO: 159016
aaauuaggaacugagcacu

SEQ ID NO: 159018 - RNA, 19 nt, Artificial Sequence
  Description of Artificial Sequence: Synthetic oligonucleotide
  Sense strand starting at position 1828 of SEQ ID NO: 2046
uguauuucuugaguuguau

SEQ ID NO: 159019 - RNA, 19 nt, Artificial Sequence
  Description of Artificial Sequence: Synthetic oligonucleotide
  Antisense strand to SEQ ID NO: 159018
auacaacucaagaaauaca

SEQ ID NO: 159020 - RNA, 19 nt, Artificial Sequence
  Description of Artificial Sequence: Synthetic oligonucleotide
  Sense strand starting at position 1834 of SEQ ID NO: 2046
ucuugaguuguauagaaua

SEQ ID NO: 159021 - RNA, 19 nt, Artificial Sequence
  Description of Artificial Sequence: Synthetic oligonucleotide
  Antisense strand to SEQ ID NO: 159020
uauucuauacaacucaaga

SEQ ID NO: 159022 - RNA, 19 nt, Artificial Sequence
  Description of Artificial Sequence: Synthetic oligonucleotide
  Sense strand starting at position 1846 of SEQ ID NO: 2046
uagaauacguacuuaugaa

SEQ ID NO: 159023 - RNA, 19 nt, Artificial Sequence
  Description of Artificial Sequence: Synthetic oligonucleotide
  Antisense strand to SEQ ID NO: 159022
uucauaaguacguauucua

SEQ ID NO: 159024 - RNA, 19 nt, Artificial Sequence
  Description of Artificial Sequence: Synthetic oligonucleotide
  Sense strand starting at position 2105 of SEQ ID NO: 2046
aaaggagucacuuggagua

SEQ ID NO: 159025 - RNA, 19 nt, Artificial Sequence
  Description of Artificial Sequence: Synthetic oligonucleotide
  Antisense strand to SEQ ID NO: 159024
uacuccaagugacuccuuu

SEQ ID NO: 159026 - RNA, 19 nt, Artificial Sequence
  Description of Artificial Sequence: Synthetic oligonucleotide
  Sense strand starting at position 2143 of SEQ ID NO: 2046
gaacaaaguccuggagcua

SEQ ID NO: 159027 - RNA, 19 nt, Artificial Sequence
  Description of Artificial Sequence: Synthetic oligonucleotide
  Antisense strand to SEQ ID NO: 159026
uagcuccaggacuuuguuc

SEQ ID NO: 159028 - RNA, 19 nt, Artificial Sequence
  Description of Artificial Sequence: Synthetic oligonucleotide
  Sense strand starting at position 2144 of SEQ ID NO: 2046
aacaaaguccuggagcuau

SEQ ID NO: 159029 - RNA, 19 nt, Artificial Sequence
  Description of Artificial Sequence: Synthetic oligonucleotide
  Antisense strand to SEQ ID NO: 159028
auagcuccaggacuuuguu

SEQ ID NO: 159030 - RNA, 19 nt, Artificial Sequence
  Description of Artificial Sequence: Synthetic oligonucleotide
  Sense strand starting at position 2213 of SEQ ID NO: 2046
guggaaguaggccaugauu

SEQ ID NO: 159031 - RNA, 19 nt, Artificial Sequence
  Description of Artificial Sequence: Synthetic oligonucleotide
  Antisense strand to SEQ ID NO: 159030
aaucauggccuacuuccac

SEQ ID NO: 159032 - RNA, 19 nt, Artificial Sequence
  Description of Artificial Sequence: Synthetic oligonucleotide
  Sense strand starting at position 2254 of SEQ ID NO: 2046
auuugugucuuuccugaau

SEQ ID NO: 159033 - RNA, 19 nt, Artificial Sequence
  Description of Artificial Sequence: Synthetic oligonucleotide
  Antisense strand to SEQ ID NO: 159032
auucaggaaagacacaaau

SEQ ID NO: 159034 - RNA, 19 nt, Artificial Sequence
  Description of Artificial Sequence: Synthetic oligonucleotide
  Sense strand starting at position 2420 of SEQ ID NO: 2046
agcaguuaucauuaauaug

SEQ ID NO: 159035 - RNA, 19 nt, Artificial Sequence
  Description of Artificial Sequence: Synthetic oligonucleotide
  Antisense strand to SEQ ID NO: 159034
cauauuaaugauaacugcu

SEQ ID NO: 159036 - RNA, 19 nt, Artificial Sequence
  Description of Artificial Sequence: Synthetic oligonucleotide
  Sense strand starting at position 2453 of SEQ ID NO: 2046
auuugugaggucuguaauc

SEQ ID NO: 159037 - RNA, 19 nt, Artificial Sequence
  Description of Artificial Sequence: Synthetic oligonucleotide
  Antisense strand to SEQ ID NO: 159036
gauuacagaccucacaaau

SEQ ID NO: 159038 - RNA, 19 nt, Artificial Sequence
  Description of Artificial Sequence: Synthetic oligonucleotide
  Sense strand starting at position 2482 of SEQ ID NO: 2046
accugacagugauuaagua

SEQ ID NO: 159039 - RNA, 19 nt, Artificial Sequence
  Description of Artificial Sequence: Synthetic oligonucleotide
  Antisense strand to SEQ ID NO: 159038
uacuuaaucacugucaggu

SEQ ID NO: 159040 - RNA, 19 nt, Artificial Sequence
  Description of Artificial Sequence: Synthetic oligonucleotide
  Sense strand starting at position 2605 of SEQ ID NO: 2046
cuguguuugaaugagaaug

SEQ ID NO: 159041 - RNA, 19 nt, Artificial Sequence
  Description of Artificial Sequence: Synthetic oligonucleotide
  Antisense strand to SEQ ID NO: 159040
cauucucauucaaacacag

SEQ ID NO: 159042 - RNA, 19 nt, Artificial Sequence
  Description of Artificial Sequence: Synthetic oligonucleotide
  Sense strand starting at position 2610 of SEQ ID NO: 2046
uuugaaugagaauguuucu

SEQ ID NO: 159043 - RNA, 19 nt, Artificial Sequence
  Description of Artificial Sequence: Synthetic oligonucleotide
  Antisense strand to SEQ ID NO: 159042
agaaacauucucauucaaa

SEQ ID NO: 159044 - RNA, 19 nt, Artificial Sequence
  Description of Artificial Sequence: Synthetic oligonucleotide
  Sense strand starting at position 2613 of SEQ ID NO: 2046
gaaugagaauguuucucuu

SEQ ID NO: 159045 - RNA, 19 nt, Artificial Sequence
  Description of Artificial Sequence: Synthetic oligonucleotide
  Antisense strand to SEQ ID NO: 159044
aagagaaacauucucauuc

SEQ ID NO: 159046 - RNA, 19 nt, Artificial Sequence
  Description of Artificial Sequence: Synthetic oligonucleotide
  Sense strand starting at position 2616 of SEQ ID NO: 2046
ugagaauguuucucuugga

SEQ ID NO: 159047 - RNA, 19 nt, Artificial Sequence
  Description of Artificial Sequence: Synthetic oligonucleotide
  Antisense strand to SEQ ID NO: 159046
uccaagagaaacauucuca

SEQ ID NO: 159048 - RNA, 19 nt, Artificial Sequence
  Description of Artificial Sequence: Synthetic oligonucleotide
  Sense strand starting at position 2617 of SEQ ID NO: 2046
gagaauguuucucuuggaa

SEQ ID NO: 159049 - RNA, 19 nt, Artificial Sequence
  Description of Artificial Sequence: Synthetic oligonucleotide
  Antisense strand to SEQ ID NO: 159048
uuccaagagaaacauucuc

SEQ ID NO: 159050 - RNA, 19 nt, Artificial Sequence
  Description of Artificial Sequence: Synthetic oligonucleotide
  Sense strand starting at position 2883 of SEQ ID NO: 2046
ggaagugacuaaucuuauc

SEQ ID NO: 159051 - RNA, 19 nt, Artificial Sequence
  Description of Artificial Sequence: Synthetic oligonucleotide
  Antisense strand to SEQ ID NO: 159050
gauaagauuagucacuucc

SEQ ID NO: 159052 - RNA, 19 nt, Artificial Sequence
  Description of Artificial Sequence: Synthetic oligonucleotide
  Sense strand starting at position 2980 of SEQ ID NO: 2046
auaucucagccugaaauug

SEQ ID NO: 159053 - RNA, 19 nt, Artificial Sequence
  Description of Artificial Sequence: Synthetic oligonucleotide
  Antisense strand to SEQ ID NO: 159052
caauuucaggcugagauau

SEQ ID NO: 159054 - RNA, 19 nt, Artificial Sequence
  Description of Artificial Sequence: Synthetic oligonucleotide
  Sense strand starting at position 2989 of SEQ ID NO: 2046
ccugaaauugcauagguau

SEQ ID NO: 159055 - RNA, 19 nt, Artificial Sequence
  Description of Artificial Sequence: Synthetic oligonucleotide
  Antisense strand to SEQ ID NO: 159054
auaccuaugcaauuucagg

SEQ ID NO: 159056 - RNA, 19 nt, Artificial Sequence
  Description of Artificial Sequence: Synthetic oligonucleotide
  Sense strand starting at position 3027 of SEQ ID NO: 2046
aaauaacgugaguauaacu

SEQ ID NO: 159057 - RNA, 19 nt, Artificial Sequence
  Description of Artificial Sequence: Synthetic oligonucleotide
  Antisense strand to SEQ ID NO: 159056
aguuauacucacguuauuu

SEQ ID NO: 159058 - RNA, 19 nt, Artificial Sequence
  Description of Artificial Sequence: Synthetic oligonucleotide
  Sense strand starting at position 3065 of SEQ ID NO: 2046
agucuauuaggucaccuua

SEQ ID NO: 159059 - RNA, 19 nt, Artificial Sequence
  Description of Artificial Sequence: Synthetic oligonucleotide
  Antisense strand to SEQ ID NO: 159058
uaaggugaccuaauagacu

SEQ ID NO: 159060 - RNA, 19 nt, Artificial Sequence
  Description of Artificial Sequence: Synthetic oligonucleotide
  Sense strand starting at position 3458 of SEQ ID NO: 2046
gguauuaaucacuauguga

SEQ ID NO: 159061 - RNA, 19 nt, Artificial Sequence
  Description of Artificial Sequence: Synthetic oligonucleotide
  Antisense strand to SEQ ID NO: 159060
ucacauagugauuaauacc

SEQ ID NO: 159062 - RNA, 19 nt, Artificial Sequence
  Description of Artificial Sequence: Synthetic oligonucleotide
  Sense strand starting at position 3652 of SEQ ID NO: 2046
acacuuaaguaauugagca

SEQ ID NO: 159063 - RNA, 19 nt, Artificial Sequence
  Description of Artificial Sequence: Synthetic oligonucleotide
  Antisense strand to SEQ ID NO: 159062
ugcucaauuacuuaagugu

SEQ ID NO: 159064 - RNA, 19 nt, Artificial Sequence
  Description of Artificial Sequence: Synthetic oligonucleotide
  Sense strand starting at position 3656 of SEQ ID NO: 2046
uuaaguaauugagcaagaa

SEQ ID NO: 159065 - RNA, 19 nt, Artificial Sequence
  Description of Artificial Sequence: Synthetic oligonucleotide
  Antisense strand to SEQ ID NO: 159064
uucuugcucaauuacuuaa

SEQ ID NO: 159066 - RNA, 19 nt, Artificial Sequence
  Description of Artificial Sequence: Synthetic oligonucleotide
  Sense strand starting at position 3660 of SEQ ID NO: 2046
guaauugagcaagaagucu

SEQ ID NO: 159067 - RNA, 19 nt, Artificial Sequence
  Description of Artificial Sequence: Synthetic oligonucleotide
  Antisense strand to SEQ ID NO: 159066
agacuucuugcucaauuac

SEQ ID NO: 159068 - RNA, 19 nt, Artificial Sequence
  Description of Artificial Sequence: Synthetic oligonucleotide
  Sense strand starting at position 3939 of SEQ ID NO: 2046
ugcauuucucuuuggccaa

SEQ ID NO: 159069 - RNA, 19 nt, Artificial Sequence
  Description of Artificial Sequence: Synthetic oligonucleotide
  Antisense strand to SEQ ID NO: 159068
uuggccaaagagaaaugca

SEQ ID NO: 159070 - RNA, 19 nt, Artificial Sequence
  Description of Artificial Sequence: Synthetic oligonucleotide
  Sense strand starting at position 3952 of SEQ ID NO: 2046
ggccaauuucuaggcuuau

SEQ ID NO: 159071 - RNA, 19 nt, Artificial Sequence
  Description of Artificial Sequence: Synthetic oligonucleotide
  Antisense strand to SEQ ID NO: 159070
auaagccuagaaauuggcc

SEQ ID NO: 159072 - RNA, 19 nt, Artificial Sequence
  Description of Artificial Sequence: Synthetic oligonucleotide
  Sense strand starting at position 3953 of SEQ ID NO: 2046
gccaauuucuaggcuuaug

SEQ ID NO: 159073 - RNA, 19 nt, Artificial Sequence
  Description of Artificial Sequence: Synthetic oligonucleotide
  Antisense strand to SEQ ID NO: 159072
cauaagccuagaaauuggc

SEQ ID NO: 159074 - RNA, 19 nt, Artificial Sequence
  Description of Artificial Sequence: Synthetic oligonucleotide
  Sense strand starting at position 3964 of SEQ ID NO: 2047
gcucaaagaugcuccuuua

SEQ ID NO: 159075 - RNA, 19 nt, Artificial Sequence
  Description of Artificial Sequence: Synthetic oligonucleotide
  Antisense strand to SEQ ID NO: 159074
uaaaggagcaucuuugagc

SEQ ID NO: 159076 - RNA, 19 nt, Artificial Sequence
  Description of Artificial Sequence: Synthetic oligonucleotide
  Sense strand starting at position 3891 of SEQ ID NO: 2047
auagguuugcuuugggaua

SEQ ID NO: 159077 - RNA, 19 nt, Artificial Sequence
  Description of Artificial Sequence: Synthetic oligonucleotide
  Antisense strand to SEQ ID NO: 159076
uaucccaaagcaaaccuau

SEQ ID NO: 159078 - RNA, 19 nt, Artificial Sequence
  Description of Artificial Sequence: Synthetic oligonucleotide
  Sense strand starting at position 3880 of SEQ ID NO: 2047
gagugaaugccauagguuu

SEQ ID NO: 159079 - RNA, 19 nt, Artificial Sequence
  Description of Artificial Sequence: Synthetic oligonucleotide
  Antisense strand to SEQ ID NO: 159078
aaaccuauggcauucacuc

SEQ ID NO: 159080 - RNA, 19 nt, Artificial Sequence
  Description of Artificial Sequence: Synthetic oligonucleotide
  Sense strand starting at position 3868 of SEQ ID NO: 2047
aggugugugcuggagugaa

SEQ ID NO: 159081 - RNA, 19 nt, Artificial Sequence
  Description of Artificial Sequence: Synthetic oligonucleotide
  Antisense strand to SEQ ID NO: 159080
uucacuccagcacacaccu

SEQ ID NO: 159082 - RNA, 19 nt, Artificial Sequence
  Description of Artificial Sequence: Synthetic oligonucleotide
  Sense strand starting at position 3816 of SEQ ID NO: 2047
aguuucuagcuugagcgau

SEQ ID NO: 159083 - RNA, 19 nt, Artificial Sequence
  Description of Artificial Sequence: Synthetic oligonucleotide
  Antisense strand to SEQ ID NO: 159082
aucgcucaagcuagaaacu

SEQ ID NO: 159084 - RNA, 19 nt, Artificial Sequence
  Description of Artificial Sequence: Synthetic oligonucleotide
  Sense strand starting at position 3815 of SEQ ID NO: 2047
aaguuucuagcuugagcga

SEQ ID NO: 159085 - RNA, 19 nt, Artificial Sequence
  Description of Artificial Sequence: Synthetic oligonucleotide
  Antisense strand to SEQ ID NO: 159084
ucgcucaagcuagaaacuu

SEQ ID NO: 159086 - RNA, 19 nt, Artificial Sequence
  Description of Artificial Sequence: Synthetic oligonucleotide
  Sense strand starting at position 3631 of SEQ ID NO: 2047
ucauaaagcucagagugaa

SEQ ID NO: 159087 - RNA, 19 nt, Artificial Sequence
  Description of Artificial Sequence: Synthetic oligonucleotide
  Antisense strand to SEQ ID NO: 159086
uucacucugagcuuuauga

SEQ ID NO: 159088 - RNA, 19 nt, Artificial Sequence
  Description of Artificial Sequence: Synthetic oligonucleotide
  Sense strand starting at position 3591 of SEQ ID NO: 2047
gggaguggauggcaugaau

SEQ ID NO: 159089 - RNA, 19 nt, Artificial Sequence
  Description of Artificial Sequence: Synthetic oligonucleotide
  Antisense strand to SEQ ID NO: 159088
auucaugccauccacuccc

SEQ ID NO: 159090 - RNA, 19 nt, Artificial Sequence
  Description of Artificial Sequence: Synthetic oligonucleotide
  Sense strand starting at position 3203 of SEQ ID NO: 2047
uccaauaauuacggaugaa

SEQ ID NO: 159091 - RNA, 19 nt, Artificial Sequence
  Description of Artificial Sequence: Synthetic oligonucleotide
  Antisense strand to SEQ ID NO: 159090
uucauccguaauuauugga

SEQ ID NO: 159092 - RNA, 19 nt, Artificial Sequence
  Description of Artificial Sequence: Synthetic oligonucleotide
  Sense strand starting at position 3196 of SEQ ID NO: 2047
ggcugaguccaauaauuac

SEQ ID NO: 159093 - RNA, 19 nt, Artificial Sequence
  Description of Artificial Sequence: Synthetic oligonucleotide
  Antisense strand to SEQ ID NO: 159092
guaauuauuggacucagcc

SEQ ID NO: 159094 - RNA, 19 nt, Artificial Sequence
  Description of Artificial Sequence: Synthetic oligonucleotide
  Sense strand starting at position 3193 of SEQ ID NO: 2047
cugggcugaguccaauaau

SEQ ID NO: 159095 - RNA, 19 nt, Artificial Sequence
  Description of Artificial Sequence: Synthetic oligonucleotide
  Antisense strand to SEQ ID NO: 159094
auuauuggacucagcccag

SEQ ID NO: 159096 - RNA, 19 nt, Artificial Sequence
  Description of Artificial Sequence: Synthetic oligonucleotide
  Sense strand starting at position 2747 of SEQ ID NO: 2047
gguuguuggcgaguccuca

SEQ ID NO: 159097 - RNA, 19 nt, Artificial Sequence
  Description of Artificial Sequence: Synthetic oligonucleotide
  Antisense strand to SEQ ID NO: 159096
ugaggacucgccaacaacc

SEQ ID NO: 159098 - RNA, 19 nt, Artificial Sequence
  Description of Artificial Sequence: Synthetic oligonucleotide
  Sense strand starting at position 2676 of SEQ ID NO: 2047
auggcaaugcccuagagaa

SEQ ID NO: 159099 - RNA, 19 nt, Artificial Sequence
  Description of Artificial Sequence: Synthetic oligonucleotide
  Antisense strand to SEQ ID NO: 159098
uucucuagggcauugccau

SEQ ID NO: 159100 - RNA, 19 nt, Artificial Sequence
  Description of Artificial Sequence: Synthetic oligonucleotide
  Sense strand starting at position 2660 of SEQ ID NO: 2047
aaugguaugucagaagaug

SEQ ID NO: 159101 - RNA, 19 nt, Artificial Sequence
  Description of Artificial Sequence: Synthetic oligonucleotide
  Antisense strand to SEQ ID NO: 159100
caucuucugacauaccauu

SEQ ID NO: 159102 - RNA, 19 nt, Artificial Sequence
  Description of Artificial Sequence: Synthetic oligonucleotide
  Sense strand starting at position 2655 of SEQ ID NO: 2047
aaauaaaugguaugucaga

SEQ ID NO: 159103 - RNA, 19 nt, Artificial Sequence
  Description of Artificial Sequence: Synthetic oligonucleotide
  Antisense strand to SEQ ID NO: 159102
ucugacauaccauuuauuu

SEQ ID NO: 159104 - RNA, 19 nt, Artificial Sequence
  Description of Artificial Sequence: Synthetic oligonucleotide
  Sense strand starting at position 2266 of SEQ ID NO: 2047
acccauguguucgcggaua

SEQ ID NO: 159105 - RNA, 19 nt, Artificial Sequence
  Description of Artificial Sequence: Synthetic oligonucleotide
  Antisense strand to SEQ ID NO: 159104
uauccgcgaacacaugggu

SEQ ID NO: 159106 - RNA, 19 nt, Artificial Sequence
  Description of Artificial Sequence: Synthetic oligonucleotide
  Sense strand starting at position 2265 of SEQ ID NO: 2047
uacccauguguucgcggau

SEQ ID NO: 159107 - RNA, 19 nt, Artificial Sequence
  Description of Artificial Sequence: Synthetic oligonucleotide
  Antisense strand to SEQ ID NO: 159106
auccgcgaacacaugggua

SEQ ID NO: 159108 - RNA, 19 nt, Artificial Sequence
  Description of Artificial Sequence: Synthetic oligonucleotide
  Sense strand starting at position 1735 of SEQ ID NO: 2047
cuccguggacucugcaauu

SEQ ID NO: 159109 - RNA, 19 nt, Artificial Sequence
  Description of Artificial Sequence: Synthetic oligonucleotide
  Antisense strand to SEQ ID NO: 159108
aauugcagaguccacggag

SEQ ID NO: 159110 - RNA, 19 nt, Artificial Sequence
  Description of Artificial Sequence: Synthetic oligonucleotide
  Sense strand starting at position 1461 of SEQ ID NO: 2047
cggugcccucgcuaaguaa

SEQ ID NO: 159111 - RNA, 19 nt, Artificial Sequence
  Description of Artificial Sequence: Synthetic oligonucleotide
  Antisense strand to SEQ ID NO: 159110
uuacuuagcgagggcaccg

SEQ ID NO: 159112 - RNA, 19 nt, Artificial Sequence
  Description of Artificial Sequence: Synthetic oligonucleotide
  Sense strand starting at position 1432 of SEQ ID NO: 2047
ugcugacucgcucgggaaa

SEQ ID NO: 159113 - RNA, 19 nt, Artificial Sequence
  Description of Artificial Sequence: Synthetic oligonucleotide
  Antisense strand to SEQ ID NO: 159112
uuucccgagcgagucagca

SEQ ID NO: 159114 - RNA, 19 nt, Artificial Sequence
  Description of Artificial Sequence: Synthetic oligonucleotide
  Sense strand starting at position 1375 of SEQ ID NO: 2047
cugauugucgagggcagaa

SEQ ID NO: 159115 - RNA, 19 nt, Artificial Sequence
  Description of Artificial Sequence: Synthetic oligonucleotide
  Antisense strand to SEQ ID NO: 159114
uucugcccucgacaaucag

SEQ ID NO: 159116 - RNA, 19 nt, Artificial Sequence
  Description of Artificial Sequence: Synthetic oligonucleotide
  Sense strand starting at position 1374 of SEQ ID NO: 2047
gcugauugucgagggcaga

SEQ ID NO: 159117 - RNA, 19 nt, Artificial Sequence
  Description of Artificial Sequence: Synthetic oligonucleotide
  Antisense strand to SEQ ID NO: 159116
ucugcccucgacaaucagc

SEQ ID NO: 159118 - RNA, 19 nt, Artificial Sequence
  Description of Artificial Sequence: Synthetic oligonucleotide
  Sense strand starting at position 1367 of SEQ ID NO: 2047
agaaguugcugauugucga

SEQ ID NO: 159119 - RNA, 19 nt, Artificial Sequence
  Description of Artificial Sequence: Synthetic oligonucleotide
  Antisense strand to SEQ ID NO: 159118
ucgacaaucagcaacuucu

SEQ ID NO: 159120 - RNA, 19 nt, Artificial Sequence
  Description of Artificial Sequence: Synthetic oligonucleotide
  Sense strand starting at position 1365 of SEQ ID NO: 2047
agagaaguugcugauuguc

SEQ ID NO: 159121 - RNA, 19 nt, Artificial Sequence
  Description of Artificial Sequence: Synthetic oligonucleotide
  Antisense strand to SEQ ID NO: 159120
gacaaucagcaacuucucu

SEQ ID NO: 159122 - RNA, 19 nt, Artificial Sequence
  Description of Artificial Sequence: Synthetic oligonucleotide
  Sense strand starting at position 1344 of SEQ ID NO: 2047
gcugucacucuagaaauaa

SEQ ID NO: 159123 - RNA, 19 nt, Artificial Sequence
  Description of Artificial Sequence: Synthetic oligonucleotide
  Antisense strand to SEQ ID NO: 159122
uuauuucuagagugacagc

SEQ ID NO: 159124 - RNA, 19 nt, Artificial Sequence
  Description of Artificial Sequence: Synthetic oligonucleotide
  Sense strand starting at position 1306 of SEQ ID NO: 2047
ugacucugcuucccuguaa

SEQ ID NO: 159125 - RNA, 19 nt, Artificial Sequence
  Description of Artificial Sequence: Synthetic oligonucleotide
  Antisense strand to SEQ ID NO: 159124
uuacagggaagcagaguca

SEQ ID NO: 159126 - RNA, 19 nt, Artificial Sequence
  Description of Artificial Sequence: Synthetic oligonucleotide
  Sense strand starting at position 1189 of SEQ ID NO: 2047
uacugaaucguggccguuu

SEQ ID NO: 159127 - RNA, 19 nt, Artificial Sequence
  Description of Artificial Sequence: Synthetic oligonucleotide
  Antisense strand to SEQ ID NO: 159126
aaacggccacgauucagua

SEQ ID NO: 159128 - RNA, 19 nt, Artificial Sequence
  Description of Artificial Sequence: Synthetic oligonucleotide
  Sense strand starting at position 1176 of SEQ ID NO: 2047
uuaauaggcuaguuacuga

SEQ ID NO: 159129 - RNA, 19 nt, Artificial Sequence
  Description of Artificial Sequence: Synthetic oligonucleotide
  Antisense strand to SEQ ID NO: 159128
ucaguaacuagccuauuaa

SEQ ID NO: 159130 - RNA, 19 nt, Artificial Sequence
  Description of Artificial Sequence: Synthetic oligonucleotide
  Sense strand starting at position 718 of SEQ ID NO: 2047
cuuucuucucguuaugaaa

SEQ ID NO: 159131 - RNA, 19 nt, Artificial Sequence
  Description of Artificial Sequence: Synthetic oligonucleotide
  Antisense strand to SEQ ID NO: 159130
uuucauaacgagaagaaag

SEQ ID NO: 159132 - RNA, 19 nt, Artificial Sequence
  Description of Artificial Sequence: Synthetic oligonucleotide
  Sense strand starting at position 717 of SEQ ID NO: 2047
ucuuucuucucguuaugaa

SEQ ID NO: 159133 - RNA, 19 nt, Artificial Sequence
  Description of Artificial Sequence: Synthetic oligonucleotide
  Antisense strand to SEQ ID NO: 159132
uucauaacgagaagaaaga

SEQ ID NO: 159134 - RNA, 19 nt, Artificial Sequence
  Description of Artificial Sequence: Synthetic oligonucleotide
  Sense strand starting at position 714 of SEQ ID NO: 2047
auuucuuucuucucguuau

SEQ ID NO: 159135 - RNA, 19 nt, Artificial Sequence
  Description of Artificial Sequence: Synthetic oligonucleotide
  Antisense strand to SEQ ID NO: 159134
auaacgagaagaaagaaau

SEQ ID NO: 159136 - RNA, 19 nt, Artificial Sequence
  Description of Artificial Sequence: Synthetic oligonucleotide
  Sense strand starting at position 668 of SEQ ID NO: 2047
uuugaaugcuuacaaugau

SEQ ID NO: 159137 - RNA, 19 nt, Artificial Sequence
  Description of Artificial Sequence: Synthetic oligonucleotide
  Antisense strand to SEQ ID NO: 159136
aucauuguaagcauucaaa

SEQ ID NO: 159138 - RNA, 19 nt, Artificial Sequence
  Description of Artificial Sequence: Synthetic oligonucleotide
  Sense strand starting at position 656 of SEQ ID NO: 2047
augucaauguaguuugaau

SEQ ID NO: 159139 - RNA, 19 nt, Artificial Sequence
  Description of Artificial Sequence: Synthetic oligonucleotide
  Antisense strand to SEQ ID NO: 159138
auucaaacuacauugacau

SEQ ID NO: 159140 - RNA, 19 nt, Artificial Sequence
  Description of Artificial Sequence: Synthetic oligonucleotide
  Sense strand starting at position 629 of SEQ ID NO: 2047
gcggcaaaugauuaauaaa

SEQ ID NO: 159141 - RNA, 19 nt, Artificial Sequence
  Description of Artificial Sequence: Synthetic oligonucleotide
  Antisense strand to SEQ ID NO: 159140
uuuauuaaucauuugccgc

SEQ ID NO: 159142 - RNA, 19 nt, Artificial Sequence
  Description of Artificial Sequence: Synthetic oligonucleotide
  Sense strand starting at position 628 of SEQ ID NO: 2047
agcggcaaaugauuaauaa

SEQ ID NO: 159143 - RNA, 19 nt, Artificial Sequence
  Description of Artificial Sequence: Synthetic oligonucleotide
  Antisense strand to SEQ ID NO: 159142
uuauuaaucauuugccgcu

SEQ ID NO: 159144 - RNA, 19 nt, Artificial Sequence
  Description of Artificial Sequence: Synthetic oligonucleotide
  Sense strand starting at position 621 of SEQ ID NO: 2047
aaguuuaagcggcaaauga

SEQ ID NO: 159145 - RNA, 19 nt, Artificial Sequence
  Description of Artificial Sequence: Synthetic oligonucleotide
  Antisense strand to SEQ ID NO: 159144
ucauuugccgcuuaaacuu

SEQ ID NO: 159146 - RNA, 19 nt, Artificial Sequence
  Description of Artificial Sequence: Synthetic oligonucleotide
  Sense strand starting at position 619 of SEQ ID NO: 2047
ggaaguuuaagcggcaaau

SEQ ID NO: 159147 - RNA, 19 nt, Artificial Sequence
  Description of Artificial Sequence: Synthetic oligonucleotide
  Antisense strand to SEQ ID NO: 159146
auuugccgcuuaaacuucc

SEQ ID NO: 159148 - RNA, 19 nt, Artificial Sequence
  Description of Artificial Sequence: Synthetic oligonucleotide
  Sense strand starting at position 607 of SEQ ID NO: 2047
aacuguguugugggaaguu

SEQ ID NO: 159149 - RNA, 19 nt, Artificial Sequence
  Description of Artificial Sequence: Synthetic oligonucleotide
  Antisense strand to SEQ ID NO: 159148
aacuucccacaacacaguu

SEQ ID NO: 159150 - RNA, 19 nt, Artificial Sequence
  Description of Artificial Sequence: Synthetic oligonucleotide
  Sense strand starting at position 575 of SEQ ID NO: 2047
uacagaggaugcuuaaagu

SEQ ID NO: 159151 - RNA, 19 nt, Artificial Sequence
  Description of Artificial Sequence: Synthetic oligonucleotide
  Antisense strand to SEQ ID NO: 159150
acuuuaagcauccucugua

SEQ ID NO: 159152 - RNA, 19 nt, Artificial Sequence
  Description of Artificial Sequence: Synthetic oligonucleotide
  Sense strand starting at position 413 of SEQ ID NO: 2047
aguggaauuuaagaucaua

SEQ ID NO: 159153 - RNA, 19 nt, Artificial Sequence
  Description of Artificial Sequence: Synthetic oligonucleotide
  Antisense strand to SEQ ID NO: 159152
uaugaucuuaaauuccacu

SEQ ID NO: 159154 - RNA, 19 nt, Artificial Sequence
  Description of Artificial Sequence: Synthetic oligonucleotide
  Sense strand starting at position 505 of SEQ ID NO: 2048
ggcggucucugcucugaaa

SEQ ID NO: 159155 - RNA, 19 nt, Artificial Sequence
  Description of Artificial Sequence: Synthetic oligonucleotide
  Antisense strand to SEQ ID NO: 159154
uuucagagcagagaccgcc

SEQ ID NO: 159156 - RNA, 19 nt, Artificial Sequence
  Description of Artificial Sequence: Synthetic oligonucleotide
  Sense strand starting at position 531 of SEQ ID NO: 2048
ugcuaagugccucaggaaa

SEQ ID NO: 159157 - RNA, 19 nt, Artificial Sequence
  Description of Artificial Sequence: Synthetic oligonucleotide
  Antisense strand to SEQ ID NO: 159156
uuuccugaggcacuuagca

SEQ ID NO: 159158 - RNA, 19 nt, Artificial Sequence
  Description of Artificial Sequence: Synthetic oligonucleotide
  Sense strand starting at position 850 of SEQ ID NO: 2048
ucaagagugucugucagga

SEQ ID NO: 159159 - RNA, 19 nt, Artificial Sequence
  Description of Artificial Sequence: Synthetic oligonucleotide
  Antisense strand to SEQ ID NO: 159158
uccugacagacacucuuga

SEQ ID NO: 159160 - RNA, 19 nt, Artificial Sequence
  Description of Artificial Sequence: Synthetic oligonucleotide
  Sense strand starting at position 852 of SEQ ID NO: 2048
aagagugucugucaggaag

SEQ ID NO: 159161 - RNA, 19 nt, Artificial Sequence
  Description of Artificial Sequence: Synthetic oligonucleotide
  Antisense strand to SEQ ID NO: 159160
cuuccugacagacacucuu

SEQ ID NO: 159162 - RNA, 19 nt, Artificial Sequence
  Description of Artificial Sequence: Synthetic oligonucleotide
  Sense strand starting at position 854 of SEQ ID NO: 2048
gagugucugucaggaagau

SEQ ID NO: 159163 - RNA, 19 nt, Artificial Sequence
  Description of Artificial Sequence: Synthetic oligonucleotide
  Antisense strand to SEQ ID NO: 159162
aucuuccugacagacacuc

SEQ ID NO: 159164 - RNA, 19 nt, Artificial Sequence
  Description of Artificial Sequence: Synthetic oligonucleotide
  Sense strand starting at position 1013 of SEQ ID NO: 2048
ggcccagagcucugagaag

SEQ ID NO: 159165 - RNA, 19 nt, Artificial Sequence
  Description of Artificial Sequence: Synthetic oligonucleotide
  Antisense strand to SEQ ID NO: 159164
cuucucagagcucugggcc

SEQ ID NO: 159166 - RNA, 19 nt, Artificial Sequence
  Description of Artificial Sequence: Synthetic oligonucleotide
  Sense strand starting at position 1065 of SEQ ID NO: 2048
ccuguuugccguuugcaga

SEQ ID NO: 159167 - RNA, 19 nt, Artificial Sequence
  Description of Artificial Sequence: Synthetic oligonucleotide
  Antisense strand to SEQ ID NO: 159166
ucugcaaacggcaaacagg

SEQ ID NO: 159168 - RNA, 19 nt, Artificial Sequence
  Description of Artificial Sequence: Synthetic oligonucleotide
  Sense strand starting at position 1066 of SEQ ID NO: 2048
cuguuugccguuugcagaa

SEQ ID NO: 159169 - RNA, 19 nt, Artificial Sequence
  Description of Artificial Sequence: Synthetic oligonucleotide
  Antisense strand to SEQ ID NO: 159168
uucugcaaacggcaaacag

SEQ ID NO: 159170 - RNA, 19 nt, Artificial Sequence
  Description of Artificial Sequence: Synthetic oligonucleotide
  Sense strand starting at position 2239 of SEQ ID NO: 2048
accaaacauuuaggugaaa

SEQ ID NO: 159171 - RNA, 19 nt, Artificial Sequence
  Description of Artificial Sequence: Synthetic oligonucleotide
  Antisense strand to SEQ ID NO: 159170
uuucaccuaaauguuuggu

SEQ ID NO: 159172 - RNA, 19 nt, Artificial Sequence
  Description of Artificial Sequence: Synthetic oligonucleotide
  Sense strand starting at position 2400 of SEQ ID NO: 2048
gucacauucucuccgaauu

SEQ ID NO: 159173 - RNA, 19 nt, Artificial Sequence
  Description of Artificial Sequence: Synthetic oligonucleotide
  Antisense strand to SEQ ID NO: 159172
aauucggagagaaugugac

SEQ ID NO: 159174 - RNA, 19 nt, Artificial Sequence
  Description of Artificial Sequence: Synthetic oligonucleotide
  Sense strand starting at position 2467 of SEQ ID NO: 2048
cccucuuucugcgcugaaa

SEQ ID NO: 159175 - RNA, 19 nt, Artificial Sequence
  Description of Artificial Sequence: Synthetic oligonucleotide
  Antisense strand to SEQ ID NO: 159174
uuucagcgcagaaagaggg

SEQ ID NO: 159176 - RNA, 19 nt, Artificial Sequence
  Description of Artificial Sequence: Synthetic oligonucleotide
  Sense strand starting at position 2536 of SEQ ID NO: 2048
augauaaauugccaaugaa

SEQ ID NO: 159177 - RNA, 19 nt, Artificial Sequence
  Description of Artificial Sequence: Synthetic oligonucleotide
  Antisense strand to SEQ ID NO: 159176
uucauuggcaauuuaucau

SEQ ID NO: 159178 - RNA, 19 nt, Artificial Sequence
  Description of Artificial Sequence: Synthetic oligonucleotide
  Sense strand starting at position 2589 of SEQ ID NO: 2048
acagauaccuguuccagaa

SEQ ID NO: 159179 - RNA, 19 nt, Artificial Sequence
  Description of Artificial Sequence: Synthetic oligonucleotide
  Antisense strand to SEQ ID NO: 159178
uucuggaacagguaucugu

SEQ ID NO: 159180 - RNA, 19 nt, Artificial Sequence
  Description of Artificial Sequence: Synthetic oligonucleotide
  Sense strand starting at position 2599 of SEQ ID NO: 2048
guuccagaaugucuuugau

SEQ ID NO: 159181 - RNA, 19 nt, Artificial Sequence
  Description of Artificial Sequence: Synthetic oligonucleotide
  Antisense strand to SEQ ID NO: 159180
aucaaagacauucuggaac

SEQ ID NO: 159182 - RNA, 19 nt, Artificial Sequence
  Description of Artificial Sequence: Synthetic oligonucleotide
  Sense strand starting at position 2603 of SEQ ID NO: 2048
cagaaugucuuugauggag

SEQ ID NO: 159183 - RNA, 19 nt, Artificial Sequence
  Description of Artificial Sequence: Synthetic oligonucleotide
  Antisense strand to SEQ ID NO: 159182
cuccaucaaagacauucug

SEQ ID NO: 159184 - RNA, 19 nt, Artificial Sequence
  Description of Artificial Sequence: Synthetic oligonucleotide
  Sense strand starting at position 2705 of SEQ ID NO: 2048
ccaauuuaguuggauuguu

SEQ ID NO: 159185 - RNA, 19 nt, Artificial Sequence
  Description of Artificial Sequence: Synthetic oligonucleotide
  Antisense strand to SEQ ID NO: 159184
aacaauccaacuaaauugg

SEQ ID NO: 159186 - RNA, 19 nt, Artificial Sequence
  Description of Artificial Sequence: Synthetic oligonucleotide
  Sense strand starting at position 2714 of SEQ ID NO: 2048
uuggauuguugacuugaau

SEQ ID NO: 159187 - RNA, 19 nt, Artificial Sequence
  Description of Artificial Sequence: Synthetic oligonucleotide
  Antisense strand to SEQ ID NO: 159186
auucaagucaacaauccaa

SEQ ID NO: 159188 - RNA, 19 nt, Artificial Sequence
  Description of Artificial Sequence: Synthetic oligonucleotide
  Sense strand starting at position 2744 of SEQ ID NO: 2048
ccaggaagaugccuucgaa

SEQ ID NO: 159189 - RNA, 19 nt, Artificial Sequence
  Description of Artificial Sequence: Synthetic oligonucleotide
  Antisense strand to SEQ ID NO: 159188
uucgaaggcaucuuccugg

SEQ ID NO: 159190 - RNA, 19 nt, Artificial Sequence
  Description of Artificial Sequence: Synthetic oligonucleotide
  Sense strand starting at position 2825 of SEQ ID NO: 2048
ugugucaacagccguauaa

SEQ ID NO: 159191 - RNA, 19 nt, Artificial Sequence
  Description of Artificial Sequence: Synthetic oligonucleotide
  Antisense strand to SEQ ID NO: 159190
uuauacggcuguugacaca

SEQ ID NO: 159192 - RNA, 19 nt, Artificial Sequence
  Description of Artificial Sequence: Synthetic oligonucleotide
  Sense strand starting at position 3147 of SEQ ID NO: 2048
uuuccaaagucuuuggcau

SEQ ID NO: 159193 - RNA, 19 nt, Artificial Sequence
  Description of Artificial Sequence: Synthetic oligonucleotide
  Antisense strand to SEQ ID NO: 159192
augccaaagacuuuggaaa

SEQ ID NO: 159194 - RNA, 19 nt, Artificial Sequence
  Description of Artificial Sequence: Synthetic oligonucleotide
  Sense strand starting at position 3148 of SEQ ID NO: 2048
uuccaaagucuuuggcaua

SEQ ID NO: 159195 - RNA, 19 nt, Artificial Sequence
  Description of Artificial Sequence: Synthetic oligonucleotide
  Antisense strand to SEQ ID NO: 159194
uaugccaaagacuuuggaa

SEQ ID NO: 159196 - RNA, 19 nt, Artificial Sequence
  Description of Artificial Sequence: Synthetic oligonucleotide
  Sense strand starting at position 3224 of SEQ ID NO: 2048
cccucuccuccaggaaaga

SEQ ID NO: 159197 - RNA, 19 nt, Artificial Sequence
  Description of Artificial Sequence: Synthetic oligonucleotide
  Antisense strand to SEQ ID NO: 159196
ucuuuccuggaggagaggg

SEQ ID NO: 159198 - RNA, 19 nt, Artificial Sequence
  Description of Artificial Sequence: Synthetic oligonucleotide
  Sense strand starting at position 3295 of SEQ ID NO: 2048
gagaguggacggugguauu

SEQ ID NO: 159199 - RNA, 19 nt, Artificial Sequence
  Description of Artificial Sequence: Synthetic oligonucleotide
  Antisense strand to SEQ ID NO: 159198
aauaccaccguccacucuc

SEQ ID NO: 159200 - RNA, 19 nt, Artificial Sequence
  Description of Artificial Sequence: Synthetic oligonucleotide
  Sense strand starting at position 3341 of SEQ ID NO: 2048
acaugagagaguugucgca

SEQ ID NO: 159201 - RNA, 19 nt, Artificial Sequence
  Description of Artificial Sequence: Synthetic oligonucleotide
  Antisense strand to SEQ ID NO: 159200
ugcgacaacucucucaugu

SEQ ID NO: 159202 - RNA, 19 nt, Artificial Sequence
  Description of Artificial Sequence: Synthetic oligonucleotide
  Sense strand starting at position 3422 of SEQ ID NO: 2048
ugugcuuuaugccuuauga

SEQ ID NO: 159203 - RNA, 19 nt, Artificial Sequence
  Description of Artificial Sequence: Synthetic oligonucleotide
  Antisense strand to SEQ ID NO: 159202
ucauaaggcauaaagcaca

SEQ ID NO: 159204 - RNA, 19 nt, Artificial Sequence
  Description of Artificial Sequence: Synthetic oligonucleotide
  Sense strand starting at position 3424 of SEQ ID NO: 2048
ugcuuuaugccuuaugaca

SEQ ID NO: 159205 - RNA, 19 nt, Artificial Sequence
  Description of Artificial Sequence: Synthetic oligonucleotide
  Antisense strand to SEQ ID NO: 159204
ugucauaaggcauaaagca

SEQ ID NO: 159206 - RNA, 19 nt, Artificial Sequence
  Description of Artificial Sequence: Synthetic oligonucleotide
  Sense strand starting at position 3581 of SEQ ID NO: 2048
agggcucucugcucugaaa

SEQ ID NO: 159207 - RNA, 19 nt, Artificial Sequence
  Description of Artificial Sequence: Synthetic oligonucleotide
  Antisense strand to SEQ ID NO: 159206
uuucagagcagagagcccu

SEQ ID NO: 159208 - RNA, 19 nt, Artificial Sequence
  Description of Artificial Sequence: Synthetic oligonucleotide
  Sense strand starting at position 3604 of SEQ ID NO: 2048
cccucuuucugcugaugua

SEQ ID NO: 159209 - RNA, 19 nt, Artificial Sequence
  Description of Artificial Sequence: Synthetic oligonucleotide
  Antisense strand to SEQ ID NO: 159208
uacaucagcagaaagaggg

SEQ ID NO: 159210 - RNA, 19 nt, Artificial Sequence
  Description of Artificial Sequence: Synthetic oligonucleotide
  Sense strand starting at position 3617 of SEQ ID NO: 2048
gauguagccucauguuaua

SEQ ID NO: 159211 - RNA, 19 nt, Artificial Sequence
  Description of Artificial Sequence: Synthetic oligonucleotide
  Antisense strand to SEQ ID NO: 159210
uauaacaugaggcuacauc

SEQ ID NO: 159212 - RNA, 19 nt, Artificial Sequence
  Description of Artificial Sequence: Synthetic oligonucleotide
  Sense strand starting at position 3620 of SEQ ID NO: 2048
guagccucauguuauaaua

SEQ ID NO: 159213 - RNA, 19 nt, Artificial Sequence
  Description of Artificial Sequence: Synthetic oligonucleotide
  Antisense strand to SEQ ID NO: 159212
uauuauaacaugaggcuac

SEQ ID NO: 159214 - RNA, 19 nt, Artificial Sequence
  Description of Artificial Sequence: Synthetic oligonucleotide
  Sense strand starting at position 3940 of SEQ ID NO: 2049
gccucagccugguaaagga

SEQ ID NO: 159215 - RNA, 19 nt, Artificial Sequence
  Description of Artificial Sequence: Synthetic oligonucleotide
  Antisense strand to SEQ ID NO: 159214
uccuuuaccaggcugaggc

SEQ ID NO: 159216 - RNA, 19 nt, Artificial Sequence
  Description of Artificial Sequence: Synthetic oligonucleotide
  Sense strand starting at position 3937 of SEQ ID NO: 2049
ucagccucagccugguaaa

SEQ ID NO: 159217 - RNA, 19 nt, Artificial Sequence
  Description of Artificial Sequence: Synthetic oligonucleotide
  Antisense strand to SEQ ID NO: 159216
uuuaccaggcugaggcuga

SEQ ID NO: 159218 - RNA, 19 nt, Artificial Sequence
  Description of Artificial Sequence: Synthetic oligonucleotide
  Sense strand starting at position 3853 of SEQ ID NO: 2049
ggucaucugcaaggugaga

SEQ ID NO: 159219 - RNA, 19 nt, Artificial Sequence
  Description of Artificial Sequence: Synthetic oligonucleotide
  Antisense strand to SEQ ID NO: 159218
ucucaccuugcagaugacc

SEQ ID NO: 159220 - RNA, 19 nt, Artificial Sequence
  Description of Artificial Sequence: Synthetic oligonucleotide
  Sense strand starting at position 2836 of SEQ ID NO: 2049
acacauucuuuggagagaa

SEQ ID NO: 159221 - RNA, 19 nt, Artificial Sequence
  Description of Artificial Sequence: Synthetic oligonucleotide
  Antisense strand to SEQ ID NO: 159220
uucucuccaaagaaugugu

SEQ ID NO: 159222 - RNA, 19 nt, Artificial Sequence
  Description of Artificial Sequence: Synthetic oligonucleotide
  Sense strand starting at position 2833 of SEQ ID NO: 2049
ggcacacauucuuuggaga

SEQ ID NO: 159223 - RNA, 19 nt, Artificial Sequence
  Description of Artificial Sequence: Synthetic oligonucleotide
  Antisense strand to SEQ ID NO: 159222
ucuccaaagaaugugugcc

SEQ ID NO: 159224 - RNA, 19 nt, Artificial Sequence
  Description of Artificial Sequence: Synthetic oligonucleotide
  Sense strand starting at position 2651 of SEQ ID NO: 2049
gaguaccugaaugguagua

SEQ ID NO: 159225 - RNA, 19 nt, Artificial Sequence
  Description of Artificial Sequence: Synthetic oligonucleotide
  Antisense strand to SEQ ID NO: 159224
uacuaccauucagguacuc

SEQ ID NO: 159226 - RNA, 19 nt, Artificial Sequence
  Description of Artificial Sequence: Synthetic oligonucleotide
  Sense strand starting at position 2650 of SEQ ID NO: 2049
ugaguaccugaaugguagu

SEQ ID NO: 159227 - RNA, 19 nt, Artificial Sequence
  Description of Artificial Sequence: Synthetic oligonucleotide
  Antisense strand to SEQ ID NO: 159226
acuaccauucagguacuca

SEQ ID NO: 159228 - RNA, 19 nt, Artificial Sequence
  Description of Artificial Sequence: Synthetic oligonucleotide
  Sense strand starting at position 2647 of SEQ ID NO: 2049
gcgugaguaccugaauggu

SEQ ID NO: 159229 - RNA, 19 nt, Artificial Sequence
  Description of Artificial Sequence: Synthetic oligonucleotide
  Antisense strand to SEQ ID NO: 159228
accauucagguacucacgc

SEQ ID NO: 159230 - RNA, 19 nt, Artificial Sequence
  Description of Artificial Sequence: Synthetic oligonucleotide
  Sense strand starting at position 2533 of SEQ ID NO: 2049
acuuguuacugggaacuuu

SEQ ID NO: 159231 - RNA, 19 nt, Artificial Sequence
  Description of Artificial Sequence: Synthetic oligonucleotide
  Antisense strand to SEQ ID NO: 159230
aaaguucccaguaacaagu

SEQ ID NO: 159232 - RNA, 19 nt, Artificial Sequence
  Description of Artificial Sequence: Synthetic oligonucleotide
  Sense strand starting at position 2467 of SEQ ID NO: 2049
ucgggucaacuuuacauga

SEQ ID NO: 159233 - RNA, 19 nt, Artificial Sequence
  Description of Artificial Sequence: Synthetic oligonucleotide
  Antisense strand to SEQ ID NO: 159232
ucauguaaaguugacccga

SEQ ID NO: 159234 - RNA, 19 nt, Artificial Sequence
  Description of Artificial Sequence: Synthetic oligonucleotide
  Sense strand starting at position 1504 of SEQ ID NO: 2049
ugagguccgagcuguaaug

SEQ ID NO: 159235 - RNA, 19 nt, Artificial Sequence
  Description of Artificial Sequence: Synthetic oligonucleotide
  Antisense strand to SEQ ID NO: 159234
cauuacagcucggaccuca

SEQ ID NO: 159236 - RNA, 19 nt, Artificial Sequence
  Description of Artificial Sequence: Synthetic oligonucleotide
  Sense strand starting at position 1501 of SEQ ID NO: 2049
gccugagguccgagcugua

SEQ ID NO: 159237 - RNA, 19 nt, Artificial Sequence
  Description of Artificial Sequence: Synthetic oligonucleotide
  Antisense strand to SEQ ID NO: 159236
uacagcucggaccucaggc

SEQ ID NO: 159238 - RNA, 19 nt, Artificial Sequence
  Description of Artificial Sequence: Synthetic oligonucleotide
  Sense strand starting at position 798 of SEQ ID NO: 2049
guguuugcccugccagcaa

SEQ ID NO: 159239 - RNA, 19 nt, Artificial Sequence
  Description of Artificial Sequence: Synthetic oligonucleotide
  Antisense strand to SEQ ID NO: 159238
uugcuggcagggcaaacac

SEQ ID NO: 159240 - RNA, 19 nt, Artificial Sequence
  Description of Artificial Sequence: Synthetic oligonucleotide
  Sense strand starting at position 780 of SEQ ID NO: 2049
acagucuucuaggaaauag

SEQ ID NO: 159241 - RNA, 19 nt, Artificial Sequence
  Description of Artificial Sequence: Synthetic oligonucleotide
  Antisense strand to SEQ ID NO: 159240
cuauuuccuagaagacugu

SEQ ID NO: 159242 - RNA, 19 nt, Artificial Sequence
  Description of Artificial Sequence: Synthetic oligonucleotide
  Sense strand starting at position 777 of SEQ ID NO: 2049
guuacagucuucuaggaaa

SEQ ID NO: 159243 - RNA, 19 nt, Artificial Sequence
  Description of Artificial Sequence: Synthetic oligonucleotide
  Antisense strand to SEQ ID NO: 159242
uuuccuagaagacuguaac

SEQ ID NO: 159244 - RNA, 19 nt, Artificial Sequence
  Description of Artificial Sequence: Synthetic oligonucleotide
  Sense strand starting at position 775 of SEQ ID NO: 2049
cuguuacagucuucuagga

SEQ ID NO: 159245 - RNA, 19 nt, Artificial Sequence
  Description of Artificial Sequence: Synthetic oligonucleotide
  Antisense strand to SEQ ID NO: 159244
uccuagaagacuguaacag

SEQ ID NO: 159246 - RNA, 19 nt, Artificial Sequence
  Description of Artificial Sequence: Synthetic oligonucleotide
  Sense strand starting at position 764 of SEQ ID NO: 2049
ggcagugccagcuguuaca

SEQ ID NO: 159247 - RNA, 19 nt, Artificial Sequence
  Description of Artificial Sequence: Synthetic oligonucleotide
  Antisense strand to SEQ ID NO: 159246
uguaacagcuggcacugcc

SEQ ID NO: 159248 - RNA, 19 nt, Artificial Sequence
  Description of Artificial Sequence: Synthetic oligonucleotide
  Sense strand starting at position 561 of SEQ ID NO: 2049
ggcccuggcucugaaagaa

SEQ ID NO: 159249 - RNA, 19 nt, Artificial Sequence
  Description of Artificial Sequence: Synthetic oligonucleotide
  Antisense strand to SEQ ID NO: 159248
uucuuucagagccagggcc

SEQ ID NO: 159250 - RNA, 19 nt, Artificial Sequence
  Description of Artificial Sequence: Synthetic oligonucleotide
  Sense strand starting at position 515 of SEQ ID NO: 2049
gugauuuagcagggacgca

SEQ ID NO: 159251 - RNA, 19 nt, Artificial Sequence
  Description of Artificial Sequence: Synthetic oligonucleotide
  Antisense strand to SEQ ID NO: 159250
ugcgucccugcuaaaucac

SEQ ID NO: 159252 - RNA, 19 nt, Artificial Sequence
  Description of Artificial Sequence: Synthetic oligonucleotide
  Sense strand starting at position 507 of SEQ ID NO: 2049
augcuugugugauuuagca

SEQ ID NO: 159253 - RNA, 19 nt, Artificial Sequence
  Description of Artificial Sequence: Synthetic oligonucleotide
  Antisense strand to SEQ ID NO: 159252
ugcuaaaucacacaagcau

SEQ ID NO: 159254 - RNA, 19 nt, Artificial Sequence
  Description of Artificial Sequence: Synthetic oligonucleotide
  Sense strand starting at position 503 of SEQ ID NO: 2049
auaaaugcuugugugauuu

SEQ ID NO: 159255 - RNA, 19 nt, Artificial Sequence
  Description of Artificial Sequence: Synthetic oligonucleotide
  Antisense strand to SEQ ID NO: 159254
aaaucacacaagcauuuau

SEQ ID NO: 159256 - RNA, 19 nt, Artificial Sequence
  Description of Artificial Sequence: Synthetic oligonucleotide
  Sense strand starting at position 502 of SEQ ID NO: 2049
cauaaaugcuugugugauu

SEQ ID NO: 159257 - RNA, 19 nt, Artificial Sequence
  Description of Artificial Sequence: Synthetic oligonucleotide
  Antisense strand to SEQ ID NO: 159256
aaucacacaagcauuuaug

SEQ ID NO: 159258 - RNA, 19 nt, Artificial Sequence
  Description of Artificial Sequence: Synthetic oligonucleotide
  Sense strand starting at position 449 of SEQ ID NO: 2049
gggagauaaauauguguuu

SEQ ID NO: 159259 - RNA, 19 nt, Artificial Sequence
  Description of Artificial Sequence: Synthetic oligonucleotide
  Antisense strand to SEQ ID NO: 159258
aaacacauauuuaucuccc

SEQ ID NO: 159260 - RNA, 19 nt, Artificial Sequence
  Description of Artificial Sequence: Synthetic oligonucleotide
  Sense strand starting at position 408 of SEQ ID NO: 2049
auaggaaagucuuauccac

SEQ ID NO: 159261 - RNA, 19 nt, Artificial Sequence
  Description of Artificial Sequence: Synthetic oligonucleotide
  Antisense strand to SEQ ID NO: 159260
guggauaagacuuuccuau

SEQ ID NO: 159262 - RNA, 19 nt, Artificial Sequence
  Description of Artificial Sequence: Synthetic oligonucleotide
  Sense strand starting at position 397 of SEQ ID NO: 2049
ccaccaacuugauaggaaa

SEQ ID NO: 159263 - RNA, 19 nt, Artificial Sequence
  Description of Artificial Sequence: Synthetic oligonucleotide
  Antisense strand to SEQ ID NO: 159262
uuuccuaucaaguuggugg

SEQ ID NO: 159264 - RNA, 19 nt, Artificial Sequence
  Description of Artificial Sequence: Synthetic oligonucleotide
  Sense strand starting at position 295 of SEQ ID NO: 2049
acuucccugcuagaguuaa

SEQ ID NO: 159265 - RNA, 19 nt, Artificial Sequence
  Description of Artificial Sequence: Synthetic oligonucleotide
  Antisense strand to SEQ ID NO: 159264
uuaacucuagcagggaagu

SEQ ID NO: 159266 - RNA, 19 nt, Artificial Sequence
  Description of Artificial Sequence: Synthetic oligonucleotide
  Sense strand starting at position 293 of SEQ ID NO: 2049
ugacuucccugcuagaguu

SEQ ID NO: 159267 - RNA, 19 nt, Artificial Sequence
  Description of Artificial Sequence: Synthetic oligonucleotide
  Antisense strand to SEQ ID NO: 159266
aacucuagcagggaaguca

SEQ ID NO: 159268 - RNA, 19 nt, Artificial Sequence
  Description of Artificial Sequence: Synthetic oligonucleotide
  Sense strand starting at position 290 of SEQ ID NO: 2049
cucugacuucccugcuaga

SEQ ID NO: 159269 - RNA, 19 nt, Artificial Sequence
  Description of Artificial Sequence: Synthetic oligonucleotide
  Antisense strand to SEQ ID NO: 159268
ucuagcagggaagucagag

SEQ ID NO: 159270 - RNA, 19 nt, Artificial Sequence
  Description of Artificial Sequence: Synthetic oligonucleotide
  Sense strand starting at position 41 of SEQ ID NO: 2049
augagagccugacucuuau

SEQ ID NO: 159271 - RNA, 19 nt, Artificial Sequence
  Description of Artificial Sequence: Synthetic oligonucleotide
  Antisense strand to SEQ ID NO: 159270
auaagagucaggcucucau

SEQ ID NO: 159272 - RNA, 19 nt, Artificial Sequence
  Description of Artificial Sequence: Synthetic oligonucleotide
  Sense strand starting at position 39 of SEQ ID NO: 2049
cuaugagagccugacucuu

SEQ ID NO: 159273 - RNA, 19 nt, Artificial Sequence
  Description of Artificial Sequence: Synthetic oligonucleotide
  Antisense strand to SEQ ID NO: 159272
aagagucaggcucucauag

SEQ ID NO: 159274 - RNA, 19 nt, Artificial Sequence
  Description of Artificial Sequence: Synthetic oligonucleotide
  Sense strand starting at position 23 of SEQ ID NO: 2049
aagccauaguauuuggcua

SEQ ID NO: 159275 - RNA, 19 nt, Artificial Sequence
  Description of Artificial Sequence: Synthetic oligonucleotide
  Antisense strand to SEQ ID NO: 159274
uagccaaauacuauggcuu

SEQ ID NO: 159276 - RNA, 19 nt, Artificial Sequence
  Description of Artificial Sequence: Synthetic oligonucleotide
  Sense strand starting at position 15 of SEQ ID NO: 2049
gggacuguaagccauagua

SEQ ID NO: 159277 - RNA, 19 nt, Artificial Sequence
  Description of Artificial Sequence: Synthetic oligonucleotide
  Antisense strand to SEQ ID NO: 159276
uacuauggcuuacaguccc

SEQ ID NO: 159278 - RNA, 19 nt, Artificial Sequence
  Description of Artificial Sequence: Synthetic oligonucleotide
  Sense strand starting at position 3872 of SEQ ID NO: 2050
agaaaccuuugcuggaaga

SEQ ID NO: 159279 - RNA, 19 nt, Artificial Sequence
  Description of Artificial Sequence: Synthetic oligonucleotide
  Antisense strand to SEQ ID NO: 159278
ucuuccagcaaagguuucu

SEQ ID NO: 159280 - RNA, 19 nt, Artificial Sequence
  Description of Artificial Sequence: Synthetic oligonucleotide
  Sense strand starting at position 3869 of SEQ ID NO: 2050
auaagaaaccuuugcugga

SEQ ID NO: 159281 - RNA, 19 nt, Artificial Sequence
  Description of Artificial Sequence: Synthetic oligonucleotide
  Antisense strand to SEQ ID NO: 159280
uccagcaaagguuucuuau

SEQ ID NO: 159282 - RNA, 19 nt, Artificial Sequence
  Description of Artificial Sequence: Synthetic oligonucleotide
  Sense strand starting at position 3834 of SEQ ID NO: 2050
uggguuuggcugcaagaua

SEQ ID NO: 159283 - RNA, 19 nt, Artificial Sequence
  Description of Artificial Sequence: Synthetic oligonucleotide
  Antisense strand to SEQ ID NO: 159282
uaucuugcagccaaaccca

SEQ ID NO: 159284 - RNA, 19 nt, Artificial Sequence
  Description of Artificial Sequence: Synthetic oligonucleotide
  Sense strand starting at position 3663 of SEQ ID NO: 2050
gagggcuguaaguaugagu

SEQ ID NO: 159285 - RNA, 19 nt, Artificial Sequence
  Description of Artificial Sequence: Synthetic oligonucleotide
  Antisense strand to SEQ ID NO: 159284
acucauacuuacagcccuc

SEQ ID NO: 159286 - RNA, 19 nt, Artificial Sequence
  Description of Artificial Sequence: Synthetic oligonucleotide
  Sense strand starting at position 3659 of SEQ ID NO: 2050
ggcagagggcuguaaguau

SEQ ID NO: 159287 - RNA, 19 nt, Artificial Sequence
  Description of Artificial Sequence: Synthetic oligonucleotide
  Antisense strand to SEQ ID NO: 159286
auacuuacagcccucugcc

SEQ ID NO: 159288 - RNA, 19 nt, Artificial Sequence
  Description of Artificial Sequence: Synthetic oligonucleotide
  Sense strand starting at position 3621 of SEQ ID NO: 2050
agacaagagugguaguaga

SEQ ID NO: 159289 - RNA, 19 nt, Artificial Sequence
  Description of Artificial Sequence: Synthetic oligonucleotide
  Antisense strand to SEQ ID NO: 159288
ucuacuaccacucuugucu

SEQ ID NO: 159290 - RNA, 19 nt, Artificial Sequence
  Description of Artificial Sequence: Synthetic oligonucleotide
  Sense strand starting at position 3605 of SEQ ID NO: 2050
aggacugugagcugaaaga

SEQ ID NO: 159291 - RNA, 19 nt, Artificial Sequence
  Description of Artificial Sequence: Synthetic oligonucleotide
  Antisense strand to SEQ ID NO: 159290
ucuuucagcucacaguccu

SEQ ID NO: 159292 - RNA, 19 nt, Artificial Sequence
  Description of Artificial Sequence: Synthetic oligonucleotide
  Sense strand starting at position 3603 of SEQ ID NO: 2050
ugaggacugugagcugaaa

SEQ ID NO: 159293 - RNA, 19 nt, Artificial Sequence
  Description of Artificial Sequence: Synthetic oligonucleotide
  Antisense strand to SEQ ID NO: 159292
uuucagcucacaguccuca

SEQ ID NO: 159294 - RNA, 19 nt, Artificial Sequence
  Description of Artificial Sequence: Synthetic oligonucleotide
  Sense strand starting at position 3472 of SEQ ID NO: 2050
gccucagccugguaaagga

SEQ ID NO: 159295 - RNA, 19 nt, Artificial Sequence
  Description of Artificial Sequence: Synthetic oligonucleotide
  Antisense strand to SEQ ID NO: 159294
uccuuuaccaggcugaggc

SEQ ID NO: 159296 - RNA, 19 nt, Artificial Sequence
  Description of Artificial Sequence: Synthetic oligonucleotide
  Sense strand starting at position 3469 of SEQ ID NO: 2050
ucagccucagccugguaaa

SEQ ID NO: 159297 - RNA, 19 nt, Artificial Sequence
  Description of Artificial Sequence: Synthetic oligonucleotide
  Antisense strand to SEQ ID NO: 159296
uuuaccaggcugaggcuga

SEQ ID NO: 159298 - RNA, 19 nt, Artificial Sequence
  Description of Artificial Sequence: Synthetic oligonucleotide
  Sense strand starting at position 3385 of SEQ ID NO: 2050
ggucaucugcaaggugaga

SEQ ID NO: 159299 - RNA, 19 nt, Artificial Sequence
  Description of Artificial Sequence: Synthetic oligonucleotide
  Antisense strand to SEQ ID NO: 159298
ucucaccuugcagaugacc

SEQ ID NO: 159300 - RNA, 19 nt, Artificial Sequence
  Description of Artificial Sequence: Synthetic oligonucleotide
  Sense strand starting at position 2368 of SEQ ID NO: 2050
acacauucuuuggagagaa

SEQ ID NO: 159301 - RNA, 19 nt, Artificial Sequence
  Description of Artificial Sequence: Synthetic oligonucleotide
  Antisense strand to SEQ ID NO: 159300
uucucuccaaagaaugugu

SEQ ID NO: 159302 - RNA, 19 nt, Artificial Sequence
  Description of Artificial Sequence: Synthetic oligonucleotide
  Sense strand starting at position 2365 of SEQ ID NO: 2050
ggcacacauucuuuggaga

SEQ ID NO: 159303 - RNA, 19 nt, Artificial Sequence
  Description of Artificial Sequence: Synthetic oligonucleotide
  Antisense strand to SEQ ID NO: 159302
ucuccaaagaaugugugcc

SEQ ID NO: 159304 - RNA, 19 nt, Artificial Sequence
  Description of Artificial Sequence: Synthetic oligonucleotide
  Sense strand starting at position 2183 of SEQ ID NO: 2050
gaguaccugaaugguagua

SEQ ID NO: 159305 - RNA, 19 nt, Artificial Sequence
  Description of Artificial Sequence: Synthetic oligonucleotide
  Antisense strand to SEQ ID NO: 159304
uacuaccauucagguacuc

SEQ ID NO: 159306 - RNA, 19 nt, Artificial Sequence
  Description of Artificial Sequence: Synthetic oligonucleotide
  Sense strand starting at position 2182 of SEQ ID NO: 2050
ugaguaccugaaugguagu

SEQ ID NO: 159307 - RNA, 19 nt, Artificial Sequence
  Description of Artificial Sequence: Synthetic oligonucleotide
  Antisense strand to SEQ ID NO: 159306
acuaccauucagguacuca

SEQ ID NO: 159308 - RNA, 19 nt, Artificial Sequence
  Description of Artificial Sequence: Synthetic oligonucleotide
  Sense strand starting at position 2179 of SEQ ID NO: 2050
gcgugaguaccugaauggu

SEQ ID NO: 159309 - RNA, 19 nt, Artificial Sequence
  Description of Artificial Sequence: Synthetic oligonucleotide
  Antisense strand to SEQ ID NO: 159308
accauucagguacucacgc

SEQ ID NO: 159310 - RNA, 19 nt, Artificial Sequence
  Description of Artificial Sequence: Synthetic oligonucleotide
  Sense strand starting at position 2065 of SEQ ID NO: 2050
acuuguuacugggaacuuu

SEQ ID NO: 159311 - RNA, 19 nt, Artificial Sequence
  Description of Artificial Sequence: Synthetic oligonucleotide
  Antisense strand to SEQ ID NO: 159310
aaaguucccaguaacaagu

SEQ ID NO: 159312 - RNA, 19 nt, Artificial Sequence
  Description of Artificial Sequence: Synthetic oligonucleotide
  Sense strand starting at position 1999 of SEQ ID NO: 2050
ucgggucaacuuuacauga

SEQ ID NO: 159313 - RNA, 19 nt, Artificial Sequence
  Description of Artificial Sequence: Synthetic oligonucleotide
  Antisense strand to SEQ ID NO: 159312
ucauguaaaguugacccga

SEQ ID NO: 159314 - RNA, 19 nt, Artificial Sequence
  Description of Artificial Sequence: Synthetic oligonucleotide
  Sense strand starting at position 1036 of SEQ ID NO: 2050
ugagguccgagcuguaaug

SEQ ID NO: 159315 - RNA, 19 nt, Artificial Sequence
  Description of Artificial Sequence: Synthetic oligonucleotide
  Antisense strand to SEQ ID NO: 159314
cauuacagcucggaccuca

SEQ ID NO: 159316 - RNA, 19 nt, Artificial Sequence
  Description of Artificial Sequence: Synthetic oligonucleotide
  Sense strand starting at position 1033 of SEQ ID NO: 2050
gccugagguccgagcugua

SEQ ID NO: 159317 - RNA, 19 nt, Artificial Sequence
  Description of Artificial Sequence: Synthetic oligonucleotide
  Antisense strand to SEQ ID NO: 159316
uacagcucggaccucaggc

SEQ ID NO: 159318 - RNA, 19 nt, Artificial Sequence
  Description of Artificial Sequence: Synthetic oligonucleotide
  Sense strand starting at position 330 of SEQ ID NO: 2050
guguuugcccugccagcaa

SEQ ID NO: 159319 - RNA, 19 nt, Artificial Sequence
  Description of Artificial Sequence: Synthetic oligonucleotide
  Antisense strand to SEQ ID NO: 159318
uugcuggcagggcaaacac

SEQ ID NO: 159320 - RNA, 19 nt, Artificial Sequence
  Description of Artificial Sequence: Synthetic oligonucleotide
  Sense strand starting at position 312 of SEQ ID NO: 2050
acagucuucuaggaaauag

SEQ ID NO: 159321 - RNA, 19 nt, Artificial Sequence
  Description of Artificial Sequence: Synthetic oligonucleotide
  Antisense strand to SEQ ID NO: 159320
cuauuuccuagaagacugu

SEQ ID NO: 159322 - RNA, 19 nt, Artificial Sequence
  Description of Artificial Sequence: Synthetic oligonucleotide
  Sense strand starting at position 309 of SEQ ID NO: 2050
guuacagucuucuaggaaa

SEQ ID NO: 159323 - RNA, 19 nt, Artificial Sequence
  Description of Artificial Sequence: Synthetic oligonucleotide
  Antisense strand to SEQ ID NO: 159322
uuuccuagaagacuguaac

SEQ ID NO: 159324 - RNA, 19 nt, Artificial Sequence
  Description of Artificial Sequence: Synthetic oligonucleotide
  Sense strand starting at position 307 of SEQ ID NO: 2050
cuguuacagucuucuagga

SEQ ID NO: 159325 - RNA, 19 nt, Artificial Sequence
  Description of Artificial Sequence: Synthetic oligonucleotide
  Antisense strand to SEQ ID NO: 159324
uccuagaagacuguaacag

SEQ ID NO: 159326 - RNA, 19 nt, Artificial Sequence
  Description of Artificial Sequence: Synthetic oligonucleotide
  Sense strand starting at position 296 of SEQ ID NO: 2050
ggcagugccagcuguuaca

SEQ ID NO: 159327 - RNA, 19 nt, Artificial Sequence
  Description of Artificial Sequence: Synthetic oligonucleotide
  Antisense strand to SEQ ID NO: 159326
uguaacagcuggcacugcc

SEQ ID NO: 159328 - RNA, 19 nt, Artificial Sequence
  Description of Artificial Sequence: Synthetic oligonucleotide
  Sense strand starting at position 93 of SEQ ID NO: 2050
ggcccuggcucugaaagaa

SEQ ID NO: 159329 - RNA, 19 nt, Artificial Sequence
  Description of Artificial Sequence: Synthetic oligonucleotide
  Antisense strand to SEQ ID NO: 159328
uucuuucagagccagggcc

SEQ ID NO: 159330 - RNA, 19 nt, Artificial Sequence
  Description of Artificial Sequence: Synthetic oligonucleotide
  Sense strand starting at position 47 of SEQ ID NO: 2050
gugauuuagcagggacgca

SEQ ID NO: 159331 - RNA, 19 nt, Artificial Sequence
  Description of Artificial Sequence: Synthetic oligonucleotide
  Antisense strand to SEQ ID NO: 159330
ugcgucccugcuaaaucac

SEQ ID NO: 159332 - RNA, 19 nt, Artificial Sequence
  Description of Artificial Sequence: Synthetic oligonucleotide
  Sense strand starting at position 39 of SEQ ID NO: 2050
augcuugugugauuuagca

SEQ ID NO: 159333 - RNA, 19 nt, Artificial Sequence
  Description of Artificial Sequence: Synthetic oligonucleotide
  Antisense strand to SEQ ID NO: 159332
ugcuaaaucacacaagcau

SEQ ID NO: 159334 - RNA, 19 nt, Artificial Sequence
  Description of Artificial Sequence: Synthetic oligonucleotide
  Sense strand starting at position 35 of SEQ ID NO: 2050
auaaaugcuugugugauuu

SEQ ID NO: 159335 - RNA, 19 nt, Artificial Sequence
  Description of Artificial Sequence: Synthetic oligonucleotide
  Antisense strand to SEQ ID NO: 159334
aaaucacacaagcauuuau

SEQ ID NO: 159336 - RNA, 19 nt, Artificial Sequence
  Description of Artificial Sequence: Synthetic oligonucleotide
  Sense strand starting at position 34 of SEQ ID NO: 2050
cauaaaugcuugugugauu

SEQ ID NO: 159337 - RNA, 19 nt, Artificial Sequence
  Description of Artificial Sequence: Synthetic oligonucleotide
  Antisense strand to SEQ ID NO: 159336
aaucacacaagcauuuaug

SEQ ID NO: 159338 - RNA, 19 nt, Artificial Sequence
  Description of Artificial Sequence: Synthetic oligonucleotide
  Sense strand starting at position 3908 of SEQ ID NO: 2051
ugggaucaguaccuuauaa

SEQ ID NO: 159339 - RNA, 19 nt, Artificial Sequence
  Description of Artificial Sequence: Synthetic oligonucleotide
  Antisense strand to SEQ ID NO: 159338
uuauaagguacugauccca

SEQ ID NO: 159340 - RNA, 19 nt, Artificial Sequence
  Description of Artificial Sequence: Synthetic oligonucleotide
  Sense strand starting at position 3873 of SEQ ID NO: 2051
gagugauuagcccgugagg

SEQ ID NO: 159341 - RNA, 19 nt, Artificial Sequence
  Description of Artificial Sequence: Synthetic oligonucleotide
  Antisense strand to SEQ ID NO: 159340
ccucacgggcuaaucacuc

SEQ ID NO: 159342 - RNA, 19 nt, Artificial Sequence
  Description of Artificial Sequence: Synthetic oligonucleotide
  Sense strand starting at position 3871 of SEQ ID NO: 2051
aggagugauuagcccguga

SEQ ID NO: 159343 - RNA, 19 nt, Artificial Sequence
  Description of Artificial Sequence: Synthetic oligonucleotide
  Antisense strand to SEQ ID NO: 159342
ucacgggcuaaucacuccu

SEQ ID NO: 159344 - RNA, 19 nt, Artificial Sequence
  Description of Artificial Sequence: Synthetic oligonucleotide
  Sense strand starting at position 3699 of SEQ ID NO: 2051
aggaaugucgcagggagaa

SEQ ID NO: 159345 - RNA, 19 nt, Artificial Sequence
  Description of Artificial Sequence: Synthetic oligonucleotide
  Antisense strand to SEQ ID NO: 159344
uucucccugcgacauuccu

SEQ ID NO: 159346 - RNA, 19 nt, Artificial Sequence
  Description of Artificial Sequence: Synthetic oligonucleotide
  Sense strand starting at position 3672 of SEQ ID NO: 2051
ccggaugacucuuccagag

SEQ ID NO: 159347 - RNA, 19 nt, Artificial Sequence
  Description of Artificial Sequence: Synthetic oligonucleotide
  Antisense strand to SEQ ID NO: 159346
cucuggaagagucauccgg

SEQ ID NO: 159348 - RNA, 19 nt, Artificial Sequence
  Description of Artificial Sequence: Synthetic oligonucleotide
  Sense strand starting at position 3618 of SEQ ID NO: 2051
gaaggaguggucugagcuu

SEQ ID NO: 159349 - RNA, 19 nt, Artificial Sequence
  Description of Artificial Sequence: Synthetic oligonucleotide
  Antisense strand to SEQ ID NO: 159348
aagcucagaccacuccuuc

SEQ ID NO: 159350 - RNA, 19 nt, Artificial Sequence
  Description of Artificial Sequence: Synthetic oligonucleotide
  Sense strand starting at position 3588 of SEQ ID NO: 2051
cagaucucuggguguuaau

SEQ ID NO: 159351 - RNA, 19 nt, Artificial Sequence
  Description of Artificial Sequence: Synthetic oligonucleotide
  Antisense strand to SEQ ID NO: 159350
auuaacacccagagaucug

SEQ ID NO: 159352 - RNA, 19 nt, Artificial Sequence
  Description of Artificial Sequence: Synthetic oligonucleotide
  Sense strand starting at position 3587 of SEQ ID NO: 2051
gcagaucucuggguguuaa

SEQ ID NO: 159353 - RNA, 19 nt, Artificial Sequence
  Description of Artificial Sequence: Synthetic oligonucleotide
  Antisense strand to SEQ ID NO: 159352
uuaacacccagagaucugc

SEQ ID NO: 159354 - RNA, 19 nt, Artificial Sequence
  Description of Artificial Sequence: Synthetic oligonucleotide
  Sense strand starting at position 3586 of SEQ ID NO: 2051
ggcagaucucuggguguua

SEQ ID NO: 159355 - RNA, 19 nt, Artificial Sequence
  Description of Artificial Sequence: Synthetic oligonucleotide
  Antisense strand to SEQ ID NO: 159354
uaacacccagagaucugcc

SEQ ID NO: 159356 - RNA, 19 nt, Artificial Sequence
  Description of Artificial Sequence: Synthetic oligonucleotide
  Sense strand starting at position 3003 of SEQ ID NO: 2051
uuagauaucugcucacaug

SEQ ID NO: 159357 - RNA, 19 nt, Artificial Sequence
  Description of Artificial Sequence: Synthetic oligonucleotide
  Antisense strand to SEQ ID NO: 159356
caugugagcagauaucuaa

SEQ ID NO: 159358 - RNA, 19 nt, Artificial Sequence
  Description of Artificial Sequence: Synthetic oligonucleotide
  Sense strand starting at position 2999 of SEQ ID NO: 2051
gcacuuagauaucugcuca

SEQ ID NO: 159359 - RNA, 19 nt, Artificial Sequence
  Description of Artificial Sequence: Synthetic oligonucleotide
  Antisense strand to SEQ ID NO: 159358
ugagcagauaucuaagugc

SEQ ID NO: 159360 - RNA, 19 nt, Artificial Sequence
  Description of Artificial Sequence: Synthetic oligonucleotide
  Sense strand starting at position 2668 of SEQ ID NO: 2051
agaugaaaugguugugguc

SEQ ID NO: 159361 - RNA, 19 nt, Artificial Sequence
  Description of Artificial Sequence: Synthetic oligonucleotide
  Antisense strand to SEQ ID NO: 159360
gaccacaaccauuucaucu

SEQ ID NO: 159362 - RNA, 19 nt, Artificial Sequence
  Description of Artificial Sequence: Synthetic oligonucleotide
  Sense strand starting at position 2652 of SEQ ID NO: 2051
uauucuguacugugacaga

SEQ ID NO: 159363 - RNA, 19 nt, Artificial Sequence
  Description of Artificial Sequence: Synthetic oligonucleotide
  Antisense strand to SEQ ID NO: 159362
ucugucacaguacagaaua

SEQ ID NO: 159364 - RNA, 19 nt, Artificial Sequence
  Description of Artificial Sequence: Synthetic oligonucleotide
  Sense strand starting at position 2529 of SEQ ID NO: 2051
uuauauaguguaggaaacu

SEQ ID NO: 159365 - RNA, 19 nt, Artificial Sequence
  Description of Artificial Sequence: Synthetic oligonucleotide
  Antisense strand to SEQ ID NO: 159364
aguuuccuacacuauauaa

SEQ ID NO: 159366 - RNA, 19 nt, Artificial Sequence
  Description of Artificial Sequence: Synthetic oligonucleotide
  Sense strand starting at position 2033 of SEQ ID NO: 2051
caccauuaguuggugagaa

SEQ ID NO: 159367 - RNA, 19 nt, Artificial Sequence
  Description of Artificial Sequence: Synthetic oligonucleotide
  Antisense strand to SEQ ID NO: 159366
uucucaccaacuaauggug

SEQ ID NO: 159368 - RNA, 19 nt, Artificial Sequence
  Description of Artificial Sequence: Synthetic oligonucleotide
  Sense strand starting at position 2032 of SEQ ID NO: 2051
gcaccauuaguuggugaga

SEQ ID NO: 159369 - RNA, 19 nt, Artificial Sequence
  Description of Artificial Sequence: Synthetic oligonucleotide
  Antisense strand to SEQ ID NO: 159368
ucucaccaacuaauggugc

SEQ ID NO: 159370 - RNA, 19 nt, Artificial Sequence
  Description of Artificial Sequence: Synthetic oligonucleotide
  Sense strand starting at position 1437 of SEQ ID NO: 2051
ggucaagaguucucagagu

SEQ ID NO: 159371 - RNA, 19 nt, Artificial Sequence
  Description of Artificial Sequence: Synthetic oligonucleotide
  Antisense strand to SEQ ID NO: 159370
acucugagaacucuugacc

SEQ ID NO: 159372 - RNA, 19 nt, Artificial Sequence
  Description of Artificial Sequence: Synthetic oligonucleotide
  Sense strand starting at position 1346 of SEQ ID NO: 2051
gcacacuucccugagagca

SEQ ID NO: 159373 - RNA, 19 nt, Artificial Sequence
  Description of Artificial Sequence: Synthetic oligonucleotide
  Antisense strand to SEQ ID NO: 159372
ugcucucagggaagugugc

SEQ ID NO: 159374 - RNA, 19 nt, Artificial Sequence
  Description of Artificial Sequence: Synthetic oligonucleotide
  Sense strand starting at position 1332 of SEQ ID NO: 2051
uuggaauaagccuggcaca

SEQ ID NO: 159375 - RNA, 19 nt, Artificial Sequence
  Description of Artificial Sequence: Synthetic oligonucleotide
  Antisense strand to SEQ ID NO: 159374
ugugccaggcuuauuccaa

SEQ ID NO: 159376 - RNA, 19 nt, Artificial Sequence
  Description of Artificial Sequence: Synthetic oligonucleotide
  Sense strand starting at position 1323 of SEQ ID NO: 2051
agaggaaccuuggaauaag

SEQ ID NO: 159377 - RNA, 19 nt, Artificial Sequence
  Description of Artificial Sequence: Synthetic oligonucleotide
  Antisense strand to SEQ ID NO: 159376
cuuauuccaagguuccucu

SEQ ID NO: 159378 - RNA, 19 nt, Artificial Sequence
  Description of Artificial Sequence: Synthetic oligonucleotide
  Sense strand starting at position 1204 of SEQ ID NO: 2051
auauguucccagggacaug

SEQ ID NO: 159379 - RNA, 19 nt, Artificial Sequence
  Description of Artificial Sequence: Synthetic oligonucleotide
  Antisense strand to SEQ ID NO: 159378
caugucccugggaacauau

SEQ ID NO: 159380 - RNA, 19 nt, Artificial Sequence
  Description of Artificial Sequence: Synthetic oligonucleotide
  Sense strand starting at position 1200 of SEQ ID NO: 2051
ccucauauguucccaggga

SEQ ID NO: 159381 - RNA, 19 nt, Artificial Sequence
  Description of Artificial Sequence: Synthetic oligonucleotide
  Antisense strand to SEQ ID NO: 159380
ucccugggaacauaugagg

SEQ ID NO: 159382 - RNA, 19 nt, Artificial Sequence
  Description of Artificial Sequence: Synthetic oligonucleotide
  Sense strand starting at position 1191 of SEQ ID NO: 2051
gcugauaggccucauaugu

SEQ ID NO: 159383 - RNA, 19 nt, Artificial Sequence
  Description of Artificial Sequence: Synthetic oligonucleotide
  Antisense strand to SEQ ID NO: 159382
acauaugaggccuaucagc

SEQ ID NO: 159384 - RNA, 19 nt, Artificial Sequence
  Description of Artificial Sequence: Synthetic oligonucleotide
  Sense strand starting at position 1154 of SEQ ID NO: 2051
acagcauaguccuuauucu

SEQ ID NO: 159385 - RNA, 19 nt, Artificial Sequence
  Description of Artificial Sequence: Synthetic oligonucleotide
  Antisense strand to SEQ ID NO: 159384
agaauaaggacuaugcugu

SEQ ID NO: 159386 - RNA, 19 nt, Artificial Sequence
  Description of Artificial Sequence: Synthetic oligonucleotide
  Sense strand starting at position 1146 of SEQ ID NO: 2051
gaaugaucacagcauaguc

SEQ ID NO: 159387 - RNA, 19 nt, Artificial Sequence
  Description of Artificial Sequence: Synthetic oligonucleotide
  Antisense strand to SEQ ID NO: 159386
gacuaugcugugaucauuc

SEQ ID NO: 159388 - RNA, 19 nt, Artificial Sequence
  Description of Artificial Sequence: Synthetic oligonucleotide
  Sense strand starting at position 1134 of SEQ ID NO: 2051
uguccuguugcugaaugau

SEQ ID NO: 159389 - RNA, 19 nt, Artificial Sequence
  Description of Artificial Sequence: Synthetic oligonucleotide
  Antisense strand to SEQ ID NO: 159388
aucauucagcaacaggaca

SEQ ID NO: 159390 - RNA, 19 nt, Artificial Sequence
  Description of Artificial Sequence: Synthetic oligonucleotide
  Sense strand starting at position 1082 of SEQ ID NO: 2051
ccauuuauugccugcugau

SEQ ID NO: 159391 - RNA, 19 nt, Artificial Sequence
  Description of Artificial Sequence: Synthetic oligonucleotide
  Antisense strand to SEQ ID NO: 159390
aucagcaggcaauaaaugg

SEQ ID NO: 159392 - RNA, 19 nt, Artificial Sequence
  Description of Artificial Sequence: Synthetic oligonucleotide
  Sense strand starting at position 1081 of SEQ ID NO: 2051
gccauuuauugccugcuga

SEQ ID NO: 159393 - RNA, 19 nt, Artificial Sequence
  Description of Artificial Sequence: Synthetic oligonucleotide
  Antisense strand to SEQ ID NO: 159392
ucagcaggcaauaaauggc

SEQ ID NO: 159394 - RNA, 19 nt, Artificial Sequence
  Description of Artificial Sequence: Synthetic oligonucleotide
  Sense strand starting at position 1046 of SEQ ID NO: 2051
cucacacuucuguggaaug

SEQ ID NO: 159395 - RNA, 19 nt, Artificial Sequence
  Description of Artificial Sequence: Synthetic oligonucleotide
  Antisense strand to SEQ ID NO: 159394
cauuccacagaagugugag

SEQ ID NO: 159396 - RNA, 19 nt, Artificial Sequence
  Description of Artificial Sequence: Synthetic oligonucleotide
  Sense strand starting at position 1035 of SEQ ID NO: 2051
gucuaaaggugcucacacu

SEQ ID NO: 159397 - RNA, 19 nt, Artificial Sequence
  Description of Artificial Sequence: Synthetic oligonucleotide
  Antisense strand to SEQ ID NO: 159396
agugugagcaccuuuagac

SEQ ID NO: 159398 - RNA, 19 nt, Artificial Sequence
  Description of Artificial Sequence: Synthetic oligonucleotide
  Sense strand starting at position 679 of SEQ ID NO: 2051
gggagugauaaauaugugu

SEQ ID NO: 159399 - RNA, 19 nt, Artificial Sequence
  Description of Artificial Sequence: Synthetic oligonucleotide
  Antisense strand to SEQ ID NO: 159398
acacauauuuaucacuccc

SEQ ID NO: 159400 - RNA, 19 nt, Artificial Sequence
  Description of Artificial Sequence: Synthetic oligonucleotide
  Sense strand starting at position 632 of SEQ ID NO: 2051
gccaacaguucucugacuu

SEQ ID NO: 159401 - RNA, 19 nt, Artificial Sequence
  Description of Artificial Sequence: Synthetic oligonucleotide
  Antisense strand to SEQ ID NO: 159400
aagucagagaacuguuggc

SEQ ID NO: 159402 - RNA, 19 nt, Artificial Sequence
  Description of Artificial Sequence: Synthetic oligonucleotide
  Sense strand starting at position 547 of SEQ ID NO: 2051
guuggaauauucucuggag

SEQ ID NO: 159403 - RNA, 19 nt, Artificial Sequence
  Description of Artificial Sequence: Synthetic oligonucleotide
  Antisense strand to SEQ ID NO: 159402
cuccagagaauauuccaac

SEQ ID NO: 159404 - RNA, 19 nt, Artificial Sequence
  Description of Artificial Sequence: Synthetic oligonucleotide
  Sense strand starting at position 521 of SEQ ID NO: 2051
accaguagguggucaguua

SEQ ID NO: 159405 - RNA, 19 nt, Artificial Sequence
  Description of Artificial Sequence: Synthetic oligonucleotide
  Antisense strand to SEQ ID NO: 159404
uaacugaccaccuacuggu

SEQ ID NO: 159406 - RNA, 19 nt, Artificial Sequence
  Description of Artificial Sequence: Synthetic oligonucleotide
  Sense strand starting at position 501 of SEQ ID NO: 2051
ccaggaccucccugucuua

SEQ ID NO: 159407 - RNA, 19 nt, Artificial Sequence
  Description of Artificial Sequence: Synthetic oligonucleotide
  Antisense strand to SEQ ID NO: 159406
uaagacagggagguccugg

SEQ ID NO: 159408 - RNA, 19 nt, Artificial Sequence
  Description of Artificial Sequence: Synthetic oligonucleotide
  Sense strand starting at position 430 of SEQ ID NO: 2051
uagaguuauggguacuguu

SEQ ID NO: 159409 - RNA, 19 nt, Artificial Sequence
  Description of Artificial Sequence: Synthetic oligonucleotide
  Antisense strand to SEQ ID NO: 159408
aacaguacccauaacucua

SEQ ID NO: 159410 - RNA, 19 nt, Artificial Sequence
  Description of Artificial Sequence: Synthetic oligonucleotide
  Sense strand starting at position 414 of SEQ ID NO: 2051
gacuuugagcccugaguag

SEQ ID NO: 159411 - RNA, 19 nt, Artificial Sequence
  Description of Artificial Sequence: Synthetic oligonucleotide
  Antisense strand to SEQ ID NO: 159410
cuacucagggcucaaaguc

SEQ ID NO: 159412 - RNA, 19 nt, Artificial Sequence
  Description of Artificial Sequence: Synthetic oligonucleotide
  Sense strand starting at position 399 of SEQ ID NO: 2051
gcaguuugacugugagacu

SEQ ID NO: 159413 - RNA, 19 nt, Artificial Sequence
  Description of Artificial Sequence: Synthetic oligonucleotide
  Antisense strand to SEQ ID NO: 159412
agucucacagucaaacugc

SEQ ID NO: 159414 - RNA, 19 nt, Artificial Sequence
  Description of Artificial Sequence: Synthetic oligonucleotide
  Sense strand starting at position 296 of SEQ ID NO: 2051
uuaucaccuccuuagaugu

SEQ ID NO: 159415 - RNA, 19 nt, Artificial Sequence
  Description of Artificial Sequence: Synthetic oligonucleotide
  Antisense strand to SEQ ID NO: 159414
acaucuaaggaggugauaa

SEQ ID NO: 159416 - RNA, 19 nt, Artificial Sequence
  Description of Artificial Sequence: Synthetic oligonucleotide
  Sense strand starting at position 295 of SEQ ID NO: 2051
guuaucaccuccuuagaug

SEQ ID NO: 159417 - RNA, 19 nt, Artificial Sequence
  Description of Artificial Sequence: Synthetic oligonucleotide
  Antisense strand to SEQ ID NO: 159416
caucuaaggaggugauaac

SEQ ID NO: 159418 - RNA, 19 nt, Artificial Sequence
  Description of Artificial Sequence: Synthetic oligonucleotide
  Sense strand starting at position 3942 of SEQ ID NO: 2052
augagaugauuguucuaaa

SEQ ID NO: 159419 - RNA, 19 nt, Artificial Sequence
  Description of Artificial Sequence: Synthetic oligonucleotide
  Antisense strand to SEQ ID NO: 159418
uuuagaacaaucaucucau

SEQ ID NO: 159420 - RNA, 19 nt, Artificial Sequence
  Description of Artificial Sequence: Synthetic oligonucleotide
  Sense strand starting at position 3940 of SEQ ID NO: 2052
ucaugagaugauuguucua

SEQ ID NO: 159421 - RNA, 19 nt, Artificial Sequence
  Description of Artificial Sequence: Synthetic oligonucleotide
  Antisense strand to SEQ ID NO: 159420
uagaacaaucaucucauga

SEQ ID NO: 159422 - RNA, 19 nt, Artificial Sequence
  Description of Artificial Sequence: Synthetic oligonucleotide
  Sense strand starting at position 3936 of SEQ ID NO: 2052
augaucaugagaugauugu

SEQ ID NO: 159423 - RNA, 19 nt, Artificial Sequence
  Description of Artificial Sequence: Synthetic oligonucleotide
  Antisense strand to SEQ ID NO: 159422
acaaucaucucaugaucau

SEQ ID NO: 159424 - RNA, 19 nt, Artificial Sequence
  Description of Artificial Sequence: Synthetic oligonucleotide
  Sense strand starting at position 3884 of SEQ ID NO: 2052
ucuguuuccgugucuguaa

SEQ ID NO: 159425 - RNA, 19 nt, Artificial Sequence
  Description of Artificial Sequence: Synthetic oligonucleotide
  Antisense strand to SEQ ID NO: 159424
uuacagacacggaaacaga

SEQ ID NO: 159426 - RNA, 19 nt, Artificial Sequence
  Description of Artificial Sequence: Synthetic oligonucleotide
  Sense strand starting at position 3883 of SEQ ID NO: 2052
uucuguuuccgugucugua

SEQ ID NO: 159427 - RNA, 19 nt, Artificial Sequence
  Description of Artificial Sequence: Synthetic oligonucleotide
  Antisense strand to SEQ ID NO: 159426
uacagacacggaaacagaa

SEQ ID NO: 159428 - RNA, 19 nt, Artificial Sequence
  Description of Artificial Sequence: Synthetic oligonucleotide
  Sense strand starting at position 3772 of SEQ ID NO: 2052
aggugguguggucauggaa

SEQ ID NO: 159429 - RNA, 19 nt, Artificial Sequence
  Description of Artificial Sequence: Synthetic oligonucleotide
  Antisense strand to SEQ ID NO: 159428
uuccaugaccacaccaccu

SEQ ID NO: 159430 - RNA, 19 nt, Artificial Sequence
  Description of Artificial Sequence: Synthetic oligonucleotide
  Sense strand starting at position 3747 of SEQ ID NO: 2052
gcaguauuaaggcaagaga

SEQ ID NO: 159431 - RNA, 19 nt, Artificial Sequence
  Description of Artificial Sequence: Synthetic oligonucleotide
  Antisense strand to SEQ ID NO: 159430
ucucuugccuuaauacugc

SEQ ID NO: 159432 - RNA, 19 nt, Artificial Sequence
  Description of Artificial Sequence: Synthetic oligonucleotide
  Sense strand starting at position 3734 of SEQ ID NO: 2052
cuaucagagauaggcagua

SEQ ID NO: 159433 - RNA, 19 nt, Artificial Sequence
  Description of Artificial Sequence: Synthetic oligonucleotide
  Antisense strand to SEQ ID NO: 159432
uacugccuaucucugauag

SEQ ID NO: 159434 - RNA, 19 nt, Artificial Sequence
  Description of Artificial Sequence: Synthetic oligonucleotide
  Sense strand starting at position 3517 of SEQ ID NO: 2052
gagccuaaugguuacuuua

SEQ ID NO: 159435 - RNA, 19 nt, Artificial Sequence
  Description of Artificial Sequence: Synthetic oligonucleotide
  Antisense strand to SEQ ID NO: 159434
uaaaguaaccauuaggcuc

SEQ ID NO: 159436 - RNA, 19 nt, Artificial Sequence
  Description of Artificial Sequence: Synthetic oligonucleotide
  Sense strand starting at position 3336 of SEQ ID NO: 2052
agaacugcucuccacuaga

SEQ ID NO: 159437 - RNA, 19 nt, Artificial Sequence
  Description of Artificial Sequence: Synthetic oligonucleotide
  Antisense strand to SEQ ID NO: 159436
ucuaguggagagcaguucu

SEQ ID NO: 159438 - RNA, 19 nt, Artificial Sequence
  Description of Artificial Sequence: Synthetic oligonucleotide
  Sense strand starting at position 3289 of SEQ ID NO: 2052
gcccgacauuugccuuaga

SEQ ID NO: 159439 - RNA, 19 nt, Artificial Sequence
  Description of Artificial Sequence: Synthetic oligonucleotide
  Antisense strand to SEQ ID NO: 159438
ucuaaggcaaaugucgggc

SEQ ID NO: 159440 - RNA, 19 nt, Artificial Sequence
  Description of Artificial Sequence: Synthetic oligonucleotide
  Sense strand starting at position 3194 of SEQ ID NO: 2052
aguccuaugggugggacau

SEQ ID NO: 159441 - RNA, 19 nt, Artificial Sequence
  Description of Artificial Sequence: Synthetic oligonucleotide
  Antisense strand to SEQ ID NO: 159440
augucccacccauaggacu

SEQ ID NO: 159442 - RNA, 19 nt, Artificial Sequence
  Description of Artificial Sequence: Synthetic oligonucleotide
  Sense strand starting at position 3029 of SEQ ID NO: 2052
ucugaagagucugagauuu

SEQ ID NO: 159443 - RNA, 19 nt, Artificial Sequence
  Description of Artificial Sequence: Synthetic oligonucleotide
  Antisense strand to SEQ ID NO: 159442
aaaucucagacucuucaga

SEQ ID NO: 159444 - RNA, 19 nt, Artificial Sequence
  Description of Artificial Sequence: Synthetic oligonucleotide
  Sense strand starting at position 3028 of SEQ ID NO: 2052
cucugaagagucugagauu

SEQ ID NO: 159445 - RNA, 19 nt, Artificial Sequence
  Description of Artificial Sequence: Synthetic oligonucleotide
  Antisense strand to SEQ ID NO: 159444
aaucucagacucuucagag

SEQ ID NO: 159446 - RNA, 19 nt, Artificial Sequence
  Description of Artificial Sequence: Synthetic oligonucleotide
  Sense strand starting at position 3013 of SEQ ID NO: 2052
ggccauugucaagaacucu

SEQ ID NO: 159447 - RNA, 19 nt, Artificial Sequence
  Description of Artificial Sequence: Synthetic oligonucleotide
  Antisense strand to SEQ ID NO: 159446
agaguucuugacaauggcc

SEQ ID NO: 159448 - RNA, 19 nt, Artificial Sequence
  Description of Artificial Sequence: Synthetic oligonucleotide
  Sense strand starting at position 2986 of SEQ ID NO: 2052
gagguugucuuagugaaag

SEQ ID NO: 159449 - RNA, 19 nt, Artificial Sequence
  Description of Artificial Sequence: Synthetic oligonucleotide
  Antisense strand to SEQ ID NO: 159448
cuuucacuaagacaaccuc

SEQ ID NO: 159450 - RNA, 19 nt, Artificial Sequence
  Description of Artificial Sequence: Synthetic oligonucleotide
  Sense strand starting at position 2979 of SEQ ID NO: 2052
ggagauggagguugucuua

SEQ ID NO: 159451 - RNA, 19 nt, Artificial Sequence
  Description of Artificial Sequence: Synthetic oligonucleotide
  Antisense strand to SEQ ID NO: 159450
uaagacaaccuccaucucc

SEQ ID NO: 159452 - RNA, 19 nt, Artificial Sequence
  Description of Artificial Sequence: Synthetic oligonucleotide
  Sense strand starting at position 2916 of SEQ ID NO: 2052
aucucucuucuagggaaca

SEQ ID NO: 159453 - RNA, 19 nt, Artificial Sequence
  Description of Artificial Sequence: Synthetic oligonucleotide
  Antisense strand to SEQ ID NO: 159452
uguucccuagaagagagau

SEQ ID NO: 159454 - RNA, 19 nt, Artificial Sequence
  Description of Artificial Sequence: Synthetic oligonucleotide
  Sense strand starting at position 2832 of SEQ ID NO: 2052
gaugaugagaggugaaguu

SEQ ID NO: 159455 - RNA, 19 nt, Artificial Sequence
  Description of Artificial Sequence: Synthetic oligonucleotide
  Antisense strand to SEQ ID NO: 159454
aacuucaccucucaucauc

SEQ ID NO: 159456 - RNA, 19 nt, Artificial Sequence
  Description of Artificial Sequence: Synthetic oligonucleotide
  Sense strand starting at position 2684 of SEQ ID NO: 2052
ggaagauccuggccuaaag

SEQ ID NO: 159457 - RNA, 19 nt, Artificial Sequence
  Description of Artificial Sequence: Synthetic oligonucleotide
  Antisense strand to SEQ ID NO: 159456
cuuuaggccaggaucuucc

SEQ ID NO: 159458 - RNA, 19 nt, Artificial Sequence
  Description of Artificial Sequence: Synthetic oligonucleotide
  Sense strand starting at position 2682 of SEQ ID NO: 2052
uuggaagauccuggccuaa

SEQ ID NO: 159459 - RNA, 19 nt, Artificial Sequence
  Description of Artificial Sequence: Synthetic oligonucleotide
  Antisense strand to SEQ ID NO: 159458
uuaggccaggaucuuccaa

SEQ ID NO: 159460 - RNA, 19 nt, Artificial Sequence
  Description of Artificial Sequence: Synthetic oligonucleotide
  Sense strand starting at position 2650 of SEQ ID NO: 2052
gggaaauucugacuggucu

SEQ ID NO: 159461 - RNA, 19 nt, Artificial Sequence
  Description of Artificial Sequence: Synthetic oligonucleotide
  Antisense strand to SEQ ID NO: 159460
agaccagucagaauuuccc

SEQ ID NO: 159462 - RNA, 19 nt, Artificial Sequence
  Description of Artificial Sequence: Synthetic oligonucleotide
  Sense strand starting at position 2616 of SEQ ID NO: 2052
cguacaagaugaguaaagu

SEQ ID NO: 159463 - RNA, 19 nt, Artificial Sequence
  Description of Artificial Sequence: Synthetic oligonucleotide
  Antisense strand to SEQ ID NO: 159462
acuuuacucaucuuguacg

SEQ ID NO: 159464 - RNA, 19 nt, Artificial Sequence
  Description of Artificial Sequence: Synthetic oligonucleotide
  Sense strand starting at position 2575 of SEQ ID NO: 2052
gacccaggucuuuacagua

SEQ ID NO: 159465 - RNA, 19 nt, Artificial Sequence
  Description of Artificial Sequence: Synthetic oligonucleotide
  Antisense strand to SEQ ID NO: 159464
uacuguaaagaccuggguc

SEQ ID NO: 159466 - RNA, 19 nt, Artificial Sequence
  Description of Artificial Sequence: Synthetic oligonucleotide
  Sense strand starting at position 2389 of SEQ ID NO: 2052
uucccuuuccucuagaugu

SEQ ID NO: 159467 - RNA, 19 nt, Artificial Sequence
  Description of Artificial Sequence: Synthetic oligonucleotide
  Antisense strand to SEQ ID NO: 159466
acaucuagaggaaagggaa

SEQ ID NO: 159468 - RNA, 19 nt, Artificial Sequence
  Description of Artificial Sequence: Synthetic oligonucleotide
  Sense strand starting at position 2309 of SEQ ID NO: 2052
uuuggccuucuuuaaugaa

SEQ ID NO: 159469 - RNA, 19 nt, Artificial Sequence
  Description of Artificial Sequence: Synthetic oligonucleotide
  Antisense strand to SEQ ID NO: 159468
uucauuaaagaaggccaaa

SEQ ID NO: 159470 - RNA, 19 nt, Artificial Sequence
  Description of Artificial Sequence: Synthetic oligonucleotide
  Sense strand starting at position 1323 of SEQ ID NO: 2052
cccaauuuccuccggaguu

SEQ ID NO: 159471 - RNA, 19 nt, Artificial Sequence
  Description of Artificial Sequence: Synthetic oligonucleotide
  Antisense strand to SEQ ID NO: 159470
aacuccggaggaaauuggg

SEQ ID NO: 159472 - RNA, 19 nt, Artificial Sequence
  Description of Artificial Sequence: Synthetic oligonucleotide
  Sense strand starting at position 1128 of SEQ ID NO: 2052
gggcgugacaguucugcuu

SEQ ID NO: 159473 - RNA, 19 nt, Artificial Sequence
  Description of Artificial Sequence: Synthetic oligonucleotide
  Antisense strand to SEQ ID NO: 159472
aagcagaacugucacgccc

SEQ ID NO: 159474 - RNA, 19 nt, Artificial Sequence
  Description of Artificial Sequence: Synthetic oligonucleotide
  Sense strand starting at position 781 of SEQ ID NO: 2052
ggugaauggccuugggauu

SEQ ID NO: 159475 - RNA, 19 nt, Artificial Sequence
  Description of Artificial Sequence: Synthetic oligonucleotide
  Antisense strand to SEQ ID NO: 159474
aaucccaaggccauucacc

SEQ ID NO: 159476 - RNA, 19 nt, Artificial Sequence
  Description of Artificial Sequence: Synthetic oligonucleotide
  Sense strand starting at position 653 of SEQ ID NO: 2052
gguagcucugguuagaaau

SEQ ID NO: 159477 - RNA, 19 nt, Artificial Sequence
  Description of Artificial Sequence: Synthetic oligonucleotide
  Antisense strand to SEQ ID NO: 159476
auuucuaaccagagcuacc

SEQ ID NO: 159478 - RNA, 19 nt, Artificial Sequence
  Description of Artificial Sequence: Synthetic oligonucleotide
  Sense strand starting at position 637 of SEQ ID NO: 2052
agcugaauugcccaaaggu

SEQ ID NO: 159479 - RNA, 19 nt, Artificial Sequence
  Description of Artificial Sequence: Synthetic oligonucleotide
  Antisense strand to SEQ ID NO: 159478
accuuugggcaauucagcu

SEQ ID NO: 159480 - RNA, 19 nt, Artificial Sequence
  Description of Artificial Sequence: Synthetic oligonucleotide
  Sense strand starting at position 544 of SEQ ID NO: 2052
uccuguuaacaaggacaau

SEQ ID NO: 159481 - RNA, 19 nt, Artificial Sequence
  Description of Artificial Sequence: Synthetic oligonucleotide
  Antisense strand to SEQ ID NO: 159480
auuguccuuguuaacagga

SEQ ID NO: 159482 - RNA, 19 nt, Artificial Sequence
  Description of Artificial Sequence: Synthetic oligonucleotide
  Sense strand starting at position 514 of SEQ ID NO: 2052
ccauuacaggauugucuuu

SEQ ID NO: 159483 - RNA, 19 nt, Artificial Sequence
  Description of Artificial Sequence: Synthetic oligonucleotide
  Antisense strand to SEQ ID NO: 159482
aaagacaauccuguaaugg

SEQ ID NO: 159484 - RNA, 19 nt, Artificial Sequence
  Description of Artificial Sequence: Synthetic oligonucleotide
  Sense strand starting at position 457 of SEQ ID NO: 2052
ccagcaaggccuuaacagu

SEQ ID NO: 159485 - RNA, 19 nt, Artificial Sequence
  Description of Artificial Sequence: Synthetic oligonucleotide
  Antisense strand to SEQ ID NO: 159484
acuguuaaggccuugcugg

SEQ ID NO: 159486 - RNA, 19 nt, Artificial Sequence
  Description of Artificial Sequence: Synthetic oligonucleotide
  Sense strand starting at position 428 of SEQ ID NO: 2052
ccuuguucuccagacauca

SEQ ID NO: 159487 - RNA, 19 nt, Artificial Sequence
  Description of Artificial Sequence: Synthetic oligonucleotide
  Antisense strand to SEQ ID NO: 159486
ugaugucuggagaacaagg

SEQ ID NO: 159488 - RNA, 19 nt, Artificial Sequence
  Description of Artificial Sequence: Synthetic oligonucleotide
  Sense strand starting at position 425 of SEQ ID NO: 2052
ugaccuuguucuccagaca

SEQ ID NO: 159489 - RNA, 19 nt, Artificial Sequence
  Description of Artificial Sequence: Synthetic oligonucleotide
  Antisense strand to SEQ ID NO: 159488
ugucuggagaacaagguca

SEQ ID NO: 159490 - RNA, 19 nt, Artificial Sequence
  Description of Artificial Sequence: Synthetic oligonucleotide
  Sense strand starting at position 365 of SEQ ID NO: 2052
gggauaauguaagcacaga

SEQ ID NO: 159491 - RNA, 19 nt, Artificial Sequence
  Description of Artificial Sequence: Synthetic oligonucleotide
  Antisense strand to SEQ ID NO: 159490
ucugugcuuacauuauccc

SEQ ID NO: 159492 - RNA, 19 nt, Artificial Sequence
  Description of Artificial Sequence: Synthetic oligonucleotide
  Sense strand starting at position 352 of SEQ ID NO: 2052
cucacagagccaugggaua

SEQ ID NO: 159493 - RNA, 19 nt, Artificial Sequence
  Description of Artificial Sequence: Synthetic oligonucleotide
  Antisense strand to SEQ ID NO: 159492
uaucccauggcucugugag

SEQ ID NO: 159494 - RNA, 19 nt, Artificial Sequence
  Description of Artificial Sequence: Synthetic oligonucleotide
  Sense strand starting at position 214 of SEQ ID NO: 2052
ccuacuuagccacagaugu

SEQ ID NO: 159495 - RNA, 19 nt, Artificial Sequence
  Description of Artificial Sequence: Synthetic oligonucleotide
  Antisense strand to SEQ ID NO: 159494
acaucuguggcuaaguagg

SEQ ID NO: 159496 - RNA, 19 nt, Artificial Sequence
  Description of Artificial Sequence: Synthetic oligonucleotide
  Sense strand starting at position 190 of SEQ ID NO: 2052
cagggauucgcugaaacuc

SEQ ID NO: 159497 - RNA, 19 nt, Artificial Sequence
  Description of Artificial Sequence: Synthetic oligonucleotide
  Antisense strand to SEQ ID NO: 159496
gaguuucagcgaaucccug

SEQ ID NO: 159498 - RNA, 19 nt, Artificial Sequence
  Description of Artificial Sequence: Synthetic oligonucleotide
  Sense strand starting at position 190 of SEQ ID NO: 2053
agaguucuaccagggcaga

SEQ ID NO: 159499 - RNA, 19 nt, Artificial Sequence
  Description of Artificial Sequence: Synthetic oligonucleotide
  Antisense strand to SEQ ID NO: 159498
ucugcccugguagaacucu

SEQ ID NO: 159500 - RNA, 19 nt, Artificial Sequence
  Description of Artificial Sequence: Synthetic oligonucleotide
  Sense strand starting at position 333 of SEQ ID NO: 2053
gcccauuagucccuagaac

SEQ ID NO: 159501 - RNA, 19 nt, Artificial Sequence
  Description of Artificial Sequence: Synthetic oligonucleotide
  Antisense strand to SEQ ID NO: 159500
guucuagggacuaaugggc

SEQ ID NO: 159502 - RNA, 19 nt, Artificial Sequence
  Description of Artificial Sequence: Synthetic oligonucleotide
  Sense strand starting at position 493 of SEQ ID NO: 2053
ggagaaauagaccgcgcuu

SEQ ID NO: 159503 - RNA, 19 nt, Artificial Sequence
  Description of Artificial Sequence: Synthetic oligonucleotide
  Antisense strand to SEQ ID NO: 159502
aagcgcggucuauuucucc

SEQ ID NO: 159504 - RNA, 19 nt, Artificial Sequence
  Description of Artificial Sequence: Synthetic oligonucleotide
  Sense strand starting at position 539 of SEQ ID NO: 2053
ucccgucuccuuuaagagu

SEQ ID NO: 159505 - RNA, 19 nt, Artificial Sequence
  Description of Artificial Sequence: Synthetic oligonucleotide
  Antisense strand to SEQ ID NO: 159504
acucuuaaaggagacggga

SEQ ID NO: 159506 - RNA, 19 nt, Artificial Sequence
  Description of Artificial Sequence: Synthetic oligonucleotide
  Sense strand starting at position 1095 of SEQ ID NO: 2053
gauucuucccaggguagca

SEQ ID NO: 159507 - RNA, 19 nt, Artificial Sequence
  Description of Artificial Sequence: Synthetic oligonucleotide
  Antisense strand to SEQ ID NO: 159506
ugcuacccugggaagaauc

SEQ ID NO: 159508 - RNA, 19 nt, Artificial Sequence
  Description of Artificial Sequence: Synthetic oligonucleotide
  Sense strand starting at position 1649 of SEQ ID NO: 2053
cacagaugcccgcauacau

SEQ ID NO: 159509 - RNA, 19 nt, Artificial Sequence
  Description of Artificial Sequence: Synthetic oligonucleotide
  Antisense strand to SEQ ID NO: 159508
auguaugcgggcaucugug

SEQ ID NO: 159510 - RNA, 19 nt, Artificial Sequence
  Description of Artificial Sequence: Synthetic oligonucleotide
  Sense strand starting at position 1863 of SEQ ID NO: 2053
ccagguggcuuucuuaaag

SEQ ID NO: 159511 - RNA, 19 nt, Artificial Sequence
  Description of Artificial Sequence: Synthetic oligonucleotide
  Antisense strand to SEQ ID NO: 159510
cuuuaagaaagccaccugg

SEQ ID NO: 159512 - RNA, 19 nt, Artificial Sequence
  Description of Artificial Sequence: Synthetic oligonucleotide
  Sense strand starting at position 1869 of SEQ ID NO: 2053
ggcuuucuuaaagggaaag

SEQ ID NO: 159513 - RNA, 19 nt, Artificial Sequence
  Description of Artificial Sequence: Synthetic oligonucleotide
  Antisense strand to SEQ ID NO: 159512
cuuucccuuuaagaaagcc

SEQ ID NO: 159514 - RNA, 19 nt, Artificial Sequence
  Description of Artificial Sequence: Synthetic oligonucleotide
  Sense strand starting at position 1870 of SEQ ID NO: 2053
gcuuucuuaaagggaaagu

SEQ ID NO: 159515 - RNA, 19 nt, Artificial Sequence
  Description of Artificial Sequence: Synthetic oligonucleotide
  Antisense strand to SEQ ID NO: 159514
acuuucccuuuaagaaagc

SEQ ID NO: 159516 - RNA, 19 nt, Artificial Sequence
  Description of Artificial Sequence: Synthetic oligonucleotide
  Sense strand starting at position 1992 of SEQ ID NO: 2053
gggcuaagaguuuggugaa

SEQ ID NO: 159517 - RNA, 19 nt, Artificial Sequence
  Description of Artificial Sequence: Synthetic oligonucleotide
  Antisense strand to SEQ ID NO: 159516
uucaccaaacucuuagccc

SEQ ID NO: 159518 - RNA, 19 nt, Artificial Sequence
  Description of Artificial Sequence: Synthetic oligonucleotide
  Sense strand starting at position 2005 of SEQ ID NO: 2053
ggugaaaguuugaagagug

SEQ ID NO: 159519 - RNA, 19 nt, Artificial Sequence
  Description of Artificial Sequence: Synthetic oligonucleotide
  Antisense strand to SEQ ID NO: 159518
cacucuucaaacuuucacc

SEQ ID NO: 159520 - RNA, 19 nt, Artificial Sequence
  Description of Artificial Sequence: Synthetic oligonucleotide
  Sense strand starting at position 2129 of SEQ ID NO: 2053
cuccuccucccagggaaua

SEQ ID NO: 159521 - RNA, 19 nt, Artificial Sequence
  Description of Artificial Sequence: Synthetic oligonucleotide
  Antisense strand to SEQ ID NO: 159520
uauucccugggaggaggag

SEQ ID NO: 159522 - RNA, 19 nt, Artificial Sequence
  Description of Artificial Sequence: Synthetic oligonucleotide
  Sense strand starting at position 2466 of SEQ ID NO: 2053
gguccuacuccuuggaacu

SEQ ID NO: 159523 - RNA, 19 nt, Artificial Sequence
  Description of Artificial Sequence: Synthetic oligonucleotide
  Antisense strand to SEQ ID NO: 159522
aguuccaaggaguaggacc

SEQ ID NO: 159524 - RNA, 19 nt, Artificial Sequence
  Description of Artificial Sequence: Synthetic oligonucleotide
  Sense strand starting at position 2496 of SEQ ID NO: 2053
gguagcccuuucucaaauu

SEQ ID NO: 159525 - RNA, 19 nt, Artificial Sequence
  Description of Artificial Sequence: Synthetic oligonucleotide
  Antisense strand to SEQ ID NO: 159524
aauuugagaaagggcuacc

SEQ ID NO: 159526 - RNA, 19 nt, Artificial Sequence
  Description of Artificial Sequence: Synthetic oligonucleotide
  Sense strand starting at position 2594 of SEQ ID NO: 2053
uccuccuuccauggugaga

SEQ ID NO: 159527 - RNA, 19 nt, Artificial Sequence
  Description of Artificial Sequence: Synthetic oligonucleotide
  Antisense strand to SEQ ID NO: 159526
ucucaccauggaaggagga

SEQ ID NO: 159528 - RNA, 19 nt, Artificial Sequence
  Description of Artificial Sequence: Synthetic oligonucleotide
  Sense strand starting at position 2607 of SEQ ID NO: 2053
gugagacagaccuggguua

SEQ ID NO: 159529 - RNA, 19 nt, Artificial Sequence
  Description of Artificial Sequence: Synthetic oligonucleotide
  Antisense strand to SEQ ID NO: 159528
uaacccaggucugucucac

SEQ ID NO: 159530 - RNA, 19 nt, Artificial Sequence
  Description of Artificial Sequence: Synthetic oligonucleotide
  Sense strand starting at position 2839 of SEQ ID NO: 2053
ccaguuaguucugucagag

SEQ ID NO: 159531 - RNA, 19 nt, Artificial Sequence
  Description of Artificial Sequence: Synthetic oligonucleotide
  Antisense strand to SEQ ID NO: 159530
cucugacagaacuaacugg

SEQ ID NO: 159532 - RNA, 19 nt, Artificial Sequence
  Description of Artificial Sequence: Synthetic oligonucleotide
  Sense strand starting at position 2884 of SEQ ID NO: 2053
agggcaucugcucagggaa

SEQ ID NO: 159533 - RNA, 19 nt, Artificial Sequence
  Description of Artificial Sequence: Synthetic oligonucleotide
  Antisense strand to SEQ ID NO: 159532
uucccugagcagaugcccu

SEQ ID NO: 159534 - RNA, 19 nt, Artificial Sequence
  Description of Artificial Sequence: Synthetic oligonucleotide
  Sense strand starting at position 3034 of SEQ ID NO: 2053
cgugaaaccaauuguugag

SEQ ID NO: 159535 - RNA, 19 nt, Artificial Sequence
  Description of Artificial Sequence: Synthetic oligonucleotide
  Antisense strand to SEQ ID NO: 159534
cucaacaauugguuucacg

SEQ ID NO: 159536 - RNA, 19 nt, Artificial Sequence
  Description of Artificial Sequence: Synthetic oligonucleotide
  Sense strand starting at position 3040 of SEQ ID NO: 2053
accaauuguugagugagau

SEQ ID NO: 159537 - RNA, 19 nt, Artificial Sequence
  Description of Artificial Sequence: Synthetic oligonucleotide
  Antisense strand to SEQ ID NO: 159536
aucucacucaacaauuggu

SEQ ID NO: 159538 - RNA, 19 nt, Artificial Sequence
  Description of Artificial Sequence: Synthetic oligonucleotide
  Sense strand starting at position 3041 of SEQ ID NO: 2053
ccaauuguugagugagauu

SEQ ID NO: 159539 - RNA, 19 nt, Artificial Sequence
  Description of Artificial Sequence: Synthetic oligonucleotide
  Antisense strand to SEQ ID NO: 159538
aaucucacucaacaauugg

SEQ ID NO: 159540 - RNA, 19 nt, Artificial Sequence
  Description of Artificial Sequence: Synthetic oligonucleotide
  Sense strand starting at position 3110 of SEQ ID NO: 2053
ccaggcauucccugaaaug

SEQ ID NO: 159541 - RNA, 19 nt, Artificial Sequence
  Description of Artificial Sequence: Synthetic oligonucleotide
  Antisense strand to SEQ ID NO: 159540
cauuucagggaaugccugg

SEQ ID NO: 159542 - RNA, 19 nt, Artificial Sequence
  Description of Artificial Sequence: Synthetic oligonucleotide
  Sense strand starting at position 3218 of SEQ ID NO: 2053
uuggacuccugaucagauc

SEQ ID NO: 159543 - RNA, 19 nt, Artificial Sequence
  Description of Artificial Sequence: Synthetic oligonucleotide
  Antisense strand to SEQ ID NO: 159542
gaucugaucaggaguccaa

SEQ ID NO: 159544 - RNA, 19 nt, Artificial Sequence
  Description of Artificial Sequence: Synthetic oligonucleotide
  Sense strand starting at position 3246 of SEQ ID NO: 2053
accuuagucuuaucagcga

SEQ ID NO: 159545 - RNA, 19 nt, Artificial Sequence
  Description of Artificial Sequence: Synthetic oligonucleotide
  Antisense strand to SEQ ID NO: 159544
ucgcugauaagacuaaggu

SEQ ID NO: 159546 - RNA, 19 nt, Artificial Sequence
  Description of Artificial Sequence: Synthetic oligonucleotide
  Sense strand starting at position 3249 of SEQ ID NO: 2053
uuagucuuaucagcgagau

SEQ ID NO: 159547 - RNA, 19 nt, Artificial Sequence
  Description of Artificial Sequence: Synthetic oligonucleotide
  Antisense strand to SEQ ID NO: 159546
aucucgcugauaagacuaa

SEQ ID NO: 159548 - RNA, 19 nt, Artificial Sequence
  Description of Artificial Sequence: Synthetic oligonucleotide
  Sense strand starting at position 3250 of SEQ ID NO: 2053
uagucuuaucagcgagauu

SEQ ID NO: 159549 - RNA, 19 nt, Artificial Sequence
  Description of Artificial Sequence: Synthetic oligonucleotide
  Antisense strand to SEQ ID NO: 159548
aaucucgcugauaagacua

SEQ ID NO: 159550 - RNA, 19 nt, Artificial Sequence
  Description of Artificial Sequence: Synthetic oligonucleotide
  Sense strand starting at position 3251 of SEQ ID NO: 2053
agucuuaucagcgagauua

SEQ ID NO: 159551 - RNA, 19 nt, Artificial Sequence
  Description of Artificial Sequence: Synthetic oligonucleotide
  Antisense strand to SEQ ID NO: 159550
uaaucucgcugauaagacu

SEQ ID NO: 159552 - RNA, 19 nt, Artificial Sequence
  Description of Artificial Sequence: Synthetic oligonucleotide
  Sense strand starting at position 3253 of SEQ ID NO: 2053
ucuuaucagcgagauuauu

SEQ ID NO: 159553 - RNA, 19 nt, Artificial Sequence
  Description of Artificial Sequence: Synthetic oligonucleotide
  Antisense strand to SEQ ID NO: 159552
aauaaucucgcugauaaga

SEQ ID NO: 159554 - RNA, 19 nt, Artificial Sequence
  Description of Artificial Sequence: Synthetic oligonucleotide
  Sense strand starting at position 3302 of SEQ ID NO: 2053
gguauagcauguuugggau

SEQ ID NO: 159555 - RNA, 19 nt, Artificial Sequence
  Description of Artificial Sequence: Synthetic oligonucleotide
  Antisense strand to SEQ ID NO: 159554
aucccaaacaugcuauacc

SEQ ID NO: 159556 - RNA, 19 nt, Artificial Sequence
  Description of Artificial Sequence: Synthetic oligonucleotide
  Sense strand starting at position 3350 of SEQ ID NO: 2053
guuucuugcgugaguugug

SEQ ID NO: 159557 - RNA, 19 nt, Artificial Sequence
  Description of Artificial Sequence: Synthetic oligonucleotide
  Antisense strand to SEQ ID NO: 159556
cacaacucacgcaagaaac

SEQ ID NO: 159558 - RNA, 19 nt, Artificial Sequence
  Description of Artificial Sequence: Synthetic oligonucleotide
  Sense strand starting at position 3427 of SEQ ID NO: 2053
ccgauuguguauuugugua

SEQ ID NO: 159559 - RNA, 19 nt, Artificial Sequence
  Description of Artificial Sequence: Synthetic oligonucleotide
  Antisense strand to SEQ ID NO: 159558
uacacaaauacacaaucgg

SEQ ID NO: 159560 - RNA, 19 nt, Artificial Sequence
  Description of Artificial Sequence: Synthetic oligonucleotide
  Sense strand starting at position 3431 of SEQ ID NO: 2053
uuguguauuuguguaggua

SEQ ID NO: 159561 - RNA, 19 nt, Artificial Sequence
  Description of Artificial Sequence: Synthetic oligonucleotide
  Antisense strand to SEQ ID NO: 159560
uaccuacacaaauacacaa

SEQ ID NO: 159562 - RNA, 19 nt, Artificial Sequence
  Description of Artificial Sequence: Synthetic oligonucleotide
  Sense strand starting at position 3432 of SEQ ID NO: 2053
uguguauuuguguagguac

SEQ ID NO: 159563 - RNA, 19 nt, Artificial Sequence
  Description of Artificial Sequence: Synthetic oligonucleotide
  Antisense strand to SEQ ID NO: 159562
guaccuacacaaauacaca

SEQ ID NO: 159564 - RNA, 19 nt, Artificial Sequence
  Description of Artificial Sequence: Synthetic oligonucleotide
  Sense strand starting at position 3434 of SEQ ID NO: 2053
uguauuuguguagguacau

SEQ ID NO: 159565 - RNA, 19 nt, Artificial Sequence
  Description of Artificial Sequence: Synthetic oligonucleotide
  Antisense strand to SEQ ID NO: 159564
auguaccuacacaaauaca

SEQ ID NO: 159566 - RNA, 19 nt, Artificial Sequence
  Description of Artificial Sequence: Synthetic oligonucleotide
  Sense strand starting at position 3435 of SEQ ID NO: 2053
guauuuguguagguacauc

SEQ ID NO: 159567 - RNA, 19 nt, Artificial Sequence
  Description of Artificial Sequence: Synthetic oligonucleotide
  Antisense strand to SEQ ID NO: 159566
gauguaccuacacaaauac

SEQ ID NO: 159568 - RNA, 19 nt, Artificial Sequence
  Description of Artificial Sequence: Synthetic oligonucleotide
  Sense strand starting at position 3444 of SEQ ID NO: 2053
uagguacaucuguggaaga

SEQ ID NO: 159569 - RNA, 19 nt, Artificial Sequence
  Description of Artificial Sequence: Synthetic oligonucleotide
  Antisense strand to SEQ ID NO: 159568
ucuuccacagauguaccua

SEQ ID NO: 159570 - RNA, 19 nt, Artificial Sequence
  Description of Artificial Sequence: Synthetic oligonucleotide
  Sense strand starting at position 3446 of SEQ ID NO: 2053
gguacaucuguggaagacu

SEQ ID NO: 159571 - RNA, 19 nt, Artificial Sequence
  Description of Artificial Sequence: Synthetic oligonucleotide
  Antisense strand to SEQ ID NO: 159570
agucuuccacagauguacc

SEQ ID NO: 159572 - RNA, 19 nt, Artificial Sequence
  Description of Artificial Sequence: Synthetic oligonucleotide
  Sense strand starting at position 3561 of SEQ ID NO: 2053
ggacguaacuuccuccaua

SEQ ID NO: 159573 - RNA, 19 nt, Artificial Sequence
  Description of Artificial Sequence: Synthetic oligonucleotide
  Antisense strand to SEQ ID NO: 159572
uauggaggaaguuacgucc

SEQ ID NO: 159574 - RNA, 19 nt, Artificial Sequence
  Description of Artificial Sequence: Synthetic oligonucleotide
  Sense strand starting at position 3564 of SEQ ID NO: 2053
cguaacuuccuccauaagu

SEQ ID NO: 159575 - RNA, 19 nt, Artificial Sequence
  Description of Artificial Sequence: Synthetic oligonucleotide
  Antisense strand to SEQ ID NO: 159574
acuuauggaggaaguuacg

SEQ ID NO: 159576 - RNA, 19 nt, Artificial Sequence
  Description of Artificial Sequence: Synthetic oligonucleotide
  Sense strand starting at position 3954 of SEQ ID NO: 2053
cucugaggcuccgucagaa

SEQ ID NO: 159577 - RNA, 19 nt, Artificial Sequence
  Description of Artificial Sequence: Synthetic oligonucleotide
  Antisense strand to SEQ ID NO: 159576
uucugacggagccucagag

SEQ ID NO: 159578 - RNA, 19 nt, Artificial Sequence
  Description of Artificial Sequence: Synthetic oligonucleotide
  Sense strand starting at position 80 of SEQ ID NO: 2054
ccagcaggcuuuguguuua

SEQ ID NO: 159579 - RNA, 19 nt, Artificial Sequence
  Description of Artificial Sequence: Synthetic oligonucleotide
  Antisense strand to SEQ ID NO: 159578
uaaacacaaagccugcugg

SEQ ID NO: 159580 - RNA, 19 nt, Artificial Sequence
  Description of Artificial Sequence: Synthetic oligonucleotide
  Sense strand starting at position 115 of SEQ ID NO: 2054
ggguuugcucaugggauga

SEQ ID NO: 159581 - RNA, 19 nt, Artificial Sequence
  Description of Artificial Sequence: Synthetic oligonucleotide
  Antisense strand to SEQ ID NO: 159580
ucaucccaugagcaaaccc

SEQ ID NO: 159582 - RNA, 19 nt, Artificial Sequence
  Description of Artificial Sequence: Synthetic oligonucleotide
  Sense strand starting at position 206 of SEQ ID NO: 2054
ucagaucacuggcaacuuu

SEQ ID NO: 159583 - RNA, 19 nt, Artificial Sequence
  Description of Artificial Sequence: Synthetic oligonucleotide
  Antisense strand to SEQ ID NO: 159582
aaaguugccagugaucuga

SEQ ID NO: 159584 - RNA, 19 nt, Artificial Sequence
  Description of Artificial Sequence: Synthetic oligonucleotide
  Sense strand starting at position 267 of SEQ ID NO: 2054
guaaauuguggcugccuca

SEQ ID NO: 159585 - RNA, 19 nt, Artificial Sequence
  Description of Artificial Sequence: Synthetic oligonucleotide
  Antisense strand to SEQ ID NO: 159584
ugaggcagccacaauuuac

SEQ ID NO: 159586 - RNA, 19 nt, Artificial Sequence
  Description of Artificial Sequence: Synthetic oligonucleotide
  Sense strand starting at position 270 of SEQ ID NO: 2054
aauuguggcugccucagaa

SEQ ID NO: 159587 - RNA, 19 nt, Artificial Sequence
  Description of Artificial Sequence: Synthetic oligonucleotide
  Antisense strand to SEQ ID NO: 159586
uucugaggcagccacaauu

SEQ ID NO: 159588 - RNA, 19 nt, Artificial Sequence
  Description of Artificial Sequence: Synthetic oligonucleotide
  Sense strand starting at position 461 of SEQ ID NO: 2054
ggccucaguuaccuggaua

SEQ ID NO: 159589 - RNA, 19 nt, Artificial Sequence
  Description of Artificial Sequence: Synthetic oligonucleotide
  Antisense strand to SEQ ID NO: 159588
uauccagguaacugaggcc

SEQ ID NO: 159590 - RNA, 19 nt, Artificial Sequence
  Description of Artificial Sequence: Synthetic oligonucleotide
  Sense strand starting at position 661 of SEQ ID NO: 2054
aagaauacgccuugugcuu

SEQ ID NO: 159591 - RNA, 19 nt, Artificial Sequence
  Description of Artificial Sequence: Synthetic oligonucleotide
  Antisense strand to SEQ ID NO: 159590
aagcacaaggcguauucuu

SEQ ID NO: 159592 - RNA, 19 nt, Artificial Sequence
  Description of Artificial Sequence: Synthetic oligonucleotide
  Sense strand starting at position 667 of SEQ ID NO: 2054
acgccuugugcuuauccau

SEQ ID NO: 159593 - RNA, 19 nt, Artificial Sequence
  Description of Artificial Sequence: Synthetic oligonucleotide
  Antisense strand to SEQ ID NO: 159592
auggauaagcacaaggcgu

SEQ ID NO: 159594 - RNA, 19 nt, Artificial Sequence
  Description of Artificial Sequence: Synthetic oligonucleotide
  Sense strand starting at position 674 of SEQ ID NO: 2054
gugcuuauccauugcagag

SEQ ID NO: 159595 - RNA, 19 nt, Artificial Sequence
  Description of Artificial Sequence: Synthetic oligonucleotide
  Antisense strand to SEQ ID NO: 159594
cucugcaauggauaagcac

SEQ ID NO: 159596 - RNA, 19 nt, Artificial Sequence
  Description of Artificial Sequence: Synthetic oligonucleotide
  Sense strand starting at position 955 of SEQ ID NO: 2054
gguucuugacccuagcagu

SEQ ID NO: 159597 - RNA, 19 nt, Artificial Sequence
  Description of Artificial Sequence: Synthetic oligonucleotide
  Antisense strand to SEQ ID NO: 159596
acugcuagggucaagaacc

SEQ ID NO: 159598 - RNA, 19 nt, Artificial Sequence
  Description of Artificial Sequence: Synthetic oligonucleotide
  Sense strand starting at position 996 of SEQ ID NO: 2054
gcguacuguuccucccaga

SEQ ID NO: 159599 - RNA, 19 nt, Artificial Sequence
  Description of Artificial Sequence: Synthetic oligonucleotide
  Antisense strand to SEQ ID NO: 159598
ucugggaggaacaguacgc

SEQ ID NO: 159600 - RNA, 19 nt, Artificial Sequence
  Description of Artificial Sequence: Synthetic oligonucleotide
  Sense strand starting at position 1086 of SEQ ID NO: 2054
ggagaaguguagcuuucga

SEQ ID NO: 159601 - RNA, 19 nt, Artificial Sequence
  Description of Artificial Sequence: Synthetic oligonucleotide
  Antisense strand to SEQ ID NO: 159600
ucgaaagcuacacuucucc

SEQ ID NO: 159602 - RNA, 19 nt, Artificial Sequence
  Description of Artificial Sequence: Synthetic oligonucleotide
  Sense strand starting at position 1319 of SEQ ID NO: 2054
ccacucuucccauaggagu

SEQ ID NO: 159603 - RNA, 19 nt, Artificial Sequence
  Description of Artificial Sequence: Synthetic oligonucleotide
  Antisense strand to SEQ ID NO: 159602
acuccuaugggaagagugg

SEQ ID NO: 159604 - RNA, 19 nt, Artificial Sequence
  Description of Artificial Sequence: Synthetic oligonucleotide
  Sense strand starting at position 1361 of SEQ ID NO: 2054
ggcuguauugauuaguaca

SEQ ID NO: 159605 - RNA, 19 nt, Artificial Sequence
  Description of Artificial Sequence: Synthetic oligonucleotide
  Antisense strand to SEQ ID NO: 159604
uguacuaaucaauacagcc

SEQ ID NO: 159606 - RNA, 19 nt, Artificial Sequence
  Description of Artificial Sequence: Synthetic oligonucleotide
  Sense strand starting at position 1363 of SEQ ID NO: 2054
cuguauugauuaguacaau

SEQ ID NO: 159607 - RNA, 19 nt, Artificial Sequence
  Description of Artificial Sequence: Synthetic oligonucleotide
  Antisense strand to SEQ ID NO: 159606
auuguacuaaucaauacag

SEQ ID NO: 159608 - RNA, 19 nt, Artificial Sequence
  Description of Artificial Sequence: Synthetic oligonucleotide
  Sense strand starting at position 1548 of SEQ ID NO: 2054
gcaacuuucugggucacuu

SEQ ID NO: 159609 - RNA, 19 nt, Artificial Sequence
  Description of Artificial Sequence: Synthetic oligonucleotide
  Antisense strand to SEQ ID NO: 159608
aagugacccagaaaguugc

SEQ ID NO: 159610 - RNA, 19 nt, Artificial Sequence
  Description of Artificial Sequence: Synthetic oligonucleotide
  Sense strand starting at position 2002 of SEQ ID NO: 2054
ccuuguucccagcaaguaa

SEQ ID NO: 159611 - RNA, 19 nt, Artificial Sequence
  Description of Artificial Sequence: Synthetic oligonucleotide
  Antisense strand to SEQ ID NO: 159610
uuacuugcugggaacaagg

SEQ ID NO: 159612 - RNA, 19 nt, Artificial Sequence
  Description of Artificial Sequence: Synthetic oligonucleotide
  Sense strand starting at position 2168 of SEQ ID NO: 2054
aggguaguugggugucuga

SEQ ID NO: 159613 - RNA, 19 nt, Artificial Sequence
  Description of Artificial Sequence: Synthetic oligonucleotide
  Antisense strand to SEQ ID NO: 159612
ucagacacccaacuacccu

SEQ ID NO: 159614 - RNA, 19 nt, Artificial Sequence
  Description of Artificial Sequence: Synthetic oligonucleotide
  Sense strand starting at position 2171 of SEQ ID NO: 2054
guaguugggugucugauga

SEQ ID NO: 159615 - RNA, 19 nt, Artificial Sequence
  Description of Artificial Sequence: Synthetic oligonucleotide
  Antisense strand to SEQ ID NO: 159614
ucaucagacacccaacuac

SEQ ID NO: 159616 - RNA, 19 nt, Artificial Sequence
  Description of Artificial Sequence: Synthetic oligonucleotide
  Sense strand starting at position 2380 of SEQ ID NO: 2054
ggcgucuuccuaggagaau

SEQ ID NO: 159617 - RNA, 19 nt, Artificial Sequence
  Description of Artificial Sequence: Synthetic oligonucleotide
  Antisense strand to SEQ ID NO: 159616
auucuccuaggaagacgcc

SEQ ID NO: 159618 - RNA, 19 nt, Artificial Sequence
  Description of Artificial Sequence: Synthetic oligonucleotide
  Sense strand starting at position 2411 of SEQ ID NO: 2054
gcaagaaagcccuggccua

SEQ ID NO: 159619 - RNA, 19 nt, Artificial Sequence
  Description of Artificial Sequence: Synthetic oligonucleotide
  Antisense strand to SEQ ID NO: 159618
uaggccagggcuuucuugc

SEQ ID NO: 159620 - RNA, 19 nt, Artificial Sequence
  Description of Artificial Sequence: Synthetic oligonucleotide
  Sense strand starting at position 2440 of SEQ ID NO: 2054
cugucagcugucuggacaa

SEQ ID NO: 159621 - RNA, 19 nt, Artificial Sequence
  Description of Artificial Sequence: Synthetic oligonucleotide
  Antisense strand to SEQ ID NO: 159620
uuguccagacagcugacag

SEQ ID NO: 159622 - RNA, 19 nt, Artificial Sequence
  Description of Artificial Sequence: Synthetic oligonucleotide
  Sense strand starting at position 2608 of SEQ ID NO: 2054
ugucgucaccaugacuaua

SEQ ID NO: 159623 - RNA, 19 nt, Artificial Sequence
  Description of Artificial Sequence: Synthetic oligonucleotide
  Antisense strand to SEQ ID NO: 159622
uauagucauggugacgaca

SEQ ID NO: 159624 - RNA, 19 nt, Artificial Sequence
  Description of Artificial Sequence: Synthetic oligonucleotide
  Sense strand starting at position 2783 of SEQ ID NO: 2054
uuuggaaacuggucaguca

SEQ ID NO: 159625 - RNA, 19 nt, Artificial Sequence
  Description of Artificial Sequence: Synthetic oligonucleotide
  Antisense strand to SEQ ID NO: 159624
ugacugaccaguuuccaaa

SEQ ID NO: 159626 - RNA, 19 nt, Artificial Sequence
  Description of Artificial Sequence: Synthetic oligonucleotide
  Sense strand starting at position 2846 of SEQ ID NO: 2054
gauggacacgugcaugaau

SEQ ID NO: 159627 - RNA, 19 nt, Artificial Sequence
  Description of Artificial Sequence: Synthetic oligonucleotide
  Antisense strand to SEQ ID NO: 159626
auucaugcacguguccauc

SEQ ID NO: 159628 - RNA, 19 nt, Artificial Sequence
  Description of Artificial Sequence: Synthetic oligonucleotide
  Sense strand starting at position 2877 of SEQ ID NO: 2054
acagcuuuccugugaguuu

SEQ ID NO: 159629 - RNA, 19 nt, Artificial Sequence
  Description of Artificial Sequence: Synthetic oligonucleotide
  Antisense strand to SEQ ID NO: 159628
aaacucacaggaaagcugu

SEQ ID NO: 159630 - RNA, 19 nt, Artificial Sequence
  Description of Artificial Sequence: Synthetic oligonucleotide
  Sense strand starting at position 3629 of SEQ ID NO: 2054
agucacagccuuuagaguu

SEQ ID NO: 159631 - RNA, 19 nt, Artificial Sequence
  Description of Artificial Sequence: Synthetic oligonucleotide
  Antisense strand to SEQ ID NO: 159630
aacucuaaaggcugugacu

SEQ ID NO: 159632 - RNA, 19 nt, Artificial Sequence
  Description of Artificial Sequence: Synthetic oligonucleotide
  Sense strand starting at position 3636 of SEQ ID NO: 2054
gccuuuagaguuugacagu

SEQ ID NO: 159633 - RNA, 19 nt, Artificial Sequence
  Description of Artificial Sequence: Synthetic oligonucleotide
  Antisense strand to SEQ ID NO: 159632
acugucaaacucuaaaggc

SEQ ID NO: 159634 - RNA, 19 nt, Artificial Sequence
  Description of Artificial Sequence: Synthetic oligonucleotide
  Sense strand starting at position 3666 of SEQ ID NO: 2054
acccuagcuuugucaguuu

SEQ ID NO: 159635 - RNA, 19 nt, Artificial Sequence
  Description of Artificial Sequence: Synthetic oligonucleotide
  Antisense strand to SEQ ID NO: 159634
aaacugacaaagcuagggu

SEQ ID NO: 159636 - RNA, 19 nt, Artificial Sequence
  Description of Artificial Sequence: Synthetic oligonucleotide
  Sense strand starting at position 3677 of SEQ ID NO: 2054
gucaguuucucaccauaua

SEQ ID NO: 159637 - RNA, 19 nt, Artificial Sequence
  Description of Artificial Sequence: Synthetic oligonucleotide
  Antisense strand to SEQ ID NO: 159636
uauauggugagaaacugac

SEQ ID NO: 159638 - RNA, 19 nt, Artificial Sequence
  Description of Artificial Sequence: Synthetic oligonucleotide
  Sense strand starting at position 3703 of SEQ ID NO: 2054
aggcaaguccauuaacaug

SEQ ID NO: 159639 - RNA, 19 nt, Artificial Sequence
  Description of Artificial Sequence: Synthetic oligonucleotide
  Antisense strand to SEQ ID NO: 159638
cauguuaauggacuugccu

SEQ ID NO: 159640 - RNA, 19 nt, Artificial Sequence
  Description of Artificial Sequence: Synthetic oligonucleotide
  Sense strand starting at position 3708 of SEQ ID NO: 2054
aguccauuaacaugucgga

SEQ ID NO: 159641 - RNA, 19 nt, Artificial Sequence
  Description of Artificial Sequence: Synthetic oligonucleotide
  Antisense strand to SEQ ID NO: 159640
uccgacauguuaauggacu

SEQ ID NO: 159642 - RNA, 19 nt, Artificial Sequence
  Description of Artificial Sequence: Synthetic oligonucleotide
  Sense strand starting at position 3713 of SEQ ID NO: 2054
auuaacaugucggaucuca

SEQ ID NO: 159643 - RNA, 19 nt, Artificial Sequence
  Description of Artificial Sequence: Synthetic oligonucleotide
  Antisense strand to SEQ ID NO: 159642
ugagauccgacauguuaau

SEQ ID NO: 159644 - RNA, 19 nt, Artificial Sequence
  Description of Artificial Sequence: Synthetic oligonucleotide
  Sense strand starting at position 3774 of SEQ ID NO: 2054
gaaucuagugagcauuagu

SEQ ID NO: 159645 - RNA, 19 nt, Artificial Sequence
  Description of Artificial Sequence: Synthetic oligonucleotide
  Antisense strand to SEQ ID NO: 159644
acuaaugcucacuagauuc

SEQ ID NO: 159646 - RNA, 19 nt, Artificial Sequence
  Description of Artificial Sequence: Synthetic oligonucleotide
  Sense strand starting at position 3777 of SEQ ID NO: 2054
ucuagugagcauuaguaau

SEQ ID NO: 159647 - RNA, 19 nt, Artificial Sequence
  Description of Artificial Sequence: Synthetic oligonucleotide
  Antisense strand to SEQ ID NO: 159646
auuacuaaugcucacuaga

SEQ ID NO: 159648 - RNA, 19 nt, Artificial Sequence
  Description of Artificial Sequence: Synthetic oligonucleotide
  Sense strand starting at position 3779 of SEQ ID NO: 2054
uagugagcauuaguaauaa

SEQ ID NO: 159649 - RNA, 19 nt, Artificial Sequence
  Description of Artificial Sequence: Synthetic oligonucleotide
  Antisense strand to SEQ ID NO: 159648
uuauuacuaaugcucacua

SEQ ID NO: 159650 - RNA, 19 nt, Artificial Sequence
  Description of Artificial Sequence: Synthetic oligonucleotide
  Sense strand starting at position 3907 of SEQ ID NO: 2054
ccuaguaugguacaaguua

SEQ ID NO: 159651 - RNA, 19 nt, Artificial Sequence
  Description of Artificial Sequence: Synthetic oligonucleotide
  Antisense strand to SEQ ID NO: 159650
uaacuuguaccauacuagg

SEQ ID NO: 159652 - RNA, 19 nt, Artificial Sequence
  Description of Artificial Sequence: Synthetic oligonucleotide
  Sense strand starting at position 3956 of SEQ ID NO: 2054
ccagcugucccaugaggua

SEQ ID NO: 159653 - RNA, 19 nt, Artificial Sequence
  Description of Artificial Sequence: Synthetic oligonucleotide
  Antisense strand to SEQ ID NO: 159652
uaccucaugggacagcugg

SEQ ID NO: 159654 - RNA, 19 nt, Artificial Sequence
  Description of Artificial Sequence: Synthetic oligonucleotide
  Sense strand starting at position 3975 of SEQ ID NO: 2054
gguccauuauuaucuccau

SEQ ID NO: 159655 - RNA, 19 nt, Artificial Sequence
  Description of Artificial Sequence: Synthetic oligonucleotide
  Antisense strand to SEQ ID NO: 159654
auggagauaauaauggacc

SEQ ID NO: 159656 - RNA, 19 nt, Artificial Sequence
  Description of Artificial Sequence: Synthetic oligonucleotide
  Sense strand starting at position 3981 of SEQ ID NO: 2054
uuauuaucuccauguuggu

SEQ ID NO: 159657 - RNA, 19 nt, Artificial Sequence
  Description of Artificial Sequence: Synthetic oligonucleotide
  Antisense strand to SEQ ID NO: 159656
accaacauggagauaauaa

SEQ ID NO: 159658 - RNA, 19 nt, Artificial Sequence
  Description of Artificial Sequence: Synthetic oligonucleotide
  Sense strand starting at position 45 of SEQ ID NO: 2055
ucaucuacuugauugagca

SEQ ID NO: 159659 - RNA, 19 nt, Artificial Sequence
  Description of Artificial Sequence: Synthetic oligonucleotide
  Antisense strand to SEQ ID NO: 159658
ugcucaaucaaguagauga

SEQ ID NO: 159660 - RNA, 19 nt, Artificial Sequence
  Description of Artificial Sequence: Synthetic oligonucleotide
  Sense strand starting at position 219 of SEQ ID NO: 2055
cauuccugggccggaaauu

SEQ ID NO: 159661 - RNA, 19 nt, Artificial Sequence
  Description of Artificial Sequence: Synthetic oligonucleotide
  Antisense strand to SEQ ID NO: 159660
aauuuccggcccaggaaug

SEQ ID NO: 159662 - RNA, 19 nt, Artificial Sequence
  Description of Artificial Sequence: Synthetic oligonucleotide
  Sense strand starting at position 358 of SEQ ID NO: 2055
ccaggucuccacuaugcuu

SEQ ID NO: 159663 - RNA, 19 nt, Artificial Sequence
  Description of Artificial Sequence: Synthetic oligonucleotide
  Antisense strand to SEQ ID NO: 159662
aagcauaguggagaccugg

SEQ ID NO: 159664 - RNA, 19 nt, Artificial Sequence
  Description of Artificial Sequence: Synthetic oligonucleotide
  Sense strand starting at position 360 of SEQ ID NO: 2055
aggucuccacuaugcuuaa

SEQ ID NO: 159665 - RNA, 19 nt, Artificial Sequence
  Description of Artificial Sequence: Synthetic oligonucleotide
  Antisense strand to SEQ ID NO: 159664
uuaagcauaguggagaccu

SEQ ID NO: 159666 - RNA, 19 nt, Artificial Sequence
  Description of Artificial Sequence: Synthetic oligonucleotide
  Sense strand starting at position 361 of SEQ ID NO: 2055
ggucuccacuaugcuuaaa

SEQ ID NO: 159667 - RNA, 19 nt, Artificial Sequence
  Description of Artificial Sequence: Synthetic oligonucleotide
  Antisense strand to SEQ ID NO: 159666
uuuaagcauaguggagacc

SEQ ID NO: 159668 - RNA, 19 nt, Artificial Sequence
  Description of Artificial Sequence: Synthetic oligonucleotide
  Sense strand starting at position 489 of SEQ ID NO: 2055
agaagacacuccuuucugu

SEQ ID NO: 159669 - RNA, 19 nt, Artificial Sequence
  Description of Artificial Sequence: Synthetic oligonucleotide
  Antisense strand to SEQ ID NO: 159668
acagaaaggagugucuucu

SEQ ID NO: 159670 - RNA, 19 nt, Artificial Sequence
  Description of Artificial Sequence: Synthetic oligonucleotide
  Sense strand starting at position 725 of SEQ ID NO: 2055
gauggagacugccuacuuu

SEQ ID NO: 159671 - RNA, 19 nt, Artificial Sequence
  Description of Artificial Sequence: Synthetic oligonucleotide
  Antisense strand to SEQ ID NO: 159670
aaaguaggcagucuccauc

SEQ ID NO: 159672 - RNA, 19 nt, Artificial Sequence
  Description of Artificial Sequence: Synthetic oligonucleotide
  Sense strand starting at position 777 of SEQ ID NO: 2055
ccucaaauggugcgagaug

SEQ ID NO: 159673 - RNA, 19 nt, Artificial Sequence
  Description of Artificial Sequence: Synthetic oligonucleotide
  Antisense strand to SEQ ID NO: 159672
caucucgcaccauuugagg

SEQ ID NO: 159674 - RNA, 19 nt, Artificial Sequence
  Description of Artificial Sequence: Synthetic oligonucleotide
  Sense strand starting at position 958 of SEQ ID NO: 2055
ugccaugaucagugacgga

SEQ ID NO: 159675 - RNA, 19 nt, Artificial Sequence
  Description of Artificial Sequence: Synthetic oligonucleotide
  Antisense strand to SEQ ID NO: 159674
uccgucacugaucauggca

SEQ ID NO: 159676 - RNA, 19 nt, Artificial Sequence
  Description of Artificial Sequence: Synthetic oligonucleotide
  Sense strand starting at position 1297 of SEQ ID NO: 2055
uggcguagucucuaggaaa

SEQ ID NO: 159677 - RNA, 19 nt, Artificial Sequence
  Description of Artificial Sequence: Synthetic oligonucleotide
  Antisense strand to SEQ ID NO: 159676
uuuccuagagacuacgcca

SEQ ID NO: 159678 - RNA, 19 nt, Artificial Sequence
  Description of Artificial Sequence: Synthetic oligonucleotide
  Sense strand starting at position 1375 of SEQ ID NO: 2055
ggguuugcaaucuggaacu

SEQ ID NO: 159679 - RNA, 19 nt, Artificial Sequence
  Description of Artificial Sequence: Synthetic oligonucleotide
  Antisense strand to SEQ ID NO: 159678
aguuccagauugcaaaccc

SEQ ID NO: 159680 - RNA, 19 nt, Artificial Sequence
  Description of Artificial Sequence: Synthetic oligonucleotide
  Sense strand starting at position 1947 of SEQ ID NO: 2055
gguccagcuccagaacuaa

SEQ ID NO: 159681 - RNA, 19 nt, Artificial Sequence
  Description of Artificial Sequence: Synthetic oligonucleotide
  Antisense strand to SEQ ID NO: 159680
uuaguucuggagcuggacc

SEQ ID NO: 159682 - RNA, 19 nt, Artificial Sequence
  Description of Artificial Sequence: Synthetic oligonucleotide
  Sense strand starting at position 2110 of SEQ ID NO: 2055
agaaguaucgcguaggaag

SEQ ID NO: 159683 - RNA, 19 nt, Artificial Sequence
  Description of Artificial Sequence: Synthetic oligonucleotide
  Antisense strand to SEQ ID NO: 159682
cuuccuacgcgauacuucu

SEQ ID NO: 159684 - RNA, 19 nt, Artificial Sequence
  Description of Artificial Sequence: Synthetic oligonucleotide
  Sense strand starting at position 2131 of SEQ ID NO: 2055
gaaggagagucagagauga

SEQ ID NO: 159685 - RNA, 19 nt, Artificial Sequence
  Description of Artificial Sequence: Synthetic oligonucleotide
  Antisense strand to SEQ ID NO: 159684
ucaucucugacucuccuuc

SEQ ID NO: 159686 - RNA, 19 nt, Artificial Sequence
  Description of Artificial Sequence: Synthetic oligonucleotide
  Sense strand starting at position 2190 of SEQ ID NO: 2055
ccucacuaacgcgaguaaa

SEQ ID NO: 159687 - RNA, 19 nt, Artificial Sequence
  Description of Artificial Sequence: Synthetic oligonucleotide
  Antisense strand to SEQ ID NO: 159686
uuuacucgcguuagugagg

SEQ ID NO: 159688 - RNA, 19 nt, Artificial Sequence
  Description of Artificial Sequence: Synthetic oligonucleotide
  Sense strand starting at position 2258 of SEQ ID NO: 2055
agggcuuucgaauaauccu

SEQ ID NO: 159689 - RNA, 19 nt, Artificial Sequence
  Description of Artificial Sequence: Synthetic oligonucleotide
  Antisense strand to SEQ ID NO: 159688
aggauuauucgaaagcccu

SEQ ID NO: 159690 - RNA, 19 nt, Artificial Sequence
  Description of Artificial Sequence: Synthetic oligonucleotide
  Sense strand starting at position 2266 of SEQ ID NO: 2055
cgaauaauccugugaagaa

SEQ ID NO: 159691 - RNA, 19 nt, Artificial Sequence
  Description of Artificial Sequence: Synthetic oligonucleotide
  Antisense strand to SEQ ID NO: 159690
uucuucacaggauuauucg

SEQ ID NO: 159692 - RNA, 19 nt, Artificial Sequence
  Description of Artificial Sequence: Synthetic oligonucleotide
  Sense strand starting at position 2273 of SEQ ID NO: 2055
uccugugaagaauguauua

SEQ ID NO: 159693 - RNA, 19 nt, Artificial Sequence
  Description of Artificial Sequence: Synthetic oligonucleotide
  Antisense strand to SEQ ID NO: 159692
uaauacauucuucacagga

SEQ ID NO: 159694 - RNA, 19 nt, Artificial Sequence
  Description of Artificial Sequence: Synthetic oligonucleotide
  Sense strand starting at position 2355 of SEQ ID NO: 2055
cucaucuguuaaguagaga

SEQ ID NO: 159695 - RNA, 19 nt, Artificial Sequence
  Description of Artificial Sequence: Synthetic oligonucleotide
  Antisense strand to SEQ ID NO: 159694
ucucuacuuaacagaugag

SEQ ID NO: 159696 - RNA, 19 nt, Artificial Sequence
  Description of Artificial Sequence: Synthetic oligonucleotide
  Sense strand starting at position 2360 of SEQ ID NO: 2055
cuguuaaguagagacagua

SEQ ID NO: 159697 - RNA, 19 nt, Artificial Sequence
  Description of Artificial Sequence: Synthetic oligonucleotide
  Antisense strand to SEQ ID NO: 159696
uacugucucuacuuaacag

SEQ ID NO: 159698 - RNA, 19 nt, Artificial Sequence
  Description of Artificial Sequence: Synthetic oligonucleotide
  Sense strand starting at position 2375 of SEQ ID NO: 2055
aguaauagugacuauguca

SEQ ID NO: 159699 - RNA, 19 nt, Artificial Sequence
  Description of Artificial Sequence: Synthetic oligonucleotide
  Antisense strand to SEQ ID NO: 159698
ugacauagucacuauuacu

SEQ ID NO: 159700 - RNA, 19 nt, Artificial Sequence
  Description of Artificial Sequence: Synthetic oligonucleotide
  Sense strand starting at position 2388 of SEQ ID NO: 2055
augucagagggaugaugua

SEQ ID NO: 159701 - RNA, 19 nt, Artificial Sequence
  Description of Artificial Sequence: Synthetic oligonucleotide
  Antisense strand to SEQ ID NO: 159700
uacaucaucccucugacau

SEQ ID NO: 159702 - RNA, 19 nt, Artificial Sequence
  Description of Artificial Sequence: Synthetic oligonucleotide
  Sense strand starting at position 2411 of SEQ ID NO: 2055
cugagacaauccguguaaa

SEQ ID NO: 159703 - RNA, 19 nt, Artificial Sequence
  Description of Artificial Sequence: Synthetic oligonucleotide
  Antisense strand to SEQ ID NO: 159702
uuuacacggauugucucag

SEQ ID NO: 159704 - RNA, 19 nt, Artificial Sequence
  Description of Artificial Sequence: Synthetic oligonucleotide
  Sense strand starting at position 2412 of SEQ ID NO: 2055
ugagacaauccguguaaac

SEQ ID NO: 159705 - RNA, 19 nt, Artificial Sequence
  Description of Artificial Sequence: Synthetic oligonucleotide
  Antisense strand to SEQ ID NO: 159704
guuuacacggauugucuca

SEQ ID NO: 159706 - RNA, 19 nt, Artificial Sequence
  Description of Artificial Sequence: Synthetic oligonucleotide
  Sense strand starting at position 2414 of SEQ ID NO: 2055
agacaauccguguaaacua

SEQ ID NO: 159707 - RNA, 19 nt, Artificial Sequence
  Description of Artificial Sequence: Synthetic oligonucleotide
  Antisense strand to SEQ ID NO: 159706
uaguuuacacggauugucu

SEQ ID NO: 159708 - RNA, 19 nt, Artificial Sequence
  Description of Artificial Sequence: Synthetic oligonucleotide
  Sense strand starting at position 2425 of SEQ ID NO: 2055
guaaacuauuuggaaugca

SEQ ID NO: 159709 - RNA, 19 nt, Artificial Sequence
  Description of Artificial Sequence: Synthetic oligonucleotide
  Antisense strand to SEQ ID NO: 159708
ugcauuccaaauaguuuac

SEQ ID NO: 159710 - RNA, 19 nt, Artificial Sequence
  Description of Artificial Sequence: Synthetic oligonucleotide
  Sense strand starting at position 2718 of SEQ ID NO: 2055
ucugguauuccauggaguu

SEQ ID NO: 159711 - RNA, 19 nt, Artificial Sequence
  Description of Artificial Sequence: Synthetic oligonucleotide
  Antisense strand to SEQ ID NO: 159710
aacuccauggaauaccaga

SEQ ID NO: 159712 - RNA, 19 nt, Artificial Sequence
  Description of Artificial Sequence: Synthetic oligonucleotide
  Sense strand starting at position 2719 of SEQ ID NO: 2055
cugguauuccauggaguuc

SEQ ID NO: 159713 - RNA, 19 nt, Artificial Sequence
  Description of Artificial Sequence: Synthetic oligonucleotide
  Antisense strand to SEQ ID NO: 159712
gaacuccauggaauaccag

SEQ ID NO: 159714 - RNA, 19 nt, Artificial Sequence
  Description of Artificial Sequence: Synthetic oligonucleotide
  Sense strand starting at position 2720 of SEQ ID NO: 2055
ugguauuccauggaguucu

SEQ ID NO: 159715 - RNA, 19 nt, Artificial Sequence
  Description of Artificial Sequence: Synthetic oligonucleotide
  Antisense strand to SEQ ID NO: 159714
agaacuccauggaauacca

SEQ ID NO: 159716 - RNA, 19 nt, Artificial Sequence
  Description of Artificial Sequence: Synthetic oligonucleotide
  Sense strand starting at position 3123 of SEQ ID NO: 2055
uuagaaauccaacguaauu

SEQ ID NO: 159717 - RNA, 19 nt, Artificial Sequence
  Description of Artificial Sequence: Synthetic oligonucleotide
  Antisense strand to SEQ ID NO: 159716
aauuacguuggauuucuaa

SEQ ID NO: 159718 - RNA, 19 nt, Artificial Sequence
  Description of Artificial Sequence: Synthetic oligonucleotide
  Sense strand starting at position 3259 of SEQ ID NO: 2055
gcaugcuuuaaguagugga

SEQ ID NO: 159719 - RNA, 19 nt, Artificial Sequence
  Description of Artificial Sequence: Synthetic oligonucleotide
  Antisense strand to SEQ ID NO: 159718
uccacuacuuaaagcaugc

SEQ ID NO: 159720 - RNA, 19 nt, Artificial Sequence
  Description of Artificial Sequence: Synthetic oligonucleotide
  Sense strand starting at position 3263 of SEQ ID NO: 2055
gcuuuaaguaguggaacuu

SEQ ID NO: 159721 - RNA, 19 nt, Artificial Sequence
  Description of Artificial Sequence: Synthetic oligonucleotide
  Antisense strand to SEQ ID NO: 159720
aaguuccacuacuuaaagc

SEQ ID NO: 159722 - RNA, 19 nt, Artificial Sequence
  Description of Artificial Sequence: Synthetic oligonucleotide
  Sense strand starting at position 3264 of SEQ ID NO: 2055
cuuuaaguaguggaacuua

SEQ ID NO: 159723 - RNA, 19 nt, Artificial Sequence
  Description of Artificial Sequence: Synthetic oligonucleotide
  Antisense strand to SEQ ID NO: 159722
uaaguuccacuacuuaaag

SEQ ID NO: 159724 - RNA, 19 nt, Artificial Sequence
  Description of Artificial Sequence: Synthetic oligonucleotide
  Sense strand starting at position 3288 of SEQ ID NO: 2055
gaaccuauaguuugguuga

SEQ ID NO: 159725 - RNA, 19 nt, Artificial Sequence
  Description of Artificial Sequence: Synthetic oligonucleotide
  Antisense strand to SEQ ID NO: 159724
ucaaccaaacuauagguuc

SEQ ID NO: 159726 - RNA, 19 nt, Artificial Sequence
  Description of Artificial Sequence: Synthetic oligonucleotide
  Sense strand starting at position 3290 of SEQ ID NO: 2055
accuauaguuugguugaaa

SEQ ID NO: 159727 - RNA, 19 nt, Artificial Sequence
  Description of Artificial Sequence: Synthetic oligonucleotide
  Antisense strand to SEQ ID NO: 159726
uuucaaccaaacuauaggu

SEQ ID NO: 159728 - RNA, 19 nt, Artificial Sequence
  Description of Artificial Sequence: Synthetic oligonucleotide
  Sense strand starting at position 3291 of SEQ ID NO: 2055
ccuauaguuugguugaaau

SEQ ID NO: 159729 - RNA, 19 nt, Artificial Sequence
  Description of Artificial Sequence: Synthetic oligonucleotide
  Antisense strand to SEQ ID NO: 159728
auuucaaccaaacuauagg

SEQ ID NO: 159730 - RNA, 19 nt, Artificial Sequence
  Description of Artificial Sequence: Synthetic oligonucleotide
  Sense strand starting at position 3293 of SEQ ID NO: 2055
uauaguuugguugaaauug

SEQ ID NO: 159731 - RNA, 19 nt, Artificial Sequence
  Description of Artificial Sequence: Synthetic oligonucleotide
  Antisense strand to SEQ ID NO: 159730
caauuucaaccaaacuaua

SEQ ID NO: 159732 - RNA, 19 nt, Artificial Sequence
  Description of Artificial Sequence: Synthetic oligonucleotide
  Sense strand starting at position 3321 of SEQ ID NO: 2055
aagggaucauggcuguaca

SEQ ID NO: 159733 - RNA, 19 nt, Artificial Sequence
  Description of Artificial Sequence: Synthetic oligonucleotide
  Antisense strand to SEQ ID NO: 159732
uguacagccaugaucccuu

SEQ ID NO: 159734 - RNA, 19 nt, Artificial Sequence
  Description of Artificial Sequence: Synthetic oligonucleotide
  Sense strand starting at position 3322 of SEQ ID NO: 2055
agggaucauggcuguacaa

SEQ ID NO: 159735 - RNA, 19 nt, Artificial Sequence
  Description of Artificial Sequence: Synthetic oligonucleotide
  Antisense strand to SEQ ID NO: 159734
uuguacagccaugaucccu

SEQ ID NO: 159736 - RNA, 19 nt, Artificial Sequence
  Description of Artificial Sequence: Synthetic oligonucleotide
  Sense strand starting at position 3324 of SEQ ID NO: 2055
ggaucauggcuguacaaug

SEQ ID NO: 159737 - RNA, 19 nt, Artificial Sequence
  Description of Artificial Sequence: Synthetic oligonucleotide
  Antisense strand to SEQ ID NO: 159736
cauuguacagccaugaucc

SEQ ID NO: 159738 - RNA, 19 nt, Artificial Sequence
  Description of Artificial Sequence: Synthetic oligonucleotide
  Sense strand starting at position 214 of SEQ ID NO: 2056
ccuccuugugagcagagaa

SEQ ID NO: 159739 - RNA, 19 nt, Artificial Sequence
  Description of Artificial Sequence: Synthetic oligonucleotide
  Antisense strand to SEQ ID NO: 159738
uucucugcucacaaggagg

SEQ ID NO: 159740 - RNA, 19 nt, Artificial Sequence
  Description of Artificial Sequence: Synthetic oligonucleotide
  Sense strand starting at position 236 of SEQ ID NO: 2056
ugacgacaacuuuauaguu

SEQ ID NO: 159741 - RNA, 19 nt, Artificial Sequence
  Description of Artificial Sequence: Synthetic oligonucleotide
  Antisense strand to SEQ ID NO: 159740
aacuauaaaguugucguca

SEQ ID NO: 159742 - RNA, 19 nt, Artificial Sequence
  Description of Artificial Sequence: Synthetic oligonucleotide
  Sense strand starting at position 361 of SEQ ID NO: 2056
agcaaaugucacugaauac

SEQ ID NO: 159743 - RNA, 19 nt, Artificial Sequence
  Description of Artificial Sequence: Synthetic oligonucleotide
  Antisense strand to SEQ ID NO: 159742
guauucagugacauuugcu

SEQ ID NO: 159744 - RNA, 19 nt, Artificial Sequence
  Description of Artificial Sequence: Synthetic oligonucleotide
  Sense strand starting at position 961 of SEQ ID NO: 2056
cuguuacauguauauggga

SEQ ID NO: 159745 - RNA, 19 nt, Artificial Sequence
  Description of Artificial Sequence: Synthetic oligonucleotide
  Antisense strand to SEQ ID NO: 159744
ucccauauacauguaacag

SEQ ID NO: 159746 - RNA, 19 nt, Artificial Sequence
  Description of Artificial Sequence: Synthetic oligonucleotide
  Sense strand starting at position 963 of SEQ ID NO: 2056
guuacauguauaugggaga

SEQ ID NO: 159747 - RNA, 19 nt, Artificial Sequence
  Description of Artificial Sequence: Synthetic oligonucleotide
  Antisense strand to SEQ ID NO: 159746
ucucccauauacauguaac

SEQ ID NO: 159748 - RNA, 19 nt, Artificial Sequence
  Description of Artificial Sequence: Synthetic oligonucleotide
  Sense strand starting at position 1040 of SEQ ID NO: 2056
cccauuggacagugaguuu

SEQ ID NO: 159749 - RNA, 19 nt, Artificial Sequence
  Description of Artificial Sequence: Synthetic oligonucleotide
  Antisense strand to SEQ ID NO: 159748
aaacucacuguccaauggg

SEQ ID NO: 159750 - RNA, 19 nt, Artificial Sequence
  Description of Artificial Sequence: Synthetic oligonucleotide
  Sense strand starting at position 1047 of SEQ ID NO: 2056
gacagugaguuucucaaag

SEQ ID NO: 159751 - RNA, 19 nt, Artificial Sequence
  Description of Artificial Sequence: Synthetic oligonucleotide
  Antisense strand to SEQ ID NO: 159750
cuuugagaaacucacuguc

SEQ ID NO: 159752 - RNA, 19 nt, Artificial Sequence
  Description of Artificial Sequence: Synthetic oligonucleotide
  Sense strand starting at position 1074 of SEQ ID NO: 2056
ccgaacuuuccuuaaggcu

SEQ ID NO: 159753 - RNA, 19 nt, Artificial Sequence
  Description of Artificial Sequence: Synthetic oligonucleotide
  Antisense strand to SEQ ID NO: 159752
agccuuaaggaaaguucgg

SEQ ID NO: 159754 - RNA, 19 nt, Artificial Sequence
  Description of Artificial Sequence: Synthetic oligonucleotide
  Sense strand starting at position 1199 of SEQ ID NO: 2056
ugguauaaaucauucugga

SEQ ID NO: 159755 - RNA, 19 nt, Artificial Sequence
  Description of Artificial Sequence: Synthetic oligonucleotide
  Antisense strand to SEQ ID NO: 159754
uccagaaugauuuauacca

SEQ ID NO: 159756 - RNA, 19 nt, Artificial Sequence
  Description of Artificial Sequence: Synthetic oligonucleotide
  Sense strand starting at position 1387 of SEQ ID NO: 2056
auaugaugccuuugaguga

SEQ ID NO: 159757 - RNA, 19 nt, Artificial Sequence
  Description of Artificial Sequence: Synthetic oligonucleotide
  Antisense strand to SEQ ID NO: 159756
ucacucaaaggcaucauau

SEQ ID NO: 159758 - RNA, 19 nt, Artificial Sequence
  Description of Artificial Sequence: Synthetic oligonucleotide
  Sense strand starting at position 1390 of SEQ ID NO: 2056
ugaugccuuugagugaauu

SEQ ID NO: 159759 - RNA, 19 nt, Artificial Sequence
  Description of Artificial Sequence: Synthetic oligonucleotide
  Antisense strand to SEQ ID NO: 159758
aauucacucaaaggcauca

SEQ ID NO: 159760 - RNA, 19 nt, Artificial Sequence
  Description of Artificial Sequence: Synthetic oligonucleotide
  Sense strand starting at position 1391 of SEQ ID NO: 2056
gaugccuuugagugaauua

SEQ ID NO: 159761 - RNA, 19 nt, Artificial Sequence
  Description of Artificial Sequence: Synthetic oligonucleotide
  Antisense strand to SEQ ID NO: 159760
uaauucacucaaaggcauc

SEQ ID NO: 159762 - RNA, 19 nt, Artificial Sequence
  Description of Artificial Sequence: Synthetic oligonucleotide
  Sense strand starting at position 1392 of SEQ ID NO: 2056
augccuuugagugaauuag

SEQ ID NO: 159763 - RNA, 19 nt, Artificial Sequence
  Description of Artificial Sequence: Synthetic oligonucleotide
  Antisense strand to SEQ ID NO: 159762
cuaauucacucaaaggcau

SEQ ID NO: 159764 - RNA, 19 nt, Artificial Sequence
  Description of Artificial Sequence: Synthetic oligonucleotide
  Sense strand starting at position 1421 of SEQ ID NO: 2056
ccuuccucagagcaaugaa

SEQ ID NO: 159765 - RNA, 19 nt, Artificial Sequence
  Description of Artificial Sequence: Synthetic oligonucleotide
  Antisense strand to SEQ ID NO: 159764
uucauugcucugaggaagg

SEQ ID NO: 159766 - RNA, 19 nt, Artificial Sequence
  Description of Artificial Sequence: Synthetic oligonucleotide
  Sense strand starting at position 1526 of SEQ ID NO: 2056
ggauguaaccugugcaaau

SEQ ID NO: 159767 - RNA, 19 nt, Artificial Sequence
  Description of Artificial Sequence: Synthetic oligonucleotide
  Antisense strand to SEQ ID NO: 159766
auuugcacagguuacaucc

SEQ ID NO: 159768 - RNA, 19 nt, Artificial Sequence
  Description of Artificial Sequence: Synthetic oligonucleotide
  Sense strand starting at position 1548 of SEQ ID NO: 2056
ugcagugguccugagaaag

SEQ ID NO: 159769 - RNA, 19 nt, Artificial Sequence
  Description of Artificial Sequence: Synthetic oligonucleotide
  Antisense strand to SEQ ID NO: 159768
cuuucucaggaccacugca

SEQ ID NO: 159770 - RNA, 19 nt, Artificial Sequence
  Description of Artificial Sequence: Synthetic oligonucleotide
  Sense strand starting at position 1614 of SEQ ID NO: 2056
ccuagagguuccucaagua

SEQ ID NO: 159771 - RNA, 19 nt, Artificial Sequence
  Description of Artificial Sequence: Synthetic oligonucleotide
  Antisense strand to SEQ ID NO: 159770
uacuugaggaaccucuagg

SEQ ID NO: 159772 - RNA, 19 nt, Artificial Sequence
  Description of Artificial Sequence: Synthetic oligonucleotide
  Sense strand starting at position 1860 of SEQ ID NO: 2056
agagauauguuccuuaaag

SEQ ID NO: 159773 - RNA, 19 nt, Artificial Sequence
  Description of Artificial Sequence: Synthetic oligonucleotide
  Antisense strand to SEQ ID NO: 159772
cuuuaaggaacauaucucu

SEQ ID NO: 159774 - RNA, 19 nt, Artificial Sequence
  Description of Artificial Sequence: Synthetic oligonucleotide
  Sense strand starting at position 1861 of SEQ ID NO: 2056
gagauauguuccuuaaaga

SEQ ID NO: 159775 - RNA, 19 nt, Artificial Sequence
  Description of Artificial Sequence: Synthetic oligonucleotide
  Antisense strand to SEQ ID NO: 159774
ucuuuaaggaacauaucuc

SEQ ID NO: 159776 - RNA, 19 nt, Artificial Sequence
  Description of Artificial Sequence: Synthetic oligonucleotide
  Sense strand starting at position 1877 of SEQ ID NO: 2056
agauuaagcugcuuuaaag

SEQ ID NO: 159777 - RNA, 19 nt, Artificial Sequence
  Description of Artificial Sequence: Synthetic oligonucleotide
  Antisense strand to SEQ ID NO: 159776
cuuuaaagcagcuuaaucu

SEQ ID NO: 159778 - RNA, 19 nt, Artificial Sequence
  Description of Artificial Sequence: Synthetic oligonucleotide
  Sense strand starting at position 1938 of SEQ ID NO: 2056
cacaguuaugcgucuguuu

SEQ ID NO: 159779 - RNA, 19 nt, Artificial Sequence
  Description of Artificial Sequence: Synthetic oligonucleotide
  Antisense strand to SEQ ID NO: 159778
aaacagacgcauaacugug

SEQ ID NO: 159780 - RNA, 19 nt, Artificial Sequence
  Description of Artificial Sequence: Synthetic oligonucleotide
  Sense strand starting at position 1951 of SEQ ID NO: 2056
cuguuugccagggacagua

SEQ ID NO: 159781 - RNA, 19 nt, Artificial Sequence
  Description of Artificial Sequence: Synthetic oligonucleotide
  Antisense strand to SEQ ID NO: 159780
uacugucccuggcaaacag

SEQ ID NO: 159782 - RNA, 19 nt, Artificial Sequence
  Description of Artificial Sequence: Synthetic oligonucleotide
  Sense strand starting at position 2031 of SEQ ID NO: 2056
gccugcuuucguucugauu

SEQ ID NO: 159783 - RNA, 19 nt, Artificial Sequence
  Description of Artificial Sequence: Synthetic oligonucleotide
  Antisense strand to SEQ ID NO: 159782
aaucagaacgaaagcaggc

SEQ ID NO: 159784 - RNA, 19 nt, Artificial Sequence
  Description of Artificial Sequence: Synthetic oligonucleotide
  Sense strand starting at position 2084 of SEQ ID NO: 2056
gaagccaagugaucuaguu

SEQ ID NO: 159785 - RNA, 19 nt, Artificial Sequence
  Description of Artificial Sequence: Synthetic oligonucleotide
  Antisense strand to SEQ ID NO: 159784
aacuagaucacuuggcuuc

SEQ ID NO: 159786 - RNA, 19 nt, Artificial Sequence
  Description of Artificial Sequence: Synthetic oligonucleotide
  Sense strand starting at position 2092 of SEQ ID NO: 2056
gugaucuaguucuugggaa

SEQ ID NO: 159787 - RNA, 19 nt, Artificial Sequence
  Description of Artificial Sequence: Synthetic oligonucleotide
  Antisense strand to SEQ ID NO: 159786
uucccaagaacuagaucac

SEQ ID NO: 159788 - RNA, 19 nt, Artificial Sequence
  Description of Artificial Sequence: Synthetic oligonucleotide
  Sense strand starting at position 2182 of SEQ ID NO: 2056
gacauuguagaaugaauuc

SEQ ID NO: 159789 - RNA, 19 nt, Artificial Sequence
  Description of Artificial Sequence: Synthetic oligonucleotide
  Antisense strand to SEQ ID NO: 159788
gaauucauucuacaauguc

SEQ ID NO: 159790 - RNA, 19 nt, Artificial Sequence
  Description of Artificial Sequence: Synthetic oligonucleotide
  Sense strand starting at position 2456 of SEQ ID NO: 2056
gaacacguagcauagauaa

SEQ ID NO: 159791 - RNA, 19 nt, Artificial Sequence
  Description of Artificial Sequence: Synthetic oligonucleotide
  Antisense strand to SEQ ID NO: 159790
uuaucuaugcuacguguuc

SEQ ID NO: 159792 - RNA, 19 nt, Artificial Sequence
  Description of Artificial Sequence: Synthetic oligonucleotide
  Sense strand starting at position 2497 of SEQ ID NO: 2056
cuuuguucucgcucuugua

SEQ ID NO: 159793 - RNA, 19 nt, Artificial Sequence
  Description of Artificial Sequence: Synthetic oligonucleotide
  Antisense strand to SEQ ID NO: 159792
uacaagagcgagaacaaag

SEQ ID NO: 159794 - RNA, 19 nt, Artificial Sequence
  Description of Artificial Sequence: Synthetic oligonucleotide
  Sense strand starting at position 2498 of SEQ ID NO: 2056
uuuguucucgcucuuguaa

SEQ ID NO: 159795 - RNA, 19 nt, Artificial Sequence
  Description of Artificial Sequence: Synthetic oligonucleotide
  Antisense strand to SEQ ID NO: 159794
uuacaagagcgagaacaaa

SEQ ID NO: 159796 - RNA, 19 nt, Artificial Sequence
  Description of Artificial Sequence: Synthetic oligonucleotide
  Sense strand starting at position 2501 of SEQ ID NO: 2056
guucucgcucuuguaagua

SEQ ID NO: 159797 - RNA, 19 nt, Artificial Sequence
  Description of Artificial Sequence: Synthetic oligonucleotide
  Antisense strand to SEQ ID NO: 159796
uacuuacaagagcgagaac

SEQ ID NO: 159798 - RNA, 19 nt, Artificial Sequence
  Description of Artificial Sequence: Synthetic oligonucleotide
  Sense strand starting at position 2932 of SEQ ID NO: 2056
gguuuccaguccucaauuu

SEQ ID NO: 159799 - RNA, 19 nt, Artificial Sequence
  Description of Artificial Sequence: Synthetic oligonucleotide
  Antisense strand to SEQ ID NO: 159798
aaauugaggacuggaaacc

SEQ ID NO: 159800 - RNA, 19 nt, Artificial Sequence
  Description of Artificial Sequence: Synthetic oligonucleotide
  Sense strand starting at position 2939 of SEQ ID NO: 2056
aguccucaauuugaagaaa

SEQ ID NO: 159801 - RNA, 19 nt, Artificial Sequence
  Description of Artificial Sequence: Synthetic oligonucleotide
  Antisense strand to SEQ ID NO: 159800
uuucuucaaauugaggacu

SEQ ID NO: 159802 - RNA, 19 nt, Artificial Sequence
  Description of Artificial Sequence: Synthetic oligonucleotide
  Sense strand starting at position 3089 of SEQ ID NO: 2056
caucaauugguggguuacu

SEQ ID NO: 159803 - RNA, 19 nt, Artificial Sequence
  Description of Artificial Sequence: Synthetic oligonucleotide
  Antisense strand to SEQ ID NO: 159802
aguaacccaccaauugaug

SEQ ID NO: 159804 - RNA, 19 nt, Artificial Sequence
  Description of Artificial Sequence: Synthetic oligonucleotide
  Sense strand starting at position 3207 of SEQ ID NO: 2056
acaucacagcaguaagauu

SEQ ID NO: 159805 - RNA, 19 nt, Artificial Sequence
  Description of Artificial Sequence: Synthetic oligonucleotide
  Antisense strand to SEQ ID NO: 159804
aaucuuacugcugugaugu

SEQ ID NO: 159806 - RNA, 19 nt, Artificial Sequence
  Description of Artificial Sequence: Synthetic oligonucleotide
  Sense strand starting at position 3242 of SEQ ID NO: 2056
ucaagaaaccucuggcaag

SEQ ID NO: 159807 - RNA, 19 nt, Artificial Sequence
  Description of Artificial Sequence: Synthetic oligonucleotide
  Antisense strand to SEQ ID NO: 159806
cuugccagagguuucuuga

SEQ ID NO: 159808 - RNA, 19 nt, Artificial Sequence
  Description of Artificial Sequence: Synthetic oligonucleotide
  Sense strand starting at position 3304 of SEQ ID NO: 2056
cagcucuaugacugugaca

SEQ ID NO: 159809 - RNA, 19 nt, Artificial Sequence
  Description of Artificial Sequence: Synthetic oligonucleotide
  Antisense strand to SEQ ID NO: 159808
ugucacagucauagagcug

SEQ ID NO: 159810 - RNA, 19 nt, Artificial Sequence
  Description of Artificial Sequence: Synthetic oligonucleotide
  Sense strand starting at position 3306 of SEQ ID NO: 2056
gcucuaugacugugacaag

SEQ ID NO: 159811 - RNA, 19 nt, Artificial Sequence
  Description of Artificial Sequence: Synthetic oligonucleotide
  Antisense strand to SEQ ID NO: 159810
cuugucacagucauagagc

SEQ ID NO: 159812 - RNA, 19 nt, Artificial Sequence
  Description of Artificial Sequence: Synthetic oligonucleotide
  Sense strand starting at position 3738 of SEQ ID NO: 2056
cuaagacuccuguagguug

SEQ ID NO: 159813 - RNA, 19 nt, Artificial Sequence
  Description of Artificial Sequence: Synthetic oligonucleotide
  Antisense strand to SEQ ID NO: 159812
caaccuacaggagucuuag

SEQ ID NO: 159814 - RNA, 19 nt, Artificial Sequence
  Description of Artificial Sequence: Synthetic oligonucleotide
  Sense strand starting at position 3741 of SEQ ID NO: 2056
agacuccuguagguugaau

SEQ ID NO: 159815 - RNA, 19 nt, Artificial Sequence
  Description of Artificial Sequence: Synthetic oligonucleotide
  Antisense strand to SEQ ID NO: 159814
auucaaccuacaggagucu

SEQ ID NO: 159816 - RNA, 19 nt, Artificial Sequence
  Description of Artificial Sequence: Synthetic oligonucleotide
  Sense strand starting at position 3847 of SEQ ID NO: 2056
gcuuacacauaguucugaa

SEQ ID NO: 159817 - RNA, 19 nt, Artificial Sequence
  Description of Artificial Sequence: Synthetic oligonucleotide
  Antisense strand to SEQ ID NO: 159816
uucagaacuauguguaagc

SEQ ID NO: 159818 - RNA, 19 nt, Artificial Sequence
  Description of Artificial Sequence: Synthetic oligonucleotide
  Sense strand starting at position 87 of SEQ ID NO: 2057
gccuuacucuuggcacaga

SEQ ID NO: 159819 - RNA, 19 nt, Artificial Sequence
  Description of Artificial Sequence: Synthetic oligonucleotide
  Antisense strand to SEQ ID NO: 159818
ucugugccaagaguaaggc

SEQ ID NO: 159820 - RNA, 19 nt, Artificial Sequence
  Description of Artificial Sequence: Synthetic oligonucleotide
  Sense strand starting at position 108 of SEQ ID NO: 2057
ggguguucauguuugucaa

SEQ ID NO: 159821 - RNA, 19 nt, Artificial Sequence
  Description of Artificial Sequence: Synthetic oligonucleotide
  Antisense strand to SEQ ID NO: 159820
uugacaaacaugaacaccc

SEQ ID NO: 159822 - RNA, 19 nt, Artificial Sequence
  Description of Artificial Sequence: Synthetic oligonucleotide
  Sense strand starting at position 351 of SEQ ID NO: 2057
gcagauuugucccugcuuc

SEQ ID NO: 159823 - RNA, 19 nt, Artificial Sequence
  Description of Artificial Sequence: Synthetic oligonucleotide
  Antisense strand to SEQ ID NO: 159822
gaagcagggacaaaucugc

SEQ ID NO: 159824 - RNA, 19 nt, Artificial Sequence
  Description of Artificial Sequence: Synthetic oligonucleotide
  Sense strand starting at position 527 of SEQ ID NO: 2057
cugccagcuccuugaggau

SEQ ID NO: 159825 - RNA, 19 nt, Artificial Sequence
  Description of Artificial Sequence: Synthetic oligonucleotide
  Antisense strand to SEQ ID NO: 159824
auccucaaggagcuggcag

SEQ ID NO: 159826 - RNA, 19 nt, Artificial Sequence
  Description of Artificial Sequence: Synthetic oligonucleotide
  Sense strand starting at position 776 of SEQ ID NO: 2057
gagccuccucgaggucaga

SEQ ID NO: 159827 - RNA, 19 nt, Artificial Sequence
  Description of Artificial Sequence: Synthetic oligonucleotide
  Antisense strand to SEQ ID NO: 159826
ucugaccucgaggaggcuc

SEQ ID NO: 159828 - RNA, 19 nt, Artificial Sequence
  Description of Artificial Sequence: Synthetic oligonucleotide
  Sense strand starting at position 792 of SEQ ID NO: 2057
agaguacuccgucagggac

SEQ ID NO: 159829 - RNA, 19 nt, Artificial Sequence
  Description of Artificial Sequence: Synthetic oligonucleotide
  Antisense strand to SEQ ID NO: 159828
gucccugacggaguacucu

SEQ ID NO: 159830 - RNA, 19 nt, Artificial Sequence
  Description of Artificial Sequence: Synthetic oligonucleotide
  Sense strand starting at position 862 of SEQ ID NO: 2057
ggcucugacaccuguguuu

SEQ ID NO: 159831 - RNA, 19 nt, Artificial Sequence
  Description of Artificial Sequence: Synthetic oligonucleotide
  Antisense strand to SEQ ID NO: 159830
aaacacaggugucagagcc

SEQ ID NO: 159832 - RNA, 19 nt, Artificial Sequence
  Description of Artificial Sequence: Synthetic oligonucleotide
  Sense strand starting at position 1216 of SEQ ID NO: 2057
cucugagagcuccaccauu

SEQ ID NO: 159833 - RNA, 19 nt, Artificial Sequence
  Description of Artificial Sequence: Synthetic oligonucleotide
  Antisense strand to SEQ ID NO: 159832
aaugguggagcucucagag

SEQ ID NO: 159834 - RNA, 19 nt, Artificial Sequence
  Description of Artificial Sequence: Synthetic oligonucleotide
  Sense strand starting at position 1720 of SEQ ID NO: 2057
uccugagcugugcacauau

SEQ ID NO: 159835 - RNA, 19 nt, Artificial Sequence
  Description of Artificial Sequence: Synthetic oligonucleotide
  Antisense strand to SEQ ID NO: 159834
auaugugcacagcucagga

SEQ ID NO: 159836 - RNA, 19 nt, Artificial Sequence
  Description of Artificial Sequence: Synthetic oligonucleotide
  Sense strand starting at position 1778 of SEQ ID NO: 2057
gccugcaucuucucaaaug

SEQ ID NO: 159837 - RNA, 19 nt, Artificial Sequence
  Description of Artificial Sequence: Synthetic oligonucleotide
  Antisense strand to SEQ ID NO: 159836
cauuugagaagaugcaggc

SEQ ID NO: 159838 - RNA, 19 nt, Artificial Sequence
  Description of Artificial Sequence: Synthetic oligonucleotide
  Sense strand starting at position 1852 of SEQ ID NO: 2057
aggagaggccuaugaccuu

SEQ ID NO: 159839 - RNA, 19 nt, Artificial Sequence
  Description of Artificial Sequence: Synthetic oligonucleotide
  Antisense strand to SEQ ID NO: 159838
aaggucauaggccucuccu

SEQ ID NO: 159840 - RNA, 19 nt, Artificial Sequence
  Description of Artificial Sequence: Synthetic oligonucleotide
  Sense strand starting at position 1944 of SEQ ID NO: 2057
gguagcucucagggaacuu

SEQ ID NO: 159841 - RNA, 19 nt, Artificial Sequence
  Description of Artificial Sequence: Synthetic oligonucleotide
  Antisense strand to SEQ ID NO: 159840
aaguucccugagagcuacc

SEQ ID NO: 159842 - RNA, 19 nt, Artificial Sequence
  Description of Artificial Sequence: Synthetic oligonucleotide
  Sense strand starting at position 2020 of SEQ ID NO: 2057
acagcuaccucugugaucu

SEQ ID NO: 159843 - RNA, 19 nt, Artificial Sequence
  Description of Artificial Sequence: Synthetic oligonucleotide
  Antisense strand to SEQ ID NO: 159842
agaucacagagguagcugu

SEQ ID NO: 159844 - RNA, 19 nt, Artificial Sequence
  Description of Artificial Sequence: Synthetic oligonucleotide
  Sense strand starting at position 2030 of SEQ ID NO: 2057
cugugaucucaugagguuc

SEQ ID NO: 159845 - RNA, 19 nt, Artificial Sequence
  Description of Artificial Sequence: Synthetic oligonucleotide
  Antisense strand to SEQ ID NO: 159844
gaaccucaugagaucacag

SEQ ID NO: 159846 - RNA, 19 nt, Artificial Sequence
  Description of Artificial Sequence: Synthetic oligonucleotide
  Sense strand starting at position 2281 of SEQ ID NO: 2057
ccucuuuagucagucacca

SEQ ID NO: 159847 - RNA, 19 nt, Artificial Sequence
  Description of Artificial Sequence: Synthetic oligonucleotide
  Antisense strand to SEQ ID NO: 159846
uggugacugacuaaagagg

SEQ ID NO: 159848 - RNA, 19 nt, Artificial Sequence
  Description of Artificial Sequence: Synthetic oligonucleotide
  Sense strand starting at position 2396 of SEQ ID NO: 2057
cuucucugugcuggagaca

SEQ ID NO: 159849 - RNA, 19 nt, Artificial Sequence
  Description of Artificial Sequence: Synthetic oligonucleotide
  Antisense strand to SEQ ID NO: 159848
ugucuccagcacagagaag

SEQ ID NO: 159850 - RNA, 19 nt, Artificial Sequence
  Description of Artificial Sequence: Synthetic oligonucleotide
  Sense strand starting at position 2459 of SEQ ID NO: 2057
cuaucuaucucuuugggaa

SEQ ID NO: 159851 - RNA, 19 nt, Artificial Sequence
  Description of Artificial Sequence: Synthetic oligonucleotide
  Antisense strand to SEQ ID NO: 159850
uucccaaagagauagauag

SEQ ID NO: 159852 - RNA, 19 nt, Artificial Sequence
  Description of Artificial Sequence: Synthetic oligonucleotide
  Sense strand starting at position 2463 of SEQ ID NO: 2057
cuaucucuuugggaagaug

SEQ ID NO: 159853 - RNA, 19 nt, Artificial Sequence
  Description of Artificial Sequence: Synthetic oligonucleotide
  Antisense strand to SEQ ID NO: 159852
caucuucccaaagagauag

SEQ ID NO: 159854 - RNA, 19 nt, Artificial Sequence
  Description of Artificial Sequence: Synthetic oligonucleotide
  Sense strand starting at position 2488 of SEQ ID NO: 2057
uuaccugcuguuggagaaa

SEQ ID NO: 159855 - RNA, 19 nt, Artificial Sequence
  Description of Artificial Sequence: Synthetic oligonucleotide
  Antisense strand to SEQ ID NO: 159854
uuucuccaacagcagguaa

SEQ ID NO: 159856 - RNA, 19 nt, Artificial Sequence
  Description of Artificial Sequence: Synthetic oligonucleotide
  Sense strand starting at position 2527 of SEQ ID NO: 2057
agucuuuaucagcacagga

SEQ ID NO: 159857 - RNA, 19 nt, Artificial Sequence
  Description of Artificial Sequence: Synthetic oligonucleotide
  Antisense strand to SEQ ID NO: 159856
uccugugcugauaaagacu

SEQ ID NO: 159858 - RNA, 19 nt, Artificial Sequence
  Description of Artificial Sequence: Synthetic oligonucleotide
  Sense strand starting at position 2529 of SEQ ID NO: 2057
ucuuuaucagcacaggacu

SEQ ID NO: 159859 - RNA, 19 nt, Artificial Sequence
  Description of Artificial Sequence: Synthetic oligonucleotide
  Antisense strand to SEQ ID NO: 159858
aguccugugcugauaaaga

SEQ ID NO: 159860 - RNA, 19 nt, Artificial Sequence
  Description of Artificial Sequence: Synthetic oligonucleotide
  Sense strand starting at position 2546 of SEQ ID NO: 2057
cugaccagugcucaucauu

SEQ ID NO: 159861 - RNA, 19 nt, Artificial Sequence
  Description of Artificial Sequence: Synthetic oligonucleotide
  Antisense strand to SEQ ID NO: 159860
aaugaugagcacuggucag

SEQ ID NO: 159862 - RNA, 19 nt, Artificial Sequence
  Description of Artificial Sequence: Synthetic oligonucleotide
  Sense strand starting at position 2555 of SEQ ID NO: 2057
gcucaucauucugcagaag

SEQ ID NO: 159863 - RNA, 19 nt, Artificial Sequence
  Description of Artificial Sequence: Synthetic oligonucleotide
  Antisense strand to SEQ ID NO: 159862
cuucugcagaaugaugagc

SEQ ID NO: 159864 - RNA, 19 nt, Artificial Sequence
  Description of Artificial Sequence: Synthetic oligonucleotide
  Sense strand starting at position 2654 of SEQ ID NO: 2057
uaagaaagcuguuugacag

SEQ ID NO: 159865 - RNA, 19 nt, Artificial Sequence
  Description of Artificial Sequence: Synthetic oligonucleotide
  Antisense strand to SEQ ID NO: 159864
cugucaaacagcuuucuua

SEQ ID NO: 159866 - RNA, 19 nt, Artificial Sequence
  Description of Artificial Sequence: Synthetic oligonucleotide
  Sense strand starting at position 2682 of SEQ ID NO: 2057
gcugccuuccuugaaagca

SEQ ID NO: 159867 - RNA, 19 nt, Artificial Sequence
  Description of Artificial Sequence: Synthetic oligonucleotide
  Antisense strand to SEQ ID NO: 159866
ugcuuucaaggaaggcagc

SEQ ID NO: 159868 - RNA, 19 nt, Artificial Sequence
  Description of Artificial Sequence: Synthetic oligonucleotide
  Sense strand starting at position 2718 of SEQ ID NO: 2057
accaaauguuuguuuccua

SEQ ID NO: 159869 - RNA, 19 nt, Artificial Sequence
  Description of Artificial Sequence: Synthetic oligonucleotide
  Antisense strand to SEQ ID NO: 159868
uaggaaacaaacauuuggu

SEQ ID NO: 159870 - RNA, 19 nt, Artificial Sequence
  Description of Artificial Sequence: Synthetic oligonucleotide
  Sense strand starting at position 2972 of SEQ ID NO: 2057
gccuuucuugccucuguca

SEQ ID NO: 159871 - RNA, 19 nt, Artificial Sequence
  Description of Artificial Sequence: Synthetic oligonucleotide
  Antisense strand to SEQ ID NO: 159870
ugacagaggcaagaaaggc

SEQ ID NO: 159872 - RNA, 19 nt, Artificial Sequence
  Description of Artificial Sequence: Synthetic oligonucleotide
  Sense strand starting at position 2979 of SEQ ID NO: 2057
uugccucugucauccauga

SEQ ID NO: 159873 - RNA, 19 nt, Artificial Sequence
  Description of Artificial Sequence: Synthetic oligonucleotide
  Antisense strand to SEQ ID NO: 159872
ucauggaugacagaggcaa

SEQ ID NO: 159874 - RNA, 19 nt, Artificial Sequence
  Description of Artificial Sequence: Synthetic oligonucleotide
  Sense strand starting at position 3053 of SEQ ID NO: 2057
uguugaacugugcagaaau

SEQ ID NO: 159875 - RNA, 19 nt, Artificial Sequence
  Description of Artificial Sequence: Synthetic oligonucleotide
  Antisense strand to SEQ ID NO: 159874
auuucugcacaguucaaca

SEQ ID NO: 159876 - RNA, 19 nt, Artificial Sequence
  Description of Artificial Sequence: Synthetic oligonucleotide
  Sense strand starting at position 3067 of SEQ ID NO: 2057
gaaauagcuguccgggaga

SEQ ID NO: 159877 - RNA, 19 nt, Artificial Sequence
  Description of Artificial Sequence: Synthetic oligonucleotide
  Antisense strand to SEQ ID NO: 159876
ucucccggacagcuauuuc

SEQ ID NO: 159878 - RNA, 19 nt, Artificial Sequence
  Description of Artificial Sequence: Synthetic oligonucleotide
  Sense strand starting at position 3160 of SEQ ID NO: 2057
guggcuguucugcaugaaa

SEQ ID NO: 159879 - RNA, 19 nt, Artificial Sequence
  Description of Artificial Sequence: Synthetic oligonucleotide
  Antisense strand to SEQ ID NO: 159878
uuucaugcagaacagccac

SEQ ID NO: 159880 - RNA, 19 nt, Artificial Sequence
  Description of Artificial Sequence: Synthetic oligonucleotide
  Sense strand starting at position 3162 of SEQ ID NO: 2057
ggcuguucugcaugaaauu

SEQ ID NO: 159881 - RNA, 19 nt, Artificial Sequence
  Description of Artificial Sequence: Synthetic oligonucleotide
  Antisense strand to SEQ ID NO: 159880
aauuucaugcagaacagcc

SEQ ID NO: 159882 - RNA, 19 nt, Artificial Sequence
  Description of Artificial Sequence: Synthetic oligonucleotide
  Sense strand starting at position 3191 of SEQ ID NO: 2057
acuugagugcagcaacuuu

SEQ ID NO: 159883 - RNA, 19 nt, Artificial Sequence
  Description of Artificial Sequence: Synthetic oligonucleotide
  Antisense strand to SEQ ID NO: 159882
aaaguugcugcacucaagu

SEQ ID NO: 159884 - RNA, 19 nt, Artificial Sequence
  Description of Artificial Sequence: Synthetic oligonucleotide
  Sense strand starting at position 3272 of SEQ ID NO: 2057
agccuucugugagcugaau

SEQ ID NO: 159885 - RNA, 19 nt, Artificial Sequence
  Description of Artificial Sequence: Synthetic oligonucleotide
  Antisense strand to SEQ ID NO: 159884
auucagcucacagaaggcu

SEQ ID NO: 159886 - RNA, 19 nt, Artificial Sequence
  Description of Artificial Sequence: Synthetic oligonucleotide
  Sense strand starting at position 3394 of SEQ ID NO: 2057
gguuauuuacggugucucu

SEQ ID NO: 159887 - RNA, 19 nt, Artificial Sequence
  Description of Artificial Sequence: Synthetic oligonucleotide
  Antisense strand to SEQ ID NO: 159886
agagacaccguaaauaacc

SEQ ID NO: 159888 - RNA, 19 nt, Artificial Sequence
  Description of Artificial Sequence: Synthetic oligonucleotide
  Sense strand starting at position 3418 of SEQ ID NO: 2057
ucuaguauuagguaauagu

SEQ ID NO: 159889 - RNA, 19 nt, Artificial Sequence
  Description of Artificial Sequence: Synthetic oligonucleotide
  Antisense strand to SEQ ID NO: 159888
acuauuaccuaauacuaga

SEQ ID NO: 159890 - RNA, 19 nt, Artificial Sequence
  Description of Artificial Sequence: Synthetic oligonucleotide
  Sense strand starting at position 3427 of SEQ ID NO: 2057
agguaauaguauuagaaag

SEQ ID NO: 159891 - RNA, 19 nt, Artificial Sequence
  Description of Artificial Sequence: Synthetic oligonucleotide
  Antisense strand to SEQ ID NO: 159890
cuuucuaauacuauuaccu

SEQ ID NO: 159892 - RNA, 19 nt, Artificial Sequence
  Description of Artificial Sequence: Synthetic oligonucleotide
  Sense strand starting at position 3518 of SEQ ID NO: 2057
gcuggaugucugugaccuc

SEQ ID NO: 159893 - RNA, 19 nt, Artificial Sequence
  Description of Artificial Sequence: Synthetic oligonucleotide
  Antisense strand to SEQ ID NO: 159892
gaggucacagacauccagc

SEQ ID NO: 159894 - RNA, 19 nt, Artificial Sequence
  Description of Artificial Sequence: Synthetic oligonucleotide
  Sense strand starting at position 3521 of SEQ ID NO: 2057
ggaugucugugaccucacu

SEQ ID NO: 159895 - RNA, 19 nt, Artificial Sequence
  Description of Artificial Sequence: Synthetic oligonucleotide
  Antisense strand to SEQ ID NO: 159894
agugaggucacagacaucc

SEQ ID NO: 159896 - RNA, 19 nt, Artificial Sequence
  Description of Artificial Sequence: Synthetic oligonucleotide
  Sense strand starting at position 3656 of SEQ ID NO: 2057
ucauguuaucuggacagug

SEQ ID NO: 159897 - RNA, 19 nt, Artificial Sequence
  Description of Artificial Sequence: Synthetic oligonucleotide
  Antisense strand to SEQ ID NO: 159896
cacuguccagauaacauga

SEQ ID NO: 159898 - RNA, 19 nt, Artificial Sequence
  Description of Artificial Sequence: Synthetic oligonucleotide
  Sense strand starting at position 3906 of SEQ ID NO: 2061
uuaucuaaacucuggugaa

SEQ ID NO: 159899 - RNA, 19 nt, Artificial Sequence
  Description of Artificial Sequence: Synthetic oligonucleotide
  Antisense strand to SEQ ID NO: 159898
uucaccagaguuuagauaa

SEQ ID NO: 159900 - RNA, 19 nt, Artificial Sequence
  Description of Artificial Sequence: Synthetic oligonucleotide
  Sense strand starting at position 3897 of SEQ ID NO: 2061
ugcuaagaguuaucuaaac

SEQ ID NO: 159901 - RNA, 19 nt, Artificial Sequence
  Description of Artificial Sequence: Synthetic oligonucleotide
  Antisense strand to SEQ ID NO: 159900
guuuagauaacucuuagca

SEQ ID NO: 159902 - RNA, 19 nt, Artificial Sequence
  Description of Artificial Sequence: Synthetic oligonucleotide
  Sense strand starting at position 3852 of SEQ ID NO: 2061
ucuggcugccauggaaaua

SEQ ID NO: 159903 - RNA, 19 nt, Artificial Sequence
  Description of Artificial Sequence: Synthetic oligonucleotide
  Antisense strand to SEQ ID NO: 159902
uauuuccauggcagccaga

SEQ ID NO: 159904 - RNA, 19 nt, Artificial Sequence
  Description of Artificial Sequence: Synthetic oligonucleotide
  Sense strand starting at position 3814 of SEQ ID NO: 2061
gaaacagcaugauccgauu

SEQ ID NO: 159905 - RNA, 19 nt, Artificial Sequence
  Description of Artificial Sequence: Synthetic oligonucleotide
  Antisense strand to SEQ ID NO: 159904
aaucggaucaugcuguuuc

SEQ ID NO: 159906 - RNA, 19 nt, Artificial Sequence
  Description of Artificial Sequence: Synthetic oligonucleotide
  Sense strand starting at position 3764 of SEQ ID NO: 2061
cgauguuacugagaaauuu

SEQ ID NO: 159907 - RNA, 19 nt, Artificial Sequence
  Description of Artificial Sequence: Synthetic oligonucleotide
  Antisense strand to SEQ ID NO: 159906
aaauuucucaguaacaucg

SEQ ID NO: 159908 - RNA, 19 nt, Artificial Sequence
  Description of Artificial Sequence: Synthetic oligonucleotide
  Sense strand starting at position 3590 of SEQ ID NO: 2061
gugauuaaagcauagcaca

SEQ ID NO: 159909 - RNA, 19 nt, Artificial Sequence
  Description of Artificial Sequence: Synthetic oligonucleotide
  Antisense strand to SEQ ID NO: 159908
ugugcuaugcuuuaaucac

SEQ ID NO: 159910 - RNA, 19 nt, Artificial Sequence
  Description of Artificial Sequence: Synthetic oligonucleotide
  Sense strand starting at position 3563 of SEQ ID NO: 2061
aacguuauuugggaagggu

SEQ ID NO: 159911 - RNA, 19 nt, Artificial Sequence
  Description of Artificial Sequence: Synthetic oligonucleotide
  Antisense strand to SEQ ID NO: 159910
acccuucccaaauaacguu

SEQ ID NO: 159912 - RNA, 19 nt, Artificial Sequence
  Description of Artificial Sequence: Synthetic oligonucleotide
  Sense strand starting at position 3270 of SEQ ID NO: 2061
uaaccugaggguuguugau

SEQ ID NO: 159913 - RNA, 19 nt, Artificial Sequence
  Description of Artificial Sequence: Synthetic oligonucleotide
  Antisense strand to SEQ ID NO: 159912
aucaacaacccucagguua

SEQ ID NO: 159914 - RNA, 19 nt, Artificial Sequence
  Description of Artificial Sequence: Synthetic oligonucleotide
  Sense strand starting at position 3253 of SEQ ID NO: 2061
cuaugaucauccuuaugua

SEQ ID NO: 159915 - RNA, 19 nt, Artificial Sequence
  Description of Artificial Sequence: Synthetic oligonucleotide
  Antisense strand to SEQ ID NO: 159914
uacauaaggaugaucauag

SEQ ID NO: 159916 - RNA, 19 nt, Artificial Sequence
  Description of Artificial Sequence: Synthetic oligonucleotide
  Sense strand starting at position 3210 of SEQ ID NO: 2061
agcgcuuugcaugaacuau

SEQ ID NO: 159917 - RNA, 19 nt, Artificial Sequence
  Description of Artificial Sequence: Synthetic oligonucleotide
  Antisense strand to SEQ ID NO: 159916
auaguucaugcaaagcgcu

SEQ ID NO: 159918 - RNA, 19 nt, Artificial Sequence
  Description of Artificial Sequence: Synthetic oligonucleotide
  Sense strand starting at position 3204 of SEQ ID NO: 2061
guguuaagcgcuuugcaug

SEQ ID NO: 159919 - RNA, 19 nt, Artificial Sequence
  Description of Artificial Sequence: Synthetic oligonucleotide
  Antisense strand to SEQ ID NO: 159918
caugcaaagcgcuuaacac

SEQ ID NO: 159920 - RNA, 19 nt, Artificial Sequence
  Description of Artificial Sequence: Synthetic oligonucleotide
  Sense strand starting at position 3203 of SEQ ID NO: 2061
uguguuaagcgcuuugcau

SEQ ID NO: 159921 - RNA, 19 nt, Artificial Sequence
  Description of Artificial Sequence: Synthetic oligonucleotide
  Antisense strand to SEQ ID NO: 159920
augcaaagcgcuuaacaca

SEQ ID NO: 159922 - RNA, 19 nt, Artificial Sequence
  Description of Artificial Sequence: Synthetic oligonucleotide
  Sense strand starting at position 3202 of SEQ ID NO: 2061
cuguguuaagcgcuuugca

SEQ ID NO: 159923 - RNA, 19 nt, Artificial Sequence
  Description of Artificial Sequence: Synthetic oligonucleotide
  Antisense strand to SEQ ID NO: 159922
ugcaaagcgcuuaacacag

SEQ ID NO: 159924 - RNA, 19 nt, Artificial Sequence
  Description of Artificial Sequence: Synthetic oligonucleotide
  Sense strand starting at position 3192 of SEQ ID NO: 2061
gcgcuaggcacuguguuaa

SEQ ID NO: 159925 - RNA, 19 nt, Artificial Sequence
  Description of Artificial Sequence: Synthetic oligonucleotide
  Antisense strand to SEQ ID NO: 159924
uuaacacagugccuagcgc

SEQ ID NO: 159926 - RNA, 19 nt, Artificial Sequence
  Description of Artificial Sequence: Synthetic oligonucleotide
  Sense strand starting at position 3088 of SEQ ID NO: 2061
gcguguccuuggaagagaa

SEQ ID NO: 159927 - RNA, 19 nt, Artificial Sequence
  Description of Artificial Sequence: Synthetic oligonucleotide
  Antisense strand to SEQ ID NO: 159926
uucucuuccaaggacacgc

SEQ ID NO: 159928 - RNA, 19 nt, Artificial Sequence
  Description of Artificial Sequence: Synthetic oligonucleotide
  Sense strand starting at position 3018 of SEQ ID NO: 2061
gaaccaauccguggagaag

SEQ ID NO: 159929 - RNA, 19 nt, Artificial Sequence
  Description of Artificial Sequence: Synthetic oligonucleotide
  Antisense strand to SEQ ID NO: 159928
cuucuccacggauugguuc

SEQ ID NO: 159930 - RNA, 19 nt, Artificial Sequence
  Description of Artificial Sequence: Synthetic oligonucleotide
  Sense strand starting at position 3017 of SEQ ID NO: 2061
ggaaccaauccguggagaa

SEQ ID NO: 159931 - RNA, 19 nt, Artificial Sequence
  Description of Artificial Sequence: Synthetic oligonucleotide
  Antisense strand to SEQ ID NO: 159930
uucuccacggauugguucc

SEQ ID NO: 159932 - RNA, 19 nt, Artificial Sequence
  Description of Artificial Sequence: Synthetic oligonucleotide
  Sense strand starting at position 2407 of SEQ ID NO: 2061
cuaccuuuagacuggcaau

SEQ ID NO: 159933 - RNA, 19 nt, Artificial Sequence
  Description of Artificial Sequence: Synthetic oligonucleotide
  Antisense strand to SEQ ID NO: 159932
auugccagucuaaagguag

SEQ ID NO: 159934 - RNA, 19 nt, Artificial Sequence
  Description of Artificial Sequence: Synthetic oligonucleotide
  Sense strand starting at position 1886 of SEQ ID NO: 2061
aggaguugcuaaccaaaua

SEQ ID NO: 159935 - RNA, 19 nt, Artificial Sequence
  Description of Artificial Sequence: Synthetic oligonucleotide
  Antisense strand to SEQ ID NO: 159934
uauuugguuagcaacuccu

SEQ ID NO: 159936 - RNA, 19 nt, Artificial Sequence
  Description of Artificial Sequence: Synthetic oligonucleotide
  Sense strand starting at position 1765 of SEQ ID NO: 2061
ggcuacacugccuagaaau

SEQ ID NO: 159937 - RNA, 19 nt, Artificial Sequence
  Description of Artificial Sequence: Synthetic oligonucleotide
  Antisense strand to SEQ ID NO: 159936
auuucuaggcaguguagcc

SEQ ID NO: 159938 - RNA, 19 nt, Artificial Sequence
  Description of Artificial Sequence: Synthetic oligonucleotide
  Sense strand starting at position 1764 of SEQ ID NO: 2061
gggcuacacugccuagaaa

SEQ ID NO: 159939 - RNA, 19 nt, Artificial Sequence
  Description of Artificial Sequence: Synthetic oligonucleotide
  Antisense strand to SEQ ID NO: 159938
uuucuaggcaguguagccc

SEQ ID NO: 159940 - RNA, 19 nt, Artificial Sequence
  Description of Artificial Sequence: Synthetic oligonucleotide
  Sense strand starting at position 1702 of SEQ ID NO: 2061
ggcauaaucggcuaguuuc

SEQ ID NO: 159941 - RNA, 19 nt, Artificial Sequence
  Description of Artificial Sequence: Synthetic oligonucleotide
  Antisense strand to SEQ ID NO: 159940
gaaacuagccgauuaugcc

SEQ ID NO: 159942 - RNA, 19 nt, Artificial Sequence
  Description of Artificial Sequence: Synthetic oligonucleotide
  Sense strand starting at position 1623 of SEQ ID NO: 2061
aaguguaaucgccauggaa

SEQ ID NO: 159943 - RNA, 19 nt, Artificial Sequence
  Description of Artificial Sequence: Synthetic oligonucleotide
  Antisense strand to SEQ ID NO: 159942
uuccauggcgauuacacuu

SEQ ID NO: 159944 - RNA, 19 nt, Artificial Sequence
  Description of Artificial Sequence: Synthetic oligonucleotide
  Sense strand starting at position 1619 of SEQ ID NO: 2061
uuagaaguguaaucgccau

SEQ ID NO: 159945 - RNA, 19 nt, Artificial Sequence
  Description of Artificial Sequence: Synthetic oligonucleotide
  Antisense strand to SEQ ID NO: 159944
auggcgauuacacuucuaa

SEQ ID NO: 159946 - RNA, 19 nt, Artificial Sequence
  Description of Artificial Sequence: Synthetic oligonucleotide
  Sense strand starting at position 1579 of SEQ ID NO: 2061
cuaaaugguucugccaauu

SEQ ID NO: 159947 - RNA, 19 nt, Artificial Sequence
  Description of Artificial Sequence: Synthetic oligonucleotide
  Antisense strand to SEQ ID NO: 159946
aauuggcagaaccauuuag

SEQ ID NO: 159948 - RNA, 19 nt, Artificial Sequence
  Description of Artificial Sequence: Synthetic oligonucleotide
  Sense strand starting at position 1549 of SEQ ID NO: 2061
augaaucuucuagggcaca

SEQ ID NO: 159949 - RNA, 19 nt, Artificial Sequence
  Description of Artificial Sequence: Synthetic oligonucleotide
  Antisense strand to SEQ ID NO: 159948
ugugcccuagaagauucau

SEQ ID NO: 159950 - RNA, 19 nt, Artificial Sequence
  Description of Artificial Sequence: Synthetic oligonucleotide
  Sense strand starting at position 1319 of SEQ ID NO: 2061
uggcaaauccacugcauua

SEQ ID NO: 159951 - RNA, 19 nt, Artificial Sequence
  Description of Artificial Sequence: Synthetic oligonucleotide
  Antisense strand to SEQ ID NO: 159950
uaaugcaguggauuugcca

SEQ ID NO: 159952 - RNA, 19 nt, Artificial Sequence
  Description of Artificial Sequence: Synthetic oligonucleotide
  Sense strand starting at position 1136 of SEQ ID NO: 2061
uuacuaggugucuauguau

SEQ ID NO: 159953 - RNA, 19 nt, Artificial Sequence
  Description of Artificial Sequence: Synthetic oligonucleotide
  Antisense strand to SEQ ID NO: 159952
auacauagacaccuaguaa

SEQ ID NO: 159954 - RNA, 19 nt, Artificial Sequence
  Description of Artificial Sequence: Synthetic oligonucleotide
  Sense strand starting at position 1135 of SEQ ID NO: 2061
auuacuaggugucuaugua

SEQ ID NO: 159955 - RNA, 19 nt, Artificial Sequence
  Description of Artificial Sequence: Synthetic oligonucleotide
  Antisense strand to SEQ ID NO: 159954
uacauagacaccuaguaau

SEQ ID NO: 159956 - RNA, 19 nt, Artificial Sequence
  Description of Artificial Sequence: Synthetic oligonucleotide
  Sense strand starting at position 1131 of SEQ ID NO: 2061
auacauuacuaggugucua

SEQ ID NO: 159957 - RNA, 19 nt, Artificial Sequence
  Description of Artificial Sequence: Synthetic oligonucleotide
  Antisense strand to SEQ ID NO: 159956
uagacaccuaguaauguau

SEQ ID NO: 159958 - RNA, 19 nt, Artificial Sequence
  Description of Artificial Sequence: Synthetic oligonucleotide
  Sense strand starting at position 1112 of SEQ ID NO: 2061
guugguagaggucacuaaa

SEQ ID NO: 159959 - RNA, 19 nt, Artificial Sequence
  Description of Artificial Sequence: Synthetic oligonucleotide
  Antisense strand to SEQ ID NO: 159958
uuuagugaccucuaccaac

SEQ ID NO: 159960 - RNA, 19 nt, Artificial Sequence
  Description of Artificial Sequence: Synthetic oligonucleotide
  Sense strand starting at position 1100 of SEQ ID NO: 2061
uuccauuuaucuguuggua

SEQ ID NO: 159961 - RNA, 19 nt, Artificial Sequence
  Description of Artificial Sequence: Synthetic oligonucleotide
  Antisense strand to SEQ ID NO: 159960
uaccaacagauaaauggaa

SEQ ID NO: 159962 - RNA, 19 nt, Artificial Sequence
  Description of Artificial Sequence: Synthetic oligonucleotide
  Sense strand starting at position 1065 of SEQ ID NO: 2061
aaagaagucuaggaauuug

SEQ ID NO: 159963 - RNA, 19 nt, Artificial Sequence
  Description of Artificial Sequence: Synthetic oligonucleotide
  Antisense strand to SEQ ID NO: 159962
caaauuccuagacuucuuu

SEQ ID NO: 159964 - RNA, 19 nt, Artificial Sequence
  Description of Artificial Sequence: Synthetic oligonucleotide
  Sense strand starting at position 825 of SEQ ID NO: 2061
gcaucugacucuccaaaug

SEQ ID NO: 159965 - RNA, 19 nt, Artificial Sequence
  Description of Artificial Sequence: Synthetic oligonucleotide
  Antisense strand to SEQ ID NO: 159964
cauuuggagagucagaugc

SEQ ID NO: 159966 - RNA, 19 nt, Artificial Sequence
  Description of Artificial Sequence: Synthetic oligonucleotide
  Sense strand starting at position 759 of SEQ ID NO: 2061
auuggaauaugaguaagua

SEQ ID NO: 159967 - RNA, 19 nt, Artificial Sequence
  Description of Artificial Sequence: Synthetic oligonucleotide
  Antisense strand to SEQ ID NO: 159966
uacuuacucauauuccaau

SEQ ID NO: 159968 - RNA, 19 nt, Artificial Sequence
  Description of Artificial Sequence: Synthetic oligonucleotide
  Sense strand starting at position 375 of SEQ ID NO: 2061
gaaauuucgggcugggcau

SEQ ID NO: 159969 - RNA, 19 nt, Artificial Sequence
  Description of Artificial Sequence: Synthetic oligonucleotide
  Antisense strand to SEQ ID NO: 159968
augcccagcccgaaauuuc

SEQ ID NO: 159970 - RNA, 19 nt, Artificial Sequence
  Description of Artificial Sequence: Synthetic oligonucleotide
  Sense strand starting at position 299 of SEQ ID NO: 2061
aguuacuaguucucauuaa

SEQ ID NO: 159971 - RNA, 19 nt, Artificial Sequence
  Description of Artificial Sequence: Synthetic oligonucleotide
  Antisense strand to SEQ ID NO: 159970
uuaaugagaacuaguaacu

SEQ ID NO: 159972 - RNA, 19 nt, Artificial Sequence
  Description of Artificial Sequence: Synthetic oligonucleotide
  Sense strand starting at position 296 of SEQ ID NO: 2061
agcaguuacuaguucucau

SEQ ID NO: 159973 - RNA, 19 nt, Artificial Sequence
  Description of Artificial Sequence: Synthetic oligonucleotide
  Antisense strand to SEQ ID NO: 159972
augagaacuaguaacugcu

SEQ ID NO: 159974 - RNA, 19 nt, Artificial Sequence
  Description of Artificial Sequence: Synthetic oligonucleotide
  Sense strand starting at position 2 of SEQ ID NO: 2061
cugauaguuguccaaauga

SEQ ID NO: 159975 - RNA, 19 nt, Artificial Sequence
  Description of Artificial Sequence: Synthetic oligonucleotide
  Antisense strand to SEQ ID NO: 159974
ucauuuggacaacuaucag

SEQ ID NO: 159976 - RNA, 19 nt, Artificial Sequence
  Description of Artificial Sequence: Synthetic oligonucleotide
  Sense strand starting at position 1 of SEQ ID NO: 2061
ucugauaguuguccaaaug

SEQ ID NO: 159977 - RNA, 19 nt, Artificial Sequence
  Description of Artificial Sequence: Synthetic oligonucleotide
  Antisense strand to SEQ ID NO: 159976
cauuuggacaacuaucaga

SEQ ID NO: 159978 - RNA, 19 nt, Artificial Sequence
  Description of Artificial Sequence: Synthetic oligonucleotide
  Sense strand starting at position 3760 of SEQ ID NO: 2059
cuagauucuggaugcacaa

SEQ ID NO: 159979 - RNA, 19 nt, Artificial Sequence
  Description of Artificial Sequence: Synthetic oligonucleotide
  Antisense strand to SEQ ID NO: 159978
uugugcauccagaaucuag

SEQ ID NO: 159980 - RNA, 19 nt, Artificial Sequence
  Description of Artificial Sequence: Synthetic oligonucleotide
  Sense strand starting at position 3672 of SEQ ID NO: 2059
ccuccaucccuaggauaga

SEQ ID NO: 159981 - RNA, 19 nt, Artificial Sequence
  Description of Artificial Sequence: Synthetic oligonucleotide
  Antisense strand to SEQ ID NO: 159980
ucuauccuagggauggagg

SEQ ID NO: 159982 - RNA, 19 nt, Artificial Sequence
  Description of Artificial Sequence: Synthetic oligonucleotide
  Sense strand starting at position 3644 of SEQ ID NO: 2059
gucauuguccaaugagauu

SEQ ID NO: 159983 - RNA, 19 nt, Artificial Sequence
  Description of Artificial Sequence: Synthetic oligonucleotide
  Antisense strand to SEQ ID NO: 159982
aaucucauuggacaaugac

SEQ ID NO: 159984 - RNA, 19 nt, Artificial Sequence
  Description of Artificial Sequence: Synthetic oligonucleotide
  Sense strand starting at position 3640 of SEQ ID NO: 2059
uauggucauuguccaauga

SEQ ID NO: 159985 - RNA, 19 nt, Artificial Sequence
  Description of Artificial Sequence: Synthetic oligonucleotide
  Antisense strand to SEQ ID NO: 159984
ucauuggacaaugaccaua

SEQ ID NO: 159986 - RNA, 19 nt, Artificial Sequence
  Description of Artificial Sequence: Synthetic oligonucleotide
  Sense strand starting at position 3637 of SEQ ID NO: 2059
ugauauggucauuguccaa

SEQ ID NO: 159987 - RNA, 19 nt, Artificial Sequence
  Description of Artificial Sequence: Synthetic oligonucleotide
  Antisense strand to SEQ ID NO: 159986
uuggacaaugaccauauca

SEQ ID NO: 159988 - RNA, 19 nt, Artificial Sequence
  Description of Artificial Sequence: Synthetic oligonucleotide
  Sense strand starting at position 3634 of SEQ ID NO: 2059
gggugauauggucauuguc

SEQ ID NO: 159989 - RNA, 19 nt, Artificial Sequence
  Description of Artificial Sequence: Synthetic oligonucleotide
  Antisense strand to SEQ ID NO: 159988
gacaaugaccauaucaccc

SEQ ID NO: 159990 - RNA, 19 nt, Artificial Sequence
  Description of Artificial Sequence: Synthetic oligonucleotide
  Sense strand starting at position 3608 of SEQ ID NO: 2059
cuauguuuagaagaagcua

SEQ ID NO: 159991 - RNA, 19 nt, Artificial Sequence
  Description of Artificial Sequence: Synthetic oligonucleotide
  Antisense strand to SEQ ID NO: 159990
uagcuucuucuaaacauag

SEQ ID NO: 159992 - RNA, 19 nt, Artificial Sequence
  Description of Artificial Sequence: Synthetic oligonucleotide
  Sense strand starting at position 3597 of SEQ ID NO: 2059
agggaaagggccuauguuu

SEQ ID NO: 159993 - RNA, 19 nt, Artificial Sequence
  Description of Artificial Sequence: Synthetic oligonucleotide
  Antisense strand to SEQ ID NO: 159992
aaacauaggcccuuucccu

SEQ ID NO: 159994 - RNA, 19 nt, Artificial Sequence
  Description of Artificial Sequence: Synthetic oligonucleotide
  Sense strand starting at position 3293 of SEQ ID NO: 2059
agggacugcugagcuaaua

SEQ ID NO: 159995 - RNA, 19 nt, Artificial Sequence
  Description of Artificial Sequence: Synthetic oligonucleotide
  Antisense strand to SEQ ID NO: 159994
uauuagcucagcagucccu

SEQ ID NO: 159996 - RNA, 19 nt, Artificial Sequence
  Description of Artificial Sequence: Synthetic oligonucleotide
  Sense strand starting at position 3026 of SEQ ID NO: 2059
agagcaucccagcaaagau

SEQ ID NO: 159997 - RNA, 19 nt, Artificial Sequence
  Description of Artificial Sequence: Synthetic oligonucleotide
  Antisense strand to SEQ ID NO: 159996
aucuuugcugggaugcucu

SEQ ID NO: 159998 - RNA, 19 nt, Artificial Sequence
  Description of Artificial Sequence: Synthetic oligonucleotide
  Sense strand starting at position 3005 of SEQ ID NO: 2059
gaaucauggcuuuggaauc

SEQ ID NO: 159999 - RNA, 19 nt, Artificial Sequence
  Description of Artificial Sequence: Synthetic oligonucleotide
  Antisense strand to SEQ ID NO: 159998
gauuccaaagccaugauuc

SEQ ID NO: 160000 - RNA, 19 nt, Artificial Sequence
  Description of Artificial Sequence: Synthetic oligonucleotide
  Sense strand starting at position 3002 of SEQ ID NO: 2059
ucugaaucauggcuuugga

SEQ ID NO: 160001 - RNA, 19 nt, Artificial Sequence
  Description of Artificial Sequence: Synthetic oligonucleotide
  Antisense strand to SEQ ID NO: 160000
uccaaagccaugauucaga

SEQ ID NO: 160002 - RNA, 19 nt, Artificial Sequence
  Description of Artificial Sequence: Synthetic oligonucleotide
  Sense strand starting at position 2916 of SEQ ID NO: 2059
ggguaauuacuccagcaaa

SEQ ID NO: 160003 - RNA, 19 nt, Artificial Sequence
  Description of Artificial Sequence: Synthetic oligonucleotide
  Antisense strand to SEQ ID NO: 160002
uuugcuggaguaauuaccc

SEQ ID NO: 160004 - RNA, 19 nt, Artificial Sequence
  Description of Artificial Sequence: Synthetic oligonucleotide
  Sense strand starting at position 2906 of SEQ ID NO: 2059
gacuccauguggguaauua

SEQ ID NO: 160005 - RNA, 19 nt, Artificial Sequence
  Description of Artificial Sequence: Synthetic oligonucleotide
  Antisense strand to SEQ ID NO: 160004
uaauuacccacauggaguc

SEQ ID NO: 160006 - RNA, 19 nt, Artificial Sequence
  Description of Artificial Sequence: Synthetic oligonucleotide
  Sense strand starting at position 2905 of SEQ ID NO: 2059
agacuccauguggguaauu

SEQ ID NO: 160007 - RNA, 19 nt, Artificial Sequence
  Description of Artificial Sequence: Synthetic oligonucleotide
  Antisense strand to SEQ ID NO: 160006
aauuacccacauggagucu

SEQ ID NO: 160008 - RNA, 19 nt, Artificial Sequence
  Description of Artificial Sequence: Synthetic oligonucleotide
  Sense strand starting at position 2891 of SEQ ID NO: 2059
auuguuuggcuugaagacu

SEQ ID NO: 160009 - RNA, 19 nt, Artificial Sequence
  Description of Artificial Sequence: Synthetic oligonucleotide
  Antisense strand to SEQ ID NO: 160008
agucuucaagccaaacaau

SEQ ID NO: 160010 - RNA, 19 nt, Artificial Sequence
  Description of Artificial Sequence: Synthetic oligonucleotide
  Sense strand starting at position 2888 of SEQ ID NO: 2059
acaauuguuuggcuugaag

SEQ ID NO: 160011 - RNA, 19 nt, Artificial Sequence
  Description of Artificial Sequence: Synthetic oligonucleotide
  Antisense strand to SEQ ID NO: 160010
cuucaagccaaacaauugu

SEQ ID NO: 160012 - RNA, 19 nt, Artificial Sequence
  Description of Artificial Sequence: Synthetic oligonucleotide
  Sense strand starting at position 2866 of SEQ ID NO: 2059
cagugagacuaucucagua

SEQ ID NO: 160013 - RNA, 19 nt, Artificial Sequence
  Description of Artificial Sequence: Synthetic oligonucleotide
  Antisense strand to SEQ ID NO: 160012
uacugagauagucucacug

SEQ ID NO: 160014 - RNA, 19 nt, Artificial Sequence
  Description of Artificial Sequence: Synthetic oligonucleotide
  Sense strand starting at position 2775 of SEQ ID NO: 2059
agacauggcuucucugaau

SEQ ID NO: 160015 - RNA, 19 nt, Artificial Sequence
  Description of Artificial Sequence: Synthetic oligonucleotide
  Antisense strand to SEQ ID NO: 160014
auucagagaagccaugucu

SEQ ID NO: 160016 - RNA, 19 nt, Artificial Sequence
  Description of Artificial Sequence: Synthetic oligonucleotide
  Sense strand starting at position 2588 of SEQ ID NO: 2059
uuagauugcuuauuacaga

SEQ ID NO: 160017 - RNA, 19 nt, Artificial Sequence
  Description of Artificial Sequence: Synthetic oligonucleotide
  Antisense strand to SEQ ID NO: 160016
ucuguaauaagcaaucuaa

SEQ ID NO: 160018 - RNA, 19 nt, Artificial Sequence
  Description of Artificial Sequence: Synthetic oligonucleotide
  Sense strand starting at position 2183 of SEQ ID NO: 2059
gagcuccuuuagguaacaa

SEQ ID NO: 160019 - RNA, 19 nt, Artificial Sequence
  Description of Artificial Sequence: Synthetic oligonucleotide
  Antisense strand to SEQ ID NO: 160018
uuguuaccuaaaggagcuc

SEQ ID NO: 160020 - RNA, 19 nt, Artificial Sequence
  Description of Artificial Sequence: Synthetic oligonucleotide
  Sense strand starting at position 2030 of SEQ ID NO: 2059
guucuucuaagauaggguu

SEQ ID NO: 160021 - RNA, 19 nt, Artificial Sequence
  Description of Artificial Sequence: Synthetic oligonucleotide
  Antisense strand to SEQ ID NO: 160020
aacccuaucuuagaagaac

SEQ ID NO: 160022 - RNA, 19 nt, Artificial Sequence
  Description of Artificial Sequence: Synthetic oligonucleotide
  Sense strand starting at position 1423 of SEQ ID NO: 2059
uuuagauuauugucagaag

SEQ ID NO: 160023 - RNA, 19 nt, Artificial Sequence
  Description of Artificial Sequence: Synthetic oligonucleotide
  Antisense strand to SEQ ID NO: 160022
cuucugacaauaaucuaaa

SEQ ID NO: 160024 - RNA, 19 nt, Artificial Sequence
  Description of Artificial Sequence: Synthetic oligonucleotide
  Sense strand starting at position 1415 of SEQ ID NO: 2059
ggagaccauuuagauuauu

SEQ ID NO: 160025 - RNA, 19 nt, Artificial Sequence
  Description of Artificial Sequence: Synthetic oligonucleotide
  Antisense strand to SEQ ID NO: 160024
aauaaucuaaauggucucc

SEQ ID NO: 160026 - RNA, 19 nt, Artificial Sequence
  Description of Artificial Sequence: Synthetic oligonucleotide
  Sense strand starting at position 1358 of SEQ ID NO: 2059
agccaauuacauggauaau

SEQ ID NO: 160027 - RNA, 19 nt, Artificial Sequence
  Description of Artificial Sequence: Synthetic oligonucleotide
  Antisense strand to SEQ ID NO: 160026
auuauccauguaauuggcu

SEQ ID NO: 160028 - RNA, 19 nt, Artificial Sequence
  Description of Artificial Sequence: Synthetic oligonucleotide
  Sense strand starting at position 1185 of SEQ ID NO: 2059
uuagaacuguccucccaag

SEQ ID NO: 160029 - RNA, 19 nt, Artificial Sequence
  Description of Artificial Sequence: Synthetic oligonucleotide
  Antisense strand to SEQ ID NO: 160028
cuugggaggacaguucuaa

SEQ ID NO: 160030 - RNA, 19 nt, Artificial Sequence
  Description of Artificial Sequence: Synthetic oligonucleotide
  Sense strand starting at position 829 of SEQ ID NO: 2059
agaugagacugauugcaua

SEQ ID NO: 160031 - RNA, 19 nt, Artificial Sequence
  Description of Artificial Sequence: Synthetic oligonucleotide
  Antisense strand to SEQ ID NO: 160030
uaugcaaucagucucaucu

SEQ ID NO: 160032 - RNA, 19 nt, Artificial Sequence
  Description of Artificial Sequence: Synthetic oligonucleotide
  Sense strand starting at position 820 of SEQ ID NO: 2059
aagucagugagaugagacu

SEQ ID NO: 160033 - RNA, 19 nt, Artificial Sequence
  Description of Artificial Sequence: Synthetic oligonucleotide
  Antisense strand to SEQ ID NO: 160032
agucucaucucacugacuu

SEQ ID NO: 160034 - RNA, 19 nt, Artificial Sequence
  Description of Artificial Sequence: Synthetic oligonucleotide
  Sense strand starting at position 816 of SEQ ID NO: 2059
uguaaagucagugagauga

SEQ ID NO: 160035 - RNA, 19 nt, Artificial Sequence
  Description of Artificial Sequence: Synthetic oligonucleotide
  Antisense strand to SEQ ID NO: 160034
ucaucucacugacuuuaca

SEQ ID NO: 160036 - RNA, 19 nt, Artificial Sequence
  Description of Artificial Sequence: Synthetic oligonucleotide
  Sense strand starting at position 815 of SEQ ID NO: 2059
uuguaaagucagugagaug

SEQ ID NO: 160037 - RNA, 19 nt, Artificial Sequence
  Description of Artificial Sequence: Synthetic oligonucleotide
  Antisense strand to SEQ ID NO: 160036
caucucacugacuuuacaa

SEQ ID NO: 160038 - RNA, 19 nt, Artificial Sequence
  Description of Artificial Sequence: Synthetic oligonucleotide
  Sense strand starting at position 814 of SEQ ID NO: 2059
cuuguaaagucagugagau

SEQ ID NO: 160039 - RNA, 19 nt, Artificial Sequence
  Description of Artificial Sequence: Synthetic oligonucleotide
  Antisense strand to SEQ ID NO: 160038
aucucacugacuuuacaag

SEQ ID NO: 160040 - RNA, 19 nt, Artificial Sequence
  Description of Artificial Sequence: Synthetic oligonucleotide
  Sense strand starting at position 798 of SEQ ID NO: 2059
gccaguauugaagaaccuu

SEQ ID NO: 160041 - RNA, 19 nt, Artificial Sequence
  Description of Artificial Sequence: Synthetic oligonucleotide
  Antisense strand to SEQ ID NO: 160040
aagguucuucaauacuggc

SEQ ID NO: 160042 - RNA, 19 nt, Artificial Sequence
  Description of Artificial Sequence: Synthetic oligonucleotide
  Sense strand starting at position 620 of SEQ ID NO: 2059
ccaguugguccugggaaag

SEQ ID NO: 160043 - RNA, 19 nt, Artificial Sequence
  Description of Artificial Sequence: Synthetic oligonucleotide
  Antisense strand to SEQ ID NO: 160042
cuuucccaggaccaacugg

SEQ ID NO: 160044 - RNA, 19 nt, Artificial Sequence
  Description of Artificial Sequence: Synthetic oligonucleotide
  Sense strand starting at position 275 of SEQ ID NO: 2059
ugaucugggucuuuaauuc

SEQ ID NO: 160045 - RNA, 19 nt, Artificial Sequence
  Description of Artificial Sequence: Synthetic oligonucleotide
  Antisense strand to SEQ ID NO: 160044
gaauuaaagacccagauca

SEQ ID NO: 160046 - RNA, 19 nt, Artificial Sequence
  Description of Artificial Sequence: Synthetic oligonucleotide
  Sense strand starting at position 251 of SEQ ID NO: 2059
cuaaguauggcuuaaauuc

SEQ ID NO: 160047 - RNA, 19 nt, Artificial Sequence
  Description of Artificial Sequence: Synthetic oligonucleotide
  Antisense strand to SEQ ID NO: 160046
gaauuuaagccauacuuag

SEQ ID NO: 160048 - RNA, 19 nt, Artificial Sequence
  Description of Artificial Sequence: Synthetic oligonucleotide
  Sense strand starting at position 124 of SEQ ID NO: 2059
augagauccuaguuuggac

SEQ ID NO: 160049 - RNA, 19 nt, Artificial Sequence
  Description of Artificial Sequence: Synthetic oligonucleotide
  Antisense strand to SEQ ID NO: 160048
guccaaacuaggaucucau

SEQ ID NO: 160050 - RNA, 19 nt, Artificial Sequence
  Description of Artificial Sequence: Synthetic oligonucleotide
  Sense strand starting at position 64 of SEQ ID NO: 2059
ucagucauccuguaucauu

SEQ ID NO: 160051 - RNA, 19 nt, Artificial Sequence
  Description of Artificial Sequence: Synthetic oligonucleotide
  Antisense strand to SEQ ID NO: 160050
aaugauacaggaugacuga

SEQ ID NO: 160052 - RNA, 19 nt, Artificial Sequence
  Description of Artificial Sequence: Synthetic oligonucleotide
  Sense strand starting at position 24 of SEQ ID NO: 2059
guauacuuaggugauguuu

SEQ ID NO: 160053 - RNA, 19 nt, Artificial Sequence
  Description of Artificial Sequence: Synthetic oligonucleotide
  Antisense strand to SEQ ID NO: 160052
aaacaucaccuaaguauac

SEQ ID NO: 160054 - RNA, 19 nt, Artificial Sequence
  Description of Artificial Sequence: Synthetic oligonucleotide
  Sense strand starting at position 13 of SEQ ID NO: 2059
agguaacuaguguauacuu

SEQ ID NO: 160055 - RNA, 19 nt, Artificial Sequence
  Description of Artificial Sequence: Synthetic oligonucleotide
  Antisense strand to SEQ ID NO: 160054
aaguauacacuaguuaccu

SEQ ID NO: 160056 - RNA, 19 nt, Artificial Sequence
  Description of Artificial Sequence: Synthetic oligonucleotide
  Sense strand starting at position 8 of SEQ ID NO: 2059
guggaagguaacuagugua

SEQ ID NO: 160057 - RNA, 19 nt, Artificial Sequence
  Description of Artificial Sequence: Synthetic oligonucleotide
  Antisense strand to SEQ ID NO: 160056
uacacuaguuaccuuccac

SEQ ID NO: 160058 - RNA, 19 nt, Artificial Sequence
  Description of Artificial Sequence: Synthetic oligonucleotide
  Sense strand starting at position 3730 of SEQ ID NO: 2060
ugaucugggucuuuaauuc

SEQ ID NO: 160059 - RNA, 19 nt, Artificial Sequence
  Description of Artificial Sequence: Synthetic oligonucleotide
  Antisense strand to SEQ ID NO: 160058
gaauuaaagacccagauca

SEQ ID NO: 160060 - RNA, 19 nt, Artificial Sequence
  Description of Artificial Sequence: Synthetic oligonucleotide
  Sense strand starting at position 3706 of SEQ ID NO: 2060
cuaaguauggcuuaaauuc

SEQ ID NO: 160061 - RNA, 19 nt, Artificial Sequence
  Description of Artificial Sequence: Synthetic oligonucleotide
  Antisense strand to SEQ ID NO: 160060
gaauuuaagccauacuuag

SEQ ID NO: 160062 - RNA, 19 nt, Artificial Sequence
  Description of Artificial Sequence: Synthetic oligonucleotide
  Sense strand starting at position 3579 of SEQ ID NO: 2060
augagauccuaguuuggac

SEQ ID NO: 160063 - RNA, 19 nt, Artificial Sequence
  Description of Artificial Sequence: Synthetic oligonucleotide
  Antisense strand to SEQ ID NO: 160062
guccaaacuaggaucucau

SEQ ID NO: 160064 - RNA, 19 nt, Artificial Sequence
  Description of Artificial Sequence: Synthetic oligonucleotide
  Sense strand starting at position 3519 of SEQ ID NO: 2060
ucagucauccuguaucauu

SEQ ID NO: 160065 - RNA, 19 nt, Artificial Sequence
  Description of Artificial Sequence: Synthetic oligonucleotide
  Antisense strand to SEQ ID NO: 160064
aaugauacaggaugacuga

SEQ ID NO: 160066 - RNA, 19 nt, Artificial Sequence
  Description of Artificial Sequence: Synthetic oligonucleotide
  Sense strand starting at position 3479 of SEQ ID NO: 2060
guauacuuaggugauguuu

SEQ ID NO: 160067 - RNA, 19 nt, Artificial Sequence
  Description of Artificial Sequence: Synthetic oligonucleotide
  Antisense strand to SEQ ID NO: 160066
aaacaucaccuaaguauac

SEQ ID NO: 160068 - RNA, 19 nt, Artificial Sequence
  Description of Artificial Sequence: Synthetic oligonucleotide
  Sense strand starting at position 3468 of SEQ ID NO: 2060
agguaacuaguguauacuu

SEQ ID NO: 160069 - RNA, 19 nt, Artificial Sequence
  Description of Artificial Sequence: Synthetic oligonucleotide
  Antisense strand to SEQ ID NO: 160068
aaguauacacuaguuaccu

SEQ ID NO: 160070 - RNA, 19 nt, Artificial Sequence
  Description of Artificial Sequence: Synthetic oligonucleotide
  Sense strand starting at position 3463 of SEQ ID NO: 2060
guggaagguaacuagugua

SEQ ID NO: 160071 - RNA, 19 nt, Artificial Sequence
  Description of Artificial Sequence: Synthetic oligonucleotide
  Antisense strand to SEQ ID NO: 160070
uacacuaguuaccuuccac

SEQ ID NO: 160072 - RNA, 19 nt, Artificial Sequence
  Description of Artificial Sequence: Synthetic oligonucleotide
  Sense strand starting at position 2887 of SEQ ID NO: 2060
ugaaaugauuagucaaucu

SEQ ID NO: 160073 - RNA, 19 nt, Artificial Sequence
  Description of Artificial Sequence: Synthetic oligonucleotide
  Antisense strand to SEQ ID NO: 160072
agauugacuaaucauuuca

SEQ ID NO: 160074 - RNA, 19 nt, Artificial Sequence
  Description of Artificial Sequence: Synthetic oligonucleotide
  Sense strand starting at position 2786 of SEQ ID NO: 2060
ugugauuaccaauggagau

SEQ ID NO: 160075 - RNA, 19 nt, Artificial Sequence
  Description of Artificial Sequence: Synthetic oligonucleotide
  Antisense strand to SEQ ID NO: 160074
aucuccauugguaaucaca

SEQ ID NO: 160076 - RNA, 19 nt, Artificial Sequence
  Description of Artificial Sequence: Synthetic oligonucleotide
  Sense strand starting at position 2780 of SEQ ID NO: 2060
gacugcugugauuaccaau

SEQ ID NO: 160077 - RNA, 19 nt, Artificial Sequence
  Description of Artificial Sequence: Synthetic oligonucleotide
  Antisense strand to SEQ ID NO: 160076
auugguaaucacagcaguc

SEQ ID NO: 160078 - RNA, 19 nt, Artificial Sequence
  Description of Artificial Sequence: Synthetic oligonucleotide
  Sense strand starting at position 2741 of SEQ ID NO: 2060
ccaggagcucaaugauaga

SEQ ID NO: 160079 - RNA, 19 nt, Artificial Sequence
  Description of Artificial Sequence: Synthetic oligonucleotide
  Antisense strand to SEQ ID NO: 160078
ucuaucauugagcuccugg

SEQ ID NO: 160080 - RNA, 19 nt, Artificial Sequence
  Description of Artificial Sequence: Synthetic oligonucleotide
  Sense strand starting at position 2527 of SEQ ID NO: 2060
gacggcacccacuauuaga

SEQ ID NO: 160081 - RNA, 19 nt, Artificial Sequence
  Description of Artificial Sequence: Synthetic oligonucleotide
  Antisense strand to SEQ ID NO: 160080
ucuaauagugggugccguc

SEQ ID NO: 160082 - RNA, 19 nt, Artificial Sequence
  Description of Artificial Sequence: Synthetic oligonucleotide
  Sense strand starting at position 2327 of SEQ ID NO: 2060
gucugagacugguuagaga

SEQ ID NO: 160083 - RNA, 19 nt, Artificial Sequence
  Description of Artificial Sequence: Synthetic oligonucleotide
  Antisense strand to SEQ ID NO: 160082
ucucuaaccagucucagac

SEQ ID NO: 160084 - RNA, 19 nt, Artificial Sequence
  Description of Artificial Sequence: Synthetic oligonucleotide
  Sense strand starting at position 2325 of SEQ ID NO: 2060
augucugagacugguuaga

SEQ ID NO: 160085 - RNA, 19 nt, Artificial Sequence
  Description of Artificial Sequence: Synthetic oligonucleotide
  Antisense strand to SEQ ID NO: 160084
ucuaaccagucucagacau

SEQ ID NO: 160086 - RNA, 19 nt, Artificial Sequence
  Description of Artificial Sequence: Synthetic oligonucleotide
  Sense strand starting at position 2279 of SEQ ID NO: 2060
agcauaaguuaagcuuaaa

SEQ ID NO: 160087 - RNA, 19 nt, Artificial Sequence
  Description of Artificial Sequence: Synthetic oligonucleotide
  Antisense strand to SEQ ID NO: 160086
uuuaagcuuaacuuaugcu

SEQ ID NO: 160088 - RNA, 19 nt, Artificial Sequence
  Description of Artificial Sequence: Synthetic oligonucleotide
  Sense strand starting at position 2223 of SEQ ID NO: 2060
uguuguuuccguuugucaa

SEQ ID NO: 160089 - RNA, 19 nt, Artificial Sequence
  Description of Artificial Sequence: Synthetic oligonucleotide
  Antisense strand to SEQ ID NO: 160088
uugacaaacggaaacaaca

SEQ ID NO: 160090 - RNA, 19 nt, Artificial Sequence
  Description of Artificial Sequence: Synthetic oligonucleotide
  Sense strand starting at position 2096 of SEQ ID NO: 2060
uuugaacuucuguaaguac

SEQ ID NO: 160091 - RNA, 19 nt, Artificial Sequence
  Description of Artificial Sequence: Synthetic oligonucleotide
  Antisense strand to SEQ ID NO: 160090
guacuuacagaaguucaaa

SEQ ID NO: 160092 - RNA, 19 nt, Artificial Sequence
  Description of Artificial Sequence: Synthetic oligonucleotide
  Sense strand starting at position 1805 of SEQ ID NO: 2060
uuaauucuacgugacauaa

SEQ ID NO: 160093 - RNA, 19 nt, Artificial Sequence
  Description of Artificial Sequence: Synthetic oligonucleotide
  Antisense strand to SEQ ID NO: 160092
uuaugucacguagaauuaa

SEQ ID NO: 160094 - RNA, 19 nt, Artificial Sequence
  Description of Artificial Sequence: Synthetic oligonucleotide
  Sense strand starting at position 1803 of SEQ ID NO: 2060
gauuaauucuacgugacau

SEQ ID NO: 160095 - RNA, 19 nt, Artificial Sequence
  Description of Artificial Sequence: Synthetic oligonucleotide
  Antisense strand to SEQ ID NO: 160094
augucacguagaauuaauc

SEQ ID NO: 160096 - RNA, 19 nt, Artificial Sequence
  Description of Artificial Sequence: Synthetic oligonucleotide
  Sense strand starting at position 1802 of SEQ ID NO: 2060
agauuaauucuacgugaca

SEQ ID NO: 160097 - RNA, 19 nt, Artificial Sequence
  Description of Artificial Sequence: Synthetic oligonucleotide
  Antisense strand to SEQ ID NO: 160096
ugucacguagaauuaaucu

SEQ ID NO: 160098 - RNA, 19 nt, Artificial Sequence
  Description of Artificial Sequence: Synthetic oligonucleotide
  Sense strand starting at position 1743 of SEQ ID NO: 2060
gguuaaaugcaacauacau

SEQ ID NO: 160099 - RNA, 19 nt, Artificial Sequence
  Description of Artificial Sequence: Synthetic oligonucleotide
  Antisense strand to SEQ ID NO: 160098
auguauguugcauuuaacc

SEQ ID NO: 160100 - RNA, 19 nt, Artificial Sequence
  Description of Artificial Sequence: Synthetic oligonucleotide
  Sense strand starting at position 1670 of SEQ ID NO: 2060
auguuaggucuugaggaac

SEQ ID NO: 160101 - RNA, 19 nt, Artificial Sequence
  Description of Artificial Sequence: Synthetic oligonucleotide
  Antisense strand to SEQ ID NO: 160100
guuccucaagaccuaacau

SEQ ID NO: 160102 - RNA, 19 nt, Artificial Sequence
  Description of Artificial Sequence: Synthetic oligonucleotide
  Sense strand starting at position 1665 of SEQ ID NO: 2060
ugaagauguuaggucuuga

SEQ ID NO: 160103 - RNA, 19 nt, Artificial Sequence
  Description of Artificial Sequence: Synthetic oligonucleotide
  Antisense strand to SEQ ID NO: 160102
ucaagaccuaacaucuuca

SEQ ID NO: 160104 - RNA, 19 nt, Artificial Sequence
  Description of Artificial Sequence: Synthetic oligonucleotide
  Sense strand starting at position 1520 of SEQ ID NO: 2060
uggugaauugggugaacaa

SEQ ID NO: 160105 - RNA, 19 nt, Artificial Sequence
  Description of Artificial Sequence: Synthetic oligonucleotide
  Antisense strand to SEQ ID NO: 160104
uuguucacccaauucacca

SEQ ID NO: 160106 - RNA, 19 nt, Artificial Sequence
  Description of Artificial Sequence: Synthetic oligonucleotide
  Sense strand starting at position 1486 of SEQ ID NO: 2060
aguucucagggaugguaga

SEQ ID NO: 160107 - RNA, 19 nt, Artificial Sequence
  Description of Artificial Sequence: Synthetic oligonucleotide
  Antisense strand to SEQ ID NO: 160106
ucuaccaucccugagaacu

SEQ ID NO: 160108 - RNA, 19 nt, Artificial Sequence
  Description of Artificial Sequence: Synthetic oligonucleotide
  Sense strand starting at position 1484 of SEQ ID NO: 2060
ucaguucucagggauggua

SEQ ID NO: 160109 - RNA, 19 nt, Artificial Sequence
  Description of Artificial Sequence: Synthetic oligonucleotide
  Antisense strand to SEQ ID NO: 160108
uaccaucccugagaacuga

SEQ ID NO: 160110 - RNA, 19 nt, Artificial Sequence
  Description of Artificial Sequence: Synthetic oligonucleotide
  Sense strand starting at position 1483 of SEQ ID NO: 2060
aucaguucucagggauggu

SEQ ID NO: 160111 - RNA, 19 nt, Artificial Sequence
  Description of Artificial Sequence: Synthetic oligonucleotide
  Antisense strand to SEQ ID NO: 160110
accaucccugagaacugau

SEQ ID NO: 160112 - RNA, 19 nt, Artificial Sequence
  Description of Artificial Sequence: Synthetic oligonucleotide
  Sense strand starting at position 1479 of SEQ ID NO: 2060
gguaaucaguucucaggga

SEQ ID NO: 160113 - RNA, 19 nt, Artificial Sequence
  Description of Artificial Sequence: Synthetic oligonucleotide
  Antisense strand to SEQ ID NO: 160112
ucccugagaacugauuacc

SEQ ID NO: 160114 - RNA, 19 nt, Artificial Sequence
  Description of Artificial Sequence: Synthetic oligonucleotide
  Sense strand starting at position 1468 of SEQ ID NO: 2060
aacagagguuugguaauca

SEQ ID NO: 160115 - RNA, 19 nt, Artificial Sequence
  Description of Artificial Sequence: Synthetic oligonucleotide
  Antisense strand to SEQ ID NO: 160114
ugauuaccaaaccucuguu

SEQ ID NO: 160116 - RNA, 19 nt, Artificial Sequence
  Description of Artificial Sequence: Synthetic oligonucleotide
  Sense strand starting at position 1466 of SEQ ID NO: 2060
caaacagagguuugguaau

SEQ ID NO: 160117 - RNA, 19 nt, Artificial Sequence
  Description of Artificial Sequence: Synthetic oligonucleotide
  Antisense strand to SEQ ID NO: 160116
auuaccaaaccucuguuug

SEQ ID NO: 160118 - RNA, 19 nt, Artificial Sequence
  Description of Artificial Sequence: Synthetic oligonucleotide
  Sense strand starting at position 1423 of SEQ ID NO: 2060
gcagcauauccagaaauug

SEQ ID NO: 160119 - RNA, 19 nt, Artificial Sequence
  Description of Artificial Sequence: Synthetic oligonucleotide
  Antisense strand to SEQ ID NO: 160118
caauuucuggauaugcugc

SEQ ID NO: 160120 - RNA, 19 nt, Artificial Sequence
  Description of Artificial Sequence: Synthetic oligonucleotide
  Sense strand starting at position 1396 of SEQ ID NO: 2060
aacaauuaagguuguguaa

SEQ ID NO: 160121 - RNA, 19 nt, Artificial Sequence
  Description of Artificial Sequence: Synthetic oligonucleotide
  Antisense strand to SEQ ID NO: 160120
uuacacaaccuuaauuguu

SEQ ID NO: 160122 - RNA, 19 nt, Artificial Sequence
  Description of Artificial Sequence: Synthetic oligonucleotide
  Sense strand starting at position 1307 of SEQ ID NO: 2060
ggauuagguuacuuuggaa

SEQ ID NO: 160123 - RNA, 19 nt, Artificial Sequence
  Description of Artificial Sequence: Synthetic oligonucleotide
  Antisense strand to SEQ ID NO: 160122
uuccaaaguaaccuaaucc

SEQ ID NO: 160124 - RNA, 19 nt, Artificial Sequence
  Description of Artificial Sequence: Synthetic oligonucleotide
  Sense strand starting at position 1204 of SEQ ID NO: 2060
ugaauucgucaauaagcaa

SEQ ID NO: 160125 - RNA, 19 nt, Artificial Sequence
  Description of Artificial Sequence: Synthetic oligonucleotide
  Antisense strand to SEQ ID NO: 160124
uugcuuauugacgaauuca

SEQ ID NO: 160126 - RNA, 19 nt, Artificial Sequence
  Description of Artificial Sequence: Synthetic oligonucleotide
  Sense strand starting at position 1100 of SEQ ID NO: 2060
cuaugagcucuggaaggca

SEQ ID NO: 160127 - RNA, 19 nt, Artificial Sequence
  Description of Artificial Sequence: Synthetic oligonucleotide
  Antisense strand to SEQ ID NO: 160126
ugccuuccagagcucauag

SEQ ID NO: 160128 - RNA, 19 nt, Artificial Sequence
  Description of Artificial Sequence: Synthetic oligonucleotide
  Sense strand starting at position 1056 of SEQ ID NO: 2060
uaucuuguucgaguugcuu

SEQ ID NO: 160129 - RNA, 19 nt, Artificial Sequence
  Description of Artificial Sequence: Synthetic oligonucleotide
  Antisense strand to SEQ ID NO: 160128
aagcaacucgaacaagaua

SEQ ID NO: 160130 - RNA, 19 nt, Artificial Sequence
  Description of Artificial Sequence: Synthetic oligonucleotide
  Sense strand starting at position 856 of SEQ ID NO: 2060
ggaagucauaauugugaaa

SEQ ID NO: 160131 - RNA, 19 nt, Artificial Sequence
  Description of Artificial Sequence: Synthetic oligonucleotide
  Antisense strand to SEQ ID NO: 160130
uuucacaauuaugacuucc

SEQ ID NO: 160132 - RNA, 19 nt, Artificial Sequence
  Description of Artificial Sequence: Synthetic oligonucleotide
  Sense strand starting at position 850 of SEQ ID NO: 2060
ugcugaggaagucauaauu

SEQ ID NO: 160133 - RNA, 19 nt, Artificial Sequence
  Description of Artificial Sequence: Synthetic oligonucleotide
  Antisense strand to SEQ ID NO: 160132
aauuaugacuuccucagca

SEQ ID NO: 160134 - RNA, 19 nt, Artificial Sequence
  Description of Artificial Sequence: Synthetic oligonucleotide
  Sense strand starting at position 832 of SEQ ID NO: 2060
agccuuguacuuuacacau

SEQ ID NO: 160135 - RNA, 19 nt, Artificial Sequence
  Description of Artificial Sequence: Synthetic oligonucleotide
  Antisense strand to SEQ ID NO: 160134
auguguaaaguacaaggcu

SEQ ID NO: 160136 - RNA, 19 nt, Artificial Sequence
  Description of Artificial Sequence: Synthetic oligonucleotide
  Sense strand starting at position 814 of SEQ ID NO: 2060
uauauaaagucuguugaga

SEQ ID NO: 160137 - RNA, 19 nt, Artificial Sequence
  Description of Artificial Sequence: Synthetic oligonucleotide
  Antisense strand to SEQ ID NO: 160136
ucucaacagacuuuauaua

SEQ ID NO: 160138 - RNA, 19 nt, Artificial Sequence
  Description of Artificial Sequence: Synthetic oligonucleotide
  Sense strand starting at position 3911 of SEQ ID NO: 2058
gcccuugguagauagugaa

SEQ ID NO: 160139 - RNA, 19 nt, Artificial Sequence
  Description of Artificial Sequence: Synthetic oligonucleotide
  Antisense strand to SEQ ID NO: 160138
uucacuaucuaccaagggc

SEQ ID NO: 160140 - RNA, 19 nt, Artificial Sequence
  Description of Artificial Sequence: Synthetic oligonucleotide
  Sense strand starting at position 3905 of SEQ ID NO: 2058
agaacagcccuugguagau

SEQ ID NO: 160141 - RNA, 19 nt, Artificial Sequence
  Description of Artificial Sequence: Synthetic oligonucleotide
  Antisense strand to SEQ ID NO: 160140
aucuaccaagggcuguucu

SEQ ID NO: 160142 - RNA, 19 nt, Artificial Sequence
  Description of Artificial Sequence: Synthetic oligonucleotide
  Sense strand starting at position 3883 of SEQ ID NO: 2058
agauaaugccuguaauaua

SEQ ID NO: 160143 - RNA, 19 nt, Artificial Sequence
  Description of Artificial Sequence: Synthetic oligonucleotide
  Antisense strand to SEQ ID NO: 160142
uauauuacaggcauuaucu

SEQ ID NO: 160144 - RNA, 19 nt, Artificial Sequence
  Description of Artificial Sequence: Synthetic oligonucleotide
  Sense strand starting at position 3881 of SEQ ID NO: 2058
ugagauaaugccuguaaua

SEQ ID NO: 160145 - RNA, 19 nt, Artificial Sequence
  Description of Artificial Sequence: Synthetic oligonucleotide
  Antisense strand to SEQ ID NO: 160144
uauuacaggcauuaucuca

SEQ ID NO: 160146 - RNA, 19 nt, Artificial Sequence
  Description of Artificial Sequence: Synthetic oligonucleotide
  Sense strand starting at position 3880 of SEQ ID NO: 2058
cugagauaaugccuguaau

SEQ ID NO: 160147 - RNA, 19 nt, Artificial Sequence
  Description of Artificial Sequence: Synthetic oligonucleotide
  Antisense strand to SEQ ID NO: 160146
auuacaggcauuaucucag

SEQ ID NO: 160148 - RNA, 19 nt, Artificial Sequence
  Description of Artificial Sequence: Synthetic oligonucleotide
  Sense strand starting at position 3870 of SEQ ID NO: 2058
ugaggcuuagcugagauaa

SEQ ID NO: 160149 - RNA, 19 nt, Artificial Sequence
  Description of Artificial Sequence: Synthetic oligonucleotide
  Antisense strand to SEQ ID NO: 160148
uuaucucagcuaagccuca

SEQ ID NO: 160150 - RNA, 19 nt, Artificial Sequence
  Description of Artificial Sequence: Synthetic oligonucleotide
  Sense strand starting at position 3867 of SEQ ID NO: 2058
uuaugaggcuuagcugaga

SEQ ID NO: 160151 - RNA, 19 nt, Artificial Sequence
  Description of Artificial Sequence: Synthetic oligonucleotide
  Antisense strand to SEQ ID NO: 160150
ucucagcuaagccucauaa

SEQ ID NO: 160152 - RNA, 19 nt, Artificial Sequence
  Description of Artificial Sequence: Synthetic oligonucleotide
  Sense strand starting at position 3865 of SEQ ID NO: 2058
uauuaugaggcuuagcuga

SEQ ID NO: 160153 - RNA, 19 nt, Artificial Sequence
  Description of Artificial Sequence: Synthetic oligonucleotide
  Antisense strand to SEQ ID NO: 160152
ucagcuaagccucauaaua

SEQ ID NO: 160154 - RNA, 19 nt, Artificial Sequence
  Description of Artificial Sequence: Synthetic oligonucleotide
  Sense strand starting at position 3794 of SEQ ID NO: 2058
cuuggugccucaguuauuu

SEQ ID NO: 160155 - RNA, 19 nt, Artificial Sequence
  Description of Artificial Sequence: Synthetic oligonucleotide
  Antisense strand to SEQ ID NO: 160154
aaauaacugaggcaccaag

SEQ ID NO: 160156 - RNA, 19 nt, Artificial Sequence
  Description of Artificial Sequence: Synthetic oligonucleotide
  Sense strand starting at position 3717 of SEQ ID NO: 2058
gggcaagaaugcuuaaguu

SEQ ID NO: 160157 - RNA, 19 nt, Artificial Sequence
  Description of Artificial Sequence: Synthetic oligonucleotide
  Antisense strand to SEQ ID NO: 160156
aacuuaagcauucuugccc

SEQ ID NO: 160158 - RNA, 19 nt, Artificial Sequence
  Description of Artificial Sequence: Synthetic oligonucleotide
  Sense strand starting at position 3677 of SEQ ID NO: 2058
gagagaucucauggcuuug

SEQ ID NO: 160159 - RNA, 19 nt, Artificial Sequence
  Description of Artificial Sequence: Synthetic oligonucleotide
  Antisense strand to SEQ ID NO: 160158
caaagccaugagaucucuc

SEQ ID NO: 160160 - RNA, 19 nt, Artificial Sequence
  Description of Artificial Sequence: Synthetic oligonucleotide
  Sense strand starting at position 3583 of SEQ ID NO: 2058
gccaauucugauggacuca

SEQ ID NO: 160161 - RNA, 19 nt, Artificial Sequence
  Description of Artificial Sequence: Synthetic oligonucleotide
  Antisense strand to SEQ ID NO: 160160
ugaguccaucagaauuggc

SEQ ID NO: 160162 - RNA, 19 nt, Artificial Sequence
  Description of Artificial Sequence: Synthetic oligonucleotide
  Sense strand starting at position 3527 of SEQ ID NO: 2058
gucuaaaucugguuaaauu

SEQ ID NO: 160163 - RNA, 19 nt, Artificial Sequence
  Description of Artificial Sequence: Synthetic oligonucleotide
  Antisense strand to SEQ ID NO: 160162
aauuuaaccagauuuagac

SEQ ID NO: 160164 - RNA, 19 nt, Artificial Sequence
  Description of Artificial Sequence: Synthetic oligonucleotide
  Sense strand starting at position 3249 of SEQ ID NO: 2058
agucaagauuaacuaguua

SEQ ID NO: 160165 - RNA, 19 nt, Artificial Sequence
  Description of Artificial Sequence: Synthetic oligonucleotide
  Antisense strand to SEQ ID NO: 160164
uaacuaguuaaucuugacu

SEQ ID NO: 160166 - RNA, 19 nt, Artificial Sequence
  Description of Artificial Sequence: Synthetic oligonucleotide
  Sense strand starting at position 2979 of SEQ ID NO: 2058
uuaucuaaacucuggugaa

SEQ ID NO: 160167 - RNA, 19 nt, Artificial Sequence
  Description of Artificial Sequence: Synthetic oligonucleotide
  Antisense strand to SEQ ID NO: 160166
uucaccagaguuuagauaa

SEQ ID NO: 160168 - RNA, 19 nt, Artificial Sequence
  Description of Artificial Sequence: Synthetic oligonucleotide
  Sense strand starting at position 2970 of SEQ ID NO: 2058
ugcuaagaguuaucuaaac

SEQ ID NO: 160169 - RNA, 19 nt, Artificial Sequence
  Description of Artificial Sequence: Synthetic oligonucleotide
  Antisense strand to SEQ ID NO: 160168
guuuagauaacucuuagca

SEQ ID NO: 160170 - RNA, 19 nt, Artificial Sequence
  Description of Artificial Sequence: Synthetic oligonucleotide
  Sense strand starting at position 2925 of SEQ ID NO: 2058
ucuggcugccauggaaaua

SEQ ID NO: 160171 - RNA, 19 nt, Artificial Sequence
  Description of Artificial Sequence: Synthetic oligonucleotide
  Antisense strand to SEQ ID NO: 160170
uauuuccauggcagccaga

SEQ ID NO: 160172 - RNA, 19 nt, Artificial Sequence
  Description of Artificial Sequence: Synthetic oligonucleotide
  Sense strand starting at position 2887 of SEQ ID NO: 2058
gaaacagcaugauccgauu

SEQ ID NO: 160173 - RNA, 19 nt, Artificial Sequence
  Description of Artificial Sequence: Synthetic oligonucleotide
  Antisense strand to SEQ ID NO: 160172
aaucggaucaugcuguuuc

SEQ ID NO: 160174 - RNA, 19 nt, Artificial Sequence
  Description of Artificial Sequence: Synthetic oligonucleotide
  Sense strand starting at position 2837 of SEQ ID NO: 2058
cgauguuacugagaaauuu

SEQ ID NO: 160175 - RNA, 19 nt, Artificial Sequence
  Description of Artificial Sequence: Synthetic oligonucleotide
  Antisense strand to SEQ ID NO: 160174
aaauuucucaguaacaucg

SEQ ID NO: 160176 - RNA, 19 nt, Artificial Sequence
  Description of Artificial Sequence: Synthetic oligonucleotide
  Sense strand starting at position 2663 of SEQ ID NO: 2058
gugauuaaagcauagcaca

SEQ ID NO: 160177 - RNA, 19 nt, Artificial Sequence
  Description of Artificial Sequence: Synthetic oligonucleotide
  Antisense strand to SEQ ID NO: 160176
ugugcuaugcuuuaaucac

SEQ ID NO: 160178 - RNA, 19 nt, Artificial Sequence
  Description of Artificial Sequence: Synthetic oligonucleotide
  Sense strand starting at position 2343 of SEQ ID NO: 2058
uaaccugaggguuguugau

SEQ ID NO: 160179 - RNA, 19 nt, Artificial Sequence
  Description of Artificial Sequence: Synthetic oligonucleotide
  Antisense strand to SEQ ID NO: 160178
aucaacaacccucagguua

SEQ ID NO: 160180 - RNA, 19 nt, Artificial Sequence
  Description of Artificial Sequence: Synthetic oligonucleotide
  Sense strand starting at position 2326 of SEQ ID NO: 2058
cuaugaucauccuuaugua

SEQ ID NO: 160181 - RNA, 19 nt, Artificial Sequence
  Description of Artificial Sequence: Synthetic oligonucleotide
  Antisense strand to SEQ ID NO: 160180
uacauaaggaugaucauag

SEQ ID NO: 160182 - RNA, 19 nt, Artificial Sequence
  Description of Artificial Sequence: Synthetic oligonucleotide
  Sense strand starting at position 2277 of SEQ ID NO: 2058
guguuaagcgcuuugcaug

SEQ ID NO: 160183 - RNA, 19 nt, Artificial Sequence
  Description of Artificial Sequence: Synthetic oligonucleotide
  Antisense strand to SEQ ID NO: 160182
caugcaaagcgcuuaacac

SEQ ID NO: 160184 - RNA, 19 nt, Artificial Sequence
  Description of Artificial Sequence: Synthetic oligonucleotide
  Sense strand starting at position 2276 of SEQ ID NO: 2058
uguguuaagcgcuuugcau

SEQ ID NO: 160185 - RNA, 19 nt, Artificial Sequence
  Description of Artificial Sequence: Synthetic oligonucleotide
  Antisense strand to SEQ ID NO: 160184
augcaaagcgcuuaacaca

SEQ ID NO: 160186 - RNA, 19 nt, Artificial Sequence
  Description of Artificial Sequence: Synthetic oligonucleotide
  Sense strand starting at position 2275 of SEQ ID NO: 2058
cuguguuaagcgcuuugca

SEQ ID NO: 160187 - RNA, 19 nt, Artificial Sequence
  Description of Artificial Sequence: Synthetic oligonucleotide
  Antisense strand to SEQ ID NO: 160186
ugcaaagcgcuuaacacag

SEQ ID NO: 160188 - RNA, 19 nt, Artificial Sequence
  Description of Artificial Sequence: Synthetic oligonucleotide
  Sense strand starting at position 2265 of SEQ ID NO: 2058
gcgcuaggcacuguguuaa

SEQ ID NO: 160189 - RNA, 19 nt, Artificial Sequence
  Description of Artificial Sequence: Synthetic oligonucleotide
  Antisense strand to SEQ ID NO: 160188
uuaacacagugccuagcgc

SEQ ID NO: 160190 - RNA, 19 nt, Artificial Sequence
  Description of Artificial Sequence: Synthetic oligonucleotide
  Sense strand starting at position 2091 of SEQ ID NO: 2058
gaaccaauccguggagaag

SEQ ID NO: 160191 - RNA, 19 nt, Artificial Sequence
  Description of Artificial Sequence: Synthetic oligonucleotide
  Antisense strand to SEQ ID NO: 160190
cuucuccacggauugguuc

SEQ ID NO: 160192 - RNA, 19 nt, Artificial Sequence
  Description of Artificial Sequence: Synthetic oligonucleotide
  Sense strand starting at position 2090 of SEQ ID NO: 2058
ggaaccaauccguggagaa

SEQ ID NO: 160193 - RNA, 19 nt, Artificial Sequence
  Description of Artificial Sequence: Synthetic oligonucleotide
  Antisense strand to SEQ ID NO: 160192
uucuccacggauugguucc

SEQ ID NO: 160194 - RNA, 19 nt, Artificial Sequence
  Description of Artificial Sequence: Synthetic oligonucleotide
  Sense strand starting at position 1480 of SEQ ID NO: 2058
cuaccuuuagacuggcaau

SEQ ID NO: 160195 - RNA, 19 nt, Artificial Sequence
  Description of Artificial Sequence: Synthetic oligonucleotide
  Antisense strand to SEQ ID NO: 160194
auugccagucuaaagguag

SEQ ID NO: 160196 - RNA, 19 nt, Artificial Sequence
  Description of Artificial Sequence: Synthetic oligonucleotide
  Sense strand starting at position 959 of SEQ ID NO: 2058
aggaguugcuaaccaaaua

SEQ ID NO: 160197 - RNA, 19 nt, Artificial Sequence
  Description of Artificial Sequence: Synthetic oligonucleotide
  Antisense strand to SEQ ID NO: 160196
uauuugguuagcaacuccu

SEQ ID NO: 160198 - RNA, 19 nt, Artificial Sequence
  Description of Artificial Sequence: Synthetic oligonucleotide
  Sense strand starting at position 838 of SEQ ID NO: 2058
ggcuacacugccuagaaau

SEQ ID NO: 160199 - RNA, 19 nt, Artificial Sequence
  Description of Artificial Sequence: Synthetic oligonucleotide
  Antisense strand to SEQ ID NO: 160198
auuucuaggcaguguagcc

SEQ ID NO: 160200 - RNA, 19 nt, Artificial Sequence
  Description of Artificial Sequence: Synthetic oligonucleotide
  Sense strand starting at position 837 of SEQ ID NO: 2058
gggcuacacugccuagaaa

SEQ ID NO: 160201 - RNA, 19 nt, Artificial Sequence
  Description of Artificial Sequence: Synthetic oligonucleotide
  Antisense strand to SEQ ID NO: 160200
uuucuaggcaguguagccc

SEQ ID NO: 160202 - RNA, 19 nt, Artificial Sequence
  Description of Artificial Sequence: Synthetic oligonucleotide
  Sense strand starting at position 696 of SEQ ID NO: 2058
aaguguaaucgccauggaa

SEQ ID NO: 160203 - RNA, 19 nt, Artificial Sequence
  Description of Artificial Sequence: Synthetic oligonucleotide
  Antisense strand to SEQ ID NO: 160202
uuccauggcgauuacacuu

SEQ ID NO: 160204 - RNA, 19 nt, Artificial Sequence
  Description of Artificial Sequence: Synthetic oligonucleotide
  Sense strand starting at position 652 of SEQ ID NO: 2058
cuaaaugguucugccaauu

SEQ ID NO: 160205 - RNA, 19 nt, Artificial Sequence
  Description of Artificial Sequence: Synthetic oligonucleotide
  Antisense strand to SEQ ID NO: 160204
aauuggcagaaccauuuag

SEQ ID NO: 160206 - RNA, 19 nt, Artificial Sequence
  Description of Artificial Sequence: Synthetic oligonucleotide
  Sense strand starting at position 622 of SEQ ID NO: 2058
augaaucuucuagggcaca

SEQ ID NO: 160207 - RNA, 19 nt, Artificial Sequence
  Description of Artificial Sequence: Synthetic oligonucleotide
  Antisense strand to SEQ ID NO: 160206
ugugcccuagaagauucau

SEQ ID NO: 160208 - RNA, 19 nt, Artificial Sequence
  Description of Artificial Sequence: Synthetic oligonucleotide
  Sense strand starting at position 209 of SEQ ID NO: 2058
uuacuaggugucuauguau

SEQ ID NO: 160209 - RNA, 19 nt, Artificial Sequence
  Description of Artificial Sequence: Synthetic oligonucleotide
  Antisense strand to SEQ ID NO: 160208
auacauagacaccuaguaa

SEQ ID NO: 160210 - RNA, 19 nt, Artificial Sequence
  Description of Artificial Sequence: Synthetic oligonucleotide
  Sense strand starting at position 204 of SEQ ID NO: 2058
auacauuacuaggugucua

SEQ ID NO: 160211 - RNA, 19 nt, Artificial Sequence
  Description of Artificial Sequence: Synthetic oligonucleotide
  Antisense strand to SEQ ID NO: 160210
uagacaccuaguaauguau

SEQ ID NO: 160212 - RNA, 19 nt, Artificial Sequence
  Description of Artificial Sequence: Synthetic oligonucleotide
  Sense strand starting at position 185 of SEQ ID NO: 2058
guugguagaggucacuaaa

SEQ ID NO: 160213 - RNA, 19 nt, Artificial Sequence
  Description of Artificial Sequence: Synthetic oligonucleotide
  Antisense strand to SEQ ID NO: 160212
uuuagugaccucuaccaac

SEQ ID NO: 160214 - RNA, 19 nt, Artificial Sequence
  Description of Artificial Sequence: Synthetic oligonucleotide
  Sense strand starting at position 173 of SEQ ID NO: 2058
uuccauuuaucuguuggua

SEQ ID NO: 160215 - RNA, 19 nt, Artificial Sequence
  Description of Artificial Sequence: Synthetic oligonucleotide
  Antisense strand to SEQ ID NO: 160214
uaccaacagauaaauggaa

SEQ ID NO: 160216 - RNA, 19 nt, Artificial Sequence
  Description of Artificial Sequence: Synthetic oligonucleotide
  Sense strand starting at position 138 of SEQ ID NO: 2058
aaagaagucuaggaauuug

SEQ ID NO: 160217 - RNA, 19 nt, Artificial Sequence
  Description of Artificial Sequence: Synthetic oligonucleotide
  Antisense strand to SEQ ID NO: 160216
caaauuccuagacuucuuu

SEQ ID NO: 160218 - RNA, 19 nt, Artificial Sequence
  Description of Artificial Sequence: Synthetic oligonucleotide
  Sense strand starting at position 3750 of SEQ ID NO: 2062
guuaaugaauauguugaga

SEQ ID NO: 160219 - RNA, 19 nt, Artificial Sequence
  Description of Artificial Sequence: Synthetic oligonucleotide
  Antisense strand to SEQ ID NO: 160218
ucucaacauauucauuaac

SEQ ID NO: 160220 - RNA, 19 nt, Artificial Sequence
  Description of Artificial Sequence: Synthetic oligonucleotide
  Sense strand starting at position 3739 of SEQ ID NO: 2062
ucacauuaguuguuaauga

SEQ ID NO: 160221 - RNA, 19 nt, Artificial Sequence
  Description of Artificial Sequence: Synthetic oligonucleotide
  Antisense strand to SEQ ID NO: 160220
ucauuaacaacuaauguga

SEQ ID NO: 160222 - RNA, 19 nt, Artificial Sequence
  Description of Artificial Sequence: Synthetic oligonucleotide
  Sense strand starting at position 3736 of SEQ ID NO: 2062
ugaucacauuaguuguuaa

SEQ ID NO: 160223 - RNA, 19 nt, Artificial Sequence
  Description of Artificial Sequence: Synthetic oligonucleotide
  Antisense strand to SEQ ID NO: 160222
uuaacaacuaaugugauca

SEQ ID NO: 160224 - RNA, 19 nt, Artificial Sequence
  Description of Artificial Sequence: Synthetic oligonucleotide
  Sense strand starting at position 3710 of SEQ ID NO: 2062
acagucuggcaacaaauau

SEQ ID NO: 160225 - RNA, 19 nt, Artificial Sequence
  Description of Artificial Sequence: Synthetic oligonucleotide
  Antisense strand to SEQ ID NO: 160224
auauuuguugccagacugu

SEQ ID NO: 160226 - RNA, 19 nt, Artificial Sequence
  Description of Artificial Sequence: Synthetic oligonucleotide
  Sense strand starting at position 3563 of SEQ ID NO: 2062
aaguucuuucuaggaagag

SEQ ID NO: 160227 - RNA, 19 nt, Artificial Sequence
  Description of Artificial Sequence: Synthetic oligonucleotide
  Antisense strand to SEQ ID NO: 160226
cucuuccuagaaagaacuu

SEQ ID NO: 160228 - RNA, 19 nt, Artificial Sequence
  Description of Artificial Sequence: Synthetic oligonucleotide
  Sense strand starting at position 3558 of SEQ ID NO: 2062
gaauuaaguucuuucuagg

SEQ ID NO: 160229 - RNA, 19 nt, Artificial Sequence
  Description of Artificial Sequence: Synthetic oligonucleotide
  Antisense strand to SEQ ID NO: 160228
ccuagaaagaacuuaauuc

SEQ ID NO: 160230 - RNA, 19 nt, Artificial Sequence
  Description of Artificial Sequence: Synthetic oligonucleotide
  Sense strand starting at position 3557 of SEQ ID NO: 2062
agaauuaaguucuuucuag

SEQ ID NO: 160231 - RNA, 19 nt, Artificial Sequence
  Description of Artificial Sequence: Synthetic oligonucleotide
  Antisense strand to SEQ ID NO: 160230
cuagaaagaacuuaauucu

SEQ ID NO: 160232 - RNA, 19 nt, Artificial Sequence
  Description of Artificial Sequence: Synthetic oligonucleotide
  Sense strand starting at position 3370 of SEQ ID NO: 2062
uugggaaguaugugaauug

SEQ ID NO: 160233 - RNA, 19 nt, Artificial Sequence
  Description of Artificial Sequence: Synthetic oligonucleotide
  Antisense strand to SEQ ID NO: 160232
caauucacauacuucccaa

SEQ ID NO: 160234 - RNA, 19 nt, Artificial Sequence
  Description of Artificial Sequence: Synthetic oligonucleotide
  Sense strand starting at position 3366 of SEQ ID NO: 2062
acucuugggaaguauguga

SEQ ID NO: 160235 - RNA, 19 nt, Artificial Sequence
  Description of Artificial Sequence: Synthetic oligonucleotide
  Antisense strand to SEQ ID NO: 160234
ucacauacuucccaagagu

SEQ ID NO: 160236 - RNA, 19 nt, Artificial Sequence
  Description of Artificial Sequence: Synthetic oligonucleotide
  Sense strand starting at position 3325 of SEQ ID NO: 2062
gucugaaguccaggacaga

SEQ ID NO: 160237 - RNA, 19 nt, Artificial Sequence
  Description of Artificial Sequence: Synthetic oligonucleotide
  Antisense strand to SEQ ID NO: 160236
ucuguccuggacuucagac

SEQ ID NO: 160238 - RNA, 19 nt, Artificial Sequence
  Description of Artificial Sequence: Synthetic oligonucleotide
  Sense strand starting at position 3212 of SEQ ID NO: 2062
cuggauagcuggagugaga

SEQ ID NO: 160239 - RNA, 19 nt, Artificial Sequence
  Description of Artificial Sequence: Synthetic oligonucleotide
  Antisense strand to SEQ ID NO: 160238
ucucacuccagcuauccag

SEQ ID NO: 160240 - RNA, 19 nt, Artificial Sequence
  Description of Artificial Sequence: Synthetic oligonucleotide
  Sense strand starting at position 3118 of SEQ ID NO: 2062
ccuagaagugagcacagua

SEQ ID NO: 160241 - RNA, 19 nt, Artificial Sequence
  Description of Artificial Sequence: Synthetic oligonucleotide
  Antisense strand to SEQ ID NO: 160240
uacugugcucacuucuagg

SEQ ID NO: 160242 - RNA, 19 nt, Artificial Sequence
  Description of Artificial Sequence: Synthetic oligonucleotide
  Sense strand starting at position 3100 of SEQ ID NO: 2062
cucucuuggucauugagac

SEQ ID NO: 160243 - RNA, 19 nt, Artificial Sequence
  Description of Artificial Sequence: Synthetic oligonucleotide
  Antisense strand to SEQ ID NO: 160242
gucucaaugaccaagagag

SEQ ID NO: 160244 - RNA, 19 nt, Artificial Sequence
  Description of Artificial Sequence: Synthetic oligonucleotide
  Sense strand starting at position 3036 of SEQ ID NO: 2062
gaguguaaauauccuaguc

SEQ ID NO: 160245 - RNA, 19 nt, Artificial Sequence
  Description of Artificial Sequence: Synthetic oligonucleotide
  Antisense strand to SEQ ID NO: 160244
gacuaggauauuuacacuc

SEQ ID NO: 160246 - RNA, 19 nt, Artificial Sequence
  Description of Artificial Sequence: Synthetic oligonucleotide
  Sense strand starting at position 2902 of SEQ ID NO: 2062
gcaugccugccauaaacau

SEQ ID NO: 160247 - RNA, 19 nt, Artificial Sequence
  Description of Artificial Sequence: Synthetic oligonucleotide
  Antisense strand to SEQ ID NO: 160246
auguuuauggcaggcaugc

SEQ ID NO: 160248 - RNA, 19 nt, Artificial Sequence
  Description of Artificial Sequence: Synthetic oligonucleotide
  Sense strand starting at position 2882 of SEQ ID NO: 2062
aaauucuguucuucuggga

SEQ ID NO: 160249 - RNA, 19 nt, Artificial Sequence
  Description of Artificial Sequence: Synthetic oligonucleotide
  Antisense strand to SEQ ID NO: 160248
ucccagaagaacagaauuu

SEQ ID NO: 160250 - RNA, 19 nt, Artificial Sequence
  Description of Artificial Sequence: Synthetic oligonucleotide
  Sense strand starting at position 2879 of SEQ ID NO: 2062
aggaaauucuguucuucug

SEQ ID NO: 160251 - RNA, 19 nt, Artificial Sequence
  Description of Artificial Sequence: Synthetic oligonucleotide
  Antisense strand to SEQ ID NO: 160250
cagaagaacagaauuuccu

SEQ ID NO: 160252 - RNA, 19 nt, Artificial Sequence
  Description of Artificial Sequence: Synthetic oligonucleotide
  Sense strand starting at position 2877 of SEQ ID NO: 2062
cuaggaaauucuguucuuc

SEQ ID NO: 160253 - RNA, 19 nt, Artificial Sequence
  Description of Artificial Sequence: Synthetic oligonucleotide
  Antisense strand to SEQ ID NO: 160252
gaagaacagaauuuccuag

SEQ ID NO: 160254 - RNA, 19 nt, Artificial Sequence
  Description of Artificial Sequence: Synthetic oligonucleotide
  Sense strand starting at position 2672 of SEQ ID NO: 2062
gagaaacugggaugccuua

SEQ ID NO: 160255 - RNA, 19 nt, Artificial Sequence
  Description of Artificial Sequence: Synthetic oligonucleotide
  Antisense strand to SEQ ID NO: 160254
uaaggcaucccaguuucuc

SEQ ID NO: 160256 - RNA, 19 nt, Artificial Sequence
  Description of Artificial Sequence: Synthetic oligonucleotide
  Sense strand starting at position 2484 of SEQ ID NO: 2062
ugugaaaguauaggcuauu

SEQ ID NO: 160257 - RNA, 19 nt, Artificial Sequence
  Description of Artificial Sequence: Synthetic oligonucleotide
  Antisense strand to SEQ ID NO: 160256
aauagccuauacuuucaca

SEQ ID NO: 160258 - RNA, 19 nt, Artificial Sequence
  Description of Artificial Sequence: Synthetic oligonucleotide
  Sense strand starting at position 2451 of SEQ ID NO: 2062
gugugucugggaggacauu

SEQ ID NO: 160259 - RNA, 19 nt, Artificial Sequence
  Description of Artificial Sequence: Synthetic oligonucleotide
  Antisense strand to SEQ ID NO: 160258
aauguccucccagacacac

SEQ ID NO: 160260 - RNA, 19 nt, Artificial Sequence
  Description of Artificial Sequence: Synthetic oligonucleotide
  Sense strand starting at position 2256 of SEQ ID NO: 2062
agcucaaugggauguaguu

SEQ ID NO: 160261 - RNA, 19 nt, Artificial Sequence
  Description of Artificial Sequence: Synthetic oligonucleotide
  Antisense strand to SEQ ID NO: 160260
aacuacaucccauugagcu

SEQ ID NO: 160262 - RNA, 19 nt, Artificial Sequence
  Description of Artificial Sequence: Synthetic oligonucleotide
  Sense strand starting at position 2132 of SEQ ID NO: 2062
gguuucuuuccugaaagau

SEQ ID NO: 160263 - RNA, 19 nt, Artificial Sequence
  Description of Artificial Sequence: Synthetic oligonucleotide
  Antisense strand to SEQ ID NO: 160262
aucuuucaggaaagaaacc

SEQ ID NO: 160264 - RNA, 19 nt, Artificial Sequence
  Description of Artificial Sequence: Synthetic oligonucleotide
  Sense strand starting at position 2130 of SEQ ID NO: 2062
uugguuucuuuccugaaag

SEQ ID NO: 160265 - RNA, 19 nt, Artificial Sequence
  Description of Artificial Sequence: Synthetic oligonucleotide
  Antisense strand to SEQ ID NO: 160264
cuuucaggaaagaaaccaa

SEQ ID NO: 160266 - RNA, 19 nt, Artificial Sequence
  Description of Artificial Sequence: Synthetic oligonucleotide
  Sense strand starting at position 2129 of SEQ ID NO: 2062
uuugguuucuuuccugaaa

SEQ ID NO: 160267 - RNA, 19 nt, Artificial Sequence
  Description of Artificial Sequence: Synthetic oligonucleotide
  Antisense strand to SEQ ID NO: 160266
uuucaggaaagaaaccaaa

SEQ ID NO: 160268 - RNA, 19 nt, Artificial Sequence
  Description of Artificial Sequence: Synthetic oligonucleotide
  Sense strand starting at position 2024 of SEQ ID NO: 2062
ugcuaaugccaagauucua

SEQ ID NO: 160269 - RNA, 19 nt, Artificial Sequence
  Description of Artificial Sequence: Synthetic oligonucleotide
  Antisense strand to SEQ ID NO: 160268
uagaaucuuggcauuagca

SEQ ID NO: 160270 - RNA, 19 nt, Artificial Sequence
  Description of Artificial Sequence: Synthetic oligonucleotide
  Sense strand starting at position 1795 of SEQ ID NO: 2062
guagguaaauacguaauga

SEQ ID NO: 160271 - RNA, 19 nt, Artificial Sequence
  Description of Artificial Sequence: Synthetic oligonucleotide
  Antisense strand to SEQ ID NO: 160270
ucauuacguauuuaccuac

SEQ ID NO: 160272 - RNA, 19 nt, Artificial Sequence
  Description of Artificial Sequence: Synthetic oligonucleotide
  Sense strand starting at position 1787 of SEQ ID NO: 2062
gggucucaguagguaaaua

SEQ ID NO: 160273 - RNA, 19 nt, Artificial Sequence
  Description of Artificial Sequence: Synthetic oligonucleotide
  Antisense strand to SEQ ID NO: 160272
uauuuaccuacugagaccc

SEQ ID NO: 160274 - RNA, 19 nt, Artificial Sequence
  Description of Artificial Sequence: Synthetic oligonucleotide
  Sense strand starting at position 1786 of SEQ ID NO: 2062
ugggucucaguagguaaau

SEQ ID NO: 160275 - RNA, 19 nt, Artificial Sequence
  Description of Artificial Sequence: Synthetic oligonucleotide
  Antisense strand to SEQ ID NO: 160274
auuuaccuacugagaccca

SEQ ID NO: 160276 - RNA, 19 nt, Artificial Sequence
  Description of Artificial Sequence: Synthetic oligonucleotide
  Sense strand starting at position 1728 of SEQ ID NO: 2062
ccugaaagauaggaugaau

SEQ ID NO: 160277 - RNA, 19 nt, Artificial Sequence
  Description of Artificial Sequence: Synthetic oligonucleotide
  Antisense strand to SEQ ID NO: 160276
auucauccuaucuuucagg

SEQ ID NO: 160278 - RNA, 19 nt, Artificial Sequence
  Description of Artificial Sequence: Synthetic oligonucleotide
  Sense strand starting at position 1640 of SEQ ID NO: 2062
cuguuaguuccauaaacac

SEQ ID NO: 160279 - RNA, 19 nt, Artificial Sequence
  Description of Artificial Sequence: Synthetic oligonucleotide
  Antisense strand to SEQ ID NO: 160278
guguuuauggaacuaacag

SEQ ID NO: 160280 - RNA, 19 nt, Artificial Sequence
  Description of Artificial Sequence: Synthetic oligonucleotide
  Sense strand starting at position 1556 of SEQ ID NO: 2062
cugaaaggcuuucuuggau

SEQ ID NO: 160281 - RNA, 19 nt, Artificial Sequence
  Description of Artificial Sequence: Synthetic oligonucleotide
  Antisense strand to SEQ ID NO: 160280
auccaagaaagccuuucag

SEQ ID NO: 160282 - RNA, 19 nt, Artificial Sequence
  Description of Artificial Sequence: Synthetic oligonucleotide
  Sense strand starting at position 773 of SEQ ID NO: 2062
gcaagaguuucuucuuaag

SEQ ID NO: 160283 - RNA, 19 nt, Artificial Sequence
  Description of Artificial Sequence: Synthetic oligonucleotide
  Antisense strand to SEQ ID NO: 160282
cuuaagaagaaacucuugc

SEQ ID NO: 160284 - RNA, 19 nt, Artificial Sequence
  Description of Artificial Sequence: Synthetic oligonucleotide
  Sense strand starting at position 692 of SEQ ID NO: 2062
ggugaauaguaucuauauc

SEQ ID NO: 160285 - RNA, 19 nt, Artificial Sequence
  Description of Artificial Sequence: Synthetic oligonucleotide
  Antisense strand to SEQ ID NO: 160284
gauauagauacuauucacc

SEQ ID NO: 160286 - RNA, 19 nt, Artificial Sequence
  Description of Artificial Sequence: Synthetic oligonucleotide
  Sense strand starting at position 577 of SEQ ID NO: 2062
ucuuguugacuguagcaua

SEQ ID NO: 160287 - RNA, 19 nt, Artificial Sequence
  Description of Artificial Sequence: Synthetic oligonucleotide
  Antisense strand to SEQ ID NO: 160286
uaugcuacagucaacaaga

SEQ ID NO: 160288 - RNA, 19 nt, Artificial Sequence
  Description of Artificial Sequence: Synthetic oligonucleotide
  Sense strand starting at position 572 of SEQ ID NO: 2062
accagucuuguugacugua

SEQ ID NO: 160289 - RNA, 19 nt, Artificial Sequence
  Description of Artificial Sequence: Synthetic oligonucleotide
  Antisense strand to SEQ ID NO: 160288
uacagucaacaagacuggu

SEQ ID NO: 160290 - RNA, 19 nt, Artificial Sequence
  Description of Artificial Sequence: Synthetic oligonucleotide
  Sense strand starting at position 534 of SEQ ID NO: 2062
gagguugugcaauaucaga

SEQ ID NO: 160291 - RNA, 19 nt, Artificial Sequence
  Description of Artificial Sequence: Synthetic oligonucleotide
  Antisense strand to SEQ ID NO: 160290
ucugauauugcacaaccuc

SEQ ID NO: 160292 - RNA, 19 nt, Artificial Sequence
  Description of Artificial Sequence: Synthetic oligonucleotide
  Sense strand starting at position 392 of SEQ ID NO: 2062
uucucauuccagugaucag

SEQ ID NO: 160293 - RNA, 19 nt, Artificial Sequence
  Description of Artificial Sequence: Synthetic oligonucleotide
  Antisense strand to SEQ ID NO: 160292
cugaucacuggaaugagaa

SEQ ID NO: 160294 - RNA, 19 nt, Artificial Sequence
  Description of Artificial Sequence: Synthetic oligonucleotide
  Sense strand starting at position 345 of SEQ ID NO: 2062
aguguccaucuuuacaagu

SEQ ID NO: 160295 - RNA, 19 nt, Artificial Sequence
  Description of Artificial Sequence: Synthetic oligonucleotide
  Antisense strand to SEQ ID NO: 160294
acuuguaaagauggacacu

SEQ ID NO: 160296 - RNA, 19 nt, Artificial Sequence
  Description of Artificial Sequence: Synthetic oligonucleotide
  Sense strand starting at position 280 of SEQ ID NO: 2062
gaaggucagugcccugaau

SEQ ID NO: 160297 - RNA, 19 nt, Artificial Sequence
  Description of Artificial Sequence: Synthetic oligonucleotide
  Antisense strand to SEQ ID NO: 160296
auucagggcacugaccuuc

SEQ ID NO: 160298 - RNA, 19 nt, Artificial Sequence
  Description of Artificial Sequence: Synthetic oligonucleotide
  Sense strand starting at position 72 of SEQ ID NO: 2063
acuaaugaauuggccuaau

SEQ ID NO: 160299 - RNA, 19 nt, Artificial Sequence
  Description of Artificial Sequence: Synthetic oligonucleotide
  Antisense strand to SEQ ID NO: 160298
auuaggccaauucauuagu

SEQ ID NO: 160300 - RNA, 19 nt, Artificial Sequence
  Description of Artificial Sequence: Synthetic oligonucleotide
  Sense strand starting at position 213 of SEQ ID NO: 2063
gugacaaguccauagucua

SEQ ID NO: 160301 - RNA, 19 nt, Artificial Sequence
  Description of Artificial Sequence: Synthetic oligonucleotide
  Antisense strand to SEQ ID NO: 160300
uagacuauggacuugucac

SEQ ID NO: 160302 - RNA, 19 nt, Artificial Sequence
  Description of Artificial Sequence: Synthetic oligonucleotide
  Sense strand starting at position 216 of SEQ ID NO: 2063
acaaguccauagucuaaca

SEQ ID NO: 160303 - RNA, 19 nt, Artificial Sequence
  Description of Artificial Sequence: Synthetic oligonucleotide
  Antisense strand to SEQ ID NO: 160302
uguuagacuauggacuugu

SEQ ID NO: 160304 - RNA, 19 nt, Artificial Sequence
  Description of Artificial Sequence: Synthetic oligonucleotide
  Sense strand starting at position 456 of SEQ ID NO: 2063
agaacuacauuugaugaca

SEQ ID NO: 160305 - RNA, 19 nt, Artificial Sequence
  Description of Artificial Sequence: Synthetic oligonucleotide
  Antisense strand to SEQ ID NO: 160304
ugucaucaaauguaguucu

SEQ ID NO: 160306 - RNA, 19 nt, Artificial Sequence
  Description of Artificial Sequence: Synthetic oligonucleotide
  Sense strand starting at position 562 of SEQ ID NO: 2063
gacacucggcagcaugaua

SEQ ID NO: 160307 - RNA, 19 nt, Artificial Sequence
  Description of Artificial Sequence: Synthetic oligonucleotide
  Antisense strand to SEQ ID NO: 160306
uaucaugcugccgaguguc

SEQ ID NO: 160308 - RNA, 19 nt, Artificial Sequence
  Description of Artificial Sequence: Synthetic oligonucleotide
  Sense strand starting at position 840 of SEQ ID NO: 2063
uucuauaaagccugagcua

SEQ ID NO: 160309 - RNA, 19 nt, Artificial Sequence
  Description of Artificial Sequence: Synthetic oligonucleotide
  Antisense strand to SEQ ID NO: 160308
uagcucaggcuuuauagaa

SEQ ID NO: 160310 - RNA, 19 nt, Artificial Sequence
  Description of Artificial Sequence: Synthetic oligonucleotide
  Sense strand starting at position 841 of SEQ ID NO: 2063
ucuauaaagccugagcuaa

SEQ ID NO: 160311 - RNA, 19 nt, Artificial Sequence
  Description of Artificial Sequence: Synthetic oligonucleotide
  Antisense strand to SEQ ID NO: 160310
uuagcucaggcuuuauaga

SEQ ID NO: 160312 - RNA, 19 nt, Artificial Sequence
  Description of Artificial Sequence: Synthetic oligonucleotide
  Sense strand starting at position 1033 of SEQ ID NO: 2063
gaagaugugacuuguggag

SEQ ID NO: 160313 - RNA, 19 nt, Artificial Sequence
  Description of Artificial Sequence: Synthetic oligonucleotide
  Antisense strand to SEQ ID NO: 160312
cuccacaagucacaucuuc

SEQ ID NO: 160314 - RNA, 19 nt, Artificial Sequence
  Description of Artificial Sequence: Synthetic oligonucleotide
  Sense strand starting at position 1052 of SEQ ID NO: 2063
cguggguggcauuauggaa

SEQ ID NO: 160315 - RNA, 19 nt, Artificial Sequence
  Description of Artificial Sequence: Synthetic oligonucleotide
  Antisense strand to SEQ ID NO: 160314
uuccauaaugccacccacg

SEQ ID NO: 160316 - RNA, 19 nt, Artificial Sequence
  Description of Artificial Sequence: Synthetic oligonucleotide
  Sense strand starting at position 1248 of SEQ ID NO: 2063
aaauuagagccguauggga

SEQ ID NO: 160317 - RNA, 19 nt, Artificial Sequence
  Description of Artificial Sequence: Synthetic oligonucleotide
  Antisense strand to SEQ ID NO: 160316
ucccauacggcucuaauuu

SEQ ID NO: 160318 - RNA, 19 nt, Artificial Sequence
  Description of Artificial Sequence: Synthetic oligonucleotide
  Sense strand starting at position 1778 of SEQ ID NO: 2063
cgguaaagccgcuuagugu

SEQ ID NO: 160319 - RNA, 19 nt, Artificial Sequence
  Description of Artificial Sequence: Synthetic oligonucleotide
  Antisense strand to SEQ ID NO: 160318
acacuaagcggcuuuaccg

SEQ ID NO: 160320 - RNA, 19 nt, Artificial Sequence
  Description of Artificial Sequence: Synthetic oligonucleotide
  Sense strand starting at position 2336 of SEQ ID NO: 2063
ucagauuacugguuagagu

SEQ ID NO: 160321 - RNA, 19 nt, Artificial Sequence
  Description of Artificial Sequence: Synthetic oligonucleotide
  Antisense strand to SEQ ID NO: 160320
acucuaaccaguaaucuga

SEQ ID NO: 160322 - RNA, 19 nt, Artificial Sequence
  Description of Artificial Sequence: Synthetic oligonucleotide
  Sense strand starting at position 2337 of SEQ ID NO: 2063
cagauuacugguuagagug

SEQ ID NO: 160323 - RNA, 19 nt, Artificial Sequence
  Description of Artificial Sequence: Synthetic oligonucleotide
  Antisense strand to SEQ ID NO: 160322
cacucuaaccaguaaucug

SEQ ID NO: 160324 - RNA, 19 nt, Artificial Sequence
  Description of Artificial Sequence: Synthetic oligonucleotide
  Sense strand starting at position 2403 of SEQ ID NO: 2063
augugaaaguuuccuugga

SEQ ID NO: 160325 - RNA, 19 nt, Artificial Sequence
  Description of Artificial Sequence: Synthetic oligonucleotide
  Antisense strand to SEQ ID NO: 160324
uccaaggaaacuuucacau

SEQ ID NO: 160326 - RNA, 19 nt, Artificial Sequence
  Description of Artificial Sequence: Synthetic oligonucleotide
  Sense strand starting at position 2404 of SEQ ID NO: 2063
ugugaaaguuuccuuggaa

SEQ ID NO: 160327 - RNA, 19 nt, Artificial Sequence
  Description of Artificial Sequence: Synthetic oligonucleotide
  Antisense strand to SEQ ID NO: 160326
uuccaaggaaacuuucaca

SEQ ID NO: 160328 - RNA, 19 nt, Artificial Sequence
  Description of Artificial Sequence: Synthetic oligonucleotide
  Sense strand starting at position 2405 of SEQ ID NO: 2063
gugaaaguuuccuuggaaa

SEQ ID NO: 160329 - RNA, 19 nt, Artificial Sequence
  Description of Artificial Sequence: Synthetic oligonucleotide
  Antisense strand to SEQ ID NO: 160328
uuuccaaggaaacuuucac

SEQ ID NO: 160330 - RNA, 19 nt, Artificial Sequence
  Description of Artificial Sequence: Synthetic oligonucleotide
  Sense strand starting at position 2503 of SEQ ID NO: 2063
agauuuccagcuugcauau

SEQ ID NO: 160331 - RNA, 19 nt, Artificial Sequence
  Description of Artificial Sequence: Synthetic oligonucleotide
  Antisense strand to SEQ ID NO: 160330
auaugcaagcuggaaaucu

SEQ ID NO: 160332 - RNA, 19 nt, Artificial Sequence
  Description of Artificial Sequence: Synthetic oligonucleotide
  Sense strand starting at position 2516 of SEQ ID NO: 2063
gcauaucuaucucuuacga

SEQ ID NO: 160333 - RNA, 19 nt, Artificial Sequence
  Description of Artificial Sequence: Synthetic oligonucleotide
  Antisense strand to SEQ ID NO: 160332
ucguaagagauagauaugc

SEQ ID NO: 160334 - RNA, 19 nt, Artificial Sequence
  Description of Artificial Sequence: Synthetic oligonucleotide
  Sense strand starting at position 2567 of SEQ ID NO: 2063
gccacagugcaagauucua

SEQ ID NO: 160335 - RNA, 19 nt, Artificial Sequence
  Description of Artificial Sequence: Synthetic oligonucleotide
  Antisense strand to SEQ ID NO: 160334
uagaaucuugcacuguggc

SEQ ID NO: 160336 - RNA, 19 nt, Artificial Sequence
  Description of Artificial Sequence: Synthetic oligonucleotide
  Sense strand starting at position 2823 of SEQ ID NO: 2063
cuguguaugaauuguaaug

SEQ ID NO: 160337 - RNA, 19 nt, Artificial Sequence
  Description of Artificial Sequence: Synthetic oligonucleotide
  Antisense strand to SEQ ID NO: 160336
cauuacaauucauacacag

SEQ ID NO: 160338 - RNA, 19 nt, Artificial Sequence
  Description of Artificial Sequence: Synthetic oligonucleotide
  Sense strand starting at position 2895 of SEQ ID NO: 2063
cuuucuguuccugaaacag

SEQ ID NO: 160339 - RNA, 19 nt, Artificial Sequence
  Description of Artificial Sequence: Synthetic oligonucleotide
  Antisense strand to SEQ ID NO: 160338
cuguuucaggaacagaaag

SEQ ID NO: 160340 - RNA, 19 nt, Artificial Sequence
  Description of Artificial Sequence: Synthetic oligonucleotide
  Sense strand starting at position 2947 of SEQ ID NO: 2063
gcuguuccucugucuguaa

SEQ ID NO: 160341 - RNA, 19 nt, Artificial Sequence
  Description of Artificial Sequence: Synthetic oligonucleotide
  Antisense strand to SEQ ID NO: 160340
uuacagacagaggaacagc

SEQ ID NO: 160342 - RNA, 19 nt, Artificial Sequence
  Description of Artificial Sequence: Synthetic oligonucleotide
  Sense strand starting at position 3154 of SEQ ID NO: 2063
aauaauugguguccaguaa

SEQ ID NO: 160343 - RNA, 19 nt, Artificial Sequence
  Description of Artificial Sequence: Synthetic oligonucleotide
  Antisense strand to SEQ ID NO: 160342
uuacuggacaccaauuauu

SEQ ID NO: 160344 - RNA, 19 nt, Artificial Sequence
  Description of Artificial Sequence: Synthetic oligonucleotide
  Sense strand starting at position 3155 of SEQ ID NO: 2063
auaauugguguccaguaag

SEQ ID NO: 160345 - RNA, 19 nt, Artificial Sequence
  Description of Artificial Sequence: Synthetic oligonucleotide
  Antisense strand to SEQ ID NO: 160344
cuuacuggacaccaauuau

SEQ ID NO: 160346 - RNA, 19 nt, Artificial Sequence
  Description of Artificial Sequence: Synthetic oligonucleotide
  Sense strand starting at position 3158 of SEQ ID NO: 2063
auugguguccaguaaguau

SEQ ID NO: 160347 - RNA, 19 nt, Artificial Sequence
  Description of Artificial Sequence: Synthetic oligonucleotide
  Antisense strand to SEQ ID NO: 160346
auacuuacuggacaccaau

SEQ ID NO: 160348 - RNA, 19 nt, Artificial Sequence
  Description of Artificial Sequence: Synthetic oligonucleotide
  Sense strand starting at position 3161 of SEQ ID NO: 2063
gguguccaguaaguauuua

SEQ ID NO: 160349 - RNA, 19 nt, Artificial Sequence
  Description of Artificial Sequence: Synthetic oligonucleotide
  Antisense strand to SEQ ID NO: 160348
uaaauacuuacuggacacc

SEQ ID NO: 160350 - RNA, 19 nt, Artificial Sequence
  Description of Artificial Sequence: Synthetic oligonucleotide
  Sense strand starting at position 3282 of SEQ ID NO: 2063
ggaguucuuacgcauucca

SEQ ID NO: 160351 - RNA, 19 nt, Artificial Sequence
  Description of Artificial Sequence: Synthetic oligonucleotide
  Antisense strand to SEQ ID NO: 160350
uggaaugcguaagaacucc

SEQ ID NO: 160352 - RNA, 19 nt, Artificial Sequence
  Description of Artificial Sequence: Synthetic oligonucleotide
  Sense strand starting at position 3358 of SEQ ID NO: 2063
augacauccuccucugaug

SEQ ID NO: 160353 - RNA, 19 nt, Artificial Sequence
  Description of Artificial Sequence: Synthetic oligonucleotide
  Antisense strand to SEQ ID NO: 160352
caucagaggaggaugucau

SEQ ID NO: 160354 - RNA, 19 nt, Artificial Sequence
  Description of Artificial Sequence: Synthetic oligonucleotide
  Sense strand starting at position 3582 of SEQ ID NO: 2063
gaggaugucauggguccaa

SEQ ID NO: 160355 - RNA, 19 nt, Artificial Sequence
  Description of Artificial Sequence: Synthetic oligonucleotide
  Antisense strand to SEQ ID NO: 160354
uuggacccaugacauccuc

SEQ ID NO: 160356 - RNA, 19 nt, Artificial Sequence
  Description of Artificial Sequence: Synthetic oligonucleotide
  Sense strand starting at position 3612 of SEQ ID NO: 2063
uggagugcccuugagauaa

SEQ ID NO: 160357 - RNA, 19 nt, Artificial Sequence
  Description of Artificial Sequence: Synthetic oligonucleotide
  Antisense strand to SEQ ID NO: 160356
uuaucucaagggcacucca

SEQ ID NO: 160358 - RNA, 19 nt, Artificial Sequence
  Description of Artificial Sequence: Synthetic oligonucleotide
  Sense strand starting at position 3838 of SEQ ID NO: 2063
ccagcucuuugggucagau

SEQ ID NO: 160359 - RNA, 19 nt, Artificial Sequence
  Description of Artificial Sequence: Synthetic oligonucleotide
  Antisense strand to SEQ ID NO: 160358
aucugacccaaagagcugg

SEQ ID NO: 160360 - RNA, 19 nt, Artificial Sequence
  Description of Artificial Sequence: Synthetic oligonucleotide
  Sense strand starting at position 3840 of SEQ ID NO: 2063
agcucuuugggucagauca

SEQ ID NO: 160361 - RNA, 19 nt, Artificial Sequence
  Description of Artificial Sequence: Synthetic oligonucleotide
  Antisense strand to SEQ ID NO: 160360
ugaucugacccaaagagcu

SEQ ID NO: 160362 - RNA, 19 nt, Artificial Sequence
  Description of Artificial Sequence: Synthetic oligonucleotide
  Sense strand starting at position 3850 of SEQ ID NO: 2063
gucagaucaguuggcaaau

SEQ ID NO: 160363 - RNA, 19 nt, Artificial Sequence
  Description of Artificial Sequence: Synthetic oligonucleotide
  Antisense strand to SEQ ID NO: 160362
auuugccaacugaucugac

SEQ ID NO: 160364 - RNA, 19 nt, Artificial Sequence
  Description of Artificial Sequence: Synthetic oligonucleotide
  Sense strand starting at position 3863 of SEQ ID NO: 2063
gcaaaucacuggucucacu

SEQ ID NO: 160365 - RNA, 19 nt, Artificial Sequence
  Description of Artificial Sequence: Synthetic oligonucleotide
  Antisense strand to SEQ ID NO: 160364
agugagaccagugauuugc

SEQ ID NO: 160366 - RNA, 19 nt, Artificial Sequence
  Description of Artificial Sequence: Synthetic oligonucleotide
  Sense strand starting at position 3870 of SEQ ID NO: 2063
acuggucucacuuggaaug

SEQ ID NO: 160367 - RNA, 19 nt, Artificial Sequence
  Description of Artificial Sequence: Synthetic oligonucleotide
  Antisense strand to SEQ ID NO: 160366
cauuccaagugagaccagu

SEQ ID NO: 160368 - RNA, 19 nt, Artificial Sequence
  Description of Artificial Sequence: Synthetic oligonucleotide
  Sense strand starting at position 3931 of SEQ ID NO: 2063
agaggaagcuucucugucu

SEQ ID NO: 160369 - RNA, 19 nt, Artificial Sequence
  Description of Artificial Sequence: Synthetic oligonucleotide
  Antisense strand to SEQ ID NO: 160368
agacagagaagcuuccucu

SEQ ID NO: 160370 - RNA, 19 nt, Artificial Sequence
  Description of Artificial Sequence: Synthetic oligonucleotide
  Sense strand starting at position 3932 of SEQ ID NO: 2063
gaggaagcuucucugucua

SEQ ID NO: 160371 - RNA, 19 nt, Artificial Sequence
  Description of Artificial Sequence: Synthetic oligonucleotide
  Antisense strand to SEQ ID NO: 160370
uagacagagaagcuuccuc

SEQ ID NO: 160372 - RNA, 19 nt, Artificial Sequence
  Description of Artificial Sequence: Synthetic oligonucleotide
  Sense strand starting at position 3934 of SEQ ID NO: 2063
ggaagcuucucugucuaca

SEQ ID NO: 160373 - RNA, 19 nt, Artificial Sequence
  Description of Artificial Sequence: Synthetic oligonucleotide
  Antisense strand to SEQ ID NO: 160372
uguagacagagaagcuucc

SEQ ID NO: 160374 - RNA, 19 nt, Artificial Sequence
  Description of Artificial Sequence: Synthetic oligonucleotide
  Sense strand starting at position 3953 of SEQ ID NO: 2063
gcaagauccucagugggaa

SEQ ID NO: 160375 - RNA, 19 nt, Artificial Sequence
  Description of Artificial Sequence: Synthetic oligonucleotide
  Antisense strand to SEQ ID NO: 160374
uucccacugaggaucuugc

SEQ ID NO: 160376 - RNA, 19 nt, Artificial Sequence
  Description of Artificial Sequence: Synthetic oligonucleotide
  Sense strand starting at position 3980 of SEQ ID NO: 2063
ggcaaaguucuagacaccu

SEQ ID NO: 160377 - RNA, 19 nt, Artificial Sequence
  Description of Artificial Sequence: Synthetic oligonucleotide
  Antisense strand to SEQ ID NO: 160376
aggugucuagaacuuugcc

SEQ ID NO: 160378 - RNA, 19 nt, Artificial Sequence
  Description of Artificial Sequence: Synthetic oligonucleotide
  Sense strand starting at position 3964 of SEQ ID NO: 2064
gauugucauuaacgaaaua

SEQ ID NO: 160379 - RNA, 19 nt, Artificial Sequence
  Description of Artificial Sequence: Synthetic oligonucleotide
  Antisense strand to SEQ ID NO: 160378
uauuucguuaaugacaauc

SEQ ID NO: 160380 - RNA, 19 nt, Artificial Sequence
  Description of Artificial Sequence: Synthetic oligonucleotide
  Sense strand starting at position 3960 of SEQ ID NO: 2064
gacagauugucauuaacga

SEQ ID NO: 160381 - RNA, 19 nt, Artificial Sequence
  Description of Artificial Sequence: Synthetic oligonucleotide
  Antisense strand to SEQ ID NO: 160380
ucguuaaugacaaucuguc

SEQ ID NO: 160382 - RNA, 19 nt, Artificial Sequence
  Description of Artificial Sequence: Synthetic oligonucleotide
  Sense strand starting at position 3958 of SEQ ID NO: 2064
aggacagauugucauuaac

SEQ ID NO: 160383 - RNA, 19 nt, Artificial Sequence
  Description of Artificial Sequence: Synthetic oligonucleotide
  Antisense strand to SEQ ID NO: 160382
guuaaugacaaucuguccu

SEQ ID NO: 160384 - RNA, 19 nt, Artificial Sequence
  Description of Artificial Sequence: Synthetic oligonucleotide
  Sense strand starting at position 3930 of SEQ ID NO: 2064
aguacaaccugcuuugaaa

SEQ ID NO: 160385 - RNA, 19 nt, Artificial Sequence
  Description of Artificial Sequence: Synthetic oligonucleotide
  Antisense strand to SEQ ID NO: 160384
uuucaaagcagguuguacu

SEQ ID NO: 160386 - RNA, 19 nt, Artificial Sequence
  Description of Artificial Sequence: Synthetic oligonucleotide
  Sense strand starting at position 3910 of SEQ ID NO: 2064
auaaguuuagcggaaacga

SEQ ID NO: 160387 - RNA, 19 nt, Artificial Sequence
  Description of Artificial Sequence: Synthetic oligonucleotide
  Antisense strand to SEQ ID NO: 160386
ucguuuccgcuaaacuuau

SEQ ID NO: 160388 - RNA, 19 nt, Artificial Sequence
  Description of Artificial Sequence: Synthetic oligonucleotide
  Sense strand starting at position 3907 of SEQ ID NO: 2064
gguauaaguuuagcggaaa

SEQ ID NO: 160389 - RNA, 19 nt, Artificial Sequence
  Description of Artificial Sequence: Synthetic oligonucleotide
  Antisense strand to SEQ ID NO: 160388
uuuccgcuaaacuuauacc

SEQ ID NO: 160390 - RNA, 19 nt, Artificial Sequence
  Description of Artificial Sequence: Synthetic oligonucleotide
  Sense strand starting at position 3857 of SEQ ID NO: 2064
cucugagaccugcaccaau

SEQ ID NO: 160391 - RNA, 19 nt, Artificial Sequence
  Description of Artificial Sequence: Synthetic oligonucleotide
  Antisense strand to SEQ ID NO: 160390
auuggugcaggucucagag

SEQ ID NO: 160392 - RNA, 19 nt, Artificial Sequence
  Description of Artificial Sequence: Synthetic oligonucleotide
  Sense strand starting at position 3846 of SEQ ID NO: 2064
ucaagauccuucucugaga

SEQ ID NO: 160393 - RNA, 19 nt, Artificial Sequence
  Description of Artificial Sequence: Synthetic oligonucleotide
  Antisense strand to SEQ ID NO: 160392
ucucagagaaggaucuuga

SEQ ID NO: 160394 - RNA, 19 nt, Artificial Sequence
  Description of Artificial Sequence: Synthetic oligonucleotide
  Sense strand starting at position 3733 of SEQ ID NO: 2064
gcccucauaggauaguuaa

SEQ ID NO: 160395 - RNA, 19 nt, Artificial Sequence
  Description of Artificial Sequence: Synthetic oligonucleotide
  Antisense strand to SEQ ID NO: 160394
uuaacuauccuaugagggc

SEQ ID NO: 160396 - RNA, 19 nt, Artificial Sequence
  Description of Artificial Sequence: Synthetic oligonucleotide
  Sense strand starting at position 3692 of SEQ ID NO: 2064
acuuuaggauauguaacua

SEQ ID NO: 160397 - RNA, 19 nt, Artificial Sequence
  Description of Artificial Sequence: Synthetic oligonucleotide
  Antisense strand to SEQ ID NO: 160396
uaguuacauauccuaaagu

SEQ ID NO: 160398 - RNA, 19 nt, Artificial Sequence
  Description of Artificial Sequence: Synthetic oligonucleotide
  Sense strand starting at position 3686 of SEQ ID NO: 2064
caaaguacuuuaggauaug

SEQ ID NO: 160399 - RNA, 19 nt, Artificial Sequence
  Description of Artificial Sequence: Synthetic oligonucleotide
  Antisense strand to SEQ ID NO: 160398
cauauccuaaaguacuuug

SEQ ID NO: 160400 - RNA, 19 nt, Artificial Sequence
  Description of Artificial Sequence: Synthetic oligonucleotide
  Sense strand starting at position 3616 of SEQ ID NO: 2064
acuugaagaaauugacguu

SEQ ID NO: 160401 - RNA, 19 nt, Artificial Sequence
  Description of Artificial Sequence: Synthetic oligonucleotide
  Antisense strand to SEQ ID NO: 160400
aacgucaauuucuucaagu

SEQ ID NO: 160402 - RNA, 19 nt, Artificial Sequence
  Description of Artificial Sequence: Synthetic oligonucleotide
  Sense strand starting at position 3576 of SEQ ID NO: 2064
ugaaguguaugagaaauag

SEQ ID NO: 160403 - RNA, 19 nt, Artificial Sequence
  Description of Artificial Sequence: Synthetic oligonucleotide
  Antisense strand to SEQ ID NO: 160402
cuauuucucauacacuuca

SEQ ID NO: 160404 - RNA, 19 nt, Artificial Sequence
  Description of Artificial Sequence: Synthetic oligonucleotide
  Sense strand starting at position 3574 of SEQ ID NO: 2064
uaugaaguguaugagaaau

SEQ ID NO: 160405 - RNA, 19 nt, Artificial Sequence
  Description of Artificial Sequence: Synthetic oligonucleotide
  Antisense strand to SEQ ID NO: 160404
auuucucauacacuucaua

SEQ ID NO: 160406 - RNA, 19 nt, Artificial Sequence
  Description of Artificial Sequence: Synthetic oligonucleotide
  Sense strand starting at position 3501 of SEQ ID NO: 2064
ggauauuuauuaugugugu

SEQ ID NO: 160407 - RNA, 19 nt, Artificial Sequence
  Description of Artificial Sequence: Synthetic oligonucleotide
  Antisense strand to SEQ ID NO: 160406
acacacauaauaaauaucc

SEQ ID NO: 160408 - RNA, 19 nt, Artificial Sequence
  Description of Artificial Sequence: Synthetic oligonucleotide
  Sense strand starting at position 3438 of SEQ ID NO: 2064
gauacaucugucuggugaa

SEQ ID NO: 160409 - RNA, 19 nt, Artificial Sequence
  Description of Artificial Sequence: Synthetic oligonucleotide
  Antisense strand to SEQ ID NO: 160408
uucaccagacagauguauc

SEQ ID NO: 160410 - RNA, 19 nt, Artificial Sequence
  Description of Artificial Sequence: Synthetic oligonucleotide
  Sense strand starting at position 3437 of SEQ ID NO: 2064
agauacaucugucugguga

SEQ ID NO: 160411 - RNA, 19 nt, Artificial Sequence
  Description of Artificial Sequence: Synthetic oligonucleotide
  Antisense strand to SEQ ID NO: 160410
ucaccagacagauguaucu

SEQ ID NO: 160412 - RNA, 19 nt, Artificial Sequence
  Description of Artificial Sequence: Synthetic oligonucleotide
  Sense strand starting at position 3380 of SEQ ID NO: 2064
gucguugaguuagagagga

SEQ ID NO: 160413 - RNA, 19 nt, Artificial Sequence
  Description of Artificial Sequence: Synthetic oligonucleotide
  Antisense strand to SEQ ID NO: 160412
uccucucuaacucaacgac

SEQ ID NO: 160414 - RNA, 19 nt, Artificial Sequence
  Description of Artificial Sequence: Synthetic oligonucleotide
  Sense strand starting at position 3372 of SEQ ID NO: 2064
cauucugugucguugaguu

SEQ ID NO: 160415 - RNA, 19 nt, Artificial Sequence
  Description of Artificial Sequence: Synthetic oligonucleotide
  Antisense strand to SEQ ID NO: 160414
aacucaacgacacagaaug

SEQ ID NO: 160416 - RNA, 19 nt, Artificial Sequence
  Description of Artificial Sequence: Synthetic oligonucleotide
  Sense strand starting at position 3369 of SEQ ID NO: 2064
cgucauucugugucguuga

SEQ ID NO: 160417 - RNA, 19 nt, Artificial Sequence
  Description of Artificial Sequence: Synthetic oligonucleotide
  Antisense strand to SEQ ID NO: 160416
ucaacgacacagaaugacg

SEQ ID NO: 160418 - RNA, 19 nt, Artificial Sequence
  Description of Artificial Sequence: Synthetic oligonucleotide
  Sense strand starting at position 3278 of SEQ ID NO: 2064
gggauccugcuugauuauu

SEQ ID NO: 160419 - RNA, 19 nt, Artificial Sequence
  Description of Artificial Sequence: Synthetic oligonucleotide
  Antisense strand to SEQ ID NO: 160418
aauaaucaagcaggauccc

SEQ ID NO: 160420 - RNA, 19 nt, Artificial Sequence
  Description of Artificial Sequence: Synthetic oligonucleotide
  Sense strand starting at position 2823 of SEQ ID NO: 2064
uccguaguuuccucucaga

SEQ ID NO: 160421 - RNA, 19 nt, Artificial Sequence
  Description of Artificial Sequence: Synthetic oligonucleotide
  Antisense strand to SEQ ID NO: 160420
ucugagaggaaacuacgga

SEQ ID NO: 160422 - RNA, 19 nt, Artificial Sequence
  Description of Artificial Sequence: Synthetic oligonucleotide
  Sense strand starting at position 2620 of SEQ ID NO: 2064
gccaauggauucccaggaa

SEQ ID NO: 160423 - RNA, 19 nt, Artificial Sequence
  Description of Artificial Sequence: Synthetic oligonucleotide
  Antisense strand to SEQ ID NO: 160422
uuccugggaauccauuggc

SEQ ID NO: 160424 - RNA, 19 nt, Artificial Sequence
  Description of Artificial Sequence: Synthetic oligonucleotide
  Sense strand starting at position 2577 of SEQ ID NO: 2064
gucauaguaaccgaugugu

SEQ ID NO: 160425 - RNA, 19 nt, Artificial Sequence
  Description of Artificial Sequence: Synthetic oligonucleotide
  Antisense strand to SEQ ID NO: 160424
acacaucgguuacuaugac

SEQ ID NO: 160426 - RNA, 19 nt, Artificial Sequence
  Description of Artificial Sequence: Synthetic oligonucleotide
  Sense strand starting at position 2566 of SEQ ID NO: 2064
gugguuauauugucauagu

SEQ ID NO: 160427 - RNA, 19 nt, Artificial Sequence
  Description of Artificial Sequence: Synthetic oligonucleotide
  Antisense strand to SEQ ID NO: 160426
acuaugacaauauaaccac

SEQ ID NO: 160428 - RNA, 19 nt, Artificial Sequence
  Description of Artificial Sequence: Synthetic oligonucleotide
  Sense strand starting at position 2143 of SEQ ID NO: 2064
gccugugcggcuucugaga

SEQ ID NO: 160429 - RNA, 19 nt, Artificial Sequence
  Description of Artificial Sequence: Synthetic oligonucleotide
  Antisense strand to SEQ ID NO: 160428
ucucagaagccgcacaggc

SEQ ID NO: 160430 - RNA, 19 nt, Artificial Sequence
  Description of Artificial Sequence: Synthetic oligonucleotide
  Sense strand starting at position 2078 of SEQ ID NO: 2064
gccugucccucagugauuu

SEQ ID NO: 160431 - RNA, 19 nt, Artificial Sequence
  Description of Artificial Sequence: Synthetic oligonucleotide
  Antisense strand to SEQ ID NO: 160430
aaaucacugagggacaggc

SEQ ID NO: 160432 - RNA, 19 nt, Artificial Sequence
  Description of Artificial Sequence: Synthetic oligonucleotide
  Sense strand starting at position 2076 of SEQ ID NO: 2064
gcgccugucccucagugau

SEQ ID NO: 160433 - RNA, 19 nt, Artificial Sequence
  Description of Artificial Sequence: Synthetic oligonucleotide
  Antisense strand to SEQ ID NO: 160432
aucacugagggacaggcgc

SEQ ID NO: 160434 - RNA, 19 nt, Artificial Sequence
  Description of Artificial Sequence: Synthetic oligonucleotide
  Sense strand starting at position 2052 of SEQ ID NO: 2064
ggucccucucgcgagauuu

SEQ ID NO: 160435 - RNA, 19 nt, Artificial Sequence
  Description of Artificial Sequence: Synthetic oligonucleotide
  Antisense strand to SEQ ID NO: 160434
aaaucucgcgagagggacc

SEQ ID NO: 160436 - RNA, 19 nt, Artificial Sequence
  Description of Artificial Sequence: Synthetic oligonucleotide
  Sense strand starting at position 1043 of SEQ ID NO: 2064
cgacuacacugauucuaac

SEQ ID NO: 160437 - RNA, 19 nt, Artificial Sequence
  Description of Artificial Sequence: Synthetic oligonucleotide
  Antisense strand to SEQ ID NO: 160436
guuagaaucaguguagucg

SEQ ID NO: 160438 - RNA, 19 nt, Artificial Sequence
  Description of Artificial Sequence: Synthetic oligonucleotide
  Sense strand starting at position 1032 of SEQ ID NO: 2064
augguaucuuccgacuaca

SEQ ID NO: 160439 - RNA, 19 nt, Artificial Sequence
  Description of Artificial Sequence: Synthetic oligonucleotide
  Antisense strand to SEQ ID NO: 160438
uguagucggaagauaccau

SEQ ID NO: 160440 - RNA, 19 nt, Artificial Sequence
  Description of Artificial Sequence: Synthetic oligonucleotide
  Sense strand starting at position 1027 of SEQ ID NO: 2064
ucagaaugguaucuuccga

SEQ ID NO: 160441 - RNA, 19 nt, Artificial Sequence
  Description of Artificial Sequence: Synthetic oligonucleotide
  Antisense strand to SEQ ID NO: 160440
ucggaagauaccauucuga

SEQ ID NO: 160442 - RNA, 19 nt, Artificial Sequence
  Description of Artificial Sequence: Synthetic oligonucleotide
  Sense strand starting at position 1018 of SEQ ID NO: 2064
acacgacucucagaauggu

SEQ ID NO: 160443 - RNA, 19 nt, Artificial Sequence
  Description of Artificial Sequence: Synthetic oligonucleotide
  Antisense strand to SEQ ID NO: 160442
accauucugagagucgugu

SEQ ID NO: 160444 - RNA, 19 nt, Artificial Sequence
  Description of Artificial Sequence: Synthetic oligonucleotide
  Sense strand starting at position 953 of SEQ ID NO: 2064
acacuauucccauguguca

SEQ ID NO: 160445 - RNA, 19 nt, Artificial Sequence
  Description of Artificial Sequence: Synthetic oligonucleotide
  Antisense strand to SEQ ID NO: 160444
ugacacaugggaauagugu

SEQ ID NO: 160446 - RNA, 19 nt, Artificial Sequence
  Description of Artificial Sequence: Synthetic oligonucleotide
  Sense strand starting at position 893 of SEQ ID NO: 2064
uccugaaaugugcaucaau

SEQ ID NO: 160447 - RNA, 19 nt, Artificial Sequence
  Description of Artificial Sequence: Synthetic oligonucleotide
  Antisense strand to SEQ ID NO: 160446
auugaugcacauuucagga

SEQ ID NO: 160448 - RNA, 19 nt, Artificial Sequence
  Description of Artificial Sequence: Synthetic oligonucleotide
  Sense strand starting at position 642 of SEQ ID NO: 2064
aguucugcuccugaaagac

SEQ ID NO: 160449 - RNA, 19 nt, Artificial Sequence
  Description of Artificial Sequence: Synthetic oligonucleotide
  Antisense strand to SEQ ID NO: 160448
gucuuucaggagcagaacu

SEQ ID NO: 160450 - RNA, 19 nt, Artificial Sequence
  Description of Artificial Sequence: Synthetic oligonucleotide
  Sense strand starting at position 324 of SEQ ID NO: 2064
guggucacugggcauauau

SEQ ID NO: 160451 - RNA, 19 nt, Artificial Sequence
  Description of Artificial Sequence: Synthetic oligonucleotide
  Antisense strand to SEQ ID NO: 160450
auauaugcccagugaccac

SEQ ID NO: 160452 - RNA, 19 nt, Artificial Sequence
  Description of Artificial Sequence: Synthetic oligonucleotide
  Sense strand starting at position 323 of SEQ ID NO: 2064
uguggucacugggcauaua

SEQ ID NO: 160453 - RNA, 19 nt, Artificial Sequence
  Description of Artificial Sequence: Synthetic oligonucleotide
  Antisense strand to SEQ ID NO: 160452
uauaugcccagugaccaca

SEQ ID NO: 160454 - RNA, 19 nt, Artificial Sequence
  Description of Artificial Sequence: Synthetic oligonucleotide
  Sense strand starting at position 266 of SEQ ID NO: 2064
agggauaucuaagaugaaa

SEQ ID NO: 160455 - RNA, 19 nt, Artificial Sequence
  Description of Artificial Sequence: Synthetic oligonucleotide
  Antisense strand to SEQ ID NO: 160454
uuucaucuuagauaucccu

SEQ ID NO: 160456 - RNA, 19 nt, Artificial Sequence
  Description of Artificial Sequence: Synthetic oligonucleotide
  Sense strand starting at position 192 of SEQ ID NO: 2064
ugguuuccaucucucuaua

SEQ ID NO: 160457 - RNA, 19 nt, Artificial Sequence
  Description of Artificial Sequence: Synthetic oligonucleotide
  Antisense strand to SEQ ID NO: 160456
uauagagagauggaaacca

SEQ ID NO: 160458 - RNA, 19 nt, Artificial Sequence
  Description of Artificial Sequence: Synthetic oligonucleotide
  Sense strand starting at position 3922 of SEQ ID NO: 2066
gggaauaacucccuccauc

SEQ ID NO: 160459 - RNA, 19 nt, Artificial Sequence
  Description of Artificial Sequence: Synthetic oligonucleotide
  Antisense strand to SEQ ID NO: 160458
gauggagggaguuauuccc

SEQ ID NO: 160460 - RNA, 19 nt, Artificial Sequence
  Description of Artificial Sequence: Synthetic oligonucleotide
  Sense strand starting at position 3909 of SEQ ID NO: 2066
gcuacugugcggugggaau

SEQ ID NO: 160461 - RNA, 19 nt, Artificial Sequence
  Description of Artificial Sequence: Synthetic oligonucleotide
  Antisense strand to SEQ ID NO: 160460
auucccaccgcacaguagc

SEQ ID NO: 160462 - RNA, 19 nt, Artificial Sequence
  Description of Artificial Sequence: Synthetic oligonucleotide
  Sense strand starting at position 3861 of SEQ ID NO: 2066
gcugguucaugucaggcua

SEQ ID NO: 160463 - RNA, 19 nt, Artificial Sequence
  Description of Artificial Sequence: Synthetic oligonucleotide
  Antisense strand to SEQ ID NO: 160462
uagccugacaugaaccagc

SEQ ID NO: 160464 - RNA, 19 nt, Artificial Sequence
  Description of Artificial Sequence: Synthetic oligonucleotide
  Sense strand starting at position 3777 of SEQ ID NO: 2066
ucacaucugucccucaagu

SEQ ID NO: 160465 - RNA, 19 nt, Artificial Sequence
  Description of Artificial Sequence: Synthetic oligonucleotide
  Antisense strand to SEQ ID NO: 160464
acuugagggacagauguga

SEQ ID NO: 160466 - RNA, 19 nt, Artificial Sequence
  Description of Artificial Sequence: Synthetic oligonucleotide
  Sense strand starting at position 3766 of SEQ ID NO: 2066
cuuugaggucgucacaucu

SEQ ID NO: 160467 - RNA, 19 nt, Artificial Sequence
  Description of Artificial Sequence: Synthetic oligonucleotide
  Antisense strand to SEQ ID NO: 160466
agaugugacgaccucaaag

SEQ ID NO: 160468 - RNA, 19 nt, Artificial Sequence
  Description of Artificial Sequence: Synthetic oligonucleotide
  Sense strand starting at position 3763 of SEQ ID NO: 2066
gaucuuugaggucgucaca

SEQ ID NO: 160469 - RNA, 19 nt, Artificial Sequence
  Description of Artificial Sequence: Synthetic oligonucleotide
  Antisense strand to SEQ ID NO: 160468
ugugacgaccucaaagauc

SEQ ID NO: 160470 - RNA, 19 nt, Artificial Sequence
  Description of Artificial Sequence: Synthetic oligonucleotide
  Sense strand starting at position 3757 of SEQ ID NO: 2066
ccuagagaucuuugagguc

SEQ ID NO: 160471 - RNA, 19 nt, Artificial Sequence
  Description of Artificial Sequence: Synthetic oligonucleotide
  Antisense strand to SEQ ID NO: 160470
gaccucaaagaucucuagg

SEQ ID NO: 160472 - RNA, 19 nt, Artificial Sequence
  Description of Artificial Sequence: Synthetic oligonucleotide
  Sense strand starting at position 3729 of SEQ ID NO: 2066
cucuuagaguugugaggag

SEQ ID NO: 160473 - RNA, 19 nt, Artificial Sequence
  Description of Artificial Sequence: Synthetic oligonucleotide
  Antisense strand to SEQ ID NO: 160472
cuccucacaacucuaagag

SEQ ID NO: 160474 - RNA, 19 nt, Artificial Sequence
  Description of Artificial Sequence: Synthetic oligonucleotide
  Sense strand starting at position 3610 of SEQ ID NO: 2066
ugggaauauucccacagug

SEQ ID NO: 160475 - RNA, 19 nt, Artificial Sequence
  Description of Artificial Sequence: Synthetic oligonucleotide
  Antisense strand to SEQ ID NO: 160474
cacugugggaauauuccca

SEQ ID NO: 160476 - RNA, 19 nt, Artificial Sequence
  Description of Artificial Sequence: Synthetic oligonucleotide
  Sense strand starting at position 3609 of SEQ ID NO: 2066
gugggaauauucccacagu

SEQ ID NO: 160477 - RNA, 19 nt, Artificial Sequence
  Description of Artificial Sequence: Synthetic oligonucleotide
  Antisense strand to SEQ ID NO: 160476
acugugggaauauucccac

SEQ ID NO: 160478 - RNA, 19 nt, Artificial Sequence
  Description of Artificial Sequence: Synthetic oligonucleotide
  Sense strand starting at position 3600 of SEQ ID NO: 2066
guuucuguggugggaauau

SEQ ID NO: 160479 - RNA, 19 nt, Artificial Sequence
  Description of Artificial Sequence: Synthetic oligonucleotide
  Antisense strand to SEQ ID NO: 160478
auauucccaccacagaaac

SEQ ID NO: 160480 - RNA, 19 nt, Artificial Sequence
  Description of Artificial Sequence: Synthetic oligonucleotide
  Sense strand starting at position 3599 of SEQ ID NO: 2066
aguuucuguggugggaaua

SEQ ID NO: 160481 - RNA, 19 nt, Artificial Sequence
  Description of Artificial Sequence: Synthetic oligonucleotide
  Antisense strand to SEQ ID NO: 160480
uauucccaccacagaaacu

SEQ ID NO: 160482 - RNA, 19 nt, Artificial Sequence
  Description of Artificial Sequence: Synthetic oligonucleotide
  Sense strand starting at position 3598 of SEQ ID NO: 2066
caguuucuguggugggaau

SEQ ID NO: 160483 - RNA, 19 nt, Artificial Sequence
  Description of Artificial Sequence: Synthetic oligonucleotide
  Antisense strand to SEQ ID NO: 160482
auucccaccacagaaacug

SEQ ID NO: 160484 - RNA, 19 nt, Artificial Sequence
  Description of Artificial Sequence: Synthetic oligonucleotide
  Sense strand starting at position 3596 of SEQ ID NO: 2066
gccaguuucugugguggga

SEQ ID NO: 160485 - RNA, 19 nt, Artificial Sequence
  Description of Artificial Sequence: Synthetic oligonucleotide
  Antisense strand to SEQ ID NO: 160484
ucccaccacagaaacuggc

SEQ ID NO: 160486 - RNA, 19 nt, Artificial Sequence
  Description of Artificial Sequence: Synthetic oligonucleotide
  Sense strand starting at position 3528 of SEQ ID NO: 2066
gcuggugaauacuuacaac

SEQ ID NO: 160487 - RNA, 19 nt, Artificial Sequence
  Description of Artificial Sequence: Synthetic oligonucleotide
  Antisense strand to SEQ ID NO: 160486
guuguaaguauucaccagc

SEQ ID NO: 160488 - RNA, 19 nt, Artificial Sequence
  Description of Artificial Sequence: Synthetic oligonucleotide
  Sense strand starting at position 3522 of SEQ ID NO: 2066
gggugugcuggugaauacu

SEQ ID NO: 160489 - RNA, 19 nt, Artificial Sequence
  Description of Artificial Sequence: Synthetic oligonucleotide
  Antisense strand to SEQ ID NO: 160488
aguauucaccagcacaccc

SEQ ID NO: 160490 - RNA, 19 nt, Artificial Sequence
  Description of Artificial Sequence: Synthetic oligonucleotide
  Sense strand starting at position 3113 of SEQ ID NO: 2066
ccgcguggaucccagagaa

SEQ ID NO: 160491 - RNA, 19 nt, Artificial Sequence
  Description of Artificial Sequence: Synthetic oligonucleotide
  Antisense strand to SEQ ID NO: 160490
uucucugggauccacgcgg

SEQ ID NO: 160492 - RNA, 19 nt, Artificial Sequence
  Description of Artificial Sequence: Synthetic oligonucleotide
  Sense strand starting at position 3051 of SEQ ID NO: 2066
gugagugagcuuuggaaug

SEQ ID NO: 160493 - RNA, 19 nt, Artificial Sequence
  Description of Artificial Sequence: Synthetic oligonucleotide
  Antisense strand to SEQ ID NO: 160492
cauuccaaagcucacucac

SEQ ID NO: 160494 - RNA, 19 nt, Artificial Sequence
  Description of Artificial Sequence: Synthetic oligonucleotide
  Sense strand starting at position 3040 of SEQ ID NO: 2066
gcugacucccugugaguga

SEQ ID NO: 160495 - RNA, 19 nt, Artificial Sequence
  Description of Artificial Sequence: Synthetic oligonucleotide
  Antisense strand to SEQ ID NO: 160494
ucacucacagggagucagc

SEQ ID NO: 160496 - RNA, 19 nt, Artificial Sequence
  Description of Artificial Sequence: Synthetic oligonucleotide
  Sense strand starting at position 2796 of SEQ ID NO: 2066
gcguaaagcuuuccuucca

SEQ ID NO: 160497 - RNA, 19 nt, Artificial Sequence
  Description of Artificial Sequence: Synthetic oligonucleotide
  Antisense strand to SEQ ID NO: 160496
uggaaggaaagcuuuacgc

SEQ ID NO: 160498 - RNA, 19 nt, Artificial Sequence
  Description of Artificial Sequence: Synthetic oligonucleotide
  Sense strand starting at position 2784 of SEQ ID NO: 2066
caccguucccgugcguaaa

SEQ ID NO: 160499 - RNA, 19 nt, Artificial Sequence
  Description of Artificial Sequence: Synthetic oligonucleotide
  Antisense strand to SEQ ID NO: 160498
uuuacgcacgggaacggug

SEQ ID NO: 160500 - RNA, 19 nt, Artificial Sequence
  Description of Artificial Sequence: Synthetic oligonucleotide
  Sense strand starting at position 2098 of SEQ ID NO: 2066
ggaggugucugguccggaa

SEQ ID NO: 160501 - RNA, 19 nt, Artificial Sequence
  Description of Artificial Sequence: Synthetic oligonucleotide
  Antisense strand to SEQ ID NO: 160500
uuccggaccagacaccucc

SEQ ID NO: 160502 - RNA, 19 nt, Artificial Sequence
  Description of Artificial Sequence: Synthetic oligonucleotide
  Sense strand starting at position 1910 of SEQ ID NO: 2066
gccaguucucagccagcga

SEQ ID NO: 160503 - RNA, 19 nt, Artificial Sequence
  Description of Artificial Sequence: Synthetic oligonucleotide
  Antisense strand to SEQ ID NO: 160502
ucgcuggcugagaacuggc

SEQ ID NO: 160504 - RNA, 19 nt, Artificial Sequence
  Description of Artificial Sequence: Synthetic oligonucleotide
  Sense strand starting at position 1432 of SEQ ID NO: 2066
augugauggucacaggugu

SEQ ID NO: 160505 - RNA, 19 nt, Artificial Sequence
  Description of Artificial Sequence: Synthetic oligonucleotide
  Antisense strand to SEQ ID NO: 160504
acaccugugaccaucacau

SEQ ID NO: 160506 - RNA, 19 nt, Artificial Sequence
  Description of Artificial Sequence: Synthetic oligonucleotide
  Sense strand starting at position 1427 of SEQ ID NO: 2066
cacucaugugauggucaca

SEQ ID NO: 160507 - RNA, 19 nt, Artificial Sequence
  Description of Artificial Sequence: Synthetic oligonucleotide
  Antisense strand to SEQ ID NO: 160506
ugugaccaucacaugagug

SEQ ID NO: 160508 - RNA, 19 nt, Artificial Sequence
  Description of Artificial Sequence: Synthetic oligonucleotide
  Sense strand starting at position 1401 of SEQ ID NO: 2066
ucacuugcucaguaaacgu

SEQ ID NO: 160509 - RNA, 19 nt, Artificial Sequence
  Description of Artificial Sequence: Synthetic oligonucleotide
  Antisense strand to SEQ ID NO: 160508
acguuuacugagcaaguga

SEQ ID NO: 160510 - RNA, 19 nt, Artificial Sequence
  Description of Artificial Sequence: Synthetic oligonucleotide
  Sense strand starting at position 1337 of SEQ ID NO: 2066
acacguuguucccaaguca

SEQ ID NO: 160511 - RNA, 19 nt, Artificial Sequence
  Description of Artificial Sequence: Synthetic oligonucleotide
  Antisense strand to SEQ ID NO: 160510
ugacuugggaacaacgugu

SEQ ID NO: 160512 - RNA, 19 nt, Artificial Sequence
  Description of Artificial Sequence: Synthetic oligonucleotide
  Sense strand starting at position 1319 of SEQ ID NO: 2066
cugucuugcugacguagaa

SEQ ID NO: 160513 - RNA, 19 nt, Artificial Sequence
  Description of Artificial Sequence: Synthetic oligonucleotide
  Antisense strand to SEQ ID NO: 160512
uucuacgucagcaagacag

SEQ ID NO: 160514 - RNA, 19 nt, Artificial Sequence
  Description of Artificial Sequence: Synthetic oligonucleotide
  Sense strand starting at position 1208 of SEQ ID NO: 2066
cagcauuagucucgggagu

SEQ ID NO: 160515 - RNA, 19 nt, Artificial Sequence
  Description of Artificial Sequence: Synthetic oligonucleotide
  Antisense strand to SEQ ID NO: 160514
acucccgagacuaaugcug

SEQ ID NO: 160516 - RNA, 19 nt, Artificial Sequence
  Description of Artificial Sequence: Synthetic oligonucleotide
  Sense strand starting at position 1103 of SEQ ID NO: 2066
guuugcuucugugaaagca

SEQ ID NO: 160517 - RNA, 19 nt, Artificial Sequence
  Description of Artificial Sequence: Synthetic oligonucleotide
  Antisense strand to SEQ ID NO: 160516
ugcuuucacagaagcaaac

SEQ ID NO: 160518 - RNA, 19 nt, Artificial Sequence
  Description of Artificial Sequence: Synthetic oligonucleotide
  Sense strand starting at position 1101 of SEQ ID NO: 2066
gaguuugcuucugugaaag

SEQ ID NO: 160519 - RNA, 19 nt, Artificial Sequence
  Description of Artificial Sequence: Synthetic oligonucleotide
  Antisense strand to SEQ ID NO: 160518
cuuucacagaagcaaacuc

SEQ ID NO: 160520 - RNA, 19 nt, Artificial Sequence
  Description of Artificial Sequence: Synthetic oligonucleotide
  Sense strand starting at position 1100 of SEQ ID NO: 2066
agaguuugcuucugugaaa

SEQ ID NO: 160521 - RNA, 19 nt, Artificial Sequence
  Description of Artificial Sequence: Synthetic oligonucleotide
  Antisense strand to SEQ ID NO: 160520
uuucacagaagcaaacucu

SEQ ID NO: 160522 - RNA, 19 nt, Artificial Sequence
  Description of Artificial Sequence: Synthetic oligonucleotide
  Sense strand starting at position 1097 of SEQ ID NO: 2066
gggagaguuugcuucugug

SEQ ID NO: 160523 - RNA, 19 nt, Artificial Sequence
  Description of Artificial Sequence: Synthetic oligonucleotide
  Antisense strand to SEQ ID NO: 160522
cacagaagcaaacucuccc

SEQ ID NO: 160524 - RNA, 19 nt, Artificial Sequence
  Description of Artificial Sequence: Synthetic oligonucleotide
  Sense strand starting at position 1004 of SEQ ID NO: 2066
agccaugacccggguaaga

SEQ ID NO: 160525 - RNA, 19 nt, Artificial Sequence
  Description of Artificial Sequence: Synthetic oligonucleotide
  Antisense strand to SEQ ID NO: 160524
ucuuacccgggucauggcu

SEQ ID NO: 160526 - RNA, 19 nt, Artificial Sequence
  Description of Artificial Sequence: Synthetic oligonucleotide
  Sense strand starting at position 779 of SEQ ID NO: 2066
ggcagaaggagcugucuca

SEQ ID NO: 160527 - RNA, 19 nt, Artificial Sequence
  Description of Artificial Sequence: Synthetic oligonucleotide
  Antisense strand to SEQ ID NO: 160526
ugagacagcuccuucugcc

SEQ ID NO: 160528 - RNA, 19 nt, Artificial Sequence
  Description of Artificial Sequence: Synthetic oligonucleotide
  Sense strand starting at position 3896 of SEQ ID NO: 2065
gggaauaacucccuccauc

SEQ ID NO: 160529 - RNA, 19 nt, Artificial Sequence
  Description of Artificial Sequence: Synthetic oligonucleotide
  Antisense strand to SEQ ID NO: 160528
gauggagggaguuauuccc

SEQ ID NO: 160530 - RNA, 19 nt, Artificial Sequence
  Description of Artificial Sequence: Synthetic oligonucleotide
  Sense strand starting at position 3883 of SEQ ID NO: 2065
gcuacugugcggugggaau

SEQ ID NO: 160531 - RNA, 19 nt, Artificial Sequence
  Description of Artificial Sequence: Synthetic oligonucleotide
  Antisense strand to SEQ ID NO: 160530
auucccaccgcacaguagc

SEQ ID NO: 160532 - RNA, 19 nt, Artificial Sequence
  Description of Artificial Sequence: Synthetic oligonucleotide
  Sense strand starting at position 3835 of SEQ ID NO: 2065
gcugguucaugucaggcua

SEQ ID NO: 160533 - RNA, 19 nt, Artificial Sequence
  Description of Artificial Sequence: Synthetic oligonucleotide
  Antisense strand to SEQ ID NO: 160532
uagccugacaugaaccagc

SEQ ID NO: 160534 - RNA, 19 nt, Artificial Sequence
  Description of Artificial Sequence: Synthetic oligonucleotide
  Sense strand starting at position 3751 of SEQ ID NO: 2065
ucacaucugucccucaagu

SEQ ID NO: 160535 - RNA, 19 nt, Artificial Sequence
  Description of Artificial Sequence: Synthetic oligonucleotide
  Antisense strand to SEQ ID NO: 160534
acuugagggacagauguga

SEQ ID NO: 160536 - RNA, 19 nt, Artificial Sequence
  Description of Artificial Sequence: Synthetic oligonucleotide
  Sense strand starting at position 3740 of SEQ ID NO: 2065
cuuugaggucgucacaucu

SEQ ID NO: 160537 - RNA, 19 nt, Artificial Sequence
  Description of Artificial Sequence: Synthetic oligonucleotide
  Antisense strand to SEQ ID NO: 160536
agaugugacgaccucaaag

SEQ ID NO: 160538 - RNA, 19 nt, Artificial Sequence
  Description of Artificial Sequence: Synthetic oligonucleotide
  Sense strand starting at position 3737 of SEQ ID NO: 2065
gaucuuugaggucgucaca

SEQ ID NO: 160539 - RNA, 19 nt, Artificial Sequence
  Description of Artificial Sequence: Synthetic oligonucleotide
  Antisense strand to SEQ ID NO: 160538
ugugacgaccucaaagauc

SEQ ID NO: 160540 - RNA, 19 nt, Artificial Sequence
  Description of Artificial Sequence: Synthetic oligonucleotide
  Sense strand starting at position 3731 of SEQ ID NO: 2065
ccuagagaucuuugagguc

SEQ ID NO: 160541 - RNA, 19 nt, Artificial Sequence
  Description of Artificial Sequence: Synthetic oligonucleotide
  Antisense strand to SEQ ID NO: 160540
gaccucaaagaucucuagg

SEQ ID NO: 160542 - RNA, 19 nt, Artificial Sequence
  Description of Artificial Sequence: Synthetic oligonucleotide
  Sense strand starting at position 3703 of SEQ ID NO: 2065
cucuuagaguugugaggag

SEQ ID NO: 160543 - RNA, 19 nt, Artificial Sequence
  Description of Artificial Sequence: Synthetic oligonucleotide
  Antisense strand to SEQ ID NO: 160542
cuccucacaacucuaagag

SEQ ID NO: 160544 - RNA, 19 nt, Artificial Sequence
  Description of Artificial Sequence: Synthetic oligonucleotide
  Sense strand starting at position 3584 of SEQ ID NO: 2065
ugggaauauucccacagug

SEQ ID NO: 160545 - RNA, 19 nt, Artificial Sequence
  Description of Artificial Sequence: Synthetic oligonucleotide
  Antisense strand to SEQ ID NO: 160544
cacugugggaauauuccca

SEQ ID NO: 160546 - RNA, 19 nt, Artificial Sequence
  Description of Artificial Sequence: Synthetic oligonucleotide
  Sense strand starting at position 3583 of SEQ ID NO: 2065
gugggaauauucccacagu

SEQ ID NO: 160547 - RNA, 19 nt, Artificial Sequence
  Description of Artificial Sequence: Synthetic oligonucleotide
  Antisense strand to SEQ ID NO: 160546
acugugggaauauucccac

SEQ ID NO: 160548 - RNA, 19 nt, Artificial Sequence
  Description of Artificial Sequence: Synthetic oligonucleotide
  Sense strand starting at position 3574 of SEQ ID NO: 2065
guuucuguggugggaauau

SEQ ID NO: 160549 - RNA, 19 nt, Artificial Sequence
  Description of Artificial Sequence: Synthetic oligonucleotide
  Antisense strand to SEQ ID NO: 160548
auauucccaccacagaaac

SEQ ID NO: 160550 - RNA, 19 nt, Artificial Sequence
  Description of Artificial Sequence: Synthetic oligonucleotide
  Sense strand starting at position 3573 of SEQ ID NO: 2065
aguuucuguggugggaaua

SEQ ID NO: 160551 - RNA, 19 nt, Artificial Sequence
  Description of Artificial Sequence: Synthetic oligonucleotide
  Antisense strand to SEQ ID NO: 160550
uauucccaccacagaaacu

SEQ ID NO: 160552 - RNA, 19 nt, Artificial Sequence
  Description of Artificial Sequence: Synthetic oligonucleotide
  Sense strand starting at position 3572 of SEQ ID NO: 2065
caguuucuguggugggaau

SEQ ID NO: 160553 - RNA, 19 nt, Artificial Sequence
  Description of Artificial Sequence: Synthetic oligonucleotide
  Antisense strand to SEQ ID NO: 160552
auucccaccacagaaacug

SEQ ID NO: 160554 - RNA, 19 nt, Artificial Sequence
  Description of Artificial Sequence: Synthetic oligonucleotide
  Sense strand starting at position 3570 of SEQ ID NO: 2065
gccaguuucugugguggga

SEQ ID NO: 160555 - RNA, 19 nt, Artificial Sequence
  Description of Artificial Sequence: Synthetic oligonucleotide
  Antisense strand to SEQ ID NO: 160554
ucccaccacagaaacuggc

SEQ ID NO: 160556 - RNA, 19 nt, Artificial Sequence
  Description of Artificial Sequence: Synthetic oligonucleotide
  Sense strand starting at position 3502 of SEQ ID NO: 2065
gcuggugaauacuuacaac

SEQ ID NO: 160557 - RNA, 19 nt, Artificial Sequence
  Description of Artificial Sequence: Synthetic oligonucleotide
  Antisense strand to SEQ ID NO: 160556
guuguaaguauucaccagc

SEQ ID NO: 160558 - RNA, 19 nt, Artificial Sequence
  Description of Artificial Sequence: Synthetic oligonucleotide
  Sense strand starting at position 3496 of SEQ ID NO: 2065
gggugugcuggugaauacu

SEQ ID NO: 160559 - RNA, 19 nt, Artificial Sequence
  Description of Artificial Sequence: Synthetic oligonucleotide
  Antisense strand to SEQ ID NO: 160558
aguauucaccagcacaccc

SEQ ID NO: 160560 - RNA, 19 nt, Artificial Sequence
  Description of Artificial Sequence: Synthetic oligonucleotide
  Sense strand starting at position 3087 of SEQ ID NO: 2065
ccgcguggaucccagagaa

SEQ ID NO: 160561 - RNA, 19 nt, Artificial Sequence
  Description of Artificial Sequence: Synthetic oligonucleotide
  Antisense strand to SEQ ID NO: 160560
uucucugggauccacgcgg

SEQ ID NO: 160562 - RNA, 19 nt, Artificial Sequence
  Description of Artificial Sequence: Synthetic oligonucleotide
  Sense strand starting at position 3025 of SEQ ID NO: 2065
gugagugagcuuuggaaug

SEQ ID NO: 160563 - RNA, 19 nt, Artificial Sequence
  Description of Artificial Sequence: Synthetic oligonucleotide
  Antisense strand to SEQ ID NO: 160562
cauuccaaagcucacucac

SEQ ID NO: 160564 - RNA, 19 nt, Artificial Sequence
  Description of Artificial Sequence: Synthetic oligonucleotide
  Sense strand starting at position 3014 of SEQ ID NO: 2065
gcugacucccugugaguga

SEQ ID NO: 160565 - RNA, 19 nt, Artificial Sequence
  Description of Artificial Sequence: Synthetic oligonucleotide
  Antisense strand to SEQ ID NO: 160564
ucacucacagggagucagc

SEQ ID NO: 160566 - RNA, 19 nt, Artificial Sequence
  Description of Artificial Sequence: Synthetic oligonucleotide
  Sense strand starting at position 2770 of SEQ ID NO: 2065
gcguaaagcuuuccuucca

SEQ ID NO: 160567 - RNA, 19 nt, Artificial Sequence
  Description of Artificial Sequence: Synthetic oligonucleotide
  Antisense strand to SEQ ID NO: 160566
uggaaggaaagcuuuacgc

SEQ ID NO: 160568 - RNA, 19 nt, Artificial Sequence
  Description of Artificial Sequence: Synthetic oligonucleotide
  Sense strand starting at position 2758 of SEQ ID NO: 2065
caccguucccgugcguaaa

SEQ ID NO: 160569 - RNA, 19 nt, Artificial Sequence
  Description of Artificial Sequence: Synthetic oligonucleotide
  Antisense strand to SEQ ID NO: 160568
uuuacgcacgggaacggug

SEQ ID NO: 160570 - RNA, 19 nt, Artificial Sequence
  Description of Artificial Sequence: Synthetic oligonucleotide
  Sense strand starting at position 2072 of SEQ ID NO: 2065
ggaggugucugguccggaa

SEQ ID NO: 160571 - RNA, 19 nt, Artificial Sequence
  Description of Artificial Sequence: Synthetic oligonucleotide
  Antisense strand to SEQ ID NO: 160570
uuccggaccagacaccucc

SEQ ID NO: 160572 - RNA, 19 nt, Artificial Sequence
  Description of Artificial Sequence: Synthetic oligonucleotide
  Sense strand starting at position 1884 of SEQ ID NO: 2065
gccaguucucagccagcga

SEQ ID NO: 160573 - RNA, 19 nt, Artificial Sequence
  Description of Artificial Sequence: Synthetic oligonucleotide
  Antisense strand to SEQ ID NO: 160572
ucgcuggcugagaacuggc

SEQ ID NO: 160574 - RNA, 19 nt, Artificial Sequence
  Description of Artificial Sequence: Synthetic oligonucleotide
  Sense strand starting at position 1406 of SEQ ID NO: 2065
augugauggucacaggugu

SEQ ID NO: 160575 - RNA, 19 nt, Artificial Sequence
  Description of Artificial Sequence: Synthetic oligonucleotide
  Antisense strand to SEQ ID NO: 160574
acaccugugaccaucacau

SEQ ID NO: 160576 - RNA, 19 nt, Artificial Sequence
  Description of Artificial Sequence: Synthetic oligonucleotide
  Sense strand starting at position 1401 of SEQ ID NO: 2065
cacucaugugauggucaca

SEQ ID NO: 160577 - RNA, 19 nt, Artificial Sequence
  Description of Artificial Sequence: Synthetic oligonucleotide
  Antisense strand to SEQ ID NO: 160576
ugugaccaucacaugagug

SEQ ID NO: 160578 - RNA, 19 nt, Artificial Sequence
  Description of Artificial Sequence: Synthetic oligonucleotide
  Sense strand starting at position 1375 of SEQ ID NO: 2065
ucacuugcucaguaaacgu

SEQ ID NO: 160579 - RNA, 19 nt, Artificial Sequence
  Description of Artificial Sequence: Synthetic oligonucleotide
  Antisense strand to SEQ ID NO: 160578
acguuuacugagcaaguga

SEQ ID NO: 160580 - RNA, 19 nt, Artificial Sequence
  Description of Artificial Sequence: Synthetic oligonucleotide
  Sense strand starting at position 1311 of SEQ ID NO: 2065
acacguuguucccaaguca

SEQ ID NO: 160581 - RNA, 19 nt, Artificial Sequence
  Description of Artificial Sequence: Synthetic oligonucleotide
  Antisense strand to SEQ ID NO: 160580
ugacuugggaacaacgugu

SEQ ID NO: 160582 - RNA, 19 nt, Artificial Sequence
  Description of Artificial Sequence: Synthetic oligonucleotide
  Sense strand starting at position 1293 of SEQ ID NO: 2065
cugucuugcugacguagaa

SEQ ID NO: 160583 - RNA, 19 nt, Artificial Sequence
  Description of Artificial Sequence: Synthetic oligonucleotide
  Antisense strand to SEQ ID NO: 160582
uucuacgucagcaagacag

SEQ ID NO: 160584 - RNA, 19 nt, Artificial Sequence
  Description of Artificial Sequence: Synthetic oligonucleotide
  Sense strand starting at position 1182 of SEQ ID NO: 2065
cagcauuagucucgggagu

SEQ ID NO: 160585 - RNA, 19 nt, Artificial Sequence
  Description of Artificial Sequence: Synthetic oligonucleotide
  Antisense strand to SEQ ID NO: 160584
acucccgagacuaaugcug

SEQ ID NO: 160586 - RNA, 19 nt, Artificial Sequence
  Description of Artificial Sequence: Synthetic oligonucleotide
  Sense strand starting at position 1077 of SEQ ID NO: 2065
guuugcuucugugaaagca

SEQ ID NO: 160587 - RNA, 19 nt, Artificial Sequence
  Description of Artificial Sequence: Synthetic oligonucleotide
  Antisense strand to SEQ ID NO: 160586
ugcuuucacagaagcaaac

SEQ ID NO: 160588 - RNA, 19 nt, Artificial Sequence
  Description of Artificial Sequence: Synthetic oligonucleotide
  Sense strand starting at position 1075 of SEQ ID NO: 2065
gaguuugcuucugugaaag

SEQ ID NO: 160589 - RNA, 19 nt, Artificial Sequence
  Description of Artificial Sequence: Synthetic oligonucleotide
  Antisense strand to SEQ ID NO: 160588
cuuucacagaagcaaacuc

SEQ ID NO: 160590 - RNA, 19 nt, Artificial Sequence
  Description of Artificial Sequence: Synthetic oligonucleotide
  Sense strand starting at position 1074 of SEQ ID NO: 2065
agaguuugcuucugugaaa

SEQ ID NO: 160591 - RNA, 19 nt, Artificial Sequence
  Description of Artificial Sequence: Synthetic oligonucleotide
  Antisense strand to SEQ ID NO: 160590
uuucacagaagcaaacucu

SEQ ID NO: 160592 - RNA, 19 nt, Artificial Sequence
  Description of Artificial Sequence: Synthetic oligonucleotide
  Sense strand starting at position 1071 of SEQ ID NO: 2065
gggagaguuugcuucugug

SEQ ID NO: 160593 - RNA, 19 nt, Artificial Sequence
  Description of Artificial Sequence: Synthetic oligonucleotide
  Antisense strand to SEQ ID NO: 160592
cacagaagcaaacucuccc

SEQ ID NO: 160594 - RNA, 19 nt, Artificial Sequence
  Description of Artificial Sequence: Synthetic oligonucleotide
  Sense strand starting at position 978 of SEQ ID NO: 2065
agccaugacccggguaaga

SEQ ID NO: 160595 - RNA, 19 nt, Artificial Sequence
  Description of Artificial Sequence: Synthetic oligonucleotide
  Antisense strand to SEQ ID NO: 160594
ucuuacccgggucauggcu

SEQ ID NO: 160596 - RNA, 19 nt, Artificial Sequence
  Description of Artificial Sequence: Synthetic oligonucleotide
  Sense strand starting at position 753 of SEQ ID NO: 2065
ggcagaaggagcugucuca

SEQ ID NO: 160597 - RNA, 19 nt, Artificial Sequence
  Description of Artificial Sequence: Synthetic oligonucleotide
  Antisense strand to SEQ ID NO: 160596
ugagacagcuccuucugcc

SEQ ID NO: 160598 - RNA, 19 nt, Artificial Sequence
  Description of Artificial Sequence: Synthetic oligonucleotide
  Sense strand starting at position 148 of SEQ ID NO: 2068
accgcagaaccugaagauu

SEQ ID NO: 160599 - RNA, 19 nt, Artificial Sequence
  Description of Artificial Sequence: Synthetic oligonucleotide
  Antisense strand to SEQ ID NO: 160598
aaucuucagguucugcggu

SEQ ID NO: 160600 - RNA, 19 nt, Artificial Sequence
  Description of Artificial Sequence: Synthetic oligonucleotide
  Sense strand starting at position 246 of SEQ ID NO: 2068
ggccuccugaauugaagua

SEQ ID NO: 160601 - RNA, 19 nt, Artificial Sequence
  Description of Artificial Sequence: Synthetic oligonucleotide
  Antisense strand to SEQ ID NO: 160600
uacuucaauucaggaggcc

SEQ ID NO: 160602 - RNA, 19 nt, Artificial Sequence
  Description of Artificial Sequence: Synthetic oligonucleotide
  Sense strand starting at position 464 of SEQ ID NO: 2068
ccacgugagguagauacau

SEQ ID NO: 160603 - RNA, 19 nt, Artificial Sequence
  Description of Artificial Sequence: Synthetic oligonucleotide
  Antisense strand to SEQ ID NO: 160602
auguaucuaccucacgugg

SEQ ID NO: 160604 - RNA, 19 nt, Artificial Sequence
  Description of Artificial Sequence: Synthetic oligonucleotide
  Sense strand starting at position 486 of SEQ ID NO: 2068
ccacuaucagaggguuaag

SEQ ID NO: 160605 - RNA, 19 nt, Artificial Sequence
  Description of Artificial Sequence: Synthetic oligonucleotide
  Antisense strand to SEQ ID NO: 160604
cuuaacccucugauagugg

SEQ ID NO: 160606 - RNA, 19 nt, Artificial Sequence
  Description of Artificial Sequence: Synthetic oligonucleotide
  Sense strand starting at position 642 of SEQ ID NO: 2068
gguuccaauucucuuugaa

SEQ ID NO: 160607 - RNA, 19 nt, Artificial Sequence
  Description of Artificial Sequence: Synthetic oligonucleotide
  Antisense strand to SEQ ID NO: 160606
uucaaagagaauuggaacc

SEQ ID NO: 160608 - RNA, 19 nt, Artificial Sequence
  Description of Artificial Sequence: Synthetic oligonucleotide
  Sense strand starting at position 645 of SEQ ID NO: 2068
uccaauucucuuugaagga

SEQ ID NO: 160609 - RNA, 19 nt, Artificial Sequence
  Description of Artificial Sequence: Synthetic oligonucleotide
  Antisense strand to SEQ ID NO: 160608
uccuucaaagagaauugga

SEQ ID NO: 160610 - RNA, 19 nt, Artificial Sequence
  Description of Artificial Sequence: Synthetic oligonucleotide
  Sense strand starting at position 666 of SEQ ID NO: 2068
cccaauguucucuagacgu

SEQ ID NO: 160611 - RNA, 19 nt, Artificial Sequence
  Description of Artificial Sequence: Synthetic oligonucleotide
  Antisense strand to SEQ ID NO: 160610
acgucuagagaacauuggg

SEQ ID NO: 160612 - RNA, 19 nt, Artificial Sequence
  Description of Artificial Sequence: Synthetic oligonucleotide
  Sense strand starting at position 668 of SEQ ID NO: 2068
caauguucucuagacguaa

SEQ ID NO: 160613 - RNA, 19 nt, Artificial Sequence
  Description of Artificial Sequence: Synthetic oligonucleotide
  Antisense strand to SEQ ID NO: 160612
uuacgucuagagaacauug

SEQ ID NO: 160614 - RNA, 19 nt, Artificial Sequence
  Description of Artificial Sequence: Synthetic oligonucleotide
  Sense strand starting at position 1128 of SEQ ID NO: 2068
gcacuaugaugacaauuua

SEQ ID NO: 160615 - RNA, 19 nt, Artificial Sequence
  Description of Artificial Sequence: Synthetic oligonucleotide
  Antisense strand to SEQ ID NO: 160614
uaaauugucaucauagugc

SEQ ID NO: 160616 - RNA, 19 nt, Artificial Sequence
  Description of Artificial Sequence: Synthetic oligonucleotide
  Sense strand starting at position 1178 of SEQ ID NO: 2068
cucuaugauguaggaauua

SEQ ID NO: 160617 - RNA, 19 nt, Artificial Sequence
  Description of Artificial Sequence: Synthetic oligonucleotide
  Antisense strand to SEQ ID NO: 160616
uaauuccuacaucauagag

SEQ ID NO: 160618 - RNA, 19 nt, Artificial Sequence
  Description of Artificial Sequence: Synthetic oligonucleotide
  Sense strand starting at position 1227 of SEQ ID NO: 2068
gcucacagacauuauguua

SEQ ID NO: 160619 - RNA, 19 nt, Artificial Sequence
  Description of Artificial Sequence: Synthetic oligonucleotide
  Antisense strand to SEQ ID NO: 160618
uaacauaaugucugugagc

SEQ ID NO: 160620 - RNA, 19 nt, Artificial Sequence
  Description of Artificial Sequence: Synthetic oligonucleotide
  Sense strand starting at position 1318 of SEQ ID NO: 2068
acucuuucuagugggaaga

SEQ ID NO: 160621 - RNA, 19 nt, Artificial Sequence
  Description of Artificial Sequence: Synthetic oligonucleotide
  Antisense strand to SEQ ID NO: 160620
ucuucccacuagaaagagu

SEQ ID NO: 160622 - RNA, 19 nt, Artificial Sequence
  Description of Artificial Sequence: Synthetic oligonucleotide
  Sense strand starting at position 1319 of SEQ ID NO: 2068
cucuuucuagugggaagaa

SEQ ID NO: 160623 - RNA, 19 nt, Artificial Sequence
  Description of Artificial Sequence: Synthetic oligonucleotide
  Antisense strand to SEQ ID NO: 160622
uucuucccacuagaaagag

SEQ ID NO: 160624 - RNA, 19 nt, Artificial Sequence
  Description of Artificial Sequence: Synthetic oligonucleotide
  Sense strand starting at position 1362 of SEQ ID NO: 2068
uguccaaacccuggacuua

SEQ ID NO: 160625 - RNA, 19 nt, Artificial Sequence
  Description of Artificial Sequence: Synthetic oligonucleotide
  Antisense strand to SEQ ID NO: 160624
uaaguccaggguuuggaca

SEQ ID NO: 160626 - RNA, 19 nt, Artificial Sequence
  Description of Artificial Sequence: Synthetic oligonucleotide
  Sense strand starting at position 1455 of SEQ ID NO: 2068
cugagauuguacucaggga

SEQ ID NO: 160627 - RNA, 19 nt, Artificial Sequence
  Description of Artificial Sequence: Synthetic oligonucleotide
  Antisense strand to SEQ ID NO: 160626
ucccugaguacaaucucag

SEQ ID NO: 160628 - RNA, 19 nt, Artificial Sequence
  Description of Artificial Sequence: Synthetic oligonucleotide
  Sense strand starting at position 1566 of SEQ ID NO: 2068
gcaaguccucuguauaagu

SEQ ID NO: 160629 - RNA, 19 nt, Artificial Sequence
  Description of Artificial Sequence: Synthetic oligonucleotide
  Antisense strand to SEQ ID NO: 160628
acuuauacagaggacuugc

SEQ ID NO: 160630 - RNA, 19 nt, Artificial Sequence
  Description of Artificial Sequence: Synthetic oligonucleotide
  Sense strand starting at position 1794 of SEQ ID NO: 2068
cccugucugcguuucucaa

SEQ ID NO: 160631 - RNA, 19 nt, Artificial Sequence
  Description of Artificial Sequence: Synthetic oligonucleotide
  Antisense strand to SEQ ID NO: 160630
uugagaaacgcagacaggg

SEQ ID NO: 160632 - RNA, 19 nt, Artificial Sequence
  Description of Artificial Sequence: Synthetic oligonucleotide
  Sense strand starting at position 1801 of SEQ ID NO: 2068
ugcguuucucaagacacuu

SEQ ID NO: 160633 - RNA, 19 nt, Artificial Sequence
  Description of Artificial Sequence: Synthetic oligonucleotide
  Antisense strand to SEQ ID NO: 160632
aagugucuugagaaacgca

SEQ ID NO: 160634 - RNA, 19 nt, Artificial Sequence
  Description of Artificial Sequence: Synthetic oligonucleotide
  Sense strand starting at position 1845 of SEQ ID NO: 2068
gucugucuggcccaauuau

SEQ ID NO: 160635 - RNA, 19 nt, Artificial Sequence
  Description of Artificial Sequence: Synthetic oligonucleotide
  Antisense strand to SEQ ID NO: 160634
auaauugggccagacagac

SEQ ID NO: 160636 - RNA, 19 nt, Artificial Sequence
  Description of Artificial Sequence: Synthetic oligonucleotide
  Sense strand starting at position 1941 of SEQ ID NO: 2068
gcccaaacucccuagugua

SEQ ID NO: 160637 - RNA, 19 nt, Artificial Sequence
  Description of Artificial Sequence: Synthetic oligonucleotide
  Antisense strand to SEQ ID NO: 160636
uacacuagggaguuugggc

SEQ ID NO: 160638 - RNA, 19 nt, Artificial Sequence
  Description of Artificial Sequence: Synthetic oligonucleotide
  Sense strand starting at position 2010 of SEQ ID NO: 2068
acagaugccuuugcugauu

SEQ ID NO: 160639 - RNA, 19 nt, Artificial Sequence
  Description of Artificial Sequence: Synthetic oligonucleotide
  Antisense strand to SEQ ID NO: 160638
aaucagcaaaggcaucugu

SEQ ID NO: 160640 - RNA, 19 nt, Artificial Sequence
  Description of Artificial Sequence: Synthetic oligonucleotide
  Sense strand starting at position 2013 of SEQ ID NO: 2068
gaugccuuugcugauuaca

SEQ ID NO: 160641 - RNA, 19 nt, Artificial Sequence
  Description of Artificial Sequence: Synthetic oligonucleotide
  Antisense strand to SEQ ID NO: 160640
uguaaucagcaaaggcauc

SEQ ID NO: 160642 - RNA, 19 nt, Artificial Sequence
  Description of Artificial Sequence: Synthetic oligonucleotide
  Sense strand starting at position 2015 of SEQ ID NO: 2068
ugccuuugcugauuacaaa

SEQ ID NO: 160643 - RNA, 19 nt, Artificial Sequence
  Description of Artificial Sequence: Synthetic oligonucleotide
  Antisense strand to SEQ ID NO: 160642
uuuguaaucagcaaaggca

SEQ ID NO: 160644 - RNA, 19 nt, Artificial Sequence
  Description of Artificial Sequence: Synthetic oligonucleotide
  Sense strand starting at position 2285 of SEQ ID NO: 2068
aagaauuagcccugacagu

SEQ ID NO: 160645 - RNA, 19 nt, Artificial Sequence
  Description of Artificial Sequence: Synthetic oligonucleotide
  Antisense strand to SEQ ID NO: 160644
acugucagggcuaauucuu

SEQ ID NO: 160646 - RNA, 19 nt, Artificial Sequence
  Description of Artificial Sequence: Synthetic oligonucleotide
  Sense strand starting at position 2286 of SEQ ID NO: 2068
agaauuagcccugacaguc

SEQ ID NO: 160647 - RNA, 19 nt, Artificial Sequence
  Description of Artificial Sequence: Synthetic oligonucleotide
  Antisense strand to SEQ ID NO: 160646
gacugucagggcuaauucu

SEQ ID NO: 160648 - RNA, 19 nt, Artificial Sequence
  Description of Artificial Sequence: Synthetic oligonucleotide
  Sense strand starting at position 2570 of SEQ ID NO: 2068
ccguaacucagagguuacu

SEQ ID NO: 160649 - RNA, 19 nt, Artificial Sequence
  Description of Artificial Sequence: Synthetic oligonucleotide
  Antisense strand to SEQ ID NO: 160648
aguaaccucugaguuacgg

SEQ ID NO: 160650 - RNA, 19 nt, Artificial Sequence
  Description of Artificial Sequence: Synthetic oligonucleotide
  Sense strand starting at position 2865 of SEQ ID NO: 2068
ccgggagguuucucaguga

SEQ ID NO: 160651 - RNA, 19 nt, Artificial Sequence
  Description of Artificial Sequence: Synthetic oligonucleotide
  Antisense strand to SEQ ID NO: 160650
ucacugagaaaccucccgg

SEQ ID NO: 160652 - RNA, 19 nt, Artificial Sequence
  Description of Artificial Sequence: Synthetic oligonucleotide
  Sense strand starting at position 2868 of SEQ ID NO: 2068
ggagguuucucagugaugu

SEQ ID NO: 160653 - RNA, 19 nt, Artificial Sequence
  Description of Artificial Sequence: Synthetic oligonucleotide
  Antisense strand to SEQ ID NO: 160652
acaucacugagaaaccucc

SEQ ID NO: 160654 - RNA, 19 nt, Artificial Sequence
  Description of Artificial Sequence: Synthetic oligonucleotide
  Sense strand starting at position 2869 of SEQ ID NO: 2068
gagguuucucagugauguc

SEQ ID NO: 160655 - RNA, 19 nt, Artificial Sequence
  Description of Artificial Sequence: Synthetic oligonucleotide
  Antisense strand to SEQ ID NO: 160654
gacaucacugagaaaccuc

SEQ ID NO: 160656 - RNA, 19 nt, Artificial Sequence
  Description of Artificial Sequence: Synthetic oligonucleotide
  Sense strand starting at position 2912 of SEQ ID NO: 2068
agugaaagaucauccaguc

SEQ ID NO: 160657 - RNA, 19 nt, Artificial Sequence
  Description of Artificial Sequence: Synthetic oligonucleotide
  Antisense strand to SEQ ID NO: 160656
gacuggaugaucuuucacu

SEQ ID NO: 160658 - RNA, 19 nt, Artificial Sequence
  Description of Artificial Sequence: Synthetic oligonucleotide
  Sense strand starting at position 3012 of SEQ ID NO: 2068
ucaagaagcucuucuuaga

SEQ ID NO: 160659 - RNA, 19 nt, Artificial Sequence
  Description of Artificial Sequence: Synthetic oligonucleotide
  Antisense strand to SEQ ID NO: 160658
ucuaagaagagcuucuuga

SEQ ID NO: 160660 - RNA, 19 nt, Artificial Sequence
  Description of Artificial Sequence: Synthetic oligonucleotide
  Sense strand starting at position 3078 of SEQ ID NO: 2068
ucuagugaccuugggaaca

SEQ ID NO: 160661 - RNA, 19 nt, Artificial Sequence
  Description of Artificial Sequence: Synthetic oligonucleotide
  Antisense strand to SEQ ID NO: 160660
uguucccaaggucacuaga

SEQ ID NO: 160662 - RNA, 19 nt, Artificial Sequence
  Description of Artificial Sequence: Synthetic oligonucleotide
  Sense strand starting at position 3123 of SEQ ID NO: 2068
cccuucuguguagagguaa

SEQ ID NO: 160663 - RNA, 19 nt, Artificial Sequence
  Description of Artificial Sequence: Synthetic oligonucleotide
  Antisense strand to SEQ ID NO: 160662
uuaccucuacacagaaggg

SEQ ID NO: 160664 - RNA, 19 nt, Artificial Sequence
  Description of Artificial Sequence: Synthetic oligonucleotide
  Sense strand starting at position 3144 of SEQ ID NO: 2068
acacccauuucgcaaggau

SEQ ID NO: 160665 - RNA, 19 nt, Artificial Sequence
  Description of Artificial Sequence: Synthetic oligonucleotide
  Antisense strand to SEQ ID NO: 160664
auccuugcgaaaugggugu

SEQ ID NO: 160666 - RNA, 19 nt, Artificial Sequence
  Description of Artificial Sequence: Synthetic oligonucleotide
  Sense strand starting at position 3162 of SEQ ID NO: 2068
uggugugaggguuggaaga

SEQ ID NO: 160667 - RNA, 19 nt, Artificial Sequence
  Description of Artificial Sequence: Synthetic oligonucleotide
  Antisense strand to SEQ ID NO: 160666
ucuuccaacccucacacca

SEQ ID NO: 160668 - RNA, 19 nt, Artificial Sequence
  Description of Artificial Sequence: Synthetic oligonucleotide
  Sense strand starting at position 3225 of SEQ ID NO: 2068
aaauaaauguggcuauugu

SEQ ID NO: 160669 - RNA, 19 nt, Artificial Sequence
  Description of Artificial Sequence: Synthetic oligonucleotide
  Antisense strand to SEQ ID NO: 160668
acaauagccacauuuauuu

SEQ ID NO: 160670 - RNA, 19 nt, Artificial Sequence
  Description of Artificial Sequence: Synthetic oligonucleotide
  Sense strand starting at position 3226 of SEQ ID NO: 2068
aauaaauguggcuauuguu

SEQ ID NO: 160671 - RNA, 19 nt, Artificial Sequence
  Description of Artificial Sequence: Synthetic oligonucleotide
  Antisense strand to SEQ ID NO: 160670
aacaauagccacauuuauu

SEQ ID NO: 160672 - RNA, 19 nt, Artificial Sequence
  Description of Artificial Sequence: Synthetic oligonucleotide
  Sense strand starting at position 3284 of SEQ ID NO: 2068
acaugaccucuuggguaca

SEQ ID NO: 160673 - RNA, 19 nt, Artificial Sequence
  Description of Artificial Sequence: Synthetic oligonucleotide
  Antisense strand to SEQ ID NO: 160672
uguacccaagaggucaugu

SEQ ID NO: 160674 - RNA, 19 nt, Artificial Sequence
  Description of Artificial Sequence: Synthetic oligonucleotide
  Sense strand starting at position 3287 of SEQ ID NO: 2068
ugaccucuuggguacaagu

SEQ ID NO: 160675 - RNA, 19 nt, Artificial Sequence
  Description of Artificial Sequence: Synthetic oligonucleotide
  Antisense strand to SEQ ID NO: 160674
acuuguacccaagagguca

SEQ ID NO: 160676 - RNA, 19 nt, Artificial Sequence
  Description of Artificial Sequence: Synthetic oligonucleotide
  Sense strand starting at position 3493 of SEQ ID NO: 2068
accucagugccuuauugau

SEQ ID NO: 160677 - RNA, 19 nt, Artificial Sequence
  Description of Artificial Sequence: Synthetic oligonucleotide
  Antisense strand to SEQ ID NO: 160676
aucaauaaggcacugaggu

SEQ ID NO: 160678 - RNA, 19 nt, Artificial Sequence
  Description of Artificial Sequence: Synthetic oligonucleotide
  Sense strand starting at position 436 of SEQ ID NO: 2067
gcacuaugaugacaauuua

SEQ ID NO: 160679 - RNA, 19 nt, Artificial Sequence
  Description of Artificial Sequence: Synthetic oligonucleotide
  Antisense strand to SEQ ID NO: 160678
uaaauugucaucauagugc

SEQ ID NO: 160680 - RNA, 19 nt, Artificial Sequence
  Description of Artificial Sequence: Synthetic oligonucleotide
  Sense strand starting at position 486 of SEQ ID NO: 2067
cucuaugauguaggaauua

SEQ ID NO: 160681 - RNA, 19 nt, Artificial Sequence
  Description of Artificial Sequence: Synthetic oligonucleotide
  Antisense strand to SEQ ID NO: 160680
uaauuccuacaucauagag

SEQ ID NO: 160682 - RNA, 19 nt, Artificial Sequence
  Description of Artificial Sequence: Synthetic oligonucleotide
  Sense strand starting at position 535 of SEQ ID NO: 2067
gcucacagacauuauguua

SEQ ID NO: 160683 - RNA, 19 nt, Artificial Sequence
  Description of Artificial Sequence: Synthetic oligonucleotide
  Antisense strand to SEQ ID NO: 160682
uaacauaaugucugugagc

SEQ ID NO: 160684 - RNA, 19 nt, Artificial Sequence
  Description of Artificial Sequence: Synthetic oligonucleotide
  Sense strand starting at position 626 of SEQ ID NO: 2067
acucuuucuagugggaaga

SEQ ID NO: 160685 - RNA, 19 nt, Artificial Sequence
  Description of Artificial Sequence: Synthetic oligonucleotide
  Antisense strand to SEQ ID NO: 160684
ucuucccacuagaaagagu

SEQ ID NO: 160686 - RNA, 19 nt, Artificial Sequence
  Description of Artificial Sequence: Synthetic oligonucleotide
  Sense strand starting at position 627 of SEQ ID NO: 2067
cucuuucuagugggaagaa

SEQ ID NO: 160687 - RNA, 19 nt, Artificial Sequence
  Description of Artificial Sequence: Synthetic oligonucleotide
  Antisense strand to SEQ ID NO: 160686
uucuucccacuagaaagag

SEQ ID NO: 160688 - RNA, 19 nt, Artificial Sequence
  Description of Artificial Sequence: Synthetic oligonucleotide
  Sense strand starting at position 670 of SEQ ID NO: 2067
uguccaaacccuggacuua

SEQ ID NO: 160689 - RNA, 19 nt, Artificial Sequence
  Description of Artificial Sequence: Synthetic oligonucleotide
  Antisense strand to SEQ ID NO: 160688
uaaguccaggguuuggaca

SEQ ID NO: 160690 - RNA, 19 nt, Artificial Sequence
  Description of Artificial Sequence: Synthetic oligonucleotide
  Sense strand starting at position 763 of SEQ ID NO: 2067
cugagauuguacucaggga

SEQ ID NO: 160691 - RNA, 19 nt, Artificial Sequence
  Description of Artificial Sequence: Synthetic oligonucleotide
  Antisense strand to SEQ ID NO: 160690
ucccugaguacaaucucag

SEQ ID NO: 160692 - RNA, 19 nt, Artificial Sequence
  Description of Artificial Sequence: Synthetic oligonucleotide
  Sense strand starting at position 795 of SEQ ID NO: 2067
gagacauaguaauaguuaa

SEQ ID NO: 160693 - RNA, 19 nt, Artificial Sequence
  Description of Artificial Sequence: Synthetic oligonucleotide
  Antisense strand to SEQ ID NO: 160692
uuaacuauuacuaugucuc

SEQ ID NO: 160694 - RNA, 19 nt, Artificial Sequence
  Description of Artificial Sequence: Synthetic oligonucleotide
  Sense strand starting at position 815 of SEQ ID NO: 2067
agaggcaccucugaagaau

SEQ ID NO: 160695 - RNA, 19 nt, Artificial Sequence
  Description of Artificial Sequence: Synthetic oligonucleotide
  Antisense strand to SEQ ID NO: 160694
auucuucagaggugccucu

SEQ ID NO: 160696 - RNA, 19 nt, Artificial Sequence
  Description of Artificial Sequence: Synthetic oligonucleotide
  Sense strand starting at position 874 of SEQ ID NO: 2067
gcaaguccucuguauaagu

SEQ ID NO: 160697 - RNA, 19 nt, Artificial Sequence
  Description of Artificial Sequence: Synthetic oligonucleotide
  Antisense strand to SEQ ID NO: 160696
acuuauacagaggacuugc

SEQ ID NO: 160698 - RNA, 19 nt, Artificial Sequence
  Description of Artificial Sequence: Synthetic oligonucleotide
  Sense strand starting at position 944 of SEQ ID NO: 2067
aaacauaucgcgcaugagu

SEQ ID NO: 160699 - RNA, 19 nt, Artificial Sequence
  Description of Artificial Sequence: Synthetic oligonucleotide
  Antisense strand to SEQ ID NO: 160698
acucaugcgcgauauguuu

SEQ ID NO: 160700 - RNA, 19 nt, Artificial Sequence
  Description of Artificial Sequence: Synthetic oligonucleotide
  Sense strand starting at position 952 of SEQ ID NO: 2067
cgcgcaugaguucacaacu

SEQ ID NO: 160701 - RNA, 19 nt, Artificial Sequence
  Description of Artificial Sequence: Synthetic oligonucleotide
  Antisense strand to SEQ ID NO: 160700
aguugugaacucaugcgcg

SEQ ID NO: 160702 - RNA, 19 nt, Artificial Sequence
  Description of Artificial Sequence: Synthetic oligonucleotide
  Sense strand starting at position 1102 of SEQ ID NO: 2067
cccugucugcguuucucaa

SEQ ID NO: 160703 - RNA, 19 nt, Artificial Sequence
  Description of Artificial Sequence: Synthetic oligonucleotide
  Antisense strand to SEQ ID NO: 160702
uugagaaacgcagacaggg

SEQ ID NO: 160704 - RNA, 19 nt, Artificial Sequence
  Description of Artificial Sequence: Synthetic oligonucleotide
  Sense strand starting at position 1109 of SEQ ID NO: 2067
ugcguuucucaagacacuu

SEQ ID NO: 160705 - RNA, 19 nt, Artificial Sequence
  Description of Artificial Sequence: Synthetic oligonucleotide
  Antisense strand to SEQ ID NO: 160704
aagugucuugagaaacgca

SEQ ID NO: 160706 - RNA, 19 nt, Artificial Sequence
  Description of Artificial Sequence: Synthetic oligonucleotide
  Sense strand starting at position 1153 of SEQ ID NO: 2067
gucugucuggcccaauuau

SEQ ID NO: 160707 - RNA, 19 nt, Artificial Sequence
  Description of Artificial Sequence: Synthetic oligonucleotide
  Antisense strand to SEQ ID NO: 160706
auaauugggccagacagac

SEQ ID NO: 160708 - RNA, 19 nt, Artificial Sequence
  Description of Artificial Sequence: Synthetic oligonucleotide
  Sense strand starting at position 1249 of SEQ ID NO: 2067
gcccaaacucccuagugua

SEQ ID NO: 160709 - RNA, 19 nt, Artificial Sequence
  Description of Artificial Sequence: Synthetic oligonucleotide
  Antisense strand to SEQ ID NO: 160708
uacacuagggaguuugggc

SEQ ID NO: 160710 - RNA, 19 nt, Artificial Sequence
  Description of Artificial Sequence: Synthetic oligonucleotide
  Sense strand starting at position 1318 of SEQ ID NO: 2067
acagaugccuuugcugauu

SEQ ID NO: 160711 - RNA, 19 nt, Artificial Sequence
  Description of Artificial Sequence: Synthetic oligonucleotide
  Antisense strand to SEQ ID NO: 160710
aaucagcaaaggcaucugu

SEQ ID NO: 160712 - RNA, 19 nt, Artificial Sequence
  Description of Artificial Sequence: Synthetic oligonucleotide
  Sense strand starting at position 1321 of SEQ ID NO: 2067
gaugccuuugcugauuaca

SEQ ID NO: 160713 - RNA, 19 nt, Artificial Sequence
  Description of Artificial Sequence: Synthetic oligonucleotide
  Antisense strand to SEQ ID NO: 160712
uguaaucagcaaaggcauc

SEQ ID NO: 160714 - RNA, 19 nt, Artificial Sequence
  Description of Artificial Sequence: Synthetic oligonucleotide
  Sense strand starting at position 1323 of SEQ ID NO: 2067
ugccuuugcugauuacaaa

SEQ ID NO: 160715 - RNA, 19 nt, Artificial Sequence
  Description of Artificial Sequence: Synthetic oligonucleotide
  Antisense strand to SEQ ID NO: 160714
uuuguaaucagcaaaggca

SEQ ID NO: 160716 - RNA, 19 nt, Artificial Sequence
  Description of Artificial Sequence: Synthetic oligonucleotide
  Sense strand starting at position 1593 of SEQ ID NO: 2067
aagaauuagcccugacagu

SEQ ID NO: 160717 - RNA, 19 nt, Artificial Sequence
  Description of Artificial Sequence: Synthetic oligonucleotide
  Antisense strand to SEQ ID NO: 160716
acugucagggcuaauucuu

SEQ ID NO: 160718 - RNA, 19 nt, Artificial Sequence
  Description of Artificial Sequence: Synthetic oligonucleotide
  Sense strand starting at position 1594 of SEQ ID NO: 2067
agaauuagcccugacaguc

SEQ ID NO: 160719 - RNA, 19 nt, Artificial Sequence
  Description of Artificial Sequence: Synthetic oligonucleotide
  Antisense strand to SEQ ID NO: 160718
gacugucagggcuaauucu

SEQ ID NO: 160720 - RNA, 19 nt, Artificial Sequence
  Description of Artificial Sequence: Synthetic oligonucleotide
  Sense strand starting at position 1878 of SEQ ID NO: 2067
ccguaacucagagguuacu

SEQ ID NO: 160721 - RNA, 19 nt, Artificial Sequence
  Description of Artificial Sequence: Synthetic oligonucleotide
  Antisense strand to SEQ ID NO: 160720
aguaaccucugaguuacgg

SEQ ID NO: 160722 - RNA, 19 nt, Artificial Sequence
  Description of Artificial Sequence: Synthetic oligonucleotide
  Sense strand starting at position 2173 of SEQ ID NO: 2067
ccgggagguuucucaguga

SEQ ID NO: 160723 - RNA, 19 nt, Artificial Sequence
  Description of Artificial Sequence: Synthetic oligonucleotide
  Antisense strand to SEQ ID NO: 160722
ucacugagaaaccucccgg

SEQ ID NO: 160724 - RNA, 19 nt, Artificial Sequence
  Description of Artificial Sequence: Synthetic oligonucleotide
  Sense strand starting at position 2176 of SEQ ID NO: 2067
ggagguuucucagugaugu

SEQ ID NO: 160725 - RNA, 19 nt, Artificial Sequence
  Description of Artificial Sequence: Synthetic oligonucleotide
  Antisense strand to SEQ ID NO: 160724
acaucacugagaaaccucc

SEQ ID NO: 160726 - RNA, 19 nt, Artificial Sequence
  Description of Artificial Sequence: Synthetic oligonucleotide
  Sense strand starting at position 2177 of SEQ ID NO: 2067
gagguuucucagugauguc

SEQ ID NO: 160727 - RNA, 19 nt, Artificial Sequence
  Description of Artificial Sequence: Synthetic oligonucleotide
  Antisense strand to SEQ ID NO: 160726
gacaucacugagaaaccuc

SEQ ID NO: 160728 - RNA, 19 nt, Artificial Sequence
  Description of Artificial Sequence: Synthetic oligonucleotide
  Sense strand starting at position 2220 of SEQ ID NO: 2067
agugaaagaucauccaguc

SEQ ID NO: 160729 - RNA, 19 nt, Artificial Sequence
  Description of Artificial Sequence: Synthetic oligonucleotide
  Antisense strand to SEQ ID NO: 160728
gacuggaugaucuuucacu

SEQ ID NO: 160730 - RNA, 19 nt, Artificial Sequence
  Description of Artificial Sequence: Synthetic oligonucleotide
  Sense strand starting at position 2320 of SEQ ID NO: 2067
ucaagaagcucuucuuaga

SEQ ID NO: 160731 - RNA, 19 nt, Artificial Sequence
  Description of Artificial Sequence: Synthetic oligonucleotide
  Antisense strand to SEQ ID NO: 160730
ucuaagaagagcuucuuga

SEQ ID NO: 160732 - RNA, 19 nt, Artificial Sequence
  Description of Artificial Sequence: Synthetic oligonucleotide
  Sense strand starting at position 2386 of SEQ ID NO: 2067
ucuagugaccuugggaaca

SEQ ID NO: 160733 - RNA, 19 nt, Artificial Sequence
  Description of Artificial Sequence: Synthetic oligonucleotide
  Antisense strand to SEQ ID NO: 160732
uguucccaaggucacuaga

SEQ ID NO: 160734 - RNA, 19 nt, Artificial Sequence
  Description of Artificial Sequence: Synthetic oligonucleotide
  Sense strand starting at position 2431 of SEQ ID NO: 2067
cccuucuguguagagguaa

SEQ ID NO: 160735 - RNA, 19 nt, Artificial Sequence
  Description of Artificial Sequence: Synthetic oligonucleotide
  Antisense strand to SEQ ID NO: 160734
uuaccucuacacagaaggg

SEQ ID NO: 160736 - RNA, 19 nt, Artificial Sequence
  Description of Artificial Sequence: Synthetic oligonucleotide
  Sense strand starting at position 2452 of SEQ ID NO: 2067
acacccauuucgcaaggau

SEQ ID NO: 160737 - RNA, 19 nt, Artificial Sequence
  Description of Artificial Sequence: Synthetic oligonucleotide
  Antisense strand to SEQ ID NO: 160736
auccuugcgaaaugggugu

SEQ ID NO: 160738 - RNA, 19 nt, Artificial Sequence
  Description of Artificial Sequence: Synthetic oligonucleotide
  Sense strand starting at position 2470 of SEQ ID NO: 2067
uggugugaggguuggaaga

SEQ ID NO: 160739 - RNA, 19 nt, Artificial Sequence
  Description of Artificial Sequence: Synthetic oligonucleotide
  Antisense strand to SEQ ID NO: 160738
ucuuccaacccucacacca

SEQ ID NO: 160740 - RNA, 19 nt, Artificial Sequence
  Description of Artificial Sequence: Synthetic oligonucleotide
  Sense strand starting at position 2533 of SEQ ID NO: 2067
aaauaaauguggcuauugu

SEQ ID NO: 160741 - RNA, 19 nt, Artificial Sequence
  Description of Artificial Sequence: Synthetic oligonucleotide
  Antisense strand to SEQ ID NO: 160740
acaauagccacauuuauuu

SEQ ID NO: 160742 - RNA, 19 nt, Artificial Sequence
  Description of Artificial Sequence: Synthetic oligonucleotide
  Sense strand starting at position 2534 of SEQ ID NO: 2067
aauaaauguggcuauuguu

SEQ ID NO: 160743 - RNA, 19 nt, Artificial Sequence
  Description of Artificial Sequence: Synthetic oligonucleotide
  Antisense strand to SEQ ID NO: 160742
aacaauagccacauuuauu

SEQ ID NO: 160744 - RNA, 19 nt, Artificial Sequence
  Description of Artificial Sequence: Synthetic oligonucleotide
  Sense strand starting at position 2542 of SEQ ID NO: 2067
uggcuauuguuaguguaaa

SEQ ID NO: 160745 - RNA, 19 nt, Artificial Sequence
  Description of Artificial Sequence: Synthetic oligonucleotide
  Antisense strand to SEQ ID NO: 160744
uuuacacuaacaauagcca

SEQ ID NO: 160746 - RNA, 19 nt, Artificial Sequence
  Description of Artificial Sequence: Synthetic oligonucleotide
  Sense strand starting at position 2592 of SEQ ID NO: 2067
acaugaccucuuggguaca

SEQ ID NO: 160747 - RNA, 19 nt, Artificial Sequence
  Description of Artificial Sequence: Synthetic oligonucleotide
  Antisense strand to SEQ ID NO: 160746
uguacccaagaggucaugu

SEQ ID NO: 160748 - RNA, 19 nt, Artificial Sequence
  Description of Artificial Sequence: Synthetic oligonucleotide
  Sense strand starting at position 2595 of SEQ ID NO: 2067
ugaccucuuggguacaagu

SEQ ID NO: 160749 - RNA, 19 nt, Artificial Sequence
  Description of Artificial Sequence: Synthetic oligonucleotide
  Antisense strand to SEQ ID NO: 160748
acuuguacccaagagguca

SEQ ID NO: 160750 - RNA, 19 nt, Artificial Sequence
  Description of Artificial Sequence: Synthetic oligonucleotide
  Sense strand starting at position 2801 of SEQ ID NO: 2067
accucagugccuuauugau

SEQ ID NO: 160751 - RNA, 19 nt, Artificial Sequence
  Description of Artificial Sequence: Synthetic oligonucleotide
  Antisense strand to SEQ ID NO: 160750
aucaauaaggcacugaggu

SEQ ID NO: 160752 - RNA, 19 nt, Artificial Sequence
  Description of Artificial Sequence: Synthetic oligonucleotide
  Sense strand starting at position 3469 of SEQ ID NO: 2067
cagauugugcucuggcaca

SEQ ID NO: 160753 - RNA, 19 nt, Artificial Sequence
  Description of Artificial Sequence: Synthetic oligonucleotide
  Antisense strand to SEQ ID NO: 160752
ugugccagagcacaaucug

SEQ ID NO: 160754 - RNA, 19 nt, Artificial Sequence
  Description of Artificial Sequence: Synthetic oligonucleotide
  Sense strand starting at position 3586 of SEQ ID NO: 2067
aagcucuggcagugaagau

SEQ ID NO: 160755 - RNA, 19 nt, Artificial Sequence
  Description of Artificial Sequence: Synthetic oligonucleotide
  Antisense strand to SEQ ID NO: 160754
aucuucacugccagagcuu

SEQ ID NO: 160756 - RNA, 19 nt, Artificial Sequence
  Description of Artificial Sequence: Synthetic oligonucleotide
  Sense strand starting at position 3920 of SEQ ID NO: 2067
uuugaaugagcccgagaaa

SEQ ID NO: 160757 - RNA, 19 nt, Artificial Sequence
  Description of Artificial Sequence: Synthetic oligonucleotide
  Antisense strand to SEQ ID NO: 160756
uuucucgggcucauucaaa

SEQ ID NO: 160758 - RNA, 19 nt, Artificial Sequence
  Description of Artificial Sequence: Synthetic oligonucleotide
  Sense strand starting at position 357 of SEQ ID NO: 2069
gcacuaugaugacaauuua

SEQ ID NO: 160759 - RNA, 19 nt, Artificial Sequence
  Description of Artificial Sequence: Synthetic oligonucleotide
  Antisense strand to SEQ ID NO: 160758
uaaauugucaucauagugc

SEQ ID NO: 160760 - RNA, 19 nt, Artificial Sequence
  Description of Artificial Sequence: Synthetic oligonucleotide
  Sense strand starting at position 407 of SEQ ID NO: 2069
cucuaugauguaggaauua

SEQ ID NO: 160761 - RNA, 19 nt, Artificial Sequence
  Description of Artificial Sequence: Synthetic oligonucleotide
  Antisense strand to SEQ ID NO: 160760
uaauuccuacaucauagag

SEQ ID NO: 160762 - RNA, 19 nt, Artificial Sequence
  Description of Artificial Sequence: Synthetic oligonucleotide
  Sense strand starting at position 456 of SEQ ID NO: 2069
gcucacagacauuauguua

SEQ ID NO: 160763 - RNA, 19 nt, Artificial Sequence
  Description of Artificial Sequence: Synthetic oligonucleotide
  Antisense strand to SEQ ID NO: 160762
uaacauaaugucugugagc

SEQ ID NO: 160764 - RNA, 19 nt, Artificial Sequence
  Description of Artificial Sequence: Synthetic oligonucleotide
  Sense strand starting at position 547 of SEQ ID NO: 2069
acucuuucuagugggaaga

SEQ ID NO: 160765 - RNA, 19 nt, Artificial Sequence
  Description of Artificial Sequence: Synthetic oligonucleotide
  Antisense strand to SEQ ID NO: 160764
ucuucccacuagaaagagu

SEQ ID NO: 160766 - RNA, 19 nt, Artificial Sequence
  Description of Artificial Sequence: Synthetic oligonucleotide
  Sense strand starting at position 548 of SEQ ID NO: 2069
cucuuucuagugggaagaa

SEQ ID NO: 160767 - RNA, 19 nt, Artificial Sequence
  Description of Artificial Sequence: Synthetic oligonucleotide
  Antisense strand to SEQ ID NO: 160766
uucuucccacuagaaagag

SEQ ID NO: 160768 - RNA, 19 nt, Artificial Sequence
  Description of Artificial Sequence: Synthetic oligonucleotide
  Sense strand starting at position 591 of SEQ ID NO: 2069
uguccaaacccuggacuua

SEQ ID NO: 160769 - RNA, 19 nt, Artificial Sequence
  Description of Artificial Sequence: Synthetic oligonucleotide
  Antisense strand to SEQ ID NO: 160768
uaaguccaggguuuggaca

SEQ ID NO: 160770 - RNA, 19 nt, Artificial Sequence
  Description of Artificial Sequence: Synthetic oligonucleotide
  Sense strand starting at position 684 of SEQ ID NO: 2069
cugagauuguacucaggga

SEQ ID NO: 160771 - RNA, 19 nt, Artificial Sequence
  Description of Artificial Sequence: Synthetic oligonucleotide
  Antisense strand to SEQ ID NO: 160770
ucccugaguacaaucucag

SEQ ID NO: 160772 - RNA, 19 nt, Artificial Sequence
  Description of Artificial Sequence: Synthetic oligonucleotide
  Sense strand starting at position 716 of SEQ ID NO: 2069
gagacauaguaauaguuaa

SEQ ID NO: 160773 - RNA, 19 nt, Artificial Sequence
  Description of Artificial Sequence: Synthetic oligonucleotide
  Antisense strand to SEQ ID NO: 160772
uuaacuauuacuaugucuc

SEQ ID NO: 160774 - RNA, 19 nt, Artificial Sequence
  Description of Artificial Sequence: Synthetic oligonucleotide
  Sense strand starting at position 795 of SEQ ID NO: 2069
gcaaguccucuguauaagu

SEQ ID NO: 160775 - RNA, 19 nt, Artificial Sequence
  Description of Artificial Sequence: Synthetic oligonucleotide
  Antisense strand to SEQ ID NO: 160774
acuuauacagaggacuugc

SEQ ID NO: 160776 - RNA, 19 nt, Artificial Sequence
  Description of Artificial Sequence: Synthetic oligonucleotide
  Sense strand starting at position 865 of SEQ ID NO: 2069
aaacauaucgcgcaugagu

SEQ ID NO: 160777 - RNA, 19 nt, Artificial Sequence
  Description of Artificial Sequence: Synthetic oligonucleotide
  Antisense strand to SEQ ID NO: 160776
acucaugcgcgauauguuu

SEQ ID NO: 160778 - RNA, 19 nt, Artificial Sequence
  Description of Artificial Sequence: Synthetic oligonucleotide
  Sense strand starting at position 873 of SEQ ID NO: 2069
cgcgcaugaguucacaacu

SEQ ID NO: 160779 - RNA, 19 nt, Artificial Sequence
  Description of Artificial Sequence: Synthetic oligonucleotide
  Antisense strand to SEQ ID NO: 160778
aguugugaacucaugcgcg

SEQ ID NO: 160780 - RNA, 19 nt, Artificial Sequence
  Description of Artificial Sequence: Synthetic oligonucleotide
  Sense strand starting at position 1023 of SEQ ID NO: 2069
cccugucugcguuucucaa

SEQ ID NO: 160781 - RNA, 19 nt, Artificial Sequence
  Description of Artificial Sequence: Synthetic oligonucleotide
  Antisense strand to SEQ ID NO: 160780
uugagaaacgcagacaggg

SEQ ID NO: 160782 - RNA, 19 nt, Artificial Sequence
  Description of Artificial Sequence: Synthetic oligonucleotide
  Sense strand starting at position 1030 of SEQ ID NO: 2069
ugcguuucucaagacacuu

SEQ ID NO: 160783 - RNA, 19 nt, Artificial Sequence
  Description of Artificial Sequence: Synthetic oligonucleotide
  Antisense strand to SEQ ID NO: 160782
aagugucuugagaaacgca

SEQ ID NO: 160784 - RNA, 19 nt, Artificial Sequence
  Description of Artificial Sequence: Synthetic oligonucleotide
  Sense strand starting at position 1074 of SEQ ID NO: 2069
gucugucuggcccaauuau

SEQ ID NO: 160785 - RNA, 19 nt, Artificial Sequence
  Description of Artificial Sequence: Synthetic oligonucleotide
  Antisense strand to SEQ ID NO: 160784
auaauugggccagacagac

SEQ ID NO: 160786 - RNA, 19 nt, Artificial Sequence
  Description of Artificial Sequence: Synthetic oligonucleotide
  Sense strand starting at position 1170 of SEQ ID NO: 2069
gcccaaacucccuagugua

SEQ ID NO: 160787 - RNA, 19 nt, Artificial Sequence
  Description of Artificial Sequence: Synthetic oligonucleotide
  Antisense strand to SEQ ID NO: 160786
uacacuagggaguuugggc

SEQ ID NO: 160788 - RNA, 19 nt, Artificial Sequence
  Description of Artificial Sequence: Synthetic oligonucleotide
  Sense strand starting at position 1239 of SEQ ID NO: 2069
acagaugccuuugcugauu

SEQ ID NO: 160789 - RNA, 19 nt, Artificial Sequence
  Description of Artificial Sequence: Synthetic oligonucleotide
  Antisense strand to SEQ ID NO: 160788
aaucagcaaaggcaucugu

SEQ ID NO: 160790 - RNA, 19 nt, Artificial Sequence
  Description of Artificial Sequence: Synthetic oligonucleotide
  Sense strand starting at position 1242 of SEQ ID NO: 2069
gaugccuuugcugauuaca

SEQ ID NO: 160791 - RNA, 19 nt, Artificial Sequence
  Description of Artificial Sequence: Synthetic oligonucleotide
  Antisense strand to SEQ ID NO: 160790
uguaaucagcaaaggcauc

SEQ ID NO: 160792 - RNA, 19 nt, Artificial Sequence
  Description of Artificial Sequence: Synthetic oligonucleotide
  Sense strand starting at position 1244 of SEQ ID NO: 2069
ugccuuugcugauuacaaa

SEQ ID NO: 160793 - RNA, 19 nt, Artificial Sequence
  Description of Artificial Sequence: Synthetic oligonucleotide
  Antisense strand to SEQ ID NO: 160792
uuuguaaucagcaaaggca

SEQ ID NO: 160794 - RNA, 19 nt, Artificial Sequence
  Description of Artificial Sequence: Synthetic oligonucleotide
  Sense strand starting at position 1514 of SEQ ID NO: 2069
aagaauuagcccugacagu

SEQ ID NO: 160795 - RNA, 19 nt, Artificial Sequence
  Description of Artificial Sequence: Synthetic oligonucleotide
  Antisense strand to SEQ ID NO: 160794
acugucagggcuaauucuu

SEQ ID NO: 160796 - RNA, 19 nt, Artificial Sequence
  Description of Artificial Sequence: Synthetic oligonucleotide
  Sense strand starting at position 1515 of SEQ ID NO: 2069
agaauuagcccugacaguc

SEQ ID NO: 160797 - RNA, 19 nt, Artificial Sequence
  Description of Artificial Sequence: Synthetic oligonucleotide
  Antisense strand to SEQ ID NO: 160796
gacugucagggcuaauucu

SEQ ID NO: 160798 - RNA, 19 nt, Artificial Sequence
  Description of Artificial Sequence: Synthetic oligonucleotide
  Sense strand starting at position 1799 of SEQ ID NO: 2069
ccguaacucagagguuacu

SEQ ID NO: 160799 - RNA, 19 nt, Artificial Sequence
  Description of Artificial Sequence: Synthetic oligonucleotide
  Antisense strand to SEQ ID NO: 160798
aguaaccucugaguuacgg

SEQ ID NO: 160800 - RNA, 19 nt, Artificial Sequence
  Description of Artificial Sequence: Synthetic oligonucleotide
  Sense strand starting at position 2094 of SEQ ID NO: 2069
ccgggagguuucucaguga

SEQ ID NO: 160801 - RNA, 19 nt, Artificial Sequence
  Description of Artificial Sequence: Synthetic oligonucleotide
  Antisense strand to SEQ ID NO: 160800
ucacugagaaaccucccgg

SEQ ID NO: 160802 - RNA, 19 nt, Artificial Sequence
  Description of Artificial Sequence: Synthetic oligonucleotide
  Sense strand starting at position 2097 of SEQ ID NO: 2069
ggagguuucucagugaugu

SEQ ID NO: 160803 - RNA, 19 nt, Artificial Sequence
  Description of Artificial Sequence: Synthetic oligonucleotide
  Antisense strand to SEQ ID NO: 160802
acaucacugagaaaccucc

SEQ ID NO: 160804 - RNA, 19 nt, Artificial Sequence
  Description of Artificial Sequence: Synthetic oligonucleotide
  Sense strand starting at position 2098 of SEQ ID NO: 2069
gagguuucucagugauguc

SEQ ID NO: 160805 - RNA, 19 nt, Artificial Sequence
  Description of Artificial Sequence: Synthetic oligonucleotide
  Antisense strand to SEQ ID NO: 160804
gacaucacugagaaaccuc

SEQ ID NO: 160806 - RNA, 19 nt, Artificial Sequence
  Description of Artificial Sequence: Synthetic oligonucleotide
  Sense strand starting at position 2141 of SEQ ID NO: 2069
agugaaagaucauccaguc

SEQ ID NO: 160807 - RNA, 19 nt, Artificial Sequence
  Description of Artificial Sequence: Synthetic oligonucleotide
  Antisense strand to SEQ ID NO: 160806
gacuggaugaucuuucacu

SEQ ID NO: 160808 - RNA, 19 nt, Artificial Sequence
  Description of Artificial Sequence: Synthetic oligonucleotide
  Sense strand starting at position 2241 of SEQ ID NO: 2069
ucaagaagcucuucuuaga

SEQ ID NO: 160809 - RNA, 19 nt, Artificial Sequence
  Description of Artificial Sequence: Synthetic oligonucleotide
  Antisense strand to SEQ ID NO: 160808
ucuaagaagagcuucuuga

SEQ ID NO: 160810 - RNA, 19 nt, Artificial Sequence
  Description of Artificial Sequence: Synthetic oligonucleotide
  Sense strand starting at position 2307 of SEQ ID NO: 2069
ucuagugaccuugggaaca

SEQ ID NO: 160811 - RNA, 19 nt, Artificial Sequence
  Description of Artificial Sequence: Synthetic oligonucleotide
  Antisense strand to SEQ ID NO: 160810
uguucccaaggucacuaga

SEQ ID NO: 160812 - RNA, 19 nt, Artificial Sequence
  Description of Artificial Sequence: Synthetic oligonucleotide
  Sense strand starting at position 2352 of SEQ ID NO: 2069
cccuucuguguagagguaa

SEQ ID NO: 160813 - RNA, 19 nt, Artificial Sequence
  Description of Artificial Sequence: Synthetic oligonucleotide
  Antisense strand to SEQ ID NO: 160812
uuaccucuacacagaaggg

SEQ ID NO: 160814 - RNA, 19 nt, Artificial Sequence
  Description of Artificial Sequence: Synthetic oligonucleotide
  Sense strand starting at position 2373 of SEQ ID NO: 2069
acacccauuucgcaaggau

SEQ ID NO: 160815 - RNA, 19 nt, Artificial Sequence
  Description of Artificial Sequence: Synthetic oligonucleotide
  Antisense strand to SEQ ID NO: 160814
auccuugcgaaaugggugu

SEQ ID NO: 160816 - RNA, 19 nt, Artificial Sequence
  Description of Artificial Sequence: Synthetic oligonucleotide
  Sense strand starting at position 2391 of SEQ ID NO: 2069
uggugugaggguuggaaga

SEQ ID NO: 160817 - RNA, 19 nt, Artificial Sequence
  Description of Artificial Sequence: Synthetic oligonucleotide
  Antisense strand to SEQ ID NO: 160816
ucuuccaacccucacacca

SEQ ID NO: 160818 - RNA, 19 nt, Artificial Sequence
  Description of Artificial Sequence: Synthetic oligonucleotide
  Sense strand starting at position 2454 of SEQ ID NO: 2069
aaauaaauguggcuauugu

SEQ ID NO: 160819 - RNA, 19 nt, Artificial Sequence
  Description of Artificial Sequence: Synthetic oligonucleotide
  Antisense strand to SEQ ID NO: 160818
acaauagccacauuuauuu

SEQ ID NO: 160820 - RNA, 19 nt, Artificial Sequence
  Description of Artificial Sequence: Synthetic oligonucleotide
  Sense strand starting at position 2455 of SEQ ID NO: 2069
aauaaauguggcuauuguu

SEQ ID NO: 160821 - RNA, 19 nt, Artificial Sequence
  Description of Artificial Sequence: Synthetic oligonucleotide
  Antisense strand to SEQ ID NO: 160820
aacaauagccacauuuauu

SEQ ID NO: 160822 - RNA, 19 nt, Artificial Sequence
  Description of Artificial Sequence: Synthetic oligonucleotide
  Sense strand starting at position 2463 of SEQ ID NO: 2069
uggcuauuguuaguguaaa

SEQ ID NO: 160823 - RNA, 19 nt, Artificial Sequence
  Description of Artificial Sequence: Synthetic oligonucleotide
  Antisense strand to SEQ ID NO: 160822
uuuacacuaacaauagcca

SEQ ID NO: 160824 - RNA, 19 nt, Artificial Sequence
  Description of Artificial Sequence: Synthetic oligonucleotide
  Sense strand starting at position 2513 of SEQ ID NO: 2069
acaugaccucuuggguaca

SEQ ID NO: 160825 - RNA, 19 nt, Artificial Sequence
  Description of Artificial Sequence: Synthetic oligonucleotide
  Antisense strand to SEQ ID NO: 160824
uguacccaagaggucaugu

SEQ ID NO: 160826 - RNA, 19 nt, Artificial Sequence
  Description of Artificial Sequence: Synthetic oligonucleotide
  Sense strand starting at position 2516 of SEQ ID NO: 2069
ugaccucuuggguacaagu

SEQ ID NO: 160827 - RNA, 19 nt, Artificial Sequence
  Description of Artificial Sequence: Synthetic oligonucleotide
  Antisense strand to SEQ ID NO: 160826
acuuguacccaagagguca

SEQ ID NO: 160828 - RNA, 19 nt, Artificial Sequence
  Description of Artificial Sequence: Synthetic oligonucleotide
  Sense strand starting at position 2722 of SEQ ID NO: 2069
accucagugccuuauugau

SEQ ID NO: 160829 - RNA, 19 nt, Artificial Sequence
  Description of Artificial Sequence: Synthetic oligonucleotide
  Antisense strand to SEQ ID NO: 160828
aucaauaaggcacugaggu

SEQ ID NO: 160830 - RNA, 19 nt, Artificial Sequence
  Description of Artificial Sequence: Synthetic oligonucleotide
  Sense strand starting at position 3390 of SEQ ID NO: 2069
cagauugugcucuggcaca

SEQ ID NO: 160831 - RNA, 19 nt, Artificial Sequence
  Description of Artificial Sequence: Synthetic oligonucleotide
  Antisense strand to SEQ ID NO: 160830
ugugccagagcacaaucug

SEQ ID NO: 160832 - RNA, 19 nt, Artificial Sequence
  Description of Artificial Sequence: Synthetic oligonucleotide
  Sense strand starting at position 3507 of SEQ ID NO: 2069
aagcucuggcagugaagau

SEQ ID NO: 160833 - RNA, 19 nt, Artificial Sequence
  Description of Artificial Sequence: Synthetic oligonucleotide
  Antisense strand to SEQ ID NO: 160832
aucuucacugccagagcuu

SEQ ID NO: 160834 - RNA, 19 nt, Artificial Sequence
  Description of Artificial Sequence: Synthetic oligonucleotide
  Sense strand starting at position 3841 of SEQ ID NO: 2069
uuugaaugagcccgagaaa

SEQ ID NO: 160835 - RNA, 19 nt, Artificial Sequence
  Description of Artificial Sequence: Synthetic oligonucleotide
  Antisense strand to SEQ ID NO: 160834
uuucucgggcucauucaaa

SEQ ID NO: 160836 - RNA, 19 nt, Artificial Sequence
  Description of Artificial Sequence: Synthetic oligonucleotide
  Sense strand starting at position 3916 of SEQ ID NO: 2069
uucugagcuagaugagauu

SEQ ID NO: 160837 - RNA, 19 nt, Artificial Sequence
  Description of Artificial Sequence: Synthetic oligonucleotide
  Antisense strand to SEQ ID NO: 160836
aaucucaucuagcucagaa

SEQ ID NO: 160838 - RNA, 19 nt, Artificial Sequence
  Description of Artificial Sequence: Synthetic oligonucleotide
  Sense strand starting at position 3980 of SEQ ID NO: 2070
gcagauauguggucaguuu

SEQ ID NO: 160839 - RNA, 19 nt, Artificial Sequence
  Description of Artificial Sequence: Synthetic oligonucleotide
  Antisense strand to SEQ ID NO: 160838
aaacugaccacauaucugc

SEQ ID NO: 160840 - RNA, 19 nt, Artificial Sequence
  Description of Artificial Sequence: Synthetic oligonucleotide
  Sense strand starting at position 3365 of SEQ ID NO: 2070
ucauaucaucuugaacgua

SEQ ID NO: 160841 - RNA, 19 nt, Artificial Sequence
  Description of Artificial Sequence: Synthetic oligonucleotide
  Antisense strand to SEQ ID NO: 160840
uacguucaagaugauauga

SEQ ID NO: 160842 - RNA, 19 nt, Artificial Sequence
  Description of Artificial Sequence: Synthetic oligonucleotide
  Sense strand starting at position 3364 of SEQ ID NO: 2070
aucauaucaucuugaacgu

SEQ ID NO: 160843 - RNA, 19 nt, Artificial Sequence
  Description of Artificial Sequence: Synthetic oligonucleotide
  Antisense strand to SEQ ID NO: 160842
acguucaagaugauaugau

SEQ ID NO: 160844 - RNA, 19 nt, Artificial Sequence
  Description of Artificial Sequence: Synthetic oligonucleotide
  Sense strand starting at position 3361 of SEQ ID NO: 2070
gugaucauaucaucuugaa

SEQ ID NO: 160845 - RNA, 19 nt, Artificial Sequence
  Description of Artificial Sequence: Synthetic oligonucleotide
  Antisense strand to SEQ ID NO: 160844
uucaagaugauaugaucac

SEQ ID NO: 160846 - RNA, 19 nt, Artificial Sequence
  Description of Artificial Sequence: Synthetic oligonucleotide
  Sense strand starting at position 3350 of SEQ ID NO: 2070
guuaaauuccagugaucau

SEQ ID NO: 160847 - RNA, 19 nt, Artificial Sequence
  Description of Artificial Sequence: Synthetic oligonucleotide
  Antisense strand to SEQ ID NO: 160846
augaucacuggaauuuaac

SEQ ID NO: 160848 - RNA, 19 nt, Artificial Sequence
  Description of Artificial Sequence: Synthetic oligonucleotide
  Sense strand starting at position 3347 of SEQ ID NO: 2070
gauguuaaauuccagugau

SEQ ID NO: 160849 - RNA, 19 nt, Artificial Sequence
  Description of Artificial Sequence: Synthetic oligonucleotide
  Antisense strand to SEQ ID NO: 160848
aucacuggaauuuaacauc

SEQ ID NO: 160850 - RNA, 19 nt, Artificial Sequence
  Description of Artificial Sequence: Synthetic oligonucleotide
  Sense strand starting at position 3340 of SEQ ID NO: 2070
acuguaugauguuaaauuc

SEQ ID NO: 160851 - RNA, 19 nt, Artificial Sequence
  Description of Artificial Sequence: Synthetic oligonucleotide
  Antisense strand to SEQ ID NO: 160850
gaauuuaacaucauacagu

SEQ ID NO: 160852 - RNA, 19 nt, Artificial Sequence
  Description of Artificial Sequence: Synthetic oligonucleotide
  Sense strand starting at position 3337 of SEQ ID NO: 2070
cucacuguaugauguuaaa

SEQ ID NO: 160853 - RNA, 19 nt, Artificial Sequence
  Description of Artificial Sequence: Synthetic oligonucleotide
  Antisense strand to SEQ ID NO: 160852
uuuaacaucauacagugag

SEQ ID NO: 160854 - RNA, 19 nt, Artificial Sequence
  Description of Artificial Sequence: Synthetic oligonucleotide
  Sense strand starting at position 3335 of SEQ ID NO: 2070
cccucacuguaugauguua

SEQ ID NO: 160855 - RNA, 19 nt, Artificial Sequence
  Description of Artificial Sequence: Synthetic oligonucleotide
  Antisense strand to SEQ ID NO: 160854
uaacaucauacagugaggg

SEQ ID NO: 160856 - RNA, 19 nt, Artificial Sequence
  Description of Artificial Sequence: Synthetic oligonucleotide
  Sense strand starting at position 3085 of SEQ ID NO: 2070
gcaagauaauaauagcuca

SEQ ID NO: 160857 - RNA, 19 nt, Artificial Sequence
  Description of Artificial Sequence: Synthetic oligonucleotide
  Antisense strand to SEQ ID NO: 160856
ugagcuauuauuaucuugc

SEQ ID NO: 160858 - RNA, 19 nt, Artificial Sequence
  Description of Artificial Sequence: Synthetic oligonucleotide
  Sense strand starting at position 2883 of SEQ ID NO: 2070
guaauacaugucuauaguc

SEQ ID NO: 160859 - RNA, 19 nt, Artificial Sequence
  Description of Artificial Sequence: Synthetic oligonucleotide
  Antisense strand to SEQ ID NO: 160858
gacuauagacauguauuac

SEQ ID NO: 160860 - RNA, 19 nt, Artificial Sequence
  Description of Artificial Sequence: Synthetic oligonucleotide
  Sense strand starting at position 2882 of SEQ ID NO: 2070
gguaauacaugucuauagu

SEQ ID NO: 160861 - RNA, 19 nt, Artificial Sequence
  Description of Artificial Sequence: Synthetic oligonucleotide
  Antisense strand to SEQ ID NO: 160860
acuauagacauguauuacc

SEQ ID NO: 160862 - RNA, 19 nt, Artificial Sequence
  Description of Artificial Sequence: Synthetic oligonucleotide
  Sense strand starting at position 2189 of SEQ ID NO: 2070
gggugacacguuuaauccu

SEQ ID NO: 160863 - RNA, 19 nt, Artificial Sequence
  Description of Artificial Sequence: Synthetic oligonucleotide
  Antisense strand to SEQ ID NO: 160862
aggauuaaacgugucaccc

SEQ ID NO: 160864 - RNA, 19 nt, Artificial Sequence
  Description of Artificial Sequence: Synthetic oligonucleotide
  Sense strand starting at position 1730 of SEQ ID NO: 2070
agacauucccagugcugua

SEQ ID NO: 160865 - RNA, 19 nt, Artificial Sequence
  Description of Artificial Sequence: Synthetic oligonucleotide
  Antisense strand to SEQ ID NO: 160864
uacagcacugggaaugucu

SEQ ID NO: 160866 - RNA, 19 nt, Artificial Sequence
  Description of Artificial Sequence: Synthetic oligonucleotide
  Sense strand starting at position 1641 of SEQ ID NO: 2070
cugccuugcuaucuuuaga

SEQ ID NO: 160867 - RNA, 19 nt, Artificial Sequence
  Description of Artificial Sequence: Synthetic oligonucleotide
  Antisense strand to SEQ ID NO: 160866
ucuaaagauagcaaggcag

SEQ ID NO: 160868 - RNA, 19 nt, Artificial Sequence
  Description of Artificial Sequence: Synthetic oligonucleotide
  Sense strand starting at position 1462 of SEQ ID NO: 2070
ccacgaaucuuuccugcca

SEQ ID NO: 160869 - RNA, 19 nt, Artificial Sequence
  Description of Artificial Sequence: Synthetic oligonucleotide
  Antisense strand to SEQ ID NO: 160868
uggcaggaaagauucgugg

SEQ ID NO: 160870 - RNA, 19 nt, Artificial Sequence
  Description of Artificial Sequence: Synthetic oligonucleotide
  Sense strand starting at position 1454 of SEQ ID NO: 2070
gaaugaguccacgaaucuu

SEQ ID NO: 160871 - RNA, 19 nt, Artificial Sequence
  Description of Artificial Sequence: Synthetic oligonucleotide
  Antisense strand to SEQ ID NO: 160870
aagauucguggacucauuc

SEQ ID NO: 160872 - RNA, 19 nt, Artificial Sequence
  Description of Artificial Sequence: Synthetic oligonucleotide
  Sense strand starting at position 1451 of SEQ ID NO: 2070
guugaaugaguccacgaau

SEQ ID NO: 160873 - RNA, 19 nt, Artificial Sequence
  Description of Artificial Sequence: Synthetic oligonucleotide
  Antisense strand to SEQ ID NO: 160872
auucguggacucauucaac

SEQ ID NO: 160874 - RNA, 19 nt, Artificial Sequence
  Description of Artificial Sequence: Synthetic oligonucleotide
  Sense strand starting at position 1441 of SEQ ID NO: 2070
gaccucauuuguugaauga

SEQ ID NO: 160875 - RNA, 19 nt, Artificial Sequence
  Description of Artificial Sequence: Synthetic oligonucleotide
  Antisense strand to SEQ ID NO: 160874
ucauucaacaaaugagguc

SEQ ID NO: 160876 - RNA, 19 nt, Artificial Sequence
  Description of Artificial Sequence: Synthetic oligonucleotide
  Sense strand starting at position 1416 of SEQ ID NO: 2070
uagaauaacguaugguaca

SEQ ID NO: 160877 - RNA, 19 nt, Artificial Sequence
  Description of Artificial Sequence: Synthetic oligonucleotide
  Antisense strand to SEQ ID NO: 160876
uguaccauacguuauucua

SEQ ID NO: 160878 - RNA, 19 nt, Artificial Sequence
  Description of Artificial Sequence: Synthetic oligonucleotide
  Sense strand starting at position 1414 of SEQ ID NO: 2070
ccuagaauaacguauggua

SEQ ID NO: 160879 - RNA, 19 nt, Artificial Sequence
  Description of Artificial Sequence: Synthetic oligonucleotide
  Antisense strand to SEQ ID NO: 160878
uaccauacguuauucuagg

SEQ ID NO: 160880 - RNA, 19 nt, Artificial Sequence
  Description of Artificial Sequence: Synthetic oligonucleotide
  Sense strand starting at position 1398 of SEQ ID NO: 2070
ugauauaucccuggcuccu

SEQ ID NO: 160881 - RNA, 19 nt, Artificial Sequence
  Description of Artificial Sequence: Synthetic oligonucleotide
  Antisense strand to SEQ ID NO: 160880
aggagccagggauauauca

SEQ ID NO: 160882 - RNA, 19 nt, Artificial Sequence
  Description of Artificial Sequence: Synthetic oligonucleotide
  Sense strand starting at position 1320 of SEQ ID NO: 2070
uuacuuguucgugugguuu

SEQ ID NO: 160883 - RNA, 19 nt, Artificial Sequence
  Description of Artificial Sequence: Synthetic oligonucleotide
  Antisense strand to SEQ ID NO: 160882
aaaccacacgaacaaguaa

SEQ ID NO: 160884 - RNA, 19 nt, Artificial Sequence
  Description of Artificial Sequence: Synthetic oligonucleotide
  Sense strand starting at position 1319 of SEQ ID NO: 2070
uuuacuuguucgugugguu

SEQ ID NO: 160885 - RNA, 19 nt, Artificial Sequence
  Description of Artificial Sequence: Synthetic oligonucleotide
  Antisense strand to SEQ ID NO: 160884
aaccacacgaacaaguaaa

SEQ ID NO: 160886 - RNA, 19 nt, Artificial Sequence
  Description of Artificial Sequence: Synthetic oligonucleotide
  Sense strand starting at position 1304 of SEQ ID NO: 2070
uccaaugcugcguacuuua

SEQ ID NO: 160887 - RNA, 19 nt, Artificial Sequence
  Description of Artificial Sequence: Synthetic oligonucleotide
  Antisense strand to SEQ ID NO: 160886
uaaaguacgcagcauugga

SEQ ID NO: 160888 - RNA, 19 nt, Artificial Sequence
  Description of Artificial Sequence: Synthetic oligonucleotide
  Sense strand starting at position 1191 of SEQ ID NO: 2070
acuugagugucaccugauu

SEQ ID NO: 160889 - RNA, 19 nt, Artificial Sequence
  Description of Artificial Sequence: Synthetic oligonucleotide
  Antisense strand to SEQ ID NO: 160888
aaucaggugacacucaagu

SEQ ID NO: 160890 - RNA, 19 nt, Artificial Sequence
  Description of Artificial Sequence: Synthetic oligonucleotide
  Sense strand starting at position 1137 of SEQ ID NO: 2070
ccuguaauguucuggacac

SEQ ID NO: 160891 - RNA, 19 nt, Artificial Sequence
  Description of Artificial Sequence: Synthetic oligonucleotide
  Antisense strand to SEQ ID NO: 160890
guguccagaacauuacagg

SEQ ID NO: 160892 - RNA, 19 nt, Artificial Sequence
  Description of Artificial Sequence: Synthetic oligonucleotide
  Sense strand starting at position 1076 of SEQ ID NO: 2070
ugcuguuccucaugcacau

SEQ ID NO: 160893 - RNA, 19 nt, Artificial Sequence
  Description of Artificial Sequence: Synthetic oligonucleotide
  Antisense strand to SEQ ID NO: 160892
augugcaugaggaacagca

SEQ ID NO: 160894 - RNA, 19 nt, Artificial Sequence
  Description of Artificial Sequence: Synthetic oligonucleotide
  Sense strand starting at position 976 of SEQ ID NO: 2070
cuucgaggcuauccaugau

SEQ ID NO: 160895 - RNA, 19 nt, Artificial Sequence
  Description of Artificial Sequence: Synthetic oligonucleotide
  Antisense strand to SEQ ID NO: 160894
aucauggauagccucgaag

SEQ ID NO: 160896 - RNA, 19 nt, Artificial Sequence
  Description of Artificial Sequence: Synthetic oligonucleotide
  Sense strand starting at position 970 of SEQ ID NO: 2070
gagagucuucgaggcuauc

SEQ ID NO: 160897 - RNA, 19 nt, Artificial Sequence
  Description of Artificial Sequence: Synthetic oligonucleotide
  Antisense strand to SEQ ID NO: 160896
gauagccucgaagacucuc

SEQ ID NO: 160898 - RNA, 19 nt, Artificial Sequence
  Description of Artificial Sequence: Synthetic oligonucleotide
  Sense strand starting at position 968 of SEQ ID NO: 2070
aagagagucuucgaggcua

SEQ ID NO: 160899 - RNA, 19 nt, Artificial Sequence
  Description of Artificial Sequence: Synthetic oligonucleotide
  Antisense strand to SEQ ID NO: 160898
uagccucgaagacucucuu

SEQ ID NO: 160900 - RNA, 19 nt, Artificial Sequence
  Description of Artificial Sequence: Synthetic oligonucleotide
  Sense strand starting at position 954 of SEQ ID NO: 2070
augucugaguccucaagag

SEQ ID NO: 160901 - RNA, 19 nt, Artificial Sequence
  Description of Artificial Sequence: Synthetic oligonucleotide
  Antisense strand to SEQ ID NO: 160900
cucuugaggacucagacau

SEQ ID NO: 160902 - RNA, 19 nt, Artificial Sequence
  Description of Artificial Sequence: Synthetic oligonucleotide
  Sense strand starting at position 623 of SEQ ID NO: 2070
agguaauucucccagcuga

SEQ ID NO: 160903 - RNA, 19 nt, Artificial Sequence
  Description of Artificial Sequence: Synthetic oligonucleotide
  Antisense strand to SEQ ID NO: 160902
ucagcugggagaauuaccu

SEQ ID NO: 160904 - RNA, 19 nt, Artificial Sequence
  Description of Artificial Sequence: Synthetic oligonucleotide
  Sense strand starting at position 408 of SEQ ID NO: 2070
gggagaucuucagcaagug

SEQ ID NO: 160905 - RNA, 19 nt, Artificial Sequence
  Description of Artificial Sequence: Synthetic oligonucleotide
  Antisense strand to SEQ ID NO: 160904
cacuugcugaagaucuccc

SEQ ID NO: 160906 - RNA, 19 nt, Artificial Sequence
  Description of Artificial Sequence: Synthetic oligonucleotide
  Sense strand starting at position 381 of SEQ ID NO: 2070
caggcuuuguccugccauu

SEQ ID NO: 160907 - RNA, 19 nt, Artificial Sequence
  Description of Artificial Sequence: Synthetic oligonucleotide
  Antisense strand to SEQ ID NO: 160906
aauggcaggacaaagccug

SEQ ID NO: 160908 - RNA, 19 nt, Artificial Sequence
  Description of Artificial Sequence: Synthetic oligonucleotide
  Sense strand starting at position 295 of SEQ ID NO: 2070
uccagcaaguuuggagaaa

SEQ ID NO: 160909 - RNA, 19 nt, Artificial Sequence
  Description of Artificial Sequence: Synthetic oligonucleotide
  Antisense strand to SEQ ID NO: 160908
uuucuccaaacuugcugga

SEQ ID NO: 160910 - RNA, 19 nt, Artificial Sequence
  Description of Artificial Sequence: Synthetic oligonucleotide
  Sense strand starting at position 3968 of SEQ ID NO: 2071
aguauuguugaccaggcau

SEQ ID NO: 160911 - RNA, 19 nt, Artificial Sequence
  Description of Artificial Sequence: Synthetic oligonucleotide
  Antisense strand to SEQ ID NO: 160910
augccuggucaacaauacu

SEQ ID NO: 160912 - RNA, 19 nt, Artificial Sequence
  Description of Artificial Sequence: Synthetic oligonucleotide
  Sense strand starting at position 3967 of SEQ ID NO: 2071
gaguauuguugaccaggca

SEQ ID NO: 160913 - RNA, 19 nt, Artificial Sequence
  Description of Artificial Sequence: Synthetic oligonucleotide
  Antisense strand to SEQ ID NO: 160912
ugccuggucaacaauacuc

SEQ ID NO: 160914 - RNA, 19 nt, Artificial Sequence
  Description of Artificial Sequence: Synthetic oligonucleotide
  Sense strand starting at position 3963 of SEQ ID NO: 2071
uauugaguauuguugacca

SEQ ID NO: 160915 - RNA, 19 nt, Artificial Sequence
  Description of Artificial Sequence: Synthetic oligonucleotide
  Antisense strand to SEQ ID NO: 160914
uggucaacaauacucaaua

SEQ ID NO: 160916 - RNA, 19 nt, Artificial Sequence
  Description of Artificial Sequence: Synthetic oligonucleotide
  Sense strand starting at position 3914 of SEQ ID NO: 2071
guccuagguccuugcauuu

SEQ ID NO: 160917 - RNA, 19 nt, Artificial Sequence
  Description of Artificial Sequence: Synthetic oligonucleotide
  Antisense strand to SEQ ID NO: 160916
aaaugcaaggaccuaggac

SEQ ID NO: 160918 - RNA, 19 nt, Artificial Sequence
  Description of Artificial Sequence: Synthetic oligonucleotide
  Sense strand starting at position 3547 of SEQ ID NO: 2071
agaaacuucgacugacuau

SEQ ID NO: 160919 - RNA, 19 nt, Artificial Sequence
  Description of Artificial Sequence: Synthetic oligonucleotide
  Antisense strand to SEQ ID NO: 160918
auagucagucgaaguuucu

SEQ ID NO: 160920 - RNA, 19 nt, Artificial Sequence
  Description of Artificial Sequence: Synthetic oligonucleotide
  Sense strand starting at position 3396 of SEQ ID NO: 2071
uggugacuccauuauacuc

SEQ ID NO: 160921 - RNA, 19 nt, Artificial Sequence
  Description of Artificial Sequence: Synthetic oligonucleotide
  Antisense strand to SEQ ID NO: 160920
gaguauaauggagucacca

SEQ ID NO: 160922 - RNA, 19 nt, Artificial Sequence
  Description of Artificial Sequence: Synthetic oligonucleotide
  Sense strand starting at position 3307 of SEQ ID NO: 2071
cccgucucuaugggaaauu

SEQ ID NO: 160923 - RNA, 19 nt, Artificial Sequence
  Description of Artificial Sequence: Synthetic oligonucleotide
  Antisense strand to SEQ ID NO: 160922
aauuucccauagagacggg

SEQ ID NO: 160924 - RNA, 19 nt, Artificial Sequence
  Description of Artificial Sequence: Synthetic oligonucleotide
  Sense strand starting at position 3126 of SEQ ID NO: 2071
aaggauuaauaugauugga

SEQ ID NO: 160925 - RNA, 19 nt, Artificial Sequence
  Description of Artificial Sequence: Synthetic oligonucleotide
  Antisense strand to SEQ ID NO: 160924
uccaaucauauuaauccuu

SEQ ID NO: 160926 - RNA, 19 nt, Artificial Sequence
  Description of Artificial Sequence: Synthetic oligonucleotide
  Sense strand starting at position 3095 of SEQ ID NO: 2071
guguaaguucaggacuggu

SEQ ID NO: 160927 - RNA, 19 nt, Artificial Sequence
  Description of Artificial Sequence: Synthetic oligonucleotide
  Antisense strand to SEQ ID NO: 160926
accaguccugaacuuacac

SEQ ID NO: 160928 - RNA, 19 nt, Artificial Sequence
  Description of Artificial Sequence: Synthetic oligonucleotide
  Sense strand starting at position 2991 of SEQ ID NO: 2071
uuauguaaagacuggaauu

SEQ ID NO: 160929 - RNA, 19 nt, Artificial Sequence
  Description of Artificial Sequence: Synthetic oligonucleotide
  Antisense strand to SEQ ID NO: 160928
aauuccagucuuuacauaa

SEQ ID NO: 160930 - RNA, 19 nt, Artificial Sequence
  Description of Artificial Sequence: Synthetic oligonucleotide
  Sense strand starting at position 2980 of SEQ ID NO: 2071
guuccacaugauuauguaa

SEQ ID NO: 160931 - RNA, 19 nt, Artificial Sequence
  Description of Artificial Sequence: Synthetic oligonucleotide
  Antisense strand to SEQ ID NO: 160930
uuacauaaucauguggaac

SEQ ID NO: 160932 - RNA, 19 nt, Artificial Sequence
  Description of Artificial Sequence: Synthetic oligonucleotide
  Sense strand starting at position 2979 of SEQ ID NO: 2071
uguuccacaugauuaugua

SEQ ID NO: 160933 - RNA, 19 nt, Artificial Sequence
  Description of Artificial Sequence: Synthetic oligonucleotide
  Antisense strand to SEQ ID NO: 160932
uacauaaucauguggaaca

SEQ ID NO: 160934 - RNA, 19 nt, Artificial Sequence
  Description of Artificial Sequence: Synthetic oligonucleotide
  Sense strand starting at position 2974 of SEQ ID NO: 2071
auccguguuccacaugauu

SEQ ID NO: 160935 - RNA, 19 nt, Artificial Sequence
  Description of Artificial Sequence: Synthetic oligonucleotide
  Antisense strand to SEQ ID NO: 160934
aaucauguggaacacggau

SEQ ID NO: 160936 - RNA, 19 nt, Artificial Sequence
  Description of Artificial Sequence: Synthetic oligonucleotide
  Sense strand starting at position 2849 of SEQ ID NO: 2071
cacgaacugugaucuuaga

SEQ ID NO: 160937 - RNA, 19 nt, Artificial Sequence
  Description of Artificial Sequence: Synthetic oligonucleotide
  Antisense strand to SEQ ID NO: 160936
ucuaagaucacaguucgug

SEQ ID NO: 160938 - RNA, 19 nt, Artificial Sequence
  Description of Artificial Sequence: Synthetic oligonucleotide
  Sense strand starting at position 2802 of SEQ ID NO: 2071
aggacacugcgcuagaguu

SEQ ID NO: 160939 - RNA, 19 nt, Artificial Sequence
  Description of Artificial Sequence: Synthetic oligonucleotide
  Antisense strand to SEQ ID NO: 160938
aacucuagcgcaguguccu

SEQ ID NO: 160940 - RNA, 19 nt, Artificial Sequence
  Description of Artificial Sequence: Synthetic oligonucleotide
  Sense strand starting at position 2611 of SEQ ID NO: 2071
cuuuaaugggaacguaguu

SEQ ID NO: 160941 - RNA, 19 nt, Artificial Sequence
  Description of Artificial Sequence: Synthetic oligonucleotide
  Antisense strand to SEQ ID NO: 160940
aacuacguucccauuaaag

SEQ ID NO: 160942 - RNA, 19 nt, Artificial Sequence
  Description of Artificial Sequence: Synthetic oligonucleotide
  Sense strand starting at position 2546 of SEQ ID NO: 2071
agaaguuuggugugcagag

SEQ ID NO: 160943 - RNA, 19 nt, Artificial Sequence
  Description of Artificial Sequence: Synthetic oligonucleotide
  Antisense strand to SEQ ID NO: 160942
cucugcacaccaaacuucu

SEQ ID NO: 160944 - RNA, 19 nt, Artificial Sequence
  Description of Artificial Sequence: Synthetic oligonucleotide
  Sense strand starting at position 2465 of SEQ ID NO: 2071
guucgcugucccuuguaaa

SEQ ID NO: 160945 - RNA, 19 nt, Artificial Sequence
  Description of Artificial Sequence: Synthetic oligonucleotide
  Antisense strand to SEQ ID NO: 160944
uuuacaagggacagcgaac

SEQ ID NO: 160946 - RNA, 19 nt, Artificial Sequence
  Description of Artificial Sequence: Synthetic oligonucleotide
  Sense strand starting at position 1387 of SEQ ID NO: 2071
gcauaaguuaaaggugaca

SEQ ID NO: 160947 - RNA, 19 nt, Artificial Sequence
  Description of Artificial Sequence: Synthetic oligonucleotide
  Antisense strand to SEQ ID NO: 160946
ugucaccuuuaacuuaugc

SEQ ID NO: 160948 - RNA, 19 nt, Artificial Sequence
  Description of Artificial Sequence: Synthetic oligonucleotide
  Sense strand starting at position 1312 of SEQ ID NO: 2071
gucauuaaauuccuuggaa

SEQ ID NO: 160949 - RNA, 19 nt, Artificial Sequence
  Description of Artificial Sequence: Synthetic oligonucleotide
  Antisense strand to SEQ ID NO: 160948
uuccaaggaauuuaaugac

SEQ ID NO: 160950 - RNA, 19 nt, Artificial Sequence
  Description of Artificial Sequence: Synthetic oligonucleotide
  Sense strand starting at position 1288 of SEQ ID NO: 2071
cguacuuuacaagacauau

SEQ ID NO: 160951 - RNA, 19 nt, Artificial Sequence
  Description of Artificial Sequence: Synthetic oligonucleotide
  Antisense strand to SEQ ID NO: 160950
auaugucuuguaaaguacg

SEQ ID NO: 160952 - RNA, 19 nt, Artificial Sequence
  Description of Artificial Sequence: Synthetic oligonucleotide
  Sense strand starting at position 1283 of SEQ ID NO: 2071
guaagcguacuuuacaaga

SEQ ID NO: 160953 - RNA, 19 nt, Artificial Sequence
  Description of Artificial Sequence: Synthetic oligonucleotide
  Antisense strand to SEQ ID NO: 160952
ucuuguaaaguacgcuuac

SEQ ID NO: 160954 - RNA, 19 nt, Artificial Sequence
  Description of Artificial Sequence: Synthetic oligonucleotide
  Sense strand starting at position 1265 of SEQ ID NO: 2071
guaagcguacuuuaacaug

SEQ ID NO: 160955 - RNA, 19 nt, Artificial Sequence
  Description of Artificial Sequence: Synthetic oligonucleotide
  Antisense strand to SEQ ID NO: 160954
cauguuaaaguacgcuuac

SEQ ID NO: 160956 - RNA, 19 nt, Artificial Sequence
  Description of Artificial Sequence: Synthetic oligonucleotide
  Sense strand starting at position 1047 of SEQ ID NO: 2071
gcaaauguauaugcaucau

SEQ ID NO: 160957 - RNA, 19 nt, Artificial Sequence
  Description of Artificial Sequence: Synthetic oligonucleotide
  Antisense strand to SEQ ID NO: 160956
augaugcauauacauuugc

SEQ ID NO: 160958 - RNA, 19 nt, Artificial Sequence
  Description of Artificial Sequence: Synthetic oligonucleotide
  Sense strand starting at position 1044 of SEQ ID NO: 2071
ugugcaaauguauaugcau

SEQ ID NO: 160959 - RNA, 19 nt, Artificial Sequence
  Description of Artificial Sequence: Synthetic oligonucleotide
  Antisense strand to SEQ ID NO: 160958
augcauauacauuugcaca

SEQ ID NO: 160960 - RNA, 19 nt, Artificial Sequence
  Description of Artificial Sequence: Synthetic oligonucleotide
  Sense strand starting at position 1008 of SEQ ID NO: 2071
ucucauaagaguugaggau

SEQ ID NO: 160961 - RNA, 19 nt, Artificial Sequence
  Description of Artificial Sequence: Synthetic oligonucleotide
  Antisense strand to SEQ ID NO: 160960
auccucaacucuuaugaga

SEQ ID NO: 160962 - RNA, 19 nt, Artificial Sequence
  Description of Artificial Sequence: Synthetic oligonucleotide
  Sense strand starting at position 980 of SEQ ID NO: 2071
uuucuaaugugccuuuaag

SEQ ID NO: 160963 - RNA, 19 nt, Artificial Sequence
  Description of Artificial Sequence: Synthetic oligonucleotide
  Antisense strand to SEQ ID NO: 160962
cuuaaaggcacauuagaaa

SEQ ID NO: 160964 - RNA, 19 nt, Artificial Sequence
  Description of Artificial Sequence: Synthetic oligonucleotide
  Sense strand starting at position 891 of SEQ ID NO: 2071
acuggugugaauggauaaa

SEQ ID NO: 160965 - RNA, 19 nt, Artificial Sequence
  Description of Artificial Sequence: Synthetic oligonucleotide
  Antisense strand to SEQ ID NO: 160964
uuuauccauucacaccagu

SEQ ID NO: 160966 - RNA, 19 nt, Artificial Sequence
  Description of Artificial Sequence: Synthetic oligonucleotide
  Sense strand starting at position 832 of SEQ ID NO: 2071
gcaccuaaccagugagaaa

SEQ ID NO: 160967 - RNA, 19 nt, Artificial Sequence
  Description of Artificial Sequence: Synthetic oligonucleotide
  Antisense strand to SEQ ID NO: 160966
uuucucacugguuaggugc

SEQ ID NO: 160968 - RNA, 19 nt, Artificial Sequence
  Description of Artificial Sequence: Synthetic oligonucleotide
  Sense strand starting at position 750 of SEQ ID NO: 2071
cauggucucuacucagagu

SEQ ID NO: 160969 - RNA, 19 nt, Artificial Sequence
  Description of Artificial Sequence: Synthetic oligonucleotide
  Antisense strand to SEQ ID NO: 160968
acucugaguagagaccaug

SEQ ID NO: 160970 - RNA, 19 nt, Artificial Sequence
  Description of Artificial Sequence: Synthetic oligonucleotide
  Sense strand starting at position 640 of SEQ ID NO: 2071
ggacuugagaccuguacuc

SEQ ID NO: 160971 - RNA, 19 nt, Artificial Sequence
  Description of Artificial Sequence: Synthetic oligonucleotide
  Antisense strand to SEQ ID NO: 160970
gaguacaggucucaagucc

SEQ ID NO: 160972 - RNA, 19 nt, Artificial Sequence
  Description of Artificial Sequence: Synthetic oligonucleotide
  Sense strand starting at position 624 of SEQ ID NO: 2071
agagauugaguaugcugga

SEQ ID NO: 160973 - RNA, 19 nt, Artificial Sequence
  Description of Artificial Sequence: Synthetic oligonucleotide
  Antisense strand to SEQ ID NO: 160972
uccagcauacucaaucucu

SEQ ID NO: 160974 - RNA, 19 nt, Artificial Sequence
  Description of Artificial Sequence: Synthetic oligonucleotide
  Sense strand starting at position 621 of SEQ ID NO: 2071
cugagagauugaguaugcu

SEQ ID NO: 160975 - RNA, 19 nt, Artificial Sequence
  Description of Artificial Sequence: Synthetic oligonucleotide
  Antisense strand to SEQ ID NO: 160974
agcauacucaaucucucag

SEQ ID NO: 160976 - RNA, 19 nt, Artificial Sequence
  Description of Artificial Sequence: Synthetic oligonucleotide
  Sense strand starting at position 592 of SEQ ID NO: 2071
cgucuuauuguagaaugag

SEQ ID NO: 160977 - RNA, 19 nt, Artificial Sequence
  Description of Artificial Sequence: Synthetic oligonucleotide
  Antisense strand to SEQ ID NO: 160976
cucauucuacaauaagacg

SEQ ID NO: 160978 - RNA, 19 nt, Artificial Sequence
  Description of Artificial Sequence: Synthetic oligonucleotide
  Sense strand starting at position 546 of SEQ ID NO: 2071
ugggcaagauuacuacaau

SEQ ID NO: 160979 - RNA, 19 nt, Artificial Sequence
  Description of Artificial Sequence: Synthetic oligonucleotide
  Antisense strand to SEQ ID NO: 160978
auuguaguaaucuugccca

SEQ ID NO: 160980 - RNA, 19 nt, Artificial Sequence
  Description of Artificial Sequence: Synthetic oligonucleotide
  Sense strand starting at position 541 of SEQ ID NO: 2071
gagucugggcaagauuacu

SEQ ID NO: 160981 - RNA, 19 nt, Artificial Sequence
  Description of Artificial Sequence: Synthetic oligonucleotide
  Antisense strand to SEQ ID NO: 160980
aguaaucuugcccagacuc

SEQ ID NO: 160982 - RNA, 19 nt, Artificial Sequence
  Description of Artificial Sequence: Synthetic oligonucleotide
  Sense strand starting at position 537 of SEQ ID NO: 2071
cagggagucugggcaagau

SEQ ID NO: 160983 - RNA, 19 nt, Artificial Sequence
  Description of Artificial Sequence: Synthetic oligonucleotide
  Antisense strand to SEQ ID NO: 160982
aucuugcccagacucccug

SEQ ID NO: 160984 - RNA, 19 nt, Artificial Sequence
  Description of Artificial Sequence: Synthetic oligonucleotide
  Sense strand starting at position 481 of SEQ ID NO: 2071
gcaugauuccgugucuagu

SEQ ID NO: 160985 - RNA, 19 nt, Artificial Sequence
  Description of Artificial Sequence: Synthetic oligonucleotide
  Antisense strand to SEQ ID NO: 160984
acuagacacggaaucaugc

SEQ ID NO: 160986 - RNA, 19 nt, Artificial Sequence
  Description of Artificial Sequence: Synthetic oligonucleotide
  Sense strand starting at position 71 of SEQ ID NO: 2071
agagaagcaucucucaguu

SEQ ID NO: 160987 - RNA, 19 nt, Artificial Sequence
  Description of Artificial Sequence: Synthetic oligonucleotide
  Antisense strand to SEQ ID NO: 160986
aacugagagaugcuucucu

SEQ ID NO: 160988 - RNA, 19 nt, Artificial Sequence
  Description of Artificial Sequence: Synthetic oligonucleotide
  Sense strand starting at position 35 of SEQ ID NO: 2071
augcguaguagauacaauu

SEQ ID NO: 160989 - RNA, 19 nt, Artificial Sequence
  Description of Artificial Sequence: Synthetic oligonucleotide
  Antisense strand to SEQ ID NO: 160988
aauuguaucuacuacgcau

SEQ ID NO: 160990 - RNA, 19 nt, Artificial Sequence
  Description of Artificial Sequence: Synthetic oligonucleotide
  Sense strand starting at position 40 of SEQ ID NO: 2072
aagaaugguugagagaauc

SEQ ID NO: 160991 - RNA, 19 nt, Artificial Sequence
  Description of Artificial Sequence: Synthetic oligonucleotide
  Antisense strand to SEQ ID NO: 160990
gauucucucaaccauucuu

SEQ ID NO: 160992 - RNA, 19 nt, Artificial Sequence
  Description of Artificial Sequence: Synthetic oligonucleotide
  Sense strand starting at position 162 of SEQ ID NO: 2072
aggcgacagaagugauaua

SEQ ID NO: 160993 - RNA, 19 nt, Artificial Sequence
  Description of Artificial Sequence: Synthetic oligonucleotide
  Antisense strand to SEQ ID NO: 160992
uauaucacuucugucgccu

SEQ ID NO: 160994 - RNA, 19 nt, Artificial Sequence
  Description of Artificial Sequence: Synthetic oligonucleotide
  Sense strand starting at position 213 of SEQ ID NO: 2072
gugcaauccuaacuugguu

SEQ ID NO: 160995 - RNA, 19 nt, Artificial Sequence
  Description of Artificial Sequence: Synthetic oligonucleotide
  Antisense strand to SEQ ID NO: 160994
aaccaaguuaggauugcac

SEQ ID NO: 160996 - RNA, 19 nt, Artificial Sequence
  Description of Artificial Sequence: Synthetic oligonucleotide
  Sense strand starting at position 244 of SEQ ID NO: 2072
agucaagucuuggcagacu

SEQ ID NO: 160997 - RNA, 19 nt, Artificial Sequence
  Description of Artificial Sequence: Synthetic oligonucleotide
  Antisense strand to SEQ ID NO: 160996
agucugccaagacuugacu

SEQ ID NO: 160998 - RNA, 19 nt, Artificial Sequence
  Description of Artificial Sequence: Synthetic oligonucleotide
  Sense strand starting at position 401 of SEQ ID NO: 2072
ggguuuguguagcuuauuu

SEQ ID NO: 160999 - RNA, 19 nt, Artificial Sequence
  Description of Artificial Sequence: Synthetic oligonucleotide
  Antisense strand to SEQ ID NO: 160998
aaauaagcuacacaaaccc

SEQ ID NO: 161000 - RNA, 19 nt, Artificial Sequence
  Description of Artificial Sequence: Synthetic oligonucleotide
  Sense strand starting at position 427 of SEQ ID NO: 2072
gcacaauuccgugugucac

SEQ ID NO: 161001 - RNA, 19 nt, Artificial Sequence
  Description of Artificial Sequence: Synthetic oligonucleotide
  Antisense strand to SEQ ID NO: 161000
gugacacacggaauugugc

SEQ ID NO: 161002 - RNA, 19 nt, Artificial Sequence
  Description of Artificial Sequence: Synthetic oligonucleotide
  Sense strand starting at position 429 of SEQ ID NO: 2072
acaauuccgugugucacaa

SEQ ID NO: 161003 - RNA, 19 nt, Artificial Sequence
  Description of Artificial Sequence: Synthetic oligonucleotide
  Antisense strand to SEQ ID NO: 161002
uugugacacacggaauugu

SEQ ID NO: 161004 - RNA, 19 nt, Artificial Sequence
  Description of Artificial Sequence: Synthetic oligonucleotide
  Sense strand starting at position 582 of SEQ ID NO: 2072
cugcucucucccgaacaga

SEQ ID NO: 161005 - RNA, 19 nt, Artificial Sequence
  Description of Artificial Sequence: Synthetic oligonucleotide
  Antisense strand to SEQ ID NO: 161004
ucuguucgggagagagcag

SEQ ID NO: 161006 - RNA, 19 nt, Artificial Sequence
  Description of Artificial Sequence: Synthetic oligonucleotide
  Sense strand starting at position 688 of SEQ ID NO: 2072
ugaaucaaaugagaacaaa

SEQ ID NO: 161007 - RNA, 19 nt, Artificial Sequence
  Description of Artificial Sequence: Synthetic oligonucleotide
  Antisense strand to SEQ ID NO: 161006
uuuguucucauuugauuca

SEQ ID NO: 161008 - RNA, 19 nt, Artificial Sequence
  Description of Artificial Sequence: Synthetic oligonucleotide
  Sense strand starting at position 898 of SEQ ID NO: 2072
ucauguauguuacacauuu

SEQ ID NO: 161009 - RNA, 19 nt, Artificial Sequence
  Description of Artificial Sequence: Synthetic oligonucleotide
  Antisense strand to SEQ ID NO: 161008
aaauguguaacauacauga

SEQ ID NO: 161010 - RNA, 19 nt, Artificial Sequence
  Description of Artificial Sequence: Synthetic oligonucleotide
  Sense strand starting at position 983 of SEQ ID NO: 2072
cgugaaucccugcaucuag

SEQ ID NO: 161011 - RNA, 19 nt, Artificial Sequence
  Description of Artificial Sequence: Synthetic oligonucleotide
  Antisense strand to SEQ ID NO: 161010
cuagaugcagggauucacg

SEQ ID NO: 161012 - RNA, 19 nt, Artificial Sequence
  Description of Artificial Sequence: Synthetic oligonucleotide
  Sense strand starting at position 998 of SEQ ID NO: 2072
cuagaauggugguuaagag

SEQ ID NO: 161013 - RNA, 19 nt, Artificial Sequence
  Description of Artificial Sequence: Synthetic oligonucleotide
  Antisense strand to SEQ ID NO: 161012
cucuuaaccaccauucuag

SEQ ID NO: 161014 - RNA, 19 nt, Artificial Sequence
  Description of Artificial Sequence: Synthetic oligonucleotide
  Sense strand starting at position 999 of SEQ ID NO: 2072
uagaauggugguuaagagu

SEQ ID NO: 161015 - RNA, 19 nt, Artificial Sequence
  Description of Artificial Sequence: Synthetic oligonucleotide
  Antisense strand to SEQ ID NO: 161014
acucuuaaccaccauucua

SEQ ID NO: 161016 - RNA, 19 nt, Artificial Sequence
  Description of Artificial Sequence: Synthetic oligonucleotide
  Sense strand starting at position 1006 of SEQ ID NO: 2072
gugguuaagaguuagacau

SEQ ID NO: 161017 - RNA, 19 nt, Artificial Sequence
  Description of Artificial Sequence: Synthetic oligonucleotide
  Antisense strand to SEQ ID NO: 161016
augucuaacucuuaaccac

SEQ ID NO: 161018 - RNA, 19 nt, Artificial Sequence
  Description of Artificial Sequence: Synthetic oligonucleotide
  Sense strand starting at position 1141 of SEQ ID NO: 2072
uugaucagcucuuugagga

SEQ ID NO: 161019 - RNA, 19 nt, Artificial Sequence
  Description of Artificial Sequence: Synthetic oligonucleotide
  Antisense strand to SEQ ID NO: 161018
uccucaaagagcugaucaa

SEQ ID NO: 161020 - RNA, 19 nt, Artificial Sequence
  Description of Artificial Sequence: Synthetic oligonucleotide
  Sense strand starting at position 1207 of SEQ ID NO: 2072
agaggugcaccguagacau

SEQ ID NO: 161021 - RNA, 19 nt, Artificial Sequence
  Description of Artificial Sequence: Synthetic oligonucleotide
  Antisense strand to SEQ ID NO: 161020
augucuacggugcaccucu

SEQ ID NO: 161022 - RNA, 19 nt, Artificial Sequence
  Description of Artificial Sequence: Synthetic oligonucleotide
  Sense strand starting at position 1214 of SEQ ID NO: 2072
caccguagacaucaagauu

SEQ ID NO: 161023 - RNA, 19 nt, Artificial Sequence
  Description of Artificial Sequence: Synthetic oligonucleotide
  Antisense strand to SEQ ID NO: 161022
aaucuugaugucuacggug

SEQ ID NO: 161024 - RNA, 19 nt, Artificial Sequence
  Description of Artificial Sequence: Synthetic oligonucleotide
  Sense strand starting at position 1217 of SEQ ID NO: 2072
cguagacaucaagauucuu

SEQ ID NO: 161025 - RNA, 19 nt, Artificial Sequence
  Description of Artificial Sequence: Synthetic oligonucleotide
  Antisense strand to SEQ ID NO: 161024
aagaaucuugaugucuacg

SEQ ID NO: 161026 - RNA, 19 nt, Artificial Sequence
  Description of Artificial Sequence: Synthetic oligonucleotide
  Sense strand starting at position 2242 of SEQ ID NO: 2072
gccauuucugcucgucacu

SEQ ID NO: 161027 - RNA, 19 nt, Artificial Sequence
  Description of Artificial Sequence: Synthetic oligonucleotide
  Antisense strand to SEQ ID NO: 161026
agugacgagcagaaauggc

SEQ ID NO: 161028 - RNA, 19 nt, Artificial Sequence
  Description of Artificial Sequence: Synthetic oligonucleotide
  Sense strand starting at position 2269 of SEQ ID NO: 2072
accuguagcuauguauaca

SEQ ID NO: 161029 - RNA, 19 nt, Artificial Sequence
  Description of Artificial Sequence: Synthetic oligonucleotide
  Antisense strand to SEQ ID NO: 161028
uguauacauagcuacaggu

SEQ ID NO: 161030 - RNA, 19 nt, Artificial Sequence
  Description of Artificial Sequence: Synthetic oligonucleotide
  Sense strand starting at position 2287 of SEQ ID NO: 2072
acguauugucguuaaacua

SEQ ID NO: 161031 - RNA, 19 nt, Artificial Sequence
  Description of Artificial Sequence: Synthetic oligonucleotide
  Antisense strand to SEQ ID NO: 161030
uaguuuaacgacaauacgu

SEQ ID NO: 161032 - RNA, 19 nt, Artificial Sequence
  Description of Artificial Sequence: Synthetic oligonucleotide
  Sense strand starting at position 2339 of SEQ ID NO: 2072
aguacuuugcacuguaacu

SEQ ID NO: 161033 - RNA, 19 nt, Artificial Sequence
  Description of Artificial Sequence: Synthetic oligonucleotide
  Antisense strand to SEQ ID NO: 161032
aguuacagugcaaaguacu

SEQ ID NO: 161034 - RNA, 19 nt, Artificial Sequence
  Description of Artificial Sequence: Synthetic oligonucleotide
  Sense strand starting at position 2523 of SEQ ID NO: 2072
cugacuagaugggacuaua

SEQ ID NO: 161035 - RNA, 19 nt, Artificial Sequence
  Description of Artificial Sequence: Synthetic oligonucleotide
  Antisense strand to SEQ ID NO: 161034
uauagucccaucuagucag

SEQ ID NO: 161036 - RNA, 19 nt, Artificial Sequence
  Description of Artificial Sequence: Synthetic oligonucleotide
  Sense strand starting at position 2785 of SEQ ID NO: 2072
aaugcagugguacgauauu

SEQ ID NO: 161037 - RNA, 19 nt, Artificial Sequence
  Description of Artificial Sequence: Synthetic oligonucleotide
  Antisense strand to SEQ ID NO: 161036
aauaucguaccacugcauu

SEQ ID NO: 161038 - RNA, 19 nt, Artificial Sequence
  Description of Artificial Sequence: Synthetic oligonucleotide
  Sense strand starting at position 3034 of SEQ ID NO: 2072
cggccuaaauuucuuaguu

SEQ ID NO: 161039 - RNA, 19 nt, Artificial Sequence
  Description of Artificial Sequence: Synthetic oligonucleotide
  Antisense strand to SEQ ID NO: 161038
aacuaagaaauuuaggccg

SEQ ID NO: 161040 - RNA, 19 nt, Artificial Sequence
  Description of Artificial Sequence: Synthetic oligonucleotide
  Sense strand starting at position 3035 of SEQ ID NO: 2072
ggccuaaauuucuuaguuu

SEQ ID NO: 161041 - RNA, 19 nt, Artificial Sequence
  Description of Artificial Sequence: Synthetic oligonucleotide
  Antisense strand to SEQ ID NO: 161040
aaacuaagaaauuuaggcc

SEQ ID NO: 161042 - RNA, 19 nt, Artificial Sequence
  Description of Artificial Sequence: Synthetic oligonucleotide
  Sense strand starting at position 3056 of SEQ ID NO: 2072
acaaacgugccaugguaau

SEQ ID NO: 161043 - RNA, 19 nt, Artificial Sequence
  Description of Artificial Sequence: Synthetic oligonucleotide
  Antisense strand to SEQ ID NO: 161042
auuaccauggcacguuugu

SEQ ID NO: 161044 - RNA, 19 nt, Artificial Sequence
  Description of Artificial Sequence: Synthetic oligonucleotide
  Sense strand starting at position 3109 of SEQ ID NO: 2072
gguguaggaguacacuaua

SEQ ID NO: 161045 - RNA, 19 nt, Artificial Sequence
  Description of Artificial Sequence: Synthetic oligonucleotide
  Antisense strand to SEQ ID NO: 161044
uauaguguacuccuacacc

SEQ ID NO: 161046 - RNA, 19 nt, Artificial Sequence
  Description of Artificial Sequence: Synthetic oligonucleotide
  Sense strand starting at position 3201 of SEQ ID NO: 2072
augcuuccaugaguguaaa

SEQ ID NO: 161047 - RNA, 19 nt, Artificial Sequence
  Description of Artificial Sequence: Synthetic oligonucleotide
  Antisense strand to SEQ ID NO: 161046
uuuacacucauggaagcau

SEQ ID NO: 161048 - RNA, 19 nt, Artificial Sequence
  Description of Artificial Sequence: Synthetic oligonucleotide
  Sense strand starting at position 3202 of SEQ ID NO: 2072
ugcuuccaugaguguaaag

SEQ ID NO: 161049 - RNA, 19 nt, Artificial Sequence
  Description of Artificial Sequence: Synthetic oligonucleotide
  Antisense strand to SEQ ID NO: 161048
cuuuacacucauggaagca

SEQ ID NO: 161050 - RNA, 19 nt, Artificial Sequence
  Description of Artificial Sequence: Synthetic oligonucleotide
  Sense strand starting at position 3204 of SEQ ID NO: 2072
cuuccaugaguguaaagua

SEQ ID NO: 161051 - RNA, 19 nt, Artificial Sequence
  Description of Artificial Sequence: Synthetic oligonucleotide
  Antisense strand to SEQ ID NO: 161050
uacuuuacacucauggaag

SEQ ID NO: 161052 - RNA, 19 nt, Artificial Sequence
  Description of Artificial Sequence: Synthetic oligonucleotide
  Sense strand starting at position 3233 of SEQ ID NO: 2072
gcucguggugcugucagaa

SEQ ID NO: 161053 - RNA, 19 nt, Artificial Sequence
  Description of Artificial Sequence: Synthetic oligonucleotide
  Antisense strand to SEQ ID NO: 161052
uucugacagcaccacgagc

SEQ ID NO: 161054 - RNA, 19 nt, Artificial Sequence
  Description of Artificial Sequence: Synthetic oligonucleotide
  Sense strand starting at position 3236 of SEQ ID NO: 2072
cguggugcugucagaaguc

SEQ ID NO: 161055 - RNA, 19 nt, Artificial Sequence
  Description of Artificial Sequence: Synthetic oligonucleotide
  Antisense strand to SEQ ID NO: 161054
gacuucugacagcaccacg

SEQ ID NO: 161056 - RNA, 19 nt, Artificial Sequence
  Description of Artificial Sequence: Synthetic oligonucleotide
  Sense strand starting at position 3326 of SEQ ID NO: 2072
uguguuccaucugugaaua

SEQ ID NO: 161057 - RNA, 19 nt, Artificial Sequence
  Description of Artificial Sequence: Synthetic oligonucleotide
  Antisense strand to SEQ ID NO: 161056
uauucacagauggaacaca

SEQ ID NO: 161058 - RNA, 19 nt, Artificial Sequence
  Description of Artificial Sequence: Synthetic oligonucleotide
  Sense strand starting at position 3327 of SEQ ID NO: 2072
guguuccaucugugaauau

SEQ ID NO: 161059 - RNA, 19 nt, Artificial Sequence
  Description of Artificial Sequence: Synthetic oligonucleotide
  Antisense strand to SEQ ID NO: 161058
auauucacagauggaacac

SEQ ID NO: 161060 - RNA, 19 nt, Artificial Sequence
  Description of Artificial Sequence: Synthetic oligonucleotide
  Sense strand starting at position 3357 of SEQ ID NO: 2072
ugcacuuaccagggaugua

SEQ ID NO: 161061 - RNA, 19 nt, Artificial Sequence
  Description of Artificial Sequence: Synthetic oligonucleotide
  Antisense strand to SEQ ID NO: 161060
uacaucccugguaagugca

SEQ ID NO: 161062 - RNA, 19 nt, Artificial Sequence
  Description of Artificial Sequence: Synthetic oligonucleotide
  Sense strand starting at position 3358 of SEQ ID NO: 2072
gcacuuaccagggauguaa

SEQ ID NO: 161063 - RNA, 19 nt, Artificial Sequence
  Description of Artificial Sequence: Synthetic oligonucleotide
  Antisense strand to SEQ ID NO: 161062
uuacaucccugguaagugc

SEQ ID NO: 161064 - RNA, 19 nt, Artificial Sequence
  Description of Artificial Sequence: Synthetic oligonucleotide
  Sense strand starting at position 3969 of SEQ ID NO: 2072
gagcauccuccauagugau

SEQ ID NO: 161065 - RNA, 19 nt, Artificial Sequence
  Description of Artificial Sequence: Synthetic oligonucleotide
  Antisense strand to SEQ ID NO: 161064
aucacuauggaggaugcuc

SEQ ID NO: 161066 - RNA, 19 nt, Artificial Sequence
  Description of Artificial Sequence: Synthetic oligonucleotide
  Sense strand starting at position 3975 of SEQ ID NO: 2072
ccuccauagugauucucuu

SEQ ID NO: 161067 - RNA, 19 nt, Artificial Sequence
  Description of Artificial Sequence: Synthetic oligonucleotide
  Antisense strand to SEQ ID NO: 161066
aagagaaucacuauggagg

SEQ ID NO: 161068 - RNA, 19 nt, Artificial Sequence
  Description of Artificial Sequence: Synthetic oligonucleotide
  Sense strand starting at position 3979 of SEQ ID NO: 2072
cauagugauucucuuuggu

SEQ ID NO: 161069 - RNA, 19 nt, Artificial Sequence
  Description of Artificial Sequence: Synthetic oligonucleotide
  Antisense strand to SEQ ID NO: 161068
accaaagagaaucacuaug

SEQ ID NO: 161070 - RNA, 19 nt, Artificial Sequence
  Description of Artificial Sequence: Synthetic oligonucleotide
  Sense strand starting at position 38 of SEQ ID NO: 2073
ccauuauuaguccauguac

SEQ ID NO: 161071 - RNA, 19 nt, Artificial Sequence
  Description of Artificial Sequence: Synthetic oligonucleotide
  Antisense strand to SEQ ID NO: 161070
guacauggacuaauaaugg

SEQ ID NO: 161072 - RNA, 19 nt, Artificial Sequence
  Description of Artificial Sequence: Synthetic oligonucleotide
  Sense strand starting at position 40 of SEQ ID NO: 2073
auuauuaguccauguacua

SEQ ID NO: 161073 - RNA, 19 nt, Artificial Sequence
  Description of Artificial Sequence: Synthetic oligonucleotide
  Antisense strand to SEQ ID NO: 161072
uaguacauggacuaauaau

SEQ ID NO: 161074 - RNA, 19 nt, Artificial Sequence
  Description of Artificial Sequence: Synthetic oligonucleotide
  Sense strand starting at position 399 of SEQ ID NO: 2073
accacuagucuauauaguu

SEQ ID NO: 161075 - RNA, 19 nt, Artificial Sequence
  Description of Artificial Sequence: Synthetic oligonucleotide
  Antisense strand to SEQ ID NO: 161074
aacuauauagacuaguggu

SEQ ID NO: 161076 - RNA, 19 nt, Artificial Sequence
  Description of Artificial Sequence: Synthetic oligonucleotide
  Sense strand starting at position 501 of SEQ ID NO: 2073
uauguuaugccuugaacug

SEQ ID NO: 161077 - RNA, 19 nt, Artificial Sequence
  Description of Artificial Sequence: Synthetic oligonucleotide
  Antisense strand to SEQ ID NO: 161076
caguucaaggcauaacaua

SEQ ID NO: 161078 - RNA, 19 nt, Artificial Sequence
  Description of Artificial Sequence: Synthetic oligonucleotide
  Sense strand starting at position 508 of SEQ ID NO: 2073
ugccuugaacugcauacau

SEQ ID NO: 161079 - RNA, 19 nt, Artificial Sequence
  Description of Artificial Sequence: Synthetic oligonucleotide
  Antisense strand to SEQ ID NO: 161078
auguaugcaguucaaggca

SEQ ID NO: 161080 - RNA, 19 nt, Artificial Sequence
  Description of Artificial Sequence: Synthetic oligonucleotide
  Sense strand starting at position 518 of SEQ ID NO: 2073
ugcauacauguacguagaa

SEQ ID NO: 161081 - RNA, 19 nt, Artificial Sequence
  Description of Artificial Sequence: Synthetic oligonucleotide
  Antisense strand to SEQ ID NO: 161080
uucuacguacauguaugca

SEQ ID NO: 161082 - RNA, 19 nt, Artificial Sequence
  Description of Artificial Sequence: Synthetic oligonucleotide
  Sense strand starting at position 519 of SEQ ID NO: 2073
gcauacauguacguagaaa

SEQ ID NO: 161083 - RNA, 19 nt, Artificial Sequence
  Description of Artificial Sequence: Synthetic oligonucleotide
  Antisense strand to SEQ ID NO: 161082
uuucuacguacauguaugc

SEQ ID NO: 161084 - RNA, 19 nt, Artificial Sequence
  Description of Artificial Sequence: Synthetic oligonucleotide
  Sense strand starting at position 647 of SEQ ID NO: 2073
uccuauguugcauacagua

SEQ ID NO: 161085 - RNA, 19 nt, Artificial Sequence
  Description of Artificial Sequence: Synthetic oligonucleotide
  Antisense strand to SEQ ID NO: 161084
uacuguaugcaacauagga

SEQ ID NO: 161086 - RNA, 19 nt, Artificial Sequence
  Description of Artificial Sequence: Synthetic oligonucleotide
  Sense strand starting at position 785 of SEQ ID NO: 2073
uuaagaacaucauaugaga

SEQ ID NO: 161087 - RNA, 19 nt, Artificial Sequence
  Description of Artificial Sequence: Synthetic oligonucleotide
  Antisense strand to SEQ ID NO: 161086
ucucauaugauguucuuaa

SEQ ID NO: 161088 - RNA, 19 nt, Artificial Sequence
  Description of Artificial Sequence: Synthetic oligonucleotide
  Sense strand starting at position 844 of SEQ ID NO: 2073
cggugucacuaaucaauuu

SEQ ID NO: 161089 - RNA, 19 nt, Artificial Sequence
  Description of Artificial Sequence: Synthetic oligonucleotide
  Antisense strand to SEQ ID NO: 161088
aaauugauuagugacaccg

SEQ ID NO: 161090 - RNA, 19 nt, Artificial Sequence
  Description of Artificial Sequence: Synthetic oligonucleotide
  Sense strand starting at position 908 of SEQ ID NO: 2073
gcauacuuucccugcagag

SEQ ID NO: 161091 - RNA, 19 nt, Artificial Sequence
  Description of Artificial Sequence: Synthetic oligonucleotide
  Antisense strand to SEQ ID NO: 161090
cucugcagggaaaguaugc

SEQ ID NO: 161092 - RNA, 19 nt, Artificial Sequence
  Description of Artificial Sequence: Synthetic oligonucleotide
  Sense strand starting at position 927 of SEQ ID NO: 2073
ggaccacuacugugacuua

SEQ ID NO: 161093 - RNA, 19 nt, Artificial Sequence
  Description of Artificial Sequence: Synthetic oligonucleotide
  Antisense strand to SEQ ID NO: 161092
uaagucacaguaguggucc

SEQ ID NO: 161094 - RNA, 19 nt, Artificial Sequence
  Description of Artificial Sequence: Synthetic oligonucleotide
  Sense strand starting at position 930 of SEQ ID NO: 2073
ccacuacugugacuuaaag

SEQ ID NO: 161095 - RNA, 19 nt, Artificial Sequence
  Description of Artificial Sequence: Synthetic oligonucleotide
  Antisense strand to SEQ ID NO: 161094
cuuuaagucacaguagugg

SEQ ID NO: 161096 - RNA, 19 nt, Artificial Sequence
  Description of Artificial Sequence: Synthetic oligonucleotide
  Sense strand starting at position 966 of SEQ ID NO: 2073
uucuuugaagcuuaguauu

SEQ ID NO: 161097 - RNA, 19 nt, Artificial Sequence
  Description of Artificial Sequence: Synthetic oligonucleotide
  Antisense strand to SEQ ID NO: 161096
aauacuaagcuucaaagaa

SEQ ID NO: 161098 - RNA, 19 nt, Artificial Sequence
  Description of Artificial Sequence: Synthetic oligonucleotide
  Sense strand starting at position 992 of SEQ ID NO: 2073
gcauucuuacuugauuagu

SEQ ID NO: 161099 - RNA, 19 nt, Artificial Sequence
  Description of Artificial Sequence: Synthetic oligonucleotide
  Antisense strand to SEQ ID NO: 161098
acuaaucaaguaagaaugc

SEQ ID NO: 161100 - RNA, 19 nt, Artificial Sequence
  Description of Artificial Sequence: Synthetic oligonucleotide
  Sense strand starting at position 1053 of SEQ ID NO: 2073
cccuaugugccagaauaac

SEQ ID NO: 161101 - RNA, 19 nt, Artificial Sequence
  Description of Artificial Sequence: Synthetic oligonucleotide
  Antisense strand to SEQ ID NO: 161100
guuauucuggcacauaggg

SEQ ID NO: 161102 - RNA, 19 nt, Artificial Sequence
  Description of Artificial Sequence: Synthetic oligonucleotide
  Sense strand starting at position 1121 of SEQ ID NO: 2073
aacaguguccacugggaaa

SEQ ID NO: 161103 - RNA, 19 nt, Artificial Sequence
  Description of Artificial Sequence: Synthetic oligonucleotide
  Antisense strand to SEQ ID NO: 161102
uuucccaguggacacuguu

SEQ ID NO: 161104 - RNA, 19 nt, Artificial Sequence
  Description of Artificial Sequence: Synthetic oligonucleotide
  Sense strand starting at position 1523 of SEQ ID NO: 2073
agauuaaccugagaagaaa

SEQ ID NO: 161105 - RNA, 19 nt, Artificial Sequence
  Description of Artificial Sequence: Synthetic oligonucleotide
  Antisense strand to SEQ ID NO: 161104
uuucuucucagguuaaucu

SEQ ID NO: 161106 - RNA, 19 nt, Artificial Sequence
  Description of Artificial Sequence: Synthetic oligonucleotide
  Sense strand starting at position 1549 of SEQ ID NO: 2073
auaauaagucauugccaag

SEQ ID NO: 161107 - RNA, 19 nt, Artificial Sequence
  Description of Artificial Sequence: Synthetic oligonucleotide
  Antisense strand to SEQ ID NO: 161106
cuuggcaaugacuuauuau

SEQ ID NO: 161108 - RNA, 19 nt, Artificial Sequence
  Description of Artificial Sequence: Synthetic oligonucleotide
  Sense strand starting at position 1555 of SEQ ID NO: 2073
agucauugccaagaccaga

SEQ ID NO: 161109 - RNA, 19 nt, Artificial Sequence
  Description of Artificial Sequence: Synthetic oligonucleotide
  Antisense strand to SEQ ID NO: 161108
ucuggucuuggcaaugacu

SEQ ID NO: 161110 - RNA, 19 nt, Artificial Sequence
  Description of Artificial Sequence: Synthetic oligonucleotide
  Sense strand starting at position 1817 of SEQ ID NO: 2073
gaaagagagugccauuuaa

SEQ ID NO: 161111 - RNA, 19 nt, Artificial Sequence
  Description of Artificial Sequence: Synthetic oligonucleotide
  Antisense strand to SEQ ID NO: 161110
uuaaauggcacucucuuuc

SEQ ID NO: 161112 - RNA, 19 nt, Artificial Sequence
  Description of Artificial Sequence: Synthetic oligonucleotide
  Sense strand starting at position 1828 of SEQ ID NO: 2073
ccauuuaagcuguggcuau

SEQ ID NO: 161113 - RNA, 19 nt, Artificial Sequence
  Description of Artificial Sequence: Synthetic oligonucleotide
  Antisense strand to SEQ ID NO: 161112
auagccacagcuuaaaugg

SEQ ID NO: 161114 - RNA, 19 nt, Artificial Sequence
  Description of Artificial Sequence: Synthetic oligonucleotide
  Sense strand starting at position 1942 of SEQ ID NO: 2073
guuuaauuacugcaaggca

SEQ ID NO: 161115 - RNA, 19 nt, Artificial Sequence
  Description of Artificial Sequence: Synthetic oligonucleotide
  Antisense strand to SEQ ID NO: 161114
ugccuugcaguaauuaaac

SEQ ID NO: 161116 - RNA, 19 nt, Artificial Sequence
  Description of Artificial Sequence: Synthetic oligonucleotide
  Sense strand starting at position 2082 of SEQ ID NO: 2073
gaugaaaucacuggagugu

SEQ ID NO: 161117 - RNA, 19 nt, Artificial Sequence
  Description of Artificial Sequence: Synthetic oligonucleotide
  Antisense strand to SEQ ID NO: 161116
acacuccagugauuucauc

SEQ ID NO: 161118 - RNA, 19 nt, Artificial Sequence
  Description of Artificial Sequence: Synthetic oligonucleotide
  Sense strand starting at position 2106 of SEQ ID NO: 2073
cugucuucacgugcugagu

SEQ ID NO: 161119 - RNA, 19 nt, Artificial Sequence
  Description of Artificial Sequence: Synthetic oligonucleotide
  Antisense strand to SEQ ID NO: 161118
acucagcacgugaagacag

SEQ ID NO: 161120 - RNA, 19 nt, Artificial Sequence
  Description of Artificial Sequence: Synthetic oligonucleotide
  Sense strand starting at position 2197 of SEQ ID NO: 2073
gucaguuuaccagaaugca

SEQ ID NO: 161121 - RNA, 19 nt, Artificial Sequence
  Description of Artificial Sequence: Synthetic oligonucleotide
  Antisense strand to SEQ ID NO: 161120
ugcauucugguaaacugac

SEQ ID NO: 161122 - RNA, 19 nt, Artificial Sequence
  Description of Artificial Sequence: Synthetic oligonucleotide
  Sense strand starting at position 2247 of SEQ ID NO: 2073
uaggguuuacaguggugau

SEQ ID NO: 161123 - RNA, 19 nt, Artificial Sequence
  Description of Artificial Sequence: Synthetic oligonucleotide
  Antisense strand to SEQ ID NO: 161122
aucaccacuguaaacccua

SEQ ID NO: 161124 - RNA, 19 nt, Artificial Sequence
  Description of Artificial Sequence: Synthetic oligonucleotide
  Sense strand starting at position 2251 of SEQ ID NO: 2073
guuuacaguggugauguua

SEQ ID NO: 161125 - RNA, 19 nt, Artificial Sequence
  Description of Artificial Sequence: Synthetic oligonucleotide
  Antisense strand to SEQ ID NO: 161124
uaacaucaccacuguaaac

SEQ ID NO: 161126 - RNA, 19 nt, Artificial Sequence
  Description of Artificial Sequence: Synthetic oligonucleotide
  Sense strand starting at position 2259 of SEQ ID NO: 2073
uggugauguuaucucaaau

SEQ ID NO: 161127 - RNA, 19 nt, Artificial Sequence
  Description of Artificial Sequence: Synthetic oligonucleotide
  Antisense strand to SEQ ID NO: 161126
auuugagauaacaucacca

SEQ ID NO: 161128 - RNA, 19 nt, Artificial Sequence
  Description of Artificial Sequence: Synthetic oligonucleotide
  Sense strand starting at position 2339 of SEQ ID NO: 2073
gcuuauuacuuagcagaau

SEQ ID NO: 161129 - RNA, 19 nt, Artificial Sequence
  Description of Artificial Sequence: Synthetic oligonucleotide
  Antisense strand to SEQ ID NO: 161128
auucugcuaaguaauaagc

SEQ ID NO: 161130 - RNA, 19 nt, Artificial Sequence
  Description of Artificial Sequence: Synthetic oligonucleotide
  Sense strand starting at position 2560 of SEQ ID NO: 2073
gcaagauaaagucagcugu

SEQ ID NO: 161131 - RNA, 19 nt, Artificial Sequence
  Description of Artificial Sequence: Synthetic oligonucleotide
  Antisense strand to SEQ ID NO: 161130
acagcugacuuuaucuugc

SEQ ID NO: 161132 - RNA, 19 nt, Artificial Sequence
  Description of Artificial Sequence: Synthetic oligonucleotide
  Sense strand starting at position 2562 of SEQ ID NO: 2073
aagauaaagucagcugugu

SEQ ID NO: 161133 - RNA, 19 nt, Artificial Sequence
  Description of Artificial Sequence: Synthetic oligonucleotide
  Antisense strand to SEQ ID NO: 161132
acacagcugacuuuaucuu

SEQ ID NO: 161134 - RNA, 19 nt, Artificial Sequence
  Description of Artificial Sequence: Synthetic oligonucleotide
  Sense strand starting at position 2619 of SEQ ID NO: 2073
ucaguucucugagucucau

SEQ ID NO: 161135 - RNA, 19 nt, Artificial Sequence
  Description of Artificial Sequence: Synthetic oligonucleotide
  Antisense strand to SEQ ID NO: 161134
augagacucagagaacuga

SEQ ID NO: 161136 - RNA, 19 nt, Artificial Sequence
  Description of Artificial Sequence: Synthetic oligonucleotide
  Sense strand starting at position 2653 of SEQ ID NO: 2073
ugugcuucugcacauuaau

SEQ ID NO: 161137 - RNA, 19 nt, Artificial Sequence
  Description of Artificial Sequence: Synthetic oligonucleotide
  Antisense strand to SEQ ID NO: 161136
auuaaugugcagaagcaca

SEQ ID NO: 161138 - RNA, 19 nt, Artificial Sequence
  Description of Artificial Sequence: Synthetic oligonucleotide
  Sense strand starting at position 2690 of SEQ ID NO: 2073
cccuguuaaucagucuaau

SEQ ID NO: 161139 - RNA, 19 nt, Artificial Sequence
  Description of Artificial Sequence: Synthetic oligonucleotide
  Antisense strand to SEQ ID NO: 161138
auuagacugauuaacaggg

SEQ ID NO: 161140 - RNA, 19 nt, Artificial Sequence
  Description of Artificial Sequence: Synthetic oligonucleotide
  Sense strand starting at position 2693 of SEQ ID NO: 2073
uguuaaucagucuaauguc

SEQ ID NO: 161141 - RNA, 19 nt, Artificial Sequence
  Description of Artificial Sequence: Synthetic oligonucleotide
  Antisense strand to SEQ ID NO: 161140
gacauuagacugauuaaca

SEQ ID NO: 161142 - RNA, 19 nt, Artificial Sequence
  Description of Artificial Sequence: Synthetic oligonucleotide
  Sense strand starting at position 3006 of SEQ ID NO: 2073
ugucuagagguguauguuu

SEQ ID NO: 161143 - RNA, 19 nt, Artificial Sequence
  Description of Artificial Sequence: Synthetic oligonucleotide
  Antisense strand to SEQ ID NO: 161142
aaacauacaccucuagaca

SEQ ID NO: 161144 - RNA, 19 nt, Artificial Sequence
  Description of Artificial Sequence: Synthetic oligonucleotide
  Sense strand starting at position 3648 of SEQ ID NO: 2073
cgcccuugagaauguaaua

SEQ ID NO: 161145 - RNA, 19 nt, Artificial Sequence
  Description of Artificial Sequence: Synthetic oligonucleotide
  Antisense strand to SEQ ID NO: 161144
uauuacauucucaagggcg

SEQ ID NO: 161146 - RNA, 19 nt, Artificial Sequence
  Description of Artificial Sequence: Synthetic oligonucleotide
  Sense strand starting at position 3747 of SEQ ID NO: 2073
accgccuaucucuauaaga

SEQ ID NO: 161147 - RNA, 19 nt, Artificial Sequence
  Description of Artificial Sequence: Synthetic oligonucleotide
  Antisense strand to SEQ ID NO: 161146
ucuuauagagauaggcggu

SEQ ID NO: 161148 - RNA, 19 nt, Artificial Sequence
  Description of Artificial Sequence: Synthetic oligonucleotide
  Sense strand starting at position 3749 of SEQ ID NO: 2073
cgccuaucucuauaagaac

SEQ ID NO: 161149 - RNA, 19 nt, Artificial Sequence
  Description of Artificial Sequence: Synthetic oligonucleotide
  Antisense strand to SEQ ID NO: 161148
guucuuauagagauaggcg

SEQ ID NO: 161150 - RNA, 19 nt, Artificial Sequence
  Description of Artificial Sequence: Synthetic oligonucleotide
  Sense strand starting at position 2560 of SEQ ID NO: 2074
gagagaucuccucagccuc

SEQ ID NO: 161151 - RNA, 19 nt, Artificial Sequence
  Description of Artificial Sequence: Synthetic oligonucleotide
  Antisense strand to SEQ ID NO: 161150
gaggcugaggagaucucuc

SEQ ID NO: 161152 - RNA, 19 nt, Artificial Sequence
  Description of Artificial Sequence: Synthetic oligonucleotide
  Sense strand starting at position 2522 of SEQ ID NO: 2074
uugggaggucaauaugguu

SEQ ID NO: 161153 - RNA, 19 nt, Artificial Sequence
  Description of Artificial Sequence: Synthetic oligonucleotide
  Antisense strand to SEQ ID NO: 161152
aaccauauugaccucccaa

SEQ ID NO: 161154 - RNA, 19 nt, Artificial Sequence
  Description of Artificial Sequence: Synthetic oligonucleotide
  Sense strand starting at position 2516 of SEQ ID NO: 2074
uguucuuugggaggucaau

SEQ ID NO: 161155 - RNA, 19 nt, Artificial Sequence
  Description of Artificial Sequence: Synthetic oligonucleotide
  Antisense strand to SEQ ID NO: 161154
auugaccucccaaagaaca

SEQ ID NO: 161156 - RNA, 19 nt, Artificial Sequence
  Description of Artificial Sequence: Synthetic oligonucleotide
  Sense strand starting at position 2514 of SEQ ID NO: 2074
guuguucuuugggagguca

SEQ ID NO: 161157 - RNA, 19 nt, Artificial Sequence
  Description of Artificial Sequence: Synthetic oligonucleotide
  Antisense strand to SEQ ID NO: 161156
ugaccucccaaagaacaac

SEQ ID NO: 161158 - RNA, 19 nt, Artificial Sequence
  Description of Artificial Sequence: Synthetic oligonucleotide
  Sense strand starting at position 2510 of SEQ ID NO: 2074
aaguguuguucuuugggag

SEQ ID NO: 161159 - RNA, 19 nt, Artificial Sequence
  Description of Artificial Sequence: Synthetic oligonucleotide
  Antisense strand to SEQ ID NO: 161158
cucccaaagaacaacacuu

SEQ ID NO: 161160 - RNA, 19 nt, Artificial Sequence
  Description of Artificial Sequence: Synthetic oligonucleotide
  Sense strand starting at position 2505 of SEQ ID NO: 2074
gcugcaaguguuguucuuu

SEQ ID NO: 161161 - RNA, 19 nt, Artificial Sequence
  Description of Artificial Sequence: Synthetic oligonucleotide
  Antisense strand to SEQ ID NO: 161160
aaagaacaacacuugcagc

SEQ ID NO: 161162 - RNA, 19 nt, Artificial Sequence
  Description of Artificial Sequence: Synthetic oligonucleotide
  Sense strand starting at position 2504 of SEQ ID NO: 2074
ggcugcaaguguuguucuu

SEQ ID NO: 161163 - RNA, 19 nt, Artificial Sequence
  Description of Artificial Sequence: Synthetic oligonucleotide
  Antisense strand to SEQ ID NO: 161162
aagaacaacacuugcagcc

SEQ ID NO: 161164 - RNA, 19 nt, Artificial Sequence
  Description of Artificial Sequence: Synthetic oligonucleotide
  Sense strand starting at position 2485 of SEQ ID NO: 2074
acuggauugucuuccgcau

SEQ ID NO: 161165 - RNA, 19 nt, Artificial Sequence
  Description of Artificial Sequence: Synthetic oligonucleotide
  Antisense strand to SEQ ID NO: 161164
augcggaagacaauccagu

SEQ ID NO: 161166 - RNA, 19 nt, Artificial Sequence
  Description of Artificial Sequence: Synthetic oligonucleotide
  Sense strand starting at position 2459 of SEQ ID NO: 2074
gaggcacuuuaaucaguuu

SEQ ID NO: 161167 - RNA, 19 nt, Artificial Sequence
  Description of Artificial Sequence: Synthetic oligonucleotide
  Antisense strand to SEQ ID NO: 161166
aaacugauuaaagugccuc

SEQ ID NO: 161168 - RNA, 19 nt, Artificial Sequence
  Description of Artificial Sequence: Synthetic oligonucleotide
  Sense strand starting at position 2244 of SEQ ID NO: 2074
acaugacucucagagacua

SEQ ID NO: 161169 - RNA, 19 nt, Artificial Sequence
  Description of Artificial Sequence: Synthetic oligonucleotide
  Antisense strand to SEQ ID NO: 161168
uagucucugagagucaugu

SEQ ID NO: 161170 - RNA, 19 nt, Artificial Sequence
  Description of Artificial Sequence: Synthetic oligonucleotide
  Sense strand starting at position 2242 of SEQ ID NO: 2074
gcacaugacucucagagac

SEQ ID NO: 161171 - RNA, 19 nt, Artificial Sequence
  Description of Artificial Sequence: Synthetic oligonucleotide
  Antisense strand to SEQ ID NO: 161170
gucucugagagucaugugc

SEQ ID NO: 161172 - RNA, 19 nt, Artificial Sequence
  Description of Artificial Sequence: Synthetic oligonucleotide
  Sense strand starting at position 2188 of SEQ ID NO: 2074
gguuguaccaguugcaaac

SEQ ID NO: 161173 - RNA, 19 nt, Artificial Sequence
  Description of Artificial Sequence: Synthetic oligonucleotide
  Antisense strand to SEQ ID NO: 161172
guuugcaacugguacaacc

SEQ ID NO: 161174 - RNA, 19 nt, Artificial Sequence
  Description of Artificial Sequence: Synthetic oligonucleotide
  Sense strand starting at position 1206 of SEQ ID NO: 2074
ccuaccaucuccgcuagau

SEQ ID NO: 161175 - RNA, 19 nt, Artificial Sequence
  Description of Artificial Sequence: Synthetic oligonucleotide
  Antisense strand to SEQ ID NO: 161174
aucuagcggagaugguagg

SEQ ID NO: 161176 - RNA, 19 nt, Artificial Sequence
  Description of Artificial Sequence: Synthetic oligonucleotide
  Sense strand starting at position 594 of SEQ ID NO: 2074
gguaacuccaguugcaagu

SEQ ID NO: 161177 - RNA, 19 nt, Artificial Sequence
  Description of Artificial Sequence: Synthetic oligonucleotide
  Antisense strand to SEQ ID NO: 161176
acuugcaacuggaguuacc

SEQ ID NO: 161178 - RNA, 19 nt, Artificial Sequence
  Description of Artificial Sequence: Synthetic oligonucleotide
  Sense strand starting at position 520 of SEQ ID NO: 2074
gcacuucuuucuuugguau

SEQ ID NO: 161179 - RNA, 19 nt, Artificial Sequence
  Description of Artificial Sequence: Synthetic oligonucleotide
  Antisense strand to SEQ ID NO: 161178
auaccaaagaaagaagugc

SEQ ID NO: 161180 - RNA, 19 nt, Artificial Sequence
  Description of Artificial Sequence: Synthetic oligonucleotide
  Sense strand starting at position 519 of SEQ ID NO: 2074
agcacuucuuucuuuggua

SEQ ID NO: 161181 - RNA, 19 nt, Artificial Sequence
  Description of Artificial Sequence: Synthetic oligonucleotide
  Antisense strand to SEQ ID NO: 161180
uaccaaagaaagaagugcu

SEQ ID NO: 161182 - RNA, 19 nt, Artificial Sequence
  Description of Artificial Sequence: Synthetic oligonucleotide
  Sense strand starting at position 3816 of SEQ ID NO: 2075
uuuaaaguuuccuuaguuc

SEQ ID NO: 161183 - RNA, 19 nt, Artificial Sequence
  Description of Artificial Sequence: Synthetic oligonucleotide
  Antisense strand to SEQ ID NO: 161182
gaacuaaggaaacuuuaaa

SEQ ID NO: 161184 - RNA, 19 nt, Artificial Sequence
  Description of Artificial Sequence: Synthetic oligonucleotide
  Sense strand starting at position 2849 of SEQ ID NO: 2075
aacugcauguauccgaauu

SEQ ID NO: 161185 - RNA, 19 nt, Artificial Sequence
  Description of Artificial Sequence: Synthetic oligonucleotide
  Antisense strand to SEQ ID NO: 161184
aauucggauacaugcaguu

SEQ ID NO: 161186 - RNA, 19 nt, Artificial Sequence
  Description of Artificial Sequence: Synthetic oligonucleotide
  Sense strand starting at position 2800 of SEQ ID NO: 2075
cuggucuauuucuaaagag

SEQ ID NO: 161187 - RNA, 19 nt, Artificial Sequence
  Description of Artificial Sequence: Synthetic oligonucleotide
  Antisense strand to SEQ ID NO: 161186
cucuuuagaaauagaccag

SEQ ID NO: 161188 - RNA, 19 nt, Artificial Sequence
  Description of Artificial Sequence: Synthetic oligonucleotide
  Sense strand starting at position 2492 of SEQ ID NO: 2075
uaaagaguuuauugugguu

SEQ ID NO: 161189 - RNA, 19 nt, Artificial Sequence
  Description of Artificial Sequence: Synthetic oligonucleotide
  Antisense strand to SEQ ID NO: 161188
aaccacaauaaacucuuua

SEQ ID NO: 161190 - RNA, 19 nt, Artificial Sequence
  Description of Artificial Sequence: Synthetic oligonucleotide
  Sense strand starting at position 2227 of SEQ ID NO: 2075
uguuaacuuuaugagauag

SEQ ID NO: 161191 - RNA, 19 nt, Artificial Sequence
  Description of Artificial Sequence: Synthetic oligonucleotide
  Antisense strand to SEQ ID NO: 161190
cuaucucauaaaguuaaca

SEQ ID NO: 161192 - RNA, 19 nt, Artificial Sequence
  Description of Artificial Sequence: Synthetic oligonucleotide
  Sense strand starting at position 2204 of SEQ ID NO: 2075
ugcaguuguccauagccuu

SEQ ID NO: 161193 - RNA, 19 nt, Artificial Sequence
  Description of Artificial Sequence: Synthetic oligonucleotide
  Antisense strand to SEQ ID NO: 161192
aaggcuauggacaacugca

SEQ ID NO: 161194 - RNA, 19 nt, Artificial Sequence
  Description of Artificial Sequence: Synthetic oligonucleotide
  Sense strand starting at position 2194 of SEQ ID NO: 2075
cgcgaauaccugcaguugu

SEQ ID NO: 161195 - RNA, 19 nt, Artificial Sequence
  Description of Artificial Sequence: Synthetic oligonucleotide
  Antisense strand to SEQ ID NO: 161194
acaacugcagguauucgcg

SEQ ID NO: 161196 - RNA, 19 nt, Artificial Sequence
  Description of Artificial Sequence: Synthetic oligonucleotide
  Sense strand starting at position 2096 of SEQ ID NO: 2075
ccuuguggcuggucuugaa

SEQ ID NO: 161197 - RNA, 19 nt, Artificial Sequence
  Description of Artificial Sequence: Synthetic oligonucleotide
  Antisense strand to SEQ ID NO: 161196
uucaagaccagccacaagg

SEQ ID NO: 161198 - RNA, 19 nt, Artificial Sequence
  Description of Artificial Sequence: Synthetic oligonucleotide
  Sense strand starting at position 2007 of SEQ ID NO: 2075
ugcugucuccaccaagaca

SEQ ID NO: 161199 - RNA, 19 nt, Artificial Sequence
  Description of Artificial Sequence: Synthetic oligonucleotide
  Antisense strand to SEQ ID NO: 161198
ugucuugguggagacagca

SEQ ID NO: 161200 - RNA, 19 nt, Artificial Sequence
  Description of Artificial Sequence: Synthetic oligonucleotide
  Sense strand starting at position 1661 of SEQ ID NO: 2075
cgaaucaguuuccuaaauu

SEQ ID NO: 161201 - RNA, 19 nt, Artificial Sequence
  Description of Artificial Sequence: Synthetic oligonucleotide
  Antisense strand to SEQ ID NO: 161200
aauuuaggaaacugauucg

SEQ ID NO: 161202 - RNA, 19 nt, Artificial Sequence
  Description of Artificial Sequence: Synthetic oligonucleotide
  Sense strand starting at position 1660 of SEQ ID NO: 2075
ucgaaucaguuuccuaaau

SEQ ID NO: 161203 - RNA, 19 nt, Artificial Sequence
  Description of Artificial Sequence: Synthetic oligonucleotide
  Antisense strand to SEQ ID NO: 161202
auuuaggaaacugauucga

SEQ ID NO: 161204 - RNA, 19 nt, Artificial Sequence
  Description of Artificial Sequence: Synthetic oligonucleotide
  Sense strand starting at position 1436 of SEQ ID NO: 2075
ugaagaauuccggguacac

SEQ ID NO: 161205 - RNA, 19 nt, Artificial Sequence
  Description of Artificial Sequence: Synthetic oligonucleotide
  Antisense strand to SEQ ID NO: 161204
guguacccggaauucuuca

SEQ ID NO: 161206 - RNA, 19 nt, Artificial Sequence
  Description of Artificial Sequence: Synthetic oligonucleotide
  Sense strand starting at position 1424 of SEQ ID NO: 2075
cugaaagugggcugaagaa

SEQ ID NO: 161207 - RNA, 19 nt, Artificial Sequence
  Description of Artificial Sequence: Synthetic oligonucleotide
  Antisense strand to SEQ ID NO: 161206
uucuucagcccacuuucag

SEQ ID NO: 161208 - RNA, 19 nt, Artificial Sequence
  Description of Artificial Sequence: Synthetic oligonucleotide
  Sense strand starting at position 1413 of SEQ ID NO: 2075
aaccuaagguccugaaagu

SEQ ID NO: 161209 - RNA, 19 nt, Artificial Sequence
  Description of Artificial Sequence: Synthetic oligonucleotide
  Antisense strand to SEQ ID NO: 161208
acuuucaggaccuuagguu

SEQ ID NO: 161210 - RNA, 19 nt, Artificial Sequence
  Description of Artificial Sequence: Synthetic oligonucleotide
  Sense strand starting at position 1308 of SEQ ID NO: 2075
ggccacagccauuagagau

SEQ ID NO: 161211 - RNA, 19 nt, Artificial Sequence
  Description of Artificial Sequence: Synthetic oligonucleotide
  Antisense strand to SEQ ID NO: 161210
aucucuaauggcuguggcc

SEQ ID NO: 161212 - RNA, 19 nt, Artificial Sequence
  Description of Artificial Sequence: Synthetic oligonucleotide
  Sense strand starting at position 1262 of SEQ ID NO: 2075
gggaaagcaggcugguaau

SEQ ID NO: 161213 - RNA, 19 nt, Artificial Sequence
  Description of Artificial Sequence: Synthetic oligonucleotide
  Antisense strand to SEQ ID NO: 161212
auuaccagccugcuuuccc

SEQ ID NO: 161214 - RNA, 19 nt, Artificial Sequence
  Description of Artificial Sequence: Synthetic oligonucleotide
  Sense strand starting at position 1247 of SEQ ID NO: 2075
uaucucuuguucugaggga

SEQ ID NO: 161215 - RNA, 19 nt, Artificial Sequence
  Description of Artificial Sequence: Synthetic oligonucleotide
  Antisense strand to SEQ ID NO: 161214
ucccucagaacaagagaua

SEQ ID NO: 161216 - RNA, 19 nt, Artificial Sequence
  Description of Artificial Sequence: Synthetic oligonucleotide
  Sense strand starting at position 1061 of SEQ ID NO: 2075
aaucacuguugguaagaua

SEQ ID NO: 161217 - RNA, 19 nt, Artificial Sequence
  Description of Artificial Sequence: Synthetic oligonucleotide
  Antisense strand to SEQ ID NO: 161216
uaucuuaccaacagugauu

SEQ ID NO: 161218 - RNA, 19 nt, Artificial Sequence
  Description of Artificial Sequence: Synthetic oligonucleotide
  Sense strand starting at position 1060 of SEQ ID NO: 2075
gaaucacuguugguaagau

SEQ ID NO: 161219 - RNA, 19 nt, Artificial Sequence
  Description of Artificial Sequence: Synthetic oligonucleotide
  Antisense strand to SEQ ID NO: 161218
aucuuaccaacagugauuc

SEQ ID NO: 161220 - RNA, 19 nt, Artificial Sequence
  Description of Artificial Sequence: Synthetic oligonucleotide
  Sense strand starting at position 1059 of SEQ ID NO: 2075
agaaucacuguugguaaga

SEQ ID NO: 161221 - RNA, 19 nt, Artificial Sequence
  Description of Artificial Sequence: Synthetic oligonucleotide
  Antisense strand to SEQ ID NO: 161220
ucuuaccaacagugauucu

SEQ ID NO: 161222 - RNA, 19 nt, Artificial Sequence
  Description of Artificial Sequence: Synthetic oligonucleotide
  Sense strand starting at position 1058 of SEQ ID NO: 2075
aagaaucacuguugguaag

SEQ ID NO: 161223 - RNA, 19 nt, Artificial Sequence
  Description of Artificial Sequence: Synthetic oligonucleotide
  Antisense strand to SEQ ID NO: 161222
cuuaccaacagugauucuu

SEQ ID NO: 161224 - RNA, 19 nt, Artificial Sequence
  Description of Artificial Sequence: Synthetic oligonucleotide
  Sense strand starting at position 933 of SEQ ID NO: 2075
uagugagaaugagacgaau

SEQ ID NO: 161225 - RNA, 19 nt, Artificial Sequence
  Description of Artificial Sequence: Synthetic oligonucleotide
  Antisense strand to SEQ ID NO: 161224
auucgucucauucucacua

SEQ ID NO: 161226 - RNA, 19 nt, Artificial Sequence
  Description of Artificial Sequence: Synthetic oligonucleotide
  Sense strand starting at position 924 of SEQ ID NO: 2075
gcaacugaauagugagaau

SEQ ID NO: 161227 - RNA, 19 nt, Artificial Sequence
  Description of Artificial Sequence: Synthetic oligonucleotide
  Antisense strand to SEQ ID NO: 161226
auucucacuauucaguugc

SEQ ID NO: 161228 - RNA, 19 nt, Artificial Sequence
  Description of Artificial Sequence: Synthetic oligonucleotide
  Sense strand starting at position 591 of SEQ ID NO: 2075
ggugauagaccuuguauca

SEQ ID NO: 161229 - RNA, 19 nt, Artificial Sequence
  Description of Artificial Sequence: Synthetic oligonucleotide
  Antisense strand to SEQ ID NO: 161228
ugauacaaggucuaucacc

SEQ ID NO: 161230 - RNA, 19 nt, Artificial Sequence
  Description of Artificial Sequence: Synthetic oligonucleotide
  Sense strand starting at position 64 of SEQ ID NO: 2076
cugacaacugcaugugaac

SEQ ID NO: 161231 - RNA, 19 nt, Artificial Sequence
  Description of Artificial Sequence: Synthetic oligonucleotide
  Antisense strand to SEQ ID NO: 161230
guucacaugcaguugucag

SEQ ID NO: 161232 - RNA, 19 nt, Artificial Sequence
  Description of Artificial Sequence: Synthetic oligonucleotide
  Sense strand starting at position 236 of SEQ ID NO: 2076
ccucuuuagcugugauagg

SEQ ID NO: 161233 - RNA, 19 nt, Artificial Sequence
  Description of Artificial Sequence: Synthetic oligonucleotide
  Antisense strand to SEQ ID NO: 161232
ccuaucacagcuaaagagg

SEQ ID NO: 161234 - RNA, 19 nt, Artificial Sequence
  Description of Artificial Sequence: Synthetic oligonucleotide
  Sense strand starting at position 511 of SEQ ID NO: 2076
gucucugccggucacauua

SEQ ID NO: 161235 - RNA, 19 nt, Artificial Sequence
  Description of Artificial Sequence: Synthetic oligonucleotide
  Antisense strand to SEQ ID NO: 161234
uaaugugaccggcagagac

SEQ ID NO: 161236 - RNA, 19 nt, Artificial Sequence
  Description of Artificial Sequence: Synthetic oligonucleotide
  Sense strand starting at position 703 of SEQ ID NO: 2076
guaagucacccuugacucu

SEQ ID NO: 161237 - RNA, 19 nt, Artificial Sequence
  Description of Artificial Sequence: Synthetic oligonucleotide
  Antisense strand to SEQ ID NO: 161236
agagucaagggugacuuac

SEQ ID NO: 161238 - RNA, 19 nt, Artificial Sequence
  Description of Artificial Sequence: Synthetic oligonucleotide
  Sense strand starting at position 913 of SEQ ID NO: 2076
ggaucuuuaagagguugga

SEQ ID NO: 161239 - RNA, 19 nt, Artificial Sequence
  Description of Artificial Sequence: Synthetic oligonucleotide
  Antisense strand to SEQ ID NO: 161238
uccaaccucuuaaagaucc

SEQ ID NO: 161240 - RNA, 19 nt, Artificial Sequence
  Description of Artificial Sequence: Synthetic oligonucleotide
  Sense strand starting at position 916 of SEQ ID NO: 2076
ucuuuaagagguuggauca

SEQ ID NO: 161241 - RNA, 19 nt, Artificial Sequence
  Description of Artificial Sequence: Synthetic oligonucleotide
  Antisense strand to SEQ ID NO: 161240
ugauccaaccucuuaaaga

SEQ ID NO: 161242 - RNA, 19 nt, Artificial Sequence
  Description of Artificial Sequence: Synthetic oligonucleotide
  Sense strand starting at position 917 of SEQ ID NO: 2076
cuuuaagagguuggaucau

SEQ ID NO: 161243 - RNA, 19 nt, Artificial Sequence
  Description of Artificial Sequence: Synthetic oligonucleotide
  Antisense strand to SEQ ID NO: 161242
augauccaaccucuuaaag

SEQ ID NO: 161244 - RNA, 19 nt, Artificial Sequence
  Description of Artificial Sequence: Synthetic oligonucleotide
  Sense strand starting at position 923 of SEQ ID NO: 2076
gagguuggaucauucuuau

SEQ ID NO: 161245 - RNA, 19 nt, Artificial Sequence
  Description of Artificial Sequence: Synthetic oligonucleotide
  Antisense strand to SEQ ID NO: 161244
auaagaaugauccaaccuc

SEQ ID NO: 161246 - RNA, 19 nt, Artificial Sequence
  Description of Artificial Sequence: Synthetic oligonucleotide
  Sense strand starting at position 926 of SEQ ID NO: 2076
guuggaucauucuuaucag

SEQ ID NO: 161247 - RNA, 19 nt, Artificial Sequence
  Description of Artificial Sequence: Synthetic oligonucleotide
  Antisense strand to SEQ ID NO: 161246
cugauaagaaugauccaac

SEQ ID NO: 161248 - RNA, 19 nt, Artificial Sequence
  Description of Artificial Sequence: Synthetic oligonucleotide
  Sense strand starting at position 929 of SEQ ID NO: 2076
ggaucauucuuaucaguca

SEQ ID NO: 161249 - RNA, 19 nt, Artificial Sequence
  Description of Artificial Sequence: Synthetic oligonucleotide
  Antisense strand to SEQ ID NO: 161248
ugacugauaagaaugaucc

SEQ ID NO: 161250 - RNA, 19 nt, Artificial Sequence
  Description of Artificial Sequence: Synthetic oligonucleotide
  Sense strand starting at position 1115 of SEQ ID NO: 2076
cggugaagaucaucuaacu

SEQ ID NO: 161251 - RNA, 19 nt, Artificial Sequence
  Description of Artificial Sequence: Synthetic oligonucleotide
  Antisense strand to SEQ ID NO: 161250
aguuagaugaucuucaccg

SEQ ID NO: 161252 - RNA, 19 nt, Artificial Sequence
  Description of Artificial Sequence: Synthetic oligonucleotide
  Sense strand starting at position 1159 of SEQ ID NO: 2076
uagggcagucuuuaacacu

SEQ ID NO: 161253 - RNA, 19 nt, Artificial Sequence
  Description of Artificial Sequence: Synthetic oligonucleotide
  Antisense strand to SEQ ID NO: 161252
aguguuaaagacugcccua

SEQ ID NO: 161254 - RNA, 19 nt, Artificial Sequence
  Description of Artificial Sequence: Synthetic oligonucleotide
  Sense strand starting at position 1223 of SEQ ID NO: 2076
ugagucuagcaagaaguaa

SEQ ID NO: 161255 - RNA, 19 nt, Artificial Sequence
  Description of Artificial Sequence: Synthetic oligonucleotide
  Antisense strand to SEQ ID NO: 161254
uuacuucuugcuagacuca

SEQ ID NO: 161256 - RNA, 19 nt, Artificial Sequence
  Description of Artificial Sequence: Synthetic oligonucleotide
  Sense strand starting at position 1276 of SEQ ID NO: 2076
cgcuuagaccucgauguga

SEQ ID NO: 161257 - RNA, 19 nt, Artificial Sequence
  Description of Artificial Sequence: Synthetic oligonucleotide
  Antisense strand to SEQ ID NO: 161256
ucacaucgaggucuaagcg

SEQ ID NO: 161258 - RNA, 19 nt, Artificial Sequence
  Description of Artificial Sequence: Synthetic oligonucleotide
  Sense strand starting at position 1278 of SEQ ID NO: 2076
cuuagaccucgaugugaaa

SEQ ID NO: 161259 - RNA, 19 nt, Artificial Sequence
  Description of Artificial Sequence: Synthetic oligonucleotide
  Antisense strand to SEQ ID NO: 161258
uuucacaucgaggucuaag

SEQ ID NO: 161260 - RNA, 19 nt, Artificial Sequence
  Description of Artificial Sequence: Synthetic oligonucleotide
  Sense strand starting at position 1334 of SEQ ID NO: 2076
cuccauuugugggagggau

SEQ ID NO: 161261 - RNA, 19 nt, Artificial Sequence
  Description of Artificial Sequence: Synthetic oligonucleotide
  Antisense strand to SEQ ID NO: 161260
aucccucccacaaauggag

SEQ ID NO: 161262 - RNA, 19 nt, Artificial Sequence
  Description of Artificial Sequence: Synthetic oligonucleotide
  Sense strand starting at position 1376 of SEQ ID NO: 2076
acagauuaucagugcuauc

SEQ ID NO: 161263 - RNA, 19 nt, Artificial Sequence
  Description of Artificial Sequence: Synthetic oligonucleotide
  Antisense strand to SEQ ID NO: 161262
gauagcacugauaaucugu

SEQ ID NO: 161264 - RNA, 19 nt, Artificial Sequence
  Description of Artificial Sequence: Synthetic oligonucleotide
  Sense strand starting at position 1399 of SEQ ID NO: 2076
gggccacacucuucgaagu

SEQ ID NO: 161265 - RNA, 19 nt, Artificial Sequence
  Description of Artificial Sequence: Synthetic oligonucleotide
  Antisense strand to SEQ ID NO: 161264
acuucgaagaguguggccc

SEQ ID NO: 161266 - RNA, 19 nt, Artificial Sequence
  Description of Artificial Sequence: Synthetic oligonucleotide
  Sense strand starting at position 1445 of SEQ ID NO: 2076
gauccugccgguuagucau

SEQ ID NO: 161267 - RNA, 19 nt, Artificial Sequence
  Description of Artificial Sequence: Synthetic oligonucleotide
  Antisense strand to SEQ ID NO: 161266
augacuaaccggcaggauc

SEQ ID NO: 161268 - RNA, 19 nt, Artificial Sequence
  Description of Artificial Sequence: Synthetic oligonucleotide
  Sense strand starting at position 1456 of SEQ ID NO: 2076
uuagucauuaggcguugaa

SEQ ID NO: 161269 - RNA, 19 nt, Artificial Sequence
  Description of Artificial Sequence: Synthetic oligonucleotide
  Antisense strand to SEQ ID NO: 161268
uucaacgccuaaugacuaa

SEQ ID NO: 161270 - RNA, 19 nt, Artificial Sequence
  Description of Artificial Sequence: Synthetic oligonucleotide
  Sense strand starting at position 1459 of SEQ ID NO: 2076
gucauuaggcguugaacac

SEQ ID NO: 161271 - RNA, 19 nt, Artificial Sequence
  Description of Artificial Sequence: Synthetic oligonucleotide
  Antisense strand to SEQ ID NO: 161270
guguucaacgccuaaugac

SEQ ID NO: 161272 - RNA, 19 nt, Artificial Sequence
  Description of Artificial Sequence: Synthetic oligonucleotide
  Sense strand starting at position 1478 of SEQ ID NO: 2076
cgagcuauaaugcaaguga

SEQ ID NO: 161273 - RNA, 19 nt, Artificial Sequence
  Description of Artificial Sequence: Synthetic oligonucleotide
  Antisense strand to SEQ ID NO: 161272
ucacuugcauuauagcucg

SEQ ID NO: 161274 - RNA, 19 nt, Artificial Sequence
  Description of Artificial Sequence: Synthetic oligonucleotide
  Sense strand starting at position 1769 of SEQ ID NO: 2076
ugcgacuucugggcugaga

SEQ ID NO: 161275 - RNA, 19 nt, Artificial Sequence
  Description of Artificial Sequence: Synthetic oligonucleotide
  Antisense strand to SEQ ID NO: 161274
ucucagcccagaagucgca

SEQ ID NO: 161276 - RNA, 19 nt, Artificial Sequence
  Description of Artificial Sequence: Synthetic oligonucleotide
  Sense strand starting at position 2011 of SEQ ID NO: 2076
agguuaaacacgugacuac

SEQ ID NO: 161277 - RNA, 19 nt, Artificial Sequence
  Description of Artificial Sequence: Synthetic oligonucleotide
  Antisense strand to SEQ ID NO: 161276
guagucacguguuuaaccu

SEQ ID NO: 161278 - RNA, 19 nt, Artificial Sequence
  Description of Artificial Sequence: Synthetic oligonucleotide
  Sense strand starting at position 2012 of SEQ ID NO: 2076
gguuaaacacgugacuacu

SEQ ID NO: 161279 - RNA, 19 nt, Artificial Sequence
  Description of Artificial Sequence: Synthetic oligonucleotide
  Antisense strand to SEQ ID NO: 161278
aguagucacguguuuaacc

SEQ ID NO: 161280 - RNA, 19 nt, Artificial Sequence
  Description of Artificial Sequence: Synthetic oligonucleotide
  Sense strand starting at position 2090 of SEQ ID NO: 2076
caaacuucuggcugggagu

SEQ ID NO: 161281 - RNA, 19 nt, Artificial Sequence
  Description of Artificial Sequence: Synthetic oligonucleotide
  Antisense strand to SEQ ID NO: 161280
acucccagccagaaguuug

SEQ ID NO: 161282 - RNA, 19 nt, Artificial Sequence
  Description of Artificial Sequence: Synthetic oligonucleotide
  Sense strand starting at position 2427 of SEQ ID NO: 2076
guugccacauuauuaguaa

SEQ ID NO: 161283 - RNA, 19 nt, Artificial Sequence
  Description of Artificial Sequence: Synthetic oligonucleotide
  Antisense strand to SEQ ID NO: 161282
uuacuaauaauguggcaac

SEQ ID NO: 161284 - RNA, 19 nt, Artificial Sequence
  Description of Artificial Sequence: Synthetic oligonucleotide
  Sense strand starting at position 2480 of SEQ ID NO: 2076
uagggaaguuagccaaauu

SEQ ID NO: 161285 - RNA, 19 nt, Artificial Sequence
  Description of Artificial Sequence: Synthetic oligonucleotide
  Antisense strand to SEQ ID NO: 161284
aauuuggcuaacuucccua

SEQ ID NO: 161286 - RNA, 19 nt, Artificial Sequence
  Description of Artificial Sequence: Synthetic oligonucleotide
  Sense strand starting at position 2491 of SEQ ID NO: 2076
gccaaauuaauggguguua

SEQ ID NO: 161287 - RNA, 19 nt, Artificial Sequence
  Description of Artificial Sequence: Synthetic oligonucleotide
  Antisense strand to SEQ ID NO: 161286
uaacacccauuaauuuggc

SEQ ID NO: 161288 - RNA, 19 nt, Artificial Sequence
  Description of Artificial Sequence: Synthetic oligonucleotide
  Sense strand starting at position 2492 of SEQ ID NO: 2076
ccaaauuaauggguguuau

SEQ ID NO: 161289 - RNA, 19 nt, Artificial Sequence
  Description of Artificial Sequence: Synthetic oligonucleotide
  Antisense strand to SEQ ID NO: 161288
auaacacccauuaauuugg

SEQ ID NO: 161290 - RNA, 19 nt, Artificial Sequence
  Description of Artificial Sequence: Synthetic oligonucleotide
  Sense strand starting at position 2493 of SEQ ID NO: 2076
caaauuaauggguguuaug

SEQ ID NO: 161291 - RNA, 19 nt, Artificial Sequence
  Description of Artificial Sequence: Synthetic oligonucleotide
  Antisense strand to SEQ ID NO: 161290
cauaacacccauuaauuug

SEQ ID NO: 161292 - RNA, 19 nt, Artificial Sequence
  Description of Artificial Sequence: Synthetic oligonucleotide
  Sense strand starting at position 2507 of SEQ ID NO: 2076
uuauguggccauuaguaaa

SEQ ID NO: 161293 - RNA, 19 nt, Artificial Sequence
  Description of Artificial Sequence: Synthetic oligonucleotide
  Antisense strand to SEQ ID NO: 161292
uuuacuaauggccacauaa

SEQ ID NO: 161294 - RNA, 19 nt, Artificial Sequence
  Description of Artificial Sequence: Synthetic oligonucleotide
  Sense strand starting at position 2544 of SEQ ID NO: 2076
aacccugacuuguuaacga

SEQ ID NO: 161295 - RNA, 19 nt, Artificial Sequence
  Description of Artificial Sequence: Synthetic oligonucleotide
  Antisense strand to SEQ ID NO: 161294
ucguuaacaagucaggguu

SEQ ID NO: 161296 - RNA, 19 nt, Artificial Sequence
  Description of Artificial Sequence: Synthetic oligonucleotide
  Sense strand starting at position 2551 of SEQ ID NO: 2076
acuuguuaacgauaaagca

SEQ ID NO: 161297 - RNA, 19 nt, Artificial Sequence
  Description of Artificial Sequence: Synthetic oligonucleotide
  Antisense strand to SEQ ID NO: 161296
ugcuuuaucguuaacaagu

SEQ ID NO: 161298 - RNA, 19 nt, Artificial Sequence
  Description of Artificial Sequence: Synthetic oligonucleotide
  Sense strand starting at position 2649 of SEQ ID NO: 2076
gaugauaacccaugggcaa

SEQ ID NO: 161299 - RNA, 19 nt, Artificial Sequence
  Description of Artificial Sequence: Synthetic oligonucleotide
  Antisense strand to SEQ ID NO: 161298
uugcccauggguuaucauc

SEQ ID NO: 161300 - RNA, 19 nt, Artificial Sequence
  Description of Artificial Sequence: Synthetic oligonucleotide
  Sense strand starting at position 2650 of SEQ ID NO: 2076
augauaacccaugggcaaa

SEQ ID NO: 161301 - RNA, 19 nt, Artificial Sequence
  Description of Artificial Sequence: Synthetic oligonucleotide
  Antisense strand to SEQ ID NO: 161300
uuugcccauggguuaucau

SEQ ID NO: 161302 - RNA, 19 nt, Artificial Sequence
  Description of Artificial Sequence: Synthetic oligonucleotide
  Sense strand starting at position 2661 of SEQ ID NO: 2076
ugggcaaaucauuagcuuu

SEQ ID NO: 161303 - RNA, 19 nt, Artificial Sequence
  Description of Artificial Sequence: Synthetic oligonucleotide
  Antisense strand to SEQ ID NO: 161302
aaagcuaaugauuugccca

SEQ ID NO: 161304 - RNA, 19 nt, Artificial Sequence
  Description of Artificial Sequence: Synthetic oligonucleotide
  Sense strand starting at position 2834 of SEQ ID NO: 2076
gucuuuaucugccuaagau

SEQ ID NO: 161305 - RNA, 19 nt, Artificial Sequence
  Description of Artificial Sequence: Synthetic oligonucleotide
  Antisense strand to SEQ ID NO: 161304
aucuuaggcagauaaagac

SEQ ID NO: 161306 - RNA, 19 nt, Artificial Sequence
  Description of Artificial Sequence: Synthetic oligonucleotide
  Sense strand starting at position 3300 of SEQ ID NO: 2076
ccuaguaaucccugaacag

SEQ ID NO: 161307 - RNA, 19 nt, Artificial Sequence
  Description of Artificial Sequence: Synthetic oligonucleotide
  Antisense strand to SEQ ID NO: 161306
cuguucagggauuacuagg

SEQ ID NO: 161308 - RNA, 19 nt, Artificial Sequence
  Description of Artificial Sequence: Synthetic oligonucleotide
  Sense strand starting at position 3395 of SEQ ID NO: 2076
guaaucauacugugauucu

SEQ ID NO: 161309 - RNA, 19 nt, Artificial Sequence
  Description of Artificial Sequence: Synthetic oligonucleotide
  Antisense strand to SEQ ID NO: 161308
agaaucacaguaugauuac

SEQ ID NO: 161310 - RNA, 19 nt, Artificial Sequence
  Description of Artificial Sequence: Synthetic oligonucleotide
  Sense strand starting at position 376 of SEQ ID NO: 2077
ugagcucaggagugaaauc

SEQ ID NO: 161311 - RNA, 19 nt, Artificial Sequence
  Description of Artificial Sequence: Synthetic oligonucleotide
  Antisense strand to SEQ ID NO: 161310
gauuucacuccugagcuca

SEQ ID NO: 161312 - RNA, 19 nt, Artificial Sequence
  Description of Artificial Sequence: Synthetic oligonucleotide
  Sense strand starting at position 666 of SEQ ID NO: 2077
gcaggagcugaauaguaaa

SEQ ID NO: 161313 - RNA, 19 nt, Artificial Sequence
  Description of Artificial Sequence: Synthetic oligonucleotide
  Antisense strand to SEQ ID NO: 161312
uuuacuauucagcuccugc

SEQ ID NO: 161314 - RNA, 19 nt, Artificial Sequence
  Description of Artificial Sequence: Synthetic oligonucleotide
  Sense strand starting at position 899 of SEQ ID NO: 2077
gugaucugauguuuagaag

SEQ ID NO: 161315 - RNA, 19 nt, Artificial Sequence
  Description of Artificial Sequence: Synthetic oligonucleotide
  Antisense strand to SEQ ID NO: 161314
cuucuaaacaucagaucac

SEQ ID NO: 161316 - RNA, 19 nt, Artificial Sequence
  Description of Artificial Sequence: Synthetic oligonucleotide
  Sense strand starting at position 914 of SEQ ID NO: 2077
gaaggauuccuuugguuau

SEQ ID NO: 161317 - RNA, 19 nt, Artificial Sequence
  Description of Artificial Sequence: Synthetic oligonucleotide
  Antisense strand to SEQ ID NO: 161316
auaaccaaaggaauccuuc

SEQ ID NO: 161318 - RNA, 19 nt, Artificial Sequence
  Description of Artificial Sequence: Synthetic oligonucleotide
  Sense strand starting at position 940 of SEQ ID NO: 2077
guaacaggugcugauacaa

SEQ ID NO: 161319 - RNA, 19 nt, Artificial Sequence
  Description of Artificial Sequence: Synthetic oligonucleotide
  Antisense strand to SEQ ID NO: 161318
uuguaucagcaccuguuac

SEQ ID NO: 161320 - RNA, 19 nt, Artificial Sequence
  Description of Artificial Sequence: Synthetic oligonucleotide
  Sense strand starting at position 948 of SEQ ID NO: 2077
ugcugauacaaagguagaa

SEQ ID NO: 161321 - RNA, 19 nt, Artificial Sequence
  Description of Artificial Sequence: Synthetic oligonucleotide
  Antisense strand to SEQ ID NO: 161320
uucuaccuuuguaucagca

SEQ ID NO: 161322 - RNA, 19 nt, Artificial Sequence
  Description of Artificial Sequence: Synthetic oligonucleotide
  Sense strand starting at position 1055 of SEQ ID NO: 2077
guagcaauucuagaccuau

SEQ ID NO: 161323 - RNA, 19 nt, Artificial Sequence
  Description of Artificial Sequence: Synthetic oligonucleotide
  Antisense strand to SEQ ID NO: 161322
auaggucuagaauugcuac

SEQ ID NO: 161324 - RNA, 19 nt, Artificial Sequence
  Description of Artificial Sequence: Synthetic oligonucleotide
  Sense strand starting at position 1092 of SEQ ID NO: 2077
aggauuuauugaggagaug

SEQ ID NO: 161325 - RNA, 19 nt, Artificial Sequence
  Description of Artificial Sequence: Synthetic oligonucleotide
  Antisense strand to SEQ ID NO: 161324
caucuccucaauaaauccu

SEQ ID NO: 161326 - RNA, 19 nt, Artificial Sequence
  Description of Artificial Sequence: Synthetic oligonucleotide
  Sense strand starting at position 1147 of SEQ ID NO: 2077
ggacauuagaagugugauc

SEQ ID NO: 161327 - RNA, 19 nt, Artificial Sequence
  Description of Artificial Sequence: Synthetic oligonucleotide
  Antisense strand to SEQ ID NO: 161326
gaucacacuucuaaugucc

SEQ ID NO: 161328 - RNA, 19 nt, Artificial Sequence
  Description of Artificial Sequence: Synthetic oligonucleotide
  Sense strand starting at position 1149 of SEQ ID NO: 2077
acauuagaagugugaucac

SEQ ID NO: 161329 - RNA, 19 nt, Artificial Sequence
  Description of Artificial Sequence: Synthetic oligonucleotide
  Antisense strand to SEQ ID NO: 161328
gugaucacacuucuaaugu

SEQ ID NO: 161330 - RNA, 19 nt, Artificial Sequence
  Description of Artificial Sequence: Synthetic oligonucleotide
  Sense strand starting at position 1152 of SEQ ID NO: 2077
uuagaagugugaucacuau

SEQ ID NO: 161331 - RNA, 19 nt, Artificial Sequence
  Description of Artificial Sequence: Synthetic oligonucleotide
  Antisense strand to SEQ ID NO: 161330
auagugaucacacuucuaa

SEQ ID NO: 161332 - RNA, 19 nt, Artificial Sequence
  Description of Artificial Sequence: Synthetic oligonucleotide
  Sense strand starting at position 1289 of SEQ ID NO: 2077
ggcugcuaccaagaucaau

SEQ ID NO: 161333 - RNA, 19 nt, Artificial Sequence
  Description of Artificial Sequence: Synthetic oligonucleotide
  Antisense strand to SEQ ID NO: 161332
auugaucuugguagcagcc

SEQ ID NO: 161334 - RNA, 19 nt, Artificial Sequence
  Description of Artificial Sequence: Synthetic oligonucleotide
  Sense strand starting at position 1356 of SEQ ID NO: 2077
gcugcuauuuaguuguuaa

SEQ ID NO: 161335 - RNA, 19 nt, Artificial Sequence
  Description of Artificial Sequence: Synthetic oligonucleotide
  Antisense strand to SEQ ID NO: 161334
uuaacaacuaaauagcagc

SEQ ID NO: 161336 - RNA, 19 nt, Artificial Sequence
  Description of Artificial Sequence: Synthetic oligonucleotide
  Sense strand starting at position 1479 of SEQ ID NO: 2077
ucuacacacucuucggaau

SEQ ID NO: 161337 - RNA, 19 nt, Artificial Sequence
  Description of Artificial Sequence: Synthetic oligonucleotide
  Antisense strand to SEQ ID NO: 161336
auuccgaagaguguguaga

SEQ ID NO: 161338 - RNA, 19 nt, Artificial Sequence
  Description of Artificial Sequence: Synthetic oligonucleotide
  Sense strand starting at position 1480 of SEQ ID NO: 2077
cuacacacucuucggaauu

SEQ ID NO: 161339 - RNA, 19 nt, Artificial Sequence
  Description of Artificial Sequence: Synthetic oligonucleotide
  Antisense strand to SEQ ID NO: 161338
aauuccgaagaguguguag

SEQ ID NO: 161340 - RNA, 19 nt, Artificial Sequence
  Description of Artificial Sequence: Synthetic oligonucleotide
  Sense strand starting at position 1501 of SEQ ID NO: 2077
uguucuaugccagauccau

SEQ ID NO: 161341 - RNA, 19 nt, Artificial Sequence
  Description of Artificial Sequence: Synthetic oligonucleotide
  Antisense strand to SEQ ID NO: 161340
auggaucuggcauagaaca

SEQ ID NO: 161342 - RNA, 19 nt, Artificial Sequence
  Description of Artificial Sequence: Synthetic oligonucleotide
  Sense strand starting at position 1507 of SEQ ID NO: 2077
augccagauccauguuaga

SEQ ID NO: 161343 - RNA, 19 nt, Artificial Sequence
  Description of Artificial Sequence: Synthetic oligonucleotide
  Antisense strand to SEQ ID NO: 161342
ucuaacauggaucuggcau

SEQ ID NO: 161344 - RNA, 19 nt, Artificial Sequence
  Description of Artificial Sequence: Synthetic oligonucleotide
  Sense strand starting at position 1516 of SEQ ID NO: 2077
ccauguuagagucaggaug

SEQ ID NO: 161345 - RNA, 19 nt, Artificial Sequence
  Description of Artificial Sequence: Synthetic oligonucleotide
  Antisense strand to SEQ ID NO: 161344
cauccugacucuaacaugg

SEQ ID NO: 161346 - RNA, 19 nt, Artificial Sequence
  Description of Artificial Sequence: Synthetic oligonucleotide
  Sense strand starting at position 1682 of SEQ ID NO: 2077
ugugcuuuaacucugcgua

SEQ ID NO: 161347 - RNA, 19 nt, Artificial Sequence
  Description of Artificial Sequence: Synthetic oligonucleotide
  Antisense strand to SEQ ID NO: 161346
uacgcagaguuaaagcaca

SEQ ID NO: 161348 - RNA, 19 nt, Artificial Sequence
  Description of Artificial Sequence: Synthetic oligonucleotide
  Sense strand starting at position 1687 of SEQ ID NO: 2077
uuuaacucugcguagaaac

SEQ ID NO: 161349 - RNA, 19 nt, Artificial Sequence
  Description of Artificial Sequence: Synthetic oligonucleotide
  Antisense strand to SEQ ID NO: 161348
guuucuacgcagaguuaaa

SEQ ID NO: 161350 - RNA, 19 nt, Artificial Sequence
  Description of Artificial Sequence: Synthetic oligonucleotide
  Sense strand starting at position 2056 of SEQ ID NO: 2077
ggaagaaccaaucggcuuu

SEQ ID NO: 161351 - RNA, 19 nt, Artificial Sequence
  Description of Artificial Sequence: Synthetic oligonucleotide
  Antisense strand to SEQ ID NO: 161350
aaagccgauugguucuucc

SEQ ID NO: 161352 - RNA, 19 nt, Artificial Sequence
  Description of Artificial Sequence: Synthetic oligonucleotide
  Sense strand starting at position 2109 of SEQ ID NO: 2077
cuuguuauugggcauaucu

SEQ ID NO: 161353 - RNA, 19 nt, Artificial Sequence
  Description of Artificial Sequence: Synthetic oligonucleotide
  Antisense strand to SEQ ID NO: 161352
agauaugcccaauaacaag

SEQ ID NO: 161354 - RNA, 19 nt, Artificial Sequence
  Description of Artificial Sequence: Synthetic oligonucleotide
  Sense strand starting at position 2111 of SEQ ID NO: 2077
uguuauugggcauaucuuu

SEQ ID NO: 161355 - RNA, 19 nt, Artificial Sequence
  Description of Artificial Sequence: Synthetic oligonucleotide
  Antisense strand to SEQ ID NO: 161354
aaagauaugcccaauaaca

SEQ ID NO: 161356 - RNA, 19 nt, Artificial Sequence
  Description of Artificial Sequence: Synthetic oligonucleotide
  Sense strand starting at position 2125 of SEQ ID NO: 2077
ucuuucugacgucaugaga

SEQ ID NO: 161357 - RNA, 19 nt, Artificial Sequence
  Description of Artificial Sequence: Synthetic oligonucleotide
  Antisense strand to SEQ ID NO: 161356
ucucaugacgucagaaaga

SEQ ID NO: 161358 - RNA, 19 nt, Artificial Sequence
  Description of Artificial Sequence: Synthetic oligonucleotide
  Sense strand starting at position 2535 of SEQ ID NO: 2077
cgggcauucccagggagaa

SEQ ID NO: 161359 - RNA, 19 nt, Artificial Sequence
  Description of Artificial Sequence: Synthetic oligonucleotide
  Antisense strand to SEQ ID NO: 161358
uucucccugggaaugcccg

SEQ ID NO: 161360 - RNA, 19 nt, Artificial Sequence
  Description of Artificial Sequence: Synthetic oligonucleotide
  Sense strand starting at position 2536 of SEQ ID NO: 2077
gggcauucccagggagaaa

SEQ ID NO: 161361 - RNA, 19 nt, Artificial Sequence
  Description of Artificial Sequence: Synthetic oligonucleotide
  Antisense strand to SEQ ID NO: 161360
uuucucccugggaaugccc

SEQ ID NO: 161362 - RNA, 19 nt, Artificial Sequence
  Description of Artificial Sequence: Synthetic oligonucleotide
  Sense strand starting at position 2704 of SEQ ID NO: 2077
cacagucuuguugagaaau

SEQ ID NO: 161363 - RNA, 19 nt, Artificial Sequence
  Description of Artificial Sequence: Synthetic oligonucleotide
  Antisense strand to SEQ ID NO: 161362
auuucucaacaagacugug

SEQ ID NO: 161364 - RNA, 19 nt, Artificial Sequence
  Description of Artificial Sequence: Synthetic oligonucleotide
  Sense strand starting at position 2715 of SEQ ID NO: 2077
ugagaaauuugagacucau

SEQ ID NO: 161365 - RNA, 19 nt, Artificial Sequence
  Description of Artificial Sequence: Synthetic oligonucleotide
  Antisense strand to SEQ ID NO: 161364
augagucucaaauuucuca

SEQ ID NO: 161366 - RNA, 19 nt, Artificial Sequence
  Description of Artificial Sequence: Synthetic oligonucleotide
  Sense strand starting at position 2724 of SEQ ID NO: 2077
ugagacucaugcccaugaa

SEQ ID NO: 161367 - RNA, 19 nt, Artificial Sequence
  Description of Artificial Sequence: Synthetic oligonucleotide
  Antisense strand to SEQ ID NO: 161366
uucaugggcaugagucuca

SEQ ID NO: 161368 - RNA, 19 nt, Artificial Sequence
  Description of Artificial Sequence: Synthetic oligonucleotide
  Sense strand starting at position 2909 of SEQ ID NO: 2077
cuaugagugccugaaauaa

SEQ ID NO: 161369 - RNA, 19 nt, Artificial Sequence
  Description of Artificial Sequence: Synthetic oligonucleotide
  Antisense strand to SEQ ID NO: 161368
uuauuucaggcacucauag

SEQ ID NO: 161370 - RNA, 19 nt, Artificial Sequence
  Description of Artificial Sequence: Synthetic oligonucleotide
  Sense strand starting at position 2980 of SEQ ID NO: 2077
guuguaauuaauuagguga

SEQ ID NO: 161371 - RNA, 19 nt, Artificial Sequence
  Description of Artificial Sequence: Synthetic oligonucleotide
  Antisense strand to SEQ ID NO: 161370
ucaccuaauuaauuacaac

SEQ ID NO: 161372 - RNA, 19 nt, Artificial Sequence
  Description of Artificial Sequence: Synthetic oligonucleotide
  Sense strand starting at position 2983 of SEQ ID NO: 2077
guaauuaauuaggugaaga

SEQ ID NO: 161373 - RNA, 19 nt, Artificial Sequence
  Description of Artificial Sequence: Synthetic oligonucleotide
  Antisense strand to SEQ ID NO: 161372
ucuucaccuaauuaauuac

SEQ ID NO: 161374 - RNA, 19 nt, Artificial Sequence
  Description of Artificial Sequence: Synthetic oligonucleotide
  Sense strand starting at position 3315 of SEQ ID NO: 2077
ugggauaugcaguaauccu

SEQ ID NO: 161375 - RNA, 19 nt, Artificial Sequence
  Description of Artificial Sequence: Synthetic oligonucleotide
  Antisense strand to SEQ ID NO: 161374
aggauuacugcauauccca

SEQ ID NO: 161376 - RNA, 19 nt, Artificial Sequence
  Description of Artificial Sequence: Synthetic oligonucleotide
  Sense strand starting at position 3324 of SEQ ID NO: 2077
caguaauccuggucagaga

SEQ ID NO: 161377 - RNA, 19 nt, Artificial Sequence
  Description of Artificial Sequence: Synthetic oligonucleotide
  Antisense strand to SEQ ID NO: 161376
ucucugaccaggauuacug

SEQ ID NO: 161378 - RNA, 19 nt, Artificial Sequence
  Description of Artificial Sequence: Synthetic oligonucleotide
  Sense strand starting at position 3337 of SEQ ID NO: 2077
cagagaugucagugaggac

SEQ ID NO: 161379 - RNA, 19 nt, Artificial Sequence
  Description of Artificial Sequence: Synthetic oligonucleotide
  Antisense strand to SEQ ID NO: 161378
guccucacugacaucucug

SEQ ID NO: 161380 - RNA, 19 nt, Artificial Sequence
  Description of Artificial Sequence: Synthetic oligonucleotide
  Sense strand starting at position 3344 of SEQ ID NO: 2077
gucagugaggacugagaua

SEQ ID NO: 161381 - RNA, 19 nt, Artificial Sequence
  Description of Artificial Sequence: Synthetic oligonucleotide
  Antisense strand to SEQ ID NO: 161380
uaucucaguccucacugac

SEQ ID NO: 161382 - RNA, 19 nt, Artificial Sequence
  Description of Artificial Sequence: Synthetic oligonucleotide
  Sense strand starting at position 3355 of SEQ ID NO: 2077
cugagauauggguggaacu

SEQ ID NO: 161383 - RNA, 19 nt, Artificial Sequence
  Description of Artificial Sequence: Synthetic oligonucleotide
  Antisense strand to SEQ ID NO: 161382
aguuccacccauaucucag

SEQ ID NO: 161384 - RNA, 19 nt, Artificial Sequence
  Description of Artificial Sequence: Synthetic oligonucleotide
  Sense strand starting at position 3487 of SEQ ID NO: 2077
gcuuauguaguugaauaga

SEQ ID NO: 161385 - RNA, 19 nt, Artificial Sequence
  Description of Artificial Sequence: Synthetic oligonucleotide
  Antisense strand to SEQ ID NO: 161384
ucuauucaacuacauaagc

SEQ ID NO: 161386 - RNA, 19 nt, Artificial Sequence
  Description of Artificial Sequence: Synthetic oligonucleotide
  Sense strand starting at position 3495 of SEQ ID NO: 2077
aguugaauagaugguggua

SEQ ID NO: 161387 - RNA, 19 nt, Artificial Sequence
  Description of Artificial Sequence: Synthetic oligonucleotide
  Antisense strand to SEQ ID NO: 161386
uaccaccaucuauucaacu

SEQ ID NO: 161388 - RNA, 19 nt, Artificial Sequence
  Description of Artificial Sequence: Synthetic oligonucleotide
  Sense strand starting at position 3961 of SEQ ID NO: 2077
cagcuuugugcucagaaga

SEQ ID NO: 161389 - RNA, 19 nt, Artificial Sequence
  Description of Artificial Sequence: Synthetic oligonucleotide
  Antisense strand to SEQ ID NO: 161388
ucuucugagcacaaagcug

SEQ ID NO: 161390 - RNA, 19 nt, Artificial Sequence
  Description of Artificial Sequence: Synthetic oligonucleotide
  Sense strand starting at position 3701 of SEQ ID NO: 2078
ggcaaaugcaugggauaac

SEQ ID NO: 161391 - RNA, 19 nt, Artificial Sequence
  Description of Artificial Sequence: Synthetic oligonucleotide
  Antisense strand to SEQ ID NO: 161390
guuaucccaugcauuugcc

SEQ ID NO: 161392 - RNA, 19 nt, Artificial Sequence
  Description of Artificial Sequence: Synthetic oligonucleotide
  Sense strand starting at position 3700 of SEQ ID NO: 2078
uggcaaaugcaugggauaa

SEQ ID NO: 161393 - RNA, 19 nt, Artificial Sequence
  Description of Artificial Sequence: Synthetic oligonucleotide
  Antisense strand to SEQ ID NO: 161392
uuaucccaugcauuugcca

SEQ ID NO: 161394 - RNA, 19 nt, Artificial Sequence
  Description of Artificial Sequence: Synthetic oligonucleotide
  Sense strand starting at position 3699 of SEQ ID NO: 2078
cuggcaaaugcaugggaua

SEQ ID NO: 161395 - RNA, 19 nt, Artificial Sequence
  Description of Artificial Sequence: Synthetic oligonucleotide
  Antisense strand to SEQ ID NO: 161394
uaucccaugcauuugccag

SEQ ID NO: 161396 - RNA, 19 nt, Artificial Sequence
  Description of Artificial Sequence: Synthetic oligonucleotide
  Sense strand starting at position 3140 of SEQ ID NO: 2078
cuaccuuuccauuguguca

SEQ ID NO: 161397 - RNA, 19 nt, Artificial Sequence
  Description of Artificial Sequence: Synthetic oligonucleotide
  Antisense strand to SEQ ID NO: 161396
ugacacaauggaaagguag

SEQ ID NO: 161398 - RNA, 19 nt, Artificial Sequence
  Description of Artificial Sequence: Synthetic oligonucleotide
  Sense strand starting at position 3066 of SEQ ID NO: 2078
uguccuucccuggauaaca

SEQ ID NO: 161399 - RNA, 19 nt, Artificial Sequence
  Description of Artificial Sequence: Synthetic oligonucleotide
  Antisense strand to SEQ ID NO: 161398
uguuauccagggaaggaca

SEQ ID NO: 161400 - RNA, 19 nt, Artificial Sequence
  Description of Artificial Sequence: Synthetic oligonucleotide
  Sense strand starting at position 3063 of SEQ ID NO: 2078
acauguccuucccuggaua

SEQ ID NO: 161401 - RNA, 19 nt, Artificial Sequence
  Description of Artificial Sequence: Synthetic oligonucleotide
  Antisense strand to SEQ ID NO: 161400
uauccagggaaggacaugu

SEQ ID NO: 161402 - RNA, 19 nt, Artificial Sequence
  Description of Artificial Sequence: Synthetic oligonucleotide
  Sense strand starting at position 3017 of SEQ ID NO: 2078
auaauugucuaugugugca

SEQ ID NO: 161403 - RNA, 19 nt, Artificial Sequence
  Description of Artificial Sequence: Synthetic oligonucleotide
  Antisense strand to SEQ ID NO: 161402
ugcacacauagacaauuau

SEQ ID NO: 161404 - RNA, 19 nt, Artificial Sequence
  Description of Artificial Sequence: Synthetic oligonucleotide
  Sense strand starting at position 2919 of SEQ ID NO: 2078
aggauaaauuacucagccu

SEQ ID NO: 161405 - RNA, 19 nt, Artificial Sequence
  Description of Artificial Sequence: Synthetic oligonucleotide
  Antisense strand to SEQ ID NO: 161404
aggcugaguaauuuauccu

SEQ ID NO: 161406 - RNA, 19 nt, Artificial Sequence
  Description of Artificial Sequence: Synthetic oligonucleotide
  Sense strand starting at position 2908 of SEQ ID NO: 2078
guuggugaccaaggauaaa

SEQ ID NO: 161407 - RNA, 19 nt, Artificial Sequence
  Description of Artificial Sequence: Synthetic oligonucleotide
  Antisense strand to SEQ ID NO: 161406
uuuauccuuggucaccaac

SEQ ID NO: 161408 - RNA, 19 nt, Artificial Sequence
  Description of Artificial Sequence: Synthetic oligonucleotide
  Sense strand starting at position 2904 of SEQ ID NO: 2078
uagaguuggugaccaagga

SEQ ID NO: 161409 - RNA, 19 nt, Artificial Sequence
  Description of Artificial Sequence: Synthetic oligonucleotide
  Antisense strand to SEQ ID NO: 161408
uccuuggucaccaacucua

SEQ ID NO: 161410 - RNA, 19 nt, Artificial Sequence
  Description of Artificial Sequence: Synthetic oligonucleotide
  Sense strand starting at position 2817 of SEQ ID NO: 2078
gagaguuacuguucaggug

SEQ ID NO: 161411 - RNA, 19 nt, Artificial Sequence
  Description of Artificial Sequence: Synthetic oligonucleotide
  Antisense strand to SEQ ID NO: 161410
caccugaacaguaacucuc

SEQ ID NO: 161412 - RNA, 19 nt, Artificial Sequence
  Description of Artificial Sequence: Synthetic oligonucleotide
  Sense strand starting at position 2804 of SEQ ID NO: 2078
cauccauuucguggagagu

SEQ ID NO: 161413 - RNA, 19 nt, Artificial Sequence
  Description of Artificial Sequence: Synthetic oligonucleotide
  Antisense strand to SEQ ID NO: 161412
acucuccacgaaauggaug

SEQ ID NO: 161414 - RNA, 19 nt, Artificial Sequence
  Description of Artificial Sequence: Synthetic oligonucleotide
  Sense strand starting at position 2656 of SEQ ID NO: 2078
gaguuuaggcuugauagca

SEQ ID NO: 161415 - RNA, 19 nt, Artificial Sequence
  Description of Artificial Sequence: Synthetic oligonucleotide
  Antisense strand to SEQ ID NO: 161414
ugcuaucaagccuaaacuc

SEQ ID NO: 161416 - RNA, 19 nt, Artificial Sequence
  Description of Artificial Sequence: Synthetic oligonucleotide
  Sense strand starting at position 2655 of SEQ ID NO: 2078
ggaguuuaggcuugauagc

SEQ ID NO: 161417 - RNA, 19 nt, Artificial Sequence
  Description of Artificial Sequence: Synthetic oligonucleotide
  Antisense strand to SEQ ID NO: 161416
gcuaucaagccuaaacucc

SEQ ID NO: 161418 - RNA, 19 nt, Artificial Sequence
  Description of Artificial Sequence: Synthetic oligonucleotide
  Sense strand starting at position 2652 of SEQ ID NO: 2078
gcuggaguuuaggcuugau

SEQ ID NO: 161419 - RNA, 19 nt, Artificial Sequence
  Description of Artificial Sequence: Synthetic oligonucleotide
  Antisense strand to SEQ ID NO: 161418
aucaagccuaaacuccagc

SEQ ID NO: 161420 - RNA, 19 nt, Artificial Sequence
  Description of Artificial Sequence: Synthetic oligonucleotide
  Sense strand starting at position 2617 of SEQ ID NO: 2078
ugaguuaauuucgugccuu

SEQ ID NO: 161421 - RNA, 19 nt, Artificial Sequence
  Description of Artificial Sequence: Synthetic oligonucleotide
  Antisense strand to SEQ ID NO: 161420
aaggcacgaaauuaacuca

SEQ ID NO: 161422 - RNA, 19 nt, Artificial Sequence
  Description of Artificial Sequence: Synthetic oligonucleotide
  Sense strand starting at position 2597 of SEQ ID NO: 2078
guguaucucuauguguaaa

SEQ ID NO: 161423 - RNA, 19 nt, Artificial Sequence
  Description of Artificial Sequence: Synthetic oligonucleotide
  Antisense strand to SEQ ID NO: 161422
uuuacacauagagauacac

SEQ ID NO: 161424 - RNA, 19 nt, Artificial Sequence
  Description of Artificial Sequence: Synthetic oligonucleotide
  Sense strand starting at position 2230 of SEQ ID NO: 2078
gccguccugucuccaauuu

SEQ ID NO: 161425 - RNA, 19 nt, Artificial Sequence
  Description of Artificial Sequence: Synthetic oligonucleotide
  Antisense strand to SEQ ID NO: 161424
aaauuggagacaggacggc

SEQ ID NO: 161426 - RNA, 19 nt, Artificial Sequence
  Description of Artificial Sequence: Synthetic oligonucleotide
  Sense strand starting at position 2193 of SEQ ID NO: 2078
gugccuucgguuguauagu

SEQ ID NO: 161427 - RNA, 19 nt, Artificial Sequence
  Description of Artificial Sequence: Synthetic oligonucleotide
  Antisense strand to SEQ ID NO: 161426
acuauacaaccgaaggcac

SEQ ID NO: 161428 - RNA, 19 nt, Artificial Sequence
  Description of Artificial Sequence: Synthetic oligonucleotide
  Sense strand starting at position 1880 of SEQ ID NO: 2078
ugacauccugcguaggaua

SEQ ID NO: 161429 - RNA, 19 nt, Artificial Sequence
  Description of Artificial Sequence: Synthetic oligonucleotide
  Antisense strand to SEQ ID NO: 161428
uauccuacgcaggauguca

SEQ ID NO: 161430 - RNA, 19 nt, Artificial Sequence
  Description of Artificial Sequence: Synthetic oligonucleotide
  Sense strand starting at position 1879 of SEQ ID NO: 2078
cugacauccugcguaggau

SEQ ID NO: 161431 - RNA, 19 nt, Artificial Sequence
  Description of Artificial Sequence: Synthetic oligonucleotide
  Antisense strand to SEQ ID NO: 161430
auccuacgcaggaugucag

SEQ ID NO: 161432 - RNA, 19 nt, Artificial Sequence
  Description of Artificial Sequence: Synthetic oligonucleotide
  Sense strand starting at position 1851 of SEQ ID NO: 2078
cccguauucugacccgaac

SEQ ID NO: 161433 - RNA, 19 nt, Artificial Sequence
  Description of Artificial Sequence: Synthetic oligonucleotide
  Antisense strand to SEQ ID NO: 161432
guucgggucagaauacggg

SEQ ID NO: 161434 - RNA, 19 nt, Artificial Sequence
  Description of Artificial Sequence: Synthetic oligonucleotide
  Sense strand starting at position 1565 of SEQ ID NO: 2078
cguuacgggucuucuaaag

SEQ ID NO: 161435 - RNA, 19 nt, Artificial Sequence
  Description of Artificial Sequence: Synthetic oligonucleotide
  Antisense strand to SEQ ID NO: 161434
cuuuagaagacccguaacg

SEQ ID NO: 161436 - RNA, 19 nt, Artificial Sequence
  Description of Artificial Sequence: Synthetic oligonucleotide
  Sense strand starting at position 1517 of SEQ ID NO: 2078
acgcgaggucuggugcuua

SEQ ID NO: 161437 - RNA, 19 nt, Artificial Sequence
  Description of Artificial Sequence: Synthetic oligonucleotide
  Antisense strand to SEQ ID NO: 161436
uaagcaccagaccucgcgu

SEQ ID NO: 161438 - RNA, 19 nt, Artificial Sequence
  Description of Artificial Sequence: Synthetic oligonucleotide
  Sense strand starting at position 1497 of SEQ ID NO: 2078
gucucaccuuuguuuacua

SEQ ID NO: 161439 - RNA, 19 nt, Artificial Sequence
  Description of Artificial Sequence: Synthetic oligonucleotide
  Antisense strand to SEQ ID NO: 161438
uaguaaacaaaggugagac

SEQ ID NO: 161440 - RNA, 19 nt, Artificial Sequence
  Description of Artificial Sequence: Synthetic oligonucleotide
  Sense strand starting at position 1311 of SEQ ID NO: 2078
gaucgcucagguuaacaca

SEQ ID NO: 161441 - RNA, 19 nt, Artificial Sequence
  Description of Artificial Sequence: Synthetic oligonucleotide
  Antisense strand to SEQ ID NO: 161440
uguguuaaccugagcgauc

SEQ ID NO: 161442 - RNA, 19 nt, Artificial Sequence
  Description of Artificial Sequence: Synthetic oligonucleotide
  Sense strand starting at position 1176 of SEQ ID NO: 2078
ggauacaauucuuugcaug

SEQ ID NO: 161443 - RNA, 19 nt, Artificial Sequence
  Description of Artificial Sequence: Synthetic oligonucleotide
  Antisense strand to SEQ ID NO: 161442
caugcaaagaauuguaucc

SEQ ID NO: 161444 - RNA, 19 nt, Artificial Sequence
  Description of Artificial Sequence: Synthetic oligonucleotide
  Sense strand starting at position 1175 of SEQ ID NO: 2078
uggauacaauucuuugcau

SEQ ID NO: 161445 - RNA, 19 nt, Artificial Sequence
  Description of Artificial Sequence: Synthetic oligonucleotide
  Antisense strand to SEQ ID NO: 161444
augcaaagaauuguaucca

SEQ ID NO: 161446 - RNA, 19 nt, Artificial Sequence
  Description of Artificial Sequence: Synthetic oligonucleotide
  Sense strand starting at position 1102 of SEQ ID NO: 2078
gcccaaauaccauggucaa

SEQ ID NO: 161447 - RNA, 19 nt, Artificial Sequence
  Description of Artificial Sequence: Synthetic oligonucleotide
  Antisense strand to SEQ ID NO: 161446
uugaccaugguauuugggc

SEQ ID NO: 161448 - RNA, 19 nt, Artificial Sequence
  Description of Artificial Sequence: Synthetic oligonucleotide
  Sense strand starting at position 995 of SEQ ID NO: 2078
accucuugacaugguuuaa

SEQ ID NO: 161449 - RNA, 19 nt, Artificial Sequence
  Description of Artificial Sequence: Synthetic oligonucleotide
  Antisense strand to SEQ ID NO: 161448
uuaaaccaugucaagaggu

SEQ ID NO: 161450 - RNA, 19 nt, Artificial Sequence
  Description of Artificial Sequence: Synthetic oligonucleotide
  Sense strand starting at position 854 of SEQ ID NO: 2078
ucaguuguguuaucacacu

SEQ ID NO: 161451 - RNA, 19 nt, Artificial Sequence
  Description of Artificial Sequence: Synthetic oligonucleotide
  Antisense strand to SEQ ID NO: 161450
agugugauaacacaacuga

SEQ ID NO: 161452 - RNA, 19 nt, Artificial Sequence
  Description of Artificial Sequence: Synthetic oligonucleotide
  Sense strand starting at position 819 of SEQ ID NO: 2078
gguuaagaauuauuaucac

SEQ ID NO: 161453 - RNA, 19 nt, Artificial Sequence
  Description of Artificial Sequence: Synthetic oligonucleotide
  Antisense strand to SEQ ID NO: 161452
gugauaauaauucuuaacc

SEQ ID NO: 161454 - RNA, 19 nt, Artificial Sequence
  Description of Artificial Sequence: Synthetic oligonucleotide
  Sense strand starting at position 706 of SEQ ID NO: 2078
agcaguaauuucuaaugac

SEQ ID NO: 161455 - RNA, 19 nt, Artificial Sequence
  Description of Artificial Sequence: Synthetic oligonucleotide
  Antisense strand to SEQ ID NO: 161454
gucauuagaaauuacugcu

SEQ ID NO: 161456 - RNA, 19 nt, Artificial Sequence
  Description of Artificial Sequence: Synthetic oligonucleotide
  Sense strand starting at position 668 of SEQ ID NO: 2078
aucuauuaagagugaaagu

SEQ ID NO: 161457 - RNA, 19 nt, Artificial Sequence
  Description of Artificial Sequence: Synthetic oligonucleotide
  Antisense strand to SEQ ID NO: 161456
acuuucacucuuaauagau

SEQ ID NO: 161458 - RNA, 19 nt, Artificial Sequence
  Description of Artificial Sequence: Synthetic oligonucleotide
  Sense strand starting at position 600 of SEQ ID NO: 2078
ggaacuguauaagcuaaua

SEQ ID NO: 161459 - RNA, 19 nt, Artificial Sequence
  Description of Artificial Sequence: Synthetic oligonucleotide
  Antisense strand to SEQ ID NO: 161458
uauuagcuuauacaguucc

SEQ ID NO: 161460 - RNA, 19 nt, Artificial Sequence
  Description of Artificial Sequence: Synthetic oligonucleotide
  Sense strand starting at position 597 of SEQ ID NO: 2078
auuggaacuguauaagcua

SEQ ID NO: 161461 - RNA, 19 nt, Artificial Sequence
  Description of Artificial Sequence: Synthetic oligonucleotide
  Antisense strand to SEQ ID NO: 161460
uagcuuauacaguuccaau

SEQ ID NO: 161462 - RNA, 19 nt, Artificial Sequence
  Description of Artificial Sequence: Synthetic oligonucleotide
  Sense strand starting at position 385 of SEQ ID NO: 2078
gcgcaacauuaagcaagau

SEQ ID NO: 161463 - RNA, 19 nt, Artificial Sequence
  Description of Artificial Sequence: Synthetic oligonucleotide
  Antisense strand to SEQ ID NO: 161462
aucuugcuuaauguugcgc

SEQ ID NO: 161464 - RNA, 19 nt, Artificial Sequence
  Description of Artificial Sequence: Synthetic oligonucleotide
  Sense strand starting at position 360 of SEQ ID NO: 2078
guggccagguguucaauau

SEQ ID NO: 161465 - RNA, 19 nt, Artificial Sequence
  Description of Artificial Sequence: Synthetic oligonucleotide
  Antisense strand to SEQ ID NO: 161464
auauugaacaccuggccac

SEQ ID NO: 161466 - RNA, 19 nt, Artificial Sequence
  Description of Artificial Sequence: Synthetic oligonucleotide
  Sense strand starting at position 334 of SEQ ID NO: 2078
gaugccaaagcggaauaau

SEQ ID NO: 161467 - RNA, 19 nt, Artificial Sequence
  Description of Artificial Sequence: Synthetic oligonucleotide
  Antisense strand to SEQ ID NO: 161466
auuauuccgcuuuggcauc

SEQ ID NO: 161468 - RNA, 19 nt, Artificial Sequence
  Description of Artificial Sequence: Synthetic oligonucleotide
  Sense strand starting at position 71 of SEQ ID NO: 2078
uagagaccauccucguuaa

SEQ ID NO: 161469 - RNA, 19 nt, Artificial Sequence
  Description of Artificial Sequence: Synthetic oligonucleotide
  Antisense strand to SEQ ID NO: 161468
uuaacgaggauggucucua

SEQ ID NO: 161470 - RNA, 19 nt, Artificial Sequence
  Description of Artificial Sequence: Synthetic oligonucleotide
  Sense strand starting at position 3886 of SEQ ID NO: 2079
guggcugagcgagacuaua

SEQ ID NO: 161471 - RNA, 19 nt, Artificial Sequence
  Description of Artificial Sequence: Synthetic oligonucleotide
  Antisense strand to SEQ ID NO: 161470
uauagucucgcucagccac

SEQ ID NO: 161472 - RNA, 19 nt, Artificial Sequence
  Description of Artificial Sequence: Synthetic oligonucleotide
  Sense strand starting at position 3557 of SEQ ID NO: 2079
uauguuuguguuuaagucu

SEQ ID NO: 161473 - RNA, 19 nt, Artificial Sequence
  Description of Artificial Sequence: Synthetic oligonucleotide
  Antisense strand to SEQ ID NO: 161472
agacuuaaacacaaacaua

SEQ ID NO: 161474 - RNA, 19 nt, Artificial Sequence
  Description of Artificial Sequence: Synthetic oligonucleotide
  Sense strand starting at position 3534 of SEQ ID NO: 2079
ccagaucugguguaggcau

SEQ ID NO: 161475 - RNA, 19 nt, Artificial Sequence
  Description of Artificial Sequence: Synthetic oligonucleotide
  Antisense strand to SEQ ID NO: 161474
augccuacaccagaucugg

SEQ ID NO: 161476 - RNA, 19 nt, Artificial Sequence
  Description of Artificial Sequence: Synthetic oligonucleotide
  Sense strand starting at position 3467 of SEQ ID NO: 2079
uguuauuacccaugaagac

SEQ ID NO: 161477 - RNA, 19 nt, Artificial Sequence
  Description of Artificial Sequence: Synthetic oligonucleotide
  Antisense strand to SEQ ID NO: 161476
gucuucauggguaauaaca

SEQ ID NO: 161478 - RNA, 19 nt, Artificial Sequence
  Description of Artificial Sequence: Synthetic oligonucleotide
  Sense strand starting at position 3464 of SEQ ID NO: 2079
gcauguuauuacccaugaa

SEQ ID NO: 161479 - RNA, 19 nt, Artificial Sequence
  Description of Artificial Sequence: Synthetic oligonucleotide
  Antisense strand to SEQ ID NO: 161478
uucauggguaauaacaugc

SEQ ID NO: 161480 - RNA, 19 nt, Artificial Sequence
  Description of Artificial Sequence: Synthetic oligonucleotide
  Sense strand starting at position 3249 of SEQ ID NO: 2079
ucccaaaucccuugcgauu

SEQ ID NO: 161481 - RNA, 19 nt, Artificial Sequence
  Description of Artificial Sequence: Synthetic oligonucleotide
  Antisense strand to SEQ ID NO: 161480
aaucgcaagggauuuggga

SEQ ID NO: 161482 - RNA, 19 nt, Artificial Sequence
  Description of Artificial Sequence: Synthetic oligonucleotide
  Sense strand starting at position 3056 of SEQ ID NO: 2079
uagguauucuaaguauugu

SEQ ID NO: 161483 - RNA, 19 nt, Artificial Sequence
  Description of Artificial Sequence: Synthetic oligonucleotide
  Antisense strand to SEQ ID NO: 161482
acaauacuuagaauaccua

SEQ ID NO: 161484 - RNA, 19 nt, Artificial Sequence
  Description of Artificial Sequence: Synthetic oligonucleotide
  Sense strand starting at position 3047 of SEQ ID NO: 2079
aagguauucuagguauucu

SEQ ID NO: 161485 - RNA, 19 nt, Artificial Sequence
  Description of Artificial Sequence: Synthetic oligonucleotide
  Antisense strand to SEQ ID NO: 161484
agaauaccuagaauaccuu

SEQ ID NO: 161486 - RNA, 19 nt, Artificial Sequence
  Description of Artificial Sequence: Synthetic oligonucleotide
  Sense strand starting at position 2936 of SEQ ID NO: 2079
cuauguuacuaguuuauga

SEQ ID NO: 161487 - RNA, 19 nt, Artificial Sequence
  Description of Artificial Sequence: Synthetic oligonucleotide
  Antisense strand to SEQ ID NO: 161486
ucauaaacuaguaacauag

SEQ ID NO: 161488 - RNA, 19 nt, Artificial Sequence
  Description of Artificial Sequence: Synthetic oligonucleotide
  Sense strand starting at position 2927 of SEQ ID NO: 2079
ugguaagaacuauguuacu

SEQ ID NO: 161489 - RNA, 19 nt, Artificial Sequence
  Description of Artificial Sequence: Synthetic oligonucleotide
  Antisense strand to SEQ ID NO: 161488
aguaacauaguucuuacca

SEQ ID NO: 161490 - RNA, 19 nt, Artificial Sequence
  Description of Artificial Sequence: Synthetic oligonucleotide
  Sense strand starting at position 2921 of SEQ ID NO: 2079
ugauaaugguaagaacuau

SEQ ID NO: 161491 - RNA, 19 nt, Artificial Sequence
  Description of Artificial Sequence: Synthetic oligonucleotide
  Antisense strand to SEQ ID NO: 161490
auaguucuuaccauuauca

SEQ ID NO: 161492 - RNA, 19 nt, Artificial Sequence
  Description of Artificial Sequence: Synthetic oligonucleotide
  Sense strand starting at position 2918 of SEQ ID NO: 2079
acuugauaaugguaagaac

SEQ ID NO: 161493 - RNA, 19 nt, Artificial Sequence
  Description of Artificial Sequence: Synthetic oligonucleotide
  Antisense strand to SEQ ID NO: 161492
guucuuaccauuaucaagu

SEQ ID NO: 161494 - RNA, 19 nt, Artificial Sequence
  Description of Artificial Sequence: Synthetic oligonucleotide
  Sense strand starting at position 2831 of SEQ ID NO: 2079
acauguuuggagugaugcu

SEQ ID NO: 161495 - RNA, 19 nt, Artificial Sequence
  Description of Artificial Sequence: Synthetic oligonucleotide
  Antisense strand to SEQ ID NO: 161494
agcaucacuccaaacaugu

SEQ ID NO: 161496 - RNA, 19 nt, Artificial Sequence
  Description of Artificial Sequence: Synthetic oligonucleotide
  Sense strand starting at position 2665 of SEQ ID NO: 2079
uuucuuguccuguauugca

SEQ ID NO: 161497 - RNA, 19 nt, Artificial Sequence
  Description of Artificial Sequence: Synthetic oligonucleotide
  Antisense strand to SEQ ID NO: 161496
ugcaauacaggacaagaaa

SEQ ID NO: 161498 - RNA, 19 nt, Artificial Sequence
  Description of Artificial Sequence: Synthetic oligonucleotide
  Sense strand starting at position 2649 of SEQ ID NO: 2079
ccaguuauugugcaacuuu

SEQ ID NO: 161499 - RNA, 19 nt, Artificial Sequence
  Description of Artificial Sequence: Synthetic oligonucleotide
  Antisense strand to SEQ ID NO: 161498
aaaguugcacaauaacugg

SEQ ID NO: 161500 - RNA, 19 nt, Artificial Sequence
  Description of Artificial Sequence: Synthetic oligonucleotide
  Sense strand starting at position 2638 of SEQ ID NO: 2079
ggaacuaaggcccaguuau

SEQ ID NO: 161501 - RNA, 19 nt, Artificial Sequence
  Description of Artificial Sequence: Synthetic oligonucleotide
  Antisense strand to SEQ ID NO: 161500
auaacugggccuuaguucc

SEQ ID NO: 161502 - RNA, 19 nt, Artificial Sequence
  Description of Artificial Sequence: Synthetic oligonucleotide
  Sense strand starting at position 2599 of SEQ ID NO: 2079
accuuagagugcucaaagu

SEQ ID NO: 161503 - RNA, 19 nt, Artificial Sequence
  Description of Artificial Sequence: Synthetic oligonucleotide
  Antisense strand to SEQ ID NO: 161502
acuuugagcacucuaaggu

SEQ ID NO: 161504 - RNA, 19 nt, Artificial Sequence
  Description of Artificial Sequence: Synthetic oligonucleotide
  Sense strand starting at position 2563 of SEQ ID NO: 2079
acgauuagcuucccuauuu

SEQ ID NO: 161505 - RNA, 19 nt, Artificial Sequence
  Description of Artificial Sequence: Synthetic oligonucleotide
  Antisense strand to SEQ ID NO: 161504
aaauagggaagcuaaucgu

SEQ ID NO: 161506 - RNA, 19 nt, Artificial Sequence
  Description of Artificial Sequence: Synthetic oligonucleotide
  Sense strand starting at position 2455 of SEQ ID NO: 2079
uaacuuaacguuugugauu

SEQ ID NO: 161507 - RNA, 19 nt, Artificial Sequence
  Description of Artificial Sequence: Synthetic oligonucleotide
  Antisense strand to SEQ ID NO: 161506
aaucacaaacguuaaguua

SEQ ID NO: 161508 - RNA, 19 nt, Artificial Sequence
  Description of Artificial Sequence: Synthetic oligonucleotide
  Sense strand starting at position 2320 of SEQ ID NO: 2079
ggaguuugaucugcugggu

SEQ ID NO: 161509 - RNA, 19 nt, Artificial Sequence
  Description of Artificial Sequence: Synthetic oligonucleotide
  Antisense strand to SEQ ID NO: 161508
acccagcagaucaaacucc

SEQ ID NO: 161510 - RNA, 19 nt, Artificial Sequence
  Description of Artificial Sequence: Synthetic oligonucleotide
  Sense strand starting at position 2314 of SEQ ID NO: 2079
ggguuaggaguuugaucug

SEQ ID NO: 161511 - RNA, 19 nt, Artificial Sequence
  Description of Artificial Sequence: Synthetic oligonucleotide
  Antisense strand to SEQ ID NO: 161510
cagaucaaacuccuaaccc

SEQ ID NO: 161512 - RNA, 19 nt, Artificial Sequence
  Description of Artificial Sequence: Synthetic oligonucleotide
  Sense strand starting at position 2304 of SEQ ID NO: 2079
cuuucaugcuggguuagga

SEQ ID NO: 161513 - RNA, 19 nt, Artificial Sequence
  Description of Artificial Sequence: Synthetic oligonucleotide
  Antisense strand to SEQ ID NO: 161512
uccuaacccagcaugaaag

SEQ ID NO: 161514 - RNA, 19 nt, Artificial Sequence
  Description of Artificial Sequence: Synthetic oligonucleotide
  Sense strand starting at position 2289 of SEQ ID NO: 2079
ggaguuguaguuuaucuuu

SEQ ID NO: 161515 - RNA, 19 nt, Artificial Sequence
  Description of Artificial Sequence: Synthetic oligonucleotide
  Antisense strand to SEQ ID NO: 161514
aaagauaaacuacaacucc

SEQ ID NO: 161516 - RNA, 19 nt, Artificial Sequence
  Description of Artificial Sequence: Synthetic oligonucleotide
  Sense strand starting at position 2252 of SEQ ID NO: 2079
gagguuauaagacgcaguu

SEQ ID NO: 161517 - RNA, 19 nt, Artificial Sequence
  Description of Artificial Sequence: Synthetic oligonucleotide
  Antisense strand to SEQ ID NO: 161516
aacugcgucuuauaaccuc

SEQ ID NO: 161518 - RNA, 19 nt, Artificial Sequence
  Description of Artificial Sequence: Synthetic oligonucleotide
  Sense strand starting at position 2241 of SEQ ID NO: 2079
gggccugagccgagguuau

SEQ ID NO: 161519 - RNA, 19 nt, Artificial Sequence
  Description of Artificial Sequence: Synthetic oligonucleotide
  Antisense strand to SEQ ID NO: 161518
auaaccucggcucaggccc

SEQ ID NO: 161520 - RNA, 19 nt, Artificial Sequence
  Description of Artificial Sequence: Synthetic oligonucleotide
  Sense strand starting at position 2195 of SEQ ID NO: 2079
ggagauguaguuuaugggu

SEQ ID NO: 161521 - RNA, 19 nt, Artificial Sequence
  Description of Artificial Sequence: Synthetic oligonucleotide
  Antisense strand to SEQ ID NO: 161520
acccauaaacuacaucucc

SEQ ID NO: 161522 - RNA, 19 nt, Artificial Sequence
  Description of Artificial Sequence: Synthetic oligonucleotide
  Sense strand starting at position 1270 of SEQ ID NO: 2079
cgguacuggcuggaucaga

SEQ ID NO: 161523 - RNA, 19 nt, Artificial Sequence
  Description of Artificial Sequence: Synthetic oligonucleotide
  Antisense strand to SEQ ID NO: 161522
ucugauccagccaguaccg

SEQ ID NO: 161524 - RNA, 19 nt, Artificial Sequence
  Description of Artificial Sequence: Synthetic oligonucleotide
  Sense strand starting at position 1123 of SEQ ID NO: 2079
gagggaugguguuuccgga

SEQ ID NO: 161525 - RNA, 19 nt, Artificial Sequence
  Description of Artificial Sequence: Synthetic oligonucleotide
  Antisense strand to SEQ ID NO: 161524
uccggaaacaccaucccuc

SEQ ID NO: 161526 - RNA, 19 nt, Artificial Sequence
  Description of Artificial Sequence: Synthetic oligonucleotide
  Sense strand starting at position 1087 of SEQ ID NO: 2079
gaggguaacuaaggaaaga

SEQ ID NO: 161527 - RNA, 19 nt, Artificial Sequence
  Description of Artificial Sequence: Synthetic oligonucleotide
  Antisense strand to SEQ ID NO: 161526
ucuuuccuuaguuacccuc

SEQ ID NO: 161528 - RNA, 19 nt, Artificial Sequence
  Description of Artificial Sequence: Synthetic oligonucleotide
  Sense strand starting at position 1070 of SEQ ID NO: 2079
cagcguaaccaugaggaga

SEQ ID NO: 161529 - RNA, 19 nt, Artificial Sequence
  Description of Artificial Sequence: Synthetic oligonucleotide
  Antisense strand to SEQ ID NO: 161528
ucuccucaugguuacgcug

SEQ ID NO: 161530 - RNA, 19 nt, Artificial Sequence
  Description of Artificial Sequence: Synthetic oligonucleotide
  Sense strand starting at position 995 of SEQ ID NO: 2079
agguaaacucuuggaguag

SEQ ID NO: 161531 - RNA, 19 nt, Artificial Sequence
  Description of Artificial Sequence: Synthetic oligonucleotide
  Antisense strand to SEQ ID NO: 161530
cuacuccaagaguuuaccu

SEQ ID NO: 161532 - RNA, 19 nt, Artificial Sequence
  Description of Artificial Sequence: Synthetic oligonucleotide
  Sense strand starting at position 933 of SEQ ID NO: 2079
gagaaacuacggugucaaa

SEQ ID NO: 161533 - RNA, 19 nt, Artificial Sequence
  Description of Artificial Sequence: Synthetic oligonucleotide
  Antisense strand to SEQ ID NO: 161532
uuugacaccguaguuucuc

SEQ ID NO: 161534 - RNA, 19 nt, Artificial Sequence
  Description of Artificial Sequence: Synthetic oligonucleotide
  Sense strand starting at position 898 of SEQ ID NO: 2079
uccaaauuagggugugaua

SEQ ID NO: 161535 - RNA, 19 nt, Artificial Sequence
  Description of Artificial Sequence: Synthetic oligonucleotide
  Antisense strand to SEQ ID NO: 161534
uaucacacccuaauuugga

SEQ ID NO: 161536 - RNA, 19 nt, Artificial Sequence
  Description of Artificial Sequence: Synthetic oligonucleotide
  Sense strand starting at position 476 of SEQ ID NO: 2079
ggcggugugcacagagauu

SEQ ID NO: 161537 - RNA, 19 nt, Artificial Sequence
  Description of Artificial Sequence: Synthetic oligonucleotide
  Antisense strand to SEQ ID NO: 161536
aaucucugugcacaccgcc

SEQ ID NO: 161538 - RNA, 19 nt, Artificial Sequence
  Description of Artificial Sequence: Synthetic oligonucleotide
  Sense strand starting at position 406 of SEQ ID NO: 2079
ggcaaucacuauccgaauu

SEQ ID NO: 161539 - RNA, 19 nt, Artificial Sequence
  Description of Artificial Sequence: Synthetic oligonucleotide
  Antisense strand to SEQ ID NO: 161538
aauucggauagugauugcc

SEQ ID NO: 161540 - RNA, 19 nt, Artificial Sequence
  Description of Artificial Sequence: Synthetic oligonucleotide
  Sense strand starting at position 121 of SEQ ID NO: 2079
cgagaugaguaagaaggaa

SEQ ID NO: 161541 - RNA, 19 nt, Artificial Sequence
  Description of Artificial Sequence: Synthetic oligonucleotide
  Antisense strand to SEQ ID NO: 161540
uuccuucuuacucaucucg

SEQ ID NO: 161542 - RNA, 19 nt, Artificial Sequence
  Description of Artificial Sequence: Synthetic oligonucleotide
  Sense strand starting at position 114 of SEQ ID NO: 2079
gauggcacgagaugaguaa

SEQ ID NO: 161543 - RNA, 19 nt, Artificial Sequence
  Description of Artificial Sequence: Synthetic oligonucleotide
  Antisense strand to SEQ ID NO: 161542
uuacucaucucgugccauc

SEQ ID NO: 161544 - RNA, 19 nt, Artificial Sequence
  Description of Artificial Sequence: Synthetic oligonucleotide
  Sense strand starting at position 110 of SEQ ID NO: 2079
gguagauggcacgagauga

SEQ ID NO: 161545 - RNA, 19 nt, Artificial Sequence
  Description of Artificial Sequence: Synthetic oligonucleotide
  Antisense strand to SEQ ID NO: 161544
ucaucucgugccaucuacc

SEQ ID NO: 161546 - RNA, 19 nt, Artificial Sequence
  Description of Artificial Sequence: Synthetic oligonucleotide
  Sense strand starting at position 85 of SEQ ID NO: 2079
uggaguuaagaaugucaag

SEQ ID NO: 161547 - RNA, 19 nt, Artificial Sequence
  Description of Artificial Sequence: Synthetic oligonucleotide
  Antisense strand to SEQ ID NO: 161546
cuugacauucuuaacucca

SEQ ID NO: 161548 - RNA, 19 nt, Artificial Sequence
  Description of Artificial Sequence: Synthetic oligonucleotide
  Sense strand starting at position 36 of SEQ ID NO: 2079
accauuucuugagguggaa

SEQ ID NO: 161549 - RNA, 19 nt, Artificial Sequence
  Description of Artificial Sequence: Synthetic oligonucleotide
  Antisense strand to SEQ ID NO: 161548
uuccaccucaagaaauggu

SEQ ID NO: 161550 - RNA, 19 nt, Artificial Sequence
  Description of Artificial Sequence: Synthetic oligonucleotide
  Sense strand starting at position 3692 of SEQ ID NO: 2080
ugagaacuucccugcuauu

SEQ ID NO: 161551 - RNA, 19 nt, Artificial Sequence
  Description of Artificial Sequence: Synthetic oligonucleotide
  Antisense strand to SEQ ID NO: 161550
aauagcagggaaguucuca

SEQ ID NO: 161552 - RNA, 19 nt, Artificial Sequence
  Description of Artificial Sequence: Synthetic oligonucleotide
  Sense strand starting at position 3691 of SEQ ID NO: 2080
cugagaacuucccugcuau

SEQ ID NO: 161553 - RNA, 19 nt, Artificial Sequence
  Description of Artificial Sequence: Synthetic oligonucleotide
  Antisense strand to SEQ ID NO: 161552
auagcagggaaguucucag

SEQ ID NO: 161554 - RNA, 19 nt, Artificial Sequence
  Description of Artificial Sequence: Synthetic oligonucleotide
  Sense strand starting at position 3627 of SEQ ID NO: 2080
ugucauuaacacugauguu

SEQ ID NO: 161555 - RNA, 19 nt, Artificial Sequence
  Description of Artificial Sequence: Synthetic oligonucleotide
  Antisense strand to SEQ ID NO: 161554
aacaucaguguuaaugaca

SEQ ID NO: 161556 - RNA, 19 nt, Artificial Sequence
  Description of Artificial Sequence: Synthetic oligonucleotide
  Sense strand starting at position 3577 of SEQ ID NO: 2080
cuaccauugccugauacug

SEQ ID NO: 161557 - RNA, 19 nt, Artificial Sequence
  Description of Artificial Sequence: Synthetic oligonucleotide
  Antisense strand to SEQ ID NO: 161556
caguaucaggcaaugguag

SEQ ID NO: 161558 - RNA, 19 nt, Artificial Sequence
  Description of Artificial Sequence: Synthetic oligonucleotide
  Sense strand starting at position 3455 of SEQ ID NO: 2080
cucacagaauugcuagaaa

SEQ ID NO: 161559 - RNA, 19 nt, Artificial Sequence
  Description of Artificial Sequence: Synthetic oligonucleotide
  Antisense strand to SEQ ID NO: 161558
uuucuagcaauucugugag

SEQ ID NO: 161560 - RNA, 19 nt, Artificial Sequence
  Description of Artificial Sequence: Synthetic oligonucleotide
  Sense strand starting at position 3378 of SEQ ID NO: 2080
gcuuauucugacuaguaag

SEQ ID NO: 161561 - RNA, 19 nt, Artificial Sequence
  Description of Artificial Sequence: Synthetic oligonucleotide
  Antisense strand to SEQ ID NO: 161560
cuuacuagucagaauaagc

SEQ ID NO: 161562 - RNA, 19 nt, Artificial Sequence
  Description of Artificial Sequence: Synthetic oligonucleotide
  Sense strand starting at position 3377 of SEQ ID NO: 2080
agcuuauucugacuaguaa

SEQ ID NO: 161563 - RNA, 19 nt, Artificial Sequence
  Description of Artificial Sequence: Synthetic oligonucleotide
  Antisense strand to SEQ ID NO: 161562
uuacuagucagaauaagcu

SEQ ID NO: 161564 - RNA, 19 nt, Artificial Sequence
  Description of Artificial Sequence: Synthetic oligonucleotide
  Sense strand starting at position 3372 of SEQ ID NO: 2080
ugauaagcuuauucugacu

SEQ ID NO: 161565 - RNA, 19 nt, Artificial Sequence
  Description of Artificial Sequence: Synthetic oligonucleotide
  Antisense strand to SEQ ID NO: 161564
agucagaauaagcuuauca

SEQ ID NO: 161566 - RNA, 19 nt, Artificial Sequence
  Description of Artificial Sequence: Synthetic oligonucleotide
  Sense strand starting at position 3280 of SEQ ID NO: 2080
auguauuaaccacaguauc

SEQ ID NO: 161567 - RNA, 19 nt, Artificial Sequence
  Description of Artificial Sequence: Synthetic oligonucleotide
  Antisense strand to SEQ ID NO: 161566
gauacugugguuaauacau

SEQ ID NO: 161568 - RNA, 19 nt, Artificial Sequence
  Description of Artificial Sequence: Synthetic oligonucleotide
  Sense strand starting at position 3270 of SEQ ID NO: 2080
ggauccugauauguauuaa

SEQ ID NO: 161569 - RNA, 19 nt, Artificial Sequence
  Description of Artificial Sequence: Synthetic oligonucleotide
  Antisense strand to SEQ ID NO: 161568
uuaauacauaucaggaucc

SEQ ID NO: 161570 - RNA, 19 nt, Artificial Sequence
  Description of Artificial Sequence: Synthetic oligonucleotide
  Sense strand starting at position 3195 of SEQ ID NO: 2080
uuccaucuugcagauugua

SEQ ID NO: 161571 - RNA, 19 nt, Artificial Sequence
  Description of Artificial Sequence: Synthetic oligonucleotide
  Antisense strand to SEQ ID NO: 161570
uacaaucugcaagauggaa

SEQ ID NO: 161572 - RNA, 19 nt, Artificial Sequence
  Description of Artificial Sequence: Synthetic oligonucleotide
  Sense strand starting at position 3160 of SEQ ID NO: 2080
augacagucuguucucaau

SEQ ID NO: 161573 - RNA, 19 nt, Artificial Sequence
  Description of Artificial Sequence: Synthetic oligonucleotide
  Antisense strand to SEQ ID NO: 161572
auugagaacagacugucau

SEQ ID NO: 161574 - RNA, 19 nt, Artificial Sequence
  Description of Artificial Sequence: Synthetic oligonucleotide
  Sense strand starting at position 3071 of SEQ ID NO: 2080
gcuugaugauuucuguacu

SEQ ID NO: 161575 - RNA, 19 nt, Artificial Sequence
  Description of Artificial Sequence: Synthetic oligonucleotide
  Antisense strand to SEQ ID NO: 161574
aguacagaaaucaucaagc

SEQ ID NO: 161576 - RNA, 19 nt, Artificial Sequence
  Description of Artificial Sequence: Synthetic oligonucleotide
  Sense strand starting at position 3059 of SEQ ID NO: 2080
auuuguuucugugcuugau

SEQ ID NO: 161577 - RNA, 19 nt, Artificial Sequence
  Description of Artificial Sequence: Synthetic oligonucleotide
  Antisense strand to SEQ ID NO: 161576
aucaagcacagaaacaaau

SEQ ID NO: 161578 - RNA, 19 nt, Artificial Sequence
  Description of Artificial Sequence: Synthetic oligonucleotide
  Sense strand starting at position 2947 of SEQ ID NO: 2080
gaggcaaggccuuaauaau

SEQ ID NO: 161579 - RNA, 19 nt, Artificial Sequence
  Description of Artificial Sequence: Synthetic oligonucleotide
  Antisense strand to SEQ ID NO: 161578
auuauuaaggccuugccuc

SEQ ID NO: 161580 - RNA, 19 nt, Artificial Sequence
  Description of Artificial Sequence: Synthetic oligonucleotide
  Sense strand starting at position 2632 of SEQ ID NO: 2080
agcagaauguuaccaagac

SEQ ID NO: 161581 - RNA, 19 nt, Artificial Sequence
  Description of Artificial Sequence: Synthetic oligonucleotide
  Antisense strand to SEQ ID NO: 161580
gucuugguaacauucugcu

SEQ ID NO: 161582 - RNA, 19 nt, Artificial Sequence
  Description of Artificial Sequence: Synthetic oligonucleotide
  Sense strand starting at position 2624 of SEQ ID NO: 2080
aguuaaugagcagaauguu

SEQ ID NO: 161583 - RNA, 19 nt, Artificial Sequence
  Description of Artificial Sequence: Synthetic oligonucleotide
  Antisense strand to SEQ ID NO: 161582
aacauucugcucauuaacu

SEQ ID NO: 161584 - RNA, 19 nt, Artificial Sequence
  Description of Artificial Sequence: Synthetic oligonucleotide
  Sense strand starting at position 2621 of SEQ ID NO: 2080
ugaaguuaaugagcagaau

SEQ ID NO: 161585 - RNA, 19 nt, Artificial Sequence
  Description of Artificial Sequence: Synthetic oligonucleotide
  Antisense strand to SEQ ID NO: 161584
auucugcucauuaacuuca

SEQ ID NO: 161586 - RNA, 19 nt, Artificial Sequence
  Description of Artificial Sequence: Synthetic oligonucleotide
  Sense strand starting at position 2610 of SEQ ID NO: 2080
ggacgucuuccugaaguua

SEQ ID NO: 161587 - RNA, 19 nt, Artificial Sequence
  Description of Artificial Sequence: Synthetic oligonucleotide
  Antisense strand to SEQ ID NO: 161586
uaacuucaggaagacgucc

SEQ ID NO: 161588 - RNA, 19 nt, Artificial Sequence
  Description of Artificial Sequence: Synthetic oligonucleotide
  Sense strand starting at position 2532 of SEQ ID NO: 2080
cggucauuucacugucgag

SEQ ID NO: 161589 - RNA, 19 nt, Artificial Sequence
  Description of Artificial Sequence: Synthetic oligonucleotide
  Antisense strand to SEQ ID NO: 161588
cucgacagugaaaugaccg

SEQ ID NO: 161590 - RNA, 19 nt, Artificial Sequence
  Description of Artificial Sequence: Synthetic oligonucleotide
  Sense strand starting at position 2196 of SEQ ID NO: 2080
ggcuguacccuggagaaga

SEQ ID NO: 161591 - RNA, 19 nt, Artificial Sequence
  Description of Artificial Sequence: Synthetic oligonucleotide
  Antisense strand to SEQ ID NO: 161590
ucuucuccaggguacagcc

SEQ ID NO: 161592 - RNA, 19 nt, Artificial Sequence
  Description of Artificial Sequence: Synthetic oligonucleotide
  Sense strand starting at position 2194 of SEQ ID NO: 2080
uuggcuguacccuggagaa

SEQ ID NO: 161593 - RNA, 19 nt, Artificial Sequence
  Description of Artificial Sequence: Synthetic oligonucleotide
  Antisense strand to SEQ ID NO: 161592
uucuccaggguacagccaa

SEQ ID NO: 161594 - RNA, 19 nt, Artificial Sequence
  Description of Artificial Sequence: Synthetic oligonucleotide
  Sense strand starting at position 2184 of SEQ ID NO: 2080
ggagaaaggguuggcugua

SEQ ID NO: 161595 - RNA, 19 nt, Artificial Sequence
  Description of Artificial Sequence: Synthetic oligonucleotide
  Antisense strand to SEQ ID NO: 161594
uacagccaacccuuucucc

SEQ ID NO: 161596 - RNA, 19 nt, Artificial Sequence
  Description of Artificial Sequence: Synthetic oligonucleotide
  Sense strand starting at position 1453 of SEQ ID NO: 2080
gaagaugucugugucagag

SEQ ID NO: 161597 - RNA, 19 nt, Artificial Sequence
  Description of Artificial Sequence: Synthetic oligonucleotide
  Antisense strand to SEQ ID NO: 161596
cucugacacagacaucuuc

SEQ ID NO: 161598 - RNA, 19 nt, Artificial Sequence
  Description of Artificial Sequence: Synthetic oligonucleotide
  Sense strand starting at position 1452 of SEQ ID NO: 2080
ggaagaugucugugucaga

SEQ ID NO: 161599 - RNA, 19 nt, Artificial Sequence
  Description of Artificial Sequence: Synthetic oligonucleotide
  Antisense strand to SEQ ID NO: 161598
ucugacacagacaucuucc

SEQ ID NO: 161600 - RNA, 19 nt, Artificial Sequence
  Description of Artificial Sequence: Synthetic oligonucleotide
  Sense strand starting at position 1450 of SEQ ID NO: 2080
gaggaagaugucuguguca

SEQ ID NO: 161601 - RNA, 19 nt, Artificial Sequence
  Description of Artificial Sequence: Synthetic oligonucleotide
  Antisense strand to SEQ ID NO: 161600
ugacacagacaucuuccuc

SEQ ID NO: 161602 - RNA, 19 nt, Artificial Sequence
  Description of Artificial Sequence: Synthetic oligonucleotide
  Sense strand starting at position 816 of SEQ ID NO: 2080
uuugcucucccagaguaaa

SEQ ID NO: 161603 - RNA, 19 nt, Artificial Sequence
  Description of Artificial Sequence: Synthetic oligonucleotide
  Antisense strand to SEQ ID NO: 161602
uuuacucugggagagcaaa

SEQ ID NO: 161604 - RNA, 19 nt, Artificial Sequence
  Description of Artificial Sequence: Synthetic oligonucleotide
  Sense strand starting at position 773 of SEQ ID NO: 2080
ccucuuuggagucagagua

SEQ ID NO: 161605 - RNA, 19 nt, Artificial Sequence
  Description of Artificial Sequence: Synthetic oligonucleotide
  Antisense strand to SEQ ID NO: 161604
uacucugacuccaaagagg

SEQ ID NO: 161606 - RNA, 19 nt, Artificial Sequence
  Description of Artificial Sequence: Synthetic oligonucleotide
  Sense strand starting at position 766 of SEQ ID NO: 2080
auauacuccucuuuggagu

SEQ ID NO: 161607 - RNA, 19 nt, Artificial Sequence
  Description of Artificial Sequence: Synthetic oligonucleotide
  Antisense strand to SEQ ID NO: 161606
acuccaaagaggaguauau

SEQ ID NO: 161608 - RNA, 19 nt, Artificial Sequence
  Description of Artificial Sequence: Synthetic oligonucleotide
  Sense strand starting at position 698 of SEQ ID NO: 2080
cuguuuaaauauucggaau

SEQ ID NO: 161609 - RNA, 19 nt, Artificial Sequence
  Description of Artificial Sequence: Synthetic oligonucleotide
  Antisense strand to SEQ ID NO: 161608
auuccgaauauuuaaacag

SEQ ID NO: 161610 - RNA, 19 nt, Artificial Sequence
  Description of Artificial Sequence: Synthetic oligonucleotide
  Sense strand starting at position 690 of SEQ ID NO: 2080
gugauagucuguuuaaaua

SEQ ID NO: 161611 - RNA, 19 nt, Artificial Sequence
  Description of Artificial Sequence: Synthetic oligonucleotide
  Antisense strand to SEQ ID NO: 161610
uauuuaaacagacuaucac

SEQ ID NO: 161612 - RNA, 19 nt, Artificial Sequence
  Description of Artificial Sequence: Synthetic oligonucleotide
  Sense strand starting at position 593 of SEQ ID NO: 2080
gaaguauguguggaauaua

SEQ ID NO: 161613 - RNA, 19 nt, Artificial Sequence
  Description of Artificial Sequence: Synthetic oligonucleotide
  Antisense strand to SEQ ID NO: 161612
uauauuccacacauacuuc

SEQ ID NO: 161614 - RNA, 19 nt, Artificial Sequence
  Description of Artificial Sequence: Synthetic oligonucleotide
  Sense strand starting at position 590 of SEQ ID NO: 2080
caugaaguauguguggaau

SEQ ID NO: 161615 - RNA, 19 nt, Artificial Sequence
  Description of Artificial Sequence: Synthetic oligonucleotide
  Antisense strand to SEQ ID NO: 161614
auuccacacauacuucaug

SEQ ID NO: 161616 - RNA, 19 nt, Artificial Sequence
  Description of Artificial Sequence: Synthetic oligonucleotide
  Sense strand starting at position 589 of SEQ ID NO: 2080
acaugaaguauguguggaa

SEQ ID NO: 161617 - RNA, 19 nt, Artificial Sequence
  Description of Artificial Sequence: Synthetic oligonucleotide
  Antisense strand to SEQ ID NO: 161616
uuccacacauacuucaugu

SEQ ID NO: 161618 - RNA, 19 nt, Artificial Sequence
  Description of Artificial Sequence: Synthetic oligonucleotide
  Sense strand starting at position 570 of SEQ ID NO: 2080
ccaacugucguugaucuga

SEQ ID NO: 161619 - RNA, 19 nt, Artificial Sequence
  Description of Artificial Sequence: Synthetic oligonucleotide
  Antisense strand to SEQ ID NO: 161618
ucagaucaacgacaguugg

SEQ ID NO: 161620 - RNA, 19 nt, Artificial Sequence
  Description of Artificial Sequence: Synthetic oligonucleotide
  Sense strand starting at position 231 of SEQ ID NO: 2080
ucuuaagagucagcuagaa

SEQ ID NO: 161621 - RNA, 19 nt, Artificial Sequence
  Description of Artificial Sequence: Synthetic oligonucleotide
  Antisense strand to SEQ ID NO: 161620
uucuagcugacucuuaaga

SEQ ID NO: 161622 - RNA, 19 nt, Artificial Sequence
  Description of Artificial Sequence: Synthetic oligonucleotide
  Sense strand starting at position 132 of SEQ ID NO: 2080
cgcccagaggucuaagcaa

SEQ ID NO: 161623 - RNA, 19 nt, Artificial Sequence
  Description of Artificial Sequence: Synthetic oligonucleotide
  Antisense strand to SEQ ID NO: 161622
uugcuuagaccucugggcg

SEQ ID NO: 161624 - RNA, 19 nt, Artificial Sequence
  Description of Artificial Sequence: Synthetic oligonucleotide
  Sense strand starting at position 21 of SEQ ID NO: 2080
cugagagagcuuuaggcaa

SEQ ID NO: 161625 - RNA, 19 nt, Artificial Sequence
  Description of Artificial Sequence: Synthetic oligonucleotide
  Antisense strand to SEQ ID NO: 161624
uugccuaaagcucucucag

SEQ ID NO: 161626 - RNA, 19 nt, Artificial Sequence
  Description of Artificial Sequence: Synthetic oligonucleotide
  Sense strand starting at position 15 of SEQ ID NO: 2080
cuuagucugagagagcuuu

SEQ ID NO: 161627 - RNA, 19 nt, Artificial Sequence
  Description of Artificial Sequence: Synthetic oligonucleotide
  Antisense strand to SEQ ID NO: 161626
aaagcucucucagacuaag

SEQ ID NO: 161628 - RNA, 19 nt, Artificial Sequence
  Description of Artificial Sequence: Synthetic oligonucleotide
  Sense strand starting at position 8 of SEQ ID NO: 2080
uagauuccuuagucugaga

SEQ ID NO: 161629 - RNA, 19 nt, Artificial Sequence
  Description of Artificial Sequence: Synthetic oligonucleotide
  Antisense strand to SEQ ID NO: 161628
ucucagacuaaggaaucua

SEQ ID NO: 161630 - RNA, 19 nt, Artificial Sequence
  Description of Artificial Sequence: Synthetic oligonucleotide
  Sense strand starting at position 3968 of SEQ ID NO: 2081
gugauaaguacugagcaga

SEQ ID NO: 161631 - RNA, 19 nt, Artificial Sequence
  Description of Artificial Sequence: Synthetic oligonucleotide
  Antisense strand to SEQ ID NO: 161630
ucugcucaguacuuaucac

SEQ ID NO: 161632 - RNA, 19 nt, Artificial Sequence
  Description of Artificial Sequence: Synthetic oligonucleotide
  Sense strand starting at position 3958 of SEQ ID NO: 2081
aucacuggcagugauaagu

SEQ ID NO: 161633 - RNA, 19 nt, Artificial Sequence
  Description of Artificial Sequence: Synthetic oligonucleotide
  Antisense strand to SEQ ID NO: 161632
acuuaucacugccagugau

SEQ ID NO: 161634 - RNA, 19 nt, Artificial Sequence
  Description of Artificial Sequence: Synthetic oligonucleotide
  Sense strand starting at position 3951 of SEQ ID NO: 2081
ugagauaaucacuggcagu

SEQ ID NO: 161635 - RNA, 19 nt, Artificial Sequence
  Description of Artificial Sequence: Synthetic oligonucleotide
  Antisense strand to SEQ ID NO: 161634
acugccagugauuaucuca

SEQ ID NO: 161636 - RNA, 19 nt, Artificial Sequence
  Description of Artificial Sequence: Synthetic oligonucleotide
  Sense strand starting at position 3942 of SEQ ID NO: 2081
acgaauagaugagauaauc

SEQ ID NO: 161637 - RNA, 19 nt, Artificial Sequence
  Description of Artificial Sequence: Synthetic oligonucleotide
  Antisense strand to SEQ ID NO: 161636
gauuaucucaucuauucgu

SEQ ID NO: 161638 - RNA, 19 nt, Artificial Sequence
  Description of Artificial Sequence: Synthetic oligonucleotide
  Sense strand starting at position 3539 of SEQ ID NO: 2081
gcuuauguucugcaggacu

SEQ ID NO: 161639 - RNA, 19 nt, Artificial Sequence
  Description of Artificial Sequence: Synthetic oligonucleotide
  Antisense strand to SEQ ID NO: 161638
aguccugcagaacauaagc

SEQ ID NO: 161640 - RNA, 19 nt, Artificial Sequence
  Description of Artificial Sequence: Synthetic oligonucleotide
  Sense strand starting at position 3492 of SEQ ID NO: 2081
cuagaaauacaguggugaa

SEQ ID NO: 161641 - RNA, 19 nt, Artificial Sequence
  Description of Artificial Sequence: Synthetic oligonucleotide
  Antisense strand to SEQ ID NO: 161640
uucaccacuguauuucuag

SEQ ID NO: 161642 - RNA, 19 nt, Artificial Sequence
  Description of Artificial Sequence: Synthetic oligonucleotide
  Sense strand starting at position 3477 of SEQ ID NO: 2081
auaguauucuuggugcuag

SEQ ID NO: 161643 - RNA, 19 nt, Artificial Sequence
  Description of Artificial Sequence: Synthetic oligonucleotide
  Antisense strand to SEQ ID NO: 161642
cuagcaccaagaauacuau

SEQ ID NO: 161644 - RNA, 19 nt, Artificial Sequence
  Description of Artificial Sequence: Synthetic oligonucleotide
  Sense strand starting at position 3476 of SEQ ID NO: 2081
gauaguauucuuggugcua

SEQ ID NO: 161645 - RNA, 19 nt, Artificial Sequence
  Description of Artificial Sequence: Synthetic oligonucleotide
  Antisense strand to SEQ ID NO: 161644
uagcaccaagaauacuauc

SEQ ID NO: 161646 - RNA, 19 nt, Artificial Sequence
  Description of Artificial Sequence: Synthetic oligonucleotide
  Sense strand starting at position 3472 of SEQ ID NO: 2081
uauugauaguauucuuggu

SEQ ID NO: 161647 - RNA, 19 nt, Artificial Sequence
  Description of Artificial Sequence: Synthetic oligonucleotide
  Antisense strand to SEQ ID NO: 161646
accaagaauacuaucaaua

SEQ ID NO: 161648 - RNA, 19 nt, Artificial Sequence
  Description of Artificial Sequence: Synthetic oligonucleotide
  Sense strand starting at position 3258 of SEQ ID NO: 2081
cuccguuuggccucuucua

SEQ ID NO: 161649 - RNA, 19 nt, Artificial Sequence
  Description of Artificial Sequence: Synthetic oligonucleotide
  Antisense strand to SEQ ID NO: 161648
uagaagaggccaaacggag

SEQ ID NO: 161650 - RNA, 19 nt, Artificial Sequence
  Description of Artificial Sequence: Synthetic oligonucleotide
  Sense strand starting at position 3035 of SEQ ID NO: 2081
cuagccuggccugacuaau

SEQ ID NO: 161651 - RNA, 19 nt, Artificial Sequence
  Description of Artificial Sequence: Synthetic oligonucleotide
  Antisense strand to SEQ ID NO: 161650
auuagucaggccaggcuag

SEQ ID NO: 161652 - RNA, 19 nt, Artificial Sequence
  Description of Artificial Sequence: Synthetic oligonucleotide
  Sense strand starting at position 2954 of SEQ ID NO: 2081
aggguaaagguaggugaaa

SEQ ID NO: 161653 - RNA, 19 nt, Artificial Sequence
  Description of Artificial Sequence: Synthetic oligonucleotide
  Antisense strand to SEQ ID NO: 161652
uuucaccuaccuuuacccu

SEQ ID NO: 161654 - RNA, 19 nt, Artificial Sequence
  Description of Artificial Sequence: Synthetic oligonucleotide
  Sense strand starting at position 2944 of SEQ ID NO: 2081
acguaaauuuaggguaaag

SEQ ID NO: 161655 - RNA, 19 nt, Artificial Sequence
  Description of Artificial Sequence: Synthetic oligonucleotide
  Antisense strand to SEQ ID NO: 161654
cuuuacccuaaauuuacgu

SEQ ID NO: 161656 - RNA, 19 nt, Artificial Sequence
  Description of Artificial Sequence: Synthetic oligonucleotide
  Sense strand starting at position 2918 of SEQ ID NO: 2081
cuuggaauuugugaaggca

SEQ ID NO: 161657 - RNA, 19 nt, Artificial Sequence
  Description of Artificial Sequence: Synthetic oligonucleotide
  Antisense strand to SEQ ID NO: 161656
ugccuucacaaauuccaag

SEQ ID NO: 161658 - RNA, 19 nt, Artificial Sequence
  Description of Artificial Sequence: Synthetic oligonucleotide
  Sense strand starting at position 2909 of SEQ ID NO: 2081
aguuaaucgcuuggaauuu

SEQ ID NO: 161659 - RNA, 19 nt, Artificial Sequence
  Description of Artificial Sequence: Synthetic oligonucleotide
  Antisense strand to SEQ ID NO: 161658
aaauuccaagcgauuaacu

SEQ ID NO: 161660 - RNA, 19 nt, Artificial Sequence
  Description of Artificial Sequence: Synthetic oligonucleotide
  Sense strand starting at position 2908 of SEQ ID NO: 2081
caguuaaucgcuuggaauu

SEQ ID NO: 161661 - RNA, 19 nt, Artificial Sequence
  Description of Artificial Sequence: Synthetic oligonucleotide
  Antisense strand to SEQ ID NO: 161660
aauuccaagcgauuaacug

SEQ ID NO: 161662 - RNA, 19 nt, Artificial Sequence
  Description of Artificial Sequence: Synthetic oligonucleotide
  Sense strand starting at position 2906 of SEQ ID NO: 2081
aacaguuaaucgcuuggaa

SEQ ID NO: 161663 - RNA, 19 nt, Artificial Sequence
  Description of Artificial Sequence: Synthetic oligonucleotide
  Antisense strand to SEQ ID NO: 161662
uuccaagcgauuaacuguu

SEQ ID NO: 161664 - RNA, 19 nt, Artificial Sequence
  Description of Artificial Sequence: Synthetic oligonucleotide
  Sense strand starting at position 2877 of SEQ ID NO: 2081
cagagagauuugggacaga

SEQ ID NO: 161665 - RNA, 19 nt, Artificial Sequence
  Description of Artificial Sequence: Synthetic oligonucleotide
  Antisense strand to SEQ ID NO: 161664
ucugucccaaaucucucug

SEQ ID NO: 161666 - RNA, 19 nt, Artificial Sequence
  Description of Artificial Sequence: Synthetic oligonucleotide
  Sense strand starting at position 2397 of SEQ ID NO: 2081
ucaggagauuccuuaccgu

SEQ ID NO: 161667 - RNA, 19 nt, Artificial Sequence
  Description of Artificial Sequence: Synthetic oligonucleotide
  Antisense strand to SEQ ID NO: 161666
acgguaaggaaucuccuga

SEQ ID NO: 161668 - RNA, 19 nt, Artificial Sequence
  Description of Artificial Sequence: Synthetic oligonucleotide
  Sense strand starting at position 2389 of SEQ ID NO: 2081
ugccuuuaucaggagauuc

SEQ ID NO: 161669 - RNA, 19 nt, Artificial Sequence
  Description of Artificial Sequence: Synthetic oligonucleotide
  Antisense strand to SEQ ID NO: 161668
gaaucuccugauaaaggca

SEQ ID NO: 161670 - RNA, 19 nt, Artificial Sequence
  Description of Artificial Sequence: Synthetic oligonucleotide
  Sense strand starting at position 2289 of SEQ ID NO: 2081
ucuggagcuguggaucauu

SEQ ID NO: 161671 - RNA, 19 nt, Artificial Sequence
  Description of Artificial Sequence: Synthetic oligonucleotide
  Antisense strand to SEQ ID NO: 161670
aaugauccacagcuccaga

SEQ ID NO: 161672 - RNA, 19 nt, Artificial Sequence
  Description of Artificial Sequence: Synthetic oligonucleotide
  Sense strand starting at position 1503 of SEQ ID NO: 2081
cuuuacuacugacuugaga

SEQ ID NO: 161673 - RNA, 19 nt, Artificial Sequence
  Description of Artificial Sequence: Synthetic oligonucleotide
  Antisense strand to SEQ ID NO: 161672
ucucaagucaguaguaaag

SEQ ID NO: 161674 - RNA, 19 nt, Artificial Sequence
  Description of Artificial Sequence: Synthetic oligonucleotide
  Sense strand starting at position 1437 of SEQ ID NO: 2081
ugacuuccugagugcauuu

SEQ ID NO: 161675 - RNA, 19 nt, Artificial Sequence
  Description of Artificial Sequence: Synthetic oligonucleotide
  Antisense strand to SEQ ID NO: 161674
aaaugcacucaggaaguca

SEQ ID NO: 161676 - RNA, 19 nt, Artificial Sequence
  Description of Artificial Sequence: Synthetic oligonucleotide
  Sense strand starting at position 1436 of SEQ ID NO: 2081
cugacuuccugagugcauu

SEQ ID NO: 161677 - RNA, 19 nt, Artificial Sequence
  Description of Artificial Sequence: Synthetic oligonucleotide
  Antisense strand to SEQ ID NO: 161676
aaugcacucaggaagucag

SEQ ID NO: 161678 - RNA, 19 nt, Artificial Sequence
  Description of Artificial Sequence: Synthetic oligonucleotide
  Sense strand starting at position 1227 of SEQ ID NO: 2081
aguuguuucucacuuagaa

SEQ ID NO: 161679 - RNA, 19 nt, Artificial Sequence
  Description of Artificial Sequence: Synthetic oligonucleotide
  Antisense strand to SEQ ID NO: 161678
uucuaagugagaaacaacu

SEQ ID NO: 161680 - RNA, 19 nt, Artificial Sequence
  Description of Artificial Sequence: Synthetic oligonucleotide
  Sense strand starting at position 710 of SEQ ID NO: 2081
cgcacagacuuccuuaaca

SEQ ID NO: 161681 - RNA, 19 nt, Artificial Sequence
  Description of Artificial Sequence: Synthetic oligonucleotide
  Antisense strand to SEQ ID NO: 161680
uguuaaggaagucugugcg

SEQ ID NO: 161682 - RNA, 19 nt, Artificial Sequence
  Description of Artificial Sequence: Synthetic oligonucleotide
  Sense strand starting at position 613 of SEQ ID NO: 2081
gcauucuaagcaugugauu

SEQ ID NO: 161683 - RNA, 19 nt, Artificial Sequence
  Description of Artificial Sequence: Synthetic oligonucleotide
  Antisense strand to SEQ ID NO: 161682
aaucacaugcuuagaaugc

SEQ ID NO: 161684 - RNA, 19 nt, Artificial Sequence
  Description of Artificial Sequence: Synthetic oligonucleotide
  Sense strand starting at position 573 of SEQ ID NO: 2081
ucaguaggucuuuauccua

SEQ ID NO: 161685 - RNA, 19 nt, Artificial Sequence
  Description of Artificial Sequence: Synthetic oligonucleotide
  Antisense strand to SEQ ID NO: 161684
uaggauaaagaccuacuga

SEQ ID NO: 161686 - RNA, 19 nt, Artificial Sequence
  Description of Artificial Sequence: Synthetic oligonucleotide
  Sense strand starting at position 557 of SEQ ID NO: 2081
gauagagugugcucacuca

SEQ ID NO: 161687 - RNA, 19 nt, Artificial Sequence
  Description of Artificial Sequence: Synthetic oligonucleotide
  Antisense strand to SEQ ID NO: 161686
ugagugagcacacucuauc

SEQ ID NO: 161688 - RNA, 19 nt, Artificial Sequence
  Description of Artificial Sequence: Synthetic oligonucleotide
  Sense strand starting at position 555 of SEQ ID NO: 2081
gagauagagugugcucacu

SEQ ID NO: 161689 - RNA, 19 nt, Artificial Sequence
  Description of Artificial Sequence: Synthetic oligonucleotide
  Antisense strand to SEQ ID NO: 161688
agugagcacacucuaucuc

SEQ ID NO: 161690 - RNA, 19 nt, Artificial Sequence
  Description of Artificial Sequence: Synthetic oligonucleotide
  Sense strand starting at position 428 of SEQ ID NO: 2081
agcauuagagguggaggaa

SEQ ID NO: 161691 - RNA, 19 nt, Artificial Sequence
  Description of Artificial Sequence: Synthetic oligonucleotide
  Antisense strand to SEQ ID NO: 161690
uuccuccaccucuaaugcu

SEQ ID NO: 161692 - RNA, 19 nt, Artificial Sequence
  Description of Artificial Sequence: Synthetic oligonucleotide
  Sense strand starting at position 385 of SEQ ID NO: 2081
auaucugaggcagguauaa

SEQ ID NO: 161693 - RNA, 19 nt, Artificial Sequence
  Description of Artificial Sequence: Synthetic oligonucleotide
  Antisense strand to SEQ ID NO: 161692
uuauaccugccucagauau

SEQ ID NO: 161694 - RNA, 19 nt, Artificial Sequence
  Description of Artificial Sequence: Synthetic oligonucleotide
  Sense strand starting at position 383 of SEQ ID NO: 2081
ugauaucugaggcagguau

SEQ ID NO: 161695 - RNA, 19 nt, Artificial Sequence
  Description of Artificial Sequence: Synthetic oligonucleotide
  Antisense strand to SEQ ID NO: 161694
auaccugccucagauauca

SEQ ID NO: 161696 - RNA, 19 nt, Artificial Sequence
  Description of Artificial Sequence: Synthetic oligonucleotide
  Sense strand starting at position 378 of SEQ ID NO: 2081
ugggcugauaucugaggca

SEQ ID NO: 161697 - RNA, 19 nt, Artificial Sequence
  Description of Artificial Sequence: Synthetic oligonucleotide
  Antisense strand to SEQ ID NO: 161696
ugccucagauaucagccca

SEQ ID NO: 161698 - RNA, 19 nt, Artificial Sequence
  Description of Artificial Sequence: Synthetic oligonucleotide
  Sense strand starting at position 371 of SEQ ID NO: 2081
ugauaugugggcugauauc

SEQ ID NO: 161699 - RNA, 19 nt, Artificial Sequence
  Description of Artificial Sequence: Synthetic oligonucleotide
  Antisense strand to SEQ ID NO: 161698
gauaucagcccacauauca

SEQ ID NO: 161700 - RNA, 19 nt, Artificial Sequence
  Description of Artificial Sequence: Synthetic oligonucleotide
  Sense strand starting at position 369 of SEQ ID NO: 2081
agugauaugugggcugaua

SEQ ID NO: 161701 - RNA, 19 nt, Artificial Sequence
  Description of Artificial Sequence: Synthetic oligonucleotide
  Antisense strand to SEQ ID NO: 161700
uaucagcccacauaucacu

SEQ ID NO: 161702 - RNA, 19 nt, Artificial Sequence
  Description of Artificial Sequence: Synthetic oligonucleotide
  Sense strand starting at position 368 of SEQ ID NO: 2081
aagugauaugugggcugau

SEQ ID NO: 161703 - RNA, 19 nt, Artificial Sequence
  Description of Artificial Sequence: Synthetic oligonucleotide
  Antisense strand to SEQ ID NO: 161702
aucagcccacauaucacuu

SEQ ID NO: 161704 - RNA, 19 nt, Artificial Sequence
  Description of Artificial Sequence: Synthetic oligonucleotide
  Sense strand starting at position 324 of SEQ ID NO: 2081
agaguucauggagggcuua

SEQ ID NO: 161705 - RNA, 19 nt, Artificial Sequence
  Description of Artificial Sequence: Synthetic oligonucleotide
  Antisense strand to SEQ ID NO: 161704
uaagcccuccaugaacucu

SEQ ID NO: 161706 - RNA, 19 nt, Artificial Sequence
  Description of Artificial Sequence: Synthetic oligonucleotide
  Sense strand starting at position 66 of SEQ ID NO: 2081
cgaaaugucuuauuguacu

SEQ ID NO: 161707 - RNA, 19 nt, Artificial Sequence
  Description of Artificial Sequence: Synthetic oligonucleotide
  Antisense strand to SEQ ID NO: 161706
aguacaauaagacauuucg

SEQ ID NO: 161708 - RNA, 19 nt, Artificial Sequence
  Description of Artificial Sequence: Synthetic oligonucleotide
  Sense strand starting at position 55 of SEQ ID NO: 2081
augguaucucucgaaaugu

SEQ ID NO: 161709 - RNA, 19 nt, Artificial Sequence
  Description of Artificial Sequence: Synthetic oligonucleotide
  Antisense strand to SEQ ID NO: 161708
acauuucgagagauaccau

SEQ ID NO: 161710 - RNA, 19 nt, Artificial Sequence
  Description of Artificial Sequence: Synthetic oligonucleotide
  Sense strand starting at position 37 of SEQ ID NO: 2082
uggccucucccauaugaau

SEQ ID NO: 161711 - RNA, 19 nt, Artificial Sequence
  Description of Artificial Sequence: Synthetic oligonucleotide
  Antisense strand to SEQ ID NO: 161710
auucauaugggagaggcca

SEQ ID NO: 161712 - RNA, 19 nt, Artificial Sequence
  Description of Artificial Sequence: Synthetic oligonucleotide
  Sense strand starting at position 100 of SEQ ID NO: 2082
ugugcuguagaugaggaau

SEQ ID NO: 161713 - RNA, 19 nt, Artificial Sequence
  Description of Artificial Sequence: Synthetic oligonucleotide
  Antisense strand to SEQ ID NO: 161712
auuccucaucuacagcaca

SEQ ID NO: 161714 - RNA, 19 nt, Artificial Sequence
  Description of Artificial Sequence: Synthetic oligonucleotide
  Sense strand starting at position 111 of SEQ ID NO: 2082
ugaggaaucgagggccaga

SEQ ID NO: 161715 - RNA, 19 nt, Artificial Sequence
  Description of Artificial Sequence: Synthetic oligonucleotide
  Antisense strand to SEQ ID NO: 161714
ucuggcccucgauuccuca

SEQ ID NO: 161716 - RNA, 19 nt, Artificial Sequence
  Description of Artificial Sequence: Synthetic oligonucleotide
  Sense strand starting at position 193 of SEQ ID NO: 2082
gguucugaguggaaggauu

SEQ ID NO: 161717 - RNA, 19 nt, Artificial Sequence
  Description of Artificial Sequence: Synthetic oligonucleotide
  Antisense strand to SEQ ID NO: 161716
aauccuuccacucagaacc

SEQ ID NO: 161718 - RNA, 19 nt, Artificial Sequence
  Description of Artificial Sequence: Synthetic oligonucleotide
  Sense strand starting at position 226 of SEQ ID NO: 2082
guuuccugagauugagauu

SEQ ID NO: 161719 - RNA, 19 nt, Artificial Sequence
  Description of Artificial Sequence: Synthetic oligonucleotide
  Antisense strand to SEQ ID NO: 161718
aaucucaaucucaggaaac

SEQ ID NO: 161720 - RNA, 19 nt, Artificial Sequence
  Description of Artificial Sequence: Synthetic oligonucleotide
  Sense strand starting at position 297 of SEQ ID NO: 2082
guaugaggaaucugucaug

SEQ ID NO: 161721 - RNA, 19 nt, Artificial Sequence
  Description of Artificial Sequence: Synthetic oligonucleotide
  Antisense strand to SEQ ID NO: 161720
caugacagauuccucauac

SEQ ID NO: 161722 - RNA, 19 nt, Artificial Sequence
  Description of Artificial Sequence: Synthetic oligonucleotide
  Sense strand starting at position 368 of SEQ ID NO: 2082
gacugcagucaccauugaa

SEQ ID NO: 161723 - RNA, 19 nt, Artificial Sequence
  Description of Artificial Sequence: Synthetic oligonucleotide
  Antisense strand to SEQ ID NO: 161722
uucaauggugacugcaguc

SEQ ID NO: 161724 - RNA, 19 nt, Artificial Sequence
  Description of Artificial Sequence: Synthetic oligonucleotide
  Sense strand starting at position 371 of SEQ ID NO: 2082
ugcagucaccauugaaaca

SEQ ID NO: 161725 - RNA, 19 nt, Artificial Sequence
  Description of Artificial Sequence: Synthetic oligonucleotide
  Antisense strand to SEQ ID NO: 161724
uguuucaauggugacugca

SEQ ID NO: 161726 - RNA, 19 nt, Artificial Sequence
  Description of Artificial Sequence: Synthetic oligonucleotide
  Sense strand starting at position 417 of SEQ ID NO: 2082
ugaaauugaucagcuuguu

SEQ ID NO: 161727 - RNA, 19 nt, Artificial Sequence
  Description of Artificial Sequence: Synthetic oligonucleotide
  Antisense strand to SEQ ID NO: 161726
aacaagcugaucaauuuca

SEQ ID NO: 161728 - RNA, 19 nt, Artificial Sequence
  Description of Artificial Sequence: Synthetic oligonucleotide
  Sense strand starting at position 842 of SEQ ID NO: 2082
cguccugaccauuacaacu

SEQ ID NO: 161729 - RNA, 19 nt, Artificial Sequence
  Description of Artificial Sequence: Synthetic oligonucleotide
  Antisense strand to SEQ ID NO: 161728
aguuguaauggucaggacg

SEQ ID NO: 161730 - RNA, 19 nt, Artificial Sequence
  Description of Artificial Sequence: Synthetic oligonucleotide
  Sense strand starting at position 880 of SEQ ID NO: 2082
gcaugugauggucacacaa

SEQ ID NO: 161731 - RNA, 19 nt, Artificial Sequence
  Description of Artificial Sequence: Synthetic oligonucleotide
  Antisense strand to SEQ ID NO: 161730
uugugugaccaucacaugc

SEQ ID NO: 161732 - RNA, 19 nt, Artificial Sequence
  Description of Artificial Sequence: Synthetic oligonucleotide
  Sense strand starting at position 974 of SEQ ID NO: 2082
acgagaguugacuggaaac

SEQ ID NO: 161733 - RNA, 19 nt, Artificial Sequence
  Description of Artificial Sequence: Synthetic oligonucleotide
  Antisense strand to SEQ ID NO: 161732
guuuccagucaacucucgu

SEQ ID NO: 161734 - RNA, 19 nt, Artificial Sequence
  Description of Artificial Sequence: Synthetic oligonucleotide
  Sense strand starting at position 1162 of SEQ ID NO: 2082
acaugagacucagauuucu

SEQ ID NO: 161735 - RNA, 19 nt, Artificial Sequence
  Description of Artificial Sequence: Synthetic oligonucleotide
  Antisense strand to SEQ ID NO: 161734
agaaaucugagucucaugu

SEQ ID NO: 161736 - RNA, 19 nt, Artificial Sequence
  Description of Artificial Sequence: Synthetic oligonucleotide
  Sense strand starting at position 1358 of SEQ ID NO: 2082
ugcugauacuucuuacuga

SEQ ID NO: 161737 - RNA, 19 nt, Artificial Sequence
  Description of Artificial Sequence: Synthetic oligonucleotide
  Antisense strand to SEQ ID NO: 161736
ucaguaagaaguaucagca

SEQ ID NO: 161738 - RNA, 19 nt, Artificial Sequence
  Description of Artificial Sequence: Synthetic oligonucleotide
  Sense strand starting at position 1414 of SEQ ID NO: 2082
gggcuaaaggucugacuau

SEQ ID NO: 161739 - RNA, 19 nt, Artificial Sequence
  Description of Artificial Sequence: Synthetic oligonucleotide
  Antisense strand to SEQ ID NO: 161738
auagucagaccuuuagccc

SEQ ID NO: 161740 - RNA, 19 nt, Artificial Sequence
  Description of Artificial Sequence: Synthetic oligonucleotide
  Sense strand starting at position 1425 of SEQ ID NO: 2082
cugacuauacauugcauga

SEQ ID NO: 161741 - RNA, 19 nt, Artificial Sequence
  Description of Artificial Sequence: Synthetic oligonucleotide
  Antisense strand to SEQ ID NO: 161740
ucaugcaauguauagucag

SEQ ID NO: 161742 - RNA, 19 nt, Artificial Sequence
  Description of Artificial Sequence: Synthetic oligonucleotide
  Sense strand starting at position 1429 of SEQ ID NO: 2082
cuauacauugcaugagaga

SEQ ID NO: 161743 - RNA, 19 nt, Artificial Sequence
  Description of Artificial Sequence: Synthetic oligonucleotide
  Antisense strand to SEQ ID NO: 161742
ucucucaugcaauguauag

SEQ ID NO: 161744 - RNA, 19 nt, Artificial Sequence
  Description of Artificial Sequence: Synthetic oligonucleotide
  Sense strand starting at position 1611 of SEQ ID NO: 2082
aggccaaguauuggaagaa

SEQ ID NO: 161745 - RNA, 19 nt, Artificial Sequence
  Description of Artificial Sequence: Synthetic oligonucleotide
  Antisense strand to SEQ ID NO: 161744
uucuuccaauacuuggccu

SEQ ID NO: 161746 - RNA, 19 nt, Artificial Sequence
  Description of Artificial Sequence: Synthetic oligonucleotide
  Sense strand starting at position 1654 of SEQ ID NO: 2082
gcauuaaaggacugaccuu

SEQ ID NO: 161747 - RNA, 19 nt, Artificial Sequence
  Description of Artificial Sequence: Synthetic oligonucleotide
  Antisense strand to SEQ ID NO: 161746
aaggucaguccuuuaaugc

SEQ ID NO: 161748 - RNA, 19 nt, Artificial Sequence
  Description of Artificial Sequence: Synthetic oligonucleotide
  Sense strand starting at position 1815 of SEQ ID NO: 2082
gcauucuucccagagcuga

SEQ ID NO: 161749 - RNA, 19 nt, Artificial Sequence
  Description of Artificial Sequence: Synthetic oligonucleotide
  Antisense strand to SEQ ID NO: 161748
ucagcucugggaagaaugc

SEQ ID NO: 161750 - RNA, 19 nt, Artificial Sequence
  Description of Artificial Sequence: Synthetic oligonucleotide
  Sense strand starting at position 1908 of SEQ ID NO: 2082
uugggaaguuauguuuaca

SEQ ID NO: 161751 - RNA, 19 nt, Artificial Sequence
  Description of Artificial Sequence: Synthetic oligonucleotide
  Antisense strand to SEQ ID NO: 161750
uguaaacauaacuucccaa

SEQ ID NO: 161752 - RNA, 19 nt, Artificial Sequence
  Description of Artificial Sequence: Synthetic oligonucleotide
  Sense strand starting at position 2020 of SEQ ID NO: 2082
gucaaauggucuguacaca

SEQ ID NO: 161753 - RNA, 19 nt, Artificial Sequence
  Description of Artificial Sequence: Synthetic oligonucleotide
  Antisense strand to SEQ ID NO: 161752
uguguacagaccauuugac

SEQ ID NO: 161754 - RNA, 19 nt, Artificial Sequence
  Description of Artificial Sequence: Synthetic oligonucleotide
  Sense strand starting at position 2136 of SEQ ID NO: 2082
gggugcuuacagcagaaau

SEQ ID NO: 161755 - RNA, 19 nt, Artificial Sequence
  Description of Artificial Sequence: Synthetic oligonucleotide
  Antisense strand to SEQ ID NO: 161754
auuucugcuguaagcaccc

SEQ ID NO: 161756 - RNA, 19 nt, Artificial Sequence
  Description of Artificial Sequence: Synthetic oligonucleotide
  Sense strand starting at position 2383 of SEQ ID NO: 2082
gccagacauucuucuaaug

SEQ ID NO: 161757 - RNA, 19 nt, Artificial Sequence
  Description of Artificial Sequence: Synthetic oligonucleotide
  Antisense strand to SEQ ID NO: 161756
cauuagaagaaugucuggc

SEQ ID NO: 161758 - RNA, 19 nt, Artificial Sequence
  Description of Artificial Sequence: Synthetic oligonucleotide
  Sense strand starting at position 2728 of SEQ ID NO: 2082
ccaccuuaccaugguaagu

SEQ ID NO: 161759 - RNA, 19 nt, Artificial Sequence
  Description of Artificial Sequence: Synthetic oligonucleotide
  Antisense strand to SEQ ID NO: 161758
acuuaccaugguaaggugg

SEQ ID NO: 161760 - RNA, 19 nt, Artificial Sequence
  Description of Artificial Sequence: Synthetic oligonucleotide
  Sense strand starting at position 2870 of SEQ ID NO: 2082
ccacuuucccaugagucua

SEQ ID NO: 161761 - RNA, 19 nt, Artificial Sequence
  Description of Artificial Sequence: Synthetic oligonucleotide
  Antisense strand to SEQ ID NO: 161760
uagacucaugggaaagugg

SEQ ID NO: 161762 - RNA, 19 nt, Artificial Sequence
  Description of Artificial Sequence: Synthetic oligonucleotide
  Sense strand starting at position 2875 of SEQ ID NO: 2082
uucccaugagucuauuaua

SEQ ID NO: 161763 - RNA, 19 nt, Artificial Sequence
  Description of Artificial Sequence: Synthetic oligonucleotide
  Antisense strand to SEQ ID NO: 161762
uauaauagacucaugggaa

SEQ ID NO: 161764 - RNA, 19 nt, Artificial Sequence
  Description of Artificial Sequence: Synthetic oligonucleotide
  Sense strand starting at position 2899 of SEQ ID NO: 2082
cuuguaauacuguaacuag

SEQ ID NO: 161765 - RNA, 19 nt, Artificial Sequence
  Description of Artificial Sequence: Synthetic oligonucleotide
  Antisense strand to SEQ ID NO: 161764
cuaguuacaguauuacaag

SEQ ID NO: 161766 - RNA, 19 nt, Artificial Sequence
  Description of Artificial Sequence: Synthetic oligonucleotide
  Sense strand starting at position 2902 of SEQ ID NO: 2082
guaauacuguaacuagaaa

SEQ ID NO: 161767 - RNA, 19 nt, Artificial Sequence
  Description of Artificial Sequence: Synthetic oligonucleotide
  Antisense strand to SEQ ID NO: 161766
uuucuaguuacaguauuac

SEQ ID NO: 161768 - RNA, 19 nt, Artificial Sequence
  Description of Artificial Sequence: Synthetic oligonucleotide
  Sense strand starting at position 2961 of SEQ ID NO: 2082
gcacuuaaucauuaggacu

SEQ ID NO: 161769 - RNA, 19 nt, Artificial Sequence
  Description of Artificial Sequence: Synthetic oligonucleotide
  Antisense strand to SEQ ID NO: 161768
aguccuaaugauuaagugc

SEQ ID NO: 161770 - RNA, 19 nt, Artificial Sequence
  Description of Artificial Sequence: Synthetic oligonucleotide
  Sense strand starting at position 2972 of SEQ ID NO: 2082
uuaggacuucuaugugaaa

SEQ ID NO: 161771 - RNA, 19 nt, Artificial Sequence
  Description of Artificial Sequence: Synthetic oligonucleotide
  Antisense strand to SEQ ID NO: 161770
uuucacauagaaguccuaa

SEQ ID NO: 161772 - RNA, 19 nt, Artificial Sequence
  Description of Artificial Sequence: Synthetic oligonucleotide
  Sense strand starting at position 2995 of SEQ ID NO: 2082
auaugcuguguguaauaaa

SEQ ID NO: 161773 - RNA, 19 nt, Artificial Sequence
  Description of Artificial Sequence: Synthetic oligonucleotide
  Antisense strand to SEQ ID NO: 161772
uuuauuacacacagcauau

SEQ ID NO: 161774 - RNA, 19 nt, Artificial Sequence
  Description of Artificial Sequence: Synthetic oligonucleotide
  Sense strand starting at position 3143 of SEQ ID NO: 2082
cugaguggucaucaggaca

SEQ ID NO: 161775 - RNA, 19 nt, Artificial Sequence
  Description of Artificial Sequence: Synthetic oligonucleotide
  Antisense strand to SEQ ID NO: 161774
uguccugaugaccacucag

SEQ ID NO: 161776 - RNA, 19 nt, Artificial Sequence
  Description of Artificial Sequence: Synthetic oligonucleotide
  Sense strand starting at position 3157 of SEQ ID NO: 2082
ggacaccggucuccuuaaa

SEQ ID NO: 161777 - RNA, 19 nt, Artificial Sequence
  Description of Artificial Sequence: Synthetic oligonucleotide
  Antisense strand to SEQ ID NO: 161776
uuuaaggagaccggugucc

SEQ ID NO: 161778 - RNA, 19 nt, Artificial Sequence
  Description of Artificial Sequence: Synthetic oligonucleotide
  Sense strand starting at position 3211 of SEQ ID NO: 2082
ccgugcuuucuugagaaga

SEQ ID NO: 161779 - RNA, 19 nt, Artificial Sequence
  Description of Artificial Sequence: Synthetic oligonucleotide
  Antisense strand to SEQ ID NO: 161778
ucuucucaagaaagcacgg

SEQ ID NO: 161780 - RNA, 19 nt, Artificial Sequence
  Description of Artificial Sequence: Synthetic oligonucleotide
  Sense strand starting at position 3403 of SEQ ID NO: 2082
gaauuaauguggcuugaaa

SEQ ID NO: 161781 - RNA, 19 nt, Artificial Sequence
  Description of Artificial Sequence: Synthetic oligonucleotide
  Antisense strand to SEQ ID NO: 161780
uuucaagccacauuaauuc

SEQ ID NO: 161782 - RNA, 19 nt, Artificial Sequence
  Description of Artificial Sequence: Synthetic oligonucleotide
  Sense strand starting at position 3405 of SEQ ID NO: 2082
auuaauguggcuugaaaug

SEQ ID NO: 161783 - RNA, 19 nt, Artificial Sequence
  Description of Artificial Sequence: Synthetic oligonucleotide
  Antisense strand to SEQ ID NO: 161782
cauuucaagccacauuaau

SEQ ID NO: 161784 - RNA, 19 nt, Artificial Sequence
  Description of Artificial Sequence: Synthetic oligonucleotide
  Sense strand starting at position 3410 of SEQ ID NO: 2082
uguggcuugaaaugaaaca

SEQ ID NO: 161785 - RNA, 19 nt, Artificial Sequence
  Description of Artificial Sequence: Synthetic oligonucleotide
  Antisense strand to SEQ ID NO: 161784
uguuucauuucaagccaca

SEQ ID NO: 161786 - RNA, 19 nt, Artificial Sequence
  Description of Artificial Sequence: Synthetic oligonucleotide
  Sense strand starting at position 3490 of SEQ ID NO: 2082
ugucauguuauguaggaaa

SEQ ID NO: 161787 - RNA, 19 nt, Artificial Sequence
  Description of Artificial Sequence: Synthetic oligonucleotide
  Antisense strand to SEQ ID NO: 161786
uuuccuacauaacaugaca

SEQ ID NO: 161788 - RNA, 19 nt, Artificial Sequence
  Description of Artificial Sequence: Synthetic oligonucleotide
  Sense strand starting at position 3704 of SEQ ID NO: 2082
auaacaauucuugguuaag

SEQ ID NO: 161789 - RNA, 19 nt, Artificial Sequence
  Description of Artificial Sequence: Synthetic oligonucleotide
  Antisense strand to SEQ ID NO: 161788
cuuaaccaagaauuguuau

SEQ ID NO: 161790 - RNA, 19 nt, Artificial Sequence
  Description of Artificial Sequence: Synthetic oligonucleotide
  Sense strand starting at position 339 of SEQ ID NO: 2083
gcaagaaugcugugaccag

SEQ ID NO: 161791 - RNA, 19 nt, Artificial Sequence
  Description of Artificial Sequence: Synthetic oligonucleotide
  Antisense strand to SEQ ID NO: 161790
cuggucacagcauucuugc

SEQ ID NO: 161792 - RNA, 19 nt, Artificial Sequence
  Description of Artificial Sequence: Synthetic oligonucleotide
  Sense strand starting at position 369 of SEQ ID NO: 2083
aaggaagugguccaguaua

SEQ ID NO: 161793 - RNA, 19 nt, Artificial Sequence
  Description of Artificial Sequence: Synthetic oligonucleotide
  Antisense strand to SEQ ID NO: 161792
uauacuggaccacuuccuu

SEQ ID NO: 161794 - RNA, 19 nt, Artificial Sequence
  Description of Artificial Sequence: Synthetic oligonucleotide
  Sense strand starting at position 374 of SEQ ID NO: 2083
agugguccaguauaaauua

SEQ ID NO: 161795 - RNA, 19 nt, Artificial Sequence
  Description of Artificial Sequence: Synthetic oligonucleotide
  Antisense strand to SEQ ID NO: 161794
uaauuuauacuggaccacu

SEQ ID NO: 161796 - RNA, 19 nt, Artificial Sequence
  Description of Artificial Sequence: Synthetic oligonucleotide
  Sense strand starting at position 574 of SEQ ID NO: 2083
uccugaauauuugugucuu

SEQ ID NO: 161797 - RNA, 19 nt, Artificial Sequence
  Description of Artificial Sequence: Synthetic oligonucleotide
  Antisense strand to SEQ ID NO: 161796
aagacacaaauauucagga

SEQ ID NO: 161798 - RNA, 19 nt, Artificial Sequence
  Description of Artificial Sequence: Synthetic oligonucleotide
  Sense strand starting at position 576 of SEQ ID NO: 2083
cugaauauuugugucuugu

SEQ ID NO: 161799 - RNA, 19 nt, Artificial Sequence
  Description of Artificial Sequence: Synthetic oligonucleotide
  Antisense strand to SEQ ID NO: 161798
acaagacacaaauauucag

SEQ ID NO: 161800 - RNA, 19 nt, Artificial Sequence
  Description of Artificial Sequence: Synthetic oligonucleotide
  Sense strand starting at position 578 of SEQ ID NO: 2083
gaauauuugugucuugugu

SEQ ID NO: 161801 - RNA, 19 nt, Artificial Sequence
  Description of Artificial Sequence: Synthetic oligonucleotide
  Antisense strand to SEQ ID NO: 161800
acacaagacacaaauauuc

SEQ ID NO: 161802 - RNA, 19 nt, Artificial Sequence
  Description of Artificial Sequence: Synthetic oligonucleotide
  Sense strand starting at position 624 of SEQ ID NO: 2083
uaacaaguaugguccagau

SEQ ID NO: 161803 - RNA, 19 nt, Artificial Sequence
  Description of Artificial Sequence: Synthetic oligonucleotide
  Antisense strand to SEQ ID NO: 161802
aucuggaccauacuuguua

SEQ ID NO: 161804 - RNA, 19 nt, Artificial Sequence
  Description of Artificial Sequence: Synthetic oligonucleotide
  Sense strand starting at position 823 of SEQ ID NO: 2083
guggcuagcaaggauuaaa

SEQ ID NO: 161805 - RNA, 19 nt, Artificial Sequence
  Description of Artificial Sequence: Synthetic oligonucleotide
  Antisense strand to SEQ ID NO: 161804
uuuaauccuugcuagccac

SEQ ID NO: 161806 - RNA, 19 nt, Artificial Sequence
  Description of Artificial Sequence: Synthetic oligonucleotide
  Sense strand starting at position 862 of SEQ ID NO: 2083
ggagaaagaugcccaaguu

SEQ ID NO: 161807 - RNA, 19 nt, Artificial Sequence
  Description of Artificial Sequence: Synthetic oligonucleotide
  Antisense strand to SEQ ID NO: 161806
aacuugggcaucuuucucc

SEQ ID NO: 161808 - RNA, 19 nt, Artificial Sequence
  Description of Artificial Sequence: Synthetic oligonucleotide
  Sense strand starting at position 874 of SEQ ID NO: 2083
ccaaguugugcugaagcaa

SEQ ID NO: 161809 - RNA, 19 nt, Artificial Sequence
  Description of Artificial Sequence: Synthetic oligonucleotide
  Antisense strand to SEQ ID NO: 161808
uugcuucagcacaacuugg

SEQ ID NO: 161810 - RNA, 19 nt, Artificial Sequence
  Description of Artificial Sequence: Synthetic oligonucleotide
  Sense strand starting at position 1023 of SEQ ID NO: 2083
augugcaaugcguuucuua

SEQ ID NO: 161811 - RNA, 19 nt, Artificial Sequence
  Description of Artificial Sequence: Synthetic oligonucleotide
  Antisense strand to SEQ ID NO: 161810
uaagaaacgcauugcacau

SEQ ID NO: 161812 - RNA, 19 nt, Artificial Sequence
  Description of Artificial Sequence: Synthetic oligonucleotide
  Sense strand starting at position 1024 of SEQ ID NO: 2083
ugugcaaugcguuucuuaa

SEQ ID NO: 161813 - RNA, 19 nt, Artificial Sequence
  Description of Artificial Sequence: Synthetic oligonucleotide
  Antisense strand to SEQ ID NO: 161812
uuaagaaacgcauugcaca

SEQ ID NO: 161814 - RNA, 19 nt, Artificial Sequence
  Description of Artificial Sequence: Synthetic oligonucleotide
  Sense strand starting at position 1025 of SEQ ID NO: 2083
gugcaaugcguuucuuaac

SEQ ID NO: 161815 - RNA, 19 nt, Artificial Sequence
  Description of Artificial Sequence: Synthetic oligonucleotide
  Antisense strand to SEQ ID NO: 161814
guuaagaaacgcauugcac

SEQ ID NO: 161816 - RNA, 19 nt, Artificial Sequence
  Description of Artificial Sequence: Synthetic oligonucleotide
  Sense strand starting at position 1053 of SEQ ID NO: 2083
ucuugucaccacgggauau

SEQ ID NO: 161817 - RNA, 19 nt, Artificial Sequence
  Description of Artificial Sequence: Synthetic oligonucleotide
  Antisense strand to SEQ ID NO: 161816
auaucccguggugacaaga

SEQ ID NO: 161818 - RNA, 19 nt, Artificial Sequence
  Description of Artificial Sequence: Synthetic oligonucleotide
  Sense strand starting at position 1054 of SEQ ID NO: 2083
cuugucaccacgggauaua

SEQ ID NO: 161819 - RNA, 19 nt, Artificial Sequence
  Description of Artificial Sequence: Synthetic oligonucleotide
  Antisense strand to SEQ ID NO: 161818
uauaucccguggugacaag

SEQ ID NO: 161820 - RNA, 19 nt, Artificial Sequence
  Description of Artificial Sequence: Synthetic oligonucleotide
  Sense strand starting at position 1065 of SEQ ID NO: 2083
gggauauagacaugcuagu

SEQ ID NO: 161821 - RNA, 19 nt, Artificial Sequence
  Description of Artificial Sequence: Synthetic oligonucleotide
  Antisense strand to SEQ ID NO: 161820
acuagcaugucuauauccc

SEQ ID NO: 161822 - RNA, 19 nt, Artificial Sequence
  Description of Artificial Sequence: Synthetic oligonucleotide
  Sense strand starting at position 1071 of SEQ ID NO: 2083
uagacaugcuagucagacu

SEQ ID NO: 161823 - RNA, 19 nt, Artificial Sequence
  Description of Artificial Sequence: Synthetic oligonucleotide
  Antisense strand to SEQ ID NO: 161822
agucugacuagcaugucua

SEQ ID NO: 161824 - RNA, 19 nt, Artificial Sequence
  Description of Artificial Sequence: Synthetic oligonucleotide
  Sense strand starting at position 1082 of SEQ ID NO: 2083
gucagacuuccguaccaug

SEQ ID NO: 161825 - RNA, 19 nt, Artificial Sequence
  Description of Artificial Sequence: Synthetic oligonucleotide
  Antisense strand to SEQ ID NO: 161824
caugguacggaagucugac

SEQ ID NO: 161826 - RNA, 19 nt, Artificial Sequence
  Description of Artificial Sequence: Synthetic oligonucleotide
  Sense strand starting at position 2150 of SEQ ID NO: 2083
ccuggauucggaugcuaag

SEQ ID NO: 161827 - RNA, 19 nt, Artificial Sequence
  Description of Artificial Sequence: Synthetic oligonucleotide
  Antisense strand to SEQ ID NO: 161826
cuuagcauccgaauccagg

SEQ ID NO: 161828 - RNA, 19 nt, Artificial Sequence
  Description of Artificial Sequence: Synthetic oligonucleotide
  Sense strand starting at position 2421 of SEQ ID NO: 2083
ccaggaaaucccugagcuu

SEQ ID NO: 161829 - RNA, 19 nt, Artificial Sequence
  Description of Artificial Sequence: Synthetic oligonucleotide
  Antisense strand to SEQ ID NO: 161828
aagcucagggauuuccugg

SEQ ID NO: 161830 - RNA, 19 nt, Artificial Sequence
  Description of Artificial Sequence: Synthetic oligonucleotide
  Sense strand starting at position 2607 of SEQ ID NO: 2083
uccugcaagccugaagaau

SEQ ID NO: 161831 - RNA, 19 nt, Artificial Sequence
  Description of Artificial Sequence: Synthetic oligonucleotide
  Antisense strand to SEQ ID NO: 161830
auucuucaggcuugcagga

SEQ ID NO: 161832 - RNA, 19 nt, Artificial Sequence
  Description of Artificial Sequence: Synthetic oligonucleotide
  Sense strand starting at position 2684 of SEQ ID NO: 2083
ggcggaauuacuuacaggu

SEQ ID NO: 161833 - RNA, 19 nt, Artificial Sequence
  Description of Artificial Sequence: Synthetic oligonucleotide
  Antisense strand to SEQ ID NO: 161832
accuguaaguaauuccgcc

SEQ ID NO: 161834 - RNA, 19 nt, Artificial Sequence
  Description of Artificial Sequence: Synthetic oligonucleotide
  Sense strand starting at position 2709 of SEQ ID NO: 2083
ggacuucgaauguagcuua

SEQ ID NO: 161835 - RNA, 19 nt, Artificial Sequence
  Description of Artificial Sequence: Synthetic oligonucleotide
  Antisense strand to SEQ ID NO: 161834
uaagcuacauucgaagucc

SEQ ID NO: 161836 - RNA, 19 nt, Artificial Sequence
  Description of Artificial Sequence: Synthetic oligonucleotide
  Sense strand starting at position 2834 of SEQ ID NO: 2083
cagugagagcuucggacaa

SEQ ID NO: 161837 - RNA, 19 nt, Artificial Sequence
  Description of Artificial Sequence: Synthetic oligonucleotide
  Antisense strand to SEQ ID NO: 161836
uuguccgaagcucucacug

SEQ ID NO: 161838 - RNA, 19 nt, Artificial Sequence
  Description of Artificial Sequence: Synthetic oligonucleotide
  Sense strand starting at position 2838 of SEQ ID NO: 2083
gagagcuucggacaaguuu

SEQ ID NO: 161839 - RNA, 19 nt, Artificial Sequence
  Description of Artificial Sequence: Synthetic oligonucleotide
  Antisense strand to SEQ ID NO: 161838
aaacuuguccgaagcucuc

SEQ ID NO: 161840 - RNA, 19 nt, Artificial Sequence
  Description of Artificial Sequence: Synthetic oligonucleotide
  Sense strand starting at position 2867 of SEQ ID NO: 2083
ugugauguccucuaaauua

SEQ ID NO: 161841 - RNA, 19 nt, Artificial Sequence
  Description of Artificial Sequence: Synthetic oligonucleotide
  Antisense strand to SEQ ID NO: 161840
uaauuuagaggacaucaca

SEQ ID NO: 161842 - RNA, 19 nt, Artificial Sequence
  Description of Artificial Sequence: Synthetic oligonucleotide
  Sense strand starting at position 3148 of SEQ ID NO: 2083
aggauauagucauuguaga

SEQ ID NO: 161843 - RNA, 19 nt, Artificial Sequence
  Description of Artificial Sequence: Synthetic oligonucleotide
  Antisense strand to SEQ ID NO: 161842
ucuacaaugacuauauccu

SEQ ID NO: 161844 - RNA, 19 nt, Artificial Sequence
  Description of Artificial Sequence: Synthetic oligonucleotide
  Sense strand starting at position 3149 of SEQ ID NO: 2083
ggauauagucauuguagag

SEQ ID NO: 161845 - RNA, 19 nt, Artificial Sequence
  Description of Artificial Sequence: Synthetic oligonucleotide
  Antisense strand to SEQ ID NO: 161844
cucuacaaugacuauaucc

SEQ ID NO: 161846 - RNA, 19 nt, Artificial Sequence
  Description of Artificial Sequence: Synthetic oligonucleotide
  Sense strand starting at position 3153 of SEQ ID NO: 2083
auagucauuguagagcaaa

SEQ ID NO: 161847 - RNA, 19 nt, Artificial Sequence
  Description of Artificial Sequence: Synthetic oligonucleotide
  Antisense strand to SEQ ID NO: 161846
uuugcucuacaaugacuau

SEQ ID NO: 161848 - RNA, 19 nt, Artificial Sequence
  Description of Artificial Sequence: Synthetic oligonucleotide
  Sense strand starting at position 3296 of SEQ ID NO: 2083
augccaucugagcaggaua

SEQ ID NO: 161849 - RNA, 19 nt, Artificial Sequence
  Description of Artificial Sequence: Synthetic oligonucleotide
  Antisense strand to SEQ ID NO: 161848
uauccugcucagauggcau

SEQ ID NO: 161850 - RNA, 19 nt, Artificial Sequence
  Description of Artificial Sequence: Synthetic oligonucleotide
  Sense strand starting at position 3299 of SEQ ID NO: 2083
ccaucugagcaggauagua

SEQ ID NO: 161851 - RNA, 19 nt, Artificial Sequence
  Description of Artificial Sequence: Synthetic oligonucleotide
  Antisense strand to SEQ ID NO: 161850
uacuauccugcucagaugg

SEQ ID NO: 161852 - RNA, 19 nt, Artificial Sequence
  Description of Artificial Sequence: Synthetic oligonucleotide
  Sense strand starting at position 3535 of SEQ ID NO: 2083
uauuucuuuguuuggguga

SEQ ID NO: 161853 - RNA, 19 nt, Artificial Sequence
  Description of Artificial Sequence: Synthetic oligonucleotide
  Antisense strand to SEQ ID NO: 161852
ucacccaaacaaagaaaua

SEQ ID NO: 161854 - RNA, 19 nt, Artificial Sequence
  Description of Artificial Sequence: Synthetic oligonucleotide
  Sense strand starting at position 3540 of SEQ ID NO: 2083
cuuuguuugggugacacaa

SEQ ID NO: 161855 - RNA, 19 nt, Artificial Sequence
  Description of Artificial Sequence: Synthetic oligonucleotide
  Antisense strand to SEQ ID NO: 161854
uugugucacccaaacaaag

SEQ ID NO: 161856 - RNA, 19 nt, Artificial Sequence
  Description of Artificial Sequence: Synthetic oligonucleotide
  Sense strand starting at position 3559 of SEQ ID NO: 2083
agaugaauggucuauuguc

SEQ ID NO: 161857 - RNA, 19 nt, Artificial Sequence
  Description of Artificial Sequence: Synthetic oligonucleotide
  Antisense strand to SEQ ID NO: 161856
gacaauagaccauucaucu

SEQ ID NO: 161858 - RNA, 19 nt, Artificial Sequence
  Description of Artificial Sequence: Synthetic oligonucleotide
  Sense strand starting at position 3609 of SEQ ID NO: 2083
gugccaccuccuggagaaa

SEQ ID NO: 161859 - RNA, 19 nt, Artificial Sequence
  Description of Artificial Sequence: Synthetic oligonucleotide
  Antisense strand to SEQ ID NO: 161858
uuucuccaggagguggcac

SEQ ID NO: 161860 - RNA, 19 nt, Artificial Sequence
  Description of Artificial Sequence: Synthetic oligonucleotide
  Sense strand starting at position 3610 of SEQ ID NO: 2083
ugccaccuccuggagaaau

SEQ ID NO: 161861 - RNA, 19 nt, Artificial Sequence
  Description of Artificial Sequence: Synthetic oligonucleotide
  Antisense strand to SEQ ID NO: 161860
auuucuccaggagguggca

SEQ ID NO: 161862 - RNA, 19 nt, Artificial Sequence
  Description of Artificial Sequence: Synthetic oligonucleotide
  Sense strand starting at position 3713 of SEQ ID NO: 2083
ggcuuacaguacuuauaua

SEQ ID NO: 161863 - RNA, 19 nt, Artificial Sequence
  Description of Artificial Sequence: Synthetic oligonucleotide
  Antisense strand to SEQ ID NO: 161862
uauauaaguacuguaagcc

SEQ ID NO: 161864 - RNA, 19 nt, Artificial Sequence
  Description of Artificial Sequence: Synthetic oligonucleotide
  Sense strand starting at position 3862 of SEQ ID NO: 2083
gucuaaugagauugacauu

SEQ ID NO: 161865 - RNA, 19 nt, Artificial Sequence
  Description of Artificial Sequence: Synthetic oligonucleotide
  Antisense strand to SEQ ID NO: 161864
aaugucaaucucauuagac

SEQ ID NO: 161866 - RNA, 19 nt, Artificial Sequence
  Description of Artificial Sequence: Synthetic oligonucleotide
  Sense strand starting at position 3911 of SEQ ID NO: 2083
uugugagauacuggacaua

SEQ ID NO: 161867 - RNA, 19 nt, Artificial Sequence
  Description of Artificial Sequence: Synthetic oligonucleotide
  Antisense strand to SEQ ID NO: 161866
uauguccaguaucucacaa

SEQ ID NO: 161868 - RNA, 19 nt, Artificial Sequence
  Description of Artificial Sequence: Synthetic oligonucleotide
  Sense strand starting at position 3982 of SEQ ID NO: 2083
cguaccuuucuccaggaaa

SEQ ID NO: 161869 - RNA, 19 nt, Artificial Sequence
  Description of Artificial Sequence: Synthetic oligonucleotide
  Antisense strand to SEQ ID NO: 161868
uuuccuggagaaagguacg

SEQ ID NO: 161870 - RNA, 19 nt, Artificial Sequence
  Description of Artificial Sequence: Synthetic oligonucleotide
  Sense strand starting at position 3884 of SEQ ID NO: 2084
cucagauggcaucaaucua

SEQ ID NO: 161871 - RNA, 19 nt, Artificial Sequence
  Description of Artificial Sequence: Synthetic oligonucleotide
  Antisense strand to SEQ ID NO: 161870
uagauugaugccaucugag

SEQ ID NO: 161872 - RNA, 19 nt, Artificial Sequence
  Description of Artificial Sequence: Synthetic oligonucleotide
  Sense strand starting at position 3881 of SEQ ID NO: 2084
ggucucagauggcaucaau

SEQ ID NO: 161873 - RNA, 19 nt, Artificial Sequence
  Description of Artificial Sequence: Synthetic oligonucleotide
  Antisense strand to SEQ ID NO: 161872
auugaugccaucugagacc

SEQ ID NO: 161874 - RNA, 19 nt, Artificial Sequence
  Description of Artificial Sequence: Synthetic oligonucleotide
  Sense strand starting at position 3865 of SEQ ID NO: 2084
gaaggauucuaagcaaggu

SEQ ID NO: 161875 - RNA, 19 nt, Artificial Sequence
  Description of Artificial Sequence: Synthetic oligonucleotide
  Antisense strand to SEQ ID NO: 161874
accuugcuuagaauccuuc

SEQ ID NO: 161876 - RNA, 19 nt, Artificial Sequence
  Description of Artificial Sequence: Synthetic oligonucleotide
  Sense strand starting at position 3862 of SEQ ID NO: 2084
acugaaggauucuaagcaa

SEQ ID NO: 161877 - RNA, 19 nt, Artificial Sequence
  Description of Artificial Sequence: Synthetic oligonucleotide
  Antisense strand to SEQ ID NO: 161876
uugcuuagaauccuucagu

SEQ ID NO: 161878 - RNA, 19 nt, Artificial Sequence
  Description of Artificial Sequence: Synthetic oligonucleotide
  Sense strand starting at position 3828 of SEQ ID NO: 2084
aucaauacuuguugaugga

SEQ ID NO: 161879 - RNA, 19 nt, Artificial Sequence
  Description of Artificial Sequence: Synthetic oligonucleotide
  Antisense strand to SEQ ID NO: 161878
uccaucaacaaguauugau

SEQ ID NO: 161880 - RNA, 19 nt, Artificial Sequence
  Description of Artificial Sequence: Synthetic oligonucleotide
  Sense strand starting at position 3761 of SEQ ID NO: 2084
ggauguaucucuccagugu

SEQ ID NO: 161881 - RNA, 19 nt, Artificial Sequence
  Description of Artificial Sequence: Synthetic oligonucleotide
  Antisense strand to SEQ ID NO: 161880
acacuggagagauacaucc

SEQ ID NO: 161882 - RNA, 19 nt, Artificial Sequence
  Description of Artificial Sequence: Synthetic oligonucleotide
  Sense strand starting at position 3759 of SEQ ID NO: 2084
agggauguaucucuccagu

SEQ ID NO: 161883 - RNA, 19 nt, Artificial Sequence
  Description of Artificial Sequence: Synthetic oligonucleotide
  Antisense strand to SEQ ID NO: 161882
acuggagagauacaucccu

SEQ ID NO: 161884 - RNA, 19 nt, Artificial Sequence
  Description of Artificial Sequence: Synthetic oligonucleotide
  Sense strand starting at position 3632 of SEQ ID NO: 2084
gccuuucuugauggccaua

SEQ ID NO: 161885 - RNA, 19 nt, Artificial Sequence
  Description of Artificial Sequence: Synthetic oligonucleotide
  Antisense strand to SEQ ID NO: 161884
uauggccaucaagaaaggc

SEQ ID NO: 161886 - RNA, 19 nt, Artificial Sequence
  Description of Artificial Sequence: Synthetic oligonucleotide
  Sense strand starting at position 3626 of SEQ ID NO: 2084
ccugaagccuuucuugaug

SEQ ID NO: 161887 - RNA, 19 nt, Artificial Sequence
  Description of Artificial Sequence: Synthetic oligonucleotide
  Antisense strand to SEQ ID NO: 161886
caucaagaaaggcuucagg

SEQ ID NO: 161888 - RNA, 19 nt, Artificial Sequence
  Description of Artificial Sequence: Synthetic oligonucleotide
  Sense strand starting at position 3599 of SEQ ID NO: 2084
uaggucucagccuagacau

SEQ ID NO: 161889 - RNA, 19 nt, Artificial Sequence
  Description of Artificial Sequence: Synthetic oligonucleotide
  Antisense strand to SEQ ID NO: 161888
augucuaggcugagaccua

SEQ ID NO: 161890 - RNA, 19 nt, Artificial Sequence
  Description of Artificial Sequence: Synthetic oligonucleotide
  Sense strand starting at position 3448 of SEQ ID NO: 2084
agugacaaucauggaccua

SEQ ID NO: 161891 - RNA, 19 nt, Artificial Sequence
  Description of Artificial Sequence: Synthetic oligonucleotide
  Antisense strand to SEQ ID NO: 161890
uagguccaugauugucacu

SEQ ID NO: 161892 - RNA, 19 nt, Artificial Sequence
  Description of Artificial Sequence: Synthetic oligonucleotide
  Sense strand starting at position 3427 of SEQ ID NO: 2084
ggguguagggcagauuaaa

SEQ ID NO: 161893 - RNA, 19 nt, Artificial Sequence
  Description of Artificial Sequence: Synthetic oligonucleotide
  Antisense strand to SEQ ID NO: 161892
uuuaaucugcccuacaccc

SEQ ID NO: 161894 - RNA, 19 nt, Artificial Sequence
  Description of Artificial Sequence: Synthetic oligonucleotide
  Sense strand starting at position 3393 of SEQ ID NO: 2084
gguggcaucugaaaugggu

SEQ ID NO: 161895 - RNA, 19 nt, Artificial Sequence
  Description of Artificial Sequence: Synthetic oligonucleotide
  Antisense strand to SEQ ID NO: 161894
acccauuucagaugccacc

SEQ ID NO: 161896 - RNA, 19 nt, Artificial Sequence
  Description of Artificial Sequence: Synthetic oligonucleotide
  Sense strand starting at position 3390 of SEQ ID NO: 2084
ggagguggcaucugaaaug

SEQ ID NO: 161897 - RNA, 19 nt, Artificial Sequence
  Description of Artificial Sequence: Synthetic oligonucleotide
  Antisense strand to SEQ ID NO: 161896
cauuucagaugccaccucc

SEQ ID NO: 161898 - RNA, 19 nt, Artificial Sequence
  Description of Artificial Sequence: Synthetic oligonucleotide
  Sense strand starting at position 3293 of SEQ ID NO: 2084
auaccauugcagugaagug

SEQ ID NO: 161899 - RNA, 19 nt, Artificial Sequence
  Description of Artificial Sequence: Synthetic oligonucleotide
  Antisense strand to SEQ ID NO: 161898
cacuucacugcaaugguau

SEQ ID NO: 161900 - RNA, 19 nt, Artificial Sequence
  Description of Artificial Sequence: Synthetic oligonucleotide
  Sense strand starting at position 3285 of SEQ ID NO: 2084
gggugaauauaccauugca

SEQ ID NO: 161901 - RNA, 19 nt, Artificial Sequence
  Description of Artificial Sequence: Synthetic oligonucleotide
  Antisense strand to SEQ ID NO: 161900
ugcaaugguauauucaccc

SEQ ID NO: 161902 - RNA, 19 nt, Artificial Sequence
  Description of Artificial Sequence: Synthetic oligonucleotide
  Sense strand starting at position 3274 of SEQ ID NO: 2084
uguaaaggaaugggugaau

SEQ ID NO: 161903 - RNA, 19 nt, Artificial Sequence
  Description of Artificial Sequence: Synthetic oligonucleotide
  Antisense strand to SEQ ID NO: 161902
auucacccauuccuuuaca

SEQ ID NO: 161904 - RNA, 19 nt, Artificial Sequence
  Description of Artificial Sequence: Synthetic oligonucleotide
  Sense strand starting at position 2734 of SEQ ID NO: 2084
cuagacggauuccugauau

SEQ ID NO: 161905 - RNA, 19 nt, Artificial Sequence
  Description of Artificial Sequence: Synthetic oligonucleotide
  Antisense strand to SEQ ID NO: 161904
auaucaggaauccgucuag

SEQ ID NO: 161906 - RNA, 19 nt, Artificial Sequence
  Description of Artificial Sequence: Synthetic oligonucleotide
  Sense strand starting at position 2396 of SEQ ID NO: 2084
ccggacuucccuuaagaac

SEQ ID NO: 161907 - RNA, 19 nt, Artificial Sequence
  Description of Artificial Sequence: Synthetic oligonucleotide
  Antisense strand to SEQ ID NO: 161906
guucuuaagggaaguccgg

SEQ ID NO: 161908 - RNA, 19 nt, Artificial Sequence
  Description of Artificial Sequence: Synthetic oligonucleotide
  Sense strand starting at position 2314 of SEQ ID NO: 2084
agaaguuauugguccagcu

SEQ ID NO: 161909 - RNA, 19 nt, Artificial Sequence
  Description of Artificial Sequence: Synthetic oligonucleotide
  Antisense strand to SEQ ID NO: 161908
agcuggaccaauaacuucu

SEQ ID NO: 161910 - RNA, 19 nt, Artificial Sequence
  Description of Artificial Sequence: Synthetic oligonucleotide
  Sense strand starting at position 2311 of SEQ ID NO: 2084
cuaagaaguuauuggucca

SEQ ID NO: 161911 - RNA, 19 nt, Artificial Sequence
  Description of Artificial Sequence: Synthetic oligonucleotide
  Antisense strand to SEQ ID NO: 161910
uggaccaauaacuucuuag

SEQ ID NO: 161912 - RNA, 19 nt, Artificial Sequence
  Description of Artificial Sequence: Synthetic oligonucleotide
  Sense strand starting at position 2274 of SEQ ID NO: 2084
ggucgcuacagagaaucuu

SEQ ID NO: 161913 - RNA, 19 nt, Artificial Sequence
  Description of Artificial Sequence: Synthetic oligonucleotide
  Antisense strand to SEQ ID NO: 161912
aagauucucuguagcgacc

SEQ ID NO: 161914 - RNA, 19 nt, Artificial Sequence
  Description of Artificial Sequence: Synthetic oligonucleotide
  Sense strand starting at position 2267 of SEQ ID NO: 2084
guaugagggucgcuacaga

SEQ ID NO: 161915 - RNA, 19 nt, Artificial Sequence
  Description of Artificial Sequence: Synthetic oligonucleotide
  Antisense strand to SEQ ID NO: 161914
ucuguagcgacccucauac

SEQ ID NO: 161916 - RNA, 19 nt, Artificial Sequence
  Description of Artificial Sequence: Synthetic oligonucleotide
  Sense strand starting at position 2148 of SEQ ID NO: 2084
ggaaaccucuguuggaaag

SEQ ID NO: 161917 - RNA, 19 nt, Artificial Sequence
  Description of Artificial Sequence: Synthetic oligonucleotide
  Antisense strand to SEQ ID NO: 161916
cuuuccaacagagguuucc

SEQ ID NO: 161918 - RNA, 19 nt, Artificial Sequence
  Description of Artificial Sequence: Synthetic oligonucleotide
  Sense strand starting at position 2146 of SEQ ID NO: 2084
cuggaaaccucuguuggaa

SEQ ID NO: 161919 - RNA, 19 nt, Artificial Sequence
  Description of Artificial Sequence: Synthetic oligonucleotide
  Antisense strand to SEQ ID NO: 161918
uuccaacagagguuuccag

SEQ ID NO: 161920 - RNA, 19 nt, Artificial Sequence
  Description of Artificial Sequence: Synthetic oligonucleotide
  Sense strand starting at position 2145 of SEQ ID NO: 2084
gcuggaaaccucuguugga

SEQ ID NO: 161921 - RNA, 19 nt, Artificial Sequence
  Description of Artificial Sequence: Synthetic oligonucleotide
  Antisense strand to SEQ ID NO: 161920
uccaacagagguuuccagc

SEQ ID NO: 161922 - RNA, 19 nt, Artificial Sequence
  Description of Artificial Sequence: Synthetic oligonucleotide
  Sense strand starting at position 1331 of SEQ ID NO: 2084
gggcgcaagugucaaacuu

SEQ ID NO: 161923 - RNA, 19 nt, Artificial Sequence
  Description of Artificial Sequence: Synthetic oligonucleotide
  Antisense strand to SEQ ID NO: 161922
aaguuugacacuugcgccc

SEQ ID NO: 161924 - RNA, 19 nt, Artificial Sequence
  Description of Artificial Sequence: Synthetic oligonucleotide
  Sense strand starting at position 1011 of SEQ ID NO: 2084
cauagucgggcugaugaga

SEQ ID NO: 161925 - RNA, 19 nt, Artificial Sequence
  Description of Artificial Sequence: Synthetic oligonucleotide
  Antisense strand to SEQ ID NO: 161924
ucucaucagcccgacuaug

SEQ ID NO: 161926 - RNA, 19 nt, Artificial Sequence
  Description of Artificial Sequence: Synthetic oligonucleotide
  Sense strand starting at position 978 of SEQ ID NO: 2084
cggcuucccgcugagaaau

SEQ ID NO: 161927 - RNA, 19 nt, Artificial Sequence
  Description of Artificial Sequence: Synthetic oligonucleotide
  Antisense strand to SEQ ID NO: 161926
auuucucagcgggaagccg

SEQ ID NO: 161928 - RNA, 19 nt, Artificial Sequence
  Description of Artificial Sequence: Synthetic oligonucleotide
  Sense strand starting at position 977 of SEQ ID NO: 2084
ucggcuucccgcugagaaa

SEQ ID NO: 161929 - RNA, 19 nt, Artificial Sequence
  Description of Artificial Sequence: Synthetic oligonucleotide
  Antisense strand to SEQ ID NO: 161928
uuucucagcgggaagccga

SEQ ID NO: 161930 - RNA, 19 nt, Artificial Sequence
  Description of Artificial Sequence: Synthetic oligonucleotide
  Sense strand starting at position 184 of SEQ ID NO: 2084
ggcguccugcccggaaauu

SEQ ID NO: 161931 - RNA, 19 nt, Artificial Sequence
  Description of Artificial Sequence: Synthetic oligonucleotide
  Antisense strand to SEQ ID NO: 161930
aauuuccgggcaggacgcc

SEQ ID NO: 161932 - RNA, 19 nt, Artificial Sequence
  Description of Artificial Sequence: Synthetic oligonucleotide
  Sense strand starting at position 183 of SEQ ID NO: 2084
aggcguccugcccggaaau

SEQ ID NO: 161933 - RNA, 19 nt, Artificial Sequence
  Description of Artificial Sequence: Synthetic oligonucleotide
  Antisense strand to SEQ ID NO: 161932
auuuccgggcaggacgccu

SEQ ID NO: 161934 - RNA, 19 nt, Artificial Sequence
  Description of Artificial Sequence: Synthetic oligonucleotide
  Sense strand starting at position 42 of SEQ ID NO: 2084
gcaugaacuccgggaggua

SEQ ID NO: 161935 - RNA, 19 nt, Artificial Sequence
  Description of Artificial Sequence: Synthetic oligonucleotide
  Antisense strand to SEQ ID NO: 161934
uaccucccggaguucaugc

SEQ ID NO: 161936 - RNA, 19 nt, Artificial Sequence
  Description of Artificial Sequence: Synthetic oligonucleotide
  Sense strand starting at position 2 of SEQ ID NO: 2084
ccggcaugucgugauccuu

SEQ ID NO: 161937 - RNA, 19 nt, Artificial Sequence
  Description of Artificial Sequence: Synthetic oligonucleotide
  Antisense strand to SEQ ID NO: 161936
aaggaucacgacaugccgg

SEQ ID NO: 161938 - RNA, 19 nt, Artificial Sequence
  Description of Artificial Sequence: Synthetic oligonucleotide
  Sense strand starting at position 4 of SEQ ID NO: 2085
guaacaaguguauggaaag

SEQ ID NO: 161939 - RNA, 19 nt, Artificial Sequence
  Description of Artificial Sequence: Synthetic oligonucleotide
  Antisense strand to SEQ ID NO: 161938
cuuuccauacacuuguuac

SEQ ID NO: 161940 - RNA, 19 nt, Artificial Sequence
  Description of Artificial Sequence: Synthetic oligonucleotide
  Sense strand starting at position 143 of SEQ ID NO: 2085
cauugaacugcuggguuaa

SEQ ID NO: 161941 - RNA, 19 nt, Artificial Sequence
  Description of Artificial Sequence: Synthetic oligonucleotide
  Antisense strand to SEQ ID NO: 161940
uuaacccagcaguucaaug

SEQ ID NO: 161942 - RNA, 19 nt, Artificial Sequence
  Description of Artificial Sequence: Synthetic oligonucleotide
  Sense strand starting at position 154 of SEQ ID NO: 2085
uggguuaaucugggaauua

SEQ ID NO: 161943 - RNA, 19 nt, Artificial Sequence
  Description of Artificial Sequence: Synthetic oligonucleotide
  Antisense strand to SEQ ID NO: 161942
uaauucccagauuaaccca

SEQ ID NO: 161944 - RNA, 19 nt, Artificial Sequence
  Description of Artificial Sequence: Synthetic oligonucleotide
  Sense strand starting at position 257 of SEQ ID NO: 2085
uguguauuccaacaaacug

SEQ ID NO: 161945 - RNA, 19 nt, Artificial Sequence
  Description of Artificial Sequence: Synthetic oligonucleotide
  Antisense strand to SEQ ID NO: 161944
caguuuguuggaauacaca

SEQ ID NO: 161946 - RNA, 19 nt, Artificial Sequence
  Description of Artificial Sequence: Synthetic oligonucleotide
  Sense strand starting at position 307 of SEQ ID NO: 2085
acuacauauuacuuugagu

SEQ ID NO: 161947 - RNA, 19 nt, Artificial Sequence
  Description of Artificial Sequence: Synthetic oligonucleotide
  Antisense strand to SEQ ID NO: 161946
acucaaaguaauauguagu

SEQ ID NO: 161948 - RNA, 19 nt, Artificial Sequence
  Description of Artificial Sequence: Synthetic oligonucleotide
  Sense strand starting at position 364 of SEQ ID NO: 2085
uauauuguuugaguaggau

SEQ ID NO: 161949 - RNA, 19 nt, Artificial Sequence
  Description of Artificial Sequence: Synthetic oligonucleotide
  Antisense strand to SEQ ID NO: 161948
auccuacucaaacaauaua

SEQ ID NO: 161950 - RNA, 19 nt, Artificial Sequence
  Description of Artificial Sequence: Synthetic oligonucleotide
  Sense strand starting at position 367 of SEQ ID NO: 2085
auuguuugaguaggaucaa

SEQ ID NO: 161951 - RNA, 19 nt, Artificial Sequence
  Description of Artificial Sequence: Synthetic oligonucleotide
  Antisense strand to SEQ ID NO: 161950
uugauccuacucaaacaau

SEQ ID NO: 161952 - RNA, 19 nt, Artificial Sequence
  Description of Artificial Sequence: Synthetic oligonucleotide
  Sense strand starting at position 522 of SEQ ID NO: 2085
cguuguucagcaguuuaua

SEQ ID NO: 161953 - RNA, 19 nt, Artificial Sequence
  Description of Artificial Sequence: Synthetic oligonucleotide
  Antisense strand to SEQ ID NO: 161952
uauaaacugcugaacaacg

SEQ ID NO: 161954 - RNA, 19 nt, Artificial Sequence
  Description of Artificial Sequence: Synthetic oligonucleotide
  Sense strand starting at position 681 of SEQ ID NO: 2085
uugagaauuugagaaugua

SEQ ID NO: 161955 - RNA, 19 nt, Artificial Sequence
  Description of Artificial Sequence: Synthetic oligonucleotide
  Antisense strand to SEQ ID NO: 161954
uacauucucaaauucucaa

SEQ ID NO: 161956 - RNA, 19 nt, Artificial Sequence
  Description of Artificial Sequence: Synthetic oligonucleotide
  Sense strand starting at position 705 of SEQ ID NO: 2085
ggauuacugaguugacauc

SEQ ID NO: 161957 - RNA, 19 nt, Artificial Sequence
  Description of Artificial Sequence: Synthetic oligonucleotide
  Antisense strand to SEQ ID NO: 161956
gaugucaacucaguaaucc

SEQ ID NO: 161958 - RNA, 19 nt, Artificial Sequence
  Description of Artificial Sequence: Synthetic oligonucleotide
  Sense strand starting at position 715 of SEQ ID NO: 2085
guugacauccagcauuacu

SEQ ID NO: 161959 - RNA, 19 nt, Artificial Sequence
  Description of Artificial Sequence: Synthetic oligonucleotide
  Antisense strand to SEQ ID NO: 161958
aguaaugcuggaugucaac

SEQ ID NO: 161960 - RNA, 19 nt, Artificial Sequence
  Description of Artificial Sequence: Synthetic oligonucleotide
  Sense strand starting at position 1081 of SEQ ID NO: 2085
guagaaacagcuuaaugua

SEQ ID NO: 161961 - RNA, 19 nt, Artificial Sequence
  Description of Artificial Sequence: Synthetic oligonucleotide
  Antisense strand to SEQ ID NO: 161960
uacauuaagcuguuucuac

SEQ ID NO: 161962 - RNA, 19 nt, Artificial Sequence
  Description of Artificial Sequence: Synthetic oligonucleotide
  Sense strand starting at position 1169 of SEQ ID NO: 2085
cagugaauucugggaucuc

SEQ ID NO: 161963 - RNA, 19 nt, Artificial Sequence
  Description of Artificial Sequence: Synthetic oligonucleotide
  Antisense strand to SEQ ID NO: 161962
gagaucccagaauucacug

SEQ ID NO: 161964 - RNA, 19 nt, Artificial Sequence
  Description of Artificial Sequence: Synthetic oligonucleotide
  Sense strand starting at position 1323 of SEQ ID NO: 2085
gugggaucagggcauuaca

SEQ ID NO: 161965 - RNA, 19 nt, Artificial Sequence
  Description of Artificial Sequence: Synthetic oligonucleotide
  Antisense strand to SEQ ID NO: 161964
uguaaugcccugaucccac

SEQ ID NO: 161966 - RNA, 19 nt, Artificial Sequence
  Description of Artificial Sequence: Synthetic oligonucleotide
  Sense strand starting at position 1476 of SEQ ID NO: 2085
cgauucucauccuuuagaa

SEQ ID NO: 161967 - RNA, 19 nt, Artificial Sequence
  Description of Artificial Sequence: Synthetic oligonucleotide
  Antisense strand to SEQ ID NO: 161966
uucuaaaggaugagaaucg

SEQ ID NO: 161968 - RNA, 19 nt, Artificial Sequence
  Description of Artificial Sequence: Synthetic oligonucleotide
  Sense strand starting at position 1526 of SEQ ID NO: 2085
ggaauuccaguacaauugu

SEQ ID NO: 161969 - RNA, 19 nt, Artificial Sequence
  Description of Artificial Sequence: Synthetic oligonucleotide
  Antisense strand to SEQ ID NO: 161968
acaauuguacuggaauucc

SEQ ID NO: 161970 - RNA, 19 nt, Artificial Sequence
  Description of Artificial Sequence: Synthetic oligonucleotide
  Sense strand starting at position 1572 of SEQ ID NO: 2085
aaagguucuggagguguca

SEQ ID NO: 161971 - RNA, 19 nt, Artificial Sequence
  Description of Artificial Sequence: Synthetic oligonucleotide
  Antisense strand to SEQ ID NO: 161970
ugacaccuccagaaccuuu

SEQ ID NO: 161972 - RNA, 19 nt, Artificial Sequence
  Description of Artificial Sequence: Synthetic oligonucleotide
  Sense strand starting at position 1618 of SEQ ID NO: 2085
ggcaguucucaccaaccuu

SEQ ID NO: 161973 - RNA, 19 nt, Artificial Sequence
  Description of Artificial Sequence: Synthetic oligonucleotide
  Antisense strand to SEQ ID NO: 161972
aagguuggugagaacugcc

SEQ ID NO: 161974 - RNA, 19 nt, Artificial Sequence
  Description of Artificial Sequence: Synthetic oligonucleotide
  Sense strand starting at position 1669 of SEQ ID NO: 2085
ccuuaaguuccguucguuu

SEQ ID NO: 161975 - RNA, 19 nt, Artificial Sequence
  Description of Artificial Sequence: Synthetic oligonucleotide
  Antisense strand to SEQ ID NO: 161974
aaacgaacggaacuuaagg

SEQ ID NO: 161976 - RNA, 19 nt, Artificial Sequence
  Description of Artificial Sequence: Synthetic oligonucleotide
  Sense strand starting at position 1674 of SEQ ID NO: 2085
aguuccguucguuuaucaa

SEQ ID NO: 161977 - RNA, 19 nt, Artificial Sequence
  Description of Artificial Sequence: Synthetic oligonucleotide
  Antisense strand to SEQ ID NO: 161976
uugauaaacgaacggaacu

SEQ ID NO: 161978 - RNA, 19 nt, Artificial Sequence
  Description of Artificial Sequence: Synthetic oligonucleotide
  Sense strand starting at position 1838 of SEQ ID NO: 2085
aggcucaccugauugaacu

SEQ ID NO: 161979 - RNA, 19 nt, Artificial Sequence
  Description of Artificial Sequence: Synthetic oligonucleotide
  Antisense strand to SEQ ID NO: 161978
aguucaaucaggugagccu

SEQ ID NO: 161980 - RNA, 19 nt, Artificial Sequence
  Description of Artificial Sequence: Synthetic oligonucleotide
  Sense strand starting at position 1873 of SEQ ID NO: 2085
ggguucccauaucuuagaa

SEQ ID NO: 161981 - RNA, 19 nt, Artificial Sequence
  Description of Artificial Sequence: Synthetic oligonucleotide
  Antisense strand to SEQ ID NO: 161980
uucuaagauaugggaaccc

SEQ ID NO: 161982 - RNA, 19 nt, Artificial Sequence
  Description of Artificial Sequence: Synthetic oligonucleotide
  Sense strand starting at position 1943 of SEQ ID NO: 2085
ggagaagcauuggccucua

SEQ ID NO: 161983 - RNA, 19 nt, Artificial Sequence
  Description of Artificial Sequence: Synthetic oligonucleotide
  Antisense strand to SEQ ID NO: 161982
uagaggccaaugcuucucc

SEQ ID NO: 161984 - RNA, 19 nt, Artificial Sequence
  Description of Artificial Sequence: Synthetic oligonucleotide
  Sense strand starting at position 2238 of SEQ ID NO: 2085
cggucugaggcguugucua

SEQ ID NO: 161985 - RNA, 19 nt, Artificial Sequence
  Description of Artificial Sequence: Synthetic oligonucleotide
  Antisense strand to SEQ ID NO: 161984
uagacaacgccucagaccg

SEQ ID NO: 161986 - RNA, 19 nt, Artificial Sequence
  Description of Artificial Sequence: Synthetic oligonucleotide
  Sense strand starting at position 2308 of SEQ ID NO: 2085
uccgauccugaguaaccaa

SEQ ID NO: 161987 - RNA, 19 nt, Artificial Sequence
  Description of Artificial Sequence: Synthetic oligonucleotide
  Antisense strand to SEQ ID NO: 161986
uugguuacucaggaucgga

SEQ ID NO: 161988 - RNA, 19 nt, Artificial Sequence
  Description of Artificial Sequence: Synthetic oligonucleotide
  Sense strand starting at position 2311 of SEQ ID NO: 2085
gauccugaguaaccaagau

SEQ ID NO: 161989 - RNA, 19 nt, Artificial Sequence
  Description of Artificial Sequence: Synthetic oligonucleotide
  Antisense strand to SEQ ID NO: 161988
aucuugguuacucaggauc

SEQ ID NO: 161990 - RNA, 19 nt, Artificial Sequence
  Description of Artificial Sequence: Synthetic oligonucleotide
  Sense strand starting at position 2516 of SEQ ID NO: 2085
cuaacuguaggugggauua

SEQ ID NO: 161991 - RNA, 19 nt, Artificial Sequence
  Description of Artificial Sequence: Synthetic oligonucleotide
  Antisense strand to SEQ ID NO: 161990
uaaucccaccuacaguuag

SEQ ID NO: 161992 - RNA, 19 nt, Artificial Sequence
  Description of Artificial Sequence: Synthetic oligonucleotide
  Sense strand starting at position 2526 of SEQ ID NO: 2085
gugggauuaauguacuuau

SEQ ID NO: 161993 - RNA, 19 nt, Artificial Sequence
  Description of Artificial Sequence: Synthetic oligonucleotide
  Antisense strand to SEQ ID NO: 161992
auaaguacauuaaucccac

SEQ ID NO: 161994 - RNA, 19 nt, Artificial Sequence
  Description of Artificial Sequence: Synthetic oligonucleotide
  Sense strand starting at position 2529 of SEQ ID NO: 2085
ggauuaauguacuuaucug

SEQ ID NO: 161995 - RNA, 19 nt, Artificial Sequence
  Description of Artificial Sequence: Synthetic oligonucleotide
  Antisense strand to SEQ ID NO: 161994
cagauaaguacauuaaucc

SEQ ID NO: 161996 - RNA, 19 nt, Artificial Sequence
  Description of Artificial Sequence: Synthetic oligonucleotide
  Sense strand starting at position 2556 of SEQ ID NO: 2085
gcuccaguccuuuaaacug

SEQ ID NO: 161997 - RNA, 19 nt, Artificial Sequence
  Description of Artificial Sequence: Synthetic oligonucleotide
  Antisense strand to SEQ ID NO: 161996
caguuuaaaggacuggagc

SEQ ID NO: 161998 - RNA, 19 nt, Artificial Sequence
  Description of Artificial Sequence: Synthetic oligonucleotide
  Sense strand starting at position 2581 of SEQ ID NO: 2085
auugauugguaaguagacu

SEQ ID NO: 161999 - RNA, 19 nt, Artificial Sequence
  Description of Artificial Sequence: Synthetic oligonucleotide
  Antisense strand to SEQ ID NO: 161998
agucuacuuaccaaucaau

SEQ ID NO: 162000 - RNA, 19 nt, Artificial Sequence
  Description of Artificial Sequence: Synthetic oligonucleotide
  Sense strand starting at position 2582 of SEQ ID NO: 2085
uugauugguaaguagacuu

SEQ ID NO: 162001 - RNA, 19 nt, Artificial Sequence
  Description of Artificial Sequence: Synthetic oligonucleotide
  Antisense strand to SEQ ID NO: 162000
aagucuacuuaccaaucaa

SEQ ID NO: 162002 - RNA, 19 nt, Artificial Sequence
  Description of Artificial Sequence: Synthetic oligonucleotide
  Sense strand starting at position 2642 of SEQ ID NO: 2085
aaauauccugguuggacaa

SEQ ID NO: 162003 - RNA, 19 nt, Artificial Sequence
  Description of Artificial Sequence: Synthetic oligonucleotide
  Antisense strand to SEQ ID NO: 162002
uuguccaaccaggauauuu

SEQ ID NO: 162004 - RNA, 19 nt, Artificial Sequence
  Description of Artificial Sequence: Synthetic oligonucleotide
  Sense strand starting at position 2709 of SEQ ID NO: 2085
gguuauaugcuauauacaa

SEQ ID NO: 162005 - RNA, 19 nt, Artificial Sequence
  Description of Artificial Sequence: Synthetic oligonucleotide
  Antisense strand to SEQ ID NO: 162004
uuguauauagcauauaacc

SEQ ID NO: 162006 - RNA, 19 nt, Artificial Sequence
  Description of Artificial Sequence: Synthetic oligonucleotide
  Sense strand starting at position 2805 of SEQ ID NO: 2085
aggauuaucugagucacag

SEQ ID NO: 162007 - RNA, 19 nt, Artificial Sequence
  Description of Artificial Sequence: Synthetic oligonucleotide
  Antisense strand to SEQ ID NO: 162006
cugugacucagauaauccu

SEQ ID NO: 162008 - RNA, 19 nt, Artificial Sequence
  Description of Artificial Sequence: Synthetic oligonucleotide
  Sense strand starting at position 2822 of SEQ ID NO: 2085
agaucuagugugcauaacu

SEQ ID NO: 162009 - RNA, 19 nt, Artificial Sequence
  Description of Artificial Sequence: Synthetic oligonucleotide
  Antisense strand to SEQ ID NO: 162008
aguuaugcacacuagaucu

SEQ ID NO: 162010 - RNA, 19 nt, Artificial Sequence
  Description of Artificial Sequence: Synthetic oligonucleotide
  Sense strand starting at position 2972 of SEQ ID NO: 2085
ggugccuugcggucucauu

SEQ ID NO: 162011 - RNA, 19 nt, Artificial Sequence
  Description of Artificial Sequence: Synthetic oligonucleotide
  Antisense strand to SEQ ID NO: 162010
aaugagaccgcaaggcacc

SEQ ID NO: 162012 - RNA, 19 nt, Artificial Sequence
  Description of Artificial Sequence: Synthetic oligonucleotide
  Sense strand starting at position 2973 of SEQ ID NO: 2085
gugccuugcggucucauua

SEQ ID NO: 162013 - RNA, 19 nt, Artificial Sequence
  Description of Artificial Sequence: Synthetic oligonucleotide
  Antisense strand to SEQ ID NO: 162012
uaaugagaccgcaaggcac

SEQ ID NO: 162014 - RNA, 19 nt, Artificial Sequence
  Description of Artificial Sequence: Synthetic oligonucleotide
  Sense strand starting at position 3098 of SEQ ID NO: 2085
ugaugcaagccagaaacuu

SEQ ID NO: 162015 - RNA, 19 nt, Artificial Sequence
  Description of Artificial Sequence: Synthetic oligonucleotide
  Antisense strand to SEQ ID NO: 162014
aaguuucuggcuugcauca

SEQ ID NO: 162016 - RNA, 19 nt, Artificial Sequence
  Description of Artificial Sequence: Synthetic oligonucleotide
  Sense strand starting at position 3831 of SEQ ID NO: 2085
aaucguagugacgauugaa

SEQ ID NO: 162017 - RNA, 19 nt, Artificial Sequence
  Description of Artificial Sequence: Synthetic oligonucleotide
  Antisense strand to SEQ ID NO: 162016
uucaaucgucacuacgauu

SEQ ID NO: 162018 - RNA, 19 nt, Artificial Sequence
  Description of Artificial Sequence: Synthetic oligonucleotide
  Sense strand starting at position 3983 of SEQ ID NO: 2086
uucuuauggcaccagagua

SEQ ID NO: 162019 - RNA, 19 nt, Artificial Sequence
  Description of Artificial Sequence: Synthetic oligonucleotide
  Antisense strand to SEQ ID NO: 162018
uacucuggugccauaagaa

SEQ ID NO: 162020 - RNA, 19 nt, Artificial Sequence
  Description of Artificial Sequence: Synthetic oligonucleotide
  Sense strand starting at position 3878 of SEQ ID NO: 2086
gugauugauucucucaacu

SEQ ID NO: 162021 - RNA, 19 nt, Artificial Sequence
  Description of Artificial Sequence: Synthetic oligonucleotide
  Antisense strand to SEQ ID NO: 162020
aguugagagaaucaaucac

SEQ ID NO: 162022 - RNA, 19 nt, Artificial Sequence
  Description of Artificial Sequence: Synthetic oligonucleotide
  Sense strand starting at position 3877 of SEQ ID NO: 2086
ugugauugauucucucaac

SEQ ID NO: 162023 - RNA, 19 nt, Artificial Sequence
  Description of Artificial Sequence: Synthetic oligonucleotide
  Antisense strand to SEQ ID NO: 162022
guugagagaaucaaucaca

SEQ ID NO: 162024 - RNA, 19 nt, Artificial Sequence
  Description of Artificial Sequence: Synthetic oligonucleotide
  Sense strand starting at position 3871 of SEQ ID NO: 2086
ucagaaugugauugauucu

SEQ ID NO: 162025 - RNA, 19 nt, Artificial Sequence
  Description of Artificial Sequence: Synthetic oligonucleotide
  Antisense strand to SEQ ID NO: 162024
agaaucaaucacauucuga

SEQ ID NO: 162026 - RNA, 19 nt, Artificial Sequence
  Description of Artificial Sequence: Synthetic oligonucleotide
  Sense strand starting at position 3870 of SEQ ID NO: 2086
aucagaaugugauugauuc

SEQ ID NO: 162027 - RNA, 19 nt, Artificial Sequence
  Description of Artificial Sequence: Synthetic oligonucleotide
  Antisense strand to SEQ ID NO: 162026
gaaucaaucacauucugau

SEQ ID NO: 162028 - RNA, 19 nt, Artificial Sequence
  Description of Artificial Sequence: Synthetic oligonucleotide
  Sense strand starting at position 3865 of SEQ ID NO: 2086
acuacaucagaaugugauu

SEQ ID NO: 162029 - RNA, 19 nt, Artificial Sequence
  Description of Artificial Sequence: Synthetic oligonucleotide
  Antisense strand to SEQ ID NO: 162028
aaucacauucugauguagu

SEQ ID NO: 162030 - RNA, 19 nt, Artificial Sequence
  Description of Artificial Sequence: Synthetic oligonucleotide
  Sense strand starting at position 3786 of SEQ ID NO: 2086
ugguuaagucagggagaca

SEQ ID NO: 162031 - RNA, 19 nt, Artificial Sequence
  Description of Artificial Sequence: Synthetic oligonucleotide
  Antisense strand to SEQ ID NO: 162030
ugucucccugacuuaacca

SEQ ID NO: 162032 - RNA, 19 nt, Artificial Sequence
  Description of Artificial Sequence: Synthetic oligonucleotide
  Sense strand starting at position 3749 of SEQ ID NO: 2086
aaggauaccugucuuaaug

SEQ ID NO: 162033 - RNA, 19 nt, Artificial Sequence
  Description of Artificial Sequence: Synthetic oligonucleotide
  Antisense strand to SEQ ID NO: 162032
cauuaagacagguauccuu

SEQ ID NO: 162034 - RNA, 19 nt, Artificial Sequence
  Description of Artificial Sequence: Synthetic oligonucleotide
  Sense strand starting at position 3671 of SEQ ID NO: 2086
uuggcaauugcauauacuu

SEQ ID NO: 162035 - RNA, 19 nt, Artificial Sequence
  Description of Artificial Sequence: Synthetic oligonucleotide
  Antisense strand to SEQ ID NO: 162034
aaguauaugcaauugccaa

SEQ ID NO: 162036 - RNA, 19 nt, Artificial Sequence
  Description of Artificial Sequence: Synthetic oligonucleotide
  Sense strand starting at position 3498 of SEQ ID NO: 2086
cugaucauccuguaguuaa

SEQ ID NO: 162037 - RNA, 19 nt, Artificial Sequence
  Description of Artificial Sequence: Synthetic oligonucleotide
  Antisense strand to SEQ ID NO: 162036
uuaacuacaggaugaucag

SEQ ID NO: 162038 - RNA, 19 nt, Artificial Sequence
  Description of Artificial Sequence: Synthetic oligonucleotide
  Sense strand starting at position 3360 of SEQ ID NO: 2086
gugcguguucauuccuaga

SEQ ID NO: 162039 - RNA, 19 nt, Artificial Sequence
  Description of Artificial Sequence: Synthetic oligonucleotide
  Antisense strand to SEQ ID NO: 162038
ucuaggaaugaacacgcac

SEQ ID NO: 162040 - RNA, 19 nt, Artificial Sequence
  Description of Artificial Sequence: Synthetic oligonucleotide
  Sense strand starting at position 3341 of SEQ ID NO: 2086
aaagaaauguggcuaaaug

SEQ ID NO: 162041 - RNA, 19 nt, Artificial Sequence
  Description of Artificial Sequence: Synthetic oligonucleotide
  Antisense strand to SEQ ID NO: 162040
cauuuagccacauuucuuu

SEQ ID NO: 162042 - RNA, 19 nt, Artificial Sequence
  Description of Artificial Sequence: Synthetic oligonucleotide
  Sense strand starting at position 3338 of SEQ ID NO: 2086
gugaaagaaauguggcuaa

SEQ ID NO: 162043 - RNA, 19 nt, Artificial Sequence
  Description of Artificial Sequence: Synthetic oligonucleotide
  Antisense strand to SEQ ID NO: 162042
uuagccacauuucuuucac

SEQ ID NO: 162044 - RNA, 19 nt, Artificial Sequence
  Description of Artificial Sequence: Synthetic oligonucleotide
  Sense strand starting at position 3205 of SEQ ID NO: 2086
aguugaacacucuguauua

SEQ ID NO: 162045 - RNA, 19 nt, Artificial Sequence
  Description of Artificial Sequence: Synthetic oligonucleotide
  Antisense strand to SEQ ID NO: 162044
uaauacagaguguucaacu

SEQ ID NO: 162046 - RNA, 19 nt, Artificial Sequence
  Description of Artificial Sequence: Synthetic oligonucleotide
  Sense strand starting at position 3008 of SEQ ID NO: 2086
cuugacuaugucuauggua

SEQ ID NO: 162047 - RNA, 19 nt, Artificial Sequence
  Description of Artificial Sequence: Synthetic oligonucleotide
  Antisense strand to SEQ ID NO: 162046
uaccauagacauagucaag

SEQ ID NO: 162048 - RNA, 19 nt, Artificial Sequence
  Description of Artificial Sequence: Synthetic oligonucleotide
  Sense strand starting at position 2985 of SEQ ID NO: 2086
aacugucaggauuaaguuu

SEQ ID NO: 162049 - RNA, 19 nt, Artificial Sequence
  Description of Artificial Sequence: Synthetic oligonucleotide
  Antisense strand to SEQ ID NO: 162048
aaacuuaauccugacaguu

SEQ ID NO: 162050 - RNA, 19 nt, Artificial Sequence
  Description of Artificial Sequence: Synthetic oligonucleotide
  Sense strand starting at position 2945 of SEQ ID NO: 2086
guuaaagugagauauguau

SEQ ID NO: 162051 - RNA, 19 nt, Artificial Sequence
  Description of Artificial Sequence: Synthetic oligonucleotide
  Antisense strand to SEQ ID NO: 162050
auacauaucucacuuuaac

SEQ ID NO: 162052 - RNA, 19 nt, Artificial Sequence
  Description of Artificial Sequence: Synthetic oligonucleotide
  Sense strand starting at position 2837 of SEQ ID NO: 2086
ucuagaguucuggaaguuc

SEQ ID NO: 162053 - RNA, 19 nt, Artificial Sequence
  Description of Artificial Sequence: Synthetic oligonucleotide
  Antisense strand to SEQ ID NO: 162052
gaacuuccagaacucuaga

SEQ ID NO: 162054 - RNA, 19 nt, Artificial Sequence
  Description of Artificial Sequence: Synthetic oligonucleotide
  Sense strand starting at position 2714 of SEQ ID NO: 2086
ccucauugauuguugacaa

SEQ ID NO: 162055 - RNA, 19 nt, Artificial Sequence
  Description of Artificial Sequence: Synthetic oligonucleotide
  Antisense strand to SEQ ID NO: 162054
uugucaacaaucaaugagg

SEQ ID NO: 162056 - RNA, 19 nt, Artificial Sequence
  Description of Artificial Sequence: Synthetic oligonucleotide
  Sense strand starting at position 2689 of SEQ ID NO: 2086
ccuguacuccaggagcaau

SEQ ID NO: 162057 - RNA, 19 nt, Artificial Sequence
  Description of Artificial Sequence: Synthetic oligonucleotide
  Antisense strand to SEQ ID NO: 162056
auugcuccuggaguacagg

SEQ ID NO: 162058 - RNA, 19 nt, Artificial Sequence
  Description of Artificial Sequence: Synthetic oligonucleotide
  Sense strand starting at position 2610 of SEQ ID NO: 2086
gugugugccaaagauuugu

SEQ ID NO: 162059 - RNA, 19 nt, Artificial Sequence
  Description of Artificial Sequence: Synthetic oligonucleotide
  Antisense strand to SEQ ID NO: 162058
acaaaucuuuggcacacac

SEQ ID NO: 162060 - RNA, 19 nt, Artificial Sequence
  Description of Artificial Sequence: Synthetic oligonucleotide
  Sense strand starting at position 2569 of SEQ ID NO: 2086
cacucauuccugggaugca

SEQ ID NO: 162061 - RNA, 19 nt, Artificial Sequence
  Description of Artificial Sequence: Synthetic oligonucleotide
  Antisense strand to SEQ ID NO: 162060
ugcaucccaggaaugagug

SEQ ID NO: 162062 - RNA, 19 nt, Artificial Sequence
  Description of Artificial Sequence: Synthetic oligonucleotide
  Sense strand starting at position 2527 of SEQ ID NO: 2086
ggagcugugauggaugauc

SEQ ID NO: 162063 - RNA, 19 nt, Artificial Sequence
  Description of Artificial Sequence: Synthetic oligonucleotide
  Antisense strand to SEQ ID NO: 162062
gaucauccaucacagcucc

SEQ ID NO: 162064 - RNA, 19 nt, Artificial Sequence
  Description of Artificial Sequence: Synthetic oligonucleotide
  Sense strand starting at position 2526 of SEQ ID NO: 2086
gggagcugugauggaugau

SEQ ID NO: 162065 - RNA, 19 nt, Artificial Sequence
  Description of Artificial Sequence: Synthetic oligonucleotide
  Antisense strand to SEQ ID NO: 162064
aucauccaucacagcuccc

SEQ ID NO: 162066 - RNA, 19 nt, Artificial Sequence
  Description of Artificial Sequence: Synthetic oligonucleotide
  Sense strand starting at position 2156 of SEQ ID NO: 2086
uuauuugucucugucucua

SEQ ID NO: 162067 - RNA, 19 nt, Artificial Sequence
  Description of Artificial Sequence: Synthetic oligonucleotide
  Antisense strand to SEQ ID NO: 162066
uagagacagagacaaauaa

SEQ ID NO: 162068 - RNA, 19 nt, Artificial Sequence
  Description of Artificial Sequence: Synthetic oligonucleotide
  Sense strand starting at position 1834 of SEQ ID NO: 2086
ggaaacucccgcugaggaa

SEQ ID NO: 162069 - RNA, 19 nt, Artificial Sequence
  Description of Artificial Sequence: Synthetic oligonucleotide
  Antisense strand to SEQ ID NO: 162068
uuccucagcgggaguuucc

SEQ ID NO: 162070 - RNA, 19 nt, Artificial Sequence
  Description of Artificial Sequence: Synthetic oligonucleotide
  Sense strand starting at position 1809 of SEQ ID NO: 2086
uaggguaaucguuaaaucg

SEQ ID NO: 162071 - RNA, 19 nt, Artificial Sequence
  Description of Artificial Sequence: Synthetic oligonucleotide
  Antisense strand to SEQ ID NO: 162070
cgauuuaacgauuacccua

SEQ ID NO: 162072 - RNA, 19 nt, Artificial Sequence
  Description of Artificial Sequence: Synthetic oligonucleotide
  Sense strand starting at position 1726 of SEQ ID NO: 2086
uuagaauuucguuguaugg

SEQ ID NO: 162073 - RNA, 19 nt, Artificial Sequence
  Description of Artificial Sequence: Synthetic oligonucleotide
  Antisense strand to SEQ ID NO: 162072
ccauacaacgaaauucuaa

SEQ ID NO: 162074 - RNA, 19 nt, Artificial Sequence
  Description of Artificial Sequence: Synthetic oligonucleotide
  Sense strand starting at position 1725 of SEQ ID NO: 2086
uuuagaauuucguuguaug

SEQ ID NO: 162075 - RNA, 19 nt, Artificial Sequence
  Description of Artificial Sequence: Synthetic oligonucleotide
  Antisense strand to SEQ ID NO: 162074
cauacaacgaaauucuaaa

SEQ ID NO: 162076 - RNA, 19 nt, Artificial Sequence
  Description of Artificial Sequence: Synthetic oligonucleotide
  Sense strand starting at position 1674 of SEQ ID NO: 2086
cugggaguuuccuuaaauc

SEQ ID NO: 162077 - RNA, 19 nt, Artificial Sequence
  Description of Artificial Sequence: Synthetic oligonucleotide
  Antisense strand to SEQ ID NO: 162076
gauuuaaggaaacucccag

SEQ ID NO: 162078 - RNA, 19 nt, Artificial Sequence
  Description of Artificial Sequence: Synthetic oligonucleotide
  Sense strand starting at position 1629 of SEQ ID NO: 2086
aguggugaugucgaagaaa

SEQ ID NO: 162079 - RNA, 19 nt, Artificial Sequence
  Description of Artificial Sequence: Synthetic oligonucleotide
  Antisense strand to SEQ ID NO: 162078
uuucuucgacaucaccacu

SEQ ID NO: 162080 - RNA, 19 nt, Artificial Sequence
  Description of Artificial Sequence: Synthetic oligonucleotide
  Sense strand starting at position 1597 of SEQ ID NO: 2086
ggguauugaacauagguuu

SEQ ID NO: 162081 - RNA, 19 nt, Artificial Sequence
  Description of Artificial Sequence: Synthetic oligonucleotide
  Antisense strand to SEQ ID NO: 162080
aaaccuauguucaauaccc

SEQ ID NO: 162082 - RNA, 19 nt, Artificial Sequence
  Description of Artificial Sequence: Synthetic oligonucleotide
  Sense strand starting at position 1527 of SEQ ID NO: 2086
cucaaaucccuagguagau

SEQ ID NO: 162083 - RNA, 19 nt, Artificial Sequence
  Description of Artificial Sequence: Synthetic oligonucleotide
  Antisense strand to SEQ ID NO: 162082
aucuaccuagggauuugag

SEQ ID NO: 162084 - RNA, 19 nt, Artificial Sequence
  Description of Artificial Sequence: Synthetic oligonucleotide
  Sense strand starting at position 1524 of SEQ ID NO: 2086
aggcucaaaucccuaggua

SEQ ID NO: 162085 - RNA, 19 nt, Artificial Sequence
  Description of Artificial Sequence: Synthetic oligonucleotide
  Antisense strand to SEQ ID NO: 162084
uaccuagggauuugagccu

SEQ ID NO: 162086 - RNA, 19 nt, Artificial Sequence
  Description of Artificial Sequence: Synthetic oligonucleotide
  Sense strand starting at position 1486 of SEQ ID NO: 2086
uagaacaauugaguuuagu

SEQ ID NO: 162087 - RNA, 19 nt, Artificial Sequence
  Description of Artificial Sequence: Synthetic oligonucleotide
  Antisense strand to SEQ ID NO: 162086
acuaaacucaauuguucua

SEQ ID NO: 162088 - RNA, 19 nt, Artificial Sequence
  Description of Artificial Sequence: Synthetic oligonucleotide
  Sense strand starting at position 842 of SEQ ID NO: 2086
aggugagauaaacguuaga

SEQ ID NO: 162089 - RNA, 19 nt, Artificial Sequence
  Description of Artificial Sequence: Synthetic oligonucleotide
  Antisense strand to SEQ ID NO: 162088
ucuaacguuuaucucaccu

SEQ ID NO: 162090 - RNA, 19 nt, Artificial Sequence
  Description of Artificial Sequence: Synthetic oligonucleotide
  Sense strand starting at position 833 of SEQ ID NO: 2086
ugauguaguaggugagaua

SEQ ID NO: 162091 - RNA, 19 nt, Artificial Sequence
  Description of Artificial Sequence: Synthetic oligonucleotide
  Antisense strand to SEQ ID NO: 162090
uaucucaccuacuacauca

SEQ ID NO: 162092 - RNA, 19 nt, Artificial Sequence
  Description of Artificial Sequence: Synthetic oligonucleotide
  Sense strand starting at position 797 of SEQ ID NO: 2086
ugaucagugcuguaagaga

SEQ ID NO: 162093 - RNA, 19 nt, Artificial Sequence
  Description of Artificial Sequence: Synthetic oligonucleotide
  Antisense strand to SEQ ID NO: 162092
ucucuuacagcacugauca

SEQ ID NO: 162094 - RNA, 19 nt, Artificial Sequence
  Description of Artificial Sequence: Synthetic oligonucleotide
  Sense strand starting at position 39 of SEQ ID NO: 2086
ggugcaaucccucauauau

SEQ ID NO: 162095 - RNA, 19 nt, Artificial Sequence
  Description of Artificial Sequence: Synthetic oligonucleotide
  Antisense strand to SEQ ID NO: 162094
auauaugagggauugcacc

SEQ ID NO: 162096 - RNA, 19 nt, Artificial Sequence
  Description of Artificial Sequence: Synthetic oligonucleotide
  Sense strand starting at position 15 of SEQ ID NO: 2086
gaaauaucauauguaguug

SEQ ID NO: 162097 - RNA, 19 nt, Artificial Sequence
  Description of Artificial Sequence: Synthetic oligonucleotide
  Antisense strand to SEQ ID NO: 162096
caacuacauaugauauuuc

SEQ ID NO: 162098 - RNA, 19 nt, Artificial Sequence
  Description of Artificial Sequence: Synthetic oligonucleotide
  Sense strand starting at position 217 of SEQ ID NO: 2087
gggucuuacucuguccaca

SEQ ID NO: 162099 - RNA, 19 nt, Artificial Sequence
  Description of Artificial Sequence: Synthetic oligonucleotide
  Antisense strand to SEQ ID NO: 162098
uguggacagaguaagaccc

SEQ ID NO: 162100 - RNA, 19 nt, Artificial Sequence
  Description of Artificial Sequence: Synthetic oligonucleotide
  Sense strand starting at position 387 of SEQ ID NO: 2087
uuuauuauugcacgguaaa

SEQ ID NO: 162101 - RNA, 19 nt, Artificial Sequence
  Description of Artificial Sequence: Synthetic oligonucleotide
  Antisense strand to SEQ ID NO: 162100
uuuaccgugcaauaauaaa

SEQ ID NO: 162102 - RNA, 19 nt, Artificial Sequence
  Description of Artificial Sequence: Synthetic oligonucleotide
  Sense strand starting at position 388 of SEQ ID NO: 2087
uuauuauugcacgguaaau

SEQ ID NO: 162103 - RNA, 19 nt, Artificial Sequence
  Description of Artificial Sequence: Synthetic oligonucleotide
  Antisense strand to SEQ ID NO: 162102
auuuaccgugcaauaauaa

SEQ ID NO: 162104 - RNA, 19 nt, Artificial Sequence
  Description of Artificial Sequence: Synthetic oligonucleotide
  Sense strand starting at position 390 of SEQ ID NO: 2087
auuauugcacgguaaaugu

SEQ ID NO: 162105 - RNA, 19 nt, Artificial Sequence
  Description of Artificial Sequence: Synthetic oligonucleotide
  Antisense strand to SEQ ID NO: 162104
acauuuaccgugcaauaau

SEQ ID NO: 162106 - RNA, 19 nt, Artificial Sequence
  Description of Artificial Sequence: Synthetic oligonucleotide
  Sense strand starting at position 397 of SEQ ID NO: 2087
cacgguaaauguucuuuau

SEQ ID NO: 162107 - RNA, 19 nt, Artificial Sequence
  Description of Artificial Sequence: Synthetic oligonucleotide
  Antisense strand to SEQ ID NO: 162106
auaaagaacauuuaccgug

SEQ ID NO: 162108 - RNA, 19 nt, Artificial Sequence
  Description of Artificial Sequence: Synthetic oligonucleotide
  Sense strand starting at position 399 of SEQ ID NO: 2087
cgguaaauguucuuuauaa

SEQ ID NO: 162109 - RNA, 19 nt, Artificial Sequence
  Description of Artificial Sequence: Synthetic oligonucleotide
  Antisense strand to SEQ ID NO: 162108
uuauaaagaacauuuaccg

SEQ ID NO: 162110 - RNA, 19 nt, Artificial Sequence
  Description of Artificial Sequence: Synthetic oligonucleotide
  Sense strand starting at position 421 of SEQ ID NO: 2087
cuagauacauguccugaau

SEQ ID NO: 162111 - RNA, 19 nt, Artificial Sequence
  Description of Artificial Sequence: Synthetic oligonucleotide
  Antisense strand to SEQ ID NO: 162110
auucaggacauguaucuag

SEQ ID NO: 162112 - RNA, 19 nt, Artificial Sequence
  Description of Artificial Sequence: Synthetic oligonucleotide
  Sense strand starting at position 466 of SEQ ID NO: 2087
ucccauuauguggauuaca

SEQ ID NO: 162113 - RNA, 19 nt, Artificial Sequence
  Description of Artificial Sequence: Synthetic oligonucleotide
  Antisense strand to SEQ ID NO: 162112
uguaauccacauaauggga

SEQ ID NO: 162114 - RNA, 19 nt, Artificial Sequence
  Description of Artificial Sequence: Synthetic oligonucleotide
  Sense strand starting at position 1392 of SEQ ID NO: 2087
uuagucauguagccaaaua

SEQ ID NO: 162115 - RNA, 19 nt, Artificial Sequence
  Description of Artificial Sequence: Synthetic oligonucleotide
  Antisense strand to SEQ ID NO: 162114
uauuuggcuacaugacuaa

SEQ ID NO: 162116 - RNA, 19 nt, Artificial Sequence
  Description of Artificial Sequence: Synthetic oligonucleotide
  Sense strand starting at position 1546 of SEQ ID NO: 2087
gugguuuccucaucugaaa

SEQ ID NO: 162117 - RNA, 19 nt, Artificial Sequence
  Description of Artificial Sequence: Synthetic oligonucleotide
  Antisense strand to SEQ ID NO: 162116
uuucagaugaggaaaccac

SEQ ID NO: 162118 - RNA, 19 nt, Artificial Sequence
  Description of Artificial Sequence: Synthetic oligonucleotide
  Sense strand starting at position 1583 of SEQ ID NO: 2087
ggaaauaucuaugauggca

SEQ ID NO: 162119 - RNA, 19 nt, Artificial Sequence
  Description of Artificial Sequence: Synthetic oligonucleotide
  Antisense strand to SEQ ID NO: 162118
ugccaucauagauauuucc

SEQ ID NO: 162120 - RNA, 19 nt, Artificial Sequence
  Description of Artificial Sequence: Synthetic oligonucleotide
  Sense strand starting at position 1588 of SEQ ID NO: 2087
uaucuaugauggcaggaaa

SEQ ID NO: 162121 - RNA, 19 nt, Artificial Sequence
  Description of Artificial Sequence: Synthetic oligonucleotide
  Antisense strand to SEQ ID NO: 162120
uuuccugccaucauagaua

SEQ ID NO: 162122 - RNA, 19 nt, Artificial Sequence
  Description of Artificial Sequence: Synthetic oligonucleotide
  Sense strand starting at position 1618 of SEQ ID NO: 2087
aaagauaaguggcauauca

SEQ ID NO: 162123 - RNA, 19 nt, Artificial Sequence
  Description of Artificial Sequence: Synthetic oligonucleotide
  Antisense strand to SEQ ID NO: 162122
ugauaugccacuuaucuuu

SEQ ID NO: 162124 - RNA, 19 nt, Artificial Sequence
  Description of Artificial Sequence: Synthetic oligonucleotide
  Sense strand starting at position 1703 of SEQ ID NO: 2087
ccagaaaucagcuggauga

SEQ ID NO: 162125 - RNA, 19 nt, Artificial Sequence
  Description of Artificial Sequence: Synthetic oligonucleotide
  Antisense strand to SEQ ID NO: 162124
ucauccagcugauuucugg

SEQ ID NO: 162126 - RNA, 19 nt, Artificial Sequence
  Description of Artificial Sequence: Synthetic oligonucleotide
  Sense strand starting at position 1770 of SEQ ID NO: 2087
ggcucugucugagccuaua

SEQ ID NO: 162127 - RNA, 19 nt, Artificial Sequence
  Description of Artificial Sequence: Synthetic oligonucleotide
  Antisense strand to SEQ ID NO: 162126
uauaggcucagacagagcc

SEQ ID NO: 162128 - RNA, 19 nt, Artificial Sequence
  Description of Artificial Sequence: Synthetic oligonucleotide
  Sense strand starting at position 1773 of SEQ ID NO: 2087
ucugucugagccuauacuu

SEQ ID NO: 162129 - RNA, 19 nt, Artificial Sequence
  Description of Artificial Sequence: Synthetic oligonucleotide
  Antisense strand to SEQ ID NO: 162128
aaguauaggcucagacaga

SEQ ID NO: 162130 - RNA, 19 nt, Artificial Sequence
  Description of Artificial Sequence: Synthetic oligonucleotide
  Sense strand starting at position 1808 of SEQ ID NO: 2087
uuggauuuguuugguauac

SEQ ID NO: 162131 - RNA, 19 nt, Artificial Sequence
  Description of Artificial Sequence: Synthetic oligonucleotide
  Antisense strand to SEQ ID NO: 162130
guauaccaaacaaauccaa

SEQ ID NO: 162132 - RNA, 19 nt, Artificial Sequence
  Description of Artificial Sequence: Synthetic oligonucleotide
  Sense strand starting at position 1810 of SEQ ID NO: 2087
ggauuuguuugguauacag

SEQ ID NO: 162133 - RNA, 19 nt, Artificial Sequence
  Description of Artificial Sequence: Synthetic oligonucleotide
  Antisense strand to SEQ ID NO: 162132
cuguauaccaaacaaaucc

SEQ ID NO: 162134 - RNA, 19 nt, Artificial Sequence
  Description of Artificial Sequence: Synthetic oligonucleotide
  Sense strand starting at position 1829 of SEQ ID NO: 2087
ggcaguuaaacugggaaua

SEQ ID NO: 162135 - RNA, 19 nt, Artificial Sequence
  Description of Artificial Sequence: Synthetic oligonucleotide
  Antisense strand to SEQ ID NO: 162134
uauucccaguuuaacugcc

SEQ ID NO: 162136 - RNA, 19 nt, Artificial Sequence
  Description of Artificial Sequence: Synthetic oligonucleotide
  Sense strand starting at position 1830 of SEQ ID NO: 2087
gcaguuaaacugggaauag

SEQ ID NO: 162137 - RNA, 19 nt, Artificial Sequence
  Description of Artificial Sequence: Synthetic oligonucleotide
  Antisense strand to SEQ ID NO: 162136
cuauucccaguuuaacugc

SEQ ID NO: 162138 - RNA, 19 nt, Artificial Sequence
  Description of Artificial Sequence: Synthetic oligonucleotide
  Sense strand starting at position 1831 of SEQ ID NO: 2087
caguuaaacugggaauaga

SEQ ID NO: 162139 - RNA, 19 nt, Artificial Sequence
  Description of Artificial Sequence: Synthetic oligonucleotide
  Antisense strand to SEQ ID NO: 162138
ucuauucccaguuuaacug

SEQ ID NO: 162140 - RNA, 19 nt, Artificial Sequence
  Description of Artificial Sequence: Synthetic oligonucleotide
  Sense strand starting at position 1871 of SEQ ID NO: 2087
gcagcagagguuuaggaau

SEQ ID NO: 162141 - RNA, 19 nt, Artificial Sequence
  Description of Artificial Sequence: Synthetic oligonucleotide
  Antisense strand to SEQ ID NO: 162140
auuccuaaaccucugcugc

SEQ ID NO: 162142 - RNA, 19 nt, Artificial Sequence
  Description of Artificial Sequence: Synthetic oligonucleotide
  Sense strand starting at position 1913 of SEQ ID NO: 2087
gugguuaggguuugagaau

SEQ ID NO: 162143 - RNA, 19 nt, Artificial Sequence
  Description of Artificial Sequence: Synthetic oligonucleotide
  Antisense strand to SEQ ID NO: 162142
auucucaaacccuaaccac

SEQ ID NO: 162144 - RNA, 19 nt, Artificial Sequence
  Description of Artificial Sequence: Synthetic oligonucleotide
  Sense strand starting at position 1914 of SEQ ID NO: 2087
ugguuaggguuugagaaua

SEQ ID NO: 162145 - RNA, 19 nt, Artificial Sequence
  Description of Artificial Sequence: Synthetic oligonucleotide
  Antisense strand to SEQ ID NO: 162144
uauucucaaacccuaacca

SEQ ID NO: 162146 - RNA, 19 nt, Artificial Sequence
  Description of Artificial Sequence: Synthetic oligonucleotide
  Sense strand starting at position 2020 of SEQ ID NO: 2087
agauaacaaucguugccuu

SEQ ID NO: 162147 - RNA, 19 nt, Artificial Sequence
  Description of Artificial Sequence: Synthetic oligonucleotide
  Antisense strand to SEQ ID NO: 162146
aaggcaacgauuguuaucu

SEQ ID NO: 162148 - RNA, 19 nt, Artificial Sequence
  Description of Artificial Sequence: Synthetic oligonucleotide
  Sense strand starting at position 2052 of SEQ ID NO: 2087
ugauuauugggccagggua

SEQ ID NO: 162149 - RNA, 19 nt, Artificial Sequence
  Description of Artificial Sequence: Synthetic oligonucleotide
  Antisense strand to SEQ ID NO: 162148
uacccuggcccaauaauca

SEQ ID NO: 162150 - RNA, 19 nt, Artificial Sequence
  Description of Artificial Sequence: Synthetic oligonucleotide
  Sense strand starting at position 2065 of SEQ ID NO: 2087
aggguacucucucccagaa

SEQ ID NO: 162151 - RNA, 19 nt, Artificial Sequence
  Description of Artificial Sequence: Synthetic oligonucleotide
  Antisense strand to SEQ ID NO: 162150
uucugggagagaguacccu

SEQ ID NO: 162152 - RNA, 19 nt, Artificial Sequence
  Description of Artificial Sequence: Synthetic oligonucleotide
  Sense strand starting at position 2296 of SEQ ID NO: 2087
gcucgaugccugucuuugu

SEQ ID NO: 162153 - RNA, 19 nt, Artificial Sequence
  Description of Artificial Sequence: Synthetic oligonucleotide
  Antisense strand to SEQ ID NO: 162152
acaaagacaggcaucgagc

SEQ ID NO: 162154 - RNA, 19 nt, Artificial Sequence
  Description of Artificial Sequence: Synthetic oligonucleotide
  Sense strand starting at position 2300 of SEQ ID NO: 2087
gaugccugucuuuguuaga

SEQ ID NO: 162155 - RNA, 19 nt, Artificial Sequence
  Description of Artificial Sequence: Synthetic oligonucleotide
  Antisense strand to SEQ ID NO: 162154
ucuaacaaagacaggcauc

SEQ ID NO: 162156 - RNA, 19 nt, Artificial Sequence
  Description of Artificial Sequence: Synthetic oligonucleotide
  Sense strand starting at position 2329 of SEQ ID NO: 2087
cugaaagugcucugaaugg

SEQ ID NO: 162157 - RNA, 19 nt, Artificial Sequence
  Description of Artificial Sequence: Synthetic oligonucleotide
  Antisense strand to SEQ ID NO: 162156
ccauucagagcacuuucag

SEQ ID NO: 162158 - RNA, 19 nt, Artificial Sequence
  Description of Artificial Sequence: Synthetic oligonucleotide
  Sense strand starting at position 2405 of SEQ ID NO: 2087
aucacuugaggucgaguua

SEQ ID NO: 162159 - RNA, 19 nt, Artificial Sequence
  Description of Artificial Sequence: Synthetic oligonucleotide
  Antisense strand to SEQ ID NO: 162158
uaacucgaccucaagugau

SEQ ID NO: 162160 - RNA, 19 nt, Artificial Sequence
  Description of Artificial Sequence: Synthetic oligonucleotide
  Sense strand starting at position 2406 of SEQ ID NO: 2087
ucacuugaggucgaguuau

SEQ ID NO: 162161 - RNA, 19 nt, Artificial Sequence
  Description of Artificial Sequence: Synthetic oligonucleotide
  Antisense strand to SEQ ID NO: 162160
auaacucgaccucaaguga

SEQ ID NO: 162162 - RNA, 19 nt, Artificial Sequence
  Description of Artificial Sequence: Synthetic oligonucleotide
  Sense strand starting at position 2880 of SEQ ID NO: 2087
ugaugaucgcaccauugca

SEQ ID NO: 162163 - RNA, 19 nt, Artificial Sequence
  Description of Artificial Sequence: Synthetic oligonucleotide
  Antisense strand to SEQ ID NO: 162162
ugcaauggugcgaucauca

SEQ ID NO: 162164 - RNA, 19 nt, Artificial Sequence
  Description of Artificial Sequence: Synthetic oligonucleotide
  Sense strand starting at position 3029 of SEQ ID NO: 2087
aacccuugugaacguaaau

SEQ ID NO: 162165 - RNA, 19 nt, Artificial Sequence
  Description of Artificial Sequence: Synthetic oligonucleotide
  Antisense strand to SEQ ID NO: 162164
auuuacguucacaaggguu

SEQ ID NO: 162166 - RNA, 19 nt, Artificial Sequence
  Description of Artificial Sequence: Synthetic oligonucleotide
  Sense strand starting at position 3287 of SEQ ID NO: 2087
uuguauaacucagcaguuu

SEQ ID NO: 162167 - RNA, 19 nt, Artificial Sequence
  Description of Artificial Sequence: Synthetic oligonucleotide
  Antisense strand to SEQ ID NO: 162166
aaacugcugaguuauacaa

SEQ ID NO: 162168 - RNA, 19 nt, Artificial Sequence
  Description of Artificial Sequence: Synthetic oligonucleotide
  Sense strand starting at position 3345 of SEQ ID NO: 2087
uagaacaaguguuugaaca

SEQ ID NO: 162169 - RNA, 19 nt, Artificial Sequence
  Description of Artificial Sequence: Synthetic oligonucleotide
  Antisense strand to SEQ ID NO: 162168
uguucaaacacuuguucua

SEQ ID NO: 162170 - RNA, 19 nt, Artificial Sequence
  Description of Artificial Sequence: Synthetic oligonucleotide
  Sense strand starting at position 3411 of SEQ ID NO: 2087
cccaauuguugacagauga

SEQ ID NO: 162171 - RNA, 19 nt, Artificial Sequence
  Description of Artificial Sequence: Synthetic oligonucleotide
  Antisense strand to SEQ ID NO: 162170
ucaucugucaacaauuggg

SEQ ID NO: 162172 - RNA, 19 nt, Artificial Sequence
  Description of Artificial Sequence: Synthetic oligonucleotide
  Sense strand starting at position 3818 of SEQ ID NO: 2087
aaauguaagugguuagauc

SEQ ID NO: 162173 - RNA, 19 nt, Artificial Sequence
  Description of Artificial Sequence: Synthetic oligonucleotide
  Antisense strand to SEQ ID NO: 162172
gaucuaaccacuuacauuu

SEQ ID NO: 162174 - RNA, 19 nt, Artificial Sequence
  Description of Artificial Sequence: Synthetic oligonucleotide
  Sense strand starting at position 3819 of SEQ ID NO: 2087
aauguaagugguuagauca

SEQ ID NO: 162175 - RNA, 19 nt, Artificial Sequence
  Description of Artificial Sequence: Synthetic oligonucleotide
  Antisense strand to SEQ ID NO: 162174
ugaucuaaccacuuacauu

SEQ ID NO: 162176 - RNA, 19 nt, Artificial Sequence
  Description of Artificial Sequence: Synthetic oligonucleotide
  Sense strand starting at position 3868 of SEQ ID NO: 2087
guagaaauggccagucgug

SEQ ID NO: 162177 - RNA, 19 nt, Artificial Sequence
  Description of Artificial Sequence: Synthetic oligonucleotide
  Antisense strand to SEQ ID NO: 162176
cacgacuggccauuucuac

SEQ ID NO: 162178 - RNA, 19 nt, Artificial Sequence
  Description of Artificial Sequence: Synthetic oligonucleotide
  Sense strand starting at position 434 of SEQ ID NO: 2088
ccuugugucuuccuuccau

SEQ ID NO: 162179 - RNA, 19 nt, Artificial Sequence
  Description of Artificial Sequence: Synthetic oligonucleotide
  Antisense strand to SEQ ID NO: 162178
auggaaggaagacacaagg

SEQ ID NO: 162180 - RNA, 19 nt, Artificial Sequence
  Description of Artificial Sequence: Synthetic oligonucleotide
  Sense strand starting at position 792 of SEQ ID NO: 2088
ucuagauggucugaagcaa

SEQ ID NO: 162181 - RNA, 19 nt, Artificial Sequence
  Description of Artificial Sequence: Synthetic oligonucleotide
  Antisense strand to SEQ ID NO: 162180
uugcuucagaccaucuaga

SEQ ID NO: 162182 - RNA, 19 nt, Artificial Sequence
  Description of Artificial Sequence: Synthetic oligonucleotide
  Sense strand starting at position 852 of SEQ ID NO: 2088
acguuccaccacugugauu

SEQ ID NO: 162183 - RNA, 19 nt, Artificial Sequence
  Description of Artificial Sequence: Synthetic oligonucleotide
  Antisense strand to SEQ ID NO: 162182
aaucacagugguggaacgu

SEQ ID NO: 162184 - RNA, 19 nt, Artificial Sequence
  Description of Artificial Sequence: Synthetic oligonucleotide
  Sense strand starting at position 975 of SEQ ID NO: 2088
cuucccugcccuuaggaau

SEQ ID NO: 162185 - RNA, 19 nt, Artificial Sequence
  Description of Artificial Sequence: Synthetic oligonucleotide
  Antisense strand to SEQ ID NO: 162184
auuccuaagggcagggaag

SEQ ID NO: 162186 - RNA, 19 nt, Artificial Sequence
  Description of Artificial Sequence: Synthetic oligonucleotide
  Sense strand starting at position 1195 of SEQ ID NO: 2088
gggagagcauuagacugaa

SEQ ID NO: 162187 - RNA, 19 nt, Artificial Sequence
  Description of Artificial Sequence: Synthetic oligonucleotide
  Antisense strand to SEQ ID NO: 162186
uucagucuaaugcucuccc

SEQ ID NO: 162188 - RNA, 19 nt, Artificial Sequence
  Description of Artificial Sequence: Synthetic oligonucleotide
  Sense strand starting at position 1297 of SEQ ID NO: 2088
gagugacuugaucacagcu

SEQ ID NO: 162189 - RNA, 19 nt, Artificial Sequence
  Description of Artificial Sequence: Synthetic oligonucleotide
  Antisense strand to SEQ ID NO: 162188
agcugugaucaagucacuc

SEQ ID NO: 162190 - RNA, 19 nt, Artificial Sequence
  Description of Artificial Sequence: Synthetic oligonucleotide
  Sense strand starting at position 1573 of SEQ ID NO: 2088
aguagauccucauuacuca

SEQ ID NO: 162191 - RNA, 19 nt, Artificial Sequence
  Description of Artificial Sequence: Synthetic oligonucleotide
  Antisense strand to SEQ ID NO: 162190
ugaguaaugaggaucuacu

SEQ ID NO: 162192 - RNA, 19 nt, Artificial Sequence
  Description of Artificial Sequence: Synthetic oligonucleotide
  Sense strand starting at position 1574 of SEQ ID NO: 2088
guagauccucauuacucau

SEQ ID NO: 162193 - RNA, 19 nt, Artificial Sequence
  Description of Artificial Sequence: Synthetic oligonucleotide
  Antisense strand to SEQ ID NO: 162192
augaguaaugaggaucuac

SEQ ID NO: 162194 - RNA, 19 nt, Artificial Sequence
  Description of Artificial Sequence: Synthetic oligonucleotide
  Sense strand starting at position 1584 of SEQ ID NO: 2088
auuacucauugauuacgua

SEQ ID NO: 162195 - RNA, 19 nt, Artificial Sequence
  Description of Artificial Sequence: Synthetic oligonucleotide
  Antisense strand to SEQ ID NO: 162194
uacguaaucaaugaguaau

SEQ ID NO: 162196 - RNA, 19 nt, Artificial Sequence
  Description of Artificial Sequence: Synthetic oligonucleotide
  Sense strand starting at position 1585 of SEQ ID NO: 2088
uuacucauugauuacguau

SEQ ID NO: 162197 - RNA, 19 nt, Artificial Sequence
  Description of Artificial Sequence: Synthetic oligonucleotide
  Antisense strand to SEQ ID NO: 162196
auacguaaucaaugaguaa

SEQ ID NO: 162198 - RNA, 19 nt, Artificial Sequence
  Description of Artificial Sequence: Synthetic oligonucleotide
  Sense strand starting at position 1587 of SEQ ID NO: 2088
acucauugauuacguauuu

SEQ ID NO: 162199 - RNA, 19 nt, Artificial Sequence
  Description of Artificial Sequence: Synthetic oligonucleotide
  Antisense strand to SEQ ID NO: 162198
aaauacguaaucaaugagu

SEQ ID NO: 162200 - RNA, 19 nt, Artificial Sequence
  Description of Artificial Sequence: Synthetic oligonucleotide
  Sense strand starting at position 1661 of SEQ ID NO: 2088
guagcacuagccugggaaa

SEQ ID NO: 162201 - RNA, 19 nt, Artificial Sequence
  Description of Artificial Sequence: Synthetic oligonucleotide
  Antisense strand to SEQ ID NO: 162200
uuucccaggcuagugcuac

SEQ ID NO: 162202 - RNA, 19 nt, Artificial Sequence
  Description of Artificial Sequence: Synthetic oligonucleotide
  Sense strand starting at position 1760 of SEQ ID NO: 2088
gucaaacaauuguaaguua

SEQ ID NO: 162203 - RNA, 19 nt, Artificial Sequence
  Description of Artificial Sequence: Synthetic oligonucleotide
  Antisense strand to SEQ ID NO: 162202
uaacuuacaauuguuugac

SEQ ID NO: 162204 - RNA, 19 nt, Artificial Sequence
  Description of Artificial Sequence: Synthetic oligonucleotide
  Sense strand starting at position 1786 of SEQ ID NO: 2088
gccguauucuuucuaggag

SEQ ID NO: 162205 - RNA, 19 nt, Artificial Sequence
  Description of Artificial Sequence: Synthetic oligonucleotide
  Antisense strand to SEQ ID NO: 162204
cuccuagaaagaauacggc

SEQ ID NO: 162206 - RNA, 19 nt, Artificial Sequence
  Description of Artificial Sequence: Synthetic oligonucleotide
  Sense strand starting at position 1789 of SEQ ID NO: 2088
guauucuuucuaggagcaa

SEQ ID NO: 162207 - RNA, 19 nt, Artificial Sequence
  Description of Artificial Sequence: Synthetic oligonucleotide
  Antisense strand to SEQ ID NO: 162206
uugcuccuagaaagaauac

SEQ ID NO: 162208 - RNA, 19 nt, Artificial Sequence
  Description of Artificial Sequence: Synthetic oligonucleotide
  Sense strand starting at position 1823 of SEQ ID NO: 2088
uaauuuaauguuuguggca

SEQ ID NO: 162209 - RNA, 19 nt, Artificial Sequence
  Description of Artificial Sequence: Synthetic oligonucleotide
  Antisense strand to SEQ ID NO: 162208
ugccacaaacauuaaauua

SEQ ID NO: 162210 - RNA, 19 nt, Artificial Sequence
  Description of Artificial Sequence: Synthetic oligonucleotide
  Sense strand starting at position 1869 of SEQ ID NO: 2088
auaagaauugacuguacga

SEQ ID NO: 162211 - RNA, 19 nt, Artificial Sequence
  Description of Artificial Sequence: Synthetic oligonucleotide
  Antisense strand to SEQ ID NO: 162210
ucguacagucaauucuuau

SEQ ID NO: 162212 - RNA, 19 nt, Artificial Sequence
  Description of Artificial Sequence: Synthetic oligonucleotide
  Sense strand starting at position 1971 of SEQ ID NO: 2088
aguccacugguguggauua

SEQ ID NO: 162213 - RNA, 19 nt, Artificial Sequence
  Description of Artificial Sequence: Synthetic oligonucleotide
  Antisense strand to SEQ ID NO: 162212
uaauccacaccaguggacu

SEQ ID NO: 162214 - RNA, 19 nt, Artificial Sequence
  Description of Artificial Sequence: Synthetic oligonucleotide
  Sense strand starting at position 1984 of SEQ ID NO: 2088
ggauuagcccacugggaug

SEQ ID NO: 162215 - RNA, 19 nt, Artificial Sequence
  Description of Artificial Sequence: Synthetic oligonucleotide
  Antisense strand to SEQ ID NO: 162214
caucccagugggcuaaucc

SEQ ID NO: 162216 - RNA, 19 nt, Artificial Sequence
  Description of Artificial Sequence: Synthetic oligonucleotide
  Sense strand starting at position 1998 of SEQ ID NO: 2088
ggaugacaccuuggugaug

SEQ ID NO: 162217 - RNA, 19 nt, Artificial Sequence
  Description of Artificial Sequence: Synthetic oligonucleotide
  Antisense strand to SEQ ID NO: 162216
caucaccaaggugucaucc

SEQ ID NO: 162218 - RNA, 19 nt, Artificial Sequence
  Description of Artificial Sequence: Synthetic oligonucleotide
  Sense strand starting at position 2003 of SEQ ID NO: 2088
acaccuuggugauggaaua

SEQ ID NO: 162219 - RNA, 19 nt, Artificial Sequence
  Description of Artificial Sequence: Synthetic oligonucleotide
  Antisense strand to SEQ ID NO: 162218
uauuccaucaccaaggugu

SEQ ID NO: 162220 - RNA, 19 nt, Artificial Sequence
  Description of Artificial Sequence: Synthetic oligonucleotide
  Sense strand starting at position 2004 of SEQ ID NO: 2088
caccuuggugauggaauau

SEQ ID NO: 162221 - RNA, 19 nt, Artificial Sequence
  Description of Artificial Sequence: Synthetic oligonucleotide
  Antisense strand to SEQ ID NO: 162220
auauuccaucaccaaggug

SEQ ID NO: 162222 - RNA, 19 nt, Artificial Sequence
  Description of Artificial Sequence: Synthetic oligonucleotide
  Sense strand starting at position 2013 of SEQ ID NO: 2088
gauggaauauucugaucag

SEQ ID NO: 162223 - RNA, 19 nt, Artificial Sequence
  Description of Artificial Sequence: Synthetic oligonucleotide
  Antisense strand to SEQ ID NO: 162222
cugaucagaauauuccauc

SEQ ID NO: 162224 - RNA, 19 nt, Artificial Sequence
  Description of Artificial Sequence: Synthetic oligonucleotide
  Sense strand starting at position 2014 of SEQ ID NO: 2088
auggaauauucugaucagu

SEQ ID NO: 162225 - RNA, 19 nt, Artificial Sequence
  Description of Artificial Sequence: Synthetic oligonucleotide
  Antisense strand to SEQ ID NO: 162224
acugaucagaauauuccau

SEQ ID NO: 162226 - RNA, 19 nt, Artificial Sequence
  Description of Artificial Sequence: Synthetic oligonucleotide
  Sense strand starting at position 2016 of SEQ ID NO: 2088
ggaauauucugaucagugc

SEQ ID NO: 162227 - RNA, 19 nt, Artificial Sequence
  Description of Artificial Sequence: Synthetic oligonucleotide
  Antisense strand to SEQ ID NO: 162226
gcacugaucagaauauucc

SEQ ID NO: 162228 - RNA, 19 nt, Artificial Sequence
  Description of Artificial Sequence: Synthetic oligonucleotide
  Sense strand starting at position 2056 of SEQ ID NO: 2088
auagaagccugguuaagag

SEQ ID NO: 162229 - RNA, 19 nt, Artificial Sequence
  Description of Artificial Sequence: Synthetic oligonucleotide
  Antisense strand to SEQ ID NO: 162228
cucuuaaccaggcuucuau

SEQ ID NO: 162230 - RNA, 19 nt, Artificial Sequence
  Description of Artificial Sequence: Synthetic oligonucleotide
  Sense strand starting at position 2070 of SEQ ID NO: 2088
aagagagguucuggaguca

SEQ ID NO: 162231 - RNA, 19 nt, Artificial Sequence
  Description of Artificial Sequence: Synthetic oligonucleotide
  Antisense strand to SEQ ID NO: 162230
ugacuccagaaccucucuu

SEQ ID NO: 162232 - RNA, 19 nt, Artificial Sequence
  Description of Artificial Sequence: Synthetic oligonucleotide
  Sense strand starting at position 2391 of SEQ ID NO: 2088
ccaagcuguguguuuguau

SEQ ID NO: 162233 - RNA, 19 nt, Artificial Sequence
  Description of Artificial Sequence: Synthetic oligonucleotide
  Antisense strand to SEQ ID NO: 162232
auacaaacacacagcuugg

SEQ ID NO: 162234 - RNA, 19 nt, Artificial Sequence
  Description of Artificial Sequence: Synthetic oligonucleotide
  Sense strand starting at position 2399 of SEQ ID NO: 2088
uguguuuguauguguggua

SEQ ID NO: 162235 - RNA, 19 nt, Artificial Sequence
  Description of Artificial Sequence: Synthetic oligonucleotide
  Antisense strand to SEQ ID NO: 162234
uaccacacauacaaacaca

SEQ ID NO: 162236 - RNA, 19 nt, Artificial Sequence
  Description of Artificial Sequence: Synthetic oligonucleotide
  Sense strand starting at position 2400 of SEQ ID NO: 2088
guguuuguaugugugguaa

SEQ ID NO: 162237 - RNA, 19 nt, Artificial Sequence
  Description of Artificial Sequence: Synthetic oligonucleotide
  Antisense strand to SEQ ID NO: 162236
uuaccacacauacaaacac

SEQ ID NO: 162238 - RNA, 19 nt, Artificial Sequence
  Description of Artificial Sequence: Synthetic oligonucleotide
  Sense strand starting at position 2406 of SEQ ID NO: 2088
guaugugugguaagugaug

SEQ ID NO: 162239 - RNA, 19 nt, Artificial Sequence
  Description of Artificial Sequence: Synthetic oligonucleotide
  Antisense strand to SEQ ID NO: 162238
caucacuuaccacacauac

SEQ ID NO: 162240 - RNA, 19 nt, Artificial Sequence
  Description of Artificial Sequence: Synthetic oligonucleotide
  Sense strand starting at position 2423 of SEQ ID NO: 2088
ugaggagaguguugagauu

SEQ ID NO: 162241 - RNA, 19 nt, Artificial Sequence
  Description of Artificial Sequence: Synthetic oligonucleotide
  Antisense strand to SEQ ID NO: 162240
aaucucaacacucuccuca

SEQ ID NO: 162242 - RNA, 19 nt, Artificial Sequence
  Description of Artificial Sequence: Synthetic oligonucleotide
  Sense strand starting at position 2437 of SEQ ID NO: 2088
agauuaaauuaggaaugca

SEQ ID NO: 162243 - RNA, 19 nt, Artificial Sequence
  Description of Artificial Sequence: Synthetic oligonucleotide
  Antisense strand to SEQ ID NO: 162242
ugcauuccuaauuuaaucu

SEQ ID NO: 162244 - RNA, 19 nt, Artificial Sequence
  Description of Artificial Sequence: Synthetic oligonucleotide
  Sense strand starting at position 2614 of SEQ ID NO: 2088
guaagugguagcuacuuua

SEQ ID NO: 162245 - RNA, 19 nt, Artificial Sequence
  Description of Artificial Sequence: Synthetic oligonucleotide
  Antisense strand to SEQ ID NO: 162244
uaaaguagcuaccacuuac

SEQ ID NO: 162246 - RNA, 19 nt, Artificial Sequence
  Description of Artificial Sequence: Synthetic oligonucleotide
  Sense strand starting at position 3005 of SEQ ID NO: 2088
aguggugugauugaggcuu

SEQ ID NO: 162247 - RNA, 19 nt, Artificial Sequence
  Description of Artificial Sequence: Synthetic oligonucleotide
  Antisense strand to SEQ ID NO: 162246
aagccucaaucacaccacu

SEQ ID NO: 162248 - RNA, 19 nt, Artificial Sequence
  Description of Artificial Sequence: Synthetic oligonucleotide
  Sense strand starting at position 3011 of SEQ ID NO: 2088
gugauugaggcuuacugca

SEQ ID NO: 162249 - RNA, 19 nt, Artificial Sequence
  Description of Artificial Sequence: Synthetic oligonucleotide
  Antisense strand to SEQ ID NO: 162248
ugcaguaagccucaaucac

SEQ ID NO: 162250 - RNA, 19 nt, Artificial Sequence
  Description of Artificial Sequence: Synthetic oligonucleotide
  Sense strand starting at position 3240 of SEQ ID NO: 2088
caggucacucuggaauguu

SEQ ID NO: 162251 - RNA, 19 nt, Artificial Sequence
  Description of Artificial Sequence: Synthetic oligonucleotide
  Antisense strand to SEQ ID NO: 162250
aacauuccagagugaccug

SEQ ID NO: 162252 - RNA, 19 nt, Artificial Sequence
  Description of Artificial Sequence: Synthetic oligonucleotide
  Sense strand starting at position 3248 of SEQ ID NO: 2088
ucuggaauguuuccaaugu

SEQ ID NO: 162253 - RNA, 19 nt, Artificial Sequence
  Description of Artificial Sequence: Synthetic oligonucleotide
  Antisense strand to SEQ ID NO: 162252
acauuggaaacauuccaga

SEQ ID NO: 162254 - RNA, 19 nt, Artificial Sequence
  Description of Artificial Sequence: Synthetic oligonucleotide
  Sense strand starting at position 3252 of SEQ ID NO: 2088
gaauguuuccaauguggag

SEQ ID NO: 162255 - RNA, 19 nt, Artificial Sequence
  Description of Artificial Sequence: Synthetic oligonucleotide
  Antisense strand to SEQ ID NO: 162254
cuccacauuggaaacauuc

SEQ ID NO: 162256 - RNA, 19 nt, Artificial Sequence
  Description of Artificial Sequence: Synthetic oligonucleotide
  Sense strand starting at position 3547 of SEQ ID NO: 2088
gaagaauagguuuguguca

SEQ ID NO: 162257 - RNA, 19 nt, Artificial Sequence
  Description of Artificial Sequence: Synthetic oligonucleotide
  Antisense strand to SEQ ID NO: 162256
ugacacaaaccuauucuuc

SEQ ID NO: 162258 - RNA, 19 nt, Artificial Sequence
  Description of Artificial Sequence: Synthetic oligonucleotide
  Sense strand starting at position 151 of SEQ ID NO: 2089
cugaacucugaaggaguuu

SEQ ID NO: 162259 - RNA, 19 nt, Artificial Sequence
  Description of Artificial Sequence: Synthetic oligonucleotide
  Antisense strand to SEQ ID NO: 162258
aaacuccuucagaguucag

SEQ ID NO: 162260 - RNA, 19 nt, Artificial Sequence
  Description of Artificial Sequence: Synthetic oligonucleotide
  Sense strand starting at position 186 of SEQ ID NO: 2089
gggccaagggaucgagaaa

SEQ ID NO: 162261 - RNA, 19 nt, Artificial Sequence
  Description of Artificial Sequence: Synthetic oligonucleotide
  Antisense strand to SEQ ID NO: 162260
uuucucgaucccuuggccc

SEQ ID NO: 162262 - RNA, 19 nt, Artificial Sequence
  Description of Artificial Sequence: Synthetic oligonucleotide
  Sense strand starting at position 208 of SEQ ID NO: 2089
ucgugcauucuucuugcua

SEQ ID NO: 162263 - RNA, 19 nt, Artificial Sequence
  Description of Artificial Sequence: Synthetic oligonucleotide
  Antisense strand to SEQ ID NO: 162262
uagcaagaagaaugcacga

SEQ ID NO: 162264 - RNA, 19 nt, Artificial Sequence
  Description of Artificial Sequence: Synthetic oligonucleotide
  Sense strand starting at position 317 of SEQ ID NO: 2089
cucugcaggcuugaagaua

SEQ ID NO: 162265 - RNA, 19 nt, Artificial Sequence
  Description of Artificial Sequence: Synthetic oligonucleotide
  Antisense strand to SEQ ID NO: 162264
uaucuucaagccugcagag

SEQ ID NO: 162266 - RNA, 19 nt, Artificial Sequence
  Description of Artificial Sequence: Synthetic oligonucleotide
  Sense strand starting at position 845 of SEQ ID NO: 2089
ggguucucuaaagaaugca

SEQ ID NO: 162267 - RNA, 19 nt, Artificial Sequence
  Description of Artificial Sequence: Synthetic oligonucleotide
  Antisense strand to SEQ ID NO: 162266
ugcauucuuuagagaaccc

SEQ ID NO: 162268 - RNA, 19 nt, Artificial Sequence
  Description of Artificial Sequence: Synthetic oligonucleotide
  Sense strand starting at position 1063 of SEQ ID NO: 2089
ggagguguuucccucauaa

SEQ ID NO: 162269 - RNA, 19 nt, Artificial Sequence
  Description of Artificial Sequence: Synthetic oligonucleotide
  Antisense strand to SEQ ID NO: 162268
uuaugagggaaacaccucc

SEQ ID NO: 162270 - RNA, 19 nt, Artificial Sequence
  Description of Artificial Sequence: Synthetic oligonucleotide
  Sense strand starting at position 1228 of SEQ ID NO: 2089
aguuguuggaugugaagau

SEQ ID NO: 162271 - RNA, 19 nt, Artificial Sequence
  Description of Artificial Sequence: Synthetic oligonucleotide
  Antisense strand to SEQ ID NO: 162270
aucuucacauccaacaacu

SEQ ID NO: 162272 - RNA, 19 nt, Artificial Sequence
  Description of Artificial Sequence: Synthetic oligonucleotide
  Sense strand starting at position 1240 of SEQ ID NO: 2089
ugaagauucuccuucgaag

SEQ ID NO: 162273 - RNA, 19 nt, Artificial Sequence
  Description of Artificial Sequence: Synthetic oligonucleotide
  Antisense strand to SEQ ID NO: 162272
cuucgaaggagaaucuuca

SEQ ID NO: 162274 - RNA, 19 nt, Artificial Sequence
  Description of Artificial Sequence: Synthetic oligonucleotide
  Sense strand starting at position 1290 of SEQ ID NO: 2089
ggguuugaaacuggucuga

SEQ ID NO: 162275 - RNA, 19 nt, Artificial Sequence
  Description of Artificial Sequence: Synthetic oligonucleotide
  Antisense strand to SEQ ID NO: 162274
ucagaccaguuucaaaccc

SEQ ID NO: 162276 - RNA, 19 nt, Artificial Sequence
  Description of Artificial Sequence: Synthetic oligonucleotide
  Sense strand starting at position 1292 of SEQ ID NO: 2089
guuugaaacuggucugaaa

SEQ ID NO: 162277 - RNA, 19 nt, Artificial Sequence
  Description of Artificial Sequence: Synthetic oligonucleotide
  Antisense strand to SEQ ID NO: 162276
uuucagaccaguuucaaac

SEQ ID NO: 162278 - RNA, 19 nt, Artificial Sequence
  Description of Artificial Sequence: Synthetic oligonucleotide
  Sense strand starting at position 1294 of SEQ ID NO: 2089
uugaaacuggucugaaaug

SEQ ID NO: 162279 - RNA, 19 nt, Artificial Sequence
  Description of Artificial Sequence: Synthetic oligonucleotide
  Antisense strand to SEQ ID NO: 162278
cauuucagaccaguuucaa

SEQ ID NO: 162280 - RNA, 19 nt, Artificial Sequence
  Description of Artificial Sequence: Synthetic oligonucleotide
  Sense strand starting at position 1373 of SEQ ID NO: 2089
gggcaauaauucucuaaga

SEQ ID NO: 162281 - RNA, 19 nt, Artificial Sequence
  Description of Artificial Sequence: Synthetic oligonucleotide
  Antisense strand to SEQ ID NO: 162280
ucuuagagaauuauugccc

SEQ ID NO: 162282 - RNA, 19 nt, Artificial Sequence
  Description of Artificial Sequence: Synthetic oligonucleotide
  Sense strand starting at position 1374 of SEQ ID NO: 2089
ggcaauaauucucuaagag

SEQ ID NO: 162283 - RNA, 19 nt, Artificial Sequence
  Description of Artificial Sequence: Synthetic oligonucleotide
  Antisense strand to SEQ ID NO: 162282
cucuuagagaauuauugcc

SEQ ID NO: 162284 - RNA, 19 nt, Artificial Sequence
  Description of Artificial Sequence: Synthetic oligonucleotide
  Sense strand starting at position 1455 of SEQ ID NO: 2089
gaaaguuaggagcgaggaa

SEQ ID NO: 162285 - RNA, 19 nt, Artificial Sequence
  Description of Artificial Sequence: Synthetic oligonucleotide
  Antisense strand to SEQ ID NO: 162284
uuccucgcuccuaacuuuc

SEQ ID NO: 162286 - RNA, 19 nt, Artificial Sequence
  Description of Artificial Sequence: Synthetic oligonucleotide
  Sense strand starting at position 1698 of SEQ ID NO: 2089
gagggagucccugagccaa

SEQ ID NO: 162287 - RNA, 19 nt, Artificial Sequence
  Description of Artificial Sequence: Synthetic oligonucleotide
  Antisense strand to SEQ ID NO: 162286
uuggcucagggacucccuc

SEQ ID NO: 162288 - RNA, 19 nt, Artificial Sequence
  Description of Artificial Sequence: Synthetic oligonucleotide
  Sense strand starting at position 2426 of SEQ ID NO: 2089
ggaagagacuugcccaaau

SEQ ID NO: 162289 - RNA, 19 nt, Artificial Sequence
  Description of Artificial Sequence: Synthetic oligonucleotide
  Antisense strand to SEQ ID NO: 162288
auuugggcaagucucuucc

SEQ ID NO: 162290 - RNA, 19 nt, Artificial Sequence
  Description of Artificial Sequence: Synthetic oligonucleotide
  Sense strand starting at position 2678 of SEQ ID NO: 2089
cugugaagggccugacaau

SEQ ID NO: 162291 - RNA, 19 nt, Artificial Sequence
  Description of Artificial Sequence: Synthetic oligonucleotide
  Antisense strand to SEQ ID NO: 162290
auugucaggcccuucacag

SEQ ID NO: 162292 - RNA, 19 nt, Artificial Sequence
  Description of Artificial Sequence: Synthetic oligonucleotide
  Sense strand starting at position 2838 of SEQ ID NO: 2089
cuagcacccgguuaagaaa

SEQ ID NO: 162293 - RNA, 19 nt, Artificial Sequence
  Description of Artificial Sequence: Synthetic oligonucleotide
  Antisense strand to SEQ ID NO: 162292
uuucuuaaccgggugcuag

SEQ ID NO: 162294 - RNA, 19 nt, Artificial Sequence
  Description of Artificial Sequence: Synthetic oligonucleotide
  Sense strand starting at position 3042 of SEQ ID NO: 2089
auguauucuucugugauuu

SEQ ID NO: 162295 - RNA, 19 nt, Artificial Sequence
  Description of Artificial Sequence: Synthetic oligonucleotide
  Antisense strand to SEQ ID NO: 162294
aaaucacagaagaauacau

SEQ ID NO: 162296 - RNA, 19 nt, Artificial Sequence
  Description of Artificial Sequence: Synthetic oligonucleotide
  Sense strand starting at position 3043 of SEQ ID NO: 2089
uguauucuucugugauuug

SEQ ID NO: 162297 - RNA, 19 nt, Artificial Sequence
  Description of Artificial Sequence: Synthetic oligonucleotide
  Antisense strand to SEQ ID NO: 162296
caaaucacagaagaauaca

SEQ ID NO: 162298 - RNA, 19 nt, Artificial Sequence
  Description of Artificial Sequence: Synthetic oligonucleotide
  Sense strand starting at position 3054 of SEQ ID NO: 2089
gugauuugcuucucccacu

SEQ ID NO: 162299 - RNA, 19 nt, Artificial Sequence
  Description of Artificial Sequence: Synthetic oligonucleotide
  Antisense strand to SEQ ID NO: 162298
agugggagaagcaaaucac

SEQ ID NO: 162300 - RNA, 19 nt, Artificial Sequence
  Description of Artificial Sequence: Synthetic oligonucleotide
  Sense strand starting at position 3112 of SEQ ID NO: 2089
uuuccauugcuggacagua

SEQ ID NO: 162301 - RNA, 19 nt, Artificial Sequence
  Description of Artificial Sequence: Synthetic oligonucleotide
  Antisense strand to SEQ ID NO: 162300
uacuguccagcaauggaaa

SEQ ID NO: 162302 - RNA, 19 nt, Artificial Sequence
  Description of Artificial Sequence: Synthetic oligonucleotide
  Sense strand starting at position 3114 of SEQ ID NO: 2089
uccauugcuggacaguauu

SEQ ID NO: 162303 - RNA, 19 nt, Artificial Sequence
  Description of Artificial Sequence: Synthetic oligonucleotide
  Antisense strand to SEQ ID NO: 162302
aauacuguccagcaaugga

SEQ ID NO: 162304 - RNA, 19 nt, Artificial Sequence
  Description of Artificial Sequence: Synthetic oligonucleotide
  Sense strand starting at position 3205 of SEQ ID NO: 2089
caauguugugaacauugua

SEQ ID NO: 162305 - RNA, 19 nt, Artificial Sequence
  Description of Artificial Sequence: Synthetic oligonucleotide
  Antisense strand to SEQ ID NO: 162304
uacaauguucacaacauug

SEQ ID NO: 162306 - RNA, 19 nt, Artificial Sequence
  Description of Artificial Sequence: Synthetic oligonucleotide
  Sense strand starting at position 3471 of SEQ ID NO: 2089
uaucuugaaucucugggua

SEQ ID NO: 162307 - RNA, 19 nt, Artificial Sequence
  Description of Artificial Sequence: Synthetic oligonucleotide
  Antisense strand to SEQ ID NO: 162306
uacccagagauucaagaua

SEQ ID NO: 162308 - RNA, 19 nt, Artificial Sequence
  Description of Artificial Sequence: Synthetic oligonucleotide
  Sense strand starting at position 3618 of SEQ ID NO: 2089
auaugucuacucuauaugu

SEQ ID NO: 162309 - RNA, 19 nt, Artificial Sequence
  Description of Artificial Sequence: Synthetic oligonucleotide
  Antisense strand to SEQ ID NO: 162308
acauauagaguagacauau

SEQ ID NO: 162310 - RNA, 19 nt, Artificial Sequence
  Description of Artificial Sequence: Synthetic oligonucleotide
  Sense strand starting at position 3651 of SEQ ID NO: 2089
ccacuuuguguuuguauuu

SEQ ID NO: 162311 - RNA, 19 nt, Artificial Sequence
  Description of Artificial Sequence: Synthetic oligonucleotide
  Antisense strand to SEQ ID NO: 162310
aaauacaaacacaaagugg

SEQ ID NO: 162312 - RNA, 19 nt, Artificial Sequence
  Description of Artificial Sequence: Synthetic oligonucleotide
  Sense strand starting at position 3675 of SEQ ID NO: 2089
uuacauauagucugugaug

SEQ ID NO: 162313 - RNA, 19 nt, Artificial Sequence
  Description of Artificial Sequence: Synthetic oligonucleotide
  Antisense strand to SEQ ID NO: 162312
caucacagacuauauguaa

SEQ ID NO: 162314 - RNA, 19 nt, Artificial Sequence
  Description of Artificial Sequence: Synthetic oligonucleotide
  Sense strand starting at position 3676 of SEQ ID NO: 2089
uacauauagucugugauga

SEQ ID NO: 162315 - RNA, 19 nt, Artificial Sequence
  Description of Artificial Sequence: Synthetic oligonucleotide
  Antisense strand to SEQ ID NO: 162314
ucaucacagacuauaugua

SEQ ID NO: 162316 - RNA, 19 nt, Artificial Sequence
  Description of Artificial Sequence: Synthetic oligonucleotide
  Sense strand starting at position 3677 of SEQ ID NO: 2089
acauauagucugugaugaa

SEQ ID NO: 162317 - RNA, 19 nt, Artificial Sequence
  Description of Artificial Sequence: Synthetic oligonucleotide
  Antisense strand to SEQ ID NO: 162316
uucaucacagacuauaugu

SEQ ID NO: 162318 - RNA, 19 nt, Artificial Sequence
  Description of Artificial Sequence: Synthetic oligonucleotide
  Sense strand starting at position 3698 of SEQ ID NO: 2089
gaagauaaauuguugucau

SEQ ID NO: 162319 - RNA, 19 nt, Artificial Sequence
  Description of Artificial Sequence: Synthetic oligonucleotide
  Antisense strand to SEQ ID NO: 162318
augacaacaauuuaucuuc

SEQ ID NO: 162320 - RNA, 19 nt, Artificial Sequence
  Description of Artificial Sequence: Synthetic oligonucleotide
  Sense strand starting at position 3701 of SEQ ID NO: 2089
gauaaauuguugucaugga

SEQ ID NO: 162321 - RNA, 19 nt, Artificial Sequence
  Description of Artificial Sequence: Synthetic oligonucleotide
  Antisense strand to SEQ ID NO: 162320
uccaugacaacaauuuauc

SEQ ID NO: 162322 - RNA, 19 nt, Artificial Sequence
  Description of Artificial Sequence: Synthetic oligonucleotide
  Sense strand starting at position 3706 of SEQ ID NO: 2089
auuguugucauggaguaug

SEQ ID NO: 162323 - RNA, 19 nt, Artificial Sequence
  Description of Artificial Sequence: Synthetic oligonucleotide
  Antisense strand to SEQ ID NO: 162322
cauacuccaugacaacaau

SEQ ID NO: 162324 - RNA, 19 nt, Artificial Sequence
  Description of Artificial Sequence: Synthetic oligonucleotide
  Sense strand starting at position 3729 of SEQ ID NO: 2089
uucucaguuugaccauaua

SEQ ID NO: 162325 - RNA, 19 nt, Artificial Sequence
  Description of Artificial Sequence: Synthetic oligonucleotide
  Antisense strand to SEQ ID NO: 162324
uauauggucaaacugagaa

SEQ ID NO: 162326 - RNA, 19 nt, Artificial Sequence
  Description of Artificial Sequence: Synthetic oligonucleotide
  Sense strand starting at position 3762 of SEQ ID NO: 2089
uccagaaugccauaccagu

SEQ ID NO: 162327 - RNA, 19 nt, Artificial Sequence
  Description of Artificial Sequence: Synthetic oligonucleotide
  Antisense strand to SEQ ID NO: 162326
acugguauggcauucugga

SEQ ID NO: 162328 - RNA, 19 nt, Artificial Sequence
  Description of Artificial Sequence: Synthetic oligonucleotide
  Sense strand starting at position 3781 of SEQ ID NO: 2089
cuaugcucccaauauucga

SEQ ID NO: 162329 - RNA, 19 nt, Artificial Sequence
  Description of Artificial Sequence: Synthetic oligonucleotide
  Antisense strand to SEQ ID NO: 162328
ucgaauauugggagcauag

SEQ ID NO: 162330 - RNA, 19 nt, Artificial Sequence
  Description of Artificial Sequence: Synthetic oligonucleotide
  Sense strand starting at position 3789 of SEQ ID NO: 2089
ccaauauucgaagguuacu

SEQ ID NO: 162331 - RNA, 19 nt, Artificial Sequence
  Description of Artificial Sequence: Synthetic oligonucleotide
  Antisense strand to SEQ ID NO: 162330
aguaaccuucgaauauugg

SEQ ID NO: 162332 - RNA, 19 nt, Artificial Sequence
  Description of Artificial Sequence: Synthetic oligonucleotide
  Sense strand starting at position 3826 of SEQ ID NO: 2089
caggcuuggcauuaucaag

SEQ ID NO: 162333 - RNA, 19 nt, Artificial Sequence
  Description of Artificial Sequence: Synthetic oligonucleotide
  Antisense strand to SEQ ID NO: 162332
cuugauaaugccaagccug

SEQ ID NO: 162334 - RNA, 19 nt, Artificial Sequence
  Description of Artificial Sequence: Synthetic oligonucleotide
  Sense strand starting at position 3879 of SEQ ID NO: 2089
guguuaucucacuauugaa

SEQ ID NO: 162335 - RNA, 19 nt, Artificial Sequence
  Description of Artificial Sequence: Synthetic oligonucleotide
  Antisense strand to SEQ ID NO: 162334
uucaauagugagauaacac

SEQ ID NO: 162336 - RNA, 19 nt, Artificial Sequence
  Description of Artificial Sequence: Synthetic oligonucleotide
  Sense strand starting at position 3928 of SEQ ID NO: 2089
ucuguauaugcuuauaaga

SEQ ID NO: 162337 - RNA, 19 nt, Artificial Sequence
  Description of Artificial Sequence: Synthetic oligonucleotide
  Antisense strand to SEQ ID NO: 162336
ucuuauaagcauauacaga

SEQ ID NO: 162338 - RNA, 19 nt, Artificial Sequence
  Description of Artificial Sequence: Synthetic oligonucleotide
  Sense strand starting at position 3904 of SEQ ID NO: 2090
agguaacuauaucgagaga

SEQ ID NO: 162339 - RNA, 19 nt, Artificial Sequence
  Description of Artificial Sequence: Synthetic oligonucleotide
  Antisense strand to SEQ ID NO: 162338
ucucucgauauaguuaccu

SEQ ID NO: 162340 - RNA, 19 nt, Artificial Sequence
  Description of Artificial Sequence: Synthetic oligonucleotide
  Sense strand starting at position 3091 of SEQ ID NO: 2090
cgcugugguauagaaggaa

SEQ ID NO: 162341 - RNA, 19 nt, Artificial Sequence
  Description of Artificial Sequence: Synthetic oligonucleotide
  Antisense strand to SEQ ID NO: 162340
uuccuucuauaccacagcg

SEQ ID NO: 162342 - RNA, 19 nt, Artificial Sequence
  Description of Artificial Sequence: Synthetic oligonucleotide
  Sense strand starting at position 3084 of SEQ ID NO: 2090
ugcugaucgcugugguaua

SEQ ID NO: 162343 - RNA, 19 nt, Artificial Sequence
  Description of Artificial Sequence: Synthetic oligonucleotide
  Antisense strand to SEQ ID NO: 162342
uauaccacagcgaucagca

SEQ ID NO: 162344 - RNA, 19 nt, Artificial Sequence
  Description of Artificial Sequence: Synthetic oligonucleotide
  Sense strand starting at position 3082 of SEQ ID NO: 2090
cuugcugaucgcuguggua

SEQ ID NO: 162345 - RNA, 19 nt, Artificial Sequence
  Description of Artificial Sequence: Synthetic oligonucleotide
  Antisense strand to SEQ ID NO: 162344
uaccacagcgaucagcaag

SEQ ID NO: 162346 - RNA, 19 nt, Artificial Sequence
  Description of Artificial Sequence: Synthetic oligonucleotide
  Sense strand starting at position 3072 of SEQ ID NO: 2090
gcaagauacccuugcugau

SEQ ID NO: 162347 - RNA, 19 nt, Artificial Sequence
  Description of Artificial Sequence: Synthetic oligonucleotide
  Antisense strand to SEQ ID NO: 162346
aucagcaaggguaucuugc

SEQ ID NO: 162348 - RNA, 19 nt, Artificial Sequence
  Description of Artificial Sequence: Synthetic oligonucleotide
  Sense strand starting at position 3061 of SEQ ID NO: 2090
cgaaaccguuugcaagaua

SEQ ID NO: 162349 - RNA, 19 nt, Artificial Sequence
  Description of Artificial Sequence: Synthetic oligonucleotide
  Antisense strand to SEQ ID NO: 162348
uaucuugcaaacgguuucg

SEQ ID NO: 162350 - RNA, 19 nt, Artificial Sequence
  Description of Artificial Sequence: Synthetic oligonucleotide
  Sense strand starting at position 3060 of SEQ ID NO: 2090
gcgaaaccguuugcaagau

SEQ ID NO: 162351 - RNA, 19 nt, Artificial Sequence
  Description of Artificial Sequence: Synthetic oligonucleotide
  Antisense strand to SEQ ID NO: 162350
aucuugcaaacgguuucgc

SEQ ID NO: 162352 - RNA, 19 nt, Artificial Sequence
  Description of Artificial Sequence: Synthetic oligonucleotide
  Sense strand starting at position 3059 of SEQ ID NO: 2090
ugcgaaaccguuugcaaga

SEQ ID NO: 162353 - RNA, 19 nt, Artificial Sequence
  Description of Artificial Sequence: Synthetic oligonucleotide
  Antisense strand to SEQ ID NO: 162352
ucuugcaaacgguuucgca

SEQ ID NO: 162354 - RNA, 19 nt, Artificial Sequence
  Description of Artificial Sequence: Synthetic oligonucleotide
  Sense strand starting at position 2716 of SEQ ID NO: 2090
uggcuuguaacaugaagca

SEQ ID NO: 162355 - RNA, 19 nt, Artificial Sequence
  Description of Artificial Sequence: Synthetic oligonucleotide
  Antisense strand to SEQ ID NO: 162354
ugcuucauguuacaagcca

SEQ ID NO: 162356 - RNA, 19 nt, Artificial Sequence
  Description of Artificial Sequence: Synthetic oligonucleotide
  Sense strand starting at position 2709 of SEQ ID NO: 2090
gagucacuggcuuguaaca

SEQ ID NO: 162357 - RNA, 19 nt, Artificial Sequence
  Description of Artificial Sequence: Synthetic oligonucleotide
  Antisense strand to SEQ ID NO: 162356
uguuacaagccagugacuc

SEQ ID NO: 162358 - RNA, 19 nt, Artificial Sequence
  Description of Artificial Sequence: Synthetic oligonucleotide
  Sense strand starting at position 2707 of SEQ ID NO: 2090
aagagucacuggcuuguaa

SEQ ID NO: 162359 - RNA, 19 nt, Artificial Sequence
  Description of Artificial Sequence: Synthetic oligonucleotide
  Antisense strand to SEQ ID NO: 162358
uuacaagccagugacucuu

SEQ ID NO: 162360 - RNA, 19 nt, Artificial Sequence
  Description of Artificial Sequence: Synthetic oligonucleotide
  Sense strand starting at position 1707 of SEQ ID NO: 2090
ucacucaccguuugaaaug

SEQ ID NO: 162361 - RNA, 19 nt, Artificial Sequence
  Description of Artificial Sequence: Synthetic oligonucleotide
  Antisense strand to SEQ ID NO: 162360
cauuucaaacggugaguga

SEQ ID NO: 162362 - RNA, 19 nt, Artificial Sequence
  Description of Artificial Sequence: Synthetic oligonucleotide
  Sense strand starting at position 1142 of SEQ ID NO: 2090
gcaaauccuccggagaggu

SEQ ID NO: 162363 - RNA, 19 nt, Artificial Sequence
  Description of Artificial Sequence: Synthetic oligonucleotide
  Antisense strand to SEQ ID NO: 162362
accucuccggaggauuugc

SEQ ID NO: 162364 - RNA, 19 nt, Artificial Sequence
  Description of Artificial Sequence: Synthetic oligonucleotide
  Sense strand starting at position 1116 of SEQ ID NO: 2090
ugccauucccagugaguuu

SEQ ID NO: 162365 - RNA, 19 nt, Artificial Sequence
  Description of Artificial Sequence: Synthetic oligonucleotide
  Antisense strand to SEQ ID NO: 162364
aaacucacugggaauggca

SEQ ID NO: 162366 - RNA, 19 nt, Artificial Sequence
  Description of Artificial Sequence: Synthetic oligonucleotide
  Sense strand starting at position 1105 of SEQ ID NO: 2090
cgagaaacguuugccauuc

SEQ ID NO: 162367 - RNA, 19 nt, Artificial Sequence
  Description of Artificial Sequence: Synthetic oligonucleotide
  Antisense strand to SEQ ID NO: 162366
gaauggcaaacguuucucg

SEQ ID NO: 162368 - RNA, 19 nt, Artificial Sequence
  Description of Artificial Sequence: Synthetic oligonucleotide
  Sense strand starting at position 1104 of SEQ ID NO: 2090
acgagaaacguuugccauu

SEQ ID NO: 162369 - RNA, 19 nt, Artificial Sequence
  Description of Artificial Sequence: Synthetic oligonucleotide
  Antisense strand to SEQ ID NO: 162368
aauggcaaacguuucucgu

SEQ ID NO: 162370 - RNA, 19 nt, Artificial Sequence
  Description of Artificial Sequence: Synthetic oligonucleotide
  Sense strand starting at position 1002 of SEQ ID NO: 2090
cuagcaaccuccugucaga

SEQ ID NO: 162371 - RNA, 19 nt, Artificial Sequence
  Description of Artificial Sequence: Synthetic oligonucleotide
  Antisense strand to SEQ ID NO: 162370
ucugacaggagguugcuag

SEQ ID NO: 162372 - RNA, 19 nt, Artificial Sequence
  Description of Artificial Sequence: Synthetic oligonucleotide
  Sense strand starting at position 917 of SEQ ID NO: 2090
ccguuugauucgggaauuc

SEQ ID NO: 162373 - RNA, 19 nt, Artificial Sequence
  Description of Artificial Sequence: Synthetic oligonucleotide
  Antisense strand to SEQ ID NO: 162372
gaauucccgaaucaaacgg

SEQ ID NO: 162374 - RNA, 19 nt, Artificial Sequence
  Description of Artificial Sequence: Synthetic oligonucleotide
  Sense strand starting at position 916 of SEQ ID NO: 2090
accguuugauucgggaauu

SEQ ID NO: 162375 - RNA, 19 nt, Artificial Sequence
  Description of Artificial Sequence: Synthetic oligonucleotide
  Antisense strand to SEQ ID NO: 162374
aauucccgaaucaaacggu

SEQ ID NO: 162376 - RNA, 19 nt, Artificial Sequence
  Description of Artificial Sequence: Synthetic oligonucleotide
  Sense strand starting at position 915 of SEQ ID NO: 2090
uaccguuugauucgggaau

SEQ ID NO: 162377 - RNA, 19 nt, Artificial Sequence
  Description of Artificial Sequence: Synthetic oligonucleotide
  Antisense strand to SEQ ID NO: 162376
auucccgaaucaaacggua

SEQ ID NO: 162378 - RNA, 19 nt, Artificial Sequence
  Description of Artificial Sequence: Synthetic oligonucleotide
  Sense strand starting at position 879 of SEQ ID NO: 2090
gcuacaucuucucaucgua

SEQ ID NO: 162379 - RNA, 19 nt, Artificial Sequence
  Description of Artificial Sequence: Synthetic oligonucleotide
  Antisense strand to SEQ ID NO: 162378
uacgaugagaagauguagc

SEQ ID NO: 162380 - RNA, 19 nt, Artificial Sequence
  Description of Artificial Sequence: Synthetic oligonucleotide
  Sense strand starting at position 801 of SEQ ID NO: 2090
gcuacucaauaagauguau

SEQ ID NO: 162381 - RNA, 19 nt, Artificial Sequence
  Description of Artificial Sequence: Synthetic oligonucleotide
  Antisense strand to SEQ ID NO: 162380
auacaucuuauugaguagc

SEQ ID NO: 162382 - RNA, 19 nt, Artificial Sequence
  Description of Artificial Sequence: Synthetic oligonucleotide
  Sense strand starting at position 752 of SEQ ID NO: 2090
gccuaucuguuacgguaca

SEQ ID NO: 162383 - RNA, 19 nt, Artificial Sequence
  Description of Artificial Sequence: Synthetic oligonucleotide
  Antisense strand to SEQ ID NO: 162382
uguaccguaacagauaggc

SEQ ID NO: 162384 - RNA, 19 nt, Artificial Sequence
  Description of Artificial Sequence: Synthetic oligonucleotide
  Sense strand starting at position 750 of SEQ ID NO: 2090
aggccuaucuguuacggua

SEQ ID NO: 162385 - RNA, 19 nt, Artificial Sequence
  Description of Artificial Sequence: Synthetic oligonucleotide
  Antisense strand to SEQ ID NO: 162384
uaccguaacagauaggccu

SEQ ID NO: 162386 - RNA, 19 nt, Artificial Sequence
  Description of Artificial Sequence: Synthetic oligonucleotide
  Sense strand starting at position 682 of SEQ ID NO: 2090
uugcuauggucccucugaa

SEQ ID NO: 162387 - RNA, 19 nt, Artificial Sequence
  Description of Artificial Sequence: Synthetic oligonucleotide
  Antisense strand to SEQ ID NO: 162386
uucagagggaccauagcaa

SEQ ID NO: 162388 - RNA, 19 nt, Artificial Sequence
  Description of Artificial Sequence: Synthetic oligonucleotide
  Sense strand starting at position 634 of SEQ ID NO: 2090
ggucuuaaauaucggaaua

SEQ ID NO: 162389 - RNA, 19 nt, Artificial Sequence
  Description of Artificial Sequence: Synthetic oligonucleotide
  Antisense strand to SEQ ID NO: 162388
uauuccgauauuuaagacc

SEQ ID NO: 162390 - RNA, 19 nt, Artificial Sequence
  Description of Artificial Sequence: Synthetic oligonucleotide
  Sense strand starting at position 627 of SEQ ID NO: 2090
cuuccagggucuuaaauau

SEQ ID NO: 162391 - RNA, 19 nt, Artificial Sequence
  Description of Artificial Sequence: Synthetic oligonucleotide
  Antisense strand to SEQ ID NO: 162390
auauuuaagacccuggaag

SEQ ID NO: 162392 - RNA, 19 nt, Artificial Sequence
  Description of Artificial Sequence: Synthetic oligonucleotide
  Sense strand starting at position 589 of SEQ ID NO: 2090
acuacauaguaagggaaau

SEQ ID NO: 162393 - RNA, 19 nt, Artificial Sequence
  Description of Artificial Sequence: Synthetic oligonucleotide
  Antisense strand to SEQ ID NO: 162392
auuucccuuacuauguagu

SEQ ID NO: 162394 - RNA, 19 nt, Artificial Sequence
  Description of Artificial Sequence: Synthetic oligonucleotide
  Sense strand starting at position 545 of SEQ ID NO: 2090
cauggugacucauuaauga

SEQ ID NO: 162395 - RNA, 19 nt, Artificial Sequence
  Description of Artificial Sequence: Synthetic oligonucleotide
  Antisense strand to SEQ ID NO: 162394
ucauuaaugagucaccaug

SEQ ID NO: 162396 - RNA, 19 nt, Artificial Sequence
  Description of Artificial Sequence: Synthetic oligonucleotide
  Sense strand starting at position 541 of SEQ ID NO: 2090
uucccauggugacucauua

SEQ ID NO: 162397 - RNA, 19 nt, Artificial Sequence
  Description of Artificial Sequence: Synthetic oligonucleotide
  Antisense strand to SEQ ID NO: 162396
uaaugagucaccaugggaa

SEQ ID NO: 162398 - RNA, 19 nt, Artificial Sequence
  Description of Artificial Sequence: Synthetic oligonucleotide
  Sense strand starting at position 330 of SEQ ID NO: 2090
gcucaagcagguuaugaau

SEQ ID NO: 162399 - RNA, 19 nt, Artificial Sequence
  Description of Artificial Sequence: Synthetic oligonucleotide
  Antisense strand to SEQ ID NO: 162398
auucauaaccugcuugagc

SEQ ID NO: 162400 - RNA, 19 nt, Artificial Sequence
  Description of Artificial Sequence: Synthetic oligonucleotide
  Sense strand starting at position 251 of SEQ ID NO: 2090
ccugguuucucaggcacga

SEQ ID NO: 162401 - RNA, 19 nt, Artificial Sequence
  Description of Artificial Sequence: Synthetic oligonucleotide
  Antisense strand to SEQ ID NO: 162400
ucgugccugagaaaccagg

SEQ ID NO: 162402 - RNA, 19 nt, Artificial Sequence
  Description of Artificial Sequence: Synthetic oligonucleotide
  Sense strand starting at position 16 of SEQ ID NO: 2090
ggauuaaagugagcacauc

SEQ ID NO: 162403 - RNA, 19 nt, Artificial Sequence
  Description of Artificial Sequence: Synthetic oligonucleotide
  Antisense strand to SEQ ID NO: 162402
gaugugcucacuuuaaucc

SEQ ID NO: 162404 - RNA, 19 nt, Artificial Sequence
  Description of Artificial Sequence: Synthetic oligonucleotide
  Sense strand starting at position 3940 of SEQ ID NO: 2091
agcccaucacuaggagaaa

SEQ ID NO: 162405 - RNA, 19 nt, Artificial Sequence
  Description of Artificial Sequence: Synthetic oligonucleotide
  Antisense strand to SEQ ID NO: 162404
uuucuccuagugaugggcu

SEQ ID NO: 162406 - RNA, 19 nt, Artificial Sequence
  Description of Artificial Sequence: Synthetic oligonucleotide
  Sense strand starting at position 3932 of SEQ ID NO: 2091
gugaaauaagcccaucacu

SEQ ID NO: 162407 - RNA, 19 nt, Artificial Sequence
  Description of Artificial Sequence: Synthetic oligonucleotide
  Antisense strand to SEQ ID NO: 162406
agugaugggcuuauuucac

SEQ ID NO: 162408 - RNA, 19 nt, Artificial Sequence
  Description of Artificial Sequence: Synthetic oligonucleotide
  Sense strand starting at position 3918 of SEQ ID NO: 2091
uggacauggcuuuagugaa

SEQ ID NO: 162409 - RNA, 19 nt, Artificial Sequence
  Description of Artificial Sequence: Synthetic oligonucleotide
  Antisense strand to SEQ ID NO: 162408
uucacuaaagccaugucca

SEQ ID NO: 162410 - RNA, 19 nt, Artificial Sequence
  Description of Artificial Sequence: Synthetic oligonucleotide
  Sense strand starting at position 3891 of SEQ ID NO: 2091
guccaaguaugaugauacu

SEQ ID NO: 162411 - RNA, 19 nt, Artificial Sequence
  Description of Artificial Sequence: Synthetic oligonucleotide
  Antisense strand to SEQ ID NO: 162410
aguaucaucauacuuggac

SEQ ID NO: 162412 - RNA, 19 nt, Artificial Sequence
  Description of Artificial Sequence: Synthetic oligonucleotide
  Sense strand starting at position 3889 of SEQ ID NO: 2091
aaguccaaguaugaugaua

SEQ ID NO: 162413 - RNA, 19 nt, Artificial Sequence
  Description of Artificial Sequence: Synthetic oligonucleotide
  Antisense strand to SEQ ID NO: 162412
uaucaucauacuuggacuu

SEQ ID NO: 162414 - RNA, 19 nt, Artificial Sequence
  Description of Artificial Sequence: Synthetic oligonucleotide
  Sense strand starting at position 3723 of SEQ ID NO: 2091
aggaguucuagauggcuga

SEQ ID NO: 162415 - RNA, 19 nt, Artificial Sequence
  Description of Artificial Sequence: Synthetic oligonucleotide
  Antisense strand to SEQ ID NO: 162414
ucagccaucuagaacuccu

SEQ ID NO: 162416 - RNA, 19 nt, Artificial Sequence
  Description of Artificial Sequence: Synthetic oligonucleotide
  Sense strand starting at position 3721 of SEQ ID NO: 2091
ggaggaguucuagauggcu

SEQ ID NO: 162417 - RNA, 19 nt, Artificial Sequence
  Description of Artificial Sequence: Synthetic oligonucleotide
  Antisense strand to SEQ ID NO: 162416
agccaucuagaacuccucc

SEQ ID NO: 162418 - RNA, 19 nt, Artificial Sequence
  Description of Artificial Sequence: Synthetic oligonucleotide
  Sense strand starting at position 3713 of SEQ ID NO: 2091
gcugauucggaggaguucu

SEQ ID NO: 162419 - RNA, 19 nt, Artificial Sequence
  Description of Artificial Sequence: Synthetic oligonucleotide
  Antisense strand to SEQ ID NO: 162418
agaacuccuccgaaucagc

SEQ ID NO: 162420 - RNA, 19 nt, Artificial Sequence
  Description of Artificial Sequence: Synthetic oligonucleotide
  Sense strand starting at position 3712 of SEQ ID NO: 2091
ggcugauucggaggaguuc

SEQ ID NO: 162421 - RNA, 19 nt, Artificial Sequence
  Description of Artificial Sequence: Synthetic oligonucleotide
  Antisense strand to SEQ ID NO: 162420
gaacuccuccgaaucagcc

SEQ ID NO: 162422 - RNA, 19 nt, Artificial Sequence
  Description of Artificial Sequence: Synthetic oligonucleotide
  Sense strand starting at position 3710 of SEQ ID NO: 2091
acggcugauucggaggagu

SEQ ID NO: 162423 - RNA, 19 nt, Artificial Sequence
  Description of Artificial Sequence: Synthetic oligonucleotide
  Antisense strand to SEQ ID NO: 162422
acuccuccgaaucagccgu

SEQ ID NO: 162424 - RNA, 19 nt, Artificial Sequence
  Description of Artificial Sequence: Synthetic oligonucleotide
  Sense strand starting at position 3685 of SEQ ID NO: 2091
acaucucuagcaggauaca

SEQ ID NO: 162425 - RNA, 19 nt, Artificial Sequence
  Description of Artificial Sequence: Synthetic oligonucleotide
  Antisense strand to SEQ ID NO: 162424
uguauccugcuagagaugu

SEQ ID NO: 162426 - RNA, 19 nt, Artificial Sequence
  Description of Artificial Sequence: Synthetic oligonucleotide
  Sense strand starting at position 3617 of SEQ ID NO: 2091
guguauauaucccaccauu

SEQ ID NO: 162427 - RNA, 19 nt, Artificial Sequence
  Description of Artificial Sequence: Synthetic oligonucleotide
  Antisense strand to SEQ ID NO: 162426
aauggugggauauauacac

SEQ ID NO: 162428 - RNA, 19 nt, Artificial Sequence
  Description of Artificial Sequence: Synthetic oligonucleotide
  Sense strand starting at position 3607 of SEQ ID NO: 2091
acagaacacuguguauaua

SEQ ID NO: 162429 - RNA, 19 nt, Artificial Sequence
  Description of Artificial Sequence: Synthetic oligonucleotide
  Antisense strand to SEQ ID NO: 162428
uauauacacaguguucugu

SEQ ID NO: 162430 - RNA, 19 nt, Artificial Sequence
  Description of Artificial Sequence: Synthetic oligonucleotide
  Sense strand starting at position 3604 of SEQ ID NO: 2091
aguacagaacacuguguau

SEQ ID NO: 162431 - RNA, 19 nt, Artificial Sequence
  Description of Artificial Sequence: Synthetic oligonucleotide
  Antisense strand to SEQ ID NO: 162430
auacacaguguucuguacu

SEQ ID NO: 162432 - RNA, 19 nt, Artificial Sequence
  Description of Artificial Sequence: Synthetic oligonucleotide
  Sense strand starting at position 3558 of SEQ ID NO: 2091
uuauguuucuuugauucca

SEQ ID NO: 162433 - RNA, 19 nt, Artificial Sequence
  Description of Artificial Sequence: Synthetic oligonucleotide
  Antisense strand to SEQ ID NO: 162432
uggaaucaaagaaacauaa

SEQ ID NO: 162434 - RNA, 19 nt, Artificial Sequence
  Description of Artificial Sequence: Synthetic oligonucleotide
  Sense strand starting at position 3025 of SEQ ID NO: 2091
ugagacaguucucacuuua

SEQ ID NO: 162435 - RNA, 19 nt, Artificial Sequence
  Description of Artificial Sequence: Synthetic oligonucleotide
  Antisense strand to SEQ ID NO: 162434
uaaagugagaacugucuca

SEQ ID NO: 162436 - RNA, 19 nt, Artificial Sequence
  Description of Artificial Sequence: Synthetic oligonucleotide
  Sense strand starting at position 3024 of SEQ ID NO: 2091
cugagacaguucucacuuu

SEQ ID NO: 162437 - RNA, 19 nt, Artificial Sequence
  Description of Artificial Sequence: Synthetic oligonucleotide
  Antisense strand to SEQ ID NO: 162436
aaagugagaacugucucag

SEQ ID NO: 162438 - RNA, 19 nt, Artificial Sequence
  Description of Artificial Sequence: Synthetic oligonucleotide
  Sense strand starting at position 2937 of SEQ ID NO: 2091
auaagaauuuccuauagag

SEQ ID NO: 162439 - RNA, 19 nt, Artificial Sequence
  Description of Artificial Sequence: Synthetic oligonucleotide
  Antisense strand to SEQ ID NO: 162438
cucuauaggaaauucuuau

SEQ ID NO: 162440 - RNA, 19 nt, Artificial Sequence
  Description of Artificial Sequence: Synthetic oligonucleotide
  Sense strand starting at position 2851 of SEQ ID NO: 2091
agggcuccucacugacaua

SEQ ID NO: 162441 - RNA, 19 nt, Artificial Sequence
  Description of Artificial Sequence: Synthetic oligonucleotide
  Antisense strand to SEQ ID NO: 162440
uaugucagugaggagcccu

SEQ ID NO: 162442 - RNA, 19 nt, Artificial Sequence
  Description of Artificial Sequence: Synthetic oligonucleotide
  Sense strand starting at position 2721 of SEQ ID NO: 2091
aacguccacugugguaaau

SEQ ID NO: 162443 - RNA, 19 nt, Artificial Sequence
  Description of Artificial Sequence: Synthetic oligonucleotide
  Antisense strand to SEQ ID NO: 162442
auuuaccacaguggacguu

SEQ ID NO: 162444 - RNA, 19 nt, Artificial Sequence
  Description of Artificial Sequence: Synthetic oligonucleotide
  Sense strand starting at position 2720 of SEQ ID NO: 2091
aaacguccacugugguaaa

SEQ ID NO: 162445 - RNA, 19 nt, Artificial Sequence
  Description of Artificial Sequence: Synthetic oligonucleotide
  Antisense strand to SEQ ID NO: 162444
uuuaccacaguggacguuu

SEQ ID NO: 162446 - RNA, 19 nt, Artificial Sequence
  Description of Artificial Sequence: Synthetic oligonucleotide
  Sense strand starting at position 2700 of SEQ ID NO: 2091
caugaugucgacuauaaau

SEQ ID NO: 162447 - RNA, 19 nt, Artificial Sequence
  Description of Artificial Sequence: Synthetic oligonucleotide
  Antisense strand to SEQ ID NO: 162446
auuuauagucgacaucaug

SEQ ID NO: 162448 - RNA, 19 nt, Artificial Sequence
  Description of Artificial Sequence: Synthetic oligonucleotide
  Sense strand starting at position 2697 of SEQ ID NO: 2091
cuacaugaugucgacuaua

SEQ ID NO: 162449 - RNA, 19 nt, Artificial Sequence
  Description of Artificial Sequence: Synthetic oligonucleotide
  Antisense strand to SEQ ID NO: 162448
uauagucgacaucauguag

SEQ ID NO: 162450 - RNA, 19 nt, Artificial Sequence
  Description of Artificial Sequence: Synthetic oligonucleotide
  Sense strand starting at position 2696 of SEQ ID NO: 2091
acuacaugaugucgacuau

SEQ ID NO: 162451 - RNA, 19 nt, Artificial Sequence
  Description of Artificial Sequence: Synthetic oligonucleotide
  Antisense strand to SEQ ID NO: 162450
auagucgacaucauguagu

SEQ ID NO: 162452 - RNA, 19 nt, Artificial Sequence
  Description of Artificial Sequence: Synthetic oligonucleotide
  Sense strand starting at position 2659 of SEQ ID NO: 2091
ucgugaauaucuugucuuu

SEQ ID NO: 162453 - RNA, 19 nt, Artificial Sequence
  Description of Artificial Sequence: Synthetic oligonucleotide
  Antisense strand to SEQ ID NO: 162452
aaagacaagauauucacga

SEQ ID NO: 162454 - RNA, 19 nt, Artificial Sequence
  Description of Artificial Sequence: Synthetic oligonucleotide
  Sense strand starting at position 463 of SEQ ID NO: 2091
ugugucacaguacaaauua

SEQ ID NO: 162455 - RNA, 19 nt, Artificial Sequence
  Description of Artificial Sequence: Synthetic oligonucleotide
  Antisense strand to SEQ ID NO: 162454
uaauuuguacugugacaca

SEQ ID NO: 162456 - RNA, 19 nt, Artificial Sequence
  Description of Artificial Sequence: Synthetic oligonucleotide
  Sense strand starting at position 449 of SEQ ID NO: 2091
gaaacaucaucugcugugu

SEQ ID NO: 162457 - RNA, 19 nt, Artificial Sequence
  Description of Artificial Sequence: Synthetic oligonucleotide
  Antisense strand to SEQ ID NO: 162456
acacagcagaugauguuuc

SEQ ID NO: 162458 - RNA, 19 nt, Artificial Sequence
  Description of Artificial Sequence: Synthetic oligonucleotide
  Sense strand starting at position 326 of SEQ ID NO: 2091
uuagauggaucaggaaaga

SEQ ID NO: 162459 - RNA, 19 nt, Artificial Sequence
  Description of Artificial Sequence: Synthetic oligonucleotide
  Antisense strand to SEQ ID NO: 162458
ucuuuccugauccaucuaa

SEQ ID NO: 162460 - RNA, 19 nt, Artificial Sequence
  Description of Artificial Sequence: Synthetic oligonucleotide
  Sense strand starting at position 319 of SEQ ID NO: 2091
ggaguaguuagauggauca

SEQ ID NO: 162461 - RNA, 19 nt, Artificial Sequence
  Description of Artificial Sequence: Synthetic oligonucleotide
  Antisense strand to SEQ ID NO: 162460
ugauccaucuaacuacucc

SEQ ID NO: 162462 - RNA, 19 nt, Artificial Sequence
  Description of Artificial Sequence: Synthetic oligonucleotide
  Sense strand starting at position 294 of SEQ ID NO: 2091
gggacaaacucagacugua

SEQ ID NO: 162463 - RNA, 19 nt, Artificial Sequence
  Description of Artificial Sequence: Synthetic oligonucleotide
  Antisense strand to SEQ ID NO: 162462
uacagucugaguuuguccc

SEQ ID NO: 162464 - RNA, 19 nt, Artificial Sequence
  Description of Artificial Sequence: Synthetic oligonucleotide
  Sense strand starting at position 204 of SEQ ID NO: 2091
gaucuuguguucucagaua

SEQ ID NO: 162465 - RNA, 19 nt, Artificial Sequence
  Description of Artificial Sequence: Synthetic oligonucleotide
  Antisense strand to SEQ ID NO: 162464
uaucugagaacacaagauc

SEQ ID NO: 162466 - RNA, 19 nt, Artificial Sequence
  Description of Artificial Sequence: Synthetic oligonucleotide
  Sense strand starting at position 202 of SEQ ID NO: 2091
uagaucuuguguucucaga

SEQ ID NO: 162467 - RNA, 19 nt, Artificial Sequence
  Description of Artificial Sequence: Synthetic oligonucleotide
  Antisense strand to SEQ ID NO: 162466
ucugagaacacaagaucua

SEQ ID NO: 162468 - RNA, 19 nt, Artificial Sequence
  Description of Artificial Sequence: Synthetic oligonucleotide
  Sense strand starting at position 197 of SEQ ID NO: 2091
agugguagaucuuguguuc

SEQ ID NO: 162469 - RNA, 19 nt, Artificial Sequence
  Description of Artificial Sequence: Synthetic oligonucleotide
  Antisense strand to SEQ ID NO: 162468
gaacacaagaucuaccacu

SEQ ID NO: 162470 - RNA, 19 nt, Artificial Sequence
  Description of Artificial Sequence: Synthetic oligonucleotide
  Sense strand starting at position 190 of SEQ ID NO: 2091
uacugaaagugguagaucu

SEQ ID NO: 162471 - RNA, 19 nt, Artificial Sequence
  Description of Artificial Sequence: Synthetic oligonucleotide
  Antisense strand to SEQ ID NO: 162470
agaucuaccacuuucagua

SEQ ID NO: 162472 - RNA, 19 nt, Artificial Sequence
  Description of Artificial Sequence: Synthetic oligonucleotide
  Sense strand starting at position 188 of SEQ ID NO: 2091
ccuacugaaagugguagau

SEQ ID NO: 162473 - RNA, 19 nt, Artificial Sequence
  Description of Artificial Sequence: Synthetic oligonucleotide
  Antisense strand to SEQ ID NO: 162472
aucuaccacuuucaguagg

SEQ ID NO: 162474 - RNA, 19 nt, Artificial Sequence
  Description of Artificial Sequence: Synthetic oligonucleotide
  Sense strand starting at position 178 of SEQ ID NO: 2091
ggucacuuguccuacugaa

SEQ ID NO: 162475 - RNA, 19 nt, Artificial Sequence
  Description of Artificial Sequence: Synthetic oligonucleotide
  Antisense strand to SEQ ID NO: 162474
uucaguaggacaagugacc

SEQ ID NO: 162476 - RNA, 19 nt, Artificial Sequence
  Description of Artificial Sequence: Synthetic oligonucleotide
  Sense strand starting at position 117 of SEQ ID NO: 2091
uuucuaucaguagguagua

SEQ ID NO: 162477 - RNA, 19 nt, Artificial Sequence
  Description of Artificial Sequence: Synthetic oligonucleotide
  Antisense strand to SEQ ID NO: 162476
uacuaccuacugauagaaa

SEQ ID NO: 162478 - RNA, 19 nt, Artificial Sequence
  Description of Artificial Sequence: Synthetic oligonucleotide
  Sense strand starting at position 407 of SEQ ID NO: 2092
cccuguagcgggcaaauau

SEQ ID NO: 162479 - RNA, 19 nt, Artificial Sequence
  Description of Artificial Sequence: Synthetic oligonucleotide
  Antisense strand to SEQ ID NO: 162478
auauuugcccgcuacaggg

SEQ ID NO: 162480 - RNA, 19 nt, Artificial Sequence
  Description of Artificial Sequence: Synthetic oligonucleotide
  Sense strand starting at position 414 of SEQ ID NO: 2092
gcgggcaaauauccaaauu

SEQ ID NO: 162481 - RNA, 19 nt, Artificial Sequence
  Description of Artificial Sequence: Synthetic oligonucleotide
  Antisense strand to SEQ ID NO: 162480
aauuuggauauuugcccgc

SEQ ID NO: 162482 - RNA, 19 nt, Artificial Sequence
  Description of Artificial Sequence: Synthetic oligonucleotide
  Sense strand starting at position 582 of SEQ ID NO: 2092
ccacgagggcucugaucaa

SEQ ID NO: 162483 - RNA, 19 nt, Artificial Sequence
  Description of Artificial Sequence: Synthetic oligonucleotide
  Antisense strand to SEQ ID NO: 162482
uugaucagagcccucgugg

SEQ ID NO: 162484 - RNA, 19 nt, Artificial Sequence
  Description of Artificial Sequence: Synthetic oligonucleotide
  Sense strand starting at position 888 of SEQ ID NO: 2092
gggcaacugucaucuaaga

SEQ ID NO: 162485 - RNA, 19 nt, Artificial Sequence
  Description of Artificial Sequence: Synthetic oligonucleotide
  Antisense strand to SEQ ID NO: 162484
ucuuagaugacaguugccc

SEQ ID NO: 162486 - RNA, 19 nt, Artificial Sequence
  Description of Artificial Sequence: Synthetic oligonucleotide
  Sense strand starting at position 1189 of SEQ ID NO: 2092
cuccuuccauguucuguaa

SEQ ID NO: 162487 - RNA, 19 nt, Artificial Sequence
  Description of Artificial Sequence: Synthetic oligonucleotide
  Antisense strand to SEQ ID NO: 162486
uuacagaacauggaaggag

SEQ ID NO: 162488 - RNA, 19 nt, Artificial Sequence
  Description of Artificial Sequence: Synthetic oligonucleotide
  Sense strand starting at position 1277 of SEQ ID NO: 2092
ggacaugucuguccaccua

SEQ ID NO: 162489 - RNA, 19 nt, Artificial Sequence
  Description of Artificial Sequence: Synthetic oligonucleotide
  Antisense strand to SEQ ID NO: 162488
uagguggacagacaugucc

SEQ ID NO: 162490 - RNA, 19 nt, Artificial Sequence
  Description of Artificial Sequence: Synthetic oligonucleotide
  Sense strand starting at position 1343 of SEQ ID NO: 2092
agacuuugucuuggagagu

SEQ ID NO: 162491 - RNA, 19 nt, Artificial Sequence
  Description of Artificial Sequence: Synthetic oligonucleotide
  Antisense strand to SEQ ID NO: 162490
acucuccaagacaaagucu

SEQ ID NO: 162492 - RNA, 19 nt, Artificial Sequence
  Description of Artificial Sequence: Synthetic oligonucleotide
  Sense strand starting at position 1547 of SEQ ID NO: 2092
agggucuucuugucucuga

SEQ ID NO: 162493 - RNA, 19 nt, Artificial Sequence
  Description of Artificial Sequence: Synthetic oligonucleotide
  Antisense strand to SEQ ID NO: 162492
ucagagacaagaagacccu

SEQ ID NO: 162494 - RNA, 19 nt, Artificial Sequence
  Description of Artificial Sequence: Synthetic oligonucleotide
  Sense strand starting at position 1551 of SEQ ID NO: 2092
ucuucuugucucugagagu

SEQ ID NO: 162495 - RNA, 19 nt, Artificial Sequence
  Description of Artificial Sequence: Synthetic oligonucleotide
  Antisense strand to SEQ ID NO: 162494
acucucagagacaagaaga

SEQ ID NO: 162496 - RNA, 19 nt, Artificial Sequence
  Description of Artificial Sequence: Synthetic oligonucleotide
  Sense strand starting at position 1615 of SEQ ID NO: 2092
ugacuuaugugcuuauuuc

SEQ ID NO: 162497 - RNA, 19 nt, Artificial Sequence
  Description of Artificial Sequence: Synthetic oligonucleotide
  Antisense strand to SEQ ID NO: 162496
gaaauaagcacauaaguca

SEQ ID NO: 162498 - RNA, 19 nt, Artificial Sequence
  Description of Artificial Sequence: Synthetic oligonucleotide
  Sense strand starting at position 2011 of SEQ ID NO: 2092
ggcggagucccugaugaug

SEQ ID NO: 162499 - RNA, 19 nt, Artificial Sequence
  Description of Artificial Sequence: Synthetic oligonucleotide
  Antisense strand to SEQ ID NO: 162498
caucaucagggacuccgcc

SEQ ID NO: 162500 - RNA, 19 nt, Artificial Sequence
  Description of Artificial Sequence: Synthetic oligonucleotide
  Sense strand starting at position 2017 of SEQ ID NO: 2092
gucccugaugaugagcaaa

SEQ ID NO: 162501 - RNA, 19 nt, Artificial Sequence
  Description of Artificial Sequence: Synthetic oligonucleotide
  Antisense strand to SEQ ID NO: 162500
uuugcucaucaucagggac

SEQ ID NO: 162502 - RNA, 19 nt, Artificial Sequence
  Description of Artificial Sequence: Synthetic oligonucleotide
  Sense strand starting at position 2181 of SEQ ID NO: 2092
cugagaguuuaacuugauc

SEQ ID NO: 162503 - RNA, 19 nt, Artificial Sequence
  Description of Artificial Sequence: Synthetic oligonucleotide
  Antisense strand to SEQ ID NO: 162502
gaucaaguuaaacucucag

SEQ ID NO: 162504 - RNA, 19 nt, Artificial Sequence
  Description of Artificial Sequence: Synthetic oligonucleotide
  Sense strand starting at position 2205 of SEQ ID NO: 2092
gcaauagucccugagccag

SEQ ID NO: 162505 - RNA, 19 nt, Artificial Sequence
  Description of Artificial Sequence: Synthetic oligonucleotide
  Antisense strand to SEQ ID NO: 162504
cuggcucagggacuauugc

SEQ ID NO: 162506 - RNA, 19 nt, Artificial Sequence
  Description of Artificial Sequence: Synthetic oligonucleotide
  Sense strand starting at position 2231 of SEQ ID NO: 2092
augucagaauuaccuagau

SEQ ID NO: 162507 - RNA, 19 nt, Artificial Sequence
  Description of Artificial Sequence: Synthetic oligonucleotide
  Antisense strand to SEQ ID NO: 162506
aucuagguaauucugacau

SEQ ID NO: 162508 - RNA, 19 nt, Artificial Sequence
  Description of Artificial Sequence: Synthetic oligonucleotide
  Sense strand starting at position 2297 of SEQ ID NO: 2092
gucagagguccauaugcag

SEQ ID NO: 162509 - RNA, 19 nt, Artificial Sequence
  Description of Artificial Sequence: Synthetic oligonucleotide
  Antisense strand to SEQ ID NO: 162508
cugcauauggaccucugac

SEQ ID NO: 162510 - RNA, 19 nt, Artificial Sequence
  Description of Artificial Sequence: Synthetic oligonucleotide
  Sense strand starting at position 2882 of SEQ ID NO: 2092
uuaccauguuugucaucau

SEQ ID NO: 162511 - RNA, 19 nt, Artificial Sequence
  Description of Artificial Sequence: Synthetic oligonucleotide
  Antisense strand to SEQ ID NO: 162510
augaugacaaacaugguaa

SEQ ID NO: 162512 - RNA, 19 nt, Artificial Sequence
  Description of Artificial Sequence: Synthetic oligonucleotide
  Sense strand starting at position 2886 of SEQ ID NO: 2092
cauguuugucaucauguua

SEQ ID NO: 162513 - RNA, 19 nt, Artificial Sequence
  Description of Artificial Sequence: Synthetic oligonucleotide
  Antisense strand to SEQ ID NO: 162512
uaacaugaugacaaacaug

SEQ ID NO: 162514 - RNA, 19 nt, Artificial Sequence
  Description of Artificial Sequence: Synthetic oligonucleotide
  Sense strand starting at position 3400 of SEQ ID NO: 2092
ugguuucuauuaucacuuu

SEQ ID NO: 162515 - RNA, 19 nt, Artificial Sequence
  Description of Artificial Sequence: Synthetic oligonucleotide
  Antisense strand to SEQ ID NO: 162514
aaagugauaauagaaacca

SEQ ID NO: 162516 - RNA, 19 nt, Artificial Sequence
  Description of Artificial Sequence: Synthetic oligonucleotide
  Sense strand starting at position 3428 of SEQ ID NO: 2092
ucuuaaaugucuguuucuu

SEQ ID NO: 162517 - RNA, 19 nt, Artificial Sequence
  Description of Artificial Sequence: Synthetic oligonucleotide
  Antisense strand to SEQ ID NO: 162516
aagaaacagacauuuaaga

SEQ ID NO: 162518 - RNA, 19 nt, Artificial Sequence
  Description of Artificial Sequence: Synthetic oligonucleotide
  Sense strand starting at position 3438 of SEQ ID NO: 2092
cuguuucuucuguauauug

SEQ ID NO: 162519 - RNA, 19 nt, Artificial Sequence
  Description of Artificial Sequence: Synthetic oligonucleotide
  Antisense strand to SEQ ID NO: 162518
caauauacagaagaaacag

SEQ ID NO: 162520 - RNA, 19 nt, Artificial Sequence
  Description of Artificial Sequence: Synthetic oligonucleotide
  Sense strand starting at position 3440 of SEQ ID NO: 2092
guuucuucuguauauugua

SEQ ID NO: 162521 - RNA, 19 nt, Artificial Sequence
  Description of Artificial Sequence: Synthetic oligonucleotide
  Antisense strand to SEQ ID NO: 162520
uacaauauacagaagaaac

SEQ ID NO: 162522 - RNA, 19 nt, Artificial Sequence
  Description of Artificial Sequence: Synthetic oligonucleotide
  Sense strand starting at position 3448 of SEQ ID NO: 2092
uguauauuguaucucuuga

SEQ ID NO: 162523 - RNA, 19 nt, Artificial Sequence
  Description of Artificial Sequence: Synthetic oligonucleotide
  Antisense strand to SEQ ID NO: 162522
ucaagagauacaauauaca

SEQ ID NO: 162524 - RNA, 19 nt, Artificial Sequence
  Description of Artificial Sequence: Synthetic oligonucleotide
  Sense strand starting at position 3453 of SEQ ID NO: 2092
auuguaucucuugacucuu

SEQ ID NO: 162525 - RNA, 19 nt, Artificial Sequence
  Description of Artificial Sequence: Synthetic oligonucleotide
  Antisense strand to SEQ ID NO: 162524
aagagucaagagauacaau

SEQ ID NO: 162526 - RNA, 19 nt, Artificial Sequence
  Description of Artificial Sequence: Synthetic oligonucleotide
  Sense strand starting at position 3463 of SEQ ID NO: 2092
uugacucuucucuguguga

SEQ ID NO: 162527 - RNA, 19 nt, Artificial Sequence
  Description of Artificial Sequence: Synthetic oligonucleotide
  Antisense strand to SEQ ID NO: 162526
ucacacagagaagagucaa

SEQ ID NO: 162528 - RNA, 19 nt, Artificial Sequence
  Description of Artificial Sequence: Synthetic oligonucleotide
  Sense strand starting at position 3464 of SEQ ID NO: 2092
ugacucuucucugugugaa

SEQ ID NO: 162529 - RNA, 19 nt, Artificial Sequence
  Description of Artificial Sequence: Synthetic oligonucleotide
  Antisense strand to SEQ ID NO: 162528
uucacacagagaagaguca

SEQ ID NO: 162530 - RNA, 19 nt, Artificial Sequence
  Description of Artificial Sequence: Synthetic oligonucleotide
  Sense strand starting at position 3465 of SEQ ID NO: 2092
gacucuucucugugugaaa

SEQ ID NO: 162531 - RNA, 19 nt, Artificial Sequence
  Description of Artificial Sequence: Synthetic oligonucleotide
  Antisense strand to SEQ ID NO: 162530
uuucacacagagaagaguc

SEQ ID NO: 162532 - RNA, 19 nt, Artificial Sequence
  Description of Artificial Sequence: Synthetic oligonucleotide
  Sense strand starting at position 3466 of SEQ ID NO: 2092
acucuucucugugugaaau

SEQ ID NO: 162533 - RNA, 19 nt, Artificial Sequence
  Description of Artificial Sequence: Synthetic oligonucleotide
  Antisense strand to SEQ ID NO: 162532
auuucacacagagaagagu

SEQ ID NO: 162534 - RNA, 19 nt, Artificial Sequence
  Description of Artificial Sequence: Synthetic oligonucleotide
  Sense strand starting at position 3467 of SEQ ID NO: 2092
cucuucucugugugaaaug

SEQ ID NO: 162535 - RNA, 19 nt, Artificial Sequence
  Description of Artificial Sequence: Synthetic oligonucleotide
  Antisense strand to SEQ ID NO: 162534
cauuucacacagagaagag

SEQ ID NO: 162536 - RNA, 19 nt, Artificial Sequence
  Description of Artificial Sequence: Synthetic oligonucleotide
  Sense strand starting at position 3472 of SEQ ID NO: 2092
cucugugugaaauggauaa

SEQ ID NO: 162537 - RNA, 19 nt, Artificial Sequence
  Description of Artificial Sequence: Synthetic oligonucleotide
  Antisense strand to SEQ ID NO: 162536
uuauccauuucacacagag

SEQ ID NO: 162538 - RNA, 19 nt, Artificial Sequence
  Description of Artificial Sequence: Synthetic oligonucleotide
  Sense strand starting at position 3519 of SEQ ID NO: 2092
gccguuauccaugaacuaa

SEQ ID NO: 162539 - RNA, 19 nt, Artificial Sequence
  Description of Artificial Sequence: Synthetic oligonucleotide
  Antisense strand to SEQ ID NO: 162538
uuaguucauggauaacggc

SEQ ID NO: 162540 - RNA, 19 nt, Artificial Sequence
  Description of Artificial Sequence: Synthetic oligonucleotide
  Sense strand starting at position 3571 of SEQ ID NO: 2092
uuuacauucuauucgguaa

SEQ ID NO: 162541 - RNA, 19 nt, Artificial Sequence
  Description of Artificial Sequence: Synthetic oligonucleotide
  Antisense strand to SEQ ID NO: 162540
uuaccgaauagaauguaaa

SEQ ID NO: 162542 - RNA, 19 nt, Artificial Sequence
  Description of Artificial Sequence: Synthetic oligonucleotide
  Sense strand starting at position 3574 of SEQ ID NO: 2092
acauucuauucgguaaaga

SEQ ID NO: 162543 - RNA, 19 nt, Artificial Sequence
  Description of Artificial Sequence: Synthetic oligonucleotide
  Antisense strand to SEQ ID NO: 162542
ucuuuaccgaauagaaugu

SEQ ID NO: 162544 - RNA, 19 nt, Artificial Sequence
  Description of Artificial Sequence: Synthetic oligonucleotide
  Sense strand starting at position 3575 of SEQ ID NO: 2092
cauucuauucgguaaagau

SEQ ID NO: 162545 - RNA, 19 nt, Artificial Sequence
  Description of Artificial Sequence: Synthetic oligonucleotide
  Antisense strand to SEQ ID NO: 162544
aucuuuaccgaauagaaug

SEQ ID NO: 162546 - RNA, 19 nt, Artificial Sequence
  Description of Artificial Sequence: Synthetic oligonucleotide
  Sense strand starting at position 3607 of SEQ ID NO: 2092
guuguuuaccuguagauug

SEQ ID NO: 162547 - RNA, 19 nt, Artificial Sequence
  Description of Artificial Sequence: Synthetic oligonucleotide
  Antisense strand to SEQ ID NO: 162546
caaucuacagguaaacaac

SEQ ID NO: 162548 - RNA, 19 nt, Artificial Sequence
  Description of Artificial Sequence: Synthetic oligonucleotide
  Sense strand starting at position 3609 of SEQ ID NO: 2092
uguuuaccuguagauugau

SEQ ID NO: 162549 - RNA, 19 nt, Artificial Sequence
  Description of Artificial Sequence: Synthetic oligonucleotide
  Antisense strand to SEQ ID NO: 162548
aucaaucuacagguaaaca

SEQ ID NO: 162550 - RNA, 19 nt, Artificial Sequence
  Description of Artificial Sequence: Synthetic oligonucleotide
  Sense strand starting at position 3615 of SEQ ID NO: 2092
ccuguagauugauucuuaa

SEQ ID NO: 162551 - RNA, 19 nt, Artificial Sequence
  Description of Artificial Sequence: Synthetic oligonucleotide
  Antisense strand to SEQ ID NO: 162550
uuaagaaucaaucuacagg

SEQ ID NO: 162552 - RNA, 19 nt, Artificial Sequence
  Description of Artificial Sequence: Synthetic oligonucleotide
  Sense strand starting at position 3618 of SEQ ID NO: 2092
guagauugauucuuaacac

SEQ ID NO: 162553 - RNA, 19 nt, Artificial Sequence
  Description of Artificial Sequence: Synthetic oligonucleotide
  Antisense strand to SEQ ID NO: 162552
guguuaagaaucaaucuac

SEQ ID NO: 162554 - RNA, 19 nt, Artificial Sequence
  Description of Artificial Sequence: Synthetic oligonucleotide
  Sense strand starting at position 3759 of SEQ ID NO: 2092
ggcugaguugugguagugu

SEQ ID NO: 162555 - RNA, 19 nt, Artificial Sequence
  Description of Artificial Sequence: Synthetic oligonucleotide
  Antisense strand to SEQ ID NO: 162554
acacuaccacaacucagcc

SEQ ID NO: 162556 - RNA, 19 nt, Artificial Sequence
  Description of Artificial Sequence: Synthetic oligonucleotide
  Sense strand starting at position 3761 of SEQ ID NO: 2092
cugaguugugguaguguaa

SEQ ID NO: 162557 - RNA, 19 nt, Artificial Sequence
  Description of Artificial Sequence: Synthetic oligonucleotide
  Antisense strand to SEQ ID NO: 162556
uuacacuaccacaacucag

SEQ ID NO: 162558 - RNA, 19 nt, Artificial Sequence
  Description of Artificial Sequence: Synthetic oligonucleotide
  Sense strand starting at position 3847 of SEQ ID NO: 2093
acuccacgauggucagauu

SEQ ID NO: 162559 - RNA, 19 nt, Artificial Sequence
  Description of Artificial Sequence: Synthetic oligonucleotide
  Antisense strand to SEQ ID NO: 162558
aaucugaccaucguggagu

SEQ ID NO: 162560 - RNA, 19 nt, Artificial Sequence
  Description of Artificial Sequence: Synthetic oligonucleotide
  Sense strand starting at position 3616 of SEQ ID NO: 2093
guaagaagggcaugaauua

SEQ ID NO: 162561 - RNA, 19 nt, Artificial Sequence
  Description of Artificial Sequence: Synthetic oligonucleotide
  Antisense strand to SEQ ID NO: 162560
uaauucaugcccuucuuac

SEQ ID NO: 162562 - RNA, 19 nt, Artificial Sequence
  Description of Artificial Sequence: Synthetic oligonucleotide
  Sense strand starting at position 3596 of SEQ ID NO: 2093
guguuucuagcucugcuaa

SEQ ID NO: 162563 - RNA, 19 nt, Artificial Sequence
  Description of Artificial Sequence: Synthetic oligonucleotide
  Antisense strand to SEQ ID NO: 162562
uuagcagagcuagaaacac

SEQ ID NO: 162564 - RNA, 19 nt, Artificial Sequence
  Description of Artificial Sequence: Synthetic oligonucleotide
  Sense strand starting at position 3595 of SEQ ID NO: 2093
gguguuucuagcucugcua

SEQ ID NO: 162565 - RNA, 19 nt, Artificial Sequence
  Description of Artificial Sequence: Synthetic oligonucleotide
  Antisense strand to SEQ ID NO: 162564
uagcagagcuagaaacacc

SEQ ID NO: 162566 - RNA, 19 nt, Artificial Sequence
  Description of Artificial Sequence: Synthetic oligonucleotide
  Sense strand starting at position 3452 of SEQ ID NO: 2093
cuuguaguucuggaaaguu

SEQ ID NO: 162567 - RNA, 19 nt, Artificial Sequence
  Description of Artificial Sequence: Synthetic oligonucleotide
  Antisense strand to SEQ ID NO: 162566
aacuuuccagaacuacaag

SEQ ID NO: 162568 - RNA, 19 nt, Artificial Sequence
  Description of Artificial Sequence: Synthetic oligonucleotide
  Sense strand starting at position 3365 of SEQ ID NO: 2093
cccuaaugucuauggagga

SEQ ID NO: 162569 - RNA, 19 nt, Artificial Sequence
  Description of Artificial Sequence: Synthetic oligonucleotide
  Antisense strand to SEQ ID NO: 162568
uccuccauagacauuaggg

SEQ ID NO: 162570 - RNA, 19 nt, Artificial Sequence
  Description of Artificial Sequence: Synthetic oligonucleotide
  Sense strand starting at position 3323 of SEQ ID NO: 2093
acagaaauccuguguucuc

SEQ ID NO: 162571 - RNA, 19 nt, Artificial Sequence
  Description of Artificial Sequence: Synthetic oligonucleotide
  Antisense strand to SEQ ID NO: 162570
gagaacacaggauuucugu

SEQ ID NO: 162572 - RNA, 19 nt, Artificial Sequence
  Description of Artificial Sequence: Synthetic oligonucleotide
  Sense strand starting at position 3257 of SEQ ID NO: 2093
ggccaccagaggugaaaua

SEQ ID NO: 162573 - RNA, 19 nt, Artificial Sequence
  Description of Artificial Sequence: Synthetic oligonucleotide
  Antisense strand to SEQ ID NO: 162572
uauuucaccucugguggcc

SEQ ID NO: 162574 - RNA, 19 nt, Artificial Sequence
  Description of Artificial Sequence: Synthetic oligonucleotide
  Sense strand starting at position 3107 of SEQ ID NO: 2093
cuaggagcucucugaugag

SEQ ID NO: 162575 - RNA, 19 nt, Artificial Sequence
  Description of Artificial Sequence: Synthetic oligonucleotide
  Antisense strand to SEQ ID NO: 162574
cucaucagagagcuccuag

SEQ ID NO: 162576 - RNA, 19 nt, Artificial Sequence
  Description of Artificial Sequence: Synthetic oligonucleotide
  Sense strand starting at position 2995 of SEQ ID NO: 2093
gucagagcuguuccugcuu

SEQ ID NO: 162577 - RNA, 19 nt, Artificial Sequence
  Description of Artificial Sequence: Synthetic oligonucleotide
  Antisense strand to SEQ ID NO: 162576
aagcaggaacagcucugac

SEQ ID NO: 162578 - RNA, 19 nt, Artificial Sequence
  Description of Artificial Sequence: Synthetic oligonucleotide
  Sense strand starting at position 2982 of SEQ ID NO: 2093
gggcuuuccgagggucaga

SEQ ID NO: 162579 - RNA, 19 nt, Artificial Sequence
  Description of Artificial Sequence: Synthetic oligonucleotide
  Antisense strand to SEQ ID NO: 162578
ucugacccucggaaagccc

SEQ ID NO: 162580 - RNA, 19 nt, Artificial Sequence
  Description of Artificial Sequence: Synthetic oligonucleotide
  Sense strand starting at position 2719 of SEQ ID NO: 2093
gcuaauccuucuucuggga

SEQ ID NO: 162581 - RNA, 19 nt, Artificial Sequence
  Description of Artificial Sequence: Synthetic oligonucleotide
  Antisense strand to SEQ ID NO: 162580
ucccagaagaaggauuagc

SEQ ID NO: 162582 - RNA, 19 nt, Artificial Sequence
  Description of Artificial Sequence: Synthetic oligonucleotide
  Sense strand starting at position 2395 of SEQ ID NO: 2093
ggcacucuugcacacauga

SEQ ID NO: 162583 - RNA, 19 nt, Artificial Sequence
  Description of Artificial Sequence: Synthetic oligonucleotide
  Antisense strand to SEQ ID NO: 162582
ucaugugugcaagagugcc

SEQ ID NO: 162584 - RNA, 19 nt, Artificial Sequence
  Description of Artificial Sequence: Synthetic oligonucleotide
  Sense strand starting at position 2349 of SEQ ID NO: 2093
cuguccuugucauugagau

SEQ ID NO: 162585 - RNA, 19 nt, Artificial Sequence
  Description of Artificial Sequence: Synthetic oligonucleotide
  Antisense strand to SEQ ID NO: 162584
aucucaaugacaaggacag

SEQ ID NO: 162586 - RNA, 19 nt, Artificial Sequence
  Description of Artificial Sequence: Synthetic oligonucleotide
  Sense strand starting at position 2197 of SEQ ID NO: 2093
ugaugucacuggccuaauu

SEQ ID NO: 162587 - RNA, 19 nt, Artificial Sequence
  Description of Artificial Sequence: Synthetic oligonucleotide
  Antisense strand to SEQ ID NO: 162586
aauuaggccagugacauca

SEQ ID NO: 162588 - RNA, 19 nt, Artificial Sequence
  Description of Artificial Sequence: Synthetic oligonucleotide
  Sense strand starting at position 2194 of SEQ ID NO: 2093
aaaugaugucacuggccua

SEQ ID NO: 162589 - RNA, 19 nt, Artificial Sequence
  Description of Artificial Sequence: Synthetic oligonucleotide
  Antisense strand to SEQ ID NO: 162588
uaggccagugacaucauuu

SEQ ID NO: 162590 - RNA, 19 nt, Artificial Sequence
  Description of Artificial Sequence: Synthetic oligonucleotide
  Sense strand starting at position 2040 of SEQ ID NO: 2093
augaaugagcccugccuca

SEQ ID NO: 162591 - RNA, 19 nt, Artificial Sequence
  Description of Artificial Sequence: Synthetic oligonucleotide
  Antisense strand to SEQ ID NO: 162590
ugaggcagggcucauucau

SEQ ID NO: 162592 - RNA, 19 nt, Artificial Sequence
  Description of Artificial Sequence: Synthetic oligonucleotide
  Sense strand starting at position 1954 of SEQ ID NO: 2093
agagacuuaccugguauac

SEQ ID NO: 162593 - RNA, 19 nt, Artificial Sequence
  Description of Artificial Sequence: Synthetic oligonucleotide
  Antisense strand to SEQ ID NO: 162592
guauaccagguaagucucu

SEQ ID NO: 162594 - RNA, 19 nt, Artificial Sequence
  Description of Artificial Sequence: Synthetic oligonucleotide
  Sense strand starting at position 1951 of SEQ ID NO: 2093
aucagagacuuaccuggua

SEQ ID NO: 162595 - RNA, 19 nt, Artificial Sequence
  Description of Artificial Sequence: Synthetic oligonucleotide
  Antisense strand to SEQ ID NO: 162594
uaccagguaagucucugau

SEQ ID NO: 162596 - RNA, 19 nt, Artificial Sequence
  Description of Artificial Sequence: Synthetic oligonucleotide
  Sense strand starting at position 1941 of SEQ ID NO: 2093
guuuguugcaaucagagac

SEQ ID NO: 162597 - RNA, 19 nt, Artificial Sequence
  Description of Artificial Sequence: Synthetic oligonucleotide
  Antisense strand to SEQ ID NO: 162596
gucucugauugcaacaaac

SEQ ID NO: 162598 - RNA, 19 nt, Artificial Sequence
  Description of Artificial Sequence: Synthetic oligonucleotide
  Sense strand starting at position 1926 of SEQ ID NO: 2093
acacuagaauugccaguuu

SEQ ID NO: 162599 - RNA, 19 nt, Artificial Sequence
  Description of Artificial Sequence: Synthetic oligonucleotide
  Antisense strand to SEQ ID NO: 162598
aaacuggcaauucuagugu

SEQ ID NO: 162600 - RNA, 19 nt, Artificial Sequence
  Description of Artificial Sequence: Synthetic oligonucleotide
  Sense strand starting at position 1871 of SEQ ID NO: 2093
ggauuaaccugcuuacaca

SEQ ID NO: 162601 - RNA, 19 nt, Artificial Sequence
  Description of Artificial Sequence: Synthetic oligonucleotide
  Antisense strand to SEQ ID NO: 162600
uguguaagcagguuaaucc

SEQ ID NO: 162602 - RNA, 19 nt, Artificial Sequence
  Description of Artificial Sequence: Synthetic oligonucleotide
  Sense strand starting at position 1661 of SEQ ID NO: 2093
ugcaguguuacugagagug

SEQ ID NO: 162603 - RNA, 19 nt, Artificial Sequence
  Description of Artificial Sequence: Synthetic oligonucleotide
  Antisense strand to SEQ ID NO: 162602
cacucucaguaacacugca

SEQ ID NO: 162604 - RNA, 19 nt, Artificial Sequence
  Description of Artificial Sequence: Synthetic oligonucleotide
  Sense strand starting at position 1654 of SEQ ID NO: 2093
gggaaauugcaguguuacu

SEQ ID NO: 162605 - RNA, 19 nt, Artificial Sequence
  Description of Artificial Sequence: Synthetic oligonucleotide
  Antisense strand to SEQ ID NO: 162604
aguaacacugcaauuuccc

SEQ ID NO: 162606 - RNA, 19 nt, Artificial Sequence
  Description of Artificial Sequence: Synthetic oligonucleotide
  Sense strand starting at position 1594 of SEQ ID NO: 2093
aauaaaugcucaguagaga

SEQ ID NO: 162607 - RNA, 19 nt, Artificial Sequence
  Description of Artificial Sequence: Synthetic oligonucleotide
  Antisense strand to SEQ ID NO: 162606
ucucuacugagcauuuauu

SEQ ID NO: 162608 - RNA, 19 nt, Artificial Sequence
  Description of Artificial Sequence: Synthetic oligonucleotide
  Sense strand starting at position 1562 of SEQ ID NO: 2093
guccaaagugccuagcaua

SEQ ID NO: 162609 - RNA, 19 nt, Artificial Sequence
  Description of Artificial Sequence: Synthetic oligonucleotide
  Antisense strand to SEQ ID NO: 162608
uaugcuaggcacuuuggac

SEQ ID NO: 162610 - RNA, 19 nt, Artificial Sequence
  Description of Artificial Sequence: Synthetic oligonucleotide
  Sense strand starting at position 1537 of SEQ ID NO: 2093
aaguaaguacguuaggcau

SEQ ID NO: 162611 - RNA, 19 nt, Artificial Sequence
  Description of Artificial Sequence: Synthetic oligonucleotide
  Antisense strand to SEQ ID NO: 162610
augccuaacguacuuacuu

SEQ ID NO: 162612 - RNA, 19 nt, Artificial Sequence
  Description of Artificial Sequence: Synthetic oligonucleotide
  Sense strand starting at position 1532 of SEQ ID NO: 2093
uuguuaaguaaguacguua

SEQ ID NO: 162613 - RNA, 19 nt, Artificial Sequence
  Description of Artificial Sequence: Synthetic oligonucleotide
  Antisense strand to SEQ ID NO: 162612
uaacguacuuacuuaacaa

SEQ ID NO: 162614 - RNA, 19 nt, Artificial Sequence
  Description of Artificial Sequence: Synthetic oligonucleotide
  Sense strand starting at position 1259 of SEQ ID NO: 2093
auaggauggcuuuauauuc

SEQ ID NO: 162615 - RNA, 19 nt, Artificial Sequence
  Description of Artificial Sequence: Synthetic oligonucleotide
  Antisense strand to SEQ ID NO: 162614
gaauauaaagccauccuau

SEQ ID NO: 162616 - RNA, 19 nt, Artificial Sequence
  Description of Artificial Sequence: Synthetic oligonucleotide
  Sense strand starting at position 1256 of SEQ ID NO: 2093
cuuauaggauggcuuuaua

SEQ ID NO: 162617 - RNA, 19 nt, Artificial Sequence
  Description of Artificial Sequence: Synthetic oligonucleotide
  Antisense strand to SEQ ID NO: 162616
uauaaagccauccuauaag

SEQ ID NO: 162618 - RNA, 19 nt, Artificial Sequence
  Description of Artificial Sequence: Synthetic oligonucleotide
  Sense strand starting at position 1254 of SEQ ID NO: 2093
gacuuauaggauggcuuua

SEQ ID NO: 162619 - RNA, 19 nt, Artificial Sequence
  Description of Artificial Sequence: Synthetic oligonucleotide
  Antisense strand to SEQ ID NO: 162618
uaaagccauccuauaaguc

SEQ ID NO: 162620 - RNA, 19 nt, Artificial Sequence
  Description of Artificial Sequence: Synthetic oligonucleotide
  Sense strand starting at position 1253 of SEQ ID NO: 2093
ugacuuauaggauggcuuu

SEQ ID NO: 162621 - RNA, 19 nt, Artificial Sequence
  Description of Artificial Sequence: Synthetic oligonucleotide
  Antisense strand to SEQ ID NO: 162620
aaagccauccuauaaguca

SEQ ID NO: 162622 - RNA, 19 nt, Artificial Sequence
  Description of Artificial Sequence: Synthetic oligonucleotide
  Sense strand starting at position 1241 of SEQ ID NO: 2093
guagaaagccugugacuua

SEQ ID NO: 162623 - RNA, 19 nt, Artificial Sequence
  Description of Artificial Sequence: Synthetic oligonucleotide
  Antisense strand to SEQ ID NO: 162622
uaagucacaggcuuucuac

SEQ ID NO: 162624 - RNA, 19 nt, Artificial Sequence
  Description of Artificial Sequence: Synthetic oligonucleotide
  Sense strand starting at position 1228 of SEQ ID NO: 2093
cuccuaguaccauguagaa

SEQ ID NO: 162625 - RNA, 19 nt, Artificial Sequence
  Description of Artificial Sequence: Synthetic oligonucleotide
  Antisense strand to SEQ ID NO: 162624
uucuacaugguacuaggag

SEQ ID NO: 162626 - RNA, 19 nt, Artificial Sequence
  Description of Artificial Sequence: Synthetic oligonucleotide
  Sense strand starting at position 1175 of SEQ ID NO: 2093
acaugagguccgcauauua

SEQ ID NO: 162627 - RNA, 19 nt, Artificial Sequence
  Description of Artificial Sequence: Synthetic oligonucleotide
  Antisense strand to SEQ ID NO: 162626
uaauaugcggaccucaugu

SEQ ID NO: 162628 - RNA, 19 nt, Artificial Sequence
  Description of Artificial Sequence: Synthetic oligonucleotide
  Sense strand starting at position 1173 of SEQ ID NO: 2093
ggacaugagguccgcauau

SEQ ID NO: 162629 - RNA, 19 nt, Artificial Sequence
  Description of Artificial Sequence: Synthetic oligonucleotide
  Antisense strand to SEQ ID NO: 162628
auaugcggaccucaugucc

SEQ ID NO: 162630 - RNA, 19 nt, Artificial Sequence
  Description of Artificial Sequence: Synthetic oligonucleotide
  Sense strand starting at position 1126 of SEQ ID NO: 2093
acuuauaucuguucuggaa

SEQ ID NO: 162631 - RNA, 19 nt, Artificial Sequence
  Description of Artificial Sequence: Synthetic oligonucleotide
  Antisense strand to SEQ ID NO: 162630
uuccagaacagauauaagu

SEQ ID NO: 162632 - RNA, 19 nt, Artificial Sequence
  Description of Artificial Sequence: Synthetic oligonucleotide
  Sense strand starting at position 1014 of SEQ ID NO: 2093
ugaaauaagcuuggauaau

SEQ ID NO: 162633 - RNA, 19 nt, Artificial Sequence
  Description of Artificial Sequence: Synthetic oligonucleotide
  Antisense strand to SEQ ID NO: 162632
auuauccaagcuuauuuca

SEQ ID NO: 162634 - RNA, 19 nt, Artificial Sequence
  Description of Artificial Sequence: Synthetic oligonucleotide
  Sense strand starting at position 168 of SEQ ID NO: 2093
gccaccuucugacuacaga

SEQ ID NO: 162635 - RNA, 19 nt, Artificial Sequence
  Description of Artificial Sequence: Synthetic oligonucleotide
  Antisense strand to SEQ ID NO: 162634
ucuguagucagaagguggc

SEQ ID NO: 162636 - RNA, 19 nt, Artificial Sequence
  Description of Artificial Sequence: Synthetic oligonucleotide
  Sense strand starting at position 72 of SEQ ID NO: 2093
guugguggcccugaacaua

SEQ ID NO: 162637 - RNA, 19 nt, Artificial Sequence
  Description of Artificial Sequence: Synthetic oligonucleotide
  Antisense strand to SEQ ID NO: 162636
uauguucagggccaccaac

SEQ ID NO: 162638 - RNA, 19 nt, Artificial Sequence
  Description of Artificial Sequence: Synthetic oligonucleotide
  Sense strand starting at position 3842 of SEQ ID NO: 2094
ugcaauauggugggauuau

SEQ ID NO: 162639 - RNA, 19 nt, Artificial Sequence
  Description of Artificial Sequence: Synthetic oligonucleotide
  Antisense strand to SEQ ID NO: 162638
auaaucccaccauauugca

SEQ ID NO: 162640 - RNA, 19 nt, Artificial Sequence
  Description of Artificial Sequence: Synthetic oligonucleotide
  Sense strand starting at position 3841 of SEQ ID NO: 2094
uugcaauauggugggauua

SEQ ID NO: 162641 - RNA, 19 nt, Artificial Sequence
  Description of Artificial Sequence: Synthetic oligonucleotide
  Antisense strand to SEQ ID NO: 162640
uaaucccaccauauugcaa

SEQ ID NO: 162642 - RNA, 19 nt, Artificial Sequence
  Description of Artificial Sequence: Synthetic oligonucleotide
  Sense strand starting at position 3267 of SEQ ID NO: 2094
gcuguaagagcuuagcaag

SEQ ID NO: 162643 - RNA, 19 nt, Artificial Sequence
  Description of Artificial Sequence: Synthetic oligonucleotide
  Antisense strand to SEQ ID NO: 162642
cuugcuaagcucuuacagc

SEQ ID NO: 162644 - RNA, 19 nt, Artificial Sequence
  Description of Artificial Sequence: Synthetic oligonucleotide
  Sense strand starting at position 3159 of SEQ ID NO: 2094
gauguuauucgugaagaga

SEQ ID NO: 162645 - RNA, 19 nt, Artificial Sequence
  Description of Artificial Sequence: Synthetic oligonucleotide
  Antisense strand to SEQ ID NO: 162644
ucucuucacgaauaacauc

SEQ ID NO: 162646 - RNA, 19 nt, Artificial Sequence
  Description of Artificial Sequence: Synthetic oligonucleotide
  Sense strand starting at position 3156 of SEQ ID NO: 2094
gaugauguuauucgugaag

SEQ ID NO: 162647 - RNA, 19 nt, Artificial Sequence
  Description of Artificial Sequence: Synthetic oligonucleotide
  Antisense strand to SEQ ID NO: 162646
cuucacgaauaacaucauc

SEQ ID NO: 162648 - RNA, 19 nt, Artificial Sequence
  Description of Artificial Sequence: Synthetic oligonucleotide
  Sense strand starting at position 3155 of SEQ ID NO: 2094
ggaugauguuauucgugaa

SEQ ID NO: 162649 - RNA, 19 nt, Artificial Sequence
  Description of Artificial Sequence: Synthetic oligonucleotide
  Antisense strand to SEQ ID NO: 162648
uucacgaauaacaucaucc

SEQ ID NO: 162650 - RNA, 19 nt, Artificial Sequence
  Description of Artificial Sequence: Synthetic oligonucleotide
  Sense strand starting at position 3088 of SEQ ID NO: 2094
guaguagcugcucagagaa

SEQ ID NO: 162651 - RNA, 19 nt, Artificial Sequence
  Description of Artificial Sequence: Synthetic oligonucleotide
  Antisense strand to SEQ ID NO: 162650
uucucugagcagcuacuac

SEQ ID NO: 162652 - RNA, 19 nt, Artificial Sequence
  Description of Artificial Sequence: Synthetic oligonucleotide
  Sense strand starting at position 3072 of SEQ ID NO: 2094
acgugaugccuggugugua

SEQ ID NO: 162653 - RNA, 19 nt, Artificial Sequence
  Description of Artificial Sequence: Synthetic oligonucleotide
  Antisense strand to SEQ ID NO: 162652
uacacaccaggcaucacgu

SEQ ID NO: 162654 - RNA, 19 nt, Artificial Sequence
  Description of Artificial Sequence: Synthetic oligonucleotide
  Sense strand starting at position 2946 of SEQ ID NO: 2094
caucuaaauguuuguagag

SEQ ID NO: 162655 - RNA, 19 nt, Artificial Sequence
  Description of Artificial Sequence: Synthetic oligonucleotide
  Antisense strand to SEQ ID NO: 162654
cucuacaaacauuuagaug

SEQ ID NO: 162656 - RNA, 19 nt, Artificial Sequence
  Description of Artificial Sequence: Synthetic oligonucleotide
  Sense strand starting at position 2945 of SEQ ID NO: 2094
ucaucuaaauguuuguaga

SEQ ID NO: 162657 - RNA, 19 nt, Artificial Sequence
  Description of Artificial Sequence: Synthetic oligonucleotide
  Antisense strand to SEQ ID NO: 162656
ucuacaaacauuuagauga

SEQ ID NO: 162658 - RNA, 19 nt, Artificial Sequence
  Description of Artificial Sequence: Synthetic oligonucleotide
  Sense strand starting at position 2773 of SEQ ID NO: 2094
gggauucccugagcccuua

SEQ ID NO: 162659 - RNA, 19 nt, Artificial Sequence
  Description of Artificial Sequence: Synthetic oligonucleotide
  Antisense strand to SEQ ID NO: 162658
uaagggcucagggaauccc

SEQ ID NO: 162660 - RNA, 19 nt, Artificial Sequence
  Description of Artificial Sequence: Synthetic oligonucleotide
  Sense strand starting at position 2708 of SEQ ID NO: 2094
ugaagacccuggcuaucau

SEQ ID NO: 162661 - RNA, 19 nt, Artificial Sequence
  Description of Artificial Sequence: Synthetic oligonucleotide
  Antisense strand to SEQ ID NO: 162660
augauagccagggucuuca

SEQ ID NO: 162662 - RNA, 19 nt, Artificial Sequence
  Description of Artificial Sequence: Synthetic oligonucleotide
  Sense strand starting at position 2621 of SEQ ID NO: 2094
ugggaagaauggucacguu

SEQ ID NO: 162663 - RNA, 19 nt, Artificial Sequence
  Description of Artificial Sequence: Synthetic oligonucleotide
  Antisense strand to SEQ ID NO: 162662
aacgugaccauucuuccca

SEQ ID NO: 162664 - RNA, 19 nt, Artificial Sequence
  Description of Artificial Sequence: Synthetic oligonucleotide
  Sense strand starting at position 2598 of SEQ ID NO: 2094
gagaguucggagcagugaa

SEQ ID NO: 162665 - RNA, 19 nt, Artificial Sequence
  Description of Artificial Sequence: Synthetic oligonucleotide
  Antisense strand to SEQ ID NO: 162664
uucacugcuccgaacucuc

SEQ ID NO: 162666 - RNA, 19 nt, Artificial Sequence
  Description of Artificial Sequence: Synthetic oligonucleotide
  Sense strand starting at position 2586 of SEQ ID NO: 2094
cagucugugaaggagaguu

SEQ ID NO: 162667 - RNA, 19 nt, Artificial Sequence
  Description of Artificial Sequence: Synthetic oligonucleotide
  Antisense strand to SEQ ID NO: 162666
aacucuccuucacagacug

SEQ ID NO: 162668 - RNA, 19 nt, Artificial Sequence
  Description of Artificial Sequence: Synthetic oligonucleotide
  Sense strand starting at position 2581 of SEQ ID NO: 2094
gaccucagucugugaagga

SEQ ID NO: 162669 - RNA, 19 nt, Artificial Sequence
  Description of Artificial Sequence: Synthetic oligonucleotide
  Antisense strand to SEQ ID NO: 162668
uccuucacagacugagguc

SEQ ID NO: 162670 - RNA, 19 nt, Artificial Sequence
  Description of Artificial Sequence: Synthetic oligonucleotide
  Sense strand starting at position 2458 of SEQ ID NO: 2094
guuaauccaucacucagua

SEQ ID NO: 162671 - RNA, 19 nt, Artificial Sequence
  Description of Artificial Sequence: Synthetic oligonucleotide
  Antisense strand to SEQ ID NO: 162670
uacugagugauggauuaac

SEQ ID NO: 162672 - RNA, 19 nt, Artificial Sequence
  Description of Artificial Sequence: Synthetic oligonucleotide
  Sense strand starting at position 2355 of SEQ ID NO: 2094
ggcuguuuaauauaugaag

SEQ ID NO: 162673 - RNA, 19 nt, Artificial Sequence
  Description of Artificial Sequence: Synthetic oligonucleotide
  Antisense strand to SEQ ID NO: 162672
cuucauauauuaaacagcc

SEQ ID NO: 162674 - RNA, 19 nt, Artificial Sequence
  Description of Artificial Sequence: Synthetic oligonucleotide
  Sense strand starting at position 2318 of SEQ ID NO: 2094
ggaagagucuaauccucag

SEQ ID NO: 162675 - RNA, 19 nt, Artificial Sequence
  Description of Artificial Sequence: Synthetic oligonucleotide
  Antisense strand to SEQ ID NO: 162674
cugaggauuagacucuucc

SEQ ID NO: 162676 - RNA, 19 nt, Artificial Sequence
  Description of Artificial Sequence: Synthetic oligonucleotide
  Sense strand starting at position 2307 of SEQ ID NO: 2094
uccuaucuucuggaagagu

SEQ ID NO: 162677 - RNA, 19 nt, Artificial Sequence
  Description of Artificial Sequence: Synthetic oligonucleotide
  Antisense strand to SEQ ID NO: 162676
acucuuccagaagauagga

SEQ ID NO: 162678 - RNA, 19 nt, Artificial Sequence
  Description of Artificial Sequence: Synthetic oligonucleotide
  Sense strand starting at position 2303 of SEQ ID NO: 2094
acuguccuaucuucuggaa

SEQ ID NO: 162679 - RNA, 19 nt, Artificial Sequence
  Description of Artificial Sequence: Synthetic oligonucleotide
  Antisense strand to SEQ ID NO: 162678
uuccagaagauaggacagu

SEQ ID NO: 162680 - RNA, 19 nt, Artificial Sequence
  Description of Artificial Sequence: Synthetic oligonucleotide
  Sense strand starting at position 2230 of SEQ ID NO: 2094
uaguguuuacaggaagggu

SEQ ID NO: 162681 - RNA, 19 nt, Artificial Sequence
  Description of Artificial Sequence: Synthetic oligonucleotide
  Antisense strand to SEQ ID NO: 162680
acccuuccuguaaacacua

SEQ ID NO: 162682 - RNA, 19 nt, Artificial Sequence
  Description of Artificial Sequence: Synthetic oligonucleotide
  Sense strand starting at position 2225 of SEQ ID NO: 2094
agguguaguguuuacagga

SEQ ID NO: 162683 - RNA, 19 nt, Artificial Sequence
  Description of Artificial Sequence: Synthetic oligonucleotide
  Antisense strand to SEQ ID NO: 162682
uccuguaaacacuacaccu

SEQ ID NO: 162684 - RNA, 19 nt, Artificial Sequence
  Description of Artificial Sequence: Synthetic oligonucleotide
  Sense strand starting at position 2182 of SEQ ID NO: 2094
ggaugucaccugggcuuua

SEQ ID NO: 162685 - RNA, 19 nt, Artificial Sequence
  Description of Artificial Sequence: Synthetic oligonucleotide
  Antisense strand to SEQ ID NO: 162684
uaaagcccaggugacaucc

SEQ ID NO: 162686 - RNA, 19 nt, Artificial Sequence
  Description of Artificial Sequence: Synthetic oligonucleotide
  Sense strand starting at position 1659 of SEQ ID NO: 2094
gguucuagucauuauccca

SEQ ID NO: 162687 - RNA, 19 nt, Artificial Sequence
  Description of Artificial Sequence: Synthetic oligonucleotide
  Antisense strand to SEQ ID NO: 162686
ugggauaaugacuagaacc

SEQ ID NO: 162688 - RNA, 19 nt, Artificial Sequence
  Description of Artificial Sequence: Synthetic oligonucleotide
  Sense strand starting at position 1628 of SEQ ID NO: 2094
uuauaaugccaggguaagu

SEQ ID NO: 162689 - RNA, 19 nt, Artificial Sequence
  Description of Artificial Sequence: Synthetic oligonucleotide
  Antisense strand to SEQ ID NO: 162688
acuuacccuggcauuauaa

SEQ ID NO: 162690 - RNA, 19 nt, Artificial Sequence
  Description of Artificial Sequence: Synthetic oligonucleotide
  Sense strand starting at position 1627 of SEQ ID NO: 2094
auuauaaugccaggguaag

SEQ ID NO: 162691 - RNA, 19 nt, Artificial Sequence
  Description of Artificial Sequence: Synthetic oligonucleotide
  Antisense strand to SEQ ID NO: 162690
cuuacccuggcauuauaau

SEQ ID NO: 162692 - RNA, 19 nt, Artificial Sequence
  Description of Artificial Sequence: Synthetic oligonucleotide
  Sense strand starting at position 1453 of SEQ ID NO: 2094
acugauaaguuacuguuau

SEQ ID NO: 162693 - RNA, 19 nt, Artificial Sequence
  Description of Artificial Sequence: Synthetic oligonucleotide
  Antisense strand to SEQ ID NO: 162692
auaacaguaacuuaucagu

SEQ ID NO: 162694 - RNA, 19 nt, Artificial Sequence
  Description of Artificial Sequence: Synthetic oligonucleotide
  Sense strand starting at position 1208 of SEQ ID NO: 2094
ugauaaauagcauggcuua

SEQ ID NO: 162695 - RNA, 19 nt, Artificial Sequence
  Description of Artificial Sequence: Synthetic oligonucleotide
  Antisense strand to SEQ ID NO: 162694
uaagccaugcuauuuauca

SEQ ID NO: 162696 - RNA, 19 nt, Artificial Sequence
  Description of Artificial Sequence: Synthetic oligonucleotide
  Sense strand starting at position 1151 of SEQ ID NO: 2094
augugagguucuuuggaaa

SEQ ID NO: 162697 - RNA, 19 nt, Artificial Sequence
  Description of Artificial Sequence: Synthetic oligonucleotide
  Antisense strand to SEQ ID NO: 162696
uuuccaaagaaccucacau

SEQ ID NO: 162698 - RNA, 19 nt, Artificial Sequence
  Description of Artificial Sequence: Synthetic oligonucleotide
  Sense strand starting at position 1105 of SEQ ID NO: 2094
aggcuucuagcaggaauau

SEQ ID NO: 162699 - RNA, 19 nt, Artificial Sequence
  Description of Artificial Sequence: Synthetic oligonucleotide
  Antisense strand to SEQ ID NO: 162698
auauuccugcuagaagccu

SEQ ID NO: 162700 - RNA, 19 nt, Artificial Sequence
  Description of Artificial Sequence: Synthetic oligonucleotide
  Sense strand starting at position 904 of SEQ ID NO: 2094
agagaauaauagggaagaa

SEQ ID NO: 162701 - RNA, 19 nt, Artificial Sequence
  Description of Artificial Sequence: Synthetic oligonucleotide
  Antisense strand to SEQ ID NO: 162700
uucuucccuauuauucucu

SEQ ID NO: 162702 - RNA, 19 nt, Artificial Sequence
  Description of Artificial Sequence: Synthetic oligonucleotide
  Sense strand starting at position 868 of SEQ ID NO: 2094
gugacugguccuggacaca

SEQ ID NO: 162703 - RNA, 19 nt, Artificial Sequence
  Description of Artificial Sequence: Synthetic oligonucleotide
  Antisense strand to SEQ ID NO: 162702
uguguccaggaccagucac

SEQ ID NO: 162704 - RNA, 19 nt, Artificial Sequence
  Description of Artificial Sequence: Synthetic oligonucleotide
  Sense strand starting at position 292 of SEQ ID NO: 2094
cacagucaagaguggaauu

SEQ ID NO: 162705 - RNA, 19 nt, Artificial Sequence
  Description of Artificial Sequence: Synthetic oligonucleotide
  Antisense strand to SEQ ID NO: 162704
aauuccacucuugacugug

SEQ ID NO: 162706 - RNA, 19 nt, Artificial Sequence
  Description of Artificial Sequence: Synthetic oligonucleotide
  Sense strand starting at position 224 of SEQ ID NO: 2094
accaacucaucucugugua

SEQ ID NO: 162707 - RNA, 19 nt, Artificial Sequence
  Description of Artificial Sequence: Synthetic oligonucleotide
  Antisense strand to SEQ ID NO: 162706
uacacagagaugaguuggu

SEQ ID NO: 162708 - RNA, 19 nt, Artificial Sequence
  Description of Artificial Sequence: Synthetic oligonucleotide
  Sense strand starting at position 180 of SEQ ID NO: 2094
uccuaaugugagcaucaga

SEQ ID NO: 162709 - RNA, 19 nt, Artificial Sequence
  Description of Artificial Sequence: Synthetic oligonucleotide
  Antisense strand to SEQ ID NO: 162708
ucugaugcucacauuagga

SEQ ID NO: 162710 - RNA, 19 nt, Artificial Sequence
  Description of Artificial Sequence: Synthetic oligonucleotide
  Sense strand starting at position 48 of SEQ ID NO: 2094
uagcaugacucacugaguu

SEQ ID NO: 162711 - RNA, 19 nt, Artificial Sequence
  Description of Artificial Sequence: Synthetic oligonucleotide
  Antisense strand to SEQ ID NO: 162710
aacucagugagucaugcua

SEQ ID NO: 162712 - RNA, 19 nt, Artificial Sequence
  Description of Artificial Sequence: Synthetic oligonucleotide
  Sense strand starting at position 11 of SEQ ID NO: 2094
gagucagagucagcuuaga

SEQ ID NO: 162713 - RNA, 19 nt, Artificial Sequence
  Description of Artificial Sequence: Synthetic oligonucleotide
  Antisense strand to SEQ ID NO: 162712
ucuaagcugacucugacuc

SEQ ID NO: 162714 - RNA, 19 nt, Artificial Sequence
  Description of Artificial Sequence: Synthetic oligonucleotide
  Sense strand starting at position 9 of SEQ ID NO: 2094
gugagucagagucagcuua

SEQ ID NO: 162715 - RNA, 19 nt, Artificial Sequence
  Description of Artificial Sequence: Synthetic oligonucleotide
  Antisense strand to SEQ ID NO: 162714
uaagcugacucugacucac

SEQ ID NO: 162716 - RNA, 19 nt, Artificial Sequence
  Description of Artificial Sequence: Synthetic oligonucleotide
  Sense strand starting at position 3 of SEQ ID NO: 2094
ggauuagugagucagaguc

SEQ ID NO: 162717 - RNA, 19 nt, Artificial Sequence
  Description of Artificial Sequence: Synthetic oligonucleotide
  Antisense strand to SEQ ID NO: 162716
gacucugacucacuaaucc

SEQ ID NO: 162718 - RNA, 19 nt, Artificial Sequence
  Description of Artificial Sequence: Synthetic oligonucleotide
  Sense strand starting at position 51 of SEQ ID NO: 2095
acauguaugcaguaaaugu

SEQ ID NO: 162719 - RNA, 19 nt, Artificial Sequence
  Description of Artificial Sequence: Synthetic oligonucleotide
  Antisense strand to SEQ ID NO: 162718
acauuuacugcauacaugu

SEQ ID NO: 162720 - RNA, 19 nt, Artificial Sequence
  Description of Artificial Sequence: Synthetic oligonucleotide
  Sense strand starting at position 61 of SEQ ID NO: 2095
aguaaauguguacaaguau

SEQ ID NO: 162721 - RNA, 19 nt, Artificial Sequence
  Description of Artificial Sequence: Synthetic oligonucleotide
  Antisense strand to SEQ ID NO: 162720
auacuuguacacauuuacu

SEQ ID NO: 162722 - RNA, 19 nt, Artificial Sequence
  Description of Artificial Sequence: Synthetic oligonucleotide
  Sense strand starting at position 100 of SEQ ID NO: 2095
auuagagagucuucuuauu

SEQ ID NO: 162723 - RNA, 19 nt, Artificial Sequence
  Description of Artificial Sequence: Synthetic oligonucleotide
  Antisense strand to SEQ ID NO: 162722
aauaagaagacucucuaau

SEQ ID NO: 162724 - RNA, 19 nt, Artificial Sequence
  Description of Artificial Sequence: Synthetic oligonucleotide
  Sense strand starting at position 112 of SEQ ID NO: 2095
ucuuauuuccuauguuagu

SEQ ID NO: 162725 - RNA, 19 nt, Artificial Sequence
  Description of Artificial Sequence: Synthetic oligonucleotide
  Antisense strand to SEQ ID NO: 162724
acuaacauaggaaauaaga

SEQ ID NO: 162726 - RNA, 19 nt, Artificial Sequence
  Description of Artificial Sequence: Synthetic oligonucleotide
  Sense strand starting at position 113 of SEQ ID NO: 2095
cuuauuuccuauguuaguu

SEQ ID NO: 162727 - RNA, 19 nt, Artificial Sequence
  Description of Artificial Sequence: Synthetic oligonucleotide
  Antisense strand to SEQ ID NO: 162726
aacuaacauaggaaauaag

SEQ ID NO: 162728 - RNA, 19 nt, Artificial Sequence
  Description of Artificial Sequence: Synthetic oligonucleotide
  Sense strand starting at position 143 of SEQ ID NO: 2095
acucucuugcuggaacaaa

SEQ ID NO: 162729 - RNA, 19 nt, Artificial Sequence
  Description of Artificial Sequence: Synthetic oligonucleotide
  Antisense strand to SEQ ID NO: 162728
uuuguuccagcaagagagu

SEQ ID NO: 162730 - RNA, 19 nt, Artificial Sequence
  Description of Artificial Sequence: Synthetic oligonucleotide
  Sense strand starting at position 333 of SEQ ID NO: 2095
cuuagacuaguuuguaaug

SEQ ID NO: 162731 - RNA, 19 nt, Artificial Sequence
  Description of Artificial Sequence: Synthetic oligonucleotide
  Antisense strand to SEQ ID NO: 162730
cauuacaaacuagucuaag

SEQ ID NO: 162732 - RNA, 19 nt, Artificial Sequence
  Description of Artificial Sequence: Synthetic oligonucleotide
  Sense strand starting at position 473 of SEQ ID NO: 2095
agaaauaaucuuugguaug

SEQ ID NO: 162733 - RNA, 19 nt, Artificial Sequence
  Description of Artificial Sequence: Synthetic oligonucleotide
  Antisense strand to SEQ ID NO: 162732
cauaccaaagauuauuucu

SEQ ID NO: 162734 - RNA, 19 nt, Artificial Sequence
  Description of Artificial Sequence: Synthetic oligonucleotide
  Sense strand starting at position 484 of SEQ ID NO: 2095
uugguaugacuccaauugu

SEQ ID NO: 162735 - RNA, 19 nt, Artificial Sequence
  Description of Artificial Sequence: Synthetic oligonucleotide
  Antisense strand to SEQ ID NO: 162734
acaauuggagucauaccaa

SEQ ID NO: 162736 - RNA, 19 nt, Artificial Sequence
  Description of Artificial Sequence: Synthetic oligonucleotide
  Sense strand starting at position 503 of SEQ ID NO: 2095
gagauccugcugugaauca

SEQ ID NO: 162737 - RNA, 19 nt, Artificial Sequence
  Description of Artificial Sequence: Synthetic oligonucleotide
  Antisense strand to SEQ ID NO: 162736
ugauucacagcaggaucuc

SEQ ID NO: 162738 - RNA, 19 nt, Artificial Sequence
  Description of Artificial Sequence: Synthetic oligonucleotide
  Sense strand starting at position 716 of SEQ ID NO: 2095
cucugaugguucccaggga

SEQ ID NO: 162739 - RNA, 19 nt, Artificial Sequence
  Description of Artificial Sequence: Synthetic oligonucleotide
  Antisense strand to SEQ ID NO: 162738
ucccugggaaccaucagag

SEQ ID NO: 162740 - RNA, 19 nt, Artificial Sequence
  Description of Artificial Sequence: Synthetic oligonucleotide
  Sense strand starting at position 857 of SEQ ID NO: 2095
ggaucaucaugggcagauu

SEQ ID NO: 162741 - RNA, 19 nt, Artificial Sequence
  Description of Artificial Sequence: Synthetic oligonucleotide
  Antisense strand to SEQ ID NO: 162740
aaucugcccaugaugaucc

SEQ ID NO: 162742 - RNA, 19 nt, Artificial Sequence
  Description of Artificial Sequence: Synthetic oligonucleotide
  Sense strand starting at position 860 of SEQ ID NO: 2095
ucaucaugggcagauuacu

SEQ ID NO: 162743 - RNA, 19 nt, Artificial Sequence
  Description of Artificial Sequence: Synthetic oligonucleotide
  Antisense strand to SEQ ID NO: 162742
aguaaucugcccaugauga

SEQ ID NO: 162744 - RNA, 19 nt, Artificial Sequence
  Description of Artificial Sequence: Synthetic oligonucleotide
  Sense strand starting at position 869 of SEQ ID NO: 2095
gcagauuacuggcuaagga

SEQ ID NO: 162745 - RNA, 19 nt, Artificial Sequence
  Description of Artificial Sequence: Synthetic oligonucleotide
  Antisense strand to SEQ ID NO: 162744
uccuuagccaguaaucugc

SEQ ID NO: 162746 - RNA, 19 nt, Artificial Sequence
  Description of Artificial Sequence: Synthetic oligonucleotide
  Sense strand starting at position 976 of SEQ ID NO: 2095
uuucuugguccugaugaau

SEQ ID NO: 162747 - RNA, 19 nt, Artificial Sequence
  Description of Artificial Sequence: Synthetic oligonucleotide
  Antisense strand to SEQ ID NO: 162746
auucaucaggaccaagaaa

SEQ ID NO: 162748 - RNA, 19 nt, Artificial Sequence
  Description of Artificial Sequence: Synthetic oligonucleotide
  Sense strand starting at position 1623 of SEQ ID NO: 2095
agggcugcucagggagaau

SEQ ID NO: 162749 - RNA, 19 nt, Artificial Sequence
  Description of Artificial Sequence: Synthetic oligonucleotide
  Antisense strand to SEQ ID NO: 162748
auucucccugagcagcccu

SEQ ID NO: 162750 - RNA, 19 nt, Artificial Sequence
  Description of Artificial Sequence: Synthetic oligonucleotide
  Sense strand starting at position 1757 of SEQ ID NO: 2095
cuucucuguccauauggau

SEQ ID NO: 162751 - RNA, 19 nt, Artificial Sequence
  Description of Artificial Sequence: Synthetic oligonucleotide
  Antisense strand to SEQ ID NO: 162750
auccauauggacagagaag

SEQ ID NO: 162752 - RNA, 19 nt, Artificial Sequence
  Description of Artificial Sequence: Synthetic oligonucleotide
  Sense strand starting at position 1770 of SEQ ID NO: 2095
auggauaccuaccuguaua

SEQ ID NO: 162753 - RNA, 19 nt, Artificial Sequence
  Description of Artificial Sequence: Synthetic oligonucleotide
  Antisense strand to SEQ ID NO: 162752
uauacagguagguauccau

SEQ ID NO: 162754 - RNA, 19 nt, Artificial Sequence
  Description of Artificial Sequence: Synthetic oligonucleotide
  Sense strand starting at position 2090 of SEQ ID NO: 2095
uuucuuaagccagaugcaa

SEQ ID NO: 162755 - RNA, 19 nt, Artificial Sequence
  Description of Artificial Sequence: Synthetic oligonucleotide
  Antisense strand to SEQ ID NO: 162754
uugcaucuggcuuaagaaa

SEQ ID NO: 162756 - RNA, 19 nt, Artificial Sequence
  Description of Artificial Sequence: Synthetic oligonucleotide
  Sense strand starting at position 2162 of SEQ ID NO: 2095
ugaaaucucuccucugggu

SEQ ID NO: 162757 - RNA, 19 nt, Artificial Sequence
  Description of Artificial Sequence: Synthetic oligonucleotide
  Antisense strand to SEQ ID NO: 162756
acccagaggagagauuuca

SEQ ID NO: 162758 - RNA, 19 nt, Artificial Sequence
  Description of Artificial Sequence: Synthetic oligonucleotide
  Sense strand starting at position 2254 of SEQ ID NO: 2095
ggaaucucuaacugauggu

SEQ ID NO: 162759 - RNA, 19 nt, Artificial Sequence
  Description of Artificial Sequence: Synthetic oligonucleotide
  Antisense strand to SEQ ID NO: 162758
accaucaguuagagauucc

SEQ ID NO: 162760 - RNA, 19 nt, Artificial Sequence
  Description of Artificial Sequence: Synthetic oligonucleotide
  Sense strand starting at position 2275 of SEQ ID NO: 2095
agggaucucuuucuuaauu

SEQ ID NO: 162761 - RNA, 19 nt, Artificial Sequence
  Description of Artificial Sequence: Synthetic oligonucleotide
  Antisense strand to SEQ ID NO: 162760
aauuaagaaagagaucccu

SEQ ID NO: 162762 - RNA, 19 nt, Artificial Sequence
  Description of Artificial Sequence: Synthetic oligonucleotide
  Sense strand starting at position 2276 of SEQ ID NO: 2095
gggaucucuuucuuaauug

SEQ ID NO: 162763 - RNA, 19 nt, Artificial Sequence
  Description of Artificial Sequence: Synthetic oligonucleotide
  Antisense strand to SEQ ID NO: 162762
caauuaagaaagagauccc

SEQ ID NO: 162764 - RNA, 19 nt, Artificial Sequence
  Description of Artificial Sequence: Synthetic oligonucleotide
  Sense strand starting at position 2361 of SEQ ID NO: 2095
accugaaugccuuauuguu

SEQ ID NO: 162765 - RNA, 19 nt, Artificial Sequence
  Description of Artificial Sequence: Synthetic oligonucleotide
  Antisense strand to SEQ ID NO: 162764
aacaauaaggcauucaggu

SEQ ID NO: 162766 - RNA, 19 nt, Artificial Sequence
  Description of Artificial Sequence: Synthetic oligonucleotide
  Sense strand starting at position 2415 of SEQ ID NO: 2095
gcaauuugccaaugugcua

SEQ ID NO: 162767 - RNA, 19 nt, Artificial Sequence
  Description of Artificial Sequence: Synthetic oligonucleotide
  Antisense strand to SEQ ID NO: 162766
uagcacauuggcaaauugc

SEQ ID NO: 162768 - RNA, 19 nt, Artificial Sequence
  Description of Artificial Sequence: Synthetic oligonucleotide
  Sense strand starting at position 2492 of SEQ ID NO: 2095
guuguaugaccacaggcaa

SEQ ID NO: 162769 - RNA, 19 nt, Artificial Sequence
  Description of Artificial Sequence: Synthetic oligonucleotide
  Antisense strand to SEQ ID NO: 162768
uugccuguggucauacaac

SEQ ID NO: 162770 - RNA, 19 nt, Artificial Sequence
  Description of Artificial Sequence: Synthetic oligonucleotide
  Sense strand starting at position 2716 of SEQ ID NO: 2095
uuugucucccaggauagau

SEQ ID NO: 162771 - RNA, 19 nt, Artificial Sequence
  Description of Artificial Sequence: Synthetic oligonucleotide
  Antisense strand to SEQ ID NO: 162770
aucuauccugggagacaaa

SEQ ID NO: 162772 - RNA, 19 nt, Artificial Sequence
  Description of Artificial Sequence: Synthetic oligonucleotide
  Sense strand starting at position 2786 of SEQ ID NO: 2095
ggauguguacuauaacuuu

SEQ ID NO: 162773 - RNA, 19 nt, Artificial Sequence
  Description of Artificial Sequence: Synthetic oligonucleotide
  Antisense strand to SEQ ID NO: 162772
aaaguuauaguacacaucc

SEQ ID NO: 162774 - RNA, 19 nt, Artificial Sequence
  Description of Artificial Sequence: Synthetic oligonucleotide
  Sense strand starting at position 2894 of SEQ ID NO: 2095
uugaaacuugccuauguuc

SEQ ID NO: 162775 - RNA, 19 nt, Artificial Sequence
  Description of Artificial Sequence: Synthetic oligonucleotide
  Antisense strand to SEQ ID NO: 162774
gaacauaggcaaguuucaa

SEQ ID NO: 162776 - RNA, 19 nt, Artificial Sequence
  Description of Artificial Sequence: Synthetic oligonucleotide
  Sense strand starting at position 3022 of SEQ ID NO: 2095
agacucauguuaucauaug

SEQ ID NO: 162777 - RNA, 19 nt, Artificial Sequence
  Description of Artificial Sequence: Synthetic oligonucleotide
  Antisense strand to SEQ ID NO: 162776
cauaugauaacaugagucu

SEQ ID NO: 162778 - RNA, 19 nt, Artificial Sequence
  Description of Artificial Sequence: Synthetic oligonucleotide
  Sense strand starting at position 3115 of SEQ ID NO: 2095
agcuaaguguaauccaaua

SEQ ID NO: 162779 - RNA, 19 nt, Artificial Sequence
  Description of Artificial Sequence: Synthetic oligonucleotide
  Antisense strand to SEQ ID NO: 162778
uauuggauuacacuuagcu

SEQ ID NO: 162780 - RNA, 19 nt, Artificial Sequence
  Description of Artificial Sequence: Synthetic oligonucleotide
  Sense strand starting at position 3120 of SEQ ID NO: 2095
aguguaauccaauauguau

SEQ ID NO: 162781 - RNA, 19 nt, Artificial Sequence
  Description of Artificial Sequence: Synthetic oligonucleotide
  Antisense strand to SEQ ID NO: 162780
auacauauuggauuacacu

SEQ ID NO: 162782 - RNA, 19 nt, Artificial Sequence
  Description of Artificial Sequence: Synthetic oligonucleotide
  Sense strand starting at position 3169 of SEQ ID NO: 2095
guguuugaaagacaguguu

SEQ ID NO: 162783 - RNA, 19 nt, Artificial Sequence
  Description of Artificial Sequence: Synthetic oligonucleotide
  Antisense strand to SEQ ID NO: 162782
aacacugucuuucaaacac

SEQ ID NO: 162784 - RNA, 19 nt, Artificial Sequence
  Description of Artificial Sequence: Synthetic oligonucleotide
  Sense strand starting at position 3334 of SEQ ID NO: 2095
ugcauuuagugauuguucu

SEQ ID NO: 162785 - RNA, 19 nt, Artificial Sequence
  Description of Artificial Sequence: Synthetic oligonucleotide
  Antisense strand to SEQ ID NO: 162784
agaacaaucacuaaaugca

SEQ ID NO: 162786 - RNA, 19 nt, Artificial Sequence
  Description of Artificial Sequence: Synthetic oligonucleotide
  Sense strand starting at position 3335 of SEQ ID NO: 2095
gcauuuagugauuguucuu

SEQ ID NO: 162787 - RNA, 19 nt, Artificial Sequence
  Description of Artificial Sequence: Synthetic oligonucleotide
  Antisense strand to SEQ ID NO: 162786
aagaacaaucacuaaaugc

SEQ ID NO: 162788 - RNA, 19 nt, Artificial Sequence
  Description of Artificial Sequence: Synthetic oligonucleotide
  Sense strand starting at position 3547 of SEQ ID NO: 2095
agcuaugcuccaggaagaa

SEQ ID NO: 162789 - RNA, 19 nt, Artificial Sequence
  Description of Artificial Sequence: Synthetic oligonucleotide
  Antisense strand to SEQ ID NO: 162788
uucuuccuggagcauagcu

SEQ ID NO: 162790 - RNA, 19 nt, Artificial Sequence
  Description of Artificial Sequence: Synthetic oligonucleotide
  Sense strand starting at position 3559 of SEQ ID NO: 2095
ggaagaacauguguugaau

SEQ ID NO: 162791 - RNA, 19 nt, Artificial Sequence
  Description of Artificial Sequence: Synthetic oligonucleotide
  Antisense strand to SEQ ID NO: 162790
auucaacacauguucuucc

SEQ ID NO: 162792 - RNA, 19 nt, Artificial Sequence
  Description of Artificial Sequence: Synthetic oligonucleotide
  Sense strand starting at position 3716 of SEQ ID NO: 2095
gaggccagguguuuacaaa

SEQ ID NO: 162793 - RNA, 19 nt, Artificial Sequence
  Description of Artificial Sequence: Synthetic oligonucleotide
  Antisense strand to SEQ ID NO: 162792
uuuguaaacaccuggccuc

SEQ ID NO: 162794 - RNA, 19 nt, Artificial Sequence
  Description of Artificial Sequence: Synthetic oligonucleotide
  Sense strand starting at position 3717 of SEQ ID NO: 2095
aggccagguguuuacaaau

SEQ ID NO: 162795 - RNA, 19 nt, Artificial Sequence
  Description of Artificial Sequence: Synthetic oligonucleotide
  Antisense strand to SEQ ID NO: 162794
auuuguaaacaccuggccu

SEQ ID NO: 162796 - RNA, 19 nt, Artificial Sequence
  Description of Artificial Sequence: Synthetic oligonucleotide
  Sense strand starting at position 3918 of SEQ ID NO: 2095
agaugagaucacuguguga

SEQ ID NO: 162797 - RNA, 19 nt, Artificial Sequence
  Description of Artificial Sequence: Synthetic oligonucleotide
  Antisense strand to SEQ ID NO: 162796
ucacacagugaucucaucu

SEQ ID NO: 162798 - RNA, 19 nt, Artificial Sequence
  Description of Artificial Sequence: Synthetic oligonucleotide
  Sense strand starting at position 2 of SEQ ID NO: 2096
uccugauauccugacguga

SEQ ID NO: 162799 - RNA, 19 nt, Artificial Sequence
  Description of Artificial Sequence: Synthetic oligonucleotide
  Antisense strand to SEQ ID NO: 162798
ucacgucaggauaucagga

SEQ ID NO: 162800 - RNA, 19 nt, Artificial Sequence
  Description of Artificial Sequence: Synthetic oligonucleotide
  Sense strand starting at position 7 of SEQ ID NO: 2096
auauccugacgugaucauu

SEQ ID NO: 162801 - RNA, 19 nt, Artificial Sequence
  Description of Artificial Sequence: Synthetic oligonucleotide
  Antisense strand to SEQ ID NO: 162800
aaugaucacgucaggauau

SEQ ID NO: 162802 - RNA, 19 nt, Artificial Sequence
  Description of Artificial Sequence: Synthetic oligonucleotide
  Sense strand starting at position 10 of SEQ ID NO: 2096
uccugacgugaucauuaca

SEQ ID NO: 162803 - RNA, 19 nt, Artificial Sequence
  Description of Artificial Sequence: Synthetic oligonucleotide
  Antisense strand to SEQ ID NO: 162802
uguaaugaucacgucagga

SEQ ID NO: 162804 - RNA, 19 nt, Artificial Sequence
  Description of Artificial Sequence: Synthetic oligonucleotide
  Sense strand starting at position 15 of SEQ ID NO: 2096
acgugaucauuacacauuu

SEQ ID NO: 162805 - RNA, 19 nt, Artificial Sequence
  Description of Artificial Sequence: Synthetic oligonucleotide
  Antisense strand to SEQ ID NO: 162804
aaauguguaaugaucacgu

SEQ ID NO: 162806 - RNA, 19 nt, Artificial Sequence
  Description of Artificial Sequence: Synthetic oligonucleotide
  Sense strand starting at position 121 of SEQ ID NO: 2096
uuuccuguauuaguuacau

SEQ ID NO: 162807 - RNA, 19 nt, Artificial Sequence
  Description of Artificial Sequence: Synthetic oligonucleotide
  Antisense strand to SEQ ID NO: 162806
auguaacuaauacaggaaa

SEQ ID NO: 162808 - RNA, 19 nt, Artificial Sequence
  Description of Artificial Sequence: Synthetic oligonucleotide
  Sense strand starting at position 160 of SEQ ID NO: 2096
aacaaauaucuuggugguu

SEQ ID NO: 162809 - RNA, 19 nt, Artificial Sequence
  Description of Artificial Sequence: Synthetic oligonucleotide
  Antisense strand to SEQ ID NO: 162808
aaccaccaagauauuuguu

SEQ ID NO: 162810 - RNA, 19 nt, Artificial Sequence
  Description of Artificial Sequence: Synthetic oligonucleotide
  Sense strand starting at position 223 of SEQ ID NO: 2096
gggaaacgaugauauauug

SEQ ID NO: 162811 - RNA, 19 nt, Artificial Sequence
  Description of Artificial Sequence: Synthetic oligonucleotide
  Antisense strand to SEQ ID NO: 162810
caauauaucaucguuuccc

SEQ ID NO: 162812 - RNA, 19 nt, Artificial Sequence
  Description of Artificial Sequence: Synthetic oligonucleotide
  Sense strand starting at position 403 of SEQ ID NO: 2096
ggaauaauauguucugcaa

SEQ ID NO: 162813 - RNA, 19 nt, Artificial Sequence
  Description of Artificial Sequence: Synthetic oligonucleotide
  Antisense strand to SEQ ID NO: 162812
uugcagaacauauuauucc

SEQ ID NO: 162814 - RNA, 19 nt, Artificial Sequence
  Description of Artificial Sequence: Synthetic oligonucleotide
  Sense strand starting at position 507 of SEQ ID NO: 2096
auuguaagaucuucccuga

SEQ ID NO: 162815 - RNA, 19 nt, Artificial Sequence
  Description of Artificial Sequence: Synthetic oligonucleotide
  Antisense strand to SEQ ID NO: 162814
ucagggaagaucuuacaau

SEQ ID NO: 162816 - RNA, 19 nt, Artificial Sequence
  Description of Artificial Sequence: Synthetic oligonucleotide
  Sense strand starting at position 510 of SEQ ID NO: 2096
guaagaucuucccugagga

SEQ ID NO: 162817 - RNA, 19 nt, Artificial Sequence
  Description of Artificial Sequence: Synthetic oligonucleotide
  Antisense strand to SEQ ID NO: 162816
uccucagggaagaucuuac

SEQ ID NO: 162818 - RNA, 19 nt, Artificial Sequence
  Description of Artificial Sequence: Synthetic oligonucleotide
  Sense strand starting at position 531 of SEQ ID NO: 2096
acagaaagauaggaauaaa

SEQ ID NO: 162819 - RNA, 19 nt, Artificial Sequence
  Description of Artificial Sequence: Synthetic oligonucleotide
  Antisense strand to SEQ ID NO: 162818
uuuauuccuaucuuucugu

SEQ ID NO: 162820 - RNA, 19 nt, Artificial Sequence
  Description of Artificial Sequence: Synthetic oligonucleotide
  Sense strand starting at position 658 of SEQ ID NO: 2096
gacaauugcacagguggua

SEQ ID NO: 162821 - RNA, 19 nt, Artificial Sequence
  Description of Artificial Sequence: Synthetic oligonucleotide
  Antisense strand to SEQ ID NO: 162820
uaccaccugugcaauuguc

SEQ ID NO: 162822 - RNA, 19 nt, Artificial Sequence
  Description of Artificial Sequence: Synthetic oligonucleotide
  Sense strand starting at position 917 of SEQ ID NO: 2096
caugauaagcuuugaugag

SEQ ID NO: 162823 - RNA, 19 nt, Artificial Sequence
  Description of Artificial Sequence: Synthetic oligonucleotide
  Antisense strand to SEQ ID NO: 162822
cucaucaaagcuuaucaug

SEQ ID NO: 162824 - RNA, 19 nt, Artificial Sequence
  Description of Artificial Sequence: Synthetic oligonucleotide
  Sense strand starting at position 1493 of SEQ ID NO: 2096
ccagcauguuaauccaaga

SEQ ID NO: 162825 - RNA, 19 nt, Artificial Sequence
  Description of Artificial Sequence: Synthetic oligonucleotide
  Antisense strand to SEQ ID NO: 162824
ucuuggauuaacaugcugg

SEQ ID NO: 162826 - RNA, 19 nt, Artificial Sequence
  Description of Artificial Sequence: Synthetic oligonucleotide
  Sense strand starting at position 1865 of SEQ ID NO: 2096
ccaugaucauagguuugaa

SEQ ID NO: 162827 - RNA, 19 nt, Artificial Sequence
  Description of Artificial Sequence: Synthetic oligonucleotide
  Antisense strand to SEQ ID NO: 162826
uucaaaccuaugaucaugg

SEQ ID NO: 162828 - RNA, 19 nt, Artificial Sequence
  Description of Artificial Sequence: Synthetic oligonucleotide
  Sense strand starting at position 1868 of SEQ ID NO: 2096
ugaucauagguuugaauac

SEQ ID NO: 162829 - RNA, 19 nt, Artificial Sequence
  Description of Artificial Sequence: Synthetic oligonucleotide
  Antisense strand to SEQ ID NO: 162828
guauucaaaccuaugauca

SEQ ID NO: 162830 - RNA, 19 nt, Artificial Sequence
  Description of Artificial Sequence: Synthetic oligonucleotide
  Sense strand starting at position 1885 of SEQ ID NO: 2096
acaccaaacuugcuggauu

SEQ ID NO: 162831 - RNA, 19 nt, Artificial Sequence
  Description of Artificial Sequence: Synthetic oligonucleotide
  Antisense strand to SEQ ID NO: 162830
aauccagcaaguuuggugu

SEQ ID NO: 162832 - RNA, 19 nt, Artificial Sequence
  Description of Artificial Sequence: Synthetic oligonucleotide
  Sense strand starting at position 2137 of SEQ ID NO: 2096
uucucaaacugggaaacau

SEQ ID NO: 162833 - RNA, 19 nt, Artificial Sequence
  Description of Artificial Sequence: Synthetic oligonucleotide
  Antisense strand to SEQ ID NO: 162832
auguuucccaguuugagaa

SEQ ID NO: 162834 - RNA, 19 nt, Artificial Sequence
  Description of Artificial Sequence: Synthetic oligonucleotide
  Sense strand starting at position 2376 of SEQ ID NO: 2096
acaauuugccagugugcua

SEQ ID NO: 162835 - RNA, 19 nt, Artificial Sequence
  Description of Artificial Sequence: Synthetic oligonucleotide
  Antisense strand to SEQ ID NO: 162834
uagcacacuggcaaauugu

SEQ ID NO: 162836 - RNA, 19 nt, Artificial Sequence
  Description of Artificial Sequence: Synthetic oligonucleotide
  Sense strand starting at position 2413 of SEQ ID NO: 2096
cugaguucuggccacagau

SEQ ID NO: 162837 - RNA, 19 nt, Artificial Sequence
  Description of Artificial Sequence: Synthetic oligonucleotide
  Antisense strand to SEQ ID NO: 162836
aucuguggccagaacucag

SEQ ID NO: 162838 - RNA, 19 nt, Artificial Sequence
  Description of Artificial Sequence: Synthetic oligonucleotide
  Sense strand starting at position 2442 of SEQ ID NO: 2096
aguuguaugccaggucaac

SEQ ID NO: 162839 - RNA, 19 nt, Artificial Sequence
  Description of Artificial Sequence: Synthetic oligonucleotide
  Antisense strand to SEQ ID NO: 162838
guugaccuggcauacaacu

SEQ ID NO: 162840 - RNA, 19 nt, Artificial Sequence
  Description of Artificial Sequence: Synthetic oligonucleotide
  Sense strand starting at position 2463 of SEQ ID NO: 2096
uccucucuggaaugguaaa

SEQ ID NO: 162841 - RNA, 19 nt, Artificial Sequence
  Description of Artificial Sequence: Synthetic oligonucleotide
  Antisense strand to SEQ ID NO: 162840
uuuaccauuccagagagga

SEQ ID NO: 162842 - RNA, 19 nt, Artificial Sequence
  Description of Artificial Sequence: Synthetic oligonucleotide
  Sense strand starting at position 2624 of SEQ ID NO: 2096
cuuugaaguugucuuacac

SEQ ID NO: 162843 - RNA, 19 nt, Artificial Sequence
  Description of Artificial Sequence: Synthetic oligonucleotide
  Antisense strand to SEQ ID NO: 162842
guguaagacaacuucaaag

SEQ ID NO: 162844 - RNA, 19 nt, Artificial Sequence
  Description of Artificial Sequence: Synthetic oligonucleotide
  Sense strand starting at position 2658 of SEQ ID NO: 2096
acuugugucccaggacaga

SEQ ID NO: 162845 - RNA, 19 nt, Artificial Sequence
  Description of Artificial Sequence: Synthetic oligonucleotide
  Antisense strand to SEQ ID NO: 162844
ucuguccugggacacaagu

SEQ ID NO: 162846 - RNA, 19 nt, Artificial Sequence
  Description of Artificial Sequence: Synthetic oligonucleotide
  Sense strand starting at position 2717 of SEQ ID NO: 2096
gcugcuaucaaggaugugu

SEQ ID NO: 162847 - RNA, 19 nt, Artificial Sequence
  Description of Artificial Sequence: Synthetic oligonucleotide
  Antisense strand to SEQ ID NO: 162846
acacauccuugauagcagc

SEQ ID NO: 162848 - RNA, 19 nt, Artificial Sequence
  Description of Artificial Sequence: Synthetic oligonucleotide
  Sense strand starting at position 2754 of SEQ ID NO: 2096
auagaaauguacuuaguca

SEQ ID NO: 162849 - RNA, 19 nt, Artificial Sequence
  Description of Artificial Sequence: Synthetic oligonucleotide
  Antisense strand to SEQ ID NO: 162848
ugacuaaguacauuucuau

SEQ ID NO: 162850 - RNA, 19 nt, Artificial Sequence
  Description of Artificial Sequence: Synthetic oligonucleotide
  Sense strand starting at position 2761 of SEQ ID NO: 2096
uguacuuagucaccacauu

SEQ ID NO: 162851 - RNA, 19 nt, Artificial Sequence
  Description of Artificial Sequence: Synthetic oligonucleotide
  Antisense strand to SEQ ID NO: 162850
aauguggugacuaaguaca

SEQ ID NO: 162852 - RNA, 19 nt, Artificial Sequence
  Description of Artificial Sequence: Synthetic oligonucleotide
  Sense strand starting at position 2762 of SEQ ID NO: 2096
guacuuagucaccacauua

SEQ ID NO: 162853 - RNA, 19 nt, Artificial Sequence
  Description of Artificial Sequence: Synthetic oligonucleotide
  Antisense strand to SEQ ID NO: 162852
uaauguggugacuaaguac

SEQ ID NO: 162854 - RNA, 19 nt, Artificial Sequence
  Description of Artificial Sequence: Synthetic oligonucleotide
  Sense strand starting at position 2845 of SEQ ID NO: 2096
ccuauaucuuucccuguga

SEQ ID NO: 162855 - RNA, 19 nt, Artificial Sequence
  Description of Artificial Sequence: Synthetic oligonucleotide
  Antisense strand to SEQ ID NO: 162854
ucacagggaaagauauagg

SEQ ID NO: 162856 - RNA, 19 nt, Artificial Sequence
  Description of Artificial Sequence: Synthetic oligonucleotide
  Sense strand starting at position 2953 of SEQ ID NO: 2096
ggacuuaaagucugaaauc

SEQ ID NO: 162857 - RNA, 19 nt, Artificial Sequence
  Description of Artificial Sequence: Synthetic oligonucleotide
  Antisense strand to SEQ ID NO: 162856
gauuucagacuuuaagucc

SEQ ID NO: 162858 - RNA, 19 nt, Artificial Sequence
  Description of Artificial Sequence: Synthetic oligonucleotide
  Sense strand starting at position 2981 of SEQ ID NO: 2096
auaucaacucagugugauc

SEQ ID NO: 162859 - RNA, 19 nt, Artificial Sequence
  Description of Artificial Sequence: Synthetic oligonucleotide
  Antisense strand to SEQ ID NO: 162858
gaucacacugaguugauau

SEQ ID NO: 162860 - RNA, 19 nt, Artificial Sequence
  Description of Artificial Sequence: Synthetic oligonucleotide
  Sense strand starting at position 3304 of SEQ ID NO: 2096
uuccuuaucugggccaaua

SEQ ID NO: 162861 - RNA, 19 nt, Artificial Sequence
  Description of Artificial Sequence: Synthetic oligonucleotide
  Antisense strand to SEQ ID NO: 162860
uauuggcccagauaaggaa

SEQ ID NO: 162862 - RNA, 19 nt, Artificial Sequence
  Description of Artificial Sequence: Synthetic oligonucleotide
  Sense strand starting at position 3306 of SEQ ID NO: 2096
ccuuaucugggccaauaau

SEQ ID NO: 162863 - RNA, 19 nt, Artificial Sequence
  Description of Artificial Sequence: Synthetic oligonucleotide
  Antisense strand to SEQ ID NO: 162862
auuauuggcccagauaagg

SEQ ID NO: 162864 - RNA, 19 nt, Artificial Sequence
  Description of Artificial Sequence: Synthetic oligonucleotide
  Sense strand starting at position 3448 of SEQ ID NO: 2096
gagcaagagcgcugaauca

SEQ ID NO: 162865 - RNA, 19 nt, Artificial Sequence
  Description of Artificial Sequence: Synthetic oligonucleotide
  Antisense strand to SEQ ID NO: 162864
ugauucagcgcucuugcuc

SEQ ID NO: 162866 - RNA, 19 nt, Artificial Sequence
  Description of Artificial Sequence: Synthetic oligonucleotide
  Sense strand starting at position 3493 of SEQ ID NO: 2096
caaguuagguuuccagauc

SEQ ID NO: 162867 - RNA, 19 nt, Artificial Sequence
  Description of Artificial Sequence: Synthetic oligonucleotide
  Antisense strand to SEQ ID NO: 162866
gaucuggaaaccuaacuug

SEQ ID NO: 162868 - RNA, 19 nt, Artificial Sequence
  Description of Artificial Sequence: Synthetic oligonucleotide
  Sense strand starting at position 3518 of SEQ ID NO: 2096
ugcuccagucucuaaggaa

SEQ ID NO: 162869 - RNA, 19 nt, Artificial Sequence
  Description of Artificial Sequence: Synthetic oligonucleotide
  Antisense strand to SEQ ID NO: 162868
uuccuuagagacuggagca

SEQ ID NO: 162870 - RNA, 19 nt, Artificial Sequence
  Description of Artificial Sequence: Synthetic oligonucleotide
  Sense strand starting at position 3601 of SEQ ID NO: 2096
gaguccagguguuuacaaa

SEQ ID NO: 162871 - RNA, 19 nt, Artificial Sequence
  Description of Artificial Sequence: Synthetic oligonucleotide
  Antisense strand to SEQ ID NO: 162870
uuuguaaacaccuggacuc

SEQ ID NO: 162872 - RNA, 19 nt, Artificial Sequence
  Description of Artificial Sequence: Synthetic oligonucleotide
  Sense strand starting at position 3608 of SEQ ID NO: 2096
gguguuuacaaacaguguu

SEQ ID NO: 162873 - RNA, 19 nt, Artificial Sequence
  Description of Artificial Sequence: Synthetic oligonucleotide
  Antisense strand to SEQ ID NO: 162872
aacacuguuuguaaacacc

SEQ ID NO: 162874 - RNA, 19 nt, Artificial Sequence
  Description of Artificial Sequence: Synthetic oligonucleotide
  Sense strand starting at position 3630 of SEQ ID NO: 2096
accaaauguguccacaugu

SEQ ID NO: 162875 - RNA, 19 nt, Artificial Sequence
  Description of Artificial Sequence: Synthetic oligonucleotide
  Antisense strand to SEQ ID NO: 162874
acauguggacacauuuggu

SEQ ID NO: 162876 - RNA, 19 nt, Artificial Sequence
  Description of Artificial Sequence: Synthetic oligonucleotide
  Sense strand starting at position 3770 of SEQ ID NO: 2096
uggagaauuggcugcuaaa

SEQ ID NO: 162877 - RNA, 19 nt, Artificial Sequence
  Description of Artificial Sequence: Synthetic oligonucleotide
  Antisense strand to SEQ ID NO: 162876
uuuagcagccaauucucca

SEQ ID NO: 162878 - RNA, 19 nt, Artificial Sequence
  Description of Artificial Sequence: Synthetic oligonucleotide
  Sense strand starting at position 38 of SEQ ID NO: 2097
ggcguauauuuaucacauu

SEQ ID NO: 162879 - RNA, 19 nt, Artificial Sequence
  Description of Artificial Sequence: Synthetic oligonucleotide
  Antisense strand to SEQ ID NO: 162878
aaugugauaaauauacgcc

SEQ ID NO: 162880 - RNA, 19 nt, Artificial Sequence
  Description of Artificial Sequence: Synthetic oligonucleotide
  Sense strand starting at position 39 of SEQ ID NO: 2097
gcguauauuuaucacauuu

SEQ ID NO: 162881 - RNA, 19 nt, Artificial Sequence
  Description of Artificial Sequence: Synthetic oligonucleotide
  Antisense strand to SEQ ID NO: 162880
aaaugugauaaauauacgc

SEQ ID NO: 162882 - RNA, 19 nt, Artificial Sequence
  Description of Artificial Sequence: Synthetic oligonucleotide
  Sense strand starting at position 258 of SEQ ID NO: 2097
acuaucaaaugaguaguaa

SEQ ID NO: 162883 - RNA, 19 nt, Artificial Sequence
  Description of Artificial Sequence: Synthetic oligonucleotide
  Antisense strand to SEQ ID NO: 162882
uuacuacucauuugauagu

SEQ ID NO: 162884 - RNA, 19 nt, Artificial Sequence
  Description of Artificial Sequence: Synthetic oligonucleotide
  Sense strand starting at position 266 of SEQ ID NO: 2097
augaguaguaaugauaugu

SEQ ID NO: 162885 - RNA, 19 nt, Artificial Sequence
  Description of Artificial Sequence: Synthetic oligonucleotide
  Antisense strand to SEQ ID NO: 162884
acauaucauuacuacucau

SEQ ID NO: 162886 - RNA, 19 nt, Artificial Sequence
  Description of Artificial Sequence: Synthetic oligonucleotide
  Sense strand starting at position 270 of SEQ ID NO: 2097
guaguaaugauaugucaga

SEQ ID NO: 162887 - RNA, 19 nt, Artificial Sequence
  Description of Artificial Sequence: Synthetic oligonucleotide
  Antisense strand to SEQ ID NO: 162886
ucugacauaucauuacuac

SEQ ID NO: 162888 - RNA, 19 nt, Artificial Sequence
  Description of Artificial Sequence: Synthetic oligonucleotide
  Sense strand starting at position 271 of SEQ ID NO: 2097
uaguaaugauaugucagaa

SEQ ID NO: 162889 - RNA, 19 nt, Artificial Sequence
  Description of Artificial Sequence: Synthetic oligonucleotide
  Antisense strand to SEQ ID NO: 162888
uucugacauaucauuacua

SEQ ID NO: 162890 - RNA, 19 nt, Artificial Sequence
  Description of Artificial Sequence: Synthetic oligonucleotide
  Sense strand starting at position 283 of SEQ ID NO: 2097
gucagaaauugugucaacu

SEQ ID NO: 162891 - RNA, 19 nt, Artificial Sequence
  Description of Artificial Sequence: Synthetic oligonucleotide
  Antisense strand to SEQ ID NO: 162890
aguugacacaauuucugac

SEQ ID NO: 162892 - RNA, 19 nt, Artificial Sequence
  Description of Artificial Sequence: Synthetic oligonucleotide
  Sense strand starting at position 502 of SEQ ID NO: 2097
uugugaaauccugguccug

SEQ ID NO: 162893 - RNA, 19 nt, Artificial Sequence
  Description of Artificial Sequence: Synthetic oligonucleotide
  Antisense strand to SEQ ID NO: 162892
caggaccaggauuucacaa

SEQ ID NO: 162894 - RNA, 19 nt, Artificial Sequence
  Description of Artificial Sequence: Synthetic oligonucleotide
  Sense strand starting at position 711 of SEQ ID NO: 2097
ucaacagaauugucugaug

SEQ ID NO: 162895 - RNA, 19 nt, Artificial Sequence
  Description of Artificial Sequence: Synthetic oligonucleotide
  Antisense strand to SEQ ID NO: 162894
caucagacaauucuguuga

SEQ ID NO: 162896 - RNA, 19 nt, Artificial Sequence
  Description of Artificial Sequence: Synthetic oligonucleotide
  Sense strand starting at position 713 of SEQ ID NO: 2097
aacagaauugucugauggu

SEQ ID NO: 162897 - RNA, 19 nt, Artificial Sequence
  Description of Artificial Sequence: Synthetic oligonucleotide
  Antisense strand to SEQ ID NO: 162896
accaucagacaauucuguu

SEQ ID NO: 162898 - RNA, 19 nt, Artificial Sequence
  Description of Artificial Sequence: Synthetic oligonucleotide
  Sense strand starting at position 722 of SEQ ID NO: 2097
gucugaugguucccaggga

SEQ ID NO: 162899 - RNA, 19 nt, Artificial Sequence
  Description of Artificial Sequence: Synthetic oligonucleotide
  Antisense strand to SEQ ID NO: 162898
ucccugggaaccaucagac

SEQ ID NO: 162900 - RNA, 19 nt, Artificial Sequence
  Description of Artificial Sequence: Synthetic oligonucleotide
  Sense strand starting at position 1262 of SEQ ID NO: 2097
acaacaguguuugugggaa

SEQ ID NO: 162901 - RNA, 19 nt, Artificial Sequence
  Description of Artificial Sequence: Synthetic oligonucleotide
  Antisense strand to SEQ ID NO: 162900
uucccacaaacacuguugu

SEQ ID NO: 162902 - RNA, 19 nt, Artificial Sequence
  Description of Artificial Sequence: Synthetic oligonucleotide
  Sense strand starting at position 1298 of SEQ ID NO: 2097
agaagcuaaugcuuaugua

SEQ ID NO: 162903 - RNA, 19 nt, Artificial Sequence
  Description of Artificial Sequence: Synthetic oligonucleotide
  Antisense strand to SEQ ID NO: 162902
uacauaagcauuagcuucu

SEQ ID NO: 162904 - RNA, 19 nt, Artificial Sequence
  Description of Artificial Sequence: Synthetic oligonucleotide
  Sense strand starting at position 1483 of SEQ ID NO: 2097
augaaccaagcauguuauu

SEQ ID NO: 162905 - RNA, 19 nt, Artificial Sequence
  Description of Artificial Sequence: Synthetic oligonucleotide
  Antisense strand to SEQ ID NO: 162904
aauaacaugcuugguucau

SEQ ID NO: 162906 - RNA, 19 nt, Artificial Sequence
  Description of Artificial Sequence: Synthetic oligonucleotide
  Sense strand starting at position 1602 of SEQ ID NO: 2097
guggguugacuugagcaca

SEQ ID NO: 162907 - RNA, 19 nt, Artificial Sequence
  Description of Artificial Sequence: Synthetic oligonucleotide
  Antisense strand to SEQ ID NO: 162906
ugugcucaagucaacccac

SEQ ID NO: 162908 - RNA, 19 nt, Artificial Sequence
  Description of Artificial Sequence: Synthetic oligonucleotide
  Sense strand starting at position 1808 of SEQ ID NO: 2097
agcauaucacuguacucua

SEQ ID NO: 162909 - RNA, 19 nt, Artificial Sequence
  Description of Artificial Sequence: Synthetic oligonucleotide
  Antisense strand to SEQ ID NO: 162908
uagaguacagugauaugcu

SEQ ID NO: 162910 - RNA, 19 nt, Artificial Sequence
  Description of Artificial Sequence: Synthetic oligonucleotide
  Sense strand starting at position 1989 of SEQ ID NO: 2097
guaccaggaguuuaagagu

SEQ ID NO: 162911 - RNA, 19 nt, Artificial Sequence
  Description of Artificial Sequence: Synthetic oligonucleotide
  Antisense strand to SEQ ID NO: 162910
acucuuaaacuccugguac

SEQ ID NO: 162912 - RNA, 19 nt, Artificial Sequence
  Description of Artificial Sequence: Synthetic oligonucleotide
  Sense strand starting at position 2003 of SEQ ID NO: 2097
agaguugugcagcagggaa

SEQ ID NO: 162913 - RNA, 19 nt, Artificial Sequence
  Description of Artificial Sequence: Synthetic oligonucleotide
  Antisense strand to SEQ ID NO: 162912
uucccugcugcacaacucu

SEQ ID NO: 162914 - RNA, 19 nt, Artificial Sequence
  Description of Artificial Sequence: Synthetic oligonucleotide
  Sense strand starting at position 2083 of SEQ ID NO: 2097
uccagcaauguccaaagua

SEQ ID NO: 162915 - RNA, 19 nt, Artificial Sequence
  Description of Artificial Sequence: Synthetic oligonucleotide
  Antisense strand to SEQ ID NO: 162914
uacuuuggacauugcugga

SEQ ID NO: 162916 - RNA, 19 nt, Artificial Sequence
  Description of Artificial Sequence: Synthetic oligonucleotide
  Sense strand starting at position 2178 of SEQ ID NO: 2097
ggguuaagugcucaugagu

SEQ ID NO: 162917 - RNA, 19 nt, Artificial Sequence
  Description of Artificial Sequence: Synthetic oligonucleotide
  Antisense strand to SEQ ID NO: 162916
acucaugagcacuuaaccc

SEQ ID NO: 162918 - RNA, 19 nt, Artificial Sequence
  Description of Artificial Sequence: Synthetic oligonucleotide
  Sense strand starting at position 2226 of SEQ ID NO: 2097
cagugacuuucgucagaga

SEQ ID NO: 162919 - RNA, 19 nt, Artificial Sequence
  Description of Artificial Sequence: Synthetic oligonucleotide
  Antisense strand to SEQ ID NO: 162918
ucucugacgaaagucacug

SEQ ID NO: 162920 - RNA, 19 nt, Artificial Sequence
  Description of Artificial Sequence: Synthetic oligonucleotide
  Sense strand starting at position 2227 of SEQ ID NO: 2097
agugacuuucgucagagag

SEQ ID NO: 162921 - RNA, 19 nt, Artificial Sequence
  Description of Artificial Sequence: Synthetic oligonucleotide
  Antisense strand to SEQ ID NO: 162920
cucucugacgaaagucacu

SEQ ID NO: 162922 - RNA, 19 nt, Artificial Sequence
  Description of Artificial Sequence: Synthetic oligonucleotide
  Sense strand starting at position 2233 of SEQ ID NO: 2097
uuucgucagagagauaauu

SEQ ID NO: 162923 - RNA, 19 nt, Artificial Sequence
  Description of Artificial Sequence: Synthetic oligonucleotide
  Antisense strand to SEQ ID NO: 162922
aauuaucucucugacgaaa

SEQ ID NO: 162924 - RNA, 19 nt, Artificial Sequence
  Description of Artificial Sequence: Synthetic oligonucleotide
  Sense strand starting at position 2241 of SEQ ID NO: 2097
gagagauaauuggagggau

SEQ ID NO: 162925 - RNA, 19 nt, Artificial Sequence
  Description of Artificial Sequence: Synthetic oligonucleotide
  Antisense strand to SEQ ID NO: 162924
aucccuccaauuaucucuc

SEQ ID NO: 162926 - RNA, 19 nt, Artificial Sequence
  Description of Artificial Sequence: Synthetic oligonucleotide
  Sense strand starting at position 2282 of SEQ ID NO: 2097
ucucuuucuugauugggaa

SEQ ID NO: 162927 - RNA, 19 nt, Artificial Sequence
  Description of Artificial Sequence: Synthetic oligonucleotide
  Antisense strand to SEQ ID NO: 162926
uucccaaucaagaaagaga

SEQ ID NO: 162928 - RNA, 19 nt, Artificial Sequence
  Description of Artificial Sequence: Synthetic oligonucleotide
  Sense strand starting at position 2480 of SEQ ID NO: 2097
ugcuaaguuccaugacaac

SEQ ID NO: 162929 - RNA, 19 nt, Artificial Sequence
  Description of Artificial Sequence: Synthetic oligonucleotide
  Antisense strand to SEQ ID NO: 162928
guugucauggaacuuagca

SEQ ID NO: 162930 - RNA, 19 nt, Artificial Sequence
  Description of Artificial Sequence: Synthetic oligonucleotide
  Sense strand starting at position 2509 of SEQ ID NO: 2097
ccucuccucccugggauua

SEQ ID NO: 162931 - RNA, 19 nt, Artificial Sequence
  Description of Artificial Sequence: Synthetic oligonucleotide
  Antisense strand to SEQ ID NO: 162930
uaaucccagggaggagagg

SEQ ID NO: 162932 - RNA, 19 nt, Artificial Sequence
  Description of Artificial Sequence: Synthetic oligonucleotide
  Sense strand starting at position 2726 of SEQ ID NO: 2097
cuugcaucccaggacagau

SEQ ID NO: 162933 - RNA, 19 nt, Artificial Sequence
  Description of Artificial Sequence: Synthetic oligonucleotide
  Antisense strand to SEQ ID NO: 162932
aucuguccugggaugcaag

SEQ ID NO: 162934 - RNA, 19 nt, Artificial Sequence
  Description of Artificial Sequence: Synthetic oligonucleotide
  Sense strand starting at position 2891 of SEQ ID NO: 2097
cauauaugguucccuguga

SEQ ID NO: 162935 - RNA, 19 nt, Artificial Sequence
  Description of Artificial Sequence: Synthetic oligonucleotide
  Antisense strand to SEQ ID NO: 162934
ucacagggaaccauauaug

SEQ ID NO: 162936 - RNA, 19 nt, Artificial Sequence
  Description of Artificial Sequence: Synthetic oligonucleotide
  Sense strand starting at position 2892 of SEQ ID NO: 2097
auauaugguucccugugaa

SEQ ID NO: 162937 - RNA, 19 nt, Artificial Sequence
  Description of Artificial Sequence: Synthetic oligonucleotide
  Antisense strand to SEQ ID NO: 162936
uucacagggaaccauauau

SEQ ID NO: 162938 - RNA, 19 nt, Artificial Sequence
  Description of Artificial Sequence: Synthetic oligonucleotide
  Sense strand starting at position 2895 of SEQ ID NO: 2097
uaugguucccugugaacau

SEQ ID NO: 162939 - RNA, 19 nt, Artificial Sequence
  Description of Artificial Sequence: Synthetic oligonucleotide
  Antisense strand to SEQ ID NO: 162938
auguucacagggaaccaua

SEQ ID NO: 162940 - RNA, 19 nt, Artificial Sequence
  Description of Artificial Sequence: Synthetic oligonucleotide
  Sense strand starting at position 3238 of SEQ ID NO: 2097
gcauuuagugauuguccuu

SEQ ID NO: 162941 - RNA, 19 nt, Artificial Sequence
  Description of Artificial Sequence: Synthetic oligonucleotide
  Antisense strand to SEQ ID NO: 162940
aaggacaaucacuaaaugc

SEQ ID NO: 162942 - RNA, 19 nt, Artificial Sequence
  Description of Artificial Sequence: Synthetic oligonucleotide
  Sense strand starting at position 3353 of SEQ ID NO: 2097
accauuaaucgggaagcuu

SEQ ID NO: 162943 - RNA, 19 nt, Artificial Sequence
  Description of Artificial Sequence: Synthetic oligonucleotide
  Antisense strand to SEQ ID NO: 162942
aagcuucccgauuaauggu

SEQ ID NO: 162944 - RNA, 19 nt, Artificial Sequence
  Description of Artificial Sequence: Synthetic oligonucleotide
  Sense strand starting at position 3361 of SEQ ID NO: 2097
ucgggaagcuucccaagaa

SEQ ID NO: 162945 - RNA, 19 nt, Artificial Sequence
  Description of Artificial Sequence: Synthetic oligonucleotide
  Antisense strand to SEQ ID NO: 162944
uucuugggaagcuucccga

SEQ ID NO: 162946 - RNA, 19 nt, Artificial Sequence
  Description of Artificial Sequence: Synthetic oligonucleotide
  Sense strand starting at position 3496 of SEQ ID NO: 2097
ucacaucccucaguuaagu

SEQ ID NO: 162947 - RNA, 19 nt, Artificial Sequence
  Description of Artificial Sequence: Synthetic oligonucleotide
  Antisense strand to SEQ ID NO: 162946
acuuaacugagggauguga

SEQ ID NO: 162948 - RNA, 19 nt, Artificial Sequence
  Description of Artificial Sequence: Synthetic oligonucleotide
  Sense strand starting at position 3502 of SEQ ID NO: 2097
cccucaguuaaguagguua

SEQ ID NO: 162949 - RNA, 19 nt, Artificial Sequence
  Description of Artificial Sequence: Synthetic oligonucleotide
  Antisense strand to SEQ ID NO: 162948
uaaccuacuuaacugaggg

SEQ ID NO: 162950 - RNA, 19 nt, Artificial Sequence
  Description of Artificial Sequence: Synthetic oligonucleotide
  Sense strand starting at position 3534 of SEQ ID NO: 2097
gcuguugcuccugucagua

SEQ ID NO: 162951 - RNA, 19 nt, Artificial Sequence
  Description of Artificial Sequence: Synthetic oligonucleotide
  Antisense strand to SEQ ID NO: 162950
uacugacaggagcaacagc

SEQ ID NO: 162952 - RNA, 19 nt, Artificial Sequence
  Description of Artificial Sequence: Synthetic oligonucleotide
  Sense strand starting at position 3539 of SEQ ID NO: 2097
ugcuccugucaguaaggaa

SEQ ID NO: 162953 - RNA, 19 nt, Artificial Sequence
  Description of Artificial Sequence: Synthetic oligonucleotide
  Antisense strand to SEQ ID NO: 162952
uuccuuacugacaggagca

SEQ ID NO: 162954 - RNA, 19 nt, Artificial Sequence
  Description of Artificial Sequence: Synthetic oligonucleotide
  Sense strand starting at position 3624 of SEQ ID NO: 2097
gaggccaggugauuacaaa

SEQ ID NO: 162955 - RNA, 19 nt, Artificial Sequence
  Description of Artificial Sequence: Synthetic oligonucleotide
  Antisense strand to SEQ ID NO: 162954
uuuguaaucaccuggccuc

SEQ ID NO: 162956 - RNA, 19 nt, Artificial Sequence
  Description of Artificial Sequence: Synthetic oligonucleotide
  Sense strand starting at position 3631 of SEQ ID NO: 2097
ggugauuacaaaugguguu

SEQ ID NO: 162957 - RNA, 19 nt, Artificial Sequence
  Description of Artificial Sequence: Synthetic oligonucleotide
  Antisense strand to SEQ ID NO: 162956
aacaccauuuguaaucacc

SEQ ID NO: 162958 - RNA, 19 nt, Artificial Sequence
  Description of Artificial Sequence: Synthetic oligonucleotide
  Sense strand starting at position 222 of SEQ ID NO: 2098
ggugguaaugguggaaaca

SEQ ID NO: 162959 - RNA, 19 nt, Artificial Sequence
  Description of Artificial Sequence: Synthetic oligonucleotide
  Antisense strand to SEQ ID NO: 162958
uguuuccaccauuaccacc

SEQ ID NO: 162960 - RNA, 19 nt, Artificial Sequence
  Description of Artificial Sequence: Synthetic oligonucleotide
  Sense strand starting at position 243 of SEQ ID NO: 2098
gaugauauguuacugccaa

SEQ ID NO: 162961 - RNA, 19 nt, Artificial Sequence
  Description of Artificial Sequence: Synthetic oligonucleotide
  Antisense strand to SEQ ID NO: 162960
uuggcaguaacauaucauc

SEQ ID NO: 162962 - RNA, 19 nt, Artificial Sequence
  Description of Artificial Sequence: Synthetic oligonucleotide
  Sense strand starting at position 293 of SEQ ID NO: 2098
caggcauugcgacaacaaa

SEQ ID NO: 162963 - RNA, 19 nt, Artificial Sequence
  Description of Artificial Sequence: Synthetic oligonucleotide
  Antisense strand to SEQ ID NO: 162962
uuuguugucgcaaugccug

SEQ ID NO: 162964 - RNA, 19 nt, Artificial Sequence
  Description of Artificial Sequence: Synthetic oligonucleotide
  Sense strand starting at position 335 of SEQ ID NO: 2098
ucccaagacuaguuuguua

SEQ ID NO: 162965 - RNA, 19 nt, Artificial Sequence
  Description of Artificial Sequence: Synthetic oligonucleotide
  Antisense strand to SEQ ID NO: 162964
uaacaaacuagucuuggga

SEQ ID NO: 162966 - RNA, 19 nt, Artificial Sequence
  Description of Artificial Sequence: Synthetic oligonucleotide
  Sense strand starting at position 337 of SEQ ID NO: 2098
ccaagacuaguuuguuaag

SEQ ID NO: 162967 - RNA, 19 nt, Artificial Sequence
  Description of Artificial Sequence: Synthetic oligonucleotide
  Antisense strand to SEQ ID NO: 162966
cuuaacaaacuagucuugg

SEQ ID NO: 162968 - RNA, 19 nt, Artificial Sequence
  Description of Artificial Sequence: Synthetic oligonucleotide
  Sense strand starting at position 338 of SEQ ID NO: 2098
caagacuaguuuguuaagu

SEQ ID NO: 162969 - RNA, 19 nt, Artificial Sequence
  Description of Artificial Sequence: Synthetic oligonucleotide
  Antisense strand to SEQ ID NO: 162968
acuuaacaaacuagucuug

SEQ ID NO: 162970 - RNA, 19 nt, Artificial Sequence
  Description of Artificial Sequence: Synthetic oligonucleotide
  Sense strand starting at position 339 of SEQ ID NO: 2098
aagacuaguuuguuaagua

SEQ ID NO: 162971 - RNA, 19 nt, Artificial Sequence
  Description of Artificial Sequence: Synthetic oligonucleotide
  Antisense strand to SEQ ID NO: 162970
uacuuaacaaacuagucuu

SEQ ID NO: 162972 - RNA, 19 nt, Artificial Sequence
  Description of Artificial Sequence: Synthetic oligonucleotide
  Sense strand starting at position 343 of SEQ ID NO: 2098
cuaguuuguuaaguaaaug

SEQ ID NO: 162973 - RNA, 19 nt, Artificial Sequence
  Description of Artificial Sequence: Synthetic oligonucleotide
  Antisense strand to SEQ ID NO: 162972
cauuuacuuaacaaacuag

SEQ ID NO: 162974 - RNA, 19 nt, Artificial Sequence
  Description of Artificial Sequence: Synthetic oligonucleotide
  Sense strand starting at position 501 of SEQ ID NO: 2098
uuaagauucugacuguggu

SEQ ID NO: 162975 - RNA, 19 nt, Artificial Sequence
  Description of Artificial Sequence: Synthetic oligonucleotide
  Antisense strand to SEQ ID NO: 162974
accacagucagaaucuuaa

SEQ ID NO: 162976 - RNA, 19 nt, Artificial Sequence
  Description of Artificial Sequence: Synthetic oligonucleotide
  Sense strand starting at position 502 of SEQ ID NO: 2098
uaagauucugacugugguu

SEQ ID NO: 162977 - RNA, 19 nt, Artificial Sequence
  Description of Artificial Sequence: Synthetic oligonucleotide
  Antisense strand to SEQ ID NO: 162976
aaccacagucagaaucuua

SEQ ID NO: 162978 - RNA, 19 nt, Artificial Sequence
  Description of Artificial Sequence: Synthetic oligonucleotide
  Sense strand starting at position 507 of SEQ ID NO: 2098
uucugacugugguugaaag

SEQ ID NO: 162979 - RNA, 19 nt, Artificial Sequence
  Description of Artificial Sequence: Synthetic oligonucleotide
  Antisense strand to SEQ ID NO: 162978
cuuucaaccacagucagaa

SEQ ID NO: 162980 - RNA, 19 nt, Artificial Sequence
  Description of Artificial Sequence: Synthetic oligonucleotide
  Sense strand starting at position 508 of SEQ ID NO: 2098
ucugacugugguugaaaga

SEQ ID NO: 162981 - RNA, 19 nt, Artificial Sequence
  Description of Artificial Sequence: Synthetic oligonucleotide
  Antisense strand to SEQ ID NO: 162980
ucuuucaaccacagucaga

SEQ ID NO: 162982 - RNA, 19 nt, Artificial Sequence
  Description of Artificial Sequence: Synthetic oligonucleotide
  Sense strand starting at position 602 of SEQ ID NO: 2098
acaaauacguaugcaaaga

SEQ ID NO: 162983 - RNA, 19 nt, Artificial Sequence
  Description of Artificial Sequence: Synthetic oligonucleotide
  Antisense strand to SEQ ID NO: 162982
ucuuugcauacguauuugu

SEQ ID NO: 162984 - RNA, 19 nt, Artificial Sequence
  Description of Artificial Sequence: Synthetic oligonucleotide
  Sense strand starting at position 721 of SEQ ID NO: 2098
gaugguucccagggacaga

SEQ ID NO: 162985 - RNA, 19 nt, Artificial Sequence
  Description of Artificial Sequence: Synthetic oligonucleotide
  Antisense strand to SEQ ID NO: 162984
ucugucccugggaaccauc

SEQ ID NO: 162986 - RNA, 19 nt, Artificial Sequence
  Description of Artificial Sequence: Synthetic oligonucleotide
  Sense strand starting at position 860 of SEQ ID NO: 2098
ucaucaugggcagaucacu

SEQ ID NO: 162987 - RNA, 19 nt, Artificial Sequence
  Description of Artificial Sequence: Synthetic oligonucleotide
  Antisense strand to SEQ ID NO: 162986
agugaucugcccaugauga

SEQ ID NO: 162988 - RNA, 19 nt, Artificial Sequence
  Description of Artificial Sequence: Synthetic oligonucleotide
  Sense strand starting at position 866 of SEQ ID NO: 2098
ugggcagaucacuggcuaa

SEQ ID NO: 162989 - RNA, 19 nt, Artificial Sequence
  Description of Artificial Sequence: Synthetic oligonucleotide
  Antisense strand to SEQ ID NO: 162988
uuagccagugaucugccca

SEQ ID NO: 162990 - RNA, 19 nt, Artificial Sequence
  Description of Artificial Sequence: Synthetic oligonucleotide
  Sense strand starting at position 888 of SEQ ID NO: 2098
gaaagaagcuaacugugua

SEQ ID NO: 162991 - RNA, 19 nt, Artificial Sequence
  Description of Artificial Sequence: Synthetic oligonucleotide
  Antisense strand to SEQ ID NO: 162990
uacacaguuagcuucuuuc

SEQ ID NO: 162992 - RNA, 19 nt, Artificial Sequence
  Description of Artificial Sequence: Synthetic oligonucleotide
  Sense strand starting at position 1807 of SEQ ID NO: 2098
uguaucauguaaucuaauc

SEQ ID NO: 162993 - RNA, 19 nt, Artificial Sequence
  Description of Artificial Sequence: Synthetic oligonucleotide
  Antisense strand to SEQ ID NO: 162992
gauuagauuacaugauaca

SEQ ID NO: 162994 - RNA, 19 nt, Artificial Sequence
  Description of Artificial Sequence: Synthetic oligonucleotide
  Sense strand starting at position 1877 of SEQ ID NO: 2098
ccaccaaacuugcuggauu

SEQ ID NO: 162995 - RNA, 19 nt, Artificial Sequence
  Description of Artificial Sequence: Synthetic oligonucleotide
  Antisense strand to SEQ ID NO: 162994
aauccagcaaguuuggugg

SEQ ID NO: 162996 - RNA, 19 nt, Artificial Sequence
  Description of Artificial Sequence: Synthetic oligonucleotide
  Sense strand starting at position 1966 of SEQ ID NO: 2098
aaagcagaucagugcucaa

SEQ ID NO: 162997 - RNA, 19 nt, Artificial Sequence
  Description of Artificial Sequence: Synthetic oligonucleotide
  Antisense strand to SEQ ID NO: 162996
uugagcacugaucugcuuu

SEQ ID NO: 162998 - RNA, 19 nt, Artificial Sequence
  Description of Artificial Sequence: Synthetic oligonucleotide
  Sense strand starting at position 1992 of SEQ ID NO: 2098
gaguuuaggaguuguagag

SEQ ID NO: 162999 - RNA, 19 nt, Artificial Sequence
  Description of Artificial Sequence: Synthetic oligonucleotide
  Antisense strand to SEQ ID NO: 162998
cucuacaacuccuaaacuc

SEQ ID NO: 163000 - RNA, 19 nt, Artificial Sequence
  Description of Artificial Sequence: Synthetic oligonucleotide
  Sense strand starting at position 1996 of SEQ ID NO: 2098
uuaggaguuguagagcaga

SEQ ID NO: 163001 - RNA, 19 nt, Artificial Sequence
  Description of Artificial Sequence: Synthetic oligonucleotide
  Antisense strand to SEQ ID NO: 163000
ucugcucuacaacuccuaa

SEQ ID NO: 163002 - RNA, 19 nt, Artificial Sequence
  Description of Artificial Sequence: Synthetic oligonucleotide
  Sense strand starting at position 2161 of SEQ ID NO: 2098
ggaucuuuccacuggauua

SEQ ID NO: 163003 - RNA, 19 nt, Artificial Sequence
  Description of Artificial Sequence: Synthetic oligonucleotide
  Antisense strand to SEQ ID NO: 163002
uaauccaguggaaagaucc

SEQ ID NO: 163004 - RNA, 19 nt, Artificial Sequence
  Description of Artificial Sequence: Synthetic oligonucleotide
  Sense strand starting at position 2173 of SEQ ID NO: 2098
uggauuaagugcccugacu

SEQ ID NO: 163005 - RNA, 19 nt, Artificial Sequence
  Description of Artificial Sequence: Synthetic oligonucleotide
  Antisense strand to SEQ ID NO: 163004
agucagggcacuuaaucca

SEQ ID NO: 163006 - RNA, 19 nt, Artificial Sequence
  Description of Artificial Sequence: Synthetic oligonucleotide
  Sense strand starting at position 2175 of SEQ ID NO: 2098
gauuaagugcccugacuca

SEQ ID NO: 163007 - RNA, 19 nt, Artificial Sequence
  Description of Artificial Sequence: Synthetic oligonucleotide
  Antisense strand to SEQ ID NO: 163006
ugagucagggcacuuaauc

SEQ ID NO: 163008 - RNA, 19 nt, Artificial Sequence
  Description of Artificial Sequence: Synthetic oligonucleotide
  Sense strand starting at position 2409 of SEQ ID NO: 2098
acaauuugccaaugugcua

SEQ ID NO: 163009 - RNA, 19 nt, Artificial Sequence
  Description of Artificial Sequence: Synthetic oligonucleotide
  Antisense strand to SEQ ID NO: 163008
uagcacauuggcaaauugu

SEQ ID NO: 163010 - RNA, 19 nt, Artificial Sequence
  Description of Artificial Sequence: Synthetic oligonucleotide
  Sense strand starting at position 2531 of SEQ ID NO: 2098
agaagagcaucuuauuuac

SEQ ID NO: 163011 - RNA, 19 nt, Artificial Sequence
  Description of Artificial Sequence: Synthetic oligonucleotide
  Antisense strand to SEQ ID NO: 163010
guaaauaagaugcucuucu

SEQ ID NO: 163012 - RNA, 19 nt, Artificial Sequence
  Description of Artificial Sequence: Synthetic oligonucleotide
  Sense strand starting at position 2766 of SEQ ID NO: 2098
ccaucaagggaguguacua

SEQ ID NO: 163013 - RNA, 19 nt, Artificial Sequence
  Description of Artificial Sequence: Synthetic oligonucleotide
  Antisense strand to SEQ ID NO: 163012
uaguacacucccuugaugg

SEQ ID NO: 163014 - RNA, 19 nt, Artificial Sequence
  Description of Artificial Sequence: Synthetic oligonucleotide
  Sense strand starting at position 2884 of SEQ ID NO: 2098
gaaccaugccuguauguuu

SEQ ID NO: 163015 - RNA, 19 nt, Artificial Sequence
  Description of Artificial Sequence: Synthetic oligonucleotide
  Antisense strand to SEQ ID NO: 163014
aaacauacaggcaugguuc

SEQ ID NO: 163016 - RNA, 19 nt, Artificial Sequence
  Description of Artificial Sequence: Synthetic oligonucleotide
  Sense strand starting at position 3018 of SEQ ID NO: 2098
auauaaacucagugugauc

SEQ ID NO: 163017 - RNA, 19 nt, Artificial Sequence
  Description of Artificial Sequence: Synthetic oligonucleotide
  Antisense strand to SEQ ID NO: 163016
gaucacacugaguuuauau

SEQ ID NO: 163018 - RNA, 19 nt, Artificial Sequence
  Description of Artificial Sequence: Synthetic oligonucleotide
  Sense strand starting at position 3023 of SEQ ID NO: 2098
aacucagugugauccuaug

SEQ ID NO: 163019 - RNA, 19 nt, Artificial Sequence
  Description of Artificial Sequence: Synthetic oligonucleotide
  Antisense strand to SEQ ID NO: 163018
cauaggaucacacugaguu

SEQ ID NO: 163020 - RNA, 19 nt, Artificial Sequence
  Description of Artificial Sequence: Synthetic oligonucleotide
  Sense strand starting at position 3341 of SEQ ID NO: 2098
uuucuuaucugggcuaaug

SEQ ID NO: 163021 - RNA, 19 nt, Artificial Sequence
  Description of Artificial Sequence: Synthetic oligonucleotide
  Antisense strand to SEQ ID NO: 163020
cauuagcccagauaagaaa

SEQ ID NO: 163022 - RNA, 19 nt, Artificial Sequence
  Description of Artificial Sequence: Synthetic oligonucleotide
  Sense strand starting at position 3343 of SEQ ID NO: 2098
ucuuaucugggcuaaugau

SEQ ID NO: 163023 - RNA, 19 nt, Artificial Sequence
  Description of Artificial Sequence: Synthetic oligonucleotide
  Antisense strand to SEQ ID NO: 163022
aucauuagcccagauaaga

SEQ ID NO: 163024 - RNA, 19 nt, Artificial Sequence
  Description of Artificial Sequence: Synthetic oligonucleotide
  Sense strand starting at position 3349 of SEQ ID NO: 2098
cugggcuaaugaucaggaa

SEQ ID NO: 163025 - RNA, 19 nt, Artificial Sequence
  Description of Artificial Sequence: Synthetic oligonucleotide
  Antisense strand to SEQ ID NO: 163024
uuccugaucauuagcccag

SEQ ID NO: 163026 - RNA, 19 nt, Artificial Sequence
  Description of Artificial Sequence: Synthetic oligonucleotide
  Sense strand starting at position 3353 of SEQ ID NO: 2098
gcuaaugaucaggaagcuu

SEQ ID NO: 163027 - RNA, 19 nt, Artificial Sequence
  Description of Artificial Sequence: Synthetic oligonucleotide
  Antisense strand to SEQ ID NO: 163026
aagcuuccugaucauuagc

SEQ ID NO: 163028 - RNA, 19 nt, Artificial Sequence
  Description of Artificial Sequence: Synthetic oligonucleotide
  Sense strand starting at position 3368 of SEQ ID NO: 2098
gcuuuccaagaaugugauu

SEQ ID NO: 163029 - RNA, 19 nt, Artificial Sequence
  Description of Artificial Sequence: Synthetic oligonucleotide
  Antisense strand to SEQ ID NO: 163028
aaucacauucuuggaaagc

SEQ ID NO: 163030 - RNA, 19 nt, Artificial Sequence
  Description of Artificial Sequence: Synthetic oligonucleotide
  Sense strand starting at position 3529 of SEQ ID NO: 2098
cagguuagguuuccagauc

SEQ ID NO: 163031 - RNA, 19 nt, Artificial Sequence
  Description of Artificial Sequence: Synthetic oligonucleotide
  Antisense strand to SEQ ID NO: 163030
gaucuggaaaccuaaccug

SEQ ID NO: 163032 - RNA, 19 nt, Artificial Sequence
  Description of Artificial Sequence: Synthetic oligonucleotide
  Sense strand starting at position 3554 of SEQ ID NO: 2098
ugcuccagucuuuaaggaa

SEQ ID NO: 163033 - RNA, 19 nt, Artificial Sequence
  Description of Artificial Sequence: Synthetic oligonucleotide
  Antisense strand to SEQ ID NO: 163032
uuccuuaaagacuggagca

SEQ ID NO: 163034 - RNA, 19 nt, Artificial Sequence
  Description of Artificial Sequence: Synthetic oligonucleotide
  Sense strand starting at position 3561 of SEQ ID NO: 2098
gucuuuaaggaagagcuuu

SEQ ID NO: 163035 - RNA, 19 nt, Artificial Sequence
  Description of Artificial Sequence: Synthetic oligonucleotide
  Antisense strand to SEQ ID NO: 163034
aaagcucuuccuuaaagac

SEQ ID NO: 163036 - RNA, 19 nt, Artificial Sequence
  Description of Artificial Sequence: Synthetic oligonucleotide
  Sense strand starting at position 3644 of SEQ ID NO: 2098
gguguuuacaaauaguguu

SEQ ID NO: 163037 - RNA, 19 nt, Artificial Sequence
  Description of Artificial Sequence: Synthetic oligonucleotide
  Antisense strand to SEQ ID NO: 163036
aacacuauuuguaaacacc

SEQ ID NO: 163038 - RNA, 19 nt, Artificial Sequence
  Description of Artificial Sequence: Synthetic oligonucleotide
  Sense strand starting at position 187 of SEQ ID NO: 2099
ugaucuugaugaucaugau

SEQ ID NO: 163039 - RNA, 19 nt, Artificial Sequence
  Description of Artificial Sequence: Synthetic oligonucleotide
  Antisense strand to SEQ ID NO: 163038
aucaugaucaucaagauca

SEQ ID NO: 163040 - RNA, 19 nt, Artificial Sequence
  Description of Artificial Sequence: Synthetic oligonucleotide
  Sense strand starting at position 290 of SEQ ID NO: 2099
guguuaggcauugugccau

SEQ ID NO: 163041 - RNA, 19 nt, Artificial Sequence
  Description of Artificial Sequence: Synthetic oligonucleotide
  Antisense strand to SEQ ID NO: 163040
auggcacaaugccuaacac

SEQ ID NO: 163042 - RNA, 19 nt, Artificial Sequence
  Description of Artificial Sequence: Synthetic oligonucleotide
  Sense strand starting at position 340 of SEQ ID NO: 2099
cuuagacaaguuuguuaag

SEQ ID NO: 163043 - RNA, 19 nt, Artificial Sequence
  Description of Artificial Sequence: Synthetic oligonucleotide
  Antisense strand to SEQ ID NO: 163042
cuuaacaaacuugucuaag

SEQ ID NO: 163044 - RNA, 19 nt, Artificial Sequence
  Description of Artificial Sequence: Synthetic oligonucleotide
  Sense strand starting at position 342 of SEQ ID NO: 2099
uagacaaguuuguuaagua

SEQ ID NO: 163045 - RNA, 19 nt, Artificial Sequence
  Description of Artificial Sequence: Synthetic oligonucleotide
  Antisense strand to SEQ ID NO: 163044
uacuuaacaaacuugucua

SEQ ID NO: 163046 - RNA, 19 nt, Artificial Sequence
  Description of Artificial Sequence: Synthetic oligonucleotide
  Sense strand starting at position 346 of SEQ ID NO: 2099
caaguuuguuaaguaaaug

SEQ ID NO: 163047 - RNA, 19 nt, Artificial Sequence
  Description of Artificial Sequence: Synthetic oligonucleotide
  Antisense strand to SEQ ID NO: 163046
cauuuacuuaacaaacuug

SEQ ID NO: 163048 - RNA, 19 nt, Artificial Sequence
  Description of Artificial Sequence: Synthetic oligonucleotide
  Sense strand starting at position 503 of SEQ ID NO: 2099
agauccugucuguggauga

SEQ ID NO: 163049 - RNA, 19 nt, Artificial Sequence
  Description of Artificial Sequence: Synthetic oligonucleotide
  Antisense strand to SEQ ID NO: 163048
ucauccacagacaggaucu

SEQ ID NO: 163050 - RNA, 19 nt, Artificial Sequence
  Description of Artificial Sequence: Synthetic oligonucleotide
  Sense strand starting at position 507 of SEQ ID NO: 2099
ccugucuguggaugaaaga

SEQ ID NO: 163051 - RNA, 19 nt, Artificial Sequence
  Description of Artificial Sequence: Synthetic oligonucleotide
  Antisense strand to SEQ ID NO: 163050
ucuuucauccacagacagg

SEQ ID NO: 163052 - RNA, 19 nt, Artificial Sequence
  Description of Artificial Sequence: Synthetic oligonucleotide
  Sense strand starting at position 716 of SEQ ID NO: 2099
cucuaaugguucccaggga

SEQ ID NO: 163053 - RNA, 19 nt, Artificial Sequence
  Description of Artificial Sequence: Synthetic oligonucleotide
  Antisense strand to SEQ ID NO: 163052
ucccugggaaccauuagag

SEQ ID NO: 163054 - RNA, 19 nt, Artificial Sequence
  Description of Artificial Sequence: Synthetic oligonucleotide
  Sense strand starting at position 1258 of SEQ ID NO: 2099
caguguucacgggaaggga

SEQ ID NO: 163055 - RNA, 19 nt, Artificial Sequence
  Description of Artificial Sequence: Synthetic oligonucleotide
  Antisense strand to SEQ ID NO: 163054
ucccuucccgugaacacug

SEQ ID NO: 163056 - RNA, 19 nt, Artificial Sequence
  Description of Artificial Sequence: Synthetic oligonucleotide
  Sense strand starting at position 1589 of SEQ ID NO: 2099
aucccaguggguugacaua

SEQ ID NO: 163057 - RNA, 19 nt, Artificial Sequence
  Description of Artificial Sequence: Synthetic oligonucleotide
  Antisense strand to SEQ ID NO: 163056
uaugucaacccacugggau

SEQ ID NO: 163058 - RNA, 19 nt, Artificial Sequence
  Description of Artificial Sequence: Synthetic oligonucleotide
  Sense strand starting at position 2124 of SEQ ID NO: 2099
uggccugacagugauuauc

SEQ ID NO: 163059 - RNA, 19 nt, Artificial Sequence
  Description of Artificial Sequence: Synthetic oligonucleotide
  Antisense strand to SEQ ID NO: 163058
gauaaucacugucaggcca

SEQ ID NO: 163060 - RNA, 19 nt, Artificial Sequence
  Description of Artificial Sequence: Synthetic oligonucleotide
  Sense strand starting at position 2126 of SEQ ID NO: 2099
gccugacagugauuaucaa

SEQ ID NO: 163061 - RNA, 19 nt, Artificial Sequence
  Description of Artificial Sequence: Synthetic oligonucleotide
  Antisense strand to SEQ ID NO: 163060
uugauaaucacugucaggc

SEQ ID NO: 163062 - RNA, 19 nt, Artificial Sequence
  Description of Artificial Sequence: Synthetic oligonucleotide
  Sense strand starting at position 2298 of SEQ ID NO: 2099
gggcaaugauccuuuccug

SEQ ID NO: 163063 - RNA, 19 nt, Artificial Sequence
  Description of Artificial Sequence: Synthetic oligonucleotide
  Antisense strand to SEQ ID NO: 163062
caggaaaggaucauugccc

SEQ ID NO: 163064 - RNA, 19 nt, Artificial Sequence
  Description of Artificial Sequence: Synthetic oligonucleotide
  Sense strand starting at position 2417 of SEQ ID NO: 2099
acaauuugccaaugcgcua

SEQ ID NO: 163065 - RNA, 19 nt, Artificial Sequence
  Description of Artificial Sequence: Synthetic oligonucleotide
  Antisense strand to SEQ ID NO: 163064
uagcgcauuggcaaauugu

SEQ ID NO: 163066 - RNA, 19 nt, Artificial Sequence
  Description of Artificial Sequence: Synthetic oligonucleotide
  Sense strand starting at position 2737 of SEQ ID NO: 2099
aggcaauugucaccuggga

SEQ ID NO: 163067 - RNA, 19 nt, Artificial Sequence
  Description of Artificial Sequence: Synthetic oligonucleotide
  Antisense strand to SEQ ID NO: 163066
ucccaggugacaauugccu

SEQ ID NO: 163068 - RNA, 19 nt, Artificial Sequence
  Description of Artificial Sequence: Synthetic oligonucleotide
  Sense strand starting at position 2739 of SEQ ID NO: 2099
gcaauugucaccugggaca

SEQ ID NO: 163069 - RNA, 19 nt, Artificial Sequence
  Description of Artificial Sequence: Synthetic oligonucleotide
  Antisense strand to SEQ ID NO: 163068
ugucccaggugacaauugc

SEQ ID NO: 163070 - RNA, 19 nt, Artificial Sequence
  Description of Artificial Sequence: Synthetic oligonucleotide
  Sense strand starting at position 2741 of SEQ ID NO: 2099
aauugucaccugggacaga

SEQ ID NO: 163071 - RNA, 19 nt, Artificial Sequence
  Description of Artificial Sequence: Synthetic oligonucleotide
  Antisense strand to SEQ ID NO: 163070
ucugucccaggugacaauu

SEQ ID NO: 163072 - RNA, 19 nt, Artificial Sequence
  Description of Artificial Sequence: Synthetic oligonucleotide
  Sense strand starting at position 2797 of SEQ ID NO: 2099
acuugcugccauuaaggau

SEQ ID NO: 163073 - RNA, 19 nt, Artificial Sequence
  Description of Artificial Sequence: Synthetic oligonucleotide
  Antisense strand to SEQ ID NO: 163072
auccuuaauggcagcaagu

SEQ ID NO: 163074 - RNA, 19 nt, Artificial Sequence
  Description of Artificial Sequence: Synthetic oligonucleotide
  Sense strand starting at position 2801 of SEQ ID NO: 2099
gcugccauuaaggauguau

SEQ ID NO: 163075 - RNA, 19 nt, Artificial Sequence
  Description of Artificial Sequence: Synthetic oligonucleotide
  Antisense strand to SEQ ID NO: 163074
auacauccuuaauggcagc

SEQ ID NO: 163076 - RNA, 19 nt, Artificial Sequence
  Description of Artificial Sequence: Synthetic oligonucleotide
  Sense strand starting at position 2803 of SEQ ID NO: 2099
ugccauuaaggauguauac

SEQ ID NO: 163077 - RNA, 19 nt, Artificial Sequence
  Description of Artificial Sequence: Synthetic oligonucleotide
  Antisense strand to SEQ ID NO: 163076
guauacauccuuaauggca

SEQ ID NO: 163078 - RNA, 19 nt, Artificial Sequence
  Description of Artificial Sequence: Synthetic oligonucleotide
  Sense strand starting at position 2921 of SEQ ID NO: 2099
uugaaccaugccuauauga

SEQ ID NO: 163079 - RNA, 19 nt, Artificial Sequence
  Description of Artificial Sequence: Synthetic oligonucleotide
  Antisense strand to SEQ ID NO: 163078
ucauauaggcaugguucaa

SEQ ID NO: 163080 - RNA, 19 nt, Artificial Sequence
  Description of Artificial Sequence: Synthetic oligonucleotide
  Sense strand starting at position 3009 of SEQ ID NO: 2099
agguuugcagaguggagau

SEQ ID NO: 163081 - RNA, 19 nt, Artificial Sequence
  Description of Artificial Sequence: Synthetic oligonucleotide
  Antisense strand to SEQ ID NO: 163080
aucuccacucugcaaaccu

SEQ ID NO: 163082 - RNA, 19 nt, Artificial Sequence
  Description of Artificial Sequence: Synthetic oligonucleotide
  Sense strand starting at position 3035 of SEQ ID NO: 2099
gcaccuaaagucugaaauc

SEQ ID NO: 163083 - RNA, 19 nt, Artificial Sequence
  Description of Artificial Sequence: Synthetic oligonucleotide
  Antisense strand to SEQ ID NO: 163082
gauuucagacuuuaggugc

SEQ ID NO: 163084 - RNA, 19 nt, Artificial Sequence
  Description of Artificial Sequence: Synthetic oligonucleotide
  Sense strand starting at position 3324 of SEQ ID NO: 2099
ccagcaauuagugaggcuu

SEQ ID NO: 163085 - RNA, 19 nt, Artificial Sequence
  Description of Artificial Sequence: Synthetic oligonucleotide
  Antisense strand to SEQ ID NO: 163084
aagccucacuaauugcugg

SEQ ID NO: 163086 - RNA, 19 nt, Artificial Sequence
  Description of Artificial Sequence: Synthetic oligonucleotide
  Sense strand starting at position 3330 of SEQ ID NO: 2099
auuagugaggcuuacuaaa

SEQ ID NO: 163087 - RNA, 19 nt, Artificial Sequence
  Description of Artificial Sequence: Synthetic oligonucleotide
  Antisense strand to SEQ ID NO: 163086
uuuaguaagccucacuaau

SEQ ID NO: 163088 - RNA, 19 nt, Artificial Sequence
  Description of Artificial Sequence: Synthetic oligonucleotide
  Sense strand starting at position 3332 of SEQ ID NO: 2099
uagugaggcuuacuaaaca

SEQ ID NO: 163089 - RNA, 19 nt, Artificial Sequence
  Description of Artificial Sequence: Synthetic oligonucleotide
  Antisense strand to SEQ ID NO: 163088
uguuuaguaagccucacua

SEQ ID NO: 163090 - RNA, 19 nt, Artificial Sequence
  Description of Artificial Sequence: Synthetic oligonucleotide
  Sense strand starting at position 3391 of SEQ ID NO: 2099
uuagaccaguagucagaaa

SEQ ID NO: 163091 - RNA, 19 nt, Artificial Sequence
  Description of Artificial Sequence: Synthetic oligonucleotide
  Antisense strand to SEQ ID NO: 163090
uuucugacuacuggucuaa

SEQ ID NO: 163092 - RNA, 19 nt, Artificial Sequence
  Description of Artificial Sequence: Synthetic oligonucleotide
  Sense strand starting at position 3403 of SEQ ID NO: 2099
ucagaaagcuuuccaagaa

SEQ ID NO: 163093 - RNA, 19 nt, Artificial Sequence
  Description of Artificial Sequence: Synthetic oligonucleotide
  Antisense strand to SEQ ID NO: 163092
uucuuggaaagcuuucuga

SEQ ID NO: 163094 - RNA, 19 nt, Artificial Sequence
  Description of Artificial Sequence: Synthetic oligonucleotide
  Sense strand starting at position 3415 of SEQ ID NO: 2099
ccaagaaugugguuuauag

SEQ ID NO: 163095 - RNA, 19 nt, Artificial Sequence
  Description of Artificial Sequence: Synthetic oligonucleotide
  Antisense strand to SEQ ID NO: 163094
cuauaaaccacauucuugg

SEQ ID NO: 163096 - RNA, 19 nt, Artificial Sequence
  Description of Artificial Sequence: Synthetic oligonucleotide
  Sense strand starting at position 3417 of SEQ ID NO: 2099
aagaaugugguuuauaguu

SEQ ID NO: 163097 - RNA, 19 nt, Artificial Sequence
  Description of Artificial Sequence: Synthetic oligonucleotide
  Antisense strand to SEQ ID NO: 163096
aacuauaaaccacauucuu

SEQ ID NO: 163098 - RNA, 19 nt, Artificial Sequence
  Description of Artificial Sequence: Synthetic oligonucleotide
  Sense strand starting at position 3422 of SEQ ID NO: 2099
ugugguuuauaguuggaga

SEQ ID NO: 163099 - RNA, 19 nt, Artificial Sequence
  Description of Artificial Sequence: Synthetic oligonucleotide
  Antisense strand to SEQ ID NO: 163098
ucuccaacuauaaaccaca

SEQ ID NO: 163100 - RNA, 19 nt, Artificial Sequence
  Description of Artificial Sequence: Synthetic oligonucleotide
  Sense strand starting at position 3423 of SEQ ID NO: 2099
gugguuuauaguuggagaa

SEQ ID NO: 163101 - RNA, 19 nt, Artificial Sequence
  Description of Artificial Sequence: Synthetic oligonucleotide
  Antisense strand to SEQ ID NO: 163100
uucuccaacuauaaaccac

SEQ ID NO: 163102 - RNA, 19 nt, Artificial Sequence
  Description of Artificial Sequence: Synthetic oligonucleotide
  Sense strand starting at position 3424 of SEQ ID NO: 2099
ugguuuauaguuggagaag

SEQ ID NO: 163103 - RNA, 19 nt, Artificial Sequence
  Description of Artificial Sequence: Synthetic oligonucleotide
  Antisense strand to SEQ ID NO: 163102
cuucuccaacuauaaacca

SEQ ID NO: 163104 - RNA, 19 nt, Artificial Sequence
  Description of Artificial Sequence: Synthetic oligonucleotide
  Sense strand starting at position 3580 of SEQ ID NO: 2099
cugccauugcucccgucaa

SEQ ID NO: 163105 - RNA, 19 nt, Artificial Sequence
  Description of Artificial Sequence: Synthetic oligonucleotide
  Antisense strand to SEQ ID NO: 163104
uugacgggagcaauggcag

SEQ ID NO: 163106 - RNA, 19 nt, Artificial Sequence
  Description of Artificial Sequence: Synthetic oligonucleotide
  Sense strand starting at position 3691 of SEQ ID NO: 2099
ugguguucucaccaaauua

SEQ ID NO: 163107 - RNA, 19 nt, Artificial Sequence
  Description of Artificial Sequence: Synthetic oligonucleotide
  Antisense strand to SEQ ID NO: 163106
uaauuuggugagaacacca

SEQ ID NO: 163108 - RNA, 19 nt, Artificial Sequence
  Description of Artificial Sequence: Synthetic oligonucleotide
  Sense strand starting at position 3874 of SEQ ID NO: 2099
aaaugagaucacuguguaa

SEQ ID NO: 163109 - RNA, 19 nt, Artificial Sequence
  Description of Artificial Sequence: Synthetic oligonucleotide
  Antisense strand to SEQ ID NO: 163108
uuacacagugaucucauuu

SEQ ID NO: 163110 - RNA, 19 nt, Artificial Sequence
  Description of Artificial Sequence: Synthetic oligonucleotide
  Sense strand starting at position 3876 of SEQ ID NO: 2099
augagaucacuguguaaga

SEQ ID NO: 163111 - RNA, 19 nt, Artificial Sequence
  Description of Artificial Sequence: Synthetic oligonucleotide
  Antisense strand to SEQ ID NO: 163110
ucuuacacagugaucucau

SEQ ID NO: 163112 - RNA, 19 nt, Artificial Sequence
  Description of Artificial Sequence: Synthetic oligonucleotide
  Sense strand starting at position 3877 of SEQ ID NO: 2099
ugagaucacuguguaagau

SEQ ID NO: 163113 - RNA, 19 nt, Artificial Sequence
  Description of Artificial Sequence: Synthetic oligonucleotide
  Antisense strand to SEQ ID NO: 163112
aucuuacacagugaucuca

SEQ ID NO: 163114 - RNA, 19 nt, Artificial Sequence
  Description of Artificial Sequence: Synthetic oligonucleotide
  Sense strand starting at position 3893 of SEQ ID NO: 2099
gauaauacaguuugaguca

SEQ ID NO: 163115 - RNA, 19 nt, Artificial Sequence
  Description of Artificial Sequence: Synthetic oligonucleotide
  Antisense strand to SEQ ID NO: 163114
ugacucaaacuguauuauc

SEQ ID NO: 163116 - RNA, 19 nt, Artificial Sequence
  Description of Artificial Sequence: Synthetic oligonucleotide
  Sense strand starting at position 3906 of SEQ ID NO: 2099
gagucaugcccugagacuc

SEQ ID NO: 163117 - RNA, 19 nt, Artificial Sequence
  Description of Artificial Sequence: Synthetic oligonucleotide
  Antisense strand to SEQ ID NO: 163116
gagucucagggcaugacuc

SEQ ID NO: 163118 - RNA, 19 nt, Artificial Sequence
  Description of Artificial Sequence: Synthetic oligonucleotide
  Sense strand starting at position 143 of SEQ ID NO: 2100
acuauaauuuguccugugu

SEQ ID NO: 163119 - RNA, 19 nt, Artificial Sequence
  Description of Artificial Sequence: Synthetic oligonucleotide
  Antisense strand to SEQ ID NO: 163118
acacaggacaaauuauagu

SEQ ID NO: 163120 - RNA, 19 nt, Artificial Sequence
  Description of Artificial Sequence: Synthetic oligonucleotide
  Sense strand starting at position 306 of SEQ ID NO: 2100
aggaaacauuugugaauaa

SEQ ID NO: 163121 - RNA, 19 nt, Artificial Sequence
  Description of Artificial Sequence: Synthetic oligonucleotide
  Antisense strand to SEQ ID NO: 163120
uuauucacaaauguuuccu

SEQ ID NO: 163122 - RNA, 19 nt, Artificial Sequence
  Description of Artificial Sequence: Synthetic oligonucleotide
  Sense strand starting at position 307 of SEQ ID NO: 2100
ggaaacauuugugaauaaa

SEQ ID NO: 163123 - RNA, 19 nt, Artificial Sequence
  Description of Artificial Sequence: Synthetic oligonucleotide
  Antisense strand to SEQ ID NO: 163122
uuuauucacaaauguuucc

SEQ ID NO: 163124 - RNA, 19 nt, Artificial Sequence
  Description of Artificial Sequence: Synthetic oligonucleotide
  Sense strand starting at position 336 of SEQ ID NO: 2100
ugaguacacucagcugaau

SEQ ID NO: 163125 - RNA, 19 nt, Artificial Sequence
  Description of Artificial Sequence: Synthetic oligonucleotide
  Antisense strand to SEQ ID NO: 163124
auucagcugaguguacuca

SEQ ID NO: 163126 - RNA, 19 nt, Artificial Sequence
  Description of Artificial Sequence: Synthetic oligonucleotide
  Sense strand starting at position 631 of SEQ ID NO: 2100
ugggcuugaccaugaaaca

SEQ ID NO: 163127 - RNA, 19 nt, Artificial Sequence
  Description of Artificial Sequence: Synthetic oligonucleotide
  Antisense strand to SEQ ID NO: 163126
uguuucauggucaagccca

SEQ ID NO: 163128 - RNA, 19 nt, Artificial Sequence
  Description of Artificial Sequence: Synthetic oligonucleotide
  Sense strand starting at position 733 of SEQ ID NO: 2100
gagauuaggcagugaucug

SEQ ID NO: 163129 - RNA, 19 nt, Artificial Sequence
  Description of Artificial Sequence: Synthetic oligonucleotide
  Antisense strand to SEQ ID NO: 163128
cagaucacugccuaaucuc

SEQ ID NO: 163130 - RNA, 19 nt, Artificial Sequence
  Description of Artificial Sequence: Synthetic oligonucleotide
  Sense strand starting at position 868 of SEQ ID NO: 2100
gauggaguccugggaguaa

SEQ ID NO: 163131 - RNA, 19 nt, Artificial Sequence
  Description of Artificial Sequence: Synthetic oligonucleotide
  Antisense strand to SEQ ID NO: 163130
uuacucccaggacuccauc

SEQ ID NO: 163132 - RNA, 19 nt, Artificial Sequence
  Description of Artificial Sequence: Synthetic oligonucleotide
  Sense strand starting at position 1194 of SEQ ID NO: 2100
acgaaacagugcucauaag

SEQ ID NO: 163133 - RNA, 19 nt, Artificial Sequence
  Description of Artificial Sequence: Synthetic oligonucleotide
  Antisense strand to SEQ ID NO: 163132
cuuaugagcacuguuucgu

SEQ ID NO: 163134 - RNA, 19 nt, Artificial Sequence
  Description of Artificial Sequence: Synthetic oligonucleotide
  Sense strand starting at position 1195 of SEQ ID NO: 2100
cgaaacagugcucauaaga

SEQ ID NO: 163135 - RNA, 19 nt, Artificial Sequence
  Description of Artificial Sequence: Synthetic oligonucleotide
  Antisense strand to SEQ ID NO: 163134
ucuuaugagcacuguuucg

SEQ ID NO: 163136 - RNA, 19 nt, Artificial Sequence
  Description of Artificial Sequence: Synthetic oligonucleotide
  Sense strand starting at position 1420 of SEQ ID NO: 2100
acaaauguugucugaauac

SEQ ID NO: 163137 - RNA, 19 nt, Artificial Sequence
  Description of Artificial Sequence: Synthetic oligonucleotide
  Antisense strand to SEQ ID NO: 163136
guauucagacaacauuugu

SEQ ID NO: 163138 - RNA, 19 nt, Artificial Sequence
  Description of Artificial Sequence: Synthetic oligonucleotide
  Sense strand starting at position 1831 of SEQ ID NO: 2100
gcauuucuguacccagguu

SEQ ID NO: 163139 - RNA, 19 nt, Artificial Sequence
  Description of Artificial Sequence: Synthetic oligonucleotide
  Antisense strand to SEQ ID NO: 163138
aaccuggguacagaaaugc

SEQ ID NO: 163140 - RNA, 19 nt, Artificial Sequence
  Description of Artificial Sequence: Synthetic oligonucleotide
  Sense strand starting at position 2012 of SEQ ID NO: 2100
ugaugugcuuauuucccaa

SEQ ID NO: 163141 - RNA, 19 nt, Artificial Sequence
  Description of Artificial Sequence: Synthetic oligonucleotide
  Antisense strand to SEQ ID NO: 163140
uugggaaauaagcacauca

SEQ ID NO: 163142 - RNA, 19 nt, Artificial Sequence
  Description of Artificial Sequence: Synthetic oligonucleotide
  Sense strand starting at position 2098 of SEQ ID NO: 2100
aggauaagugcacagugau

SEQ ID NO: 163143 - RNA, 19 nt, Artificial Sequence
  Description of Artificial Sequence: Synthetic oligonucleotide
  Antisense strand to SEQ ID NO: 163142
aucacugugcacuuauccu

SEQ ID NO: 163144 - RNA, 19 nt, Artificial Sequence
  Description of Artificial Sequence: Synthetic oligonucleotide
  Sense strand starting at position 2157 of SEQ ID NO: 2100
auuguagaacgugacaaau

SEQ ID NO: 163145 - RNA, 19 nt, Artificial Sequence
  Description of Artificial Sequence: Synthetic oligonucleotide
  Antisense strand to SEQ ID NO: 163144
auuugucacguucuacaau

SEQ ID NO: 163146 - RNA, 19 nt, Artificial Sequence
  Description of Artificial Sequence: Synthetic oligonucleotide
  Sense strand starting at position 2167 of SEQ ID NO: 2100
gugacaaauugucugacaa

SEQ ID NO: 163147 - RNA, 19 nt, Artificial Sequence
  Description of Artificial Sequence: Synthetic oligonucleotide
  Antisense strand to SEQ ID NO: 163146
uugucagacaauuugucac

SEQ ID NO: 163148 - RNA, 19 nt, Artificial Sequence
  Description of Artificial Sequence: Synthetic oligonucleotide
  Sense strand starting at position 2168 of SEQ ID NO: 2100
ugacaaauugucugacaau

SEQ ID NO: 163149 - RNA, 19 nt, Artificial Sequence
  Description of Artificial Sequence: Synthetic oligonucleotide
  Antisense strand to SEQ ID NO: 163148
auugucagacaauuuguca

SEQ ID NO: 163150 - RNA, 19 nt, Artificial Sequence
  Description of Artificial Sequence: Synthetic oligonucleotide
  Sense strand starting at position 2190 of SEQ ID NO: 2100
ggugcuucccuauaauuag

SEQ ID NO: 163151 - RNA, 19 nt, Artificial Sequence
  Description of Artificial Sequence: Synthetic oligonucleotide
  Antisense strand to SEQ ID NO: 163150
cuaauuauagggaagcacc

SEQ ID NO: 163152 - RNA, 19 nt, Artificial Sequence
  Description of Artificial Sequence: Synthetic oligonucleotide
  Sense strand starting at position 2193 of SEQ ID NO: 2100
gcuucccuauaauuagaga

SEQ ID NO: 163153 - RNA, 19 nt, Artificial Sequence
  Description of Artificial Sequence: Synthetic oligonucleotide
  Antisense strand to SEQ ID NO: 163152
ucucuaauuauagggaagc

SEQ ID NO: 163154 - RNA, 19 nt, Artificial Sequence
  Description of Artificial Sequence: Synthetic oligonucleotide
  Sense strand starting at position 2201 of SEQ ID NO: 2100
auaauuagagauggugcuu

SEQ ID NO: 163155 - RNA, 19 nt, Artificial Sequence
  Description of Artificial Sequence: Synthetic oligonucleotide
  Antisense strand to SEQ ID NO: 163154
aagcaccaucucuaauuau

SEQ ID NO: 163156 - RNA, 19 nt, Artificial Sequence
  Description of Artificial Sequence: Synthetic oligonucleotide
  Sense strand starting at position 2391 of SEQ ID NO: 2100
uuuaucauggccuauugau

SEQ ID NO: 163157 - RNA, 19 nt, Artificial Sequence
  Description of Artificial Sequence: Synthetic oligonucleotide
  Antisense strand to SEQ ID NO: 163156
aucaauaggccaugauaaa

SEQ ID NO: 163158 - RNA, 19 nt, Artificial Sequence
  Description of Artificial Sequence: Synthetic oligonucleotide
  Sense strand starting at position 2401 of SEQ ID NO: 2100
ccuauugauccuuaggcuu

SEQ ID NO: 163159 - RNA, 19 nt, Artificial Sequence
  Description of Artificial Sequence: Synthetic oligonucleotide
  Antisense strand to SEQ ID NO: 163158
aagccuaaggaucaauagg

SEQ ID NO: 163160 - RNA, 19 nt, Artificial Sequence
  Description of Artificial Sequence: Synthetic oligonucleotide
  Sense strand starting at position 2510 of SEQ ID NO: 2100
ugguauuaaugggcuugaa

SEQ ID NO: 163161 - RNA, 19 nt, Artificial Sequence
  Description of Artificial Sequence: Synthetic oligonucleotide
  Antisense strand to SEQ ID NO: 163160
uucaagcccauuaauacca

SEQ ID NO: 163162 - RNA, 19 nt, Artificial Sequence
  Description of Artificial Sequence: Synthetic oligonucleotide
  Sense strand starting at position 2557 of SEQ ID NO: 2100
ggccauuagagucauguug

SEQ ID NO: 163163 - RNA, 19 nt, Artificial Sequence
  Description of Artificial Sequence: Synthetic oligonucleotide
  Antisense strand to SEQ ID NO: 163162
caacaugacucuaauggcc

SEQ ID NO: 163164 - RNA, 19 nt, Artificial Sequence
  Description of Artificial Sequence: Synthetic oligonucleotide
  Sense strand starting at position 2636 of SEQ ID NO: 2100
uuguaacuaugagugacuu

SEQ ID NO: 163165 - RNA, 19 nt, Artificial Sequence
  Description of Artificial Sequence: Synthetic oligonucleotide
  Antisense strand to SEQ ID NO: 163164
aagucacucauaguuacaa

SEQ ID NO: 163166 - RNA, 19 nt, Artificial Sequence
  Description of Artificial Sequence: Synthetic oligonucleotide
  Sense strand starting at position 2638 of SEQ ID NO: 2100
guaacuaugagugacuugu

SEQ ID NO: 163167 - RNA, 19 nt, Artificial Sequence
  Description of Artificial Sequence: Synthetic oligonucleotide
  Antisense strand to SEQ ID NO: 163166
acaagucacucauaguuac

SEQ ID NO: 163168 - RNA, 19 nt, Artificial Sequence
  Description of Artificial Sequence: Synthetic oligonucleotide
  Sense strand starting at position 2649 of SEQ ID NO: 2100
ugacuuguggucuacuaga

SEQ ID NO: 163169 - RNA, 19 nt, Artificial Sequence
  Description of Artificial Sequence: Synthetic oligonucleotide
  Antisense strand to SEQ ID NO: 163168
ucuaguagaccacaaguca

SEQ ID NO: 163170 - RNA, 19 nt, Artificial Sequence
  Description of Artificial Sequence: Synthetic oligonucleotide
  Sense strand starting at position 2789 of SEQ ID NO: 2100
aaugacauuuaguaggauu

SEQ ID NO: 163171 - RNA, 19 nt, Artificial Sequence
  Description of Artificial Sequence: Synthetic oligonucleotide
  Antisense strand to SEQ ID NO: 163170
aauccuacuaaaugucauu

SEQ ID NO: 163172 - RNA, 19 nt, Artificial Sequence
  Description of Artificial Sequence: Synthetic oligonucleotide
  Sense strand starting at position 2820 of SEQ ID NO: 2100
ugcacauucgaggagugaa

SEQ ID NO: 163173 - RNA, 19 nt, Artificial Sequence
  Description of Artificial Sequence: Synthetic oligonucleotide
  Antisense strand to SEQ ID NO: 163172
uucacuccucgaaugugca

SEQ ID NO: 163174 - RNA, 19 nt, Artificial Sequence
  Description of Artificial Sequence: Synthetic oligonucleotide
  Sense strand starting at position 2823 of SEQ ID NO: 2100
acauucgaggagugaaguu

SEQ ID NO: 163175 - RNA, 19 nt, Artificial Sequence
  Description of Artificial Sequence: Synthetic oligonucleotide
  Antisense strand to SEQ ID NO: 163174
aacuucacuccucgaaugu

SEQ ID NO: 163176 - RNA, 19 nt, Artificial Sequence
  Description of Artificial Sequence: Synthetic oligonucleotide
  Sense strand starting at position 3173 of SEQ ID NO: 2100
cauagugggucuucuaaga

SEQ ID NO: 163177 - RNA, 19 nt, Artificial Sequence
  Description of Artificial Sequence: Synthetic oligonucleotide
  Antisense strand to SEQ ID NO: 163176
ucuuagaagacccacuaug

SEQ ID NO: 163178 - RNA, 19 nt, Artificial Sequence
  Description of Artificial Sequence: Synthetic oligonucleotide
  Sense strand starting at position 3278 of SEQ ID NO: 2100
aaagaauggcauuguuuag

SEQ ID NO: 163179 - RNA, 19 nt, Artificial Sequence
  Description of Artificial Sequence: Synthetic oligonucleotide
  Antisense strand to SEQ ID NO: 163178
cuaaacaaugccauucuuu

SEQ ID NO: 163180 - RNA, 19 nt, Artificial Sequence
  Description of Artificial Sequence: Synthetic oligonucleotide
  Sense strand starting at position 3302 of SEQ ID NO: 2100
ggccuaucuagugaagauc

SEQ ID NO: 163181 - RNA, 19 nt, Artificial Sequence
  Description of Artificial Sequence: Synthetic oligonucleotide
  Antisense strand to SEQ ID NO: 163180
gaucuucacuagauaggcc

SEQ ID NO: 163182 - RNA, 19 nt, Artificial Sequence
  Description of Artificial Sequence: Synthetic oligonucleotide
  Sense strand starting at position 3346 of SEQ ID NO: 2100
agcuguagucacuacuaau

SEQ ID NO: 163183 - RNA, 19 nt, Artificial Sequence
  Description of Artificial Sequence: Synthetic oligonucleotide
  Antisense strand to SEQ ID NO: 163182
auuaguagugacuacagcu

SEQ ID NO: 163184 - RNA, 19 nt, Artificial Sequence
  Description of Artificial Sequence: Synthetic oligonucleotide
  Sense strand starting at position 3450 of SEQ ID NO: 2100
gcucuuuacccagaagaau

SEQ ID NO: 163185 - RNA, 19 nt, Artificial Sequence
  Description of Artificial Sequence: Synthetic oligonucleotide
  Antisense strand to SEQ ID NO: 163184
auucuucuggguaaagagc

SEQ ID NO: 163186 - RNA, 19 nt, Artificial Sequence
  Description of Artificial Sequence: Synthetic oligonucleotide
  Sense strand starting at position 3468 of SEQ ID NO: 2100
ugcuguguuguaucugcaa

SEQ ID NO: 163187 - RNA, 19 nt, Artificial Sequence
  Description of Artificial Sequence: Synthetic oligonucleotide
  Antisense strand to SEQ ID NO: 163186
uugcagauacaacacagca

SEQ ID NO: 163188 - RNA, 19 nt, Artificial Sequence
  Description of Artificial Sequence: Synthetic oligonucleotide
  Sense strand starting at position 3493 of SEQ ID NO: 2100
aaacuugauuggguuggua

SEQ ID NO: 163189 - RNA, 19 nt, Artificial Sequence
  Description of Artificial Sequence: Synthetic oligonucleotide
  Antisense strand to SEQ ID NO: 163188
uaccaacccaaucaaguuu

SEQ ID NO: 163190 - RNA, 19 nt, Artificial Sequence
  Description of Artificial Sequence: Synthetic oligonucleotide
  Sense strand starting at position 3495 of SEQ ID NO: 2100
acuugauuggguugguaca

SEQ ID NO: 163191 - RNA, 19 nt, Artificial Sequence
  Description of Artificial Sequence: Synthetic oligonucleotide
  Antisense strand to SEQ ID NO: 163190
uguaccaacccaaucaagu

SEQ ID NO: 163192 - RNA, 19 nt, Artificial Sequence
  Description of Artificial Sequence: Synthetic oligonucleotide
  Sense strand starting at position 3574 of SEQ ID NO: 2100
ugaguugagcccuacuauu

SEQ ID NO: 163193 - RNA, 19 nt, Artificial Sequence
  Description of Artificial Sequence: Synthetic oligonucleotide
  Antisense strand to SEQ ID NO: 163192
aauaguagggcucaacuca

SEQ ID NO: 163194 - RNA, 19 nt, Artificial Sequence
  Description of Artificial Sequence: Synthetic oligonucleotide
  Sense strand starting at position 3619 of SEQ ID NO: 2100
acaacaugaggcuaguuau

SEQ ID NO: 163195 - RNA, 19 nt, Artificial Sequence
  Description of Artificial Sequence: Synthetic oligonucleotide
  Antisense strand to SEQ ID NO: 163194
auaacuagccucauguugu

SEQ ID NO: 163196 - RNA, 19 nt, Artificial Sequence
  Description of Artificial Sequence: Synthetic oligonucleotide
  Sense strand starting at position 3773 of SEQ ID NO: 2100
guugaaauccuaggaacca

SEQ ID NO: 163197 - RNA, 19 nt, Artificial Sequence
  Description of Artificial Sequence: Synthetic oligonucleotide
  Antisense strand to SEQ ID NO: 163196
ugguuccuaggauuucaac

SEQ ID NO: 163198 - RNA, 19 nt, Artificial Sequence
  Description of Artificial Sequence: Synthetic oligonucleotide
  Sense strand starting at position 3926 of SEQ ID NO: 2101
gaggcugugagucauccaa

SEQ ID NO: 163199 - RNA, 19 nt, Artificial Sequence
  Description of Artificial Sequence: Synthetic oligonucleotide
  Antisense strand to SEQ ID NO: 163198
uuggaugacucacagccuc

SEQ ID NO: 163200 - RNA, 19 nt, Artificial Sequence
  Description of Artificial Sequence: Synthetic oligonucleotide
  Sense strand starting at position 3727 of SEQ ID NO: 2101
auuccuguuuagucaaaca

SEQ ID NO: 163201 - RNA, 19 nt, Artificial Sequence
  Description of Artificial Sequence: Synthetic oligonucleotide
  Antisense strand to SEQ ID NO: 163200
uguuugacuaaacaggaau

SEQ ID NO: 163202 - RNA, 19 nt, Artificial Sequence
  Description of Artificial Sequence: Synthetic oligonucleotide
  Sense strand starting at position 3683 of SEQ ID NO: 2101
cugccaucagcuuauugaa

SEQ ID NO: 163203 - RNA, 19 nt, Artificial Sequence
  Description of Artificial Sequence: Synthetic oligonucleotide
  Antisense strand to SEQ ID NO: 163202
uucaauaagcugauggcag

SEQ ID NO: 163204 - RNA, 19 nt, Artificial Sequence
  Description of Artificial Sequence: Synthetic oligonucleotide
  Sense strand starting at position 3576 of SEQ ID NO: 2101
cuugguucuagaggaaauu

SEQ ID NO: 163205 - RNA, 19 nt, Artificial Sequence
  Description of Artificial Sequence: Synthetic oligonucleotide
  Antisense strand to SEQ ID NO: 163204
aauuuccucuagaaccaag

SEQ ID NO: 163206 - RNA, 19 nt, Artificial Sequence
  Description of Artificial Sequence: Synthetic oligonucleotide
  Sense strand starting at position 3520 of SEQ ID NO: 2101
gaaggaagcuccucuauga

SEQ ID NO: 163207 - RNA, 19 nt, Artificial Sequence
  Description of Artificial Sequence: Synthetic oligonucleotide
  Antisense strand to SEQ ID NO: 163206
ucauagaggagcuuccuuc

SEQ ID NO: 163208 - RNA, 19 nt, Artificial Sequence
  Description of Artificial Sequence: Synthetic oligonucleotide
  Sense strand starting at position 3424 of SEQ ID NO: 2101
gguuucucuccucagcaaa

SEQ ID NO: 163209 - RNA, 19 nt, Artificial Sequence
  Description of Artificial Sequence: Synthetic oligonucleotide
  Antisense strand to SEQ ID NO: 163208
uuugcugaggagagaaacc

SEQ ID NO: 163210 - RNA, 19 nt, Artificial Sequence
  Description of Artificial Sequence: Synthetic oligonucleotide
  Sense strand starting at position 3382 of SEQ ID NO: 2101
gggcucugucaucacauua

SEQ ID NO: 163211 - RNA, 19 nt, Artificial Sequence
  Description of Artificial Sequence: Synthetic oligonucleotide
  Antisense strand to SEQ ID NO: 163210
uaaugugaugacagagccc

SEQ ID NO: 163212 - RNA, 19 nt, Artificial Sequence
  Description of Artificial Sequence: Synthetic oligonucleotide
  Sense strand starting at position 3242 of SEQ ID NO: 2101
agaggugugagcugauaau

SEQ ID NO: 163213 - RNA, 19 nt, Artificial Sequence
  Description of Artificial Sequence: Synthetic oligonucleotide
  Antisense strand to SEQ ID NO: 163212
auuaucagcucacaccucu

SEQ ID NO: 163214 - RNA, 19 nt, Artificial Sequence
  Description of Artificial Sequence: Synthetic oligonucleotide
  Sense strand starting at position 3186 of SEQ ID NO: 2101
caguuucuugggcaugauu

SEQ ID NO: 163215 - RNA, 19 nt, Artificial Sequence
  Description of Artificial Sequence: Synthetic oligonucleotide
  Antisense strand to SEQ ID NO: 163214
aaucaugcccaagaaacug

SEQ ID NO: 163216 - RNA, 19 nt, Artificial Sequence
  Description of Artificial Sequence: Synthetic oligonucleotide
  Sense strand starting at position 2933 of SEQ ID NO: 2101
uguuaagucaauggacagu

SEQ ID NO: 163217 - RNA, 19 nt, Artificial Sequence
  Description of Artificial Sequence: Synthetic oligonucleotide
  Antisense strand to SEQ ID NO: 163216
acuguccauugacuuaaca

SEQ ID NO: 163218 - RNA, 19 nt, Artificial Sequence
  Description of Artificial Sequence: Synthetic oligonucleotide
  Sense strand starting at position 2932 of SEQ ID NO: 2101
guguuaagucaauggacag

SEQ ID NO: 163219 - RNA, 19 nt, Artificial Sequence
  Description of Artificial Sequence: Synthetic oligonucleotide
  Antisense strand to SEQ ID NO: 163218
cuguccauugacuuaacac

SEQ ID NO: 163220 - RNA, 19 nt, Artificial Sequence
  Description of Artificial Sequence: Synthetic oligonucleotide
  Sense strand starting at position 2789 of SEQ ID NO: 2101
acaucucaggcaugugaau

SEQ ID NO: 163221 - RNA, 19 nt, Artificial Sequence
  Description of Artificial Sequence: Synthetic oligonucleotide
  Antisense strand to SEQ ID NO: 163220
auucacaugccugagaugu

SEQ ID NO: 163222 - RNA, 19 nt, Artificial Sequence
  Description of Artificial Sequence: Synthetic oligonucleotide
  Sense strand starting at position 2624 of SEQ ID NO: 2101
cuucuccaggagugacaua

SEQ ID NO: 163223 - RNA, 19 nt, Artificial Sequence
  Description of Artificial Sequence: Synthetic oligonucleotide
  Antisense strand to SEQ ID NO: 163222
uaugucacuccuggagaag

SEQ ID NO: 163224 - RNA, 19 nt, Artificial Sequence
  Description of Artificial Sequence: Synthetic oligonucleotide
  Sense strand starting at position 2620 of SEQ ID NO: 2101
cuuucuucuccaggaguga

SEQ ID NO: 163225 - RNA, 19 nt, Artificial Sequence
  Description of Artificial Sequence: Synthetic oligonucleotide
  Antisense strand to SEQ ID NO: 163224
ucacuccuggagaagaaag

SEQ ID NO: 163226 - RNA, 19 nt, Artificial Sequence
  Description of Artificial Sequence: Synthetic oligonucleotide
  Sense strand starting at position 2616 of SEQ ID NO: 2101
guaucuuucuucuccagga

SEQ ID NO: 163227 - RNA, 19 nt, Artificial Sequence
  Description of Artificial Sequence: Synthetic oligonucleotide
  Antisense strand to SEQ ID NO: 163226
uccuggagaagaaagauac

SEQ ID NO: 163228 - RNA, 19 nt, Artificial Sequence
  Description of Artificial Sequence: Synthetic oligonucleotide
  Sense strand starting at position 2565 of SEQ ID NO: 2101
acuggaucugugugacauu

SEQ ID NO: 163229 - RNA, 19 nt, Artificial Sequence
  Description of Artificial Sequence: Synthetic oligonucleotide
  Antisense strand to SEQ ID NO: 163228
aaugucacacagauccagu

SEQ ID NO: 163230 - RNA, 19 nt, Artificial Sequence
  Description of Artificial Sequence: Synthetic oligonucleotide
  Sense strand starting at position 2556 of SEQ ID NO: 2101
gcaggauugacuggaucug

SEQ ID NO: 163231 - RNA, 19 nt, Artificial Sequence
  Description of Artificial Sequence: Synthetic oligonucleotide
  Antisense strand to SEQ ID NO: 163230
cagauccagucaauccugc

SEQ ID NO: 163232 - RNA, 19 nt, Artificial Sequence
  Description of Artificial Sequence: Synthetic oligonucleotide
  Sense strand starting at position 2532 of SEQ ID NO: 2101
aguagaugucauugagaug

SEQ ID NO: 163233 - RNA, 19 nt, Artificial Sequence
  Description of Artificial Sequence: Synthetic oligonucleotide
  Antisense strand to SEQ ID NO: 163232
caucucaaugacaucuacu

SEQ ID NO: 163234 - RNA, 19 nt, Artificial Sequence
  Description of Artificial Sequence: Synthetic oligonucleotide
  Sense strand starting at position 2526 of SEQ ID NO: 2101
agggauaguagaugucauu

SEQ ID NO: 163235 - RNA, 19 nt, Artificial Sequence
  Description of Artificial Sequence: Synthetic oligonucleotide
  Antisense strand to SEQ ID NO: 163234
aaugacaucuacuaucccu

SEQ ID NO: 163236 - RNA, 19 nt, Artificial Sequence
  Description of Artificial Sequence: Synthetic oligonucleotide
  Sense strand starting at position 2397 of SEQ ID NO: 2101
auaagugaaucaucugauu

SEQ ID NO: 163237 - RNA, 19 nt, Artificial Sequence
  Description of Artificial Sequence: Synthetic oligonucleotide
  Antisense strand to SEQ ID NO: 163236
aaucagaugauucacuuau

SEQ ID NO: 163238 - RNA, 19 nt, Artificial Sequence
  Description of Artificial Sequence: Synthetic oligonucleotide
  Sense strand starting at position 2225 of SEQ ID NO: 2101
ggauuaaauuaggaggaag

SEQ ID NO: 163239 - RNA, 19 nt, Artificial Sequence
  Description of Artificial Sequence: Synthetic oligonucleotide
  Antisense strand to SEQ ID NO: 163238
cuuccuccuaauuuaaucc

SEQ ID NO: 163240 - RNA, 19 nt, Artificial Sequence
  Description of Artificial Sequence: Synthetic oligonucleotide
  Sense strand starting at position 2212 of SEQ ID NO: 2101
cuugaauggcaauggauua

SEQ ID NO: 163241 - RNA, 19 nt, Artificial Sequence
  Description of Artificial Sequence: Synthetic oligonucleotide
  Antisense strand to SEQ ID NO: 163240
uaauccauugccauucaag

SEQ ID NO: 163242 - RNA, 19 nt, Artificial Sequence
  Description of Artificial Sequence: Synthetic oligonucleotide
  Sense strand starting at position 2199 of SEQ ID NO: 2101
gggcaaaggucuucuugaa

SEQ ID NO: 163243 - RNA, 19 nt, Artificial Sequence
  Description of Artificial Sequence: Synthetic oligonucleotide
  Antisense strand to SEQ ID NO: 163242
uucaagaagaccuuugccc

SEQ ID NO: 163244 - RNA, 19 nt, Artificial Sequence
  Description of Artificial Sequence: Synthetic oligonucleotide
  Sense strand starting at position 2105 of SEQ ID NO: 2101
guaucucuggcuuaacauu

SEQ ID NO: 163245 - RNA, 19 nt, Artificial Sequence
  Description of Artificial Sequence: Synthetic oligonucleotide
  Antisense strand to SEQ ID NO: 163244
aauguuaagccagagauac

SEQ ID NO: 163246 - RNA, 19 nt, Artificial Sequence
  Description of Artificial Sequence: Synthetic oligonucleotide
  Sense strand starting at position 2036 of SEQ ID NO: 2101
ugagcccugccuuaagaaa

SEQ ID NO: 163247 - RNA, 19 nt, Artificial Sequence
  Description of Artificial Sequence: Synthetic oligonucleotide
  Antisense strand to SEQ ID NO: 163246
uuucuuaaggcagggcuca

SEQ ID NO: 163248 - RNA, 19 nt, Artificial Sequence
  Description of Artificial Sequence: Synthetic oligonucleotide
  Sense strand starting at position 2012 of SEQ ID NO: 2101
guuagcugguauuuauaua

SEQ ID NO: 163249 - RNA, 19 nt, Artificial Sequence
  Description of Artificial Sequence: Synthetic oligonucleotide
  Antisense strand to SEQ ID NO: 163248
uauauaaauaccagcuaac

SEQ ID NO: 163250 - RNA, 19 nt, Artificial Sequence
  Description of Artificial Sequence: Synthetic oligonucleotide
  Sense strand starting at position 1984 of SEQ ID NO: 2101
gccucugggaucuggugaa

SEQ ID NO: 163251 - RNA, 19 nt, Artificial Sequence
  Description of Artificial Sequence: Synthetic oligonucleotide
  Antisense strand to SEQ ID NO: 163250
uucaccagaucccagaggc

SEQ ID NO: 163252 - RNA, 19 nt, Artificial Sequence
  Description of Artificial Sequence: Synthetic oligonucleotide
  Sense strand starting at position 1924 of SEQ ID NO: 2101
auauuaagguguuccuaau

SEQ ID NO: 163253 - RNA, 19 nt, Artificial Sequence
  Description of Artificial Sequence: Synthetic oligonucleotide
  Antisense strand to SEQ ID NO: 163252
auuaggaacaccuuaauau

SEQ ID NO: 163254 - RNA, 19 nt, Artificial Sequence
  Description of Artificial Sequence: Synthetic oligonucleotide
  Sense strand starting at position 1823 of SEQ ID NO: 2101
uguauaaggucaccuuaaa

SEQ ID NO: 163255 - RNA, 19 nt, Artificial Sequence
  Description of Artificial Sequence: Synthetic oligonucleotide
  Antisense strand to SEQ ID NO: 163254
uuuaaggugaccuuauaca

SEQ ID NO: 163256 - RNA, 19 nt, Artificial Sequence
  Description of Artificial Sequence: Synthetic oligonucleotide
  Sense strand starting at position 1797 of SEQ ID NO: 2101
uguaaucugaguggaaagu

SEQ ID NO: 163257 - RNA, 19 nt, Artificial Sequence
  Description of Artificial Sequence: Synthetic oligonucleotide
  Antisense strand to SEQ ID NO: 163256
acuuuccacucagauuaca

SEQ ID NO: 163258 - RNA, 19 nt, Artificial Sequence
  Description of Artificial Sequence: Synthetic oligonucleotide
  Sense strand starting at position 1796 of SEQ ID NO: 2101
cuguaaucugaguggaaag

SEQ ID NO: 163259 - RNA, 19 nt, Artificial Sequence
  Description of Artificial Sequence: Synthetic oligonucleotide
  Antisense strand to SEQ ID NO: 163258
cuuuccacucagauuacag

SEQ ID NO: 163260 - RNA, 19 nt, Artificial Sequence
  Description of Artificial Sequence: Synthetic oligonucleotide
  Sense strand starting at position 1795 of SEQ ID NO: 2101
ccuguaaucugaguggaaa

SEQ ID NO: 163261 - RNA, 19 nt, Artificial Sequence
  Description of Artificial Sequence: Synthetic oligonucleotide
  Antisense strand to SEQ ID NO: 163260
uuuccacucagauuacagg

SEQ ID NO: 163262 - RNA, 19 nt, Artificial Sequence
  Description of Artificial Sequence: Synthetic oligonucleotide
  Sense strand starting at position 1744 of SEQ ID NO: 2101
uuagcaagccuuuacagaa

SEQ ID NO: 163263 - RNA, 19 nt, Artificial Sequence
  Description of Artificial Sequence: Synthetic oligonucleotide
  Antisense strand to SEQ ID NO: 163262
uucuguaaaggcuugcuaa

SEQ ID NO: 163264 - RNA, 19 nt, Artificial Sequence
  Description of Artificial Sequence: Synthetic oligonucleotide
  Sense strand starting at position 1703 of SEQ ID NO: 2101
acaggagagugcucuugaa

SEQ ID NO: 163265 - RNA, 19 nt, Artificial Sequence
  Description of Artificial Sequence: Synthetic oligonucleotide
  Antisense strand to SEQ ID NO: 163264
uucaagagcacucuccugu

SEQ ID NO: 163266 - RNA, 19 nt, Artificial Sequence
  Description of Artificial Sequence: Synthetic oligonucleotide
  Sense strand starting at position 1333 of SEQ ID NO: 2101
auaguucucccaggagaac

SEQ ID NO: 163267 - RNA, 19 nt, Artificial Sequence
  Description of Artificial Sequence: Synthetic oligonucleotide
  Antisense strand to SEQ ID NO: 163266
guucuccugggagaacuau

SEQ ID NO: 163268 - RNA, 19 nt, Artificial Sequence
  Description of Artificial Sequence: Synthetic oligonucleotide
  Sense strand starting at position 1286 of SEQ ID NO: 2101
gucagcagucuagaaucua

SEQ ID NO: 163269 - RNA, 19 nt, Artificial Sequence
  Description of Artificial Sequence: Synthetic oligonucleotide
  Antisense strand to SEQ ID NO: 163268
uagauucuagacugcugac

SEQ ID NO: 163270 - RNA, 19 nt, Artificial Sequence
  Description of Artificial Sequence: Synthetic oligonucleotide
  Sense strand starting at position 1260 of SEQ ID NO: 2101
uuuccauaaguuggaaaga

SEQ ID NO: 163271 - RNA, 19 nt, Artificial Sequence
  Description of Artificial Sequence: Synthetic oligonucleotide
  Antisense strand to SEQ ID NO: 163270
ucuuuccaacuuauggaaa

SEQ ID NO: 163272 - RNA, 19 nt, Artificial Sequence
  Description of Artificial Sequence: Synthetic oligonucleotide
  Sense strand starting at position 1032 of SEQ ID NO: 2101
gcaaauauauacucugaag

SEQ ID NO: 163273 - RNA, 19 nt, Artificial Sequence
  Description of Artificial Sequence: Synthetic oligonucleotide
  Antisense strand to SEQ ID NO: 163272
cuucagaguauauauuugc

SEQ ID NO: 163274 - RNA, 19 nt, Artificial Sequence
  Description of Artificial Sequence: Synthetic oligonucleotide
  Sense strand starting at position 866 of SEQ ID NO: 2101
cccugaauuugagaucaug

SEQ ID NO: 163275 - RNA, 19 nt, Artificial Sequence
  Description of Artificial Sequence: Synthetic oligonucleotide
  Antisense strand to SEQ ID NO: 163274
caugaucucaaauucaggg

SEQ ID NO: 163276 - RNA, 19 nt, Artificial Sequence
  Description of Artificial Sequence: Synthetic oligonucleotide
  Sense strand starting at position 771 of SEQ ID NO: 2101
ugcuuugauuaaguaggaa

SEQ ID NO: 163277 - RNA, 19 nt, Artificial Sequence
  Description of Artificial Sequence: Synthetic oligonucleotide
  Antisense strand to SEQ ID NO: 163276
uuccuacuuaaucaaagca

SEQ ID NO: 163278 - RNA, 19 nt, Artificial Sequence
  Description of Artificial Sequence: Synthetic oligonucleotide
  Sense strand starting at position 3937 of SEQ ID NO: 2102
aaggacuccugcuuaguuu

SEQ ID NO: 163279 - RNA, 19 nt, Artificial Sequence
  Description of Artificial Sequence: Synthetic oligonucleotide
  Antisense strand to SEQ ID NO: 163278
aaacuaagcaggaguccuu

SEQ ID NO: 163280 - RNA, 19 nt, Artificial Sequence
  Description of Artificial Sequence: Synthetic oligonucleotide
  Sense strand starting at position 3867 of SEQ ID NO: 2102
guggguuuacugcaaugaa

SEQ ID NO: 163281 - RNA, 19 nt, Artificial Sequence
  Description of Artificial Sequence: Synthetic oligonucleotide
  Antisense strand to SEQ ID NO: 163280
uucauugcaguaaacccac

SEQ ID NO: 163282 - RNA, 19 nt, Artificial Sequence
  Description of Artificial Sequence: Synthetic oligonucleotide
  Sense strand starting at position 3700 of SEQ ID NO: 2102
ugugcucuugcugauauga

SEQ ID NO: 163283 - RNA, 19 nt, Artificial Sequence
  Description of Artificial Sequence: Synthetic oligonucleotide
  Antisense strand to SEQ ID NO: 163282
ucauaucagcaagagcaca

SEQ ID NO: 163284 - RNA, 19 nt, Artificial Sequence
  Description of Artificial Sequence: Synthetic oligonucleotide
  Sense strand starting at position 3603 of SEQ ID NO: 2102
guaauauucuggguuccag

SEQ ID NO: 163285 - RNA, 19 nt, Artificial Sequence
  Description of Artificial Sequence: Synthetic oligonucleotide
  Antisense strand to SEQ ID NO: 163284
cuggaacccagaauauuac

SEQ ID NO: 163286 - RNA, 19 nt, Artificial Sequence
  Description of Artificial Sequence: Synthetic oligonucleotide
  Sense strand starting at position 3602 of SEQ ID NO: 2102
uguaauauucuggguucca

SEQ ID NO: 163287 - RNA, 19 nt, Artificial Sequence
  Description of Artificial Sequence: Synthetic oligonucleotide
  Antisense strand to SEQ ID NO: 163286
uggaacccagaauauuaca

SEQ ID NO: 163288 - RNA, 19 nt, Artificial Sequence
  Description of Artificial Sequence: Synthetic oligonucleotide
  Sense strand starting at position 3512 of SEQ ID NO: 2102
gggucagccucacuuuaau

SEQ ID NO: 163289 - RNA, 19 nt, Artificial Sequence
  Description of Artificial Sequence: Synthetic oligonucleotide
  Antisense strand to SEQ ID NO: 163288
auuaaagugaggcugaccc

SEQ ID NO: 163290 - RNA, 19 nt, Artificial Sequence
  Description of Artificial Sequence: Synthetic oligonucleotide
  Sense strand starting at position 3479 of SEQ ID NO: 2102
gucuuauguggauggaaua

SEQ ID NO: 163291 - RNA, 19 nt, Artificial Sequence
  Description of Artificial Sequence: Synthetic oligonucleotide
  Antisense strand to SEQ ID NO: 163290
uauuccauccacauaagac

SEQ ID NO: 163292 - RNA, 19 nt, Artificial Sequence
  Description of Artificial Sequence: Synthetic oligonucleotide
  Sense strand starting at position 3477 of SEQ ID NO: 2102
cugucuuauguggauggaa

SEQ ID NO: 163293 - RNA, 19 nt, Artificial Sequence
  Description of Artificial Sequence: Synthetic oligonucleotide
  Antisense strand to SEQ ID NO: 163292
uuccauccacauaagacag

SEQ ID NO: 163294 - RNA, 19 nt, Artificial Sequence
  Description of Artificial Sequence: Synthetic oligonucleotide
  Sense strand starting at position 3421 of SEQ ID NO: 2102
uggacaagucacugucauu

SEQ ID NO: 163295 - RNA, 19 nt, Artificial Sequence
  Description of Artificial Sequence: Synthetic oligonucleotide
  Antisense strand to SEQ ID NO: 163294
aaugacagugacuugucca

SEQ ID NO: 163296 - RNA, 19 nt, Artificial Sequence
  Description of Artificial Sequence: Synthetic oligonucleotide
  Sense strand starting at position 3420 of SEQ ID NO: 2102
guggacaagucacugucau

SEQ ID NO: 163297 - RNA, 19 nt, Artificial Sequence
  Description of Artificial Sequence: Synthetic oligonucleotide
  Antisense strand to SEQ ID NO: 163296
augacagugacuuguccac

SEQ ID NO: 163298 - RNA, 19 nt, Artificial Sequence
  Description of Artificial Sequence: Synthetic oligonucleotide
  Sense strand starting at position 2813 of SEQ ID NO: 2102
gugguagacuugccacaua

SEQ ID NO: 163299 - RNA, 19 nt, Artificial Sequence
  Description of Artificial Sequence: Synthetic oligonucleotide
  Antisense strand to SEQ ID NO: 163298
uauguggcaagucuaccac

SEQ ID NO: 163300 - RNA, 19 nt, Artificial Sequence
  Description of Artificial Sequence: Synthetic oligonucleotide
  Sense strand starting at position 2773 of SEQ ID NO: 2102
auucguggugguuacagaa

SEQ ID NO: 163301 - RNA, 19 nt, Artificial Sequence
  Description of Artificial Sequence: Synthetic oligonucleotide
  Antisense strand to SEQ ID NO: 163300
uucuguaaccaccacgaau

SEQ ID NO: 163302 - RNA, 19 nt, Artificial Sequence
  Description of Artificial Sequence: Synthetic oligonucleotide
  Sense strand starting at position 2648 of SEQ ID NO: 2102
gggacaguucacgaagugu

SEQ ID NO: 163303 - RNA, 19 nt, Artificial Sequence
  Description of Artificial Sequence: Synthetic oligonucleotide
  Antisense strand to SEQ ID NO: 163302
acacuucgugaacuguccc

SEQ ID NO: 163304 - RNA, 19 nt, Artificial Sequence
  Description of Artificial Sequence: Synthetic oligonucleotide
  Sense strand starting at position 2396 of SEQ ID NO: 2102
gccauuucuugagcacuca

SEQ ID NO: 163305 - RNA, 19 nt, Artificial Sequence
  Description of Artificial Sequence: Synthetic oligonucleotide
  Antisense strand to SEQ ID NO: 163304
ugagugcucaagaaauggc

SEQ ID NO: 163306 - RNA, 19 nt, Artificial Sequence
  Description of Artificial Sequence: Synthetic oligonucleotide
  Sense strand starting at position 2290 of SEQ ID NO: 2102
gacagacaguuauaagaaa

SEQ ID NO: 163307 - RNA, 19 nt, Artificial Sequence
  Description of Artificial Sequence: Synthetic oligonucleotide
  Antisense strand to SEQ ID NO: 163306
uuucuuauaacugucuguc

SEQ ID NO: 163308 - RNA, 19 nt, Artificial Sequence
  Description of Artificial Sequence: Synthetic oligonucleotide
  Sense strand starting at position 2220 of SEQ ID NO: 2102
aaagguguuugcucaaacu

SEQ ID NO: 163309 - RNA, 19 nt, Artificial Sequence
  Description of Artificial Sequence: Synthetic oligonucleotide
  Antisense strand to SEQ ID NO: 163308
aguuugagcaaacaccuuu

SEQ ID NO: 163310 - RNA, 19 nt, Artificial Sequence
  Description of Artificial Sequence: Synthetic oligonucleotide
  Sense strand starting at position 2217 of SEQ ID NO: 2102
accaaagguguuugcucaa

SEQ ID NO: 163311 - RNA, 19 nt, Artificial Sequence
  Description of Artificial Sequence: Synthetic oligonucleotide
  Antisense strand to SEQ ID NO: 163310
uugagcaaacaccuuuggu

SEQ ID NO: 163312 - RNA, 19 nt, Artificial Sequence
  Description of Artificial Sequence: Synthetic oligonucleotide
  Sense strand starting at position 2088 of SEQ ID NO: 2102
gggaauuccucacccacuu

SEQ ID NO: 163313 - RNA, 19 nt, Artificial Sequence
  Description of Artificial Sequence: Synthetic oligonucleotide
  Antisense strand to SEQ ID NO: 163312
aagugggugaggaauuccc

SEQ ID NO: 163314 - RNA, 19 nt, Artificial Sequence
  Description of Artificial Sequence: Synthetic oligonucleotide
  Sense strand starting at position 1939 of SEQ ID NO: 2102
acagaugaguucucacuua

SEQ ID NO: 163315 - RNA, 19 nt, Artificial Sequence
  Description of Artificial Sequence: Synthetic oligonucleotide
  Antisense strand to SEQ ID NO: 163314
uaagugagaacucaucugu

SEQ ID NO: 163316 - RNA, 19 nt, Artificial Sequence
  Description of Artificial Sequence: Synthetic oligonucleotide
  Sense strand starting at position 1812 of SEQ ID NO: 2102
gugccauuuccgcaauugu

SEQ ID NO: 163317 - RNA, 19 nt, Artificial Sequence
  Description of Artificial Sequence: Synthetic oligonucleotide
  Antisense strand to SEQ ID NO: 163316
acaauugcggaaauggcac

SEQ ID NO: 163318 - RNA, 19 nt, Artificial Sequence
  Description of Artificial Sequence: Synthetic oligonucleotide
  Sense strand starting at position 1802 of SEQ ID NO: 2102
accgauuagugugccauuu

SEQ ID NO: 163319 - RNA, 19 nt, Artificial Sequence
  Description of Artificial Sequence: Synthetic oligonucleotide
  Antisense strand to SEQ ID NO: 163318
aaauggcacacuaaucggu

SEQ ID NO: 163320 - RNA, 19 nt, Artificial Sequence
  Description of Artificial Sequence: Synthetic oligonucleotide
  Sense strand starting at position 1731 of SEQ ID NO: 2102
gagucaaacccaugaucag

SEQ ID NO: 163321 - RNA, 19 nt, Artificial Sequence
  Description of Artificial Sequence: Synthetic oligonucleotide
  Antisense strand to SEQ ID NO: 163320
cugaucauggguuugacuc

SEQ ID NO: 163322 - RNA, 19 nt, Artificial Sequence
  Description of Artificial Sequence: Synthetic oligonucleotide
  Sense strand starting at position 1627 of SEQ ID NO: 2102
ugcagaauagggugugaga

SEQ ID NO: 163323 - RNA, 19 nt, Artificial Sequence
  Description of Artificial Sequence: Synthetic oligonucleotide
  Antisense strand to SEQ ID NO: 163322
ucucacacccuauucugca

SEQ ID NO: 163324 - RNA, 19 nt, Artificial Sequence
  Description of Artificial Sequence: Synthetic oligonucleotide
  Sense strand starting at position 1602 of SEQ ID NO: 2102
guuuaaagcuuacugguaa

SEQ ID NO: 163325 - RNA, 19 nt, Artificial Sequence
  Description of Artificial Sequence: Synthetic oligonucleotide
  Antisense strand to SEQ ID NO: 163324
uuaccaguaagcuuuaaac

SEQ ID NO: 163326 - RNA, 19 nt, Artificial Sequence
  Description of Artificial Sequence: Synthetic oligonucleotide
  Sense strand starting at position 1581 of SEQ ID NO: 2102
uugcauacaccuggaagaa

SEQ ID NO: 163327 - RNA, 19 nt, Artificial Sequence
  Description of Artificial Sequence: Synthetic oligonucleotide
  Antisense strand to SEQ ID NO: 163326
uucuuccagguguaugcaa

SEQ ID NO: 163328 - RNA, 19 nt, Artificial Sequence
  Description of Artificial Sequence: Synthetic oligonucleotide
  Sense strand starting at position 1544 of SEQ ID NO: 2102
gcugcauaggauugaauaa

SEQ ID NO: 163329 - RNA, 19 nt, Artificial Sequence
  Description of Artificial Sequence: Synthetic oligonucleotide
  Antisense strand to SEQ ID NO: 163328
uuauucaauccuaugcagc

SEQ ID NO: 163330 - RNA, 19 nt, Artificial Sequence
  Description of Artificial Sequence: Synthetic oligonucleotide
  Sense strand starting at position 1540 of SEQ ID NO: 2102
gagagcugcauaggauuga

SEQ ID NO: 163331 - RNA, 19 nt, Artificial Sequence
  Description of Artificial Sequence: Synthetic oligonucleotide
  Antisense strand to SEQ ID NO: 163330
ucaauccuaugcagcucuc

SEQ ID NO: 163332 - RNA, 19 nt, Artificial Sequence
  Description of Artificial Sequence: Synthetic oligonucleotide
  Sense strand starting at position 1538 of SEQ ID NO: 2102
augagagcugcauaggauu

SEQ ID NO: 163333 - RNA, 19 nt, Artificial Sequence
  Description of Artificial Sequence: Synthetic oligonucleotide
  Antisense strand to SEQ ID NO: 163332
aauccuaugcagcucucau

SEQ ID NO: 163334 - RNA, 19 nt, Artificial Sequence
  Description of Artificial Sequence: Synthetic oligonucleotide
  Sense strand starting at position 1536 of SEQ ID NO: 2102
gcaugagagcugcauagga

SEQ ID NO: 163335 - RNA, 19 nt, Artificial Sequence
  Description of Artificial Sequence: Synthetic oligonucleotide
  Antisense strand to SEQ ID NO: 163334
uccuaugcagcucucaugc

SEQ ID NO: 163336 - RNA, 19 nt, Artificial Sequence
  Description of Artificial Sequence: Synthetic oligonucleotide
  Sense strand starting at position 1505 of SEQ ID NO: 2102
gaaguaaagagguggcaau

SEQ ID NO: 163337 - RNA, 19 nt, Artificial Sequence
  Description of Artificial Sequence: Synthetic oligonucleotide
  Antisense strand to SEQ ID NO: 163336
auugccaccucuuuacuuc

SEQ ID NO: 163338 - RNA, 19 nt, Artificial Sequence
  Description of Artificial Sequence: Synthetic oligonucleotide
  Sense strand starting at position 1380 of SEQ ID NO: 2102
gaaggaugcuggucaggaa

SEQ ID NO: 163339 - RNA, 19 nt, Artificial Sequence
  Description of Artificial Sequence: Synthetic oligonucleotide
  Antisense strand to SEQ ID NO: 163338
uuccugaccagcauccuuc

SEQ ID NO: 163340 - RNA, 19 nt, Artificial Sequence
  Description of Artificial Sequence: Synthetic oligonucleotide
  Sense strand starting at position 1371 of SEQ ID NO: 2102
cccuuauuagaaggaugcu

SEQ ID NO: 163341 - RNA, 19 nt, Artificial Sequence
  Description of Artificial Sequence: Synthetic oligonucleotide
  Antisense strand to SEQ ID NO: 163340
agcauccuucuaauaaggg

SEQ ID NO: 163342 - RNA, 19 nt, Artificial Sequence
  Description of Artificial Sequence: Synthetic oligonucleotide
  Sense strand starting at position 1299 of SEQ ID NO: 2102
ggcucagacauugguucua

SEQ ID NO: 163343 - RNA, 19 nt, Artificial Sequence
  Description of Artificial Sequence: Synthetic oligonucleotide
  Antisense strand to SEQ ID NO: 163342
uagaaccaaugucugagcc

SEQ ID NO: 163344 - RNA, 19 nt, Artificial Sequence
  Description of Artificial Sequence: Synthetic oligonucleotide
  Sense strand starting at position 1074 of SEQ ID NO: 2102
gagagaucgggcuggagaa

SEQ ID NO: 163345 - RNA, 19 nt, Artificial Sequence
  Description of Artificial Sequence: Synthetic oligonucleotide
  Antisense strand to SEQ ID NO: 163344
uucuccagcccgaucucuc

SEQ ID NO: 163346 - RNA, 19 nt, Artificial Sequence
  Description of Artificial Sequence: Synthetic oligonucleotide
  Sense strand starting at position 929 of SEQ ID NO: 2102
acuggcucccuuugauaau

SEQ ID NO: 163347 - RNA, 19 nt, Artificial Sequence
  Description of Artificial Sequence: Synthetic oligonucleotide
  Antisense strand to SEQ ID NO: 163346
auuaucaaagggagccagu

SEQ ID NO: 163348 - RNA, 19 nt, Artificial Sequence
  Description of Artificial Sequence: Synthetic oligonucleotide
  Sense strand starting at position 905 of SEQ ID NO: 2102
agcugacagaucuggacaa

SEQ ID NO: 163349 - RNA, 19 nt, Artificial Sequence
  Description of Artificial Sequence: Synthetic oligonucleotide
  Antisense strand to SEQ ID NO: 163348
uuguccagaucugucagcu

SEQ ID NO: 163350 - RNA, 19 nt, Artificial Sequence
  Description of Artificial Sequence: Synthetic oligonucleotide
  Sense strand starting at position 897 of SEQ ID NO: 2102
gccaucuuagcugacagau

SEQ ID NO: 163351 - RNA, 19 nt, Artificial Sequence
  Description of Artificial Sequence: Synthetic oligonucleotide
  Antisense strand to SEQ ID NO: 163350
aucugucagcuaagauggc

SEQ ID NO: 163352 - RNA, 19 nt, Artificial Sequence
  Description of Artificial Sequence: Synthetic oligonucleotide
  Sense strand starting at position 806 of SEQ ID NO: 2102
ccaugagaaggguguuaaa

SEQ ID NO: 163353 - RNA, 19 nt, Artificial Sequence
  Description of Artificial Sequence: Synthetic oligonucleotide
  Antisense strand to SEQ ID NO: 163352
uuuaacacccuucucaugg

SEQ ID NO: 163354 - RNA, 19 nt, Artificial Sequence
  Description of Artificial Sequence: Synthetic oligonucleotide
  Sense strand starting at position 804 of SEQ ID NO: 2102
caccaugagaaggguguua

SEQ ID NO: 163355 - RNA, 19 nt, Artificial Sequence
  Description of Artificial Sequence: Synthetic oligonucleotide
  Antisense strand to SEQ ID NO: 163354
uaacacccuucucauggug

SEQ ID NO: 163356 - RNA, 19 nt, Artificial Sequence
  Description of Artificial Sequence: Synthetic oligonucleotide
  Sense strand starting at position 7 of SEQ ID NO: 2102
guucccucugaaugaauga

SEQ ID NO: 163357 - RNA, 19 nt, Artificial Sequence
  Description of Artificial Sequence: Synthetic oligonucleotide
  Antisense strand to SEQ ID NO: 163356
ucauucauucagagggaac

SEQ ID NO: 163358 - RNA, 19 nt, Artificial Sequence
  Description of Artificial Sequence: Synthetic oligonucleotide
  Sense strand starting at position 3789 of SEQ ID NO: 2103
gugauaucggacuggaucu

SEQ ID NO: 163359 - RNA, 19 nt, Artificial Sequence
  Description of Artificial Sequence: Synthetic oligonucleotide
  Antisense strand to SEQ ID NO: 163358
agauccaguccgauaucac

SEQ ID NO: 163360 - RNA, 19 nt, Artificial Sequence
  Description of Artificial Sequence: Synthetic oligonucleotide
  Sense strand starting at position 3778 of SEQ ID NO: 2103
ccagcaacugggugauauc

SEQ ID NO: 163361 - RNA, 19 nt, Artificial Sequence
  Description of Artificial Sequence: Synthetic oligonucleotide
  Antisense strand to SEQ ID NO: 163360
gauaucacccaguugcugg

SEQ ID NO: 163362 - RNA, 19 nt, Artificial Sequence
  Description of Artificial Sequence: Synthetic oligonucleotide
  Sense strand starting at position 3777 of SEQ ID NO: 2103
gccagcaacugggugauau

SEQ ID NO: 163363 - RNA, 19 nt, Artificial Sequence
  Description of Artificial Sequence: Synthetic oligonucleotide
  Antisense strand to SEQ ID NO: 163362
auaucacccaguugcuggc

SEQ ID NO: 163364 - RNA, 19 nt, Artificial Sequence
  Description of Artificial Sequence: Synthetic oligonucleotide
  Sense strand starting at position 3706 of SEQ ID NO: 2103
caagcagguguuugauagu

SEQ ID NO: 163365 - RNA, 19 nt, Artificial Sequence
  Description of Artificial Sequence: Synthetic oligonucleotide
  Antisense strand to SEQ ID NO: 163364
acuaucaaacaccugcuug

SEQ ID NO: 163366 - RNA, 19 nt, Artificial Sequence
  Description of Artificial Sequence: Synthetic oligonucleotide
  Sense strand starting at position 3655 of SEQ ID NO: 2103
cuuuguggucugggcaaga

SEQ ID NO: 163367 - RNA, 19 nt, Artificial Sequence
  Description of Artificial Sequence: Synthetic oligonucleotide
  Antisense strand to SEQ ID NO: 163366
ucuugcccagaccacaaag

SEQ ID NO: 163368 - RNA, 19 nt, Artificial Sequence
  Description of Artificial Sequence: Synthetic oligonucleotide
  Sense strand starting at position 3604 of SEQ ID NO: 2103
aagagaauuugagaucgau

SEQ ID NO: 163369 - RNA, 19 nt, Artificial Sequence
  Description of Artificial Sequence: Synthetic oligonucleotide
  Antisense strand to SEQ ID NO: 163368
aucgaucucaaauucucuu

SEQ ID NO: 163370 - RNA, 19 nt, Artificial Sequence
  Description of Artificial Sequence: Synthetic oligonucleotide
  Sense strand starting at position 3540 of SEQ ID NO: 2103
gugccacuuuacucuauau

SEQ ID NO: 163371 - RNA, 19 nt, Artificial Sequence
  Description of Artificial Sequence: Synthetic oligonucleotide
  Antisense strand to SEQ ID NO: 163370
auauagaguaaaguggcac

SEQ ID NO: 163372 - RNA, 19 nt, Artificial Sequence
  Description of Artificial Sequence: Synthetic oligonucleotide
  Sense strand starting at position 3515 of SEQ ID NO: 2103
gcaauucgucagcuucgca

SEQ ID NO: 163373 - RNA, 19 nt, Artificial Sequence
  Description of Artificial Sequence: Synthetic oligonucleotide
  Antisense strand to SEQ ID NO: 163372
ugcgaagcugacgaauugc

SEQ ID NO: 163374 - RNA, 19 nt, Artificial Sequence
  Description of Artificial Sequence: Synthetic oligonucleotide
  Sense strand starting at position 3388 of SEQ ID NO: 2103
cccagaucguucccugaga

SEQ ID NO: 163375 - RNA, 19 nt, Artificial Sequence
  Description of Artificial Sequence: Synthetic oligonucleotide
  Antisense strand to SEQ ID NO: 163374
ucucagggaacgaucuggg

SEQ ID NO: 163376 - RNA, 19 nt, Artificial Sequence
  Description of Artificial Sequence: Synthetic oligonucleotide
  Sense strand starting at position 3346 of SEQ ID NO: 2103
gcgaguucgacagcucacu

SEQ ID NO: 163377 - RNA, 19 nt, Artificial Sequence
  Description of Artificial Sequence: Synthetic oligonucleotide
  Antisense strand to SEQ ID NO: 163376
agugagcugucgaacucgc

SEQ ID NO: 163378 - RNA, 19 nt, Artificial Sequence
  Description of Artificial Sequence: Synthetic oligonucleotide
  Sense strand starting at position 3344 of SEQ ID NO: 2103
gagcgaguucgacagcuca

SEQ ID NO: 163379 - RNA, 19 nt, Artificial Sequence
  Description of Artificial Sequence: Synthetic oligonucleotide
  Antisense strand to SEQ ID NO: 163378
ugagcugucgaacucgcuc

SEQ ID NO: 163380 - RNA, 19 nt, Artificial Sequence
  Description of Artificial Sequence: Synthetic oligonucleotide
  Sense strand starting at position 3260 of SEQ ID NO: 2103
guugaccugcuggauaaau

SEQ ID NO: 163381 - RNA, 19 nt, Artificial Sequence
  Description of Artificial Sequence: Synthetic oligonucleotide
  Antisense strand to SEQ ID NO: 163380
auuuauccagcaggucaac

SEQ ID NO: 163382 - RNA, 19 nt, Artificial Sequence
  Description of Artificial Sequence: Synthetic oligonucleotide
  Sense strand starting at position 3202 of SEQ ID NO: 2103
ccaggaguuaccugaagac

SEQ ID NO: 163383 - RNA, 19 nt, Artificial Sequence
  Description of Artificial Sequence: Synthetic oligonucleotide
  Antisense strand to SEQ ID NO: 163382
gucuucagguaacuccugg

SEQ ID NO: 163384 - RNA, 19 nt, Artificial Sequence
  Description of Artificial Sequence: Synthetic oligonucleotide
  Sense strand starting at position 3034 of SEQ ID NO: 2103
gagggcccucagugagaaa

SEQ ID NO: 163385 - RNA, 19 nt, Artificial Sequence
  Description of Artificial Sequence: Synthetic oligonucleotide
  Antisense strand to SEQ ID NO: 163384
uuucucacugagggcccuc

SEQ ID NO: 163386 - RNA, 19 nt, Artificial Sequence
  Description of Artificial Sequence: Synthetic oligonucleotide
  Sense strand starting at position 2879 of SEQ ID NO: 2103
cucuauucccuagaugguu

SEQ ID NO: 163387 - RNA, 19 nt, Artificial Sequence
  Description of Artificial Sequence: Synthetic oligonucleotide
  Antisense strand to SEQ ID NO: 163386
aaccaucuagggaauagag

SEQ ID NO: 163388 - RNA, 19 nt, Artificial Sequence
  Description of Artificial Sequence: Synthetic oligonucleotide
  Sense strand starting at position 2876 of SEQ ID NO: 2103
gcucucuauucccuagaug

SEQ ID NO: 163389 - RNA, 19 nt, Artificial Sequence
  Description of Artificial Sequence: Synthetic oligonucleotide
  Antisense strand to SEQ ID NO: 163388
caucuagggaauagagagc

SEQ ID NO: 163390 - RNA, 19 nt, Artificial Sequence
  Description of Artificial Sequence: Synthetic oligonucleotide
  Sense strand starting at position 2857 of SEQ ID NO: 2103
ugggauguaucgcuacaac

SEQ ID NO: 163391 - RNA, 19 nt, Artificial Sequence
  Description of Artificial Sequence: Synthetic oligonucleotide
  Antisense strand to SEQ ID NO: 163390
guuguagcgauacauccca

SEQ ID NO: 163392 - RNA, 19 nt, Artificial Sequence
  Description of Artificial Sequence: Synthetic oligonucleotide
  Sense strand starting at position 2803 of SEQ ID NO: 2103
cggcuuucucaugaacgau

SEQ ID NO: 163393 - RNA, 19 nt, Artificial Sequence
  Description of Artificial Sequence: Synthetic oligonucleotide
  Antisense strand to SEQ ID NO: 163392
aucguucaugagaaagccg

SEQ ID NO: 163394 - RNA, 19 nt, Artificial Sequence
  Description of Artificial Sequence: Synthetic oligonucleotide
  Sense strand starting at position 2727 of SEQ ID NO: 2103
cgggacaguacuuggugua

SEQ ID NO: 163395 - RNA, 19 nt, Artificial Sequence
  Description of Artificial Sequence: Synthetic oligonucleotide
  Antisense strand to SEQ ID NO: 163394
uacaccaaguacugucccg

SEQ ID NO: 163396 - RNA, 19 nt, Artificial Sequence
  Description of Artificial Sequence: Synthetic oligonucleotide
  Sense strand starting at position 2187 of SEQ ID NO: 2103
gagaaauggcgauggcgau

SEQ ID NO: 163397 - RNA, 19 nt, Artificial Sequence
  Description of Artificial Sequence: Synthetic oligonucleotide
  Antisense strand to SEQ ID NO: 163396
aucgccaucgccauuucuc

SEQ ID NO: 163398 - RNA, 19 nt, Artificial Sequence
  Description of Artificial Sequence: Synthetic oligonucleotide
  Sense strand starting at position 2154 of SEQ ID NO: 2103
gccgauagugacagugagu

SEQ ID NO: 163399 - RNA, 19 nt, Artificial Sequence
  Description of Artificial Sequence: Synthetic oligonucleotide
  Antisense strand to SEQ ID NO: 163398
acucacugucacuaucggc

SEQ ID NO: 163400 - RNA, 19 nt, Artificial Sequence
  Description of Artificial Sequence: Synthetic oligonucleotide
  Sense strand starting at position 1188 of SEQ ID NO: 2103
caggaauugccagguccaa

SEQ ID NO: 163401 - RNA, 19 nt, Artificial Sequence
  Description of Artificial Sequence: Synthetic oligonucleotide
  Antisense strand to SEQ ID NO: 163400
uuggaccuggcaauuccug

SEQ ID NO: 163402 - RNA, 19 nt, Artificial Sequence
  Description of Artificial Sequence: Synthetic oligonucleotide
  Sense strand starting at position 1141 of SEQ ID NO: 2103
auuguucgagugggagaaa

SEQ ID NO: 163403 - RNA, 19 nt, Artificial Sequence
  Description of Artificial Sequence: Synthetic oligonucleotide
  Antisense strand to SEQ ID NO: 163402
uuucucccacucgaacaau

SEQ ID NO: 163404 - RNA, 19 nt, Artificial Sequence
  Description of Artificial Sequence: Synthetic oligonucleotide
  Sense strand starting at position 1140 of SEQ ID NO: 2103
uauuguucgagugggagaa

SEQ ID NO: 163405 - RNA, 19 nt, Artificial Sequence
  Description of Artificial Sequence: Synthetic oligonucleotide
  Antisense strand to SEQ ID NO: 163404
uucucccacucgaacaaua

SEQ ID NO: 163406 - RNA, 19 nt, Artificial Sequence
  Description of Artificial Sequence: Synthetic oligonucleotide
  Sense strand starting at position 1012 of SEQ ID NO: 2103
guccuacagcacuaucaua

SEQ ID NO: 163407 - RNA, 19 nt, Artificial Sequence
  Description of Artificial Sequence: Synthetic oligonucleotide
  Antisense strand to SEQ ID NO: 163406
uaugauagugcuguaggac

SEQ ID NO: 163408 - RNA, 19 nt, Artificial Sequence
  Description of Artificial Sequence: Synthetic oligonucleotide
  Sense strand starting at position 984 of SEQ ID NO: 2103
ugcagauuugguugcuucu

SEQ ID NO: 163409 - RNA, 19 nt, Artificial Sequence
  Description of Artificial Sequence: Synthetic oligonucleotide
  Antisense strand to SEQ ID NO: 163408
agaagcaaccaaaucugca

SEQ ID NO: 163410 - RNA, 19 nt, Artificial Sequence
  Description of Artificial Sequence: Synthetic oligonucleotide
  Sense strand starting at position 908 of SEQ ID NO: 2103
ggguuuccuaacgggaaua

SEQ ID NO: 163411 - RNA, 19 nt, Artificial Sequence
  Description of Artificial Sequence: Synthetic oligonucleotide
  Antisense strand to SEQ ID NO: 163410
uauucccguuaggaaaccc

SEQ ID NO: 163412 - RNA, 19 nt, Artificial Sequence
  Description of Artificial Sequence: Synthetic oligonucleotide
  Sense strand starting at position 825 of SEQ ID NO: 2103
uucugaaauuuagcgugua

SEQ ID NO: 163413 - RNA, 19 nt, Artificial Sequence
  Description of Artificial Sequence: Synthetic oligonucleotide
  Antisense strand to SEQ ID NO: 163412
uacacgcuaaauuucagaa

SEQ ID NO: 163414 - RNA, 19 nt, Artificial Sequence
  Description of Artificial Sequence: Synthetic oligonucleotide
  Sense strand starting at position 794 of SEQ ID NO: 2103
gcaggaguagauuauuauu

SEQ ID NO: 163415 - RNA, 19 nt, Artificial Sequence
  Description of Artificial Sequence: Synthetic oligonucleotide
  Antisense strand to SEQ ID NO: 163414
aauaauaaucuacuccugc

SEQ ID NO: 163416 - RNA, 19 nt, Artificial Sequence
  Description of Artificial Sequence: Synthetic oligonucleotide
  Sense strand starting at position 703 of SEQ ID NO: 2103
cuuaauuuguuugacagua

SEQ ID NO: 163417 - RNA, 19 nt, Artificial Sequence
  Description of Artificial Sequence: Synthetic oligonucleotide
  Antisense strand to SEQ ID NO: 163416
uacugucaaacaaauuaag

SEQ ID NO: 163418 - RNA, 19 nt, Artificial Sequence
  Description of Artificial Sequence: Synthetic oligonucleotide
  Sense strand starting at position 667 of SEQ ID NO: 2103
ggaaauugguacuuuaaac

SEQ ID NO: 163419 - RNA, 19 nt, Artificial Sequence
  Description of Artificial Sequence: Synthetic oligonucleotide
  Antisense strand to SEQ ID NO: 163418
guuuaaaguaccaauuucc

SEQ ID NO: 163420 - RNA, 19 nt, Artificial Sequence
  Description of Artificial Sequence: Synthetic oligonucleotide
  Sense strand starting at position 647 of SEQ ID NO: 2103
auaacagacgccuguauaa

SEQ ID NO: 163421 - RNA, 19 nt, Artificial Sequence
  Description of Artificial Sequence: Synthetic oligonucleotide
  Antisense strand to SEQ ID NO: 163420
uuauacaggcgucuguuau

SEQ ID NO: 163422 - RNA, 19 nt, Artificial Sequence
  Description of Artificial Sequence: Synthetic oligonucleotide
  Sense strand starting at position 617 of SEQ ID NO: 2103
agauaucuccaguagcaua

SEQ ID NO: 163423 - RNA, 19 nt, Artificial Sequence
  Description of Artificial Sequence: Synthetic oligonucleotide
  Antisense strand to SEQ ID NO: 163422
uaugcuacuggagauaucu

SEQ ID NO: 163424 - RNA, 19 nt, Artificial Sequence
  Description of Artificial Sequence: Synthetic oligonucleotide
  Sense strand starting at position 576 of SEQ ID NO: 2103
gucuccuuccgacaaguua

SEQ ID NO: 163425 - RNA, 19 nt, Artificial Sequence
  Description of Artificial Sequence: Synthetic oligonucleotide
  Antisense strand to SEQ ID NO: 163424
uaacuugucggaaggagac

SEQ ID NO: 163426 - RNA, 19 nt, Artificial Sequence
  Description of Artificial Sequence: Synthetic oligonucleotide
  Sense strand starting at position 551 of SEQ ID NO: 2103
aggcaauccuauucugcua

SEQ ID NO: 163427 - RNA, 19 nt, Artificial Sequence
  Description of Artificial Sequence: Synthetic oligonucleotide
  Antisense strand to SEQ ID NO: 163426
uagcagaauaggauugccu

SEQ ID NO: 163428 - RNA, 19 nt, Artificial Sequence
  Description of Artificial Sequence: Synthetic oligonucleotide
  Sense strand starting at position 194 of SEQ ID NO: 2103
uguuacauuggccaaauau

SEQ ID NO: 163429 - RNA, 19 nt, Artificial Sequence
  Description of Artificial Sequence: Synthetic oligonucleotide
  Antisense strand to SEQ ID NO: 163428
auauuuggccaauguaaca

SEQ ID NO: 163430 - RNA, 19 nt, Artificial Sequence
  Description of Artificial Sequence: Synthetic oligonucleotide
  Sense strand starting at position 193 of SEQ ID NO: 2103
guguuacauuggccaaaua

SEQ ID NO: 163431 - RNA, 19 nt, Artificial Sequence
  Description of Artificial Sequence: Synthetic oligonucleotide
  Antisense strand to SEQ ID NO: 163430
uauuuggccaauguaacac

SEQ ID NO: 163432 - RNA, 19 nt, Artificial Sequence
  Description of Artificial Sequence: Synthetic oligonucleotide
  Sense strand starting at position 192 of SEQ ID NO: 2103
uguguuacauuggccaaau

SEQ ID NO: 163433 - RNA, 19 nt, Artificial Sequence
  Description of Artificial Sequence: Synthetic oligonucleotide
  Antisense strand to SEQ ID NO: 163432
auuuggccaauguaacaca

SEQ ID NO: 163434 - RNA, 19 nt, Artificial Sequence
  Description of Artificial Sequence: Synthetic oligonucleotide
  Sense strand starting at position 30 of SEQ ID NO: 2103
aaauuacugcgcuaggaag

SEQ ID NO: 163435 - RNA, 19 nt, Artificial Sequence
  Description of Artificial Sequence: Synthetic oligonucleotide
  Antisense strand to SEQ ID NO: 163434
cuuccuagcgcaguaauuu

SEQ ID NO: 163436 - RNA, 19 nt, Artificial Sequence
  Description of Artificial Sequence: Synthetic oligonucleotide
  Sense strand starting at position 28 of SEQ ID NO: 2103
guaaauuacugcgcuagga

SEQ ID NO: 163437 - RNA, 19 nt, Artificial Sequence
  Description of Artificial Sequence: Synthetic oligonucleotide
  Antisense strand to SEQ ID NO: 163436
uccuagcgcaguaauuuac

SEQ ID NO: 163438 - RNA, 19 nt, Artificial Sequence
  Description of Artificial Sequence: Synthetic oligonucleotide
  Sense strand starting at position 3074 of SEQ ID NO: 2104
gcgguuuaggaauguugaa

SEQ ID NO: 163439 - RNA, 19 nt, Artificial Sequence
  Description of Artificial Sequence: Synthetic oligonucleotide
  Antisense strand to SEQ ID NO: 163438
uucaacauuccuaaaccgc

SEQ ID NO: 163440 - RNA, 19 nt, Artificial Sequence
  Description of Artificial Sequence: Synthetic oligonucleotide
  Sense strand starting at position 3068 of SEQ ID NO: 2104
gugccagcgguuuaggaau

SEQ ID NO: 163441 - RNA, 19 nt, Artificial Sequence
  Description of Artificial Sequence: Synthetic oligonucleotide
  Antisense strand to SEQ ID NO: 163440
auuccuaaaccgcuggcac

SEQ ID NO: 163442 - RNA, 19 nt, Artificial Sequence
  Description of Artificial Sequence: Synthetic oligonucleotide
  Sense strand starting at position 2975 of SEQ ID NO: 2104
gguuuagcuuuguuugaac

SEQ ID NO: 163443 - RNA, 19 nt, Artificial Sequence
  Description of Artificial Sequence: Synthetic oligonucleotide
  Antisense strand to SEQ ID NO: 163442
guucaaacaaagcuaaacc

SEQ ID NO: 163444 - RNA, 19 nt, Artificial Sequence
  Description of Artificial Sequence: Synthetic oligonucleotide
  Sense strand starting at position 2974 of SEQ ID NO: 2104
ugguuuagcuuuguuugaa

SEQ ID NO: 163445 - RNA, 19 nt, Artificial Sequence
  Description of Artificial Sequence: Synthetic oligonucleotide
  Antisense strand to SEQ ID NO: 163444
uucaaacaaagcuaaacca

SEQ ID NO: 163446 - RNA, 19 nt, Artificial Sequence
  Description of Artificial Sequence: Synthetic oligonucleotide
  Sense strand starting at position 2973 of SEQ ID NO: 2104
uugguuuagcuuuguuuga

SEQ ID NO: 163447 - RNA, 19 nt, Artificial Sequence
  Description of Artificial Sequence: Synthetic oligonucleotide
  Antisense strand to SEQ ID NO: 163446
ucaaacaaagcuaaaccaa

SEQ ID NO: 163448 - RNA, 19 nt, Artificial Sequence
  Description of Artificial Sequence: Synthetic oligonucleotide
  Sense strand starting at position 2915 of SEQ ID NO: 2104
auugaacugugagauuaca

SEQ ID NO: 163449 - RNA, 19 nt, Artificial Sequence
  Description of Artificial Sequence: Synthetic oligonucleotide
  Antisense strand to SEQ ID NO: 163448
uguaaucucacaguucaau

SEQ ID NO: 163450 - RNA, 19 nt, Artificial Sequence
  Description of Artificial Sequence: Synthetic oligonucleotide
  Sense strand starting at position 2912 of SEQ ID NO: 2104
ccaauugaacugugagauu

SEQ ID NO: 163451 - RNA, 19 nt, Artificial Sequence
  Description of Artificial Sequence: Synthetic oligonucleotide
  Antisense strand to SEQ ID NO: 163450
aaucucacaguucaauugg

SEQ ID NO: 163452 - RNA, 19 nt, Artificial Sequence
  Description of Artificial Sequence: Synthetic oligonucleotide
  Sense strand starting at position 2827 of SEQ ID NO: 2104
cagugagggugggacuaau

SEQ ID NO: 163453 - RNA, 19 nt, Artificial Sequence
  Description of Artificial Sequence: Synthetic oligonucleotide
  Antisense strand to SEQ ID NO: 163452
auuagucccacccucacug

SEQ ID NO: 163454 - RNA, 19 nt, Artificial Sequence
  Description of Artificial Sequence: Synthetic oligonucleotide
  Sense strand starting at position 2805 of SEQ ID NO: 2104
gugucuuuaccauaaccca

SEQ ID NO: 163455 - RNA, 19 nt, Artificial Sequence
  Description of Artificial Sequence: Synthetic oligonucleotide
  Antisense strand to SEQ ID NO: 163454
uggguuaugguaaagacac

SEQ ID NO: 163456 - RNA, 19 nt, Artificial Sequence
  Description of Artificial Sequence: Synthetic oligonucleotide
  Sense strand starting at position 2799 of SEQ ID NO: 2104
guuacugugucuuuaccau

SEQ ID NO: 163457 - RNA, 19 nt, Artificial Sequence
  Description of Artificial Sequence: Synthetic oligonucleotide
  Antisense strand to SEQ ID NO: 163456
augguaaagacacaguaac

SEQ ID NO: 163458 - RNA, 19 nt, Artificial Sequence
  Description of Artificial Sequence: Synthetic oligonucleotide
  Sense strand starting at position 2795 of SEQ ID NO: 2104
cguaguuacugugucuuua

SEQ ID NO: 163459 - RNA, 19 nt, Artificial Sequence
  Description of Artificial Sequence: Synthetic oligonucleotide
  Antisense strand to SEQ ID NO: 163458
uaaagacacaguaacuacg

SEQ ID NO: 163460 - RNA, 19 nt, Artificial Sequence
  Description of Artificial Sequence: Synthetic oligonucleotide
  Sense strand starting at position 2724 of SEQ ID NO: 2104
cuguguaguguccauugaa

SEQ ID NO: 163461 - RNA, 19 nt, Artificial Sequence
  Description of Artificial Sequence: Synthetic oligonucleotide
  Antisense strand to SEQ ID NO: 163460
uucaauggacacuacacag

SEQ ID NO: 163462 - RNA, 19 nt, Artificial Sequence
  Description of Artificial Sequence: Synthetic oligonucleotide
  Sense strand starting at position 2643 of SEQ ID NO: 2104
agagcagucacuugggacu

SEQ ID NO: 163463 - RNA, 19 nt, Artificial Sequence
  Description of Artificial Sequence: Synthetic oligonucleotide
  Antisense strand to SEQ ID NO: 163462
agucccaagugacugcucu

SEQ ID NO: 163464 - RNA, 19 nt, Artificial Sequence
  Description of Artificial Sequence: Synthetic oligonucleotide
  Sense strand starting at position 2346 of SEQ ID NO: 2104
gaaaucuucgcggagagug

SEQ ID NO: 163465 - RNA, 19 nt, Artificial Sequence
  Description of Artificial Sequence: Synthetic oligonucleotide
  Antisense strand to SEQ ID NO: 163464
cacucuccgcgaagauuuc

SEQ ID NO: 163466 - RNA, 19 nt, Artificial Sequence
  Description of Artificial Sequence: Synthetic oligonucleotide
  Sense strand starting at position 2345 of SEQ ID NO: 2104
agaaaucuucgcggagagu

SEQ ID NO: 163467 - RNA, 19 nt, Artificial Sequence
  Description of Artificial Sequence: Synthetic oligonucleotide
  Antisense strand to SEQ ID NO: 163466
acucuccgcgaagauuucu

SEQ ID NO: 163468 - RNA, 19 nt, Artificial Sequence
  Description of Artificial Sequence: Synthetic oligonucleotide
  Sense strand starting at position 2344 of SEQ ID NO: 2104
gagaaaucuucgcggagag

SEQ ID NO: 163469 - RNA, 19 nt, Artificial Sequence
  Description of Artificial Sequence: Synthetic oligonucleotide
  Antisense strand to SEQ ID NO: 163468
cucuccgcgaagauuucuc

SEQ ID NO: 163470 - RNA, 19 nt, Artificial Sequence
  Description of Artificial Sequence: Synthetic oligonucleotide
  Sense strand starting at position 2343 of SEQ ID NO: 2104
ggagaaaucuucgcggaga

SEQ ID NO: 163471 - RNA, 19 nt, Artificial Sequence
  Description of Artificial Sequence: Synthetic oligonucleotide
  Antisense strand to SEQ ID NO: 163470
ucuccgcgaagauuucucc

SEQ ID NO: 163472 - RNA, 19 nt, Artificial Sequence
  Description of Artificial Sequence: Synthetic oligonucleotide
  Sense strand starting at position 2259 of SEQ ID NO: 2104
cggaggcgucuuugggaaa

SEQ ID NO: 163473 - RNA, 19 nt, Artificial Sequence
  Description of Artificial Sequence: Synthetic oligonucleotide
  Antisense strand to SEQ ID NO: 163472
uuucccaaagacgccuccg

SEQ ID NO: 163474 - RNA, 19 nt, Artificial Sequence
  Description of Artificial Sequence: Synthetic oligonucleotide
  Sense strand starting at position 1198 of SEQ ID NO: 2104
ucgauuuccugacaacccu

SEQ ID NO: 163475 - RNA, 19 nt, Artificial Sequence
  Description of Artificial Sequence: Synthetic oligonucleotide
  Antisense strand to SEQ ID NO: 163474
aggguugucaggaaaucga

SEQ ID NO: 163476 - RNA, 19 nt, Artificial Sequence
  Description of Artificial Sequence: Synthetic oligonucleotide
  Sense strand starting at position 255 of SEQ ID NO: 2104
uacagacuggaguguuuaa

SEQ ID NO: 163477 - RNA, 19 nt, Artificial Sequence
  Description of Artificial Sequence: Synthetic oligonucleotide
  Antisense strand to SEQ ID NO: 163476
uuaaacacuccagucugua

SEQ ID NO: 163478 - RNA, 19 nt, Artificial Sequence
  Description of Artificial Sequence: Synthetic oligonucleotide
  Sense strand starting at position 240 of SEQ ID NO: 2104
accaguuucugaugcuaca

SEQ ID NO: 163479 - RNA, 19 nt, Artificial Sequence
  Description of Artificial Sequence: Synthetic oligonucleotide
  Antisense strand to SEQ ID NO: 163478
uguagcaucagaaacuggu

SEQ ID NO: 163480 - RNA, 19 nt, Artificial Sequence
  Description of Artificial Sequence: Synthetic oligonucleotide
  Sense strand starting at position 238 of SEQ ID NO: 2104
ugaccaguuucugaugcua

SEQ ID NO: 163481 - RNA, 19 nt, Artificial Sequence
  Description of Artificial Sequence: Synthetic oligonucleotide
  Antisense strand to SEQ ID NO: 163480
uagcaucagaaacugguca

SEQ ID NO: 163482 - RNA, 19 nt, Artificial Sequence
  Description of Artificial Sequence: Synthetic oligonucleotide
  Sense strand starting at position 58 of SEQ ID NO: 2105
agcaauauccuugguuaau

SEQ ID NO: 163483 - RNA, 19 nt, Artificial Sequence
  Description of Artificial Sequence: Synthetic oligonucleotide
  Antisense strand to SEQ ID NO: 163482
auuaaccaaggauauugcu

SEQ ID NO: 163484 - RNA, 19 nt, Artificial Sequence
  Description of Artificial Sequence: Synthetic oligonucleotide
  Sense strand starting at position 59 of SEQ ID NO: 2105
gcaauauccuugguuaaug

SEQ ID NO: 163485 - RNA, 19 nt, Artificial Sequence
  Description of Artificial Sequence: Synthetic oligonucleotide
  Antisense strand to SEQ ID NO: 163484
cauuaaccaaggauauugc

SEQ ID NO: 163486 - RNA, 19 nt, Artificial Sequence
  Description of Artificial Sequence: Synthetic oligonucleotide
  Sense strand starting at position 88 of SEQ ID NO: 2105
guauauucugaauggaagu

SEQ ID NO: 163487 - RNA, 19 nt, Artificial Sequence
  Description of Artificial Sequence: Synthetic oligonucleotide
  Antisense strand to SEQ ID NO: 163486
acuuccauucagaauauac

SEQ ID NO: 163488 - RNA, 19 nt, Artificial Sequence
  Description of Artificial Sequence: Synthetic oligonucleotide
  Sense strand starting at position 379 of SEQ ID NO: 2105
agaacugagugaccuguau

SEQ ID NO: 163489 - RNA, 19 nt, Artificial Sequence
  Description of Artificial Sequence: Synthetic oligonucleotide
  Antisense strand to SEQ ID NO: 163488
auacaggucacucaguucu

SEQ ID NO: 163490 - RNA, 19 nt, Artificial Sequence
  Description of Artificial Sequence: Synthetic oligonucleotide
  Sense strand starting at position 383 of SEQ ID NO: 2105
cugagugaccuguauauua

SEQ ID NO: 163491 - RNA, 19 nt, Artificial Sequence
  Description of Artificial Sequence: Synthetic oligonucleotide
  Antisense strand to SEQ ID NO: 163490
uaauauacaggucacucag

SEQ ID NO: 163492 - RNA, 19 nt, Artificial Sequence
  Description of Artificial Sequence: Synthetic oligonucleotide
  Sense strand starting at position 385 of SEQ ID NO: 2105
gagugaccuguauauuagu

SEQ ID NO: 163493 - RNA, 19 nt, Artificial Sequence
  Description of Artificial Sequence: Synthetic oligonucleotide
  Antisense strand to SEQ ID NO: 163492
acuaauauacaggucacuc

SEQ ID NO: 163494 - RNA, 19 nt, Artificial Sequence
  Description of Artificial Sequence: Synthetic oligonucleotide
  Sense strand starting at position 416 of SEQ ID NO: 2105
gcucuuaucgguuaagaua

SEQ ID NO: 163495 - RNA, 19 nt, Artificial Sequence
  Description of Artificial Sequence: Synthetic oligonucleotide
  Antisense strand to SEQ ID NO: 163494
uaucuuaaccgauaagagc

SEQ ID NO: 163496 - RNA, 19 nt, Artificial Sequence
  Description of Artificial Sequence: Synthetic oligonucleotide
  Sense strand starting at position 699 of SEQ ID NO: 2105
ugucaagguguuuacucau

SEQ ID NO: 163497 - RNA, 19 nt, Artificial Sequence
  Description of Artificial Sequence: Synthetic oligonucleotide
  Antisense strand to SEQ ID NO: 163496
augaguaaacaccuugaca

SEQ ID NO: 163498 - RNA, 19 nt, Artificial Sequence
  Description of Artificial Sequence: Synthetic oligonucleotide
  Sense strand starting at position 762 of SEQ ID NO: 2105
ucagaagagcuguaguaua

SEQ ID NO: 163499 - RNA, 19 nt, Artificial Sequence
  Description of Artificial Sequence: Synthetic oligonucleotide
  Antisense strand to SEQ ID NO: 163498
uauacuacagcucuucuga

SEQ ID NO: 163500 - RNA, 19 nt, Artificial Sequence
  Description of Artificial Sequence: Synthetic oligonucleotide
  Sense strand starting at position 770 of SEQ ID NO: 2105
gcuguaguauauuuacgua

SEQ ID NO: 163501 - RNA, 19 nt, Artificial Sequence
  Description of Artificial Sequence: Synthetic oligonucleotide
  Antisense strand to SEQ ID NO: 163500
uacguaaauauacuacagc

SEQ ID NO: 163502 - RNA, 19 nt, Artificial Sequence
  Description of Artificial Sequence: Synthetic oligonucleotide
  Sense strand starting at position 803 of SEQ ID NO: 2105
auagcuucuguuuagguua

SEQ ID NO: 163503 - RNA, 19 nt, Artificial Sequence
  Description of Artificial Sequence: Synthetic oligonucleotide
  Antisense strand to SEQ ID NO: 163502
uaaccuaaacagaagcuau

SEQ ID NO: 163504 - RNA, 19 nt, Artificial Sequence
  Description of Artificial Sequence: Synthetic oligonucleotide
  Sense strand starting at position 872 of SEQ ID NO: 2105
gcuagcauuuaaguucuau

SEQ ID NO: 163505 - RNA, 19 nt, Artificial Sequence
  Description of Artificial Sequence: Synthetic oligonucleotide
  Antisense strand to SEQ ID NO: 163504
auagaacuuaaaugcuagc

SEQ ID NO: 163506 - RNA, 19 nt, Artificial Sequence
  Description of Artificial Sequence: Synthetic oligonucleotide
  Sense strand starting at position 898 of SEQ ID NO: 2105
auuauauuggacugaucau

SEQ ID NO: 163507 - RNA, 19 nt, Artificial Sequence
  Description of Artificial Sequence: Synthetic oligonucleotide
  Antisense strand to SEQ ID NO: 163506
augaucaguccaauauaau

SEQ ID NO: 163508 - RNA, 19 nt, Artificial Sequence
  Description of Artificial Sequence: Synthetic oligonucleotide
  Sense strand starting at position 905 of SEQ ID NO: 2105
uggacugaucauggagcaa

SEQ ID NO: 163509 - RNA, 19 nt, Artificial Sequence
  Description of Artificial Sequence: Synthetic oligonucleotide
  Antisense strand to SEQ ID NO: 163508
uugcuccaugaucagucca

SEQ ID NO: 163510 - RNA, 19 nt, Artificial Sequence
  Description of Artificial Sequence: Synthetic oligonucleotide
  Sense strand starting at position 1003 of SEQ ID NO: 2105
uugagaagugcuuauuauu

SEQ ID NO: 163511 - RNA, 19 nt, Artificial Sequence
  Description of Artificial Sequence: Synthetic oligonucleotide
  Antisense strand to SEQ ID NO: 163510
aauaauaagcacuucucaa

SEQ ID NO: 163512 - RNA, 19 nt, Artificial Sequence
  Description of Artificial Sequence: Synthetic oligonucleotide
  Sense strand starting at position 1044 of SEQ ID NO: 2105
uuaagaauggcuugcaauu

SEQ ID NO: 163513 - RNA, 19 nt, Artificial Sequence
  Description of Artificial Sequence: Synthetic oligonucleotide
  Antisense strand to SEQ ID NO: 163512
aauugcaagccauucuuaa

SEQ ID NO: 163514 - RNA, 19 nt, Artificial Sequence
  Description of Artificial Sequence: Synthetic oligonucleotide
  Sense strand starting at position 1053 of SEQ ID NO: 2105
gcuugcaauuaauuuaguu

SEQ ID NO: 163515 - RNA, 19 nt, Artificial Sequence
  Description of Artificial Sequence: Synthetic oligonucleotide
  Antisense strand to SEQ ID NO: 163514
aacuaaauuaauugcaagc

SEQ ID NO: 163516 - RNA, 19 nt, Artificial Sequence
  Description of Artificial Sequence: Synthetic oligonucleotide
  Sense strand starting at position 1217 of SEQ ID NO: 2105
auuagcaugucugcaauuu

SEQ ID NO: 163517 - RNA, 19 nt, Artificial Sequence
  Description of Artificial Sequence: Synthetic oligonucleotide
  Antisense strand to SEQ ID NO: 163516
aaauugcagacaugcuaau

SEQ ID NO: 163518 - RNA, 19 nt, Artificial Sequence
  Description of Artificial Sequence: Synthetic oligonucleotide
  Sense strand starting at position 1475 of SEQ ID NO: 2105
cuggcauggcuauagaauu

SEQ ID NO: 163519 - RNA, 19 nt, Artificial Sequence
  Description of Artificial Sequence: Synthetic oligonucleotide
  Antisense strand to SEQ ID NO: 163518
aauucuauagccaugccag

SEQ ID NO: 163520 - RNA, 19 nt, Artificial Sequence
  Description of Artificial Sequence: Synthetic oligonucleotide
  Sense strand starting at position 1593 of SEQ ID NO: 2105
uggugcugcacagacauaa

SEQ ID NO: 163521 - RNA, 19 nt, Artificial Sequence
  Description of Artificial Sequence: Synthetic oligonucleotide
  Antisense strand to SEQ ID NO: 163520
uuaugucugugcagcacca

SEQ ID NO: 163522 - RNA, 19 nt, Artificial Sequence
  Description of Artificial Sequence: Synthetic oligonucleotide
  Sense strand starting at position 1603 of SEQ ID NO: 2105
cagacauaagcucaagguu

SEQ ID NO: 163523 - RNA, 19 nt, Artificial Sequence
  Description of Artificial Sequence: Synthetic oligonucleotide
  Antisense strand to SEQ ID NO: 163522
aaccuugagcuuaugucug

SEQ ID NO: 163524 - RNA, 19 nt, Artificial Sequence
  Description of Artificial Sequence: Synthetic oligonucleotide
  Sense strand starting at position 1606 of SEQ ID NO: 2105
acauaagcucaagguuauu

SEQ ID NO: 163525 - RNA, 19 nt, Artificial Sequence
  Description of Artificial Sequence: Synthetic oligonucleotide
  Antisense strand to SEQ ID NO: 163524
aauaaccuugagcuuaugu

SEQ ID NO: 163526 - RNA, 19 nt, Artificial Sequence
  Description of Artificial Sequence: Synthetic oligonucleotide
  Sense strand starting at position 1678 of SEQ ID NO: 2105
uuauuaauguuccugggaa

SEQ ID NO: 163527 - RNA, 19 nt, Artificial Sequence
  Description of Artificial Sequence: Synthetic oligonucleotide
  Antisense strand to SEQ ID NO: 163526
uucccaggaacauuaauaa

SEQ ID NO: 163528 - RNA, 19 nt, Artificial Sequence
  Description of Artificial Sequence: Synthetic oligonucleotide
  Sense strand starting at position 1680 of SEQ ID NO: 2105
auuaauguuccugggaaag

SEQ ID NO: 163529 - RNA, 19 nt, Artificial Sequence
  Description of Artificial Sequence: Synthetic oligonucleotide
  Antisense strand to SEQ ID NO: 163528
cuuucccaggaacauuaau

SEQ ID NO: 163530 - RNA, 19 nt, Artificial Sequence
  Description of Artificial Sequence: Synthetic oligonucleotide
  Sense strand starting at position 1691 of SEQ ID NO: 2105
ugggaaagauaguauagaa

SEQ ID NO: 163531 - RNA, 19 nt, Artificial Sequence
  Description of Artificial Sequence: Synthetic oligonucleotide
  Antisense strand to SEQ ID NO: 163530
uucuauacuaucuuuccca

SEQ ID NO: 163532 - RNA, 19 nt, Artificial Sequence
  Description of Artificial Sequence: Synthetic oligonucleotide
  Sense strand starting at position 1762 of SEQ ID NO: 2105
agaaauauguacuuacggu

SEQ ID NO: 163533 - RNA, 19 nt, Artificial Sequence
  Description of Artificial Sequence: Synthetic oligonucleotide
  Antisense strand to SEQ ID NO: 163532
accguaaguacauauuucu

SEQ ID NO: 163534 - RNA, 19 nt, Artificial Sequence
  Description of Artificial Sequence: Synthetic oligonucleotide
  Sense strand starting at position 1775 of SEQ ID NO: 2105
uacgguuuccuuuggaaau

SEQ ID NO: 163535 - RNA, 19 nt, Artificial Sequence
  Description of Artificial Sequence: Synthetic oligonucleotide
  Antisense strand to SEQ ID NO: 163534
auuuccaaaggaaaccgua

SEQ ID NO: 163536 - RNA, 19 nt, Artificial Sequence
  Description of Artificial Sequence: Synthetic oligonucleotide
  Sense strand starting at position 1812 of SEQ ID NO: 2105
gguuuagaaccuggcaaga

SEQ ID NO: 163537 - RNA, 19 nt, Artificial Sequence
  Description of Artificial Sequence: Synthetic oligonucleotide
  Antisense strand to SEQ ID NO: 163536
ucuugccagguucuaaacc

SEQ ID NO: 163538 - RNA, 19 nt, Artificial Sequence
  Description of Artificial Sequence: Synthetic oligonucleotide
  Sense strand starting at position 1977 of SEQ ID NO: 2105
ucgacauuaucuuuagaag

SEQ ID NO: 163539 - RNA, 19 nt, Artificial Sequence
  Description of Artificial Sequence: Synthetic oligonucleotide
  Antisense strand to SEQ ID NO: 163538
cuucuaaagauaaugucga

SEQ ID NO: 163540 - RNA, 19 nt, Artificial Sequence
  Description of Artificial Sequence: Synthetic oligonucleotide
  Sense strand starting at position 2200 of SEQ ID NO: 2105
ucuuuaagucaacgaauua

SEQ ID NO: 163541 - RNA, 19 nt, Artificial Sequence
  Description of Artificial Sequence: Synthetic oligonucleotide
  Antisense strand to SEQ ID NO: 163540
uaauucguugacuuaaaga

SEQ ID NO: 163542 - RNA, 19 nt, Artificial Sequence
  Description of Artificial Sequence: Synthetic oligonucleotide
  Sense strand starting at position 2461 of SEQ ID NO: 2105
auccuacuguauguauuaa

SEQ ID NO: 163543 - RNA, 19 nt, Artificial Sequence
  Description of Artificial Sequence: Synthetic oligonucleotide
  Antisense strand to SEQ ID NO: 163542
uuaauacauacaguaggau

SEQ ID NO: 163544 - RNA, 19 nt, Artificial Sequence
  Description of Artificial Sequence: Synthetic oligonucleotide
  Sense strand starting at position 2510 of SEQ ID NO: 2105
uuuccauaggcauaguuau

SEQ ID NO: 163545 - RNA, 19 nt, Artificial Sequence
  Description of Artificial Sequence: Synthetic oligonucleotide
  Antisense strand to SEQ ID NO: 163544
auaacuaugccuauggaaa

SEQ ID NO: 163546 - RNA, 19 nt, Artificial Sequence
  Description of Artificial Sequence: Synthetic oligonucleotide
  Sense strand starting at position 2638 of SEQ ID NO: 2105
guaaaugcagcuugaauaa

SEQ ID NO: 163547 - RNA, 19 nt, Artificial Sequence
  Description of Artificial Sequence: Synthetic oligonucleotide
  Antisense strand to SEQ ID NO: 163546
uuauucaagcugcauuuac

SEQ ID NO: 163548 - RNA, 19 nt, Artificial Sequence
  Description of Artificial Sequence: Synthetic oligonucleotide
  Sense strand starting at position 2737 of SEQ ID NO: 2105
cugagaguccuuuacauuc

SEQ ID NO: 163549 - RNA, 19 nt, Artificial Sequence
  Description of Artificial Sequence: Synthetic oligonucleotide
  Antisense strand to SEQ ID NO: 163548
gaauguaaaggacucucag

SEQ ID NO: 163550 - RNA, 19 nt, Artificial Sequence
  Description of Artificial Sequence: Synthetic oligonucleotide
  Sense strand starting at position 2874 of SEQ ID NO: 2105
gaauauuugucugaaguug

SEQ ID NO: 163551 - RNA, 19 nt, Artificial Sequence
  Description of Artificial Sequence: Synthetic oligonucleotide
  Antisense strand to SEQ ID NO: 163550
caacuucagacaaauauuc

SEQ ID NO: 163552 - RNA, 19 nt, Artificial Sequence
  Description of Artificial Sequence: Synthetic oligonucleotide
  Sense strand starting at position 2879 of SEQ ID NO: 2105
uuugucugaaguugggaua

SEQ ID NO: 163553 - RNA, 19 nt, Artificial Sequence
  Description of Artificial Sequence: Synthetic oligonucleotide
  Antisense strand to SEQ ID NO: 163552
uaucccaacuucagacaaa

SEQ ID NO: 163554 - RNA, 19 nt, Artificial Sequence
  Description of Artificial Sequence: Synthetic oligonucleotide
  Sense strand starting at position 2880 of SEQ ID NO: 2105
uugucugaaguugggauaa

SEQ ID NO: 163555 - RNA, 19 nt, Artificial Sequence
  Description of Artificial Sequence: Synthetic oligonucleotide
  Antisense strand to SEQ ID NO: 163554
uuaucccaacuucagacaa

SEQ ID NO: 163556 - RNA, 19 nt, Artificial Sequence
  Description of Artificial Sequence: Synthetic oligonucleotide
  Sense strand starting at position 3022 of SEQ ID NO: 2105
acccgucuuuaugugagaa

SEQ ID NO: 163557 - RNA, 19 nt, Artificial Sequence
  Description of Artificial Sequence: Synthetic oligonucleotide
  Antisense strand to SEQ ID NO: 163556
uucucacauaaagacgggu

SEQ ID NO: 163558 - RNA, 19 nt, Artificial Sequence
  Description of Artificial Sequence: Synthetic oligonucleotide
  Sense strand starting at position 3230 of SEQ ID NO: 2105
augugauaaccuugugacc

SEQ ID NO: 163559 - RNA, 19 nt, Artificial Sequence
  Description of Artificial Sequence: Synthetic oligonucleotide
  Antisense strand to SEQ ID NO: 163558
ggucacaagguuaucacau

SEQ ID NO: 163560 - RNA, 19 nt, Artificial Sequence
  Description of Artificial Sequence: Synthetic oligonucleotide
  Sense strand starting at position 3751 of SEQ ID NO: 2105
gaaugccuaucagugaaag

SEQ ID NO: 163561 - RNA, 19 nt, Artificial Sequence
  Description of Artificial Sequence: Synthetic oligonucleotide
  Antisense strand to SEQ ID NO: 163560
cuuucacugauaggcauuc

SEQ ID NO: 163562 - RNA, 19 nt, Artificial Sequence
  Description of Artificial Sequence: Synthetic oligonucleotide
  Sense strand starting at position 78 of SEQ ID NO: 2107
guggccuauuguuuacaaa

SEQ ID NO: 163563 - RNA, 19 nt, Artificial Sequence
  Description of Artificial Sequence: Synthetic oligonucleotide
  Antisense strand to SEQ ID NO: 163562
uuuguaaacaauaggccac

SEQ ID NO: 163564 - RNA, 19 nt, Artificial Sequence
  Description of Artificial Sequence: Synthetic oligonucleotide
  Sense strand starting at position 430 of SEQ ID NO: 2107
caaguccucucugauagga

SEQ ID NO: 163565 - RNA, 19 nt, Artificial Sequence
  Description of Artificial Sequence: Synthetic oligonucleotide
  Antisense strand to SEQ ID NO: 163564
uccuaucagagaggacuug

SEQ ID NO: 163566 - RNA, 19 nt, Artificial Sequence
  Description of Artificial Sequence: Synthetic oligonucleotide
  Sense strand starting at position 432 of SEQ ID NO: 2107
aguccucucugauaggaaa

SEQ ID NO: 163567 - RNA, 19 nt, Artificial Sequence
  Description of Artificial Sequence: Synthetic oligonucleotide
  Antisense strand to SEQ ID NO: 163566
uuuccuaucagagaggacu

SEQ ID NO: 163568 - RNA, 19 nt, Artificial Sequence
  Description of Artificial Sequence: Synthetic oligonucleotide
  Sense strand starting at position 526 of SEQ ID NO: 2107
ccaaccaugugguguaaca

SEQ ID NO: 163569 - RNA, 19 nt, Artificial Sequence
  Description of Artificial Sequence: Synthetic oligonucleotide
  Antisense strand to SEQ ID NO: 163568
uguuacaccacaugguugg

SEQ ID NO: 163570 - RNA, 19 nt, Artificial Sequence
  Description of Artificial Sequence: Synthetic oligonucleotide
  Sense strand starting at position 528 of SEQ ID NO: 2107
aaccaugugguguaacauu

SEQ ID NO: 163571 - RNA, 19 nt, Artificial Sequence
  Description of Artificial Sequence: Synthetic oligonucleotide
  Antisense strand to SEQ ID NO: 163570
aauguuacaccacaugguu

SEQ ID NO: 163572 - RNA, 19 nt, Artificial Sequence
  Description of Artificial Sequence: Synthetic oligonucleotide
  Sense strand starting at position 604 of SEQ ID NO: 2107
ggcucuuuccagugacuga

SEQ ID NO: 163573 - RNA, 19 nt, Artificial Sequence
  Description of Artificial Sequence: Synthetic oligonucleotide
  Antisense strand to SEQ ID NO: 163572
ucagucacuggaaagagcc

SEQ ID NO: 163574 - RNA, 19 nt, Artificial Sequence
  Description of Artificial Sequence: Synthetic oligonucleotide
  Sense strand starting at position 630 of SEQ ID NO: 2107
aggacagugccuugcacaa

SEQ ID NO: 163575 - RNA, 19 nt, Artificial Sequence
  Description of Artificial Sequence: Synthetic oligonucleotide
  Antisense strand to SEQ ID NO: 163574
uugugcaaggcacuguccu

SEQ ID NO: 163576 - RNA, 19 nt, Artificial Sequence
  Description of Artificial Sequence: Synthetic oligonucleotide
  Sense strand starting at position 688 of SEQ ID NO: 2107
augggaauugcugguuuaa

SEQ ID NO: 163577 - RNA, 19 nt, Artificial Sequence
  Description of Artificial Sequence: Synthetic oligonucleotide
  Antisense strand to SEQ ID NO: 163576
uuaaaccagcaauucccau

SEQ ID NO: 163578 - RNA, 19 nt, Artificial Sequence
  Description of Artificial Sequence: Synthetic oligonucleotide
  Sense strand starting at position 744 of SEQ ID NO: 2107
aagucagucgacuagauga

SEQ ID NO: 163579 - RNA, 19 nt, Artificial Sequence
  Description of Artificial Sequence: Synthetic oligonucleotide
  Antisense strand to SEQ ID NO: 163578
ucaucuagucgacugacuu

SEQ ID NO: 163580 - RNA, 19 nt, Artificial Sequence
  Description of Artificial Sequence: Synthetic oligonucleotide
  Sense strand starting at position 746 of SEQ ID NO: 2107
gucagucgacuagaugaga

SEQ ID NO: 163581 - RNA, 19 nt, Artificial Sequence
  Description of Artificial Sequence: Synthetic oligonucleotide
  Antisense strand to SEQ ID NO: 163580
ucucaucuagucgacugac

SEQ ID NO: 163582 - RNA, 19 nt, Artificial Sequence
  Description of Artificial Sequence: Synthetic oligonucleotide
  Sense strand starting at position 775 of SEQ ID NO: 2107
cuugguuucuccuagucca

SEQ ID NO: 163583 - RNA, 19 nt, Artificial Sequence
  Description of Artificial Sequence: Synthetic oligonucleotide
  Antisense strand to SEQ ID NO: 163582
uggacuaggagaaaccaag

SEQ ID NO: 163584 - RNA, 19 nt, Artificial Sequence
  Description of Artificial Sequence: Synthetic oligonucleotide
  Sense strand starting at position 846 of SEQ ID NO: 2107
gcaugucuuccggagcaga

SEQ ID NO: 163585 - RNA, 19 nt, Artificial Sequence
  Description of Artificial Sequence: Synthetic oligonucleotide
  Antisense strand to SEQ ID NO: 163584
ucugcuccggaagacaugc

SEQ ID NO: 163586 - RNA, 19 nt, Artificial Sequence
  Description of Artificial Sequence: Synthetic oligonucleotide
  Sense strand starting at position 990 of SEQ ID NO: 2107
ggccuuauucucugaucuc

SEQ ID NO: 163587 - RNA, 19 nt, Artificial Sequence
  Description of Artificial Sequence: Synthetic oligonucleotide
  Antisense strand to SEQ ID NO: 163586
gagaucagagaauaaggcc

SEQ ID NO: 163588 - RNA, 19 nt, Artificial Sequence
  Description of Artificial Sequence: Synthetic oligonucleotide
  Sense strand starting at position 997 of SEQ ID NO: 2107
uucucugaucucugauugu

SEQ ID NO: 163589 - RNA, 19 nt, Artificial Sequence
  Description of Artificial Sequence: Synthetic oligonucleotide
  Antisense strand to SEQ ID NO: 163588
acaaucagagaucagagaa

SEQ ID NO: 163590 - RNA, 19 nt, Artificial Sequence
  Description of Artificial Sequence: Synthetic oligonucleotide
  Sense strand starting at position 1000 of SEQ ID NO: 2107
ucugaucucugauuguaug

SEQ ID NO: 163591 - RNA, 19 nt, Artificial Sequence
  Description of Artificial Sequence: Synthetic oligonucleotide
  Antisense strand to SEQ ID NO: 163590
cauacaaucagagaucaga

SEQ ID NO: 163592 - RNA, 19 nt, Artificial Sequence
  Description of Artificial Sequence: Synthetic oligonucleotide
  Sense strand starting at position 1078 of SEQ ID NO: 2107
ugccaaugccauugcaaau

SEQ ID NO: 163593 - RNA, 19 nt, Artificial Sequence
  Description of Artificial Sequence: Synthetic oligonucleotide
  Antisense strand to SEQ ID NO: 163592
auuugcaauggcauuggca

SEQ ID NO: 163594 - RNA, 19 nt, Artificial Sequence
  Description of Artificial Sequence: Synthetic oligonucleotide
  Sense strand starting at position 1392 of SEQ ID NO: 2107
auuccuuuccagugucaau

SEQ ID NO: 163595 - RNA, 19 nt, Artificial Sequence
  Description of Artificial Sequence: Synthetic oligonucleotide
  Antisense strand to SEQ ID NO: 163594
auugacacuggaaaggaau

SEQ ID NO: 163596 - RNA, 19 nt, Artificial Sequence
  Description of Artificial Sequence: Synthetic oligonucleotide
  Sense strand starting at position 1514 of SEQ ID NO: 2107
ugcaaaucacgguggaaau

SEQ ID NO: 163597 - RNA, 19 nt, Artificial Sequence
  Description of Artificial Sequence: Synthetic oligonucleotide
  Antisense strand to SEQ ID NO: 163596
auuuccaccgugauuugca

SEQ ID NO: 163598 - RNA, 19 nt, Artificial Sequence
  Description of Artificial Sequence: Synthetic oligonucleotide
  Sense strand starting at position 1515 of SEQ ID NO: 2107
gcaaaucacgguggaaaua

SEQ ID NO: 163599 - RNA, 19 nt, Artificial Sequence
  Description of Artificial Sequence: Synthetic oligonucleotide
  Antisense strand to SEQ ID NO: 163598
uauuuccaccgugauuugc

SEQ ID NO: 163600 - RNA, 19 nt, Artificial Sequence
  Description of Artificial Sequence: Synthetic oligonucleotide
  Sense strand starting at position 1555 of SEQ ID NO: 2107
gcauuugcagugugcuauu

SEQ ID NO: 163601 - RNA, 19 nt, Artificial Sequence
  Description of Artificial Sequence: Synthetic oligonucleotide
  Antisense strand to SEQ ID NO: 163600
aauagcacacugcaaaugc

SEQ ID NO: 163602 - RNA, 19 nt, Artificial Sequence
  Description of Artificial Sequence: Synthetic oligonucleotide
  Sense strand starting at position 1589 of SEQ ID NO: 2107
cuuugaccugaguaucgua

SEQ ID NO: 163603 - RNA, 19 nt, Artificial Sequence
  Description of Artificial Sequence: Synthetic oligonucleotide
  Antisense strand to SEQ ID NO: 163602
uacgauacucaggucaaag

SEQ ID NO: 163604 - RNA, 19 nt, Artificial Sequence
  Description of Artificial Sequence: Synthetic oligonucleotide
  Sense strand starting at position 1597 of SEQ ID NO: 2107
ugaguaucguacucugcua

SEQ ID NO: 163605 - RNA, 19 nt, Artificial Sequence
  Description of Artificial Sequence: Synthetic oligonucleotide
  Antisense strand to SEQ ID NO: 163604
uagcagaguacgauacuca

SEQ ID NO: 163606 - RNA, 19 nt, Artificial Sequence
  Description of Artificial Sequence: Synthetic oligonucleotide
  Sense strand starting at position 1679 of SEQ ID NO: 2107
cgaauugugaauugauaga

SEQ ID NO: 163607 - RNA, 19 nt, Artificial Sequence
  Description of Artificial Sequence: Synthetic oligonucleotide
  Antisense strand to SEQ ID NO: 163606
ucuaucaauucacaauucg

SEQ ID NO: 163608 - RNA, 19 nt, Artificial Sequence
  Description of Artificial Sequence: Synthetic oligonucleotide
  Sense strand starting at position 1742 of SEQ ID NO: 2107
gcuucucucgagggcagaa

SEQ ID NO: 163609 - RNA, 19 nt, Artificial Sequence
  Description of Artificial Sequence: Synthetic oligonucleotide
  Antisense strand to SEQ ID NO: 163608
uucugcccucgagagaagc

SEQ ID NO: 163610 - RNA, 19 nt, Artificial Sequence
  Description of Artificial Sequence: Synthetic oligonucleotide
  Sense strand starting at position 1905 of SEQ ID NO: 2107
ucagcauuagccgggagaa

SEQ ID NO: 163611 - RNA, 19 nt, Artificial Sequence
  Description of Artificial Sequence: Synthetic oligonucleotide
  Antisense strand to SEQ ID NO: 163610
uucucccggcuaaugcuga

SEQ ID NO: 163612 - RNA, 19 nt, Artificial Sequence
  Description of Artificial Sequence: Synthetic oligonucleotide
  Sense strand starting at position 1906 of SEQ ID NO: 2107
cagcauuagccgggagaac

SEQ ID NO: 163613 - RNA, 19 nt, Artificial Sequence
  Description of Artificial Sequence: Synthetic oligonucleotide
  Antisense strand to SEQ ID NO: 163612
guucucccggcuaaugcug

SEQ ID NO: 163614 - RNA, 19 nt, Artificial Sequence
  Description of Artificial Sequence: Synthetic oligonucleotide
  Sense strand starting at position 1907 of SEQ ID NO: 2107
agcauuagccgggagaacu

SEQ ID NO: 163615 - RNA, 19 nt, Artificial Sequence
  Description of Artificial Sequence: Synthetic oligonucleotide
  Antisense strand to SEQ ID NO: 163614
aguucucccggcuaaugcu

SEQ ID NO: 163616 - RNA, 19 nt, Artificial Sequence
  Description of Artificial Sequence: Synthetic oligonucleotide
  Sense strand starting at position 1950 of SEQ ID NO: 2107
gucugacaucaacgacaca

SEQ ID NO: 163617 - RNA, 19 nt, Artificial Sequence
  Description of Artificial Sequence: Synthetic oligonucleotide
  Antisense strand to SEQ ID NO: 163616
ugugucguugaugucagac

SEQ ID NO: 163618 - RNA, 19 nt, Artificial Sequence
  Description of Artificial Sequence: Synthetic oligonucleotide
  Sense strand starting at position 2104 of SEQ ID NO: 2107
gucguagaggcucaaagau

SEQ ID NO: 163619 - RNA, 19 nt, Artificial Sequence
  Description of Artificial Sequence: Synthetic oligonucleotide
  Antisense strand to SEQ ID NO: 163618
aucuuugagccucuacgac

SEQ ID NO: 163620 - RNA, 19 nt, Artificial Sequence
  Description of Artificial Sequence: Synthetic oligonucleotide
  Sense strand starting at position 2174 of SEQ ID NO: 2107
agucguuugcuccgguuca

SEQ ID NO: 163621 - RNA, 19 nt, Artificial Sequence
  Description of Artificial Sequence: Synthetic oligonucleotide
  Antisense strand to SEQ ID NO: 163620
ugaaccggagcaaacgacu

SEQ ID NO: 163622 - RNA, 19 nt, Artificial Sequence
  Description of Artificial Sequence: Synthetic oligonucleotide
  Sense strand starting at position 2297 of SEQ ID NO: 2107
gcccauuccuguccgcuua

SEQ ID NO: 163623 - RNA, 19 nt, Artificial Sequence
  Description of Artificial Sequence: Synthetic oligonucleotide
  Antisense strand to SEQ ID NO: 163622
uaagcggacaggaaugggc

SEQ ID NO: 163624 - RNA, 19 nt, Artificial Sequence
  Description of Artificial Sequence: Synthetic oligonucleotide
  Sense strand starting at position 2298 of SEQ ID NO: 2107
cccauuccuguccgcuuaa

SEQ ID NO: 163625 - RNA, 19 nt, Artificial Sequence
  Description of Artificial Sequence: Synthetic oligonucleotide
  Antisense strand to SEQ ID NO: 163624
uuaagcggacaggaauggg

SEQ ID NO: 163626 - RNA, 19 nt, Artificial Sequence
  Description of Artificial Sequence: Synthetic oligonucleotide
  Sense strand starting at position 2871 of SEQ ID NO: 2107
ggacgauagugacuauaaa

SEQ ID NO: 163627 - RNA, 19 nt, Artificial Sequence
  Description of Artificial Sequence: Synthetic oligonucleotide
  Antisense strand to SEQ ID NO: 163626
uuuauagucacuaucgucc

SEQ ID NO: 163628 - RNA, 19 nt, Artificial Sequence
  Description of Artificial Sequence: Synthetic oligonucleotide
  Sense strand starting at position 3357 of SEQ ID NO: 2107
ggagaaggcugccuuagag

SEQ ID NO: 163629 - RNA, 19 nt, Artificial Sequence
  Description of Artificial Sequence: Synthetic oligonucleotide
  Antisense strand to SEQ ID NO: 163628
cucuaaggcagccuucucc

SEQ ID NO: 163630 - RNA, 19 nt, Artificial Sequence
  Description of Artificial Sequence: Synthetic oligonucleotide
  Sense strand starting at position 3449 of SEQ ID NO: 2107
cgagauguggucuagggau

SEQ ID NO: 163631 - RNA, 19 nt, Artificial Sequence
  Description of Artificial Sequence: Synthetic oligonucleotide
  Antisense strand to SEQ ID NO: 163630
aucccuagaccacaucucg

SEQ ID NO: 163632 - RNA, 19 nt, Artificial Sequence
  Description of Artificial Sequence: Synthetic oligonucleotide
  Sense strand starting at position 3731 of SEQ ID NO: 2107
gacagagucccaggcugua

SEQ ID NO: 163633 - RNA, 19 nt, Artificial Sequence
  Description of Artificial Sequence: Synthetic oligonucleotide
  Antisense strand to SEQ ID NO: 163632
uacagccugggacucuguc

SEQ ID NO: 163634 - RNA, 19 nt, Artificial Sequence
  Description of Artificial Sequence: Synthetic oligonucleotide
  Sense strand starting at position 3767 of SEQ ID NO: 2107
acucgcaguccugagaagu

SEQ ID NO: 163635 - RNA, 19 nt, Artificial Sequence
  Description of Artificial Sequence: Synthetic oligonucleotide
  Antisense strand to SEQ ID NO: 163634
acuucucaggacugcgagu

SEQ ID NO: 163636 - RNA, 19 nt, Artificial Sequence
  Description of Artificial Sequence: Synthetic oligonucleotide
  Sense strand starting at position 3780 of SEQ ID NO: 2107
agaaguauuaugggcugua

SEQ ID NO: 163637 - RNA, 19 nt, Artificial Sequence
  Description of Artificial Sequence: Synthetic oligonucleotide
  Antisense strand to SEQ ID NO: 163636
uacagcccauaauacuucu

SEQ ID NO: 163638 - RNA, 19 nt, Artificial Sequence
  Description of Artificial Sequence: Synthetic oligonucleotide
  Sense strand starting at position 3781 of SEQ ID NO: 2107
gaaguauuaugggcuguac

SEQ ID NO: 163639 - RNA, 19 nt, Artificial Sequence
  Description of Artificial Sequence: Synthetic oligonucleotide
  Antisense strand to SEQ ID NO: 163638
guacagcccauaauacuuc

SEQ ID NO: 163640 - RNA, 19 nt, Artificial Sequence
  Description of Artificial Sequence: Synthetic oligonucleotide
  Sense strand starting at position 3790 of SEQ ID NO: 2107
ugggcuguacugggagauu

SEQ ID NO: 163641 - RNA, 19 nt, Artificial Sequence
  Description of Artificial Sequence: Synthetic oligonucleotide
  Antisense strand to SEQ ID NO: 163640
aaucucccaguacagccca

SEQ ID NO: 163642 - RNA, 19 nt, Artificial Sequence
  Description of Artificial Sequence: Synthetic oligonucleotide
  Sense strand starting at position 3087 of SEQ ID NO: 2108
ggaugcuuagcccgagauc

SEQ ID NO: 163643 - RNA, 19 nt, Artificial Sequence
  Description of Artificial Sequence: Synthetic oligonucleotide
  Antisense strand to SEQ ID NO: 163642
gaucucgggcuaagcaucc

SEQ ID NO: 163644 - RNA, 19 nt, Artificial Sequence
  Description of Artificial Sequence: Synthetic oligonucleotide
  Sense strand starting at position 2455 of SEQ ID NO: 2108
gggcgugucuugccacuuu

SEQ ID NO: 163645 - RNA, 19 nt, Artificial Sequence
  Description of Artificial Sequence: Synthetic oligonucleotide
  Antisense strand to SEQ ID NO: 163644
aaaguggcaagacacgccc

SEQ ID NO: 163646 - RNA, 19 nt, Artificial Sequence
  Description of Artificial Sequence: Synthetic oligonucleotide
  Sense strand starting at position 2425 of SEQ ID NO: 2108
uguagucccucuuccaaua

SEQ ID NO: 163647 - RNA, 19 nt, Artificial Sequence
  Description of Artificial Sequence: Synthetic oligonucleotide
  Antisense strand to SEQ ID NO: 163646
uauuggaagagggacuaca

SEQ ID NO: 163648 - RNA, 19 nt, Artificial Sequence
  Description of Artificial Sequence: Synthetic oligonucleotide
  Sense strand starting at position 91 of SEQ ID NO: 2109
acugaucugucgucuacca

SEQ ID NO: 163649 - RNA, 19 nt, Artificial Sequence
  Description of Artificial Sequence: Synthetic oligonucleotide
  Antisense strand to SEQ ID NO: 163648
ugguagacgacagaucagu

SEQ ID NO: 163650 - RNA, 19 nt, Artificial Sequence
  Description of Artificial Sequence: Synthetic oligonucleotide
  Sense strand starting at position 93 of SEQ ID NO: 2109
ugaucugucgucuaccacu

SEQ ID NO: 163651 - RNA, 19 nt, Artificial Sequence
  Description of Artificial Sequence: Synthetic oligonucleotide
  Antisense strand to SEQ ID NO: 163650
agugguagacgacagauca

SEQ ID NO: 163652 - RNA, 19 nt, Artificial Sequence
  Description of Artificial Sequence: Synthetic oligonucleotide
  Sense strand starting at position 1087 of SEQ ID NO: 2109
gcuagcacuuucucugaca

SEQ ID NO: 163653 - RNA, 19 nt, Artificial Sequence
  Description of Artificial Sequence: Synthetic oligonucleotide
  Antisense strand to SEQ ID NO: 163652
ugucagagaaagugcuagc

SEQ ID NO: 163654 - RNA, 19 nt, Artificial Sequence
  Description of Artificial Sequence: Synthetic oligonucleotide
  Sense strand starting at position 1226 of SEQ ID NO: 2109
uggcgaucaucuccuggua

SEQ ID NO: 163655 - RNA, 19 nt, Artificial Sequence
  Description of Artificial Sequence: Synthetic oligonucleotide
  Antisense strand to SEQ ID NO: 163654
uaccaggagaugaucgcca

SEQ ID NO: 163656 - RNA, 19 nt, Artificial Sequence
  Description of Artificial Sequence: Synthetic oligonucleotide
  Sense strand starting at position 1229 of SEQ ID NO: 2109
cgaucaucuccugguagga

SEQ ID NO: 163657 - RNA, 19 nt, Artificial Sequence
  Description of Artificial Sequence: Synthetic oligonucleotide
  Antisense strand to SEQ ID NO: 163656
uccuaccaggagaugaucg

SEQ ID NO: 163658 - RNA, 19 nt, Artificial Sequence
  Description of Artificial Sequence: Synthetic oligonucleotide
  Sense strand starting at position 2400 of SEQ ID NO: 2109
agccuuugggcuggagaca

SEQ ID NO: 163659 - RNA, 19 nt, Artificial Sequence
  Description of Artificial Sequence: Synthetic oligonucleotide
  Antisense strand to SEQ ID NO: 163658
ugucuccagcccaaaggcu

SEQ ID NO: 163660 - RNA, 19 nt, Artificial Sequence
  Description of Artificial Sequence: Synthetic oligonucleotide
  Sense strand starting at position 2459 of SEQ ID NO: 2109
gcgaguagaacguauccuu

SEQ ID NO: 163661 - RNA, 19 nt, Artificial Sequence
  Description of Artificial Sequence: Synthetic oligonucleotide
  Antisense strand to SEQ ID NO: 163660
aaggauacguucuacucgc

SEQ ID NO: 163662 - RNA, 19 nt, Artificial Sequence
  Description of Artificial Sequence: Synthetic oligonucleotide
  Sense strand starting at position 2462 of SEQ ID NO: 2109
aguagaacguauccuucuu

SEQ ID NO: 163663 - RNA, 19 nt, Artificial Sequence
  Description of Artificial Sequence: Synthetic oligonucleotide
  Antisense strand to SEQ ID NO: 163662
aagaaggauacguucuacu

SEQ ID NO: 163664 - RNA, 19 nt, Artificial Sequence
  Description of Artificial Sequence: Synthetic oligonucleotide
  Sense strand starting at position 2472 of SEQ ID NO: 2109
auccuucuuugcguccaaa

SEQ ID NO: 163665 - RNA, 19 nt, Artificial Sequence
  Description of Artificial Sequence: Synthetic oligonucleotide
  Antisense strand to SEQ ID NO: 163664
uuuggacgcaaagaaggau

SEQ ID NO: 163666 - RNA, 19 nt, Artificial Sequence
  Description of Artificial Sequence: Synthetic oligonucleotide
  Sense strand starting at position 2495 of SEQ ID NO: 2109
gguuccuuguuggauuuga

SEQ ID NO: 163667 - RNA, 19 nt, Artificial Sequence
  Description of Artificial Sequence: Synthetic oligonucleotide
  Antisense strand to SEQ ID NO: 163666
ucaaauccaacaaggaacc

SEQ ID NO: 163668 - RNA, 19 nt, Artificial Sequence
  Description of Artificial Sequence: Synthetic oligonucleotide
  Sense strand starting at position 2500 of SEQ ID NO: 2109
cuuguuggauuugaacaga

SEQ ID NO: 163669 - RNA, 19 nt, Artificial Sequence
  Description of Artificial Sequence: Synthetic oligonucleotide
  Antisense strand to SEQ ID NO: 163668
ucuguucaaauccaacaag

SEQ ID NO: 163670 - RNA, 19 nt, Artificial Sequence
  Description of Artificial Sequence: Synthetic oligonucleotide
  Sense strand starting at position 2611 of SEQ ID NO: 2109
cccuuagauucugcgccau

SEQ ID NO: 163671 - RNA, 19 nt, Artificial Sequence
  Description of Artificial Sequence: Synthetic oligonucleotide
  Antisense strand to SEQ ID NO: 163670
auggcgcagaaucuaaggg

SEQ ID NO: 163672 - RNA, 19 nt, Artificial Sequence
  Description of Artificial Sequence: Synthetic oligonucleotide
  Sense strand starting at position 2613 of SEQ ID NO: 2109
cuuagauucugcgccauga

SEQ ID NO: 163673 - RNA, 19 nt, Artificial Sequence
  Description of Artificial Sequence: Synthetic oligonucleotide
  Antisense strand to SEQ ID NO: 163672
ucauggcgcagaaucuaag

SEQ ID NO: 163674 - RNA, 19 nt, Artificial Sequence
  Description of Artificial Sequence: Synthetic oligonucleotide
  Sense strand starting at position 2630 of SEQ ID NO: 2109
gagccuauaggcuguugaa

SEQ ID NO: 163675 - RNA, 19 nt, Artificial Sequence
  Description of Artificial Sequence: Synthetic oligonucleotide
  Antisense strand to SEQ ID NO: 163674
uucaacagccuauaggcuc

SEQ ID NO: 163676 - RNA, 19 nt, Artificial Sequence
  Description of Artificial Sequence: Synthetic oligonucleotide
  Sense strand starting at position 2639 of SEQ ID NO: 2109
ggcuguugaauacgagaga

SEQ ID NO: 163677 - RNA, 19 nt, Artificial Sequence
  Description of Artificial Sequence: Synthetic oligonucleotide
  Antisense strand to SEQ ID NO: 163676
ucucucguauucaacagcc

SEQ ID NO: 163678 - RNA, 19 nt, Artificial Sequence
  Description of Artificial Sequence: Synthetic oligonucleotide
  Sense strand starting at position 2642 of SEQ ID NO: 2109
uguugaauacgagagaagu

SEQ ID NO: 163679 - RNA, 19 nt, Artificial Sequence
  Description of Artificial Sequence: Synthetic oligonucleotide
  Antisense strand to SEQ ID NO: 163678
acuucucucguauucaaca

SEQ ID NO: 163680 - RNA, 19 nt, Artificial Sequence
  Description of Artificial Sequence: Synthetic oligonucleotide
  Sense strand starting at position 2667 of SEQ ID NO: 2109
cuaaacgaguuucuaaauu

SEQ ID NO: 163681 - RNA, 19 nt, Artificial Sequence
  Description of Artificial Sequence: Synthetic oligonucleotide
  Antisense strand to SEQ ID NO: 163680
aauuuagaaacucguuuag

SEQ ID NO: 163682 - RNA, 19 nt, Artificial Sequence
  Description of Artificial Sequence: Synthetic oligonucleotide
  Sense strand starting at position 2808 of SEQ ID NO: 2109
uuaugagaaugucaaagaa

SEQ ID NO: 163683 - RNA, 19 nt, Artificial Sequence
  Description of Artificial Sequence: Synthetic oligonucleotide
  Antisense strand to SEQ ID NO: 163682
uucuuugacauucucauaa

SEQ ID NO: 163684 - RNA, 19 nt, Artificial Sequence
  Description of Artificial Sequence: Synthetic oligonucleotide
  Sense strand starting at position 2937 of SEQ ID NO: 2109
acauuaugucagggauggu

SEQ ID NO: 163685 - RNA, 19 nt, Artificial Sequence
  Description of Artificial Sequence: Synthetic oligonucleotide
  Antisense strand to SEQ ID NO: 163684
accaucccugacauaaugu

SEQ ID NO: 163686 - RNA, 19 nt, Artificial Sequence
  Description of Artificial Sequence: Synthetic oligonucleotide
  Sense strand starting at position 2938 of SEQ ID NO: 2109
cauuaugucagggaugguu

SEQ ID NO: 163687 - RNA, 19 nt, Artificial Sequence
  Description of Artificial Sequence: Synthetic oligonucleotide
  Antisense strand to SEQ ID NO: 163686
aaccaucccugacauaaug

SEQ ID NO: 163688 - RNA, 19 nt, Artificial Sequence
  Description of Artificial Sequence: Synthetic oligonucleotide
  Sense strand starting at position 3019 of SEQ ID NO: 2109
gaguaacagcguuguuuau

SEQ ID NO: 163689 - RNA, 19 nt, Artificial Sequence
  Description of Artificial Sequence: Synthetic oligonucleotide
  Antisense strand to SEQ ID NO: 163688
auaaacaacgcuguuacuc

SEQ ID NO: 163690 - RNA, 19 nt, Artificial Sequence
  Description of Artificial Sequence: Synthetic oligonucleotide
  Sense strand starting at position 3028 of SEQ ID NO: 2109
cguuguuuaugggugagag

SEQ ID NO: 163691 - RNA, 19 nt, Artificial Sequence
  Description of Artificial Sequence: Synthetic oligonucleotide
  Antisense strand to SEQ ID NO: 163690
cucucacccauaaacaacg

SEQ ID NO: 163692 - RNA, 19 nt, Artificial Sequence
  Description of Artificial Sequence: Synthetic oligonucleotide
  Sense strand starting at position 3030 of SEQ ID NO: 2109
uuguuuaugggugagagca

SEQ ID NO: 163693 - RNA, 19 nt, Artificial Sequence
  Description of Artificial Sequence: Synthetic oligonucleotide
  Antisense strand to SEQ ID NO: 163692
ugcucucacccauaaacaa

SEQ ID NO: 163694 - RNA, 19 nt, Artificial Sequence
  Description of Artificial Sequence: Synthetic oligonucleotide
  Sense strand starting at position 3472 of SEQ ID NO: 2109
ggcugauaauacuagaauu

SEQ ID NO: 163695 - RNA, 19 nt, Artificial Sequence
  Description of Artificial Sequence: Synthetic oligonucleotide
  Antisense strand to SEQ ID NO: 163694
aauucuaguauuaucagcc

SEQ ID NO: 163696 - RNA, 19 nt, Artificial Sequence
  Description of Artificial Sequence: Synthetic oligonucleotide
  Sense strand starting at position 3604 of SEQ ID NO: 2109
ggacuuguuccaggaacga

SEQ ID NO: 163697 - RNA, 19 nt, Artificial Sequence
  Description of Artificial Sequence: Synthetic oligonucleotide
  Antisense strand to SEQ ID NO: 163696
ucguuccuggaacaagucc

SEQ ID NO: 163698 - RNA, 19 nt, Artificial Sequence
  Description of Artificial Sequence: Synthetic oligonucleotide
  Sense strand starting at position 3617 of SEQ ID NO: 2109
gaacgaagauuauucuuga

SEQ ID NO: 163699 - RNA, 19 nt, Artificial Sequence
  Description of Artificial Sequence: Synthetic oligonucleotide
  Antisense strand to SEQ ID NO: 163698
ucaagaauaaucuucguuc

SEQ ID NO: 163700 - RNA, 19 nt, Artificial Sequence
  Description of Artificial Sequence: Synthetic oligonucleotide
  Sense strand starting at position 3620 of SEQ ID NO: 2109
cgaagauuauucuugaaau

SEQ ID NO: 163701 - RNA, 19 nt, Artificial Sequence
  Description of Artificial Sequence: Synthetic oligonucleotide
  Antisense strand to SEQ ID NO: 163700
auuucaagaauaaucuucg

SEQ ID NO: 163702 - RNA, 19 nt, Artificial Sequence
  Description of Artificial Sequence: Synthetic oligonucleotide
  Sense strand starting at position 3632 of SEQ ID NO: 2109
uugaaauguccacguagug

SEQ ID NO: 163703 - RNA, 19 nt, Artificial Sequence
  Description of Artificial Sequence: Synthetic oligonucleotide
  Antisense strand to SEQ ID NO: 163702
cacuacguggacauuucaa

SEQ ID NO: 163704 - RNA, 19 nt, Artificial Sequence
  Description of Artificial Sequence: Synthetic oligonucleotide
  Sense strand starting at position 3641 of SEQ ID NO: 2109
ccacguaguggauaagaca

SEQ ID NO: 163705 - RNA, 19 nt, Artificial Sequence
  Description of Artificial Sequence: Synthetic oligonucleotide
  Antisense strand to SEQ ID NO: 163704
ugucuuauccacuacgugg

SEQ ID NO: 163706 - RNA, 19 nt, Artificial Sequence
  Description of Artificial Sequence: Synthetic oligonucleotide
  Sense strand starting at position 3686 of SEQ ID NO: 2109
aggcuugauuggguucaau

SEQ ID NO: 163707 - RNA, 19 nt, Artificial Sequence
  Description of Artificial Sequence: Synthetic oligonucleotide
  Antisense strand to SEQ ID NO: 163706
auugaacccaaucaagccu

SEQ ID NO: 163708 - RNA, 19 nt, Artificial Sequence
  Description of Artificial Sequence: Synthetic oligonucleotide
  Sense strand starting at position 3718 of SEQ ID NO: 2109
caagguguuugccuacauu

SEQ ID NO: 163709 - RNA, 19 nt, Artificial Sequence
  Description of Artificial Sequence: Synthetic oligonucleotide
  Antisense strand to SEQ ID NO: 163708
aauguaggcaaacaccuug

SEQ ID NO: 163710 - RNA, 19 nt, Artificial Sequence
  Description of Artificial Sequence: Synthetic oligonucleotide
  Sense strand starting at position 3737 of SEQ ID NO: 2109
gccuguacuuccuccaaga

SEQ ID NO: 163711 - RNA, 19 nt, Artificial Sequence
  Description of Artificial Sequence: Synthetic oligonucleotide
  Antisense strand to SEQ ID NO: 163710
ucuuggaggaaguacaggc

SEQ ID NO: 163712 - RNA, 19 nt, Artificial Sequence
  Description of Artificial Sequence: Synthetic oligonucleotide
  Sense strand starting at position 3788 of SEQ ID NO: 2109
acuugucuguguucccuaa

SEQ ID NO: 163713 - RNA, 19 nt, Artificial Sequence
  Description of Artificial Sequence: Synthetic oligonucleotide
  Antisense strand to SEQ ID NO: 163712
uuagggaacacagacaagu

SEQ ID NO: 163714 - RNA, 19 nt, Artificial Sequence
  Description of Artificial Sequence: Synthetic oligonucleotide
  Sense strand starting at position 3792 of SEQ ID NO: 2109
gucuguguucccuaagcca

SEQ ID NO: 163715 - RNA, 19 nt, Artificial Sequence
  Description of Artificial Sequence: Synthetic oligonucleotide
  Antisense strand to SEQ ID NO: 163714
uggcuuagggaacacagac

SEQ ID NO: 163716 - RNA, 19 nt, Artificial Sequence
  Description of Artificial Sequence: Synthetic oligonucleotide
  Sense strand starting at position 3795 of SEQ ID NO: 2109
uguguucccuaagccagau

SEQ ID NO: 163717 - RNA, 19 nt, Artificial Sequence
  Description of Artificial Sequence: Synthetic oligonucleotide
  Antisense strand to SEQ ID NO: 163716
aucuggcuuagggaacaca

SEQ ID NO: 163718 - RNA, 19 nt, Artificial Sequence
  Description of Artificial Sequence: Synthetic oligonucleotide
  Sense strand starting at position 3807 of SEQ ID NO: 2109
gccagaucauaagcucuga

SEQ ID NO: 163719 - RNA, 19 nt, Artificial Sequence
  Description of Artificial Sequence: Synthetic oligonucleotide
  Antisense strand to SEQ ID NO: 163718
ucagagcuuaugaucuggc

SEQ ID NO: 163720 - RNA, 19 nt, Artificial Sequence
  Description of Artificial Sequence: Synthetic oligonucleotide
  Sense strand starting at position 3830 of SEQ ID NO: 2109
gaggaugguggcuguagau

SEQ ID NO: 163721 - RNA, 19 nt, Artificial Sequence
  Description of Artificial Sequence: Synthetic oligonucleotide
  Antisense strand to SEQ ID NO: 163720
aucuacagccaccauccuc

SEQ ID NO: 163722 - RNA, 19 nt, Artificial Sequence
  Description of Artificial Sequence: Synthetic oligonucleotide
  Sense strand starting at position 3862 of SEQ ID NO: 2109
uguguucccugagccagau

SEQ ID NO: 163723 - RNA, 19 nt, Artificial Sequence
  Description of Artificial Sequence: Synthetic oligonucleotide
  Antisense strand to SEQ ID NO: 163722
aucuggcucagggaacaca

SEQ ID NO: 163724 - RNA, 19 nt, Artificial Sequence
  Description of Artificial Sequence: Synthetic oligonucleotide
  Sense strand starting at position 3866 of SEQ ID NO: 2109
uucccugagccagaucaua

SEQ ID NO: 163725 - RNA, 19 nt, Artificial Sequence
  Description of Artificial Sequence: Synthetic oligonucleotide
  Antisense strand to SEQ ID NO: 163724
uaugaucuggcucagggaa

SEQ ID NO: 163726 - RNA, 19 nt, Artificial Sequence
  Description of Artificial Sequence: Synthetic oligonucleotide
  Sense strand starting at position 3899 of SEQ ID NO: 2109
ggaugguggccguagauga

SEQ ID NO: 163727 - RNA, 19 nt, Artificial Sequence
  Description of Artificial Sequence: Synthetic oligonucleotide
  Antisense strand to SEQ ID NO: 163726
ucaucuacggccaccaucc

SEQ ID NO: 163728 - RNA, 19 nt, Artificial Sequence
  Description of Artificial Sequence: Synthetic oligonucleotide
  Sense strand starting at position 3845 of SEQ ID NO: 2110
agucuucuaugaguaagaa

SEQ ID NO: 163729 - RNA, 19 nt, Artificial Sequence
  Description of Artificial Sequence: Synthetic oligonucleotide
  Antisense strand to SEQ ID NO: 163728
uucuuacucauagaagacu

SEQ ID NO: 163730 - RNA, 19 nt, Artificial Sequence
  Description of Artificial Sequence: Synthetic oligonucleotide
  Sense strand starting at position 3822 of SEQ ID NO: 2110
uuggguuguccacacaaag

SEQ ID NO: 163731 - RNA, 19 nt, Artificial Sequence
  Description of Artificial Sequence: Synthetic oligonucleotide
  Antisense strand to SEQ ID NO: 163730
cuuuguguggacaacccaa

SEQ ID NO: 163732 - RNA, 19 nt, Artificial Sequence
  Description of Artificial Sequence: Synthetic oligonucleotide
  Sense strand starting at position 3789 of SEQ ID NO: 2110
uagcaauagucccugguga

SEQ ID NO: 163733 - RNA, 19 nt, Artificial Sequence
  Description of Artificial Sequence: Synthetic oligonucleotide
  Antisense strand to SEQ ID NO: 163732
ucaccagggacuauugcua

SEQ ID NO: 163734 - RNA, 19 nt, Artificial Sequence
  Description of Artificial Sequence: Synthetic oligonucleotide
  Sense strand starting at position 3658 of SEQ ID NO: 2110
augcuagauagcugguaau

SEQ ID NO: 163735 - RNA, 19 nt, Artificial Sequence
  Description of Artificial Sequence: Synthetic oligonucleotide
  Antisense strand to SEQ ID NO: 163734
auuaccagcuaucuagcau

SEQ ID NO: 163736 - RNA, 19 nt, Artificial Sequence
  Description of Artificial Sequence: Synthetic oligonucleotide
  Sense strand starting at position 3602 of SEQ ID NO: 2110
gaauguuguaggugguacu

SEQ ID NO: 163737 - RNA, 19 nt, Artificial Sequence
  Description of Artificial Sequence: Synthetic oligonucleotide
  Antisense strand to SEQ ID NO: 163736
aguaccaccuacaacauuc

SEQ ID NO: 163738 - RNA, 19 nt, Artificial Sequence
  Description of Artificial Sequence: Synthetic oligonucleotide
  Sense strand starting at position 3600 of SEQ ID NO: 2110
aagaauguuguagguggua

SEQ ID NO: 163739 - RNA, 19 nt, Artificial Sequence
  Description of Artificial Sequence: Synthetic oligonucleotide
  Antisense strand to SEQ ID NO: 163738
uaccaccuacaacauucuu

SEQ ID NO: 163740 - RNA, 19 nt, Artificial Sequence
  Description of Artificial Sequence: Synthetic oligonucleotide
  Sense strand starting at position 3593 of SEQ ID NO: 2110
aagggucaagaauguugua

SEQ ID NO: 163741 - RNA, 19 nt, Artificial Sequence
  Description of Artificial Sequence: Synthetic oligonucleotide
  Antisense strand to SEQ ID NO: 163740
uacaacauucuugacccuu

SEQ ID NO: 163742 - RNA, 19 nt, Artificial Sequence
  Description of Artificial Sequence: Synthetic oligonucleotide
  Sense strand starting at position 3560 of SEQ ID NO: 2110
agggauuuauaggguacau

SEQ ID NO: 163743 - RNA, 19 nt, Artificial Sequence
  Description of Artificial Sequence: Synthetic oligonucleotide
  Antisense strand to SEQ ID NO: 163742
auguacccuauaaaucccu

SEQ ID NO: 163744 - RNA, 19 nt, Artificial Sequence
  Description of Artificial Sequence: Synthetic oligonucleotide
  Sense strand starting at position 3550 of SEQ ID NO: 2110
gacagauauuagggauuua

SEQ ID NO: 163745 - RNA, 19 nt, Artificial Sequence
  Description of Artificial Sequence: Synthetic oligonucleotide
  Antisense strand to SEQ ID NO: 163744
uaaaucccuaauaucuguc

SEQ ID NO: 163746 - RNA, 19 nt, Artificial Sequence
  Description of Artificial Sequence: Synthetic oligonucleotide
  Sense strand starting at position 3032 of SEQ ID NO: 2110
ggguuuggauccuugagga

SEQ ID NO: 163747 - RNA, 19 nt, Artificial Sequence
  Description of Artificial Sequence: Synthetic oligonucleotide
  Antisense strand to SEQ ID NO: 163746
uccucaaggauccaaaccc

SEQ ID NO: 163748 - RNA, 19 nt, Artificial Sequence
  Description of Artificial Sequence: Synthetic oligonucleotide
  Sense strand starting at position 2977 of SEQ ID NO: 2110
gagaccaccuucguaaaua

SEQ ID NO: 163749 - RNA, 19 nt, Artificial Sequence
  Description of Artificial Sequence: Synthetic oligonucleotide
  Antisense strand to SEQ ID NO: 163748
uauuuacgaagguggucuc

SEQ ID NO: 163750 - RNA, 19 nt, Artificial Sequence
  Description of Artificial Sequence: Synthetic oligonucleotide
  Sense strand starting at position 2976 of SEQ ID NO: 2110
ggagaccaccuucguaaau

SEQ ID NO: 163751 - RNA, 19 nt, Artificial Sequence
  Description of Artificial Sequence: Synthetic oligonucleotide
  Antisense strand to SEQ ID NO: 163750
auuuacgaagguggucucc

SEQ ID NO: 163752 - RNA, 19 nt, Artificial Sequence
  Description of Artificial Sequence: Synthetic oligonucleotide
  Sense strand starting at position 2915 of SEQ ID NO: 2110
ggguauaggugagcaugua

SEQ ID NO: 163753 - RNA, 19 nt, Artificial Sequence
  Description of Artificial Sequence: Synthetic oligonucleotide
  Antisense strand to SEQ ID NO: 163752
uacaugcucaccuauaccc

SEQ ID NO: 163754 - RNA, 19 nt, Artificial Sequence
  Description of Artificial Sequence: Synthetic oligonucleotide
  Sense strand starting at position 2809 of SEQ ID NO: 2110
aagcgaggucucgggaaau

SEQ ID NO: 163755 - RNA, 19 nt, Artificial Sequence
  Description of Artificial Sequence: Synthetic oligonucleotide
  Antisense strand to SEQ ID NO: 163754
auuucccgagaccucgcuu

SEQ ID NO: 163756 - RNA, 19 nt, Artificial Sequence
  Description of Artificial Sequence: Synthetic oligonucleotide
  Sense strand starting at position 2703 of SEQ ID NO: 2110
gguaaaggguauuauauuu

SEQ ID NO: 163757 - RNA, 19 nt, Artificial Sequence
  Description of Artificial Sequence: Synthetic oligonucleotide
  Antisense strand to SEQ ID NO: 163756
aaauauaauacccuuuacc

SEQ ID NO: 163758 - RNA, 19 nt, Artificial Sequence
  Description of Artificial Sequence: Synthetic oligonucleotide
  Sense strand starting at position 2533 of SEQ ID NO: 2110
ucacuucugcaaggauaaa

SEQ ID NO: 163759 - RNA, 19 nt, Artificial Sequence
  Description of Artificial Sequence: Synthetic oligonucleotide
  Antisense strand to SEQ ID NO: 163758
uuuauccuugcagaaguga

SEQ ID NO: 163760 - RNA, 19 nt, Artificial Sequence
  Description of Artificial Sequence: Synthetic oligonucleotide
  Sense strand starting at position 2530 of SEQ ID NO: 2110
uuaucacuucugcaaggau

SEQ ID NO: 163761 - RNA, 19 nt, Artificial Sequence
  Description of Artificial Sequence: Synthetic oligonucleotide
  Antisense strand to SEQ ID NO: 163760
auccuugcagaagugauaa

SEQ ID NO: 163762 - RNA, 19 nt, Artificial Sequence
  Description of Artificial Sequence: Synthetic oligonucleotide
  Sense strand starting at position 2529 of SEQ ID NO: 2110
auuaucacuucugcaagga

SEQ ID NO: 163763 - RNA, 19 nt, Artificial Sequence
  Description of Artificial Sequence: Synthetic oligonucleotide
  Antisense strand to SEQ ID NO: 163762
uccuugcagaagugauaau

SEQ ID NO: 163764 - RNA, 19 nt, Artificial Sequence
  Description of Artificial Sequence: Synthetic oligonucleotide
  Sense strand starting at position 2502 of SEQ ID NO: 2110
guguuuaggagaugaggaa

SEQ ID NO: 163765 - RNA, 19 nt, Artificial Sequence
  Description of Artificial Sequence: Synthetic oligonucleotide
  Antisense strand to SEQ ID NO: 163764
uuccucaucuccuaaacac

SEQ ID NO: 163766 - RNA, 19 nt, Artificial Sequence
  Description of Artificial Sequence: Synthetic oligonucleotide
  Sense strand starting at position 2488 of SEQ ID NO: 2110
augucagaugacugguguu

SEQ ID NO: 163767 - RNA, 19 nt, Artificial Sequence
  Description of Artificial Sequence: Synthetic oligonucleotide
  Antisense strand to SEQ ID NO: 163766
aacaccagucaucugacau

SEQ ID NO: 163768 - RNA, 19 nt, Artificial Sequence
  Description of Artificial Sequence: Synthetic oligonucleotide
  Sense strand starting at position 2237 of SEQ ID NO: 2110
gcgauagucgcugcauaua

SEQ ID NO: 163769 - RNA, 19 nt, Artificial Sequence
  Description of Artificial Sequence: Synthetic oligonucleotide
  Antisense strand to SEQ ID NO: 163768
uauaugcagcgacuaucgc

SEQ ID NO: 163770 - RNA, 19 nt, Artificial Sequence
  Description of Artificial Sequence: Synthetic oligonucleotide
  Sense strand starting at position 2223 of SEQ ID NO: 2110
gauuaagcggcucugcgau

SEQ ID NO: 163771 - RNA, 19 nt, Artificial Sequence
  Description of Artificial Sequence: Synthetic oligonucleotide
  Antisense strand to SEQ ID NO: 163770
aucgcagagccgcuuaauc

SEQ ID NO: 163772 - RNA, 19 nt, Artificial Sequence
  Description of Artificial Sequence: Synthetic oligonucleotide
  Sense strand starting at position 2050 of SEQ ID NO: 2110
ggagggauguugucaggga

SEQ ID NO: 163773 - RNA, 19 nt, Artificial Sequence
  Description of Artificial Sequence: Synthetic oligonucleotide
  Antisense strand to SEQ ID NO: 163772
ucccugacaacaucccucc

SEQ ID NO: 163774 - RNA, 19 nt, Artificial Sequence
  Description of Artificial Sequence: Synthetic oligonucleotide
  Sense strand starting at position 1630 of SEQ ID NO: 2110
ccgcuagaucagggaagaa

SEQ ID NO: 163775 - RNA, 19 nt, Artificial Sequence
  Description of Artificial Sequence: Synthetic oligonucleotide
  Antisense strand to SEQ ID NO: 163774
uucuucccugaucuagcgg

SEQ ID NO: 163776 - RNA, 19 nt, Artificial Sequence
  Description of Artificial Sequence: Synthetic oligonucleotide
  Sense strand starting at position 1577 of SEQ ID NO: 2110
auguuuagggcugagauga

SEQ ID NO: 163777 - RNA, 19 nt, Artificial Sequence
  Description of Artificial Sequence: Synthetic oligonucleotide
  Antisense strand to SEQ ID NO: 163776
ucaucucagcccuaaacau

SEQ ID NO: 163778 - RNA, 19 nt, Artificial Sequence
  Description of Artificial Sequence: Synthetic oligonucleotide
  Sense strand starting at position 1576 of SEQ ID NO: 2110
aauguuuagggcugagaug

SEQ ID NO: 163779 - RNA, 19 nt, Artificial Sequence
  Description of Artificial Sequence: Synthetic oligonucleotide
  Antisense strand to SEQ ID NO: 163778
caucucagcccuaaacauu

SEQ ID NO: 163780 - RNA, 19 nt, Artificial Sequence
  Description of Artificial Sequence: Synthetic oligonucleotide
  Sense strand starting at position 1379 of SEQ ID NO: 2110
augucugagcgguaguaga

SEQ ID NO: 163781 - RNA, 19 nt, Artificial Sequence
  Description of Artificial Sequence: Synthetic oligonucleotide
  Antisense strand to SEQ ID NO: 163780
ucuacuaccgcucagacau

SEQ ID NO: 163782 - RNA, 19 nt, Artificial Sequence
  Description of Artificial Sequence: Synthetic oligonucleotide
  Sense strand starting at position 1344 of SEQ ID NO: 2110
ggguacagaugcuuccaaa

SEQ ID NO: 163783 - RNA, 19 nt, Artificial Sequence
  Description of Artificial Sequence: Synthetic oligonucleotide
  Antisense strand to SEQ ID NO: 163782
uuuggaagcaucuguaccc

SEQ ID NO: 163784 - RNA, 19 nt, Artificial Sequence
  Description of Artificial Sequence: Synthetic oligonucleotide
  Sense strand starting at position 1141 of SEQ ID NO: 2110
ugagcuaaccucugacauc

SEQ ID NO: 163785 - RNA, 19 nt, Artificial Sequence
  Description of Artificial Sequence: Synthetic oligonucleotide
  Antisense strand to SEQ ID NO: 163784
gaugucagagguuagcuca

SEQ ID NO: 163786 - RNA, 19 nt, Artificial Sequence
  Description of Artificial Sequence: Synthetic oligonucleotide
  Sense strand starting at position 1088 of SEQ ID NO: 2110
guaagacccgaaugcuaaa

SEQ ID NO: 163787 - RNA, 19 nt, Artificial Sequence
  Description of Artificial Sequence: Synthetic oligonucleotide
  Antisense strand to SEQ ID NO: 163786
uuuagcauucgggucuuac

SEQ ID NO: 163788 - RNA, 19 nt, Artificial Sequence
  Description of Artificial Sequence: Synthetic oligonucleotide
  Sense strand starting at position 980 of SEQ ID NO: 2110
ucaauaugcugaguucuaa

SEQ ID NO: 163789 - RNA, 19 nt, Artificial Sequence
  Description of Artificial Sequence: Synthetic oligonucleotide
  Antisense strand to SEQ ID NO: 163788
uuagaacucagcauauuga

SEQ ID NO: 163790 - RNA, 19 nt, Artificial Sequence
  Description of Artificial Sequence: Synthetic oligonucleotide
  Sense strand starting at position 858 of SEQ ID NO: 2110
gggucaguaacacgagagu

SEQ ID NO: 163791 - RNA, 19 nt, Artificial Sequence
  Description of Artificial Sequence: Synthetic oligonucleotide
  Antisense strand to SEQ ID NO: 163790
acucucguguuacugaccc

SEQ ID NO: 163792 - RNA, 19 nt, Artificial Sequence
  Description of Artificial Sequence: Synthetic oligonucleotide
  Sense strand starting at position 744 of SEQ ID NO: 2110
gggauacagucacaauaca

SEQ ID NO: 163793 - RNA, 19 nt, Artificial Sequence
  Description of Artificial Sequence: Synthetic oligonucleotide
  Antisense strand to SEQ ID NO: 163792
uguauugugacuguauccc

SEQ ID NO: 163794 - RNA, 19 nt, Artificial Sequence
  Description of Artificial Sequence: Synthetic oligonucleotide
  Sense strand starting at position 733 of SEQ ID NO: 2110
uucuucuccgagggauaca

SEQ ID NO: 163795 - RNA, 19 nt, Artificial Sequence
  Description of Artificial Sequence: Synthetic oligonucleotide
  Antisense strand to SEQ ID NO: 163794
uguaucccucggagaagaa

SEQ ID NO: 163796 - RNA, 19 nt, Artificial Sequence
  Description of Artificial Sequence: Synthetic oligonucleotide
  Sense strand starting at position 732 of SEQ ID NO: 2110
uuucuucuccgagggauac

SEQ ID NO: 163797 - RNA, 19 nt, Artificial Sequence
  Description of Artificial Sequence: Synthetic oligonucleotide
  Antisense strand to SEQ ID NO: 163796
guaucccucggagaagaaa

SEQ ID NO: 163798 - RNA, 19 nt, Artificial Sequence
  Description of Artificial Sequence: Synthetic oligonucleotide
  Sense strand starting at position 635 of SEQ ID NO: 2110
gugcgagauuucgucucaa

SEQ ID NO: 163799 - RNA, 19 nt, Artificial Sequence
  Description of Artificial Sequence: Synthetic oligonucleotide
  Antisense strand to SEQ ID NO: 163798
uugagacgaaaucucgcac

SEQ ID NO: 163800 - RNA, 19 nt, Artificial Sequence
  Description of Artificial Sequence: Synthetic oligonucleotide
  Sense strand starting at position 263 of SEQ ID NO: 2110
guauguggcauuggaguua

SEQ ID NO: 163801 - RNA, 19 nt, Artificial Sequence
  Description of Artificial Sequence: Synthetic oligonucleotide
  Antisense strand to SEQ ID NO: 163800
uaacuccaaugccacauac

SEQ ID NO: 163802 - RNA, 19 nt, Artificial Sequence
  Description of Artificial Sequence: Synthetic oligonucleotide
  Sense strand starting at position 177 of SEQ ID NO: 2110
ggucuuucugugggucuaa

SEQ ID NO: 163803 - RNA, 19 nt, Artificial Sequence
  Description of Artificial Sequence: Synthetic oligonucleotide
  Antisense strand to SEQ ID NO: 163802
uuagacccacagaaagacc

SEQ ID NO: 163804 - RNA, 19 nt, Artificial Sequence
  Description of Artificial Sequence: Synthetic oligonucleotide
  Sense strand starting at position 58 of SEQ ID NO: 2110
agaagucaccaguguuaua

SEQ ID NO: 163805 - RNA, 19 nt, Artificial Sequence
  Description of Artificial Sequence: Synthetic oligonucleotide
  Antisense strand to SEQ ID NO: 163804
uauaacacuggugacuucu

SEQ ID NO: 163806 - RNA, 19 nt, Artificial Sequence
  Description of Artificial Sequence: Synthetic oligonucleotide
  Sense strand starting at position 55 of SEQ ID NO: 2110
accagaagucaccaguguu

SEQ ID NO: 163807 - RNA, 19 nt, Artificial Sequence
  Description of Artificial Sequence: Synthetic oligonucleotide
  Antisense strand to SEQ ID NO: 163806
aacacuggugacuucuggu

SEQ ID NO: 163808 - RNA, 19 nt, Artificial Sequence
  Description of Artificial Sequence: Synthetic oligonucleotide
  Sense strand starting at position 3737 of SEQ ID NO: 2111
uguaaucuagaaugcucua

SEQ ID NO: 163809 - RNA, 19 nt, Artificial Sequence
  Description of Artificial Sequence: Synthetic oligonucleotide
  Antisense strand to SEQ ID NO: 163808
uagagcauucuagauuaca

SEQ ID NO: 163810 - RNA, 19 nt, Artificial Sequence
  Description of Artificial Sequence: Synthetic oligonucleotide
  Sense strand starting at position 3734 of SEQ ID NO: 2111
ugauguaaucuagaaugcu

SEQ ID NO: 163811 - RNA, 19 nt, Artificial Sequence
  Description of Artificial Sequence: Synthetic oligonucleotide
  Antisense strand to SEQ ID NO: 163810
agcauucuagauuacauca

SEQ ID NO: 163812 - RNA, 19 nt, Artificial Sequence
  Description of Artificial Sequence: Synthetic oligonucleotide
  Sense strand starting at position 3722 of SEQ ID NO: 2111
cuauuucgucuuugaugua

SEQ ID NO: 163813 - RNA, 19 nt, Artificial Sequence
  Description of Artificial Sequence: Synthetic oligonucleotide
  Antisense strand to SEQ ID NO: 163812
uacaucaaagacgaaauag

SEQ ID NO: 163814 - RNA, 19 nt, Artificial Sequence
  Description of Artificial Sequence: Synthetic oligonucleotide
  Sense strand starting at position 3721 of SEQ ID NO: 2111
gcuauuucgucuuugaugu

SEQ ID NO: 163815 - RNA, 19 nt, Artificial Sequence
  Description of Artificial Sequence: Synthetic oligonucleotide
  Antisense strand to SEQ ID NO: 163814
acaucaaagacgaaauagc

SEQ ID NO: 163816 - RNA, 19 nt, Artificial Sequence
  Description of Artificial Sequence: Synthetic oligonucleotide
  Sense strand starting at position 3718 of SEQ ID NO: 2111
cacgcuauuucgucuuuga

SEQ ID NO: 163817 - RNA, 19 nt, Artificial Sequence
  Description of Artificial Sequence: Synthetic oligonucleotide
  Antisense strand to SEQ ID NO: 163816
ucaaagacgaaauagcgug

SEQ ID NO: 163818 - RNA, 19 nt, Artificial Sequence
  Description of Artificial Sequence: Synthetic oligonucleotide
  Sense strand starting at position 3618 of SEQ ID NO: 2111
caggguaguucuguuagaa

SEQ ID NO: 163819 - RNA, 19 nt, Artificial Sequence
  Description of Artificial Sequence: Synthetic oligonucleotide
  Antisense strand to SEQ ID NO: 163818
uucuaacagaacuacccug

SEQ ID NO: 163820 - RNA, 19 nt, Artificial Sequence
  Description of Artificial Sequence: Synthetic oligonucleotide
  Sense strand starting at position 3443 of SEQ ID NO: 2111
gcguguguuacucuugacu

SEQ ID NO: 163821 - RNA, 19 nt, Artificial Sequence
  Description of Artificial Sequence: Synthetic oligonucleotide
  Antisense strand to SEQ ID NO: 163820
agucaagaguaacacacgc

SEQ ID NO: 163822 - RNA, 19 nt, Artificial Sequence
  Description of Artificial Sequence: Synthetic oligonucleotide
  Sense strand starting at position 3326 of SEQ ID NO: 2111
aguugaaauccugauuccu

SEQ ID NO: 163823 - RNA, 19 nt, Artificial Sequence
  Description of Artificial Sequence: Synthetic oligonucleotide
  Antisense strand to SEQ ID NO: 163822
aggaaucaggauuucaacu

SEQ ID NO: 163824 - RNA, 19 nt, Artificial Sequence
  Description of Artificial Sequence: Synthetic oligonucleotide
  Sense strand starting at position 3268 of SEQ ID NO: 2111
uggagacaucccugcaucu

SEQ ID NO: 163825 - RNA, 19 nt, Artificial Sequence
  Description of Artificial Sequence: Synthetic oligonucleotide
  Antisense strand to SEQ ID NO: 163824
agaugcagggaugucucca

SEQ ID NO: 163826 - RNA, 19 nt, Artificial Sequence
  Description of Artificial Sequence: Synthetic oligonucleotide
  Sense strand starting at position 3258 of SEQ ID NO: 2111
agcugugugcuggagacau

SEQ ID NO: 163827 - RNA, 19 nt, Artificial Sequence
  Description of Artificial Sequence: Synthetic oligonucleotide
  Antisense strand to SEQ ID NO: 163826
augucuccagcacacagcu

SEQ ID NO: 163828 - RNA, 19 nt, Artificial Sequence
  Description of Artificial Sequence: Synthetic oligonucleotide
  Sense strand starting at position 3109 of SEQ ID NO: 2111
ggcgucccuuucucagaaa

SEQ ID NO: 163829 - RNA, 19 nt, Artificial Sequence
  Description of Artificial Sequence: Synthetic oligonucleotide
  Antisense strand to SEQ ID NO: 163828
uuucugagaaagggacgcc

SEQ ID NO: 163830 - RNA, 19 nt, Artificial Sequence
  Description of Artificial Sequence: Synthetic oligonucleotide
  Sense strand starting at position 2356 of SEQ ID NO: 2111
ugaaaucugccuuguagcu

SEQ ID NO: 163831 - RNA, 19 nt, Artificial Sequence
  Description of Artificial Sequence: Synthetic oligonucleotide
  Antisense strand to SEQ ID NO: 163830
agcuacaaggcagauuuca

SEQ ID NO: 163832 - RNA, 19 nt, Artificial Sequence
  Description of Artificial Sequence: Synthetic oligonucleotide
  Sense strand starting at position 2354 of SEQ ID NO: 2111
caugaaaucugccuuguag

SEQ ID NO: 163833 - RNA, 19 nt, Artificial Sequence
  Description of Artificial Sequence: Synthetic oligonucleotide
  Antisense strand to SEQ ID NO: 163832
cuacaaggcagauuucaug

SEQ ID NO: 163834 - RNA, 19 nt, Artificial Sequence
  Description of Artificial Sequence: Synthetic oligonucleotide
  Sense strand starting at position 2317 of SEQ ID NO: 2111
gaggauugucuguaaagcg

SEQ ID NO: 163835 - RNA, 19 nt, Artificial Sequence
  Description of Artificial Sequence: Synthetic oligonucleotide
  Antisense strand to SEQ ID NO: 163834
cgcuuuacagacaauccuc

SEQ ID NO: 163836 - RNA, 19 nt, Artificial Sequence
  Description of Artificial Sequence: Synthetic oligonucleotide
  Sense strand starting at position 2316 of SEQ ID NO: 2111
agaggauugucuguaaagc

SEQ ID NO: 163837 - RNA, 19 nt, Artificial Sequence
  Description of Artificial Sequence: Synthetic oligonucleotide
  Antisense strand to SEQ ID NO: 163836
gcuuuacagacaauccucu

SEQ ID NO: 163838 - RNA, 19 nt, Artificial Sequence
  Description of Artificial Sequence: Synthetic oligonucleotide
  Sense strand starting at position 2313 of SEQ ID NO: 2111
gagagaggauugucuguaa

SEQ ID NO: 163839 - RNA, 19 nt, Artificial Sequence
  Description of Artificial Sequence: Synthetic oligonucleotide
  Antisense strand to SEQ ID NO: 163838
uuacagacaauccucucuc

SEQ ID NO: 163840 - RNA, 19 nt, Artificial Sequence
  Description of Artificial Sequence: Synthetic oligonucleotide
  Sense strand starting at position 2300 of SEQ ID NO: 2111
gcguuuaccagacgagaga

SEQ ID NO: 163841 - RNA, 19 nt, Artificial Sequence
  Description of Artificial Sequence: Synthetic oligonucleotide
  Antisense strand to SEQ ID NO: 163840
ucucucgucugguaaacgc

SEQ ID NO: 163842 - RNA, 19 nt, Artificial Sequence
  Description of Artificial Sequence: Synthetic oligonucleotide
  Sense strand starting at position 2298 of SEQ ID NO: 2111
acgcguuuaccagacgaga

SEQ ID NO: 163843 - RNA, 19 nt, Artificial Sequence
  Description of Artificial Sequence: Synthetic oligonucleotide
  Antisense strand to SEQ ID NO: 163842
ucucgucugguaaacgcgu

SEQ ID NO: 163844 - RNA, 19 nt, Artificial Sequence
  Description of Artificial Sequence: Synthetic oligonucleotide
  Sense strand starting at position 2274 of SEQ ID NO: 2111
gaaaguugugauuguguag

SEQ ID NO: 163845 - RNA, 19 nt, Artificial Sequence
  Description of Artificial Sequence: Synthetic oligonucleotide
  Antisense strand to SEQ ID NO: 163844
cuacacaaucacaacuuuc

SEQ ID NO: 163846 - RNA, 19 nt, Artificial Sequence
  Description of Artificial Sequence: Synthetic oligonucleotide
  Sense strand starting at position 2178 of SEQ ID NO: 2111
ccaugaagcgauugaagag

SEQ ID NO: 163847 - RNA, 19 nt, Artificial Sequence
  Description of Artificial Sequence: Synthetic oligonucleotide
  Antisense strand to SEQ ID NO: 163846
cucuucaaucgcuucaugg

SEQ ID NO: 163848 - RNA, 19 nt, Artificial Sequence
  Description of Artificial Sequence: Synthetic oligonucleotide
  Sense strand starting at position 2175 of SEQ ID NO: 2111
guuccaugaagcgauugaa

SEQ ID NO: 163849 - RNA, 19 nt, Artificial Sequence
  Description of Artificial Sequence: Synthetic oligonucleotide
  Antisense strand to SEQ ID NO: 163848
uucaaucgcuucauggaac

SEQ ID NO: 163850 - RNA, 19 nt, Artificial Sequence
  Description of Artificial Sequence: Synthetic oligonucleotide
  Sense strand starting at position 1643 of SEQ ID NO: 2111
ccuuaagaucuccgaagcu

SEQ ID NO: 163851 - RNA, 19 nt, Artificial Sequence
  Description of Artificial Sequence: Synthetic oligonucleotide
  Antisense strand to SEQ ID NO: 163850
agcuucggagaucuuaagg

SEQ ID NO: 163852 - RNA, 19 nt, Artificial Sequence
  Description of Artificial Sequence: Synthetic oligonucleotide
  Sense strand starting at position 1036 of SEQ ID NO: 2111
gcgggaaggaauugaauca

SEQ ID NO: 163853 - RNA, 19 nt, Artificial Sequence
  Description of Artificial Sequence: Synthetic oligonucleotide
  Antisense strand to SEQ ID NO: 163852
ugauucaauuccuucccgc

SEQ ID NO: 163854 - RNA, 19 nt, Artificial Sequence
  Description of Artificial Sequence: Synthetic oligonucleotide
  Sense strand starting at position 983 of SEQ ID NO: 2111
agcggacuccaagaguaaa

SEQ ID NO: 163855 - RNA, 19 nt, Artificial Sequence
  Description of Artificial Sequence: Synthetic oligonucleotide
  Antisense strand to SEQ ID NO: 163854
uuuacucuuggaguccgcu

SEQ ID NO: 163856 - RNA, 19 nt, Artificial Sequence
  Description of Artificial Sequence: Synthetic oligonucleotide
  Sense strand starting at position 865 of SEQ ID NO: 2111
ccagcacgagccugauaaa

SEQ ID NO: 163857 - RNA, 19 nt, Artificial Sequence
  Description of Artificial Sequence: Synthetic oligonucleotide
  Antisense strand to SEQ ID NO: 163856
uuuaucaggcucgugcugg

SEQ ID NO: 163858 - RNA, 19 nt, Artificial Sequence
  Description of Artificial Sequence: Synthetic oligonucleotide
  Sense strand starting at position 823 of SEQ ID NO: 2111
guacuaauuuccuacagga

SEQ ID NO: 163859 - RNA, 19 nt, Artificial Sequence
  Description of Artificial Sequence: Synthetic oligonucleotide
  Antisense strand to SEQ ID NO: 163858
uccuguaggaaauuaguac

SEQ ID NO: 163860 - RNA, 19 nt, Artificial Sequence
  Description of Artificial Sequence: Synthetic oligonucleotide
  Sense strand starting at position 807 of SEQ ID NO: 2111
ucuagaucuugaucuagua

SEQ ID NO: 163861 - RNA, 19 nt, Artificial Sequence
  Description of Artificial Sequence: Synthetic oligonucleotide
  Antisense strand to SEQ ID NO: 163860
uacuagaucaagaucuaga

SEQ ID NO: 163862 - RNA, 19 nt, Artificial Sequence
  Description of Artificial Sequence: Synthetic oligonucleotide
  Sense strand starting at position 756 of SEQ ID NO: 2111
guuugcaagcccugagaga

SEQ ID NO: 163863 - RNA, 19 nt, Artificial Sequence
  Description of Artificial Sequence: Synthetic oligonucleotide
  Antisense strand to SEQ ID NO: 163862
ucucucagggcuugcaaac

SEQ ID NO: 163864 - RNA, 19 nt, Artificial Sequence
  Description of Artificial Sequence: Synthetic oligonucleotide
  Sense strand starting at position 701 of SEQ ID NO: 2111
cggauauauuggcuuagau

SEQ ID NO: 163865 - RNA, 19 nt, Artificial Sequence
  Description of Artificial Sequence: Synthetic oligonucleotide
  Antisense strand to SEQ ID NO: 163864
aucuaagccaauauauccg

SEQ ID NO: 163866 - RNA, 19 nt, Artificial Sequence
  Description of Artificial Sequence: Synthetic oligonucleotide
  Sense strand starting at position 700 of SEQ ID NO: 2111
acggauauauuggcuuaga

SEQ ID NO: 163867 - RNA, 19 nt, Artificial Sequence
  Description of Artificial Sequence: Synthetic oligonucleotide
  Antisense strand to SEQ ID NO: 163866
ucuaagccaauauauccgu

SEQ ID NO: 163868 - RNA, 19 nt, Artificial Sequence
  Description of Artificial Sequence: Synthetic oligonucleotide
  Sense strand starting at position 571 of SEQ ID NO: 2111
uccaauucggaguguccaa

SEQ ID NO: 163869 - RNA, 19 nt, Artificial Sequence
  Description of Artificial Sequence: Synthetic oligonucleotide
  Antisense strand to SEQ ID NO: 163868
uuggacacuccgaauugga

SEQ ID NO: 163870 - RNA, 19 nt, Artificial Sequence
  Description of Artificial Sequence: Synthetic oligonucleotide
  Sense strand starting at position 502 of SEQ ID NO: 2111
gggauaacauucuaacaug

SEQ ID NO: 163871 - RNA, 19 nt, Artificial Sequence
  Description of Artificial Sequence: Synthetic oligonucleotide
  Antisense strand to SEQ ID NO: 163870
cauguuagaauguuauccc

SEQ ID NO: 163872 - RNA, 19 nt, Artificial Sequence
  Description of Artificial Sequence: Synthetic oligonucleotide
  Sense strand starting at position 453 of SEQ ID NO: 2111
cuuacuguuugccuaagaa

SEQ ID NO: 163873 - RNA, 19 nt, Artificial Sequence
  Description of Artificial Sequence: Synthetic oligonucleotide
  Antisense strand to SEQ ID NO: 163872
uucuuaggcaaacaguaag

SEQ ID NO: 163874 - RNA, 19 nt, Artificial Sequence
  Description of Artificial Sequence: Synthetic oligonucleotide
  Sense strand starting at position 452 of SEQ ID NO: 2111
ucuuacuguuugccuaaga

SEQ ID NO: 163875 - RNA, 19 nt, Artificial Sequence
  Description of Artificial Sequence: Synthetic oligonucleotide
  Antisense strand to SEQ ID NO: 163874
ucuuaggcaaacaguaaga

SEQ ID NO: 163876 - RNA, 19 nt, Artificial Sequence
  Description of Artificial Sequence: Synthetic oligonucleotide
  Sense strand starting at position 413 of SEQ ID NO: 2111
ucgauacgcuaaucugaaa

SEQ ID NO: 163877 - RNA, 19 nt, Artificial Sequence
  Description of Artificial Sequence: Synthetic oligonucleotide
  Antisense strand to SEQ ID NO: 163876
uuucagauuagcguaucga

SEQ ID NO: 163878 - RNA, 19 nt, Artificial Sequence
  Description of Artificial Sequence: Synthetic oligonucleotide
  Sense strand starting at position 405 of SEQ ID NO: 2111
uugcaaauucgauacgcua

SEQ ID NO: 163879 - RNA, 19 nt, Artificial Sequence
  Description of Artificial Sequence: Synthetic oligonucleotide
  Antisense strand to SEQ ID NO: 163878
uagcguaucgaauuugcaa

SEQ ID NO: 163880 - RNA, 19 nt, Artificial Sequence
  Description of Artificial Sequence: Synthetic oligonucleotide
  Sense strand starting at position 394 of SEQ ID NO: 2111
ucauaagcaguuugcaaau

SEQ ID NO: 163881 - RNA, 19 nt, Artificial Sequence
  Description of Artificial Sequence: Synthetic oligonucleotide
  Antisense strand to SEQ ID NO: 163880
auuugcaaacugcuuauga

SEQ ID NO: 163882 - RNA, 19 nt, Artificial Sequence
  Description of Artificial Sequence: Synthetic oligonucleotide
  Sense strand starting at position 150 of SEQ ID NO: 2111
auuguaggcuguguacuaa

SEQ ID NO: 163883 - RNA, 19 nt, Artificial Sequence
  Description of Artificial Sequence: Synthetic oligonucleotide
  Antisense strand to SEQ ID NO: 163882
uuaguacacagccuacaau

SEQ ID NO: 163884 - RNA, 19 nt, Artificial Sequence
  Description of Artificial Sequence: Synthetic oligonucleotide
  Sense strand starting at position 149 of SEQ ID NO: 2111
aauuguaggcuguguacua

SEQ ID NO: 163885 - RNA, 19 nt, Artificial Sequence
  Description of Artificial Sequence: Synthetic oligonucleotide
  Antisense strand to SEQ ID NO: 163884
uaguacacagccuacaauu

SEQ ID NO: 163886 - RNA, 19 nt, Artificial Sequence
  Description of Artificial Sequence: Synthetic oligonucleotide
  Sense strand starting at position 2 of SEQ ID NO: 2111
guaucuggcauguggaaga

SEQ ID NO: 163887 - RNA, 19 nt, Artificial Sequence
  Description of Artificial Sequence: Synthetic oligonucleotide
  Antisense strand to SEQ ID NO: 163886
ucuuccacaugccagauac

SEQ ID NO: 163888 - RNA, 19 nt, Artificial Sequence
  Description of Artificial Sequence: Synthetic oligonucleotide
  Sense strand starting at position 17 of SEQ ID NO: 2112
uauaaucaucgauaugagu

SEQ ID NO: 163889 - RNA, 19 nt, Artificial Sequence
  Description of Artificial Sequence: Synthetic oligonucleotide
  Antisense strand to SEQ ID NO: 163888
acucauaucgaugauuaua

SEQ ID NO: 163890 - RNA, 19 nt, Artificial Sequence
  Description of Artificial Sequence: Synthetic oligonucleotide
  Sense strand starting at position 41 of SEQ ID NO: 2112
aagcaugaaugggaauuua

SEQ ID NO: 163891 - RNA, 19 nt, Artificial Sequence
  Description of Artificial Sequence: Synthetic oligonucleotide
  Antisense strand to SEQ ID NO: 163890
uaaauucccauucaugcuu

SEQ ID NO: 163892 - RNA, 19 nt, Artificial Sequence
  Description of Artificial Sequence: Synthetic oligonucleotide
  Sense strand starting at position 84 of SEQ ID NO: 2112
cuuuaauaacgagagcaau

SEQ ID NO: 163893 - RNA, 19 nt, Artificial Sequence
  Description of Artificial Sequence: Synthetic oligonucleotide
  Antisense strand to SEQ ID NO: 163892
auugcucucguuauuaaag

SEQ ID NO: 163894 - RNA, 19 nt, Artificial Sequence
  Description of Artificial Sequence: Synthetic oligonucleotide
  Sense strand starting at position 90 of SEQ ID NO: 2112
uaacgagagcaauguguga

SEQ ID NO: 163895 - RNA, 19 nt, Artificial Sequence
  Description of Artificial Sequence: Synthetic oligonucleotide
  Antisense strand to SEQ ID NO: 163894
ucacacauugcucucguua

SEQ ID NO: 163896 - RNA, 19 nt, Artificial Sequence
  Description of Artificial Sequence: Synthetic oligonucleotide
  Sense strand starting at position 94 of SEQ ID NO: 2112
gagagcaaugugugaguca

SEQ ID NO: 163897 - RNA, 19 nt, Artificial Sequence
  Description of Artificial Sequence: Synthetic oligonucleotide
  Antisense strand to SEQ ID NO: 163896
ugacucacacauugcucuc

SEQ ID NO: 163898 - RNA, 19 nt, Artificial Sequence
  Description of Artificial Sequence: Synthetic oligonucleotide
  Sense strand starting at position 97 of SEQ ID NO: 2112
agcaaugugugagucagaa

SEQ ID NO: 163899 - RNA, 19 nt, Artificial Sequence
  Description of Artificial Sequence: Synthetic oligonucleotide
  Antisense strand to SEQ ID NO: 163898
uucugacucacacauugcu

SEQ ID NO: 163900 - RNA, 19 nt, Artificial Sequence
  Description of Artificial Sequence: Synthetic oligonucleotide
  Sense strand starting at position 271 of SEQ ID NO: 2112
ggacggcgaguguagaaau

SEQ ID NO: 163901 - RNA, 19 nt, Artificial Sequence
  Description of Artificial Sequence: Synthetic oligonucleotide
  Antisense strand to SEQ ID NO: 163900
auuucuacacucgccgucc

SEQ ID NO: 163902 - RNA, 19 nt, Artificial Sequence
  Description of Artificial Sequence: Synthetic oligonucleotide
  Sense strand starting at position 386 of SEQ ID NO: 2112
auguccaaguccuuaagau

SEQ ID NO: 163903 - RNA, 19 nt, Artificial Sequence
  Description of Artificial Sequence: Synthetic oligonucleotide
  Antisense strand to SEQ ID NO: 163902
aucuuaaggacuuggacau

SEQ ID NO: 163904 - RNA, 19 nt, Artificial Sequence
  Description of Artificial Sequence: Synthetic oligonucleotide
  Sense strand starting at position 387 of SEQ ID NO: 2112
uguccaaguccuuaagaug

SEQ ID NO: 163905 - RNA, 19 nt, Artificial Sequence
  Description of Artificial Sequence: Synthetic oligonucleotide
  Antisense strand to SEQ ID NO: 163904
caucuuaaggacuuggaca

SEQ ID NO: 163906 - RNA, 19 nt, Artificial Sequence
  Description of Artificial Sequence: Synthetic oligonucleotide
  Sense strand starting at position 396 of SEQ ID NO: 2112
ccuuaagauguauaggcaa

SEQ ID NO: 163907 - RNA, 19 nt, Artificial Sequence
  Description of Artificial Sequence: Synthetic oligonucleotide
  Antisense strand to SEQ ID NO: 163906
uugccuauacaucuuaagg

SEQ ID NO: 163908 - RNA, 19 nt, Artificial Sequence
  Description of Artificial Sequence: Synthetic oligonucleotide
  Sense strand starting at position 399 of SEQ ID NO: 2112
uaagauguauaggcaauau

SEQ ID NO: 163909 - RNA, 19 nt, Artificial Sequence
  Description of Artificial Sequence: Synthetic oligonucleotide
  Antisense strand to SEQ ID NO: 163908
auauugccuauacaucuua

SEQ ID NO: 163910 - RNA, 19 nt, Artificial Sequence
  Description of Artificial Sequence: Synthetic oligonucleotide
  Sense strand starting at position 491 of SEQ ID NO: 2112
agcagacauauguauggua

SEQ ID NO: 163911 - RNA, 19 nt, Artificial Sequence
  Description of Artificial Sequence: Synthetic oligonucleotide
  Antisense strand to SEQ ID NO: 163910
uaccauacauaugucugcu

SEQ ID NO: 163912 - RNA, 19 nt, Artificial Sequence
  Description of Artificial Sequence: Synthetic oligonucleotide
  Sense strand starting at position 493 of SEQ ID NO: 2112
cagacauauguaugguaca

SEQ ID NO: 163913 - RNA, 19 nt, Artificial Sequence
  Description of Artificial Sequence: Synthetic oligonucleotide
  Antisense strand to SEQ ID NO: 163912
uguaccauacauaugucug

SEQ ID NO: 163914 - RNA, 19 nt, Artificial Sequence
  Description of Artificial Sequence: Synthetic oligonucleotide
  Sense strand starting at position 1028 of SEQ ID NO: 2112
agggaauggugagaacaaa

SEQ ID NO: 163915 - RNA, 19 nt, Artificial Sequence
  Description of Artificial Sequence: Synthetic oligonucleotide
  Antisense strand to SEQ ID NO: 163914
uuuguucucaccauucccu

SEQ ID NO: 163916 - RNA, 19 nt, Artificial Sequence
  Description of Artificial Sequence: Synthetic oligonucleotide
  Sense strand starting at position 1368 of SEQ ID NO: 2112
gggcgugaaccucgaagaa

SEQ ID NO: 163917 - RNA, 19 nt, Artificial Sequence
  Description of Artificial Sequence: Synthetic oligonucleotide
  Antisense strand to SEQ ID NO: 163916
uucuucgagguucacgccc

SEQ ID NO: 163918 - RNA, 19 nt, Artificial Sequence
  Description of Artificial Sequence: Synthetic oligonucleotide
  Sense strand starting at position 1377 of SEQ ID NO: 2112
ccucgaagaaugugaacuu

SEQ ID NO: 163919 - RNA, 19 nt, Artificial Sequence
  Description of Artificial Sequence: Synthetic oligonucleotide
  Antisense strand to SEQ ID NO: 163918
aaguucacauucuucgagg

SEQ ID NO: 163920 - RNA, 19 nt, Artificial Sequence
  Description of Artificial Sequence: Synthetic oligonucleotide
  Sense strand starting at position 1901 of SEQ ID NO: 2112
gacucuucucgcgagacuu

SEQ ID NO: 163921 - RNA, 19 nt, Artificial Sequence
  Description of Artificial Sequence: Synthetic oligonucleotide
  Antisense strand to SEQ ID NO: 163920
aagucucgcgagaagaguc

SEQ ID NO: 163922 - RNA, 19 nt, Artificial Sequence
  Description of Artificial Sequence: Synthetic oligonucleotide
  Sense strand starting at position 1970 of SEQ ID NO: 2112
cgguucuuucccgcgagaa

SEQ ID NO: 163923 - RNA, 19 nt, Artificial Sequence
  Description of Artificial Sequence: Synthetic oligonucleotide
  Antisense strand to SEQ ID NO: 163922
uucucgcgggaaagaaccg

SEQ ID NO: 163924 - RNA, 19 nt, Artificial Sequence
  Description of Artificial Sequence: Synthetic oligonucleotide
  Sense strand starting at position 2240 of SEQ ID NO: 2112
cagagaggcugccuuaaau

SEQ ID NO: 163925 - RNA, 19 nt, Artificial Sequence
  Description of Artificial Sequence: Synthetic oligonucleotide
  Antisense strand to SEQ ID NO: 163924
auuuaaggcagccucucug

SEQ ID NO: 163926 - RNA, 19 nt, Artificial Sequence
  Description of Artificial Sequence: Synthetic oligonucleotide
  Sense strand starting at position 2252 of SEQ ID NO: 2112
cuuaaauuucccgguuggu

SEQ ID NO: 163927 - RNA, 19 nt, Artificial Sequence
  Description of Artificial Sequence: Synthetic oligonucleotide
  Antisense strand to SEQ ID NO: 163926
accaaccgggaaauuuaag

SEQ ID NO: 163928 - RNA, 19 nt, Artificial Sequence
  Description of Artificial Sequence: Synthetic oligonucleotide
  Sense strand starting at position 2357 of SEQ ID NO: 2112
uuguauugaguguguaaag

SEQ ID NO: 163929 - RNA, 19 nt, Artificial Sequence
  Description of Artificial Sequence: Synthetic oligonucleotide
  Antisense strand to SEQ ID NO: 163928
cuuuacacacucaauacaa

SEQ ID NO: 163930 - RNA, 19 nt, Artificial Sequence
  Description of Artificial Sequence: Synthetic oligonucleotide
  Sense strand starting at position 2619 of SEQ ID NO: 2112
ucagaacgccuuuauauuc

SEQ ID NO: 163931 - RNA, 19 nt, Artificial Sequence
  Description of Artificial Sequence: Synthetic oligonucleotide
  Antisense strand to SEQ ID NO: 163930
gaauauaaaggcguucuga

SEQ ID NO: 163932 - RNA, 19 nt, Artificial Sequence
  Description of Artificial Sequence: Synthetic oligonucleotide
  Sense strand starting at position 2638 of SEQ ID NO: 2112
uuguguauuacggaagauu

SEQ ID NO: 163933 - RNA, 19 nt, Artificial Sequence
  Description of Artificial Sequence: Synthetic oligonucleotide
  Antisense strand to SEQ ID NO: 163932
aaucuuccguaauacacaa

SEQ ID NO: 163934 - RNA, 19 nt, Artificial Sequence
  Description of Artificial Sequence: Synthetic oligonucleotide
  Sense strand starting at position 2641 of SEQ ID NO: 2112
uguauuacggaagauucca

SEQ ID NO: 163935 - RNA, 19 nt, Artificial Sequence
  Description of Artificial Sequence: Synthetic oligonucleotide
  Antisense strand to SEQ ID NO: 163934
uggaaucuuccguaauaca

SEQ ID NO: 163936 - RNA, 19 nt, Artificial Sequence
  Description of Artificial Sequence: Synthetic oligonucleotide
  Sense strand starting at position 3099 of SEQ ID NO: 2112
aaacuccacguuuguaaga

SEQ ID NO: 163937 - RNA, 19 nt, Artificial Sequence
  Description of Artificial Sequence: Synthetic oligonucleotide
  Antisense strand to SEQ ID NO: 163936
ucuuacaaacguggaguuu

SEQ ID NO: 163938 - RNA, 19 nt, Artificial Sequence
  Description of Artificial Sequence: Synthetic oligonucleotide
  Sense strand starting at position 3109 of SEQ ID NO: 2112
uuuguaagagaaugagcau

SEQ ID NO: 163939 - RNA, 19 nt, Artificial Sequence
  Description of Artificial Sequence: Synthetic oligonucleotide
  Antisense strand to SEQ ID NO: 163938
augcucauucucuuacaaa

SEQ ID NO: 163940 - RNA, 19 nt, Artificial Sequence
  Description of Artificial Sequence: Synthetic oligonucleotide
  Sense strand starting at position 3135 of SEQ ID NO: 2112
gcaaauaaucuuuaguaug

SEQ ID NO: 163941 - RNA, 19 nt, Artificial Sequence
  Description of Artificial Sequence: Synthetic oligonucleotide
  Antisense strand to SEQ ID NO: 163940
cauacuaaagauuauuugc

SEQ ID NO: 163942 - RNA, 19 nt, Artificial Sequence
  Description of Artificial Sequence: Synthetic oligonucleotide
  Sense strand starting at position 3181 of SEQ ID NO: 2112
gccauuuccugcucgauaa

SEQ ID NO: 163943 - RNA, 19 nt, Artificial Sequence
  Description of Artificial Sequence: Synthetic oligonucleotide
  Antisense strand to SEQ ID NO: 163942
uuaucgagcaggaaauggc

SEQ ID NO: 163944 - RNA, 19 nt, Artificial Sequence
  Description of Artificial Sequence: Synthetic oligonucleotide
  Sense strand starting at position 3182 of SEQ ID NO: 2112
ccauuuccugcucgauaag

SEQ ID NO: 163945 - RNA, 19 nt, Artificial Sequence
  Description of Artificial Sequence: Synthetic oligonucleotide
  Antisense strand to SEQ ID NO: 163944
cuuaucgagcaggaaaugg

SEQ ID NO: 163946 - RNA, 19 nt, Artificial Sequence
  Description of Artificial Sequence: Synthetic oligonucleotide
  Sense strand starting at position 3185 of SEQ ID NO: 2112
uuuccugcucgauaagagu

SEQ ID NO: 163947 - RNA, 19 nt, Artificial Sequence
  Description of Artificial Sequence: Synthetic oligonucleotide
  Antisense strand to SEQ ID NO: 163946
acucuuaucgagcaggaaa

SEQ ID NO: 163948 - RNA, 19 nt, Artificial Sequence
  Description of Artificial Sequence: Synthetic oligonucleotide
  Sense strand starting at position 3338 of SEQ ID NO: 2112
ugugucaaucagcaucuaa

SEQ ID NO: 163949 - RNA, 19 nt, Artificial Sequence
  Description of Artificial Sequence: Synthetic oligonucleotide
  Antisense strand to SEQ ID NO: 163948
uuagaugcugauugacaca

SEQ ID NO: 163950 - RNA, 19 nt, Artificial Sequence
  Description of Artificial Sequence: Synthetic oligonucleotide
  Sense strand starting at position 3358 of SEQ ID NO: 2112
acaauuaagugauucgaua

SEQ ID NO: 163951 - RNA, 19 nt, Artificial Sequence
  Description of Artificial Sequence: Synthetic oligonucleotide
  Antisense strand to SEQ ID NO: 163950
uaucgaaucacuuaauugu

SEQ ID NO: 163952 - RNA, 19 nt, Artificial Sequence
  Description of Artificial Sequence: Synthetic oligonucleotide
  Sense strand starting at position 3365 of SEQ ID NO: 2112
agugauucgauacagguga

SEQ ID NO: 163953 - RNA, 19 nt, Artificial Sequence
  Description of Artificial Sequence: Synthetic oligonucleotide
  Antisense strand to SEQ ID NO: 163952
ucaccuguaucgaaucacu

SEQ ID NO: 163954 - RNA, 19 nt, Artificial Sequence
  Description of Artificial Sequence: Synthetic oligonucleotide
  Sense strand starting at position 3369 of SEQ ID NO: 2112
auucgauacaggugaugau

SEQ ID NO: 163955 - RNA, 19 nt, Artificial Sequence
  Description of Artificial Sequence: Synthetic oligonucleotide
  Antisense strand to SEQ ID NO: 163954
aucaucaccuguaucgaau

SEQ ID NO: 163956 - RNA, 19 nt, Artificial Sequence
  Description of Artificial Sequence: Synthetic oligonucleotide
  Sense strand starting at position 3378 of SEQ ID NO: 2112
aggugaugauaguuuguag

SEQ ID NO: 163957 - RNA, 19 nt, Artificial Sequence
  Description of Artificial Sequence: Synthetic oligonucleotide
  Antisense strand to SEQ ID NO: 163956
cuacaaacuaucaucaccu

SEQ ID NO: 163958 - RNA, 19 nt, Artificial Sequence
  Description of Artificial Sequence: Synthetic oligonucleotide
  Sense strand starting at position 3558 of SEQ ID NO: 2112
gucagacauugugcuagaa

SEQ ID NO: 163959 - RNA, 19 nt, Artificial Sequence
  Description of Artificial Sequence: Synthetic oligonucleotide
  Antisense strand to SEQ ID NO: 163958
uucuagcacaaugucugac

SEQ ID NO: 163960 - RNA, 19 nt, Artificial Sequence
  Description of Artificial Sequence: Synthetic oligonucleotide
  Sense strand starting at position 3562 of SEQ ID NO: 2112
gacauugugcuagaagcuu

SEQ ID NO: 163961 - RNA, 19 nt, Artificial Sequence
  Description of Artificial Sequence: Synthetic oligonucleotide
  Antisense strand to SEQ ID NO: 163960
aagcuucuagcacaauguc

SEQ ID NO: 163962 - RNA, 19 nt, Artificial Sequence
  Description of Artificial Sequence: Synthetic oligonucleotide
  Sense strand starting at position 3568 of SEQ ID NO: 2112
gugcuagaagcuugaaauu

SEQ ID NO: 163963 - RNA, 19 nt, Artificial Sequence
  Description of Artificial Sequence: Synthetic oligonucleotide
  Antisense strand to SEQ ID NO: 163962
aauuucaagcuucuagcac

SEQ ID NO: 163964 - RNA, 19 nt, Artificial Sequence
  Description of Artificial Sequence: Synthetic oligonucleotide
  Sense strand starting at position 3619 of SEQ ID NO: 2112
gggcgauggcaaugagaaa

SEQ ID NO: 163965 - RNA, 19 nt, Artificial Sequence
  Description of Artificial Sequence: Synthetic oligonucleotide
  Antisense strand to SEQ ID NO: 163964
uuucucauugccaucgccc

SEQ ID NO: 163966 - RNA, 19 nt, Artificial Sequence
  Description of Artificial Sequence: Synthetic oligonucleotide
  Sense strand starting at position 3651 of SEQ ID NO: 2112
agguuuguuauaugaaaga

SEQ ID NO: 163967 - RNA, 19 nt, Artificial Sequence
  Description of Artificial Sequence: Synthetic oligonucleotide
  Antisense strand to SEQ ID NO: 163966
ucuuucauauaacaaaccu

SEQ ID NO: 163968 - RNA, 19 nt, Artificial Sequence
  Description of Artificial Sequence: Synthetic oligonucleotide
  Sense strand starting at position 3982 of SEQ ID NO: 2113
uuuauuaugcaggagucau

SEQ ID NO: 163969 - RNA, 19 nt, Artificial Sequence
  Description of Artificial Sequence: Synthetic oligonucleotide
  Antisense strand to SEQ ID NO: 163968
augacuccugcauaauaaa

SEQ ID NO: 163970 - RNA, 19 nt, Artificial Sequence
  Description of Artificial Sequence: Synthetic oligonucleotide
  Sense strand starting at position 3941 of SEQ ID NO: 2113
uaacauugagaugguuaau

SEQ ID NO: 163971 - RNA, 19 nt, Artificial Sequence
  Description of Artificial Sequence: Synthetic oligonucleotide
  Antisense strand to SEQ ID NO: 163970
auuaaccaucucaauguua

SEQ ID NO: 163972 - RNA, 19 nt, Artificial Sequence
  Description of Artificial Sequence: Synthetic oligonucleotide
  Sense strand starting at position 3818 of SEQ ID NO: 2113
gcuguauguagcccucagu

SEQ ID NO: 163973 - RNA, 19 nt, Artificial Sequence
  Description of Artificial Sequence: Synthetic oligonucleotide
  Antisense strand to SEQ ID NO: 163972
acugagggcuacauacagc

SEQ ID NO: 163974 - RNA, 19 nt, Artificial Sequence
  Description of Artificial Sequence: Synthetic oligonucleotide
  Sense strand starting at position 3749 of SEQ ID NO: 2113
ugguauuuguagcuuauau

SEQ ID NO: 163975 - RNA, 19 nt, Artificial Sequence
  Description of Artificial Sequence: Synthetic oligonucleotide
  Antisense strand to SEQ ID NO: 163974
auauaagcuacaaauacca

SEQ ID NO: 163976 - RNA, 19 nt, Artificial Sequence
  Description of Artificial Sequence: Synthetic oligonucleotide
  Sense strand starting at position 3623 of SEQ ID NO: 2113
auuagaacugcuuagguua

SEQ ID NO: 163977 - RNA, 19 nt, Artificial Sequence
  Description of Artificial Sequence: Synthetic oligonucleotide
  Antisense strand to SEQ ID NO: 163976
uaaccuaagcaguucuaau

SEQ ID NO: 163978 - RNA, 19 nt, Artificial Sequence
  Description of Artificial Sequence: Synthetic oligonucleotide
  Sense strand starting at position 3588 of SEQ ID NO: 2113
cauggauucugacucuuag

SEQ ID NO: 163979 - RNA, 19 nt, Artificial Sequence
  Description of Artificial Sequence: Synthetic oligonucleotide
  Antisense strand to SEQ ID NO: 163978
cuaagagucagaauccaug

SEQ ID NO: 163980 - RNA, 19 nt, Artificial Sequence
  Description of Artificial Sequence: Synthetic oligonucleotide
  Sense strand starting at position 3536 of SEQ ID NO: 2113
guacuuauugacuagacuc

SEQ ID NO: 163981 - RNA, 19 nt, Artificial Sequence
  Description of Artificial Sequence: Synthetic oligonucleotide
  Antisense strand to SEQ ID NO: 163980
gagucuagucaauaaguac

SEQ ID NO: 163982 - RNA, 19 nt, Artificial Sequence
  Description of Artificial Sequence: Synthetic oligonucleotide
  Sense strand starting at position 3535 of SEQ ID NO: 2113
uguacuuauugacuagacu

SEQ ID NO: 163983 - RNA, 19 nt, Artificial Sequence
  Description of Artificial Sequence: Synthetic oligonucleotide
  Antisense strand to SEQ ID NO: 163982
agucuagucaauaaguaca

SEQ ID NO: 163984 - RNA, 19 nt, Artificial Sequence
  Description of Artificial Sequence: Synthetic oligonucleotide
  Sense strand starting at position 3528 of SEQ ID NO: 2113
gcuagaauguacuuauuga

SEQ ID NO: 163985 - RNA, 19 nt, Artificial Sequence
  Description of Artificial Sequence: Synthetic oligonucleotide
  Antisense strand to SEQ ID NO: 163984
ucaauaaguacauucuagc

SEQ ID NO: 163986 - RNA, 19 nt, Artificial Sequence
  Description of Artificial Sequence: Synthetic oligonucleotide
  Sense strand starting at position 3496 of SEQ ID NO: 2113
gugaaugaguauucucaaa

SEQ ID NO: 163987 - RNA, 19 nt, Artificial Sequence
  Description of Artificial Sequence: Synthetic oligonucleotide
  Antisense strand to SEQ ID NO: 163986
uuugagaauacucauucac

SEQ ID NO: 163988 - RNA, 19 nt, Artificial Sequence
  Description of Artificial Sequence: Synthetic oligonucleotide
  Sense strand starting at position 3489 of SEQ ID NO: 2113
uaaguaagugaaugaguau

SEQ ID NO: 163989 - RNA, 19 nt, Artificial Sequence
  Description of Artificial Sequence: Synthetic oligonucleotide
  Antisense strand to SEQ ID NO: 163988
auacucauucacuuacuua

SEQ ID NO: 163990 - RNA, 19 nt, Artificial Sequence
  Description of Artificial Sequence: Synthetic oligonucleotide
  Sense strand starting at position 3485 of SEQ ID NO: 2113
gcaauaaguaagugaauga

SEQ ID NO: 163991 - RNA, 19 nt, Artificial Sequence
  Description of Artificial Sequence: Synthetic oligonucleotide
  Antisense strand to SEQ ID NO: 163990
ucauucacuuacuuauugc

SEQ ID NO: 163992 - RNA, 19 nt, Artificial Sequence
  Description of Artificial Sequence: Synthetic oligonucleotide
  Sense strand starting at position 3081 of SEQ ID NO: 2113
uugugacauguauaaagua

SEQ ID NO: 163993 - RNA, 19 nt, Artificial Sequence
  Description of Artificial Sequence: Synthetic oligonucleotide
  Antisense strand to SEQ ID NO: 163992
uacuuuauacaugucacaa

SEQ ID NO: 163994 - RNA, 19 nt, Artificial Sequence
  Description of Artificial Sequence: Synthetic oligonucleotide
  Sense strand starting at position 2873 of SEQ ID NO: 2113
gcacaaaucuggguaccau

SEQ ID NO: 163995 - RNA, 19 nt, Artificial Sequence
  Description of Artificial Sequence: Synthetic oligonucleotide
  Antisense strand to SEQ ID NO: 163994
augguacccagauuugugc

SEQ ID NO: 163996 - RNA, 19 nt, Artificial Sequence
  Description of Artificial Sequence: Synthetic oligonucleotide
  Sense strand starting at position 2818 of SEQ ID NO: 2113
cacacagaguguuugaaug

SEQ ID NO: 163997 - RNA, 19 nt, Artificial Sequence
  Description of Artificial Sequence: Synthetic oligonucleotide
  Antisense strand to SEQ ID NO: 163996
cauucaaacacucugugug

SEQ ID NO: 163998 - RNA, 19 nt, Artificial Sequence
  Description of Artificial Sequence: Synthetic oligonucleotide
  Sense strand starting at position 2596 of SEQ ID NO: 2113
cuaucaaaucacgggcaaa

SEQ ID NO: 163999 - RNA, 19 nt, Artificial Sequence
  Description of Artificial Sequence: Synthetic oligonucleotide
  Antisense strand to SEQ ID NO: 163998
uuugcccgugauuugauag

SEQ ID NO: 164000 - RNA, 19 nt, Artificial Sequence
  Description of Artificial Sequence: Synthetic oligonucleotide
  Sense strand starting at position 2556 of SEQ ID NO: 2113
cauucugugggauaagcaa

SEQ ID NO: 164001 - RNA, 19 nt, Artificial Sequence
  Description of Artificial Sequence: Synthetic oligonucleotide
  Antisense strand to SEQ ID NO: 164000
uugcuuaucccacagaaug

SEQ ID NO: 164002 - RNA, 19 nt, Artificial Sequence
  Description of Artificial Sequence: Synthetic oligonucleotide
  Sense strand starting at position 2553 of SEQ ID NO: 2113
ccacauucugugggauaag

SEQ ID NO: 164003 - RNA, 19 nt, Artificial Sequence
  Description of Artificial Sequence: Synthetic oligonucleotide
  Antisense strand to SEQ ID NO: 164002
cuuaucccacagaaugugg

SEQ ID NO: 164004 - RNA, 19 nt, Artificial Sequence
  Description of Artificial Sequence: Synthetic oligonucleotide
  Sense strand starting at position 2551 of SEQ ID NO: 2113
ucccacauucugugggaua

SEQ ID NO: 164005 - RNA, 19 nt, Artificial Sequence
  Description of Artificial Sequence: Synthetic oligonucleotide
  Antisense strand to SEQ ID NO: 164004
uaucccacagaauguggga

SEQ ID NO: 164006 - RNA, 19 nt, Artificial Sequence
  Description of Artificial Sequence: Synthetic oligonucleotide
  Sense strand starting at position 2402 of SEQ ID NO: 2113
ccagaauuucugugcucua

SEQ ID NO: 164007 - RNA, 19 nt, Artificial Sequence
  Description of Artificial Sequence: Synthetic oligonucleotide
  Antisense strand to SEQ ID NO: 164006
uagagcacagaaauucugg

SEQ ID NO: 164008 - RNA, 19 nt, Artificial Sequence
  Description of Artificial Sequence: Synthetic oligonucleotide
  Sense strand starting at position 2401 of SEQ ID NO: 2113
gccagaauuucugugcucu

SEQ ID NO: 164009 - RNA, 19 nt, Artificial Sequence
  Description of Artificial Sequence: Synthetic oligonucleotide
  Antisense strand to SEQ ID NO: 164008
agagcacagaaauucuggc

SEQ ID NO: 164010 - RNA, 19 nt, Artificial Sequence
  Description of Artificial Sequence: Synthetic oligonucleotide
  Sense strand starting at position 2277 of SEQ ID NO: 2113
uagaaaccucagugaaggu

SEQ ID NO: 164011 - RNA, 19 nt, Artificial Sequence
  Description of Artificial Sequence: Synthetic oligonucleotide
  Antisense strand to SEQ ID NO: 164010
accuucacugagguuucua

SEQ ID NO: 164012 - RNA, 19 nt, Artificial Sequence
  Description of Artificial Sequence: Synthetic oligonucleotide
  Sense strand starting at position 2265 of SEQ ID NO: 2113
aaaccugucggguagaaac

SEQ ID NO: 164013 - RNA, 19 nt, Artificial Sequence
  Description of Artificial Sequence: Synthetic oligonucleotide
  Antisense strand to SEQ ID NO: 164012
guuucuacccgacagguuu

SEQ ID NO: 164014 - RNA, 19 nt, Artificial Sequence
  Description of Artificial Sequence: Synthetic oligonucleotide
  Sense strand starting at position 1893 of SEQ ID NO: 2113
acgcacuuacuugauugaa

SEQ ID NO: 164015 - RNA, 19 nt, Artificial Sequence
  Description of Artificial Sequence: Synthetic oligonucleotide
  Antisense strand to SEQ ID NO: 164014
uucaaucaaguaagugcgu

SEQ ID NO: 164016 - RNA, 19 nt, Artificial Sequence
  Description of Artificial Sequence: Synthetic oligonucleotide
  Sense strand starting at position 1591 of SEQ ID NO: 2113
cccucaauacaacgagaau

SEQ ID NO: 164017 - RNA, 19 nt, Artificial Sequence
  Description of Artificial Sequence: Synthetic oligonucleotide
  Antisense strand to SEQ ID NO: 164016
auucucguuguauugaggg

SEQ ID NO: 164018 - RNA, 19 nt, Artificial Sequence
  Description of Artificial Sequence: Synthetic oligonucleotide
  Sense strand starting at position 1353 of SEQ ID NO: 2113
gaguaaacugccuaaaguu

SEQ ID NO: 164019 - RNA, 19 nt, Artificial Sequence
  Description of Artificial Sequence: Synthetic oligonucleotide
  Antisense strand to SEQ ID NO: 164018
aacuuuaggcaguuuacuc

SEQ ID NO: 164020 - RNA, 19 nt, Artificial Sequence
  Description of Artificial Sequence: Synthetic oligonucleotide
  Sense strand starting at position 1289 of SEQ ID NO: 2113
aaccuuaugcgguaggaau

SEQ ID NO: 164021 - RNA, 19 nt, Artificial Sequence
  Description of Artificial Sequence: Synthetic oligonucleotide
  Antisense strand to SEQ ID NO: 164020
auuccuaccgcauaagguu

SEQ ID NO: 164022 - RNA, 19 nt, Artificial Sequence
  Description of Artificial Sequence: Synthetic oligonucleotide
  Sense strand starting at position 1246 of SEQ ID NO: 2113
ccgagagcucaagauucua

SEQ ID NO: 164023 - RNA, 19 nt, Artificial Sequence
  Description of Artificial Sequence: Synthetic oligonucleotide
  Antisense strand to SEQ ID NO: 164022
uagaaucuugagcucucgg

SEQ ID NO: 164024 - RNA, 19 nt, Artificial Sequence
  Description of Artificial Sequence: Synthetic oligonucleotide
  Sense strand starting at position 1198 of SEQ ID NO: 2113
accgacuuacauugaacaa

SEQ ID NO: 164025 - RNA, 19 nt, Artificial Sequence
  Description of Artificial Sequence: Synthetic oligonucleotide
  Antisense strand to SEQ ID NO: 164024
uuguucaauguaagucggu

SEQ ID NO: 164026 - RNA, 19 nt, Artificial Sequence
  Description of Artificial Sequence: Synthetic oligonucleotide
  Sense strand starting at position 1111 of SEQ ID NO: 2113
acauacuaggcaggauuaa

SEQ ID NO: 164027 - RNA, 19 nt, Artificial Sequence
  Description of Artificial Sequence: Synthetic oligonucleotide
  Antisense strand to SEQ ID NO: 164026
uuaauccugccuaguaugu

SEQ ID NO: 164028 - RNA, 19 nt, Artificial Sequence
  Description of Artificial Sequence: Synthetic oligonucleotide
  Sense strand starting at position 951 of SEQ ID NO: 2113
gugcgugaugaagaauuga

SEQ ID NO: 164029 - RNA, 19 nt, Artificial Sequence
  Description of Artificial Sequence: Synthetic oligonucleotide
  Antisense strand to SEQ ID NO: 164028
ucaauucuucaucacgcac

SEQ ID NO: 164030 - RNA, 19 nt, Artificial Sequence
  Description of Artificial Sequence: Synthetic oligonucleotide
  Sense strand starting at position 854 of SEQ ID NO: 2113
ucgauauuaguguaaagga

SEQ ID NO: 164031 - RNA, 19 nt, Artificial Sequence
  Description of Artificial Sequence: Synthetic oligonucleotide
  Antisense strand to SEQ ID NO: 164030
uccuuuacacuaauaucga

SEQ ID NO: 164032 - RNA, 19 nt, Artificial Sequence
  Description of Artificial Sequence: Synthetic oligonucleotide
  Sense strand starting at position 757 of SEQ ID NO: 2113
agaccagacuuugucucaa

SEQ ID NO: 164033 - RNA, 19 nt, Artificial Sequence
  Description of Artificial Sequence: Synthetic oligonucleotide
  Antisense strand to SEQ ID NO: 164032
uugagacaaagucuggucu

SEQ ID NO: 164034 - RNA, 19 nt, Artificial Sequence
  Description of Artificial Sequence: Synthetic oligonucleotide
  Sense strand starting at position 638 of SEQ ID NO: 2113
gguggugcgcggcuauaau

SEQ ID NO: 164035 - RNA, 19 nt, Artificial Sequence
  Description of Artificial Sequence: Synthetic oligonucleotide
  Antisense strand to SEQ ID NO: 164034
auuauagccgcgcaccacc

SEQ ID NO: 164036 - RNA, 19 nt, Artificial Sequence
  Description of Artificial Sequence: Synthetic oligonucleotide
  Sense strand starting at position 407 of SEQ ID NO: 2113
uuaccauuacugugaagac

SEQ ID NO: 164037 - RNA, 19 nt, Artificial Sequence
  Description of Artificial Sequence: Synthetic oligonucleotide
  Antisense strand to SEQ ID NO: 164036
gucuucacaguaaugguaa

SEQ ID NO: 164038 - RNA, 19 nt, Artificial Sequence
  Description of Artificial Sequence: Synthetic oligonucleotide
  Sense strand starting at position 360 of SEQ ID NO: 2113
gagguauuauuagcacuga

SEQ ID NO: 164039 - RNA, 19 nt, Artificial Sequence
  Description of Artificial Sequence: Synthetic oligonucleotide
  Antisense strand to SEQ ID NO: 164038
ucagugcuaauaauaccuc

SEQ ID NO: 164040 - RNA, 19 nt, Artificial Sequence
  Description of Artificial Sequence: Synthetic oligonucleotide
  Sense strand starting at position 188 of SEQ ID NO: 2113
uagggaagucauggugauu

SEQ ID NO: 164041 - RNA, 19 nt, Artificial Sequence
  Description of Artificial Sequence: Synthetic oligonucleotide
  Antisense strand to SEQ ID NO: 164040
aaucaccaugacuucccua

SEQ ID NO: 164042 - RNA, 19 nt, Artificial Sequence
  Description of Artificial Sequence: Synthetic oligonucleotide
  Sense strand starting at position 120 of SEQ ID NO: 2113
acugaagugucucuuacaa

SEQ ID NO: 164043 - RNA, 19 nt, Artificial Sequence
  Description of Artificial Sequence: Synthetic oligonucleotide
  Antisense strand to SEQ ID NO: 164042
uuguaagagacacuucagu

SEQ ID NO: 164044 - RNA, 19 nt, Artificial Sequence
  Description of Artificial Sequence: Synthetic oligonucleotide
  Sense strand starting at position 82 of SEQ ID NO: 2113
aaaggugguucuuuaauaa

SEQ ID NO: 164045 - RNA, 19 nt, Artificial Sequence
  Description of Artificial Sequence: Synthetic oligonucleotide
  Antisense strand to SEQ ID NO: 164044
uuauuaaagaaccaccuuu

SEQ ID NO: 164046 - RNA, 19 nt, Artificial Sequence
  Description of Artificial Sequence: Synthetic oligonucleotide
  Sense strand starting at position 55 of SEQ ID NO: 2113
aaagguagguuguuacuau

SEQ ID NO: 164047 - RNA, 19 nt, Artificial Sequence
  Description of Artificial Sequence: Synthetic oligonucleotide
  Antisense strand to SEQ ID NO: 164046
auaguaacaaccuaccuuu

SEQ ID NO: 164048 - RNA, 19 nt, Artificial Sequence
  Description of Artificial Sequence: Synthetic oligonucleotide
  Sense strand starting at position 148 of SEQ ID NO: 2114
acauauaugguauguauac

SEQ ID NO: 164049 - RNA, 19 nt, Artificial Sequence
  Description of Artificial Sequence: Synthetic oligonucleotide
  Antisense strand to SEQ ID NO: 164048
guauacauaccauauaugu

SEQ ID NO: 164050 - RNA, 19 nt, Artificial Sequence
  Description of Artificial Sequence: Synthetic oligonucleotide
  Sense strand starting at position 368 of SEQ ID NO: 2114
uuucucauacgugaaacau

SEQ ID NO: 164051 - RNA, 19 nt, Artificial Sequence
  Description of Artificial Sequence: Synthetic oligonucleotide
  Antisense strand to SEQ ID NO: 164050
auguuucacguaugagaaa

SEQ ID NO: 164052 - RNA, 19 nt, Artificial Sequence
  Description of Artificial Sequence: Synthetic oligonucleotide
  Sense strand starting at position 377 of SEQ ID NO: 2114
cgugaaacauacuuaggua

SEQ ID NO: 164053 - RNA, 19 nt, Artificial Sequence
  Description of Artificial Sequence: Synthetic oligonucleotide
  Antisense strand to SEQ ID NO: 164052
uaccuaaguauguuucacg

SEQ ID NO: 164054 - RNA, 19 nt, Artificial Sequence
  Description of Artificial Sequence: Synthetic oligonucleotide
  Sense strand starting at position 438 of SEQ ID NO: 2114
gggaguaaacgguagcuau

SEQ ID NO: 164055 - RNA, 19 nt, Artificial Sequence
  Description of Artificial Sequence: Synthetic oligonucleotide
  Antisense strand to SEQ ID NO: 164054
auagcuaccguuuacuccc

SEQ ID NO: 164056 - RNA, 19 nt, Artificial Sequence
  Description of Artificial Sequence: Synthetic oligonucleotide
  Sense strand starting at position 442 of SEQ ID NO: 2114
guaaacgguagcuauauua

SEQ ID NO: 164057 - RNA, 19 nt, Artificial Sequence
  Description of Artificial Sequence: Synthetic oligonucleotide
  Antisense strand to SEQ ID NO: 164056
uaauauagcuaccguuuac

SEQ ID NO: 164058 - RNA, 19 nt, Artificial Sequence
  Description of Artificial Sequence: Synthetic oligonucleotide
  Sense strand starting at position 491 of SEQ ID NO: 2114
agccaagaguucucuaaca

SEQ ID NO: 164059 - RNA, 19 nt, Artificial Sequence
  Description of Artificial Sequence: Synthetic oligonucleotide
  Antisense strand to SEQ ID NO: 164058
uguuagagaacucuuggcu

SEQ ID NO: 164060 - RNA, 19 nt, Artificial Sequence
  Description of Artificial Sequence: Synthetic oligonucleotide
  Sense strand starting at position 680 of SEQ ID NO: 2114
gccgaaguagauuaagaau

SEQ ID NO: 164061 - RNA, 19 nt, Artificial Sequence
  Description of Artificial Sequence: Synthetic oligonucleotide
  Antisense strand to SEQ ID NO: 164060
auucuuaaucuacuucggc

SEQ ID NO: 164062 - RNA, 19 nt, Artificial Sequence
  Description of Artificial Sequence: Synthetic oligonucleotide
  Sense strand starting at position 946 of SEQ ID NO: 2114
gcaagacgauacuuucgaa

SEQ ID NO: 164063 - RNA, 19 nt, Artificial Sequence
  Description of Artificial Sequence: Synthetic oligonucleotide
  Antisense strand to SEQ ID NO: 164062
uucgaaaguaucgucuugc

SEQ ID NO: 164064 - RNA, 19 nt, Artificial Sequence
  Description of Artificial Sequence: Synthetic oligonucleotide
  Sense strand starting at position 960 of SEQ ID NO: 2114
ucgaaacugucacuagacu

SEQ ID NO: 164065 - RNA, 19 nt, Artificial Sequence
  Description of Artificial Sequence: Synthetic oligonucleotide
  Antisense strand to SEQ ID NO: 164064
agucuagugacaguuucga

SEQ ID NO: 164066 - RNA, 19 nt, Artificial Sequence
  Description of Artificial Sequence: Synthetic oligonucleotide
  Sense strand starting at position 961 of SEQ ID NO: 2114
cgaaacugucacuagacua

SEQ ID NO: 164067 - RNA, 19 nt, Artificial Sequence
  Description of Artificial Sequence: Synthetic oligonucleotide
  Antisense strand to SEQ ID NO: 164066
uagucuagugacaguuucg

SEQ ID NO: 164068 - RNA, 19 nt, Artificial Sequence
  Description of Artificial Sequence: Synthetic oligonucleotide
  Sense strand starting at position 1156 of SEQ ID NO: 2114
guuggugucuacccagaaa

SEQ ID NO: 164069 - RNA, 19 nt, Artificial Sequence
  Description of Artificial Sequence: Synthetic oligonucleotide
  Antisense strand to SEQ ID NO: 164068
uuucuggguagacaccaac

SEQ ID NO: 164070 - RNA, 19 nt, Artificial Sequence
  Description of Artificial Sequence: Synthetic oligonucleotide
  Sense strand starting at position 1159 of SEQ ID NO: 2114
ggugucuacccagaaacga

SEQ ID NO: 164071 - RNA, 19 nt, Artificial Sequence
  Description of Artificial Sequence: Synthetic oligonucleotide
  Antisense strand to SEQ ID NO: 164070
ucguuucuggguagacacc

SEQ ID NO: 164072 - RNA, 19 nt, Artificial Sequence
  Description of Artificial Sequence: Synthetic oligonucleotide
  Sense strand starting at position 1549 of SEQ ID NO: 2114
ucccguagcccuuaaagaa

SEQ ID NO: 164073 - RNA, 19 nt, Artificial Sequence
  Description of Artificial Sequence: Synthetic oligonucleotide
  Antisense strand to SEQ ID NO: 164072
uucuuuaagggcuacggga

SEQ ID NO: 164074 - RNA, 19 nt, Artificial Sequence
  Description of Artificial Sequence: Synthetic oligonucleotide
  Sense strand starting at position 2071 of SEQ ID NO: 2114
ccgggugugguuuggauuu

SEQ ID NO: 164075 - RNA, 19 nt, Artificial Sequence
  Description of Artificial Sequence: Synthetic oligonucleotide
  Antisense strand to SEQ ID NO: 164074
aaauccaaaccacacccgg

SEQ ID NO: 164076 - RNA, 19 nt, Artificial Sequence
  Description of Artificial Sequence: Synthetic oligonucleotide
  Sense strand starting at position 2221 of SEQ ID NO: 2114
cagaguugucuugagaauu

SEQ ID NO: 164077 - RNA, 19 nt, Artificial Sequence
  Description of Artificial Sequence: Synthetic oligonucleotide
  Antisense strand to SEQ ID NO: 164076
aauucucaagacaacucug

SEQ ID NO: 164078 - RNA, 19 nt, Artificial Sequence
  Description of Artificial Sequence: Synthetic oligonucleotide
  Sense strand starting at position 2240 of SEQ ID NO: 2114
auaugagaauacguacaua

SEQ ID NO: 164079 - RNA, 19 nt, Artificial Sequence
  Description of Artificial Sequence: Synthetic oligonucleotide
  Antisense strand to SEQ ID NO: 164078
uauguacguauucucauau

SEQ ID NO: 164080 - RNA, 19 nt, Artificial Sequence
  Description of Artificial Sequence: Synthetic oligonucleotide
  Sense strand starting at position 2282 of SEQ ID NO: 2114
ucaagugcccaauaaauga

SEQ ID NO: 164081 - RNA, 19 nt, Artificial Sequence
  Description of Artificial Sequence: Synthetic oligonucleotide
  Antisense strand to SEQ ID NO: 164080
ucauuuauugggcacuuga

SEQ ID NO: 164082 - RNA, 19 nt, Artificial Sequence
  Description of Artificial Sequence: Synthetic oligonucleotide
  Sense strand starting at position 2315 of SEQ ID NO: 2114
uuaagaggacacugcuuaa

SEQ ID NO: 164083 - RNA, 19 nt, Artificial Sequence
  Description of Artificial Sequence: Synthetic oligonucleotide
  Antisense strand to SEQ ID NO: 164082
uuaagcaguguccucuuaa

SEQ ID NO: 164084 - RNA, 19 nt, Artificial Sequence
  Description of Artificial Sequence: Synthetic oligonucleotide
  Sense strand starting at position 2386 of SEQ ID NO: 2114
caugacgccgaguaaauua

SEQ ID NO: 164085 - RNA, 19 nt, Artificial Sequence
  Description of Artificial Sequence: Synthetic oligonucleotide
  Antisense strand to SEQ ID NO: 164084
uaauuuacucggcgucaug

SEQ ID NO: 164086 - RNA, 19 nt, Artificial Sequence
  Description of Artificial Sequence: Synthetic oligonucleotide
  Sense strand starting at position 2394 of SEQ ID NO: 2114
cgaguaaauuacuugacca

SEQ ID NO: 164087 - RNA, 19 nt, Artificial Sequence
  Description of Artificial Sequence: Synthetic oligonucleotide
  Antisense strand to SEQ ID NO: 164086
uggucaaguaauuuacucg

SEQ ID NO: 164088 - RNA, 19 nt, Artificial Sequence
  Description of Artificial Sequence: Synthetic oligonucleotide
  Sense strand starting at position 2804 of SEQ ID NO: 2114
ugugaaaguacuuggaaca

SEQ ID NO: 164089 - RNA, 19 nt, Artificial Sequence
  Description of Artificial Sequence: Synthetic oligonucleotide
  Antisense strand to SEQ ID NO: 164088
uguuccaaguacuuucaca

SEQ ID NO: 164090 - RNA, 19 nt, Artificial Sequence
  Description of Artificial Sequence: Synthetic oligonucleotide
  Sense strand starting at position 2816 of SEQ ID NO: 2114
uggaacagugucugaaaca

SEQ ID NO: 164091 - RNA, 19 nt, Artificial Sequence
  Description of Artificial Sequence: Synthetic oligonucleotide
  Antisense strand to SEQ ID NO: 164090
uguuucagacacuguucca

SEQ ID NO: 164092 - RNA, 19 nt, Artificial Sequence
  Description of Artificial Sequence: Synthetic oligonucleotide
  Sense strand starting at position 2823 of SEQ ID NO: 2114
gugucugaaacaugguaag

SEQ ID NO: 164093 - RNA, 19 nt, Artificial Sequence
  Description of Artificial Sequence: Synthetic oligonucleotide
  Antisense strand to SEQ ID NO: 164092
cuuaccauguuucagacac

SEQ ID NO: 164094 - RNA, 19 nt, Artificial Sequence
  Description of Artificial Sequence: Synthetic oligonucleotide
  Sense strand starting at position 3024 of SEQ ID NO: 2114
ucugaaauguccuuuagga

SEQ ID NO: 164095 - RNA, 19 nt, Artificial Sequence
  Description of Artificial Sequence: Synthetic oligonucleotide
  Antisense strand to SEQ ID NO: 164094
uccuaaaggacauuucaga

SEQ ID NO: 164096 - RNA, 19 nt, Artificial Sequence
  Description of Artificial Sequence: Synthetic oligonucleotide
  Sense strand starting at position 3031 of SEQ ID NO: 2114
uguccuuuaggagguuaau

SEQ ID NO: 164097 - RNA, 19 nt, Artificial Sequence
  Description of Artificial Sequence: Synthetic oligonucleotide
  Antisense strand to SEQ ID NO: 164096
auuaaccuccuaaaggaca

SEQ ID NO: 164098 - RNA, 19 nt, Artificial Sequence
  Description of Artificial Sequence: Synthetic oligonucleotide
  Sense strand starting at position 3078 of SEQ ID NO: 2114
cuauacauaugguucuaca

SEQ ID NO: 164099 - RNA, 19 nt, Artificial Sequence
  Description of Artificial Sequence: Synthetic oligonucleotide
  Antisense strand to SEQ ID NO: 164098
uguagaaccauauguauag

SEQ ID NO: 164100 - RNA, 19 nt, Artificial Sequence
  Description of Artificial Sequence: Synthetic oligonucleotide
  Sense strand starting at position 3307 of SEQ ID NO: 2114
auaggauauuugggucaga

SEQ ID NO: 164101 - RNA, 19 nt, Artificial Sequence
  Description of Artificial Sequence: Synthetic oligonucleotide
  Antisense strand to SEQ ID NO: 164100
ucugacccaaauauccuau

SEQ ID NO: 164102 - RNA, 19 nt, Artificial Sequence
  Description of Artificial Sequence: Synthetic oligonucleotide
  Sense strand starting at position 3413 of SEQ ID NO: 2114
gccaaucugagaggugaaa

SEQ ID NO: 164103 - RNA, 19 nt, Artificial Sequence
  Description of Artificial Sequence: Synthetic oligonucleotide
  Antisense strand to SEQ ID NO: 164102
uuucaccucucagauuggc

SEQ ID NO: 164104 - RNA, 19 nt, Artificial Sequence
  Description of Artificial Sequence: Synthetic oligonucleotide
  Sense strand starting at position 3438 of SEQ ID NO: 2114
aucuccaagugguuuaauu

SEQ ID NO: 164105 - RNA, 19 nt, Artificial Sequence
  Description of Artificial Sequence: Synthetic oligonucleotide
  Antisense strand to SEQ ID NO: 164104
aauuaaaccacuuggagau

SEQ ID NO: 164106 - RNA, 19 nt, Artificial Sequence
  Description of Artificial Sequence: Synthetic oligonucleotide
  Sense strand starting at position 3515 of SEQ ID NO: 2114
uccuauuucugucugugua

SEQ ID NO: 164107 - RNA, 19 nt, Artificial Sequence
  Description of Artificial Sequence: Synthetic oligonucleotide
  Antisense strand to SEQ ID NO: 164106
uacacagacagaaauagga

SEQ ID NO: 164108 - RNA, 19 nt, Artificial Sequence
  Description of Artificial Sequence: Synthetic oligonucleotide
  Sense strand starting at position 3516 of SEQ ID NO: 2114
ccuauuucugucuguguau

SEQ ID NO: 164109 - RNA, 19 nt, Artificial Sequence
  Description of Artificial Sequence: Synthetic oligonucleotide
  Antisense strand to SEQ ID NO: 164108
auacacagacagaaauagg

SEQ ID NO: 164110 - RNA, 19 nt, Artificial Sequence
  Description of Artificial Sequence: Synthetic oligonucleotide
  Sense strand starting at position 3517 of SEQ ID NO: 2114
cuauuucugucuguguaua

SEQ ID NO: 164111 - RNA, 19 nt, Artificial Sequence
  Description of Artificial Sequence: Synthetic oligonucleotide
  Antisense strand to SEQ ID NO: 164110
uauacacagacagaaauag

SEQ ID NO: 164112 - RNA, 19 nt, Artificial Sequence
  Description of Artificial Sequence: Synthetic oligonucleotide
  Sense strand starting at position 3518 of SEQ ID NO: 2114
uauuucugucuguguauau

SEQ ID NO: 164113 - RNA, 19 nt, Artificial Sequence
  Description of Artificial Sequence: Synthetic oligonucleotide
  Antisense strand to SEQ ID NO: 164112
auauacacagacagaaaua

SEQ ID NO: 164114 - RNA, 19 nt, Artificial Sequence
  Description of Artificial Sequence: Synthetic oligonucleotide
  Sense strand starting at position 3529 of SEQ ID NO: 2114
guguauauccuuuacccau

SEQ ID NO: 164115 - RNA, 19 nt, Artificial Sequence
  Description of Artificial Sequence: Synthetic oligonucleotide
  Antisense strand to SEQ ID NO: 164114
auggguaaaggauauacac

SEQ ID NO: 164116 - RNA, 19 nt, Artificial Sequence
  Description of Artificial Sequence: Synthetic oligonucleotide
  Sense strand starting at position 3559 of SEQ ID NO: 2114
auaggugcucacuauauau

SEQ ID NO: 164117 - RNA, 19 nt, Artificial Sequence
  Description of Artificial Sequence: Synthetic oligonucleotide
  Antisense strand to SEQ ID NO: 164116
auauauagugagcaccuau

SEQ ID NO: 164118 - RNA, 19 nt, Artificial Sequence
  Description of Artificial Sequence: Synthetic oligonucleotide
  Sense strand starting at position 3561 of SEQ ID NO: 2114
aggugcucacuauauauua

SEQ ID NO: 164119 - RNA, 19 nt, Artificial Sequence
  Description of Artificial Sequence: Synthetic oligonucleotide
  Antisense strand to SEQ ID NO: 164118
uaauauauagugagcaccu

SEQ ID NO: 164120 - RNA, 19 nt, Artificial Sequence
  Description of Artificial Sequence: Synthetic oligonucleotide
  Sense strand starting at position 3636 of SEQ ID NO: 2114
ugacuuugccaagaguguu

SEQ ID NO: 164121 - RNA, 19 nt, Artificial Sequence
  Description of Artificial Sequence: Synthetic oligonucleotide
  Antisense strand to SEQ ID NO: 164120
aacacucuuggcaaaguca

SEQ ID NO: 164122 - RNA, 19 nt, Artificial Sequence
  Description of Artificial Sequence: Synthetic oligonucleotide
  Sense strand starting at position 3673 of SEQ ID NO: 2114
auuagauauuuaugggauc

SEQ ID NO: 164123 - RNA, 19 nt, Artificial Sequence
  Description of Artificial Sequence: Synthetic oligonucleotide
  Antisense strand to SEQ ID NO: 164122
gaucccauaaauaucuaau

SEQ ID NO: 164124 - RNA, 19 nt, Artificial Sequence
  Description of Artificial Sequence: Synthetic oligonucleotide
  Sense strand starting at position 3674 of SEQ ID NO: 2114
uuagauauuuaugggauca

SEQ ID NO: 164125 - RNA, 19 nt, Artificial Sequence
  Description of Artificial Sequence: Synthetic oligonucleotide
  Antisense strand to SEQ ID NO: 164124
ugaucccauaaauaucuaa

SEQ ID NO: 164126 - RNA, 19 nt, Artificial Sequence
  Description of Artificial Sequence: Synthetic oligonucleotide
  Sense strand starting at position 3676 of SEQ ID NO: 2114
agauauuuaugggaucaau

SEQ ID NO: 164127 - RNA, 19 nt, Artificial Sequence
  Description of Artificial Sequence: Synthetic oligonucleotide
  Antisense strand to SEQ ID NO: 164126
auugaucccauaaauaucu

SEQ ID NO: 164128 - RNA, 19 nt, Artificial Sequence
  Description of Artificial Sequence: Synthetic oligonucleotide
  Sense strand starting at position 205 of SEQ ID NO: 2115
ggcgguucucccaacguga

SEQ ID NO: 164129 - RNA, 19 nt, Artificial Sequence
  Description of Artificial Sequence: Synthetic oligonucleotide
  Antisense strand to SEQ ID NO: 164128
ucacguugggagaaccgcc

SEQ ID NO: 164130 - RNA, 19 nt, Artificial Sequence
  Description of Artificial Sequence: Synthetic oligonucleotide
  Sense strand starting at position 455 of SEQ ID NO: 2115
ccacucaccuccgauaaga

SEQ ID NO: 164131 - RNA, 19 nt, Artificial Sequence
  Description of Artificial Sequence: Synthetic oligonucleotide
  Antisense strand to SEQ ID NO: 164130
ucuuaucggaggugagugg

SEQ ID NO: 164132 - RNA, 19 nt, Artificial Sequence
  Description of Artificial Sequence: Synthetic oligonucleotide
  Sense strand starting at position 496 of SEQ ID NO: 2115
uccuacgugcaguaaauau

SEQ ID NO: 164133 - RNA, 19 nt, Artificial Sequence
  Description of Artificial Sequence: Synthetic oligonucleotide
  Antisense strand to SEQ ID NO: 164132
auauuuacugcacguagga

SEQ ID NO: 164134 - RNA, 19 nt, Artificial Sequence
  Description of Artificial Sequence: Synthetic oligonucleotide
  Sense strand starting at position 523 of SEQ ID NO: 2115
guauaaagcuaaccuggaa

SEQ ID NO: 164135 - RNA, 19 nt, Artificial Sequence
  Description of Artificial Sequence: Synthetic oligonucleotide
  Antisense strand to SEQ ID NO: 164134
uuccagguuagcuuuauac

SEQ ID NO: 164136 - RNA, 19 nt, Artificial Sequence
  Description of Artificial Sequence: Synthetic oligonucleotide
  Sense strand starting at position 2666 of SEQ ID NO: 2115
cgcggcugcuccuuuacua

SEQ ID NO: 164137 - RNA, 19 nt, Artificial Sequence
  Description of Artificial Sequence: Synthetic oligonucleotide
  Antisense strand to SEQ ID NO: 164136
uaguaaaggagcagccgcg

SEQ ID NO: 164138 - RNA, 19 nt, Artificial Sequence
  Description of Artificial Sequence: Synthetic oligonucleotide
  Sense strand starting at position 2832 of SEQ ID NO: 2115
uugccagucuuggcaaguu

SEQ ID NO: 164139 - RNA, 19 nt, Artificial Sequence
  Description of Artificial Sequence: Synthetic oligonucleotide
  Antisense strand to SEQ ID NO: 164138
aacuugccaagacuggcaa

SEQ ID NO: 164140 - RNA, 19 nt, Artificial Sequence
  Description of Artificial Sequence: Synthetic oligonucleotide
  Sense strand starting at position 2857 of SEQ ID NO: 2115
ucggcuucugcacgggaaa

SEQ ID NO: 164141 - RNA, 19 nt, Artificial Sequence
  Description of Artificial Sequence: Synthetic oligonucleotide
  Antisense strand to SEQ ID NO: 164140
uuucccgugcagaagccga

SEQ ID NO: 164142 - RNA, 19 nt, Artificial Sequence
  Description of Artificial Sequence: Synthetic oligonucleotide
  Sense strand starting at position 2921 of SEQ ID NO: 2115
gcggaaugcucgccacaga

SEQ ID NO: 164143 - RNA, 19 nt, Artificial Sequence
  Description of Artificial Sequence: Synthetic oligonucleotide
  Antisense strand to SEQ ID NO: 164142
ucuguggcgagcauuccgc

SEQ ID NO: 164144 - RNA, 19 nt, Artificial Sequence
  Description of Artificial Sequence: Synthetic oligonucleotide
  Sense strand starting at position 2922 of SEQ ID NO: 2115
cggaaugcucgccacagaa

SEQ ID NO: 164145 - RNA, 19 nt, Artificial Sequence
  Description of Artificial Sequence: Synthetic oligonucleotide
  Antisense strand to SEQ ID NO: 164144
uucuguggcgagcauuccg

SEQ ID NO: 164146 - RNA, 19 nt, Artificial Sequence
  Description of Artificial Sequence: Synthetic oligonucleotide
  Sense strand starting at position 2924 of SEQ ID NO: 2115
gaaugcucgccacagaaau

SEQ ID NO: 164147 - RNA, 19 nt, Artificial Sequence
  Description of Artificial Sequence: Synthetic oligonucleotide
  Antisense strand to SEQ ID NO: 164146
auuucuguggcgagcauuc

SEQ ID NO: 164148 - RNA, 19 nt, Artificial Sequence
  Description of Artificial Sequence: Synthetic oligonucleotide
  Sense strand starting at position 3010 of SEQ ID NO: 2115
ggaagcuuccauugucagu

SEQ ID NO: 164149 - RNA, 19 nt, Artificial Sequence
  Description of Artificial Sequence: Synthetic oligonucleotide
  Antisense strand to SEQ ID NO: 164148
acugacaauggaagcuucc

SEQ ID NO: 164150 - RNA, 19 nt, Artificial Sequence
  Description of Artificial Sequence: Synthetic oligonucleotide
  Sense strand starting at position 3016 of SEQ ID NO: 2115
uuccauugucagugaccca

SEQ ID NO: 164151 - RNA, 19 nt, Artificial Sequence
  Description of Artificial Sequence: Synthetic oligonucleotide
  Antisense strand to SEQ ID NO: 164150
ugggucacugacaauggaa

SEQ ID NO: 164152 - RNA, 19 nt, Artificial Sequence
  Description of Artificial Sequence: Synthetic oligonucleotide
  Sense strand starting at position 3032 of SEQ ID NO: 2115
ccagguguacaaugggaaa

SEQ ID NO: 164153 - RNA, 19 nt, Artificial Sequence
  Description of Artificial Sequence: Synthetic oligonucleotide
  Antisense strand to SEQ ID NO: 164152
uuucccauuguacaccugg

SEQ ID NO: 164154 - RNA, 19 nt, Artificial Sequence
  Description of Artificial Sequence: Synthetic oligonucleotide
  Sense strand starting at position 3034 of SEQ ID NO: 2115
agguguacaaugggaaauu

SEQ ID NO: 164155 - RNA, 19 nt, Artificial Sequence
  Description of Artificial Sequence: Synthetic oligonucleotide
  Antisense strand to SEQ ID NO: 164154
aauuucccauuguacaccu

SEQ ID NO: 164156 - RNA, 19 nt, Artificial Sequence
  Description of Artificial Sequence: Synthetic oligonucleotide
  Sense strand starting at position 3065 of SEQ ID NO: 2115
ggcagagugacccagcuau

SEQ ID NO: 164157 - RNA, 19 nt, Artificial Sequence
  Description of Artificial Sequence: Synthetic oligonucleotide
  Antisense strand to SEQ ID NO: 164156
auagcugggucacucugcc

SEQ ID NO: 164158 - RNA, 19 nt, Artificial Sequence
  Description of Artificial Sequence: Synthetic oligonucleotide
  Sense strand starting at position 3159 of SEQ ID NO: 2115
accagauaccggcgaaaua

SEQ ID NO: 164159 - RNA, 19 nt, Artificial Sequence
  Description of Artificial Sequence: Synthetic oligonucleotide
  Antisense strand to SEQ ID NO: 164158
uauuucgccgguaucuggu

SEQ ID NO: 164160 - RNA, 19 nt, Artificial Sequence
  Description of Artificial Sequence: Synthetic oligonucleotide
  Sense strand starting at position 3211 of SEQ ID NO: 2115
gagagcggaucucuuuaaa

SEQ ID NO: 164161 - RNA, 19 nt, Artificial Sequence
  Description of Artificial Sequence: Synthetic oligonucleotide
  Antisense strand to SEQ ID NO: 164160
uuuaaagagauccgcucuc

SEQ ID NO: 164162 - RNA, 19 nt, Artificial Sequence
  Description of Artificial Sequence: Synthetic oligonucleotide
  Sense strand starting at position 3214 of SEQ ID NO: 2115
agcggaucucuuuaaaugu

SEQ ID NO: 164163 - RNA, 19 nt, Artificial Sequence
  Description of Artificial Sequence: Synthetic oligonucleotide
  Antisense strand to SEQ ID NO: 164162
acauuuaaagagauccgcu

SEQ ID NO: 164164 - RNA, 19 nt, Artificial Sequence
  Description of Artificial Sequence: Synthetic oligonucleotide
  Sense strand starting at position 3245 of SEQ ID NO: 2115
ucggcacugucucuuuaaa

SEQ ID NO: 164165 - RNA, 19 nt, Artificial Sequence
  Description of Artificial Sequence: Synthetic oligonucleotide
  Antisense strand to SEQ ID NO: 164164
uuuaaagagacagugccga

SEQ ID NO: 164166 - RNA, 19 nt, Artificial Sequence
  Description of Artificial Sequence: Synthetic oligonucleotide
  Sense strand starting at position 3280 of SEQ ID NO: 2115
agcuguguaagcgcugauu

SEQ ID NO: 164167 - RNA, 19 nt, Artificial Sequence
  Description of Artificial Sequence: Synthetic oligonucleotide
  Antisense strand to SEQ ID NO: 164166
aaucagcgcuuacacagcu

SEQ ID NO: 164168 - RNA, 19 nt, Artificial Sequence
  Description of Artificial Sequence: Synthetic oligonucleotide
  Sense strand starting at position 3297 of SEQ ID NO: 2115
uuggcugccuguuuggaua

SEQ ID NO: 164169 - RNA, 19 nt, Artificial Sequence
  Description of Artificial Sequence: Synthetic oligonucleotide
  Antisense strand to SEQ ID NO: 164168
uauccaaacaggcagccaa

SEQ ID NO: 164170 - RNA, 19 nt, Artificial Sequence
  Description of Artificial Sequence: Synthetic oligonucleotide
  Sense strand starting at position 3300 of SEQ ID NO: 2115
gcugccuguuuggauacau

SEQ ID NO: 164171 - RNA, 19 nt, Artificial Sequence
  Description of Artificial Sequence: Synthetic oligonucleotide
  Antisense strand to SEQ ID NO: 164170
auguauccaaacaggcagc

SEQ ID NO: 164172 - RNA, 19 nt, Artificial Sequence
  Description of Artificial Sequence: Synthetic oligonucleotide
  Sense strand starting at position 3330 of SEQ ID NO: 2115
ccuugaaacuguuagccua

SEQ ID NO: 164173 - RNA, 19 nt, Artificial Sequence
  Description of Artificial Sequence: Synthetic oligonucleotide
  Antisense strand to SEQ ID NO: 164172
uaggcuaacaguuucaagg

SEQ ID NO: 164174 - RNA, 19 nt, Artificial Sequence
  Description of Artificial Sequence: Synthetic oligonucleotide
  Sense strand starting at position 3337 of SEQ ID NO: 2115
acuguuagccuagguugau

SEQ ID NO: 164175 - RNA, 19 nt, Artificial Sequence
  Description of Artificial Sequence: Synthetic oligonucleotide
  Antisense strand to SEQ ID NO: 164174
aucaaccuaggcuaacagu

SEQ ID NO: 164176 - RNA, 19 nt, Artificial Sequence
  Description of Artificial Sequence: Synthetic oligonucleotide
  Sense strand starting at position 3338 of SEQ ID NO: 2115
cuguuagccuagguugauu

SEQ ID NO: 164177 - RNA, 19 nt, Artificial Sequence
  Description of Artificial Sequence: Synthetic oligonucleotide
  Antisense strand to SEQ ID NO: 164176
aaucaaccuaggcuaacag

SEQ ID NO: 164178 - RNA, 19 nt, Artificial Sequence
  Description of Artificial Sequence: Synthetic oligonucleotide
  Sense strand starting at position 3611 of SEQ ID NO: 2115
ugcauugguucaggaagga

SEQ ID NO: 164179 - RNA, 19 nt, Artificial Sequence
  Description of Artificial Sequence: Synthetic oligonucleotide
  Antisense strand to SEQ ID NO: 164178
uccuuccugaaccaaugca

SEQ ID NO: 164180 - RNA, 19 nt, Artificial Sequence
  Description of Artificial Sequence: Synthetic oligonucleotide
  Sense strand starting at position 3626 of SEQ ID NO: 2115
aggagacucugggugcauu

SEQ ID NO: 164181 - RNA, 19 nt, Artificial Sequence
  Description of Artificial Sequence: Synthetic oligonucleotide
  Antisense strand to SEQ ID NO: 164180
aaugcacccagagucuccu

SEQ ID NO: 164182 - RNA, 19 nt, Artificial Sequence
  Description of Artificial Sequence: Synthetic oligonucleotide
  Sense strand starting at position 3648 of SEQ ID NO: 2115
ggaauaauguucuacucaa

SEQ ID NO: 164183 - RNA, 19 nt, Artificial Sequence
  Description of Artificial Sequence: Synthetic oligonucleotide
  Antisense strand to SEQ ID NO: 164182
uugaguagaacauuauucc

SEQ ID NO: 164184 - RNA, 19 nt, Artificial Sequence
  Description of Artificial Sequence: Synthetic oligonucleotide
  Sense strand starting at position 3655 of SEQ ID NO: 2115
uguucuacucaauguaaca

SEQ ID NO: 164185 - RNA, 19 nt, Artificial Sequence
  Description of Artificial Sequence: Synthetic oligonucleotide
  Antisense strand to SEQ ID NO: 164184
uguuacauugaguagaaca

SEQ ID NO: 164186 - RNA, 19 nt, Artificial Sequence
  Description of Artificial Sequence: Synthetic oligonucleotide
  Sense strand starting at position 3821 of SEQ ID NO: 2115
uuuaaagguuguuucguga

SEQ ID NO: 164187 - RNA, 19 nt, Artificial Sequence
  Description of Artificial Sequence: Synthetic oligonucleotide
  Antisense strand to SEQ ID NO: 164186
ucacgaaacaaccuuuaaa

SEQ ID NO: 164188 - RNA, 19 nt, Artificial Sequence
  Description of Artificial Sequence: Synthetic oligonucleotide
  Sense strand starting at position 3824 of SEQ ID NO: 2115
aaagguuguuucgugaaug

SEQ ID NO: 164189 - RNA, 19 nt, Artificial Sequence
  Description of Artificial Sequence: Synthetic oligonucleotide
  Antisense strand to SEQ ID NO: 164188
cauucacgaaacaaccuuu

SEQ ID NO: 164190 - RNA, 19 nt, Artificial Sequence
  Description of Artificial Sequence: Synthetic oligonucleotide
  Sense strand starting at position 3825 of SEQ ID NO: 2115
aagguuguuucgugaauga

SEQ ID NO: 164191 - RNA, 19 nt, Artificial Sequence
  Description of Artificial Sequence: Synthetic oligonucleotide
  Antisense strand to SEQ ID NO: 164190
ucauucacgaaacaaccuu

SEQ ID NO: 164192 - RNA, 19 nt, Artificial Sequence
  Description of Artificial Sequence: Synthetic oligonucleotide
  Sense strand starting at position 3829 of SEQ ID NO: 2115
uuguuucgugaaugaggga

SEQ ID NO: 164193 - RNA, 19 nt, Artificial Sequence
  Description of Artificial Sequence: Synthetic oligonucleotide
  Antisense strand to SEQ ID NO: 164192
ucccucauucacgaaacaa

SEQ ID NO: 164194 - RNA, 19 nt, Artificial Sequence
  Description of Artificial Sequence: Synthetic oligonucleotide
  Sense strand starting at position 3834 of SEQ ID NO: 2115
ucgugaaugagggaagcau

SEQ ID NO: 164195 - RNA, 19 nt, Artificial Sequence
  Description of Artificial Sequence: Synthetic oligonucleotide
  Antisense strand to SEQ ID NO: 164194
augcuucccucauucacga

SEQ ID NO: 164196 - RNA, 19 nt, Artificial Sequence
  Description of Artificial Sequence: Synthetic oligonucleotide
  Sense strand starting at position 3854 of SEQ ID NO: 2115
gagguugggaguuggaaua

SEQ ID NO: 164197 - RNA, 19 nt, Artificial Sequence
  Description of Artificial Sequence: Synthetic oligonucleotide
  Antisense strand to SEQ ID NO: 164196
uauuccaacucccaaccuc

SEQ ID NO: 164198 - RNA, 19 nt, Artificial Sequence
  Description of Artificial Sequence: Synthetic oligonucleotide
  Sense strand starting at position 3923 of SEQ ID NO: 2115
gguuuaauuuaauagggcu

SEQ ID NO: 164199 - RNA, 19 nt, Artificial Sequence
  Description of Artificial Sequence: Synthetic oligonucleotide
  Antisense strand to SEQ ID NO: 164198
agcccuauuaaauuaaacc

SEQ ID NO: 164200 - RNA, 19 nt, Artificial Sequence
  Description of Artificial Sequence: Synthetic oligonucleotide
  Sense strand starting at position 3970 of SEQ ID NO: 2115
auuaaauuggccugcucau

SEQ ID NO: 164201 - RNA, 19 nt, Artificial Sequence
  Description of Artificial Sequence: Synthetic oligonucleotide
  Antisense strand to SEQ ID NO: 164200
augagcaggccaauuuaau

SEQ ID NO: 164202 - RNA, 19 nt, Artificial Sequence
  Description of Artificial Sequence: Synthetic oligonucleotide
  Sense strand starting at position 205 of SEQ ID NO: 2116
uggauucuauugcucagaa

SEQ ID NO: 164203 - RNA, 19 nt, Artificial Sequence
  Description of Artificial Sequence: Synthetic oligonucleotide
  Antisense strand to SEQ ID NO: 164202
uucugagcaauagaaucca

SEQ ID NO: 164204 - RNA, 19 nt, Artificial Sequence
  Description of Artificial Sequence: Synthetic oligonucleotide
  Sense strand starting at position 206 of SEQ ID NO: 2116
ggauucuauugcucagaag

SEQ ID NO: 164205 - RNA, 19 nt, Artificial Sequence
  Description of Artificial Sequence: Synthetic oligonucleotide
  Antisense strand to SEQ ID NO: 164204
cuucugagcaauagaaucc

SEQ ID NO: 164206 - RNA, 19 nt, Artificial Sequence
  Description of Artificial Sequence: Synthetic oligonucleotide
  Sense strand starting at position 344 of SEQ ID NO: 2116
aggagaaaguuauaaggga

SEQ ID NO: 164207 - RNA, 19 nt, Artificial Sequence
  Description of Artificial Sequence: Synthetic oligonucleotide
  Antisense strand to SEQ ID NO: 164206
ucccuuauaacuuucuccu

SEQ ID NO: 164208 - RNA, 19 nt, Artificial Sequence
  Description of Artificial Sequence: Synthetic oligonucleotide
  Sense strand starting at position 740 of SEQ ID NO: 2116
ugagguaacaagggauugu

SEQ ID NO: 164209 - RNA, 19 nt, Artificial Sequence
  Description of Artificial Sequence: Synthetic oligonucleotide
  Antisense strand to SEQ ID NO: 164208
acaaucccuuguuaccuca

SEQ ID NO: 164210 - RNA, 19 nt, Artificial Sequence
  Description of Artificial Sequence: Synthetic oligonucleotide
  Sense strand starting at position 744 of SEQ ID NO: 2116
guaacaagggauuguguau

SEQ ID NO: 164211 - RNA, 19 nt, Artificial Sequence
  Description of Artificial Sequence: Synthetic oligonucleotide
  Antisense strand to SEQ ID NO: 164210
auacacaaucccuuguuac

SEQ ID NO: 164212 - RNA, 19 nt, Artificial Sequence
  Description of Artificial Sequence: Synthetic oligonucleotide
  Sense strand starting at position 843 of SEQ ID NO: 2116
cgugaaagaugguuucuug

SEQ ID NO: 164213 - RNA, 19 nt, Artificial Sequence
  Description of Artificial Sequence: Synthetic oligonucleotide
  Antisense strand to SEQ ID NO: 164212
caagaaaccaucuuucacg

SEQ ID NO: 164214 - RNA, 19 nt, Artificial Sequence
  Description of Artificial Sequence: Synthetic oligonucleotide
  Sense strand starting at position 846 of SEQ ID NO: 2116
gaaagaugguuucuuguag

SEQ ID NO: 164215 - RNA, 19 nt, Artificial Sequence
  Description of Artificial Sequence: Synthetic oligonucleotide
  Antisense strand to SEQ ID NO: 164214
cuacaagaaaccaucuuuc

SEQ ID NO: 164216 - RNA, 19 nt, Artificial Sequence
  Description of Artificial Sequence: Synthetic oligonucleotide
  Sense strand starting at position 855 of SEQ ID NO: 2116
uuucuuguagcuuagguaa

SEQ ID NO: 164217 - RNA, 19 nt, Artificial Sequence
  Description of Artificial Sequence: Synthetic oligonucleotide
  Antisense strand to SEQ ID NO: 164216
uuaccuaagcuacaagaaa

SEQ ID NO: 164218 - RNA, 19 nt, Artificial Sequence
  Description of Artificial Sequence: Synthetic oligonucleotide
  Sense strand starting at position 858 of SEQ ID NO: 2116
cuuguagcuuagguaagaa

SEQ ID NO: 164219 - RNA, 19 nt, Artificial Sequence
  Description of Artificial Sequence: Synthetic oligonucleotide
  Antisense strand to SEQ ID NO: 164218
uucuuaccuaagcuacaag

SEQ ID NO: 164220 - RNA, 19 nt, Artificial Sequence
  Description of Artificial Sequence: Synthetic oligonucleotide
  Sense strand starting at position 868 of SEQ ID NO: 2116
agguaagaauguccuccuu

SEQ ID NO: 164221 - RNA, 19 nt, Artificial Sequence
  Description of Artificial Sequence: Synthetic oligonucleotide
  Antisense strand to SEQ ID NO: 164220
aaggaggacauucuuaccu

SEQ ID NO: 164222 - RNA, 19 nt, Artificial Sequence
  Description of Artificial Sequence: Synthetic oligonucleotide
  Sense strand starting at position 870 of SEQ ID NO: 2116
guaagaauguccuccuuuc

SEQ ID NO: 164223 - RNA, 19 nt, Artificial Sequence
  Description of Artificial Sequence: Synthetic oligonucleotide
  Antisense strand to SEQ ID NO: 164222
gaaaggaggacauucuuac

SEQ ID NO: 164224 - RNA, 19 nt, Artificial Sequence
  Description of Artificial Sequence: Synthetic oligonucleotide
  Sense strand starting at position 891 of SEQ ID NO: 2116
aaaguagaucccgaagugu

SEQ ID NO: 164225 - RNA, 19 nt, Artificial Sequence
  Description of Artificial Sequence: Synthetic oligonucleotide
  Antisense strand to SEQ ID NO: 164224
acacuucgggaucuacuuu

SEQ ID NO: 164226 - RNA, 19 nt, Artificial Sequence
  Description of Artificial Sequence: Synthetic oligonucleotide
  Sense strand starting at position 1012 of SEQ ID NO: 2116
aggcuuaaucuguaacucu

SEQ ID NO: 164227 - RNA, 19 nt, Artificial Sequence
  Description of Artificial Sequence: Synthetic oligonucleotide
  Antisense strand to SEQ ID NO: 164226
agaguuacagauuaagccu

SEQ ID NO: 164228 - RNA, 19 nt, Artificial Sequence
  Description of Artificial Sequence: Synthetic oligonucleotide
  Sense strand starting at position 1037 of SEQ ID NO: 2116
ucgaguuaccuugagccaa

SEQ ID NO: 164229 - RNA, 19 nt, Artificial Sequence
  Description of Artificial Sequence: Synthetic oligonucleotide
  Antisense strand to SEQ ID NO: 164228
uuggcucaagguaacucga

SEQ ID NO: 164230 - RNA, 19 nt, Artificial Sequence
  Description of Artificial Sequence: Synthetic oligonucleotide
  Sense strand starting at position 1039 of SEQ ID NO: 2116
gaguuaccuugagccaaca

SEQ ID NO: 164231 - RNA, 19 nt, Artificial Sequence
  Description of Artificial Sequence: Synthetic oligonucleotide
  Antisense strand to SEQ ID NO: 164230
uguuggcucaagguaacuc

SEQ ID NO: 164232 - RNA, 19 nt, Artificial Sequence
  Description of Artificial Sequence: Synthetic oligonucleotide
  Sense strand starting at position 1191 of SEQ ID NO: 2116
gcagccucaucuuuagaga

SEQ ID NO: 164233 - RNA, 19 nt, Artificial Sequence
  Description of Artificial Sequence: Synthetic oligonucleotide
  Antisense strand to SEQ ID NO: 164232
ucucuaaagaugaggcugc

SEQ ID NO: 164234 - RNA, 19 nt, Artificial Sequence
  Description of Artificial Sequence: Synthetic oligonucleotide
  Sense strand starting at position 1276 of SEQ ID NO: 2116
guagaaagcuccuucgaug

SEQ ID NO: 164235 - RNA, 19 nt, Artificial Sequence
  Description of Artificial Sequence: Synthetic oligonucleotide
  Antisense strand to SEQ ID NO: 164234
caucgaaggagcuuucuac

SEQ ID NO: 164236 - RNA, 19 nt, Artificial Sequence
  Description of Artificial Sequence: Synthetic oligonucleotide
  Sense strand starting at position 1315 of SEQ ID NO: 2116
uccacagaguaguccauaa

SEQ ID NO: 164237 - RNA, 19 nt, Artificial Sequence
  Description of Artificial Sequence: Synthetic oligonucleotide
  Antisense strand to SEQ ID NO: 164236
uuauggacuacucugugga

SEQ ID NO: 164238 - RNA, 19 nt, Artificial Sequence
  Description of Artificial Sequence: Synthetic oligonucleotide
  Sense strand starting at position 1319 of SEQ ID NO: 2116
cagaguaguccauaagcca

SEQ ID NO: 164239 - RNA, 19 nt, Artificial Sequence
  Description of Artificial Sequence: Synthetic oligonucleotide
  Antisense strand to SEQ ID NO: 164238
uggcuuauggacuacucug

SEQ ID NO: 164240 - RNA, 19 nt, Artificial Sequence
  Description of Artificial Sequence: Synthetic oligonucleotide
  Sense strand starting at position 1976 of SEQ ID NO: 2116
auccgaaagaccggaaaua

SEQ ID NO: 164241 - RNA, 19 nt, Artificial Sequence
  Description of Artificial Sequence: Synthetic oligonucleotide
  Antisense strand to SEQ ID NO: 164240
uauuuccggucuuucggau

SEQ ID NO: 164242 - RNA, 19 nt, Artificial Sequence
  Description of Artificial Sequence: Synthetic oligonucleotide
  Sense strand starting at position 2096 of SEQ ID NO: 2116
ggcugugagcgcuccuaag

SEQ ID NO: 164243 - RNA, 19 nt, Artificial Sequence
  Description of Artificial Sequence: Synthetic oligonucleotide
  Antisense strand to SEQ ID NO: 164242
cuuaggagcgcucacagcc

SEQ ID NO: 164244 - RNA, 19 nt, Artificial Sequence
  Description of Artificial Sequence: Synthetic oligonucleotide
  Sense strand starting at position 2114 of SEQ ID NO: 2116
gagguuugugcguucucca

SEQ ID NO: 164245 - RNA, 19 nt, Artificial Sequence
  Description of Artificial Sequence: Synthetic oligonucleotide
  Antisense strand to SEQ ID NO: 164244
uggagaacgcacaaaccuc

SEQ ID NO: 164246 - RNA, 19 nt, Artificial Sequence
  Description of Artificial Sequence: Synthetic oligonucleotide
  Sense strand starting at position 2123 of SEQ ID NO: 2116
gcguucuccaggcuucuua

SEQ ID NO: 164247 - RNA, 19 nt, Artificial Sequence
  Description of Artificial Sequence: Synthetic oligonucleotide
  Antisense strand to SEQ ID NO: 164246
uaagaagccuggagaacgc

SEQ ID NO: 164248 - RNA, 19 nt, Artificial Sequence
  Description of Artificial Sequence: Synthetic oligonucleotide
  Sense strand starting at position 2230 of SEQ ID NO: 2116
ccuagaaauuuggaucauc

SEQ ID NO: 164249 - RNA, 19 nt, Artificial Sequence
  Description of Artificial Sequence: Synthetic oligonucleotide
  Antisense strand to SEQ ID NO: 164248
gaugauccaaauuucuagg

SEQ ID NO: 164250 - RNA, 19 nt, Artificial Sequence
  Description of Artificial Sequence: Synthetic oligonucleotide
  Sense strand starting at position 2263 of SEQ ID NO: 2116
acuaguacugucgaacaga

SEQ ID NO: 164251 - RNA, 19 nt, Artificial Sequence
  Description of Artificial Sequence: Synthetic oligonucleotide
  Antisense strand to SEQ ID NO: 164250
ucuguucgacaguacuagu

SEQ ID NO: 164252 - RNA, 19 nt, Artificial Sequence
  Description of Artificial Sequence: Synthetic oligonucleotide
  Sense strand starting at position 2905 of SEQ ID NO: 2116
gaggaugaacugugaaguu

SEQ ID NO: 164253 - RNA, 19 nt, Artificial Sequence
  Description of Artificial Sequence: Synthetic oligonucleotide
  Antisense strand to SEQ ID NO: 164252
aacuucacaguucauccuc

SEQ ID NO: 164254 - RNA, 19 nt, Artificial Sequence
  Description of Artificial Sequence: Synthetic oligonucleotide
  Sense strand starting at position 2915 of SEQ ID NO: 2116
ugugaaguuaggcagucau

SEQ ID NO: 164255 - RNA, 19 nt, Artificial Sequence
  Description of Artificial Sequence: Synthetic oligonucleotide
  Antisense strand to SEQ ID NO: 164254
augacugccuaacuucaca

SEQ ID NO: 164256 - RNA, 19 nt, Artificial Sequence
  Description of Artificial Sequence: Synthetic oligonucleotide
  Sense strand starting at position 2953 of SEQ ID NO: 2116
ucacuuacugguuagguaa

SEQ ID NO: 164257 - RNA, 19 nt, Artificial Sequence
  Description of Artificial Sequence: Synthetic oligonucleotide
  Antisense strand to SEQ ID NO: 164256
uuaccuaaccaguaaguga

SEQ ID NO: 164258 - RNA, 19 nt, Artificial Sequence
  Description of Artificial Sequence: Synthetic oligonucleotide
  Sense strand starting at position 2960 of SEQ ID NO: 2116
cugguuagguaaccuugaa

SEQ ID NO: 164259 - RNA, 19 nt, Artificial Sequence
  Description of Artificial Sequence: Synthetic oligonucleotide
  Antisense strand to SEQ ID NO: 164258
uucaagguuaccuaaccag

SEQ ID NO: 164260 - RNA, 19 nt, Artificial Sequence
  Description of Artificial Sequence: Synthetic oligonucleotide
  Sense strand starting at position 3102 of SEQ ID NO: 2116
cauguaugugcucaguaaa

SEQ ID NO: 164261 - RNA, 19 nt, Artificial Sequence
  Description of Artificial Sequence: Synthetic oligonucleotide
  Antisense strand to SEQ ID NO: 164260
uuuacugagcacauacaug

SEQ ID NO: 164262 - RNA, 19 nt, Artificial Sequence
  Description of Artificial Sequence: Synthetic oligonucleotide
  Sense strand starting at position 3105 of SEQ ID NO: 2116
guaugugcucaguaaaugg

SEQ ID NO: 164263 - RNA, 19 nt, Artificial Sequence
  Description of Artificial Sequence: Synthetic oligonucleotide
  Antisense strand to SEQ ID NO: 164262
ccauuuacugagcacauac

SEQ ID NO: 164264 - RNA, 19 nt, Artificial Sequence
  Description of Artificial Sequence: Synthetic oligonucleotide
  Sense strand starting at position 3122 of SEQ ID NO: 2116
gguaauuaucaguauugcu

SEQ ID NO: 164265 - RNA, 19 nt, Artificial Sequence
  Description of Artificial Sequence: Synthetic oligonucleotide
  Antisense strand to SEQ ID NO: 164264
agcaauacugauaauuacc

SEQ ID NO: 164266 - RNA, 19 nt, Artificial Sequence
  Description of Artificial Sequence: Synthetic oligonucleotide
  Sense strand starting at position 3175 of SEQ ID NO: 2116
ucaauaugcguuuacugag

SEQ ID NO: 164267 - RNA, 19 nt, Artificial Sequence
  Description of Artificial Sequence: Synthetic oligonucleotide
  Antisense strand to SEQ ID NO: 164266
cucaguaaacgcauauuga

SEQ ID NO: 164268 - RNA, 19 nt, Artificial Sequence
  Description of Artificial Sequence: Synthetic oligonucleotide
  Sense strand starting at position 3348 of SEQ ID NO: 2116
gauugcagcuucuugagaa

SEQ ID NO: 164269 - RNA, 19 nt, Artificial Sequence
  Description of Artificial Sequence: Synthetic oligonucleotide
  Antisense strand to SEQ ID NO: 164268
uucucaagaagcugcaauc

SEQ ID NO: 164270 - RNA, 19 nt, Artificial Sequence
  Description of Artificial Sequence: Synthetic oligonucleotide
  Sense strand starting at position 3412 of SEQ ID NO: 2116
ggaaguaguccaggaauua

SEQ ID NO: 164271 - RNA, 19 nt, Artificial Sequence
  Description of Artificial Sequence: Synthetic oligonucleotide
  Antisense strand to SEQ ID NO: 164270
uaauuccuggacuacuucc

SEQ ID NO: 164272 - RNA, 19 nt, Artificial Sequence
  Description of Artificial Sequence: Synthetic oligonucleotide
  Sense strand starting at position 3485 of SEQ ID NO: 2116
uguggcuucccugaaaugu

SEQ ID NO: 164273 - RNA, 19 nt, Artificial Sequence
  Description of Artificial Sequence: Synthetic oligonucleotide
  Antisense strand to SEQ ID NO: 164272
acauuucagggaagccaca

SEQ ID NO: 164274 - RNA, 19 nt, Artificial Sequence
  Description of Artificial Sequence: Synthetic oligonucleotide
  Sense strand starting at position 3631 of SEQ ID NO: 2116
aauuguuucuggcuugaaa

SEQ ID NO: 164275 - RNA, 19 nt, Artificial Sequence
  Description of Artificial Sequence: Synthetic oligonucleotide
  Antisense strand to SEQ ID NO: 164274
uuucaagccagaaacaauu

SEQ ID NO: 164276 - RNA, 19 nt, Artificial Sequence
  Description of Artificial Sequence: Synthetic oligonucleotide
  Sense strand starting at position 3967 of SEQ ID NO: 2116
augauuagguccuauuucu

SEQ ID NO: 164277 - RNA, 19 nt, Artificial Sequence
  Description of Artificial Sequence: Synthetic oligonucleotide
  Antisense strand to SEQ ID NO: 164276
agaaauaggaccuaaucau

SEQ ID NO: 164278 - RNA, 19 nt, Artificial Sequence
  Description of Artificial Sequence: Synthetic oligonucleotide
  Sense strand starting at position 3974 of SEQ ID NO: 2116
gguccuauuucuguagugu

SEQ ID NO: 164279 - RNA, 19 nt, Artificial Sequence
  Description of Artificial Sequence: Synthetic oligonucleotide
  Antisense strand to SEQ ID NO: 164278
acacuacagaaauaggacc

SEQ ID NO: 164280 - RNA, 19 nt, Artificial Sequence
  Description of Artificial Sequence: Synthetic oligonucleotide
  Sense strand starting at position 3975 of SEQ ID NO: 2116
guccuauuucuguagugua

SEQ ID NO: 164281 - RNA, 19 nt, Artificial Sequence
  Description of Artificial Sequence: Synthetic oligonucleotide
  Antisense strand to SEQ ID NO: 164280
uacacuacagaaauaggac

SEQ ID NO: 164282 - RNA, 19 nt, Artificial Sequence
  Description of Artificial Sequence: Synthetic oligonucleotide
  Sense strand starting at position 52 of SEQ ID NO: 2117
guaacugcaguuuauaaau

SEQ ID NO: 164283 - RNA, 19 nt, Artificial Sequence
  Description of Artificial Sequence: Synthetic oligonucleotide
  Antisense strand to SEQ ID NO: 164282
auuuauaaacugcaguuac

SEQ ID NO: 164284 - RNA, 19 nt, Artificial Sequence
  Description of Artificial Sequence: Synthetic oligonucleotide
  Sense strand starting at position 454 of SEQ ID NO: 2117
aggagaauagcucgaucuc

SEQ ID NO: 164285 - RNA, 19 nt, Artificial Sequence
  Description of Artificial Sequence: Synthetic oligonucleotide
  Antisense strand to SEQ ID NO: 164284
gagaucgagcuauucuccu

SEQ ID NO: 164286 - RNA, 19 nt, Artificial Sequence
  Description of Artificial Sequence: Synthetic oligonucleotide
  Sense strand starting at position 779 of SEQ ID NO: 2117
ucccaaguugcucaggaaa

SEQ ID NO: 164287 - RNA, 19 nt, Artificial Sequence
  Description of Artificial Sequence: Synthetic oligonucleotide
  Antisense strand to SEQ ID NO: 164286
uuuccugagcaacuuggga

SEQ ID NO: 164288 - RNA, 19 nt, Artificial Sequence
  Description of Artificial Sequence: Synthetic oligonucleotide
  Sense strand starting at position 782 of SEQ ID NO: 2117
caaguugcucaggaaaguu

SEQ ID NO: 164289 - RNA, 19 nt, Artificial Sequence
  Description of Artificial Sequence: Synthetic oligonucleotide
  Antisense strand to SEQ ID NO: 164288
aacuuuccugagcaacuug

SEQ ID NO: 164290 - RNA, 19 nt, Artificial Sequence
  Description of Artificial Sequence: Synthetic oligonucleotide
  Sense strand starting at position 928 of SEQ ID NO: 2117
uaagucaaguggucaguuu

SEQ ID NO: 164291 - RNA, 19 nt, Artificial Sequence
  Description of Artificial Sequence: Synthetic oligonucleotide
  Antisense strand to SEQ ID NO: 164290
aaacugaccacuugacuua

SEQ ID NO: 164292 - RNA, 19 nt, Artificial Sequence
  Description of Artificial Sequence: Synthetic oligonucleotide
  Sense strand starting at position 952 of SEQ ID NO: 2117
uuugcuaugugacugaaca

SEQ ID NO: 164293 - RNA, 19 nt, Artificial Sequence
  Description of Artificial Sequence: Synthetic oligonucleotide
  Antisense strand to SEQ ID NO: 164292
uguucagucacauagcaaa

SEQ ID NO: 164294 - RNA, 19 nt, Artificial Sequence
  Description of Artificial Sequence: Synthetic oligonucleotide
  Sense strand starting at position 953 of SEQ ID NO: 2117
uugcuaugugacugaacaa

SEQ ID NO: 164295 - RNA, 19 nt, Artificial Sequence
  Description of Artificial Sequence: Synthetic oligonucleotide
  Antisense strand to SEQ ID NO: 164294
uuguucagucacauagcaa

SEQ ID NO: 164296 - RNA, 19 nt, Artificial Sequence
  Description of Artificial Sequence: Synthetic oligonucleotide
  Sense strand starting at position 978 of SEQ ID NO: 2117
uguuaucaagcaggaauaa

SEQ ID NO: 164297 - RNA, 19 nt, Artificial Sequence
  Description of Artificial Sequence: Synthetic oligonucleotide
  Antisense strand to SEQ ID NO: 164296
uuauuccugcuugauaaca

SEQ ID NO: 164298 - RNA, 19 nt, Artificial Sequence
  Description of Artificial Sequence: Synthetic oligonucleotide
  Sense strand starting at position 1035 of SEQ ID NO: 2117
gccaguuagcagggaauau

SEQ ID NO: 164299 - RNA, 19 nt, Artificial Sequence
  Description of Artificial Sequence: Synthetic oligonucleotide
  Antisense strand to SEQ ID NO: 164298
auauucccugcuaacuggc

SEQ ID NO: 164300 - RNA, 19 nt, Artificial Sequence
  Description of Artificial Sequence: Synthetic oligonucleotide
  Sense strand starting at position 1080 of SEQ ID NO: 2117
cguuguauuccagaaacua

SEQ ID NO: 164301 - RNA, 19 nt, Artificial Sequence
  Description of Artificial Sequence: Synthetic oligonucleotide
  Antisense strand to SEQ ID NO: 164300
uaguuucuggaauacaacg

SEQ ID NO: 164302 - RNA, 19 nt, Artificial Sequence
  Description of Artificial Sequence: Synthetic oligonucleotide
  Sense strand starting at position 1123 of SEQ ID NO: 2117
aagagaggaucuuucgcaa

SEQ ID NO: 164303 - RNA, 19 nt, Artificial Sequence
  Description of Artificial Sequence: Synthetic oligonucleotide
  Antisense strand to SEQ ID NO: 164302
uugcgaaagauccucucuu

SEQ ID NO: 164304 - RNA, 19 nt, Artificial Sequence
  Description of Artificial Sequence: Synthetic oligonucleotide
  Sense strand starting at position 1194 of SEQ ID NO: 2117
aagagaccgcuuuguuauu

SEQ ID NO: 164305 - RNA, 19 nt, Artificial Sequence
  Description of Artificial Sequence: Synthetic oligonucleotide
  Antisense strand to SEQ ID NO: 164304
aauaacaaagcggucucuu

SEQ ID NO: 164306 - RNA, 19 nt, Artificial Sequence
  Description of Artificial Sequence: Synthetic oligonucleotide
  Sense strand starting at position 1196 of SEQ ID NO: 2117
gagaccgcuuuguuauuua

SEQ ID NO: 164307 - RNA, 19 nt, Artificial Sequence
  Description of Artificial Sequence: Synthetic oligonucleotide
  Antisense strand to SEQ ID NO: 164306
uaaauaacaaagcggucuc

SEQ ID NO: 164308 - RNA, 19 nt, Artificial Sequence
  Description of Artificial Sequence: Synthetic oligonucleotide
  Sense strand starting at position 1199 of SEQ ID NO: 2117
accgcuuuguuauuuacaa

SEQ ID NO: 164309 - RNA, 19 nt, Artificial Sequence
  Description of Artificial Sequence: Synthetic oligonucleotide
  Antisense strand to SEQ ID NO: 164308
uuguaaauaacaaagcggu

SEQ ID NO: 164310 - RNA, 19 nt, Artificial Sequence
  Description of Artificial Sequence: Synthetic oligonucleotide
  Sense strand starting at position 1200 of SEQ ID NO: 2117
ccgcuuuguuauuuacaac

SEQ ID NO: 164311 - RNA, 19 nt, Artificial Sequence
  Description of Artificial Sequence: Synthetic oligonucleotide
  Antisense strand to SEQ ID NO: 164310
guuguaaauaacaaagcgg

SEQ ID NO: 164312 - RNA, 19 nt, Artificial Sequence
  Description of Artificial Sequence: Synthetic oligonucleotide
  Sense strand starting at position 1600 of SEQ ID NO: 2117
ggauguugugcgccuccau

SEQ ID NO: 164313 - RNA, 19 nt, Artificial Sequence
  Description of Artificial Sequence: Synthetic oligonucleotide
  Antisense strand to SEQ ID NO: 164312
auggaggcgcacaacaucc

SEQ ID NO: 164314 - RNA, 19 nt, Artificial Sequence
  Description of Artificial Sequence: Synthetic oligonucleotide
  Sense strand starting at position 2630 of SEQ ID NO: 2117
gagugauaaugauugucaa

SEQ ID NO: 164315 - RNA, 19 nt, Artificial Sequence
  Description of Artificial Sequence: Synthetic oligonucleotide
  Antisense strand to SEQ ID NO: 164314
uugacaaucauuaucacuc

SEQ ID NO: 164316 - RNA, 19 nt, Artificial Sequence
  Description of Artificial Sequence: Synthetic oligonucleotide
  Sense strand starting at position 2631 of SEQ ID NO: 2117
agugauaaugauugucaac

SEQ ID NO: 164317 - RNA, 19 nt, Artificial Sequence
  Description of Artificial Sequence: Synthetic oligonucleotide
  Antisense strand to SEQ ID NO: 164316
guugacaaucauuaucacu

SEQ ID NO: 164318 - RNA, 19 nt, Artificial Sequence
  Description of Artificial Sequence: Synthetic oligonucleotide
  Sense strand starting at position 2633 of SEQ ID NO: 2117
ugauaaugauugucaaccu

SEQ ID NO: 164319 - RNA, 19 nt, Artificial Sequence
  Description of Artificial Sequence: Synthetic oligonucleotide
  Antisense strand to SEQ ID NO: 164318
agguugacaaucauuauca

SEQ ID NO: 164320 - RNA, 19 nt, Artificial Sequence
  Description of Artificial Sequence: Synthetic oligonucleotide
  Sense strand starting at position 2699 of SEQ ID NO: 2117
gcgaauaugcgugccauag

SEQ ID NO: 164321 - RNA, 19 nt, Artificial Sequence
  Description of Artificial Sequence: Synthetic oligonucleotide
  Antisense strand to SEQ ID NO: 164320
cuauggcacgcauauucgc

SEQ ID NO: 164322 - RNA, 19 nt, Artificial Sequence
  Description of Artificial Sequence: Synthetic oligonucleotide
  Sense strand starting at position 2700 of SEQ ID NO: 2117
cgaauaugcgugccauagu

SEQ ID NO: 164323 - RNA, 19 nt, Artificial Sequence
  Description of Artificial Sequence: Synthetic oligonucleotide
  Antisense strand to SEQ ID NO: 164322
acuauggcacgcauauucg

SEQ ID NO: 164324 - RNA, 19 nt, Artificial Sequence
  Description of Artificial Sequence: Synthetic oligonucleotide
  Sense strand starting at position 2726 of SEQ ID NO: 2117
uugcgcauucaggaaagua

SEQ ID NO: 164325 - RNA, 19 nt, Artificial Sequence
  Description of Artificial Sequence: Synthetic oligonucleotide
  Antisense strand to SEQ ID NO: 164324
uacuuuccugaaugcgcaa

SEQ ID NO: 164326 - RNA, 19 nt, Artificial Sequence
  Description of Artificial Sequence: Synthetic oligonucleotide
  Sense strand starting at position 2774 of SEQ ID NO: 2117
gauaaugguuuggaaauaa

SEQ ID NO: 164327 - RNA, 19 nt, Artificial Sequence
  Description of Artificial Sequence: Synthetic oligonucleotide
  Antisense strand to SEQ ID NO: 164326
uuauuuccaaaccauuauc

SEQ ID NO: 164328 - RNA, 19 nt, Artificial Sequence
  Description of Artificial Sequence: Synthetic oligonucleotide
  Sense strand starting at position 3171 of SEQ ID NO: 2117
gcuguccuugcugaaguau

SEQ ID NO: 164329 - RNA, 19 nt, Artificial Sequence
  Description of Artificial Sequence: Synthetic oligonucleotide
  Antisense strand to SEQ ID NO: 164328
auacuucagcaaggacagc

SEQ ID NO: 164330 - RNA, 19 nt, Artificial Sequence
  Description of Artificial Sequence: Synthetic oligonucleotide
  Sense strand starting at position 3195 of SEQ ID NO: 2117
guguaagauugccuuagug

SEQ ID NO: 164331 - RNA, 19 nt, Artificial Sequence
  Description of Artificial Sequence: Synthetic oligonucleotide
  Antisense strand to SEQ ID NO: 164330
cacuaaggcaaucuuacac

SEQ ID NO: 164332 - RNA, 19 nt, Artificial Sequence
  Description of Artificial Sequence: Synthetic oligonucleotide
  Sense strand starting at position 3197 of SEQ ID NO: 2117
guaagauugccuuagugca

SEQ ID NO: 164333 - RNA, 19 nt, Artificial Sequence
  Description of Artificial Sequence: Synthetic oligonucleotide
  Antisense strand to SEQ ID NO: 164332
ugcacuaaggcaaucuuac

SEQ ID NO: 164334 - RNA, 19 nt, Artificial Sequence
  Description of Artificial Sequence: Synthetic oligonucleotide
  Sense strand starting at position 3269 of SEQ ID NO: 2117
agaauucuccauggccuuu

SEQ ID NO: 164335 - RNA, 19 nt, Artificial Sequence
  Description of Artificial Sequence: Synthetic oligonucleotide
  Antisense strand to SEQ ID NO: 164334
aaaggccauggagaauucu

SEQ ID NO: 164336 - RNA, 19 nt, Artificial Sequence
  Description of Artificial Sequence: Synthetic oligonucleotide
  Sense strand starting at position 3294 of SEQ ID NO: 2117
ugucuuugucaagguauuu

SEQ ID NO: 164337 - RNA, 19 nt, Artificial Sequence
  Description of Artificial Sequence: Synthetic oligonucleotide
  Antisense strand to SEQ ID NO: 164336
aaauaccuugacaaagaca

SEQ ID NO: 164338 - RNA, 19 nt, Artificial Sequence
  Description of Artificial Sequence: Synthetic oligonucleotide
  Sense strand starting at position 3370 of SEQ ID NO: 2117
ugagaucuuucuccaaaug

SEQ ID NO: 164339 - RNA, 19 nt, Artificial Sequence
  Description of Artificial Sequence: Synthetic oligonucleotide
  Antisense strand to SEQ ID NO: 164338
cauuuggagaaagaucuca

SEQ ID NO: 164340 - RNA, 19 nt, Artificial Sequence
  Description of Artificial Sequence: Synthetic oligonucleotide
  Sense strand starting at position 3393 of SEQ ID NO: 2117
acuaaugagucauccugua

SEQ ID NO: 164341 - RNA, 19 nt, Artificial Sequence
  Description of Artificial Sequence: Synthetic oligonucleotide
  Antisense strand to SEQ ID NO: 164340
uacaggaugacucauuagu

SEQ ID NO: 164342 - RNA, 19 nt, Artificial Sequence
  Description of Artificial Sequence: Synthetic oligonucleotide
  Sense strand starting at position 3398 of SEQ ID NO: 2117
ugagucauccuguaauuag

SEQ ID NO: 164343 - RNA, 19 nt, Artificial Sequence
  Description of Artificial Sequence: Synthetic oligonucleotide
  Antisense strand to SEQ ID NO: 164342
cuaauuacaggaugacuca

SEQ ID NO: 164344 - RNA, 19 nt, Artificial Sequence
  Description of Artificial Sequence: Synthetic oligonucleotide
  Sense strand starting at position 3435 of SEQ ID NO: 2117
cugggaugaacuuguccca

SEQ ID NO: 164345 - RNA, 19 nt, Artificial Sequence
  Description of Artificial Sequence: Synthetic oligonucleotide
  Antisense strand to SEQ ID NO: 164344
ugggacaaguucaucccag

SEQ ID NO: 164346 - RNA, 19 nt, Artificial Sequence
  Description of Artificial Sequence: Synthetic oligonucleotide
  Sense strand starting at position 3438 of SEQ ID NO: 2117
ggaugaacuugucccagau

SEQ ID NO: 164347 - RNA, 19 nt, Artificial Sequence
  Description of Artificial Sequence: Synthetic oligonucleotide
  Antisense strand to SEQ ID NO: 164346
aucugggacaaguucaucc

SEQ ID NO: 164348 - RNA, 19 nt, Artificial Sequence
  Description of Artificial Sequence: Synthetic oligonucleotide
  Sense strand starting at position 3442 of SEQ ID NO: 2117
gaacuugucccagauagcu

SEQ ID NO: 164349 - RNA, 19 nt, Artificial Sequence
  Description of Artificial Sequence: Synthetic oligonucleotide
  Antisense strand to SEQ ID NO: 164348
agcuaucugggacaaguuc

SEQ ID NO: 164350 - RNA, 19 nt, Artificial Sequence
  Description of Artificial Sequence: Synthetic oligonucleotide
  Sense strand starting at position 3484 of SEQ ID NO: 2117
guggcugcugggagucauu

SEQ ID NO: 164351 - RNA, 19 nt, Artificial Sequence
  Description of Artificial Sequence: Synthetic oligonucleotide
  Antisense strand to SEQ ID NO: 164350
aaugacucccagcagccac

SEQ ID NO: 164352 - RNA, 19 nt, Artificial Sequence
  Description of Artificial Sequence: Synthetic oligonucleotide
  Sense strand starting at position 3575 of SEQ ID NO: 2117
ccuggaguccauuauuaac

SEQ ID NO: 164353 - RNA, 19 nt, Artificial Sequence
  Description of Artificial Sequence: Synthetic oligonucleotide
  Antisense strand to SEQ ID NO: 164352
guuaauaauggacuccagg

SEQ ID NO: 164354 - RNA, 19 nt, Artificial Sequence
  Description of Artificial Sequence: Synthetic oligonucleotide
  Sense strand starting at position 3577 of SEQ ID NO: 2117
uggaguccauuauuaacuu

SEQ ID NO: 164355 - RNA, 19 nt, Artificial Sequence
  Description of Artificial Sequence: Synthetic oligonucleotide
  Antisense strand to SEQ ID NO: 164354
aaguuaauaauggacucca

SEQ ID NO: 164356 - RNA, 19 nt, Artificial Sequence
  Description of Artificial Sequence: Synthetic oligonucleotide
  Sense strand starting at position 3602 of SEQ ID NO: 2117
uugucacuucuguagucuu

SEQ ID NO: 164357 - RNA, 19 nt, Artificial Sequence
  Description of Artificial Sequence: Synthetic oligonucleotide
  Antisense strand to SEQ ID NO: 164356
aagacuacagaagugacaa

SEQ ID NO: 164358 - RNA, 19 nt, Artificial Sequence
  Description of Artificial Sequence: Synthetic oligonucleotide
  Sense strand starting at position 3610 of SEQ ID NO: 2117
ucuguagucuuucuaucau

SEQ ID NO: 164359 - RNA, 19 nt, Artificial Sequence
  Description of Artificial Sequence: Synthetic oligonucleotide
  Antisense strand to SEQ ID NO: 164358
augauagaaagacuacaga

SEQ ID NO: 164360 - RNA, 19 nt, Artificial Sequence
  Description of Artificial Sequence: Synthetic oligonucleotide
  Sense strand starting at position 3902 of SEQ ID NO: 2117
ugagauugugccuaugcag

SEQ ID NO: 164361 - RNA, 19 nt, Artificial Sequence
  Description of Artificial Sequence: Synthetic oligonucleotide
  Antisense strand to SEQ ID NO: 164360
cugcauaggcacaaucuca

SEQ ID NO: 164362 - RNA, 19 nt, Artificial Sequence
  Description of Artificial Sequence: Synthetic oligonucleotide
  Sense strand starting at position 33 of SEQ ID NO: 2119
ugucaaguacuaggagauc

SEQ ID NO: 164363 - RNA, 19 nt, Artificial Sequence
  Description of Artificial Sequence: Synthetic oligonucleotide
  Antisense strand to SEQ ID NO: 164362
gaucuccuaguacuugaca

SEQ ID NO: 164364 - RNA, 19 nt, Artificial Sequence
  Description of Artificial Sequence: Synthetic oligonucleotide
  Sense strand starting at position 80 of SEQ ID NO: 2119
acuugaggucuuuagcaaa

SEQ ID NO: 164365 - RNA, 19 nt, Artificial Sequence
  Description of Artificial Sequence: Synthetic oligonucleotide
  Antisense strand to SEQ ID NO: 164364
uuugcuaaagaccucaagu

SEQ ID NO: 164366 - RNA, 19 nt, Artificial Sequence
  Description of Artificial Sequence: Synthetic oligonucleotide
  Sense strand starting at position 134 of SEQ ID NO: 2119
cugccucauuauguuuaga

SEQ ID NO: 164367 - RNA, 19 nt, Artificial Sequence
  Description of Artificial Sequence: Synthetic oligonucleotide
  Antisense strand to SEQ ID NO: 164366
ucuaaacauaaugaggcag

SEQ ID NO: 164368 - RNA, 19 nt, Artificial Sequence
  Description of Artificial Sequence: Synthetic oligonucleotide
  Sense strand starting at position 136 of SEQ ID NO: 2119
gccucauuauguuuagaac

SEQ ID NO: 164369 - RNA, 19 nt, Artificial Sequence
  Description of Artificial Sequence: Synthetic oligonucleotide
  Antisense strand to SEQ ID NO: 164368
guucuaaacauaaugaggc

SEQ ID NO: 164370 - RNA, 19 nt, Artificial Sequence
  Description of Artificial Sequence: Synthetic oligonucleotide
  Sense strand starting at position 150 of SEQ ID NO: 2119
agaacauaaugugcuuuaa

SEQ ID NO: 164371 - RNA, 19 nt, Artificial Sequence
  Description of Artificial Sequence: Synthetic oligonucleotide
  Antisense strand to SEQ ID NO: 164370
uuaaagcacauuauguucu

SEQ ID NO: 164372 - RNA, 19 nt, Artificial Sequence
  Description of Artificial Sequence: Synthetic oligonucleotide
  Sense strand starting at position 262 of SEQ ID NO: 2119
cauguuacguaauccauga

SEQ ID NO: 164373 - RNA, 19 nt, Artificial Sequence
  Description of Artificial Sequence: Synthetic oligonucleotide
  Antisense strand to SEQ ID NO: 164372
ucauggauuacguaacaug

SEQ ID NO: 164374 - RNA, 19 nt, Artificial Sequence
  Description of Artificial Sequence: Synthetic oligonucleotide
  Sense strand starting at position 267 of SEQ ID NO: 2119
uacguaauccaugagcuuu

SEQ ID NO: 164375 - RNA, 19 nt, Artificial Sequence
  Description of Artificial Sequence: Synthetic oligonucleotide
  Antisense strand to SEQ ID NO: 164374
aaagcucauggauuacgua

SEQ ID NO: 164376 - RNA, 19 nt, Artificial Sequence
  Description of Artificial Sequence: Synthetic oligonucleotide
  Sense strand starting at position 286 of SEQ ID NO: 2119
uuaucuucccuguacaguu

SEQ ID NO: 164377 - RNA, 19 nt, Artificial Sequence
  Description of Artificial Sequence: Synthetic oligonucleotide
  Antisense strand to SEQ ID NO: 164376
aacuguacagggaagauaa

SEQ ID NO: 164378 - RNA, 19 nt, Artificial Sequence
  Description of Artificial Sequence: Synthetic oligonucleotide
  Sense strand starting at position 448 of SEQ ID NO: 2119
ggcagaacagaguguuaaa

SEQ ID NO: 164379 - RNA, 19 nt, Artificial Sequence
  Description of Artificial Sequence: Synthetic oligonucleotide
  Antisense strand to SEQ ID NO: 164378
uuuaacacucuguucugcc

SEQ ID NO: 164380 - RNA, 19 nt, Artificial Sequence
  Description of Artificial Sequence: Synthetic oligonucleotide
  Sense strand starting at position 459 of SEQ ID NO: 2119
guguuaaauuagcuauuag

SEQ ID NO: 164381 - RNA, 19 nt, Artificial Sequence
  Description of Artificial Sequence: Synthetic oligonucleotide
  Antisense strand to SEQ ID NO: 164380
cuaauagcuaauuuaacac

SEQ ID NO: 164382 - RNA, 19 nt, Artificial Sequence
  Description of Artificial Sequence: Synthetic oligonucleotide
  Sense strand starting at position 486 of SEQ ID NO: 2119
acuuguuuagugugaauga

SEQ ID NO: 164383 - RNA, 19 nt, Artificial Sequence
  Description of Artificial Sequence: Synthetic oligonucleotide
  Antisense strand to SEQ ID NO: 164382
ucauucacacuaaacaagu

SEQ ID NO: 164384 - RNA, 19 nt, Artificial Sequence
  Description of Artificial Sequence: Synthetic oligonucleotide
  Sense strand starting at position 740 of SEQ ID NO: 2119
acuguaggaucaccagaau

SEQ ID NO: 164385 - RNA, 19 nt, Artificial Sequence
  Description of Artificial Sequence: Synthetic oligonucleotide
  Antisense strand to SEQ ID NO: 164384
auucuggugauccuacagu

SEQ ID NO: 164386 - RNA, 19 nt, Artificial Sequence
  Description of Artificial Sequence: Synthetic oligonucleotide
  Sense strand starting at position 976 of SEQ ID NO: 2119
ucaagaacuuuaucagcgu

SEQ ID NO: 164387 - RNA, 19 nt, Artificial Sequence
  Description of Artificial Sequence: Synthetic oligonucleotide
  Antisense strand to SEQ ID NO: 164386
acgcugauaaaguucuuga

SEQ ID NO: 164388 - RNA, 19 nt, Artificial Sequence
  Description of Artificial Sequence: Synthetic oligonucleotide
  Sense strand starting at position 984 of SEQ ID NO: 2119
uuuaucagcguugcuagua

SEQ ID NO: 164389 - RNA, 19 nt, Artificial Sequence
  Description of Artificial Sequence: Synthetic oligonucleotide
  Antisense strand to SEQ ID NO: 164388
uacuagcaacgcugauaaa

SEQ ID NO: 164390 - RNA, 19 nt, Artificial Sequence
  Description of Artificial Sequence: Synthetic oligonucleotide
  Sense strand starting at position 994 of SEQ ID NO: 2119
uugcuaguaaucgcaguuu

SEQ ID NO: 164391 - RNA, 19 nt, Artificial Sequence
  Description of Artificial Sequence: Synthetic oligonucleotide
  Antisense strand to SEQ ID NO: 164390
aaacugcgauuacuagcaa

SEQ ID NO: 164392 - RNA, 19 nt, Artificial Sequence
  Description of Artificial Sequence: Synthetic oligonucleotide
  Sense strand starting at position 1029 of SEQ ID NO: 2119
gguccugaaacuggguaau

SEQ ID NO: 164393 - RNA, 19 nt, Artificial Sequence
  Description of Artificial Sequence: Synthetic oligonucleotide
  Antisense strand to SEQ ID NO: 164392
auuacccaguuucaggacc

SEQ ID NO: 164394 - RNA, 19 nt, Artificial Sequence
  Description of Artificial Sequence: Synthetic oligonucleotide
  Sense strand starting at position 1060 of SEQ ID NO: 2119
ccuacauuauacgugcaga

SEQ ID NO: 164395 - RNA, 19 nt, Artificial Sequence
  Description of Artificial Sequence: Synthetic oligonucleotide
  Antisense strand to SEQ ID NO: 164394
ucugcacguauaauguagg

SEQ ID NO: 164396 - RNA, 19 nt, Artificial Sequence
  Description of Artificial Sequence: Synthetic oligonucleotide
  Sense strand starting at position 1176 of SEQ ID NO: 2119
uuuacugucguugacuaua

SEQ ID NO: 164397 - RNA, 19 nt, Artificial Sequence
  Description of Artificial Sequence: Synthetic oligonucleotide
  Antisense strand to SEQ ID NO: 164396
uauagucaacgacaguaaa

SEQ ID NO: 164398 - RNA, 19 nt, Artificial Sequence
  Description of Artificial Sequence: Synthetic oligonucleotide
  Sense strand starting at position 1178 of SEQ ID NO: 2119
uacugucguugacuauaaa

SEQ ID NO: 164399 - RNA, 19 nt, Artificial Sequence
  Description of Artificial Sequence: Synthetic oligonucleotide
  Antisense strand to SEQ ID NO: 164398
uuuauagucaacgacagua

SEQ ID NO: 164400 - RNA, 19 nt, Artificial Sequence
  Description of Artificial Sequence: Synthetic oligonucleotide
  Sense strand starting at position 1255 of SEQ ID NO: 2119
cugccucuuggaugaugua

SEQ ID NO: 164401 - RNA, 19 nt, Artificial Sequence
  Description of Artificial Sequence: Synthetic oligonucleotide
  Antisense strand to SEQ ID NO: 164400
uacaucauccaagaggcag

SEQ ID NO: 164402 - RNA, 19 nt, Artificial Sequence
  Description of Artificial Sequence: Synthetic oligonucleotide
  Sense strand starting at position 1256 of SEQ ID NO: 2119
ugccucuuggaugauguaa

SEQ ID NO: 164403 - RNA, 19 nt, Artificial Sequence
  Description of Artificial Sequence: Synthetic oligonucleotide
  Antisense strand to SEQ ID NO: 164402
uuacaucauccaagaggca

SEQ ID NO: 164404 - RNA, 19 nt, Artificial Sequence
  Description of Artificial Sequence: Synthetic oligonucleotide
  Sense strand starting at position 2395 of SEQ ID NO: 2119
gugcguuugccaaagugga

SEQ ID NO: 164405 - RNA, 19 nt, Artificial Sequence
  Description of Artificial Sequence: Synthetic oligonucleotide
  Antisense strand to SEQ ID NO: 164404
uccacuuuggcaaacgcac

SEQ ID NO: 164406 - RNA, 19 nt, Artificial Sequence
  Description of Artificial Sequence: Synthetic oligonucleotide
  Sense strand starting at position 2472 of SEQ ID NO: 2119
ucgggagucguggaugcaa

SEQ ID NO: 164407 - RNA, 19 nt, Artificial Sequence
  Description of Artificial Sequence: Synthetic oligonucleotide
  Antisense strand to SEQ ID NO: 164406
uugcauccacgacucccga

SEQ ID NO: 164408 - RNA, 19 nt, Artificial Sequence
  Description of Artificial Sequence: Synthetic oligonucleotide
  Sense strand starting at position 2500 of SEQ ID NO: 2119
ccgggagaaaguuauaugu

SEQ ID NO: 164409 - RNA, 19 nt, Artificial Sequence
  Description of Artificial Sequence: Synthetic oligonucleotide
  Antisense strand to SEQ ID NO: 164408
acauauaacuuucucccgg

SEQ ID NO: 164410 - RNA, 19 nt, Artificial Sequence
  Description of Artificial Sequence: Synthetic oligonucleotide
  Sense strand starting at position 2575 of SEQ ID NO: 2119
agaaauagcauucgugaac

SEQ ID NO: 164411 - RNA, 19 nt, Artificial Sequence
  Description of Artificial Sequence: Synthetic oligonucleotide
  Antisense strand to SEQ ID NO: 164410
guucacgaaugcuauuucu

SEQ ID NO: 164412 - RNA, 19 nt, Artificial Sequence
  Description of Artificial Sequence: Synthetic oligonucleotide
  Sense strand starting at position 2576 of SEQ ID NO: 2119
gaaauagcauucgugaacu

SEQ ID NO: 164413 - RNA, 19 nt, Artificial Sequence
  Description of Artificial Sequence: Synthetic oligonucleotide
  Antisense strand to SEQ ID NO: 164412
aguucacgaaugcuauuuc

SEQ ID NO: 164414 - RNA, 19 nt, Artificial Sequence
  Description of Artificial Sequence: Synthetic oligonucleotide
  Sense strand starting at position 2578 of SEQ ID NO: 2119
aauagcauucgugaacuca

SEQ ID NO: 164415 - RNA, 19 nt, Artificial Sequence
  Description of Artificial Sequence: Synthetic oligonucleotide
  Antisense strand to SEQ ID NO: 164414
ugaguucacgaaugcuauu

SEQ ID NO: 164416 - RNA, 19 nt, Artificial Sequence
  Description of Artificial Sequence: Synthetic oligonucleotide
  Sense strand starting at position 2588 of SEQ ID NO: 2119
gugaacucaguuuaugcaa

SEQ ID NO: 164417 - RNA, 19 nt, Artificial Sequence
  Description of Artificial Sequence: Synthetic oligonucleotide
  Antisense strand to SEQ ID NO: 164416
uugcauaaacugaguucac

SEQ ID NO: 164418 - RNA, 19 nt, Artificial Sequence
  Description of Artificial Sequence: Synthetic oligonucleotide
  Sense strand starting at position 3111 of SEQ ID NO: 2119
uggcguuaccauuaacagu

SEQ ID NO: 164419 - RNA, 19 nt, Artificial Sequence
  Description of Artificial Sequence: Synthetic oligonucleotide
  Antisense strand to SEQ ID NO: 164418
acuguuaaugguaacgcca

SEQ ID NO: 164420 - RNA, 19 nt, Artificial Sequence
  Description of Artificial Sequence: Synthetic oligonucleotide
  Sense strand starting at position 3157 of SEQ ID NO: 2119
uuaguugagcucugggaag

SEQ ID NO: 164421 - RNA, 19 nt, Artificial Sequence
  Description of Artificial Sequence: Synthetic oligonucleotide
  Antisense strand to SEQ ID NO: 164420
cuucccagagcucaacuaa

SEQ ID NO: 164422 - RNA, 19 nt, Artificial Sequence
  Description of Artificial Sequence: Synthetic oligonucleotide
  Sense strand starting at position 3159 of SEQ ID NO: 2119
aguugagcucugggaaguu

SEQ ID NO: 164423 - RNA, 19 nt, Artificial Sequence
  Description of Artificial Sequence: Synthetic oligonucleotide
  Antisense strand to SEQ ID NO: 164422
aacuucccagagcucaacu

SEQ ID NO: 164424 - RNA, 19 nt, Artificial Sequence
  Description of Artificial Sequence: Synthetic oligonucleotide
  Sense strand starting at position 3168 of SEQ ID NO: 2119
cugggaaguuuagcucuga

SEQ ID NO: 164425 - RNA, 19 nt, Artificial Sequence
  Description of Artificial Sequence: Synthetic oligonucleotide
  Antisense strand to SEQ ID NO: 164424
ucagagcuaaacuucccag

SEQ ID NO: 164426 - RNA, 19 nt, Artificial Sequence
  Description of Artificial Sequence: Synthetic oligonucleotide
  Sense strand starting at position 3172 of SEQ ID NO: 2119
gaaguuuagcucugaccuc

SEQ ID NO: 164427 - RNA, 19 nt, Artificial Sequence
  Description of Artificial Sequence: Synthetic oligonucleotide
  Antisense strand to SEQ ID NO: 164426
gaggucagagcuaaacuuc

SEQ ID NO: 164428 - RNA, 19 nt, Artificial Sequence
  Description of Artificial Sequence: Synthetic oligonucleotide
  Sense strand starting at position 3206 of SEQ ID NO: 2119
ggaauaagaucugccugaa

SEQ ID NO: 164429 - RNA, 19 nt, Artificial Sequence
  Description of Artificial Sequence: Synthetic oligonucleotide
  Antisense strand to SEQ ID NO: 164428
uucaggcagaucuuauucc

SEQ ID NO: 164430 - RNA, 19 nt, Artificial Sequence
  Description of Artificial Sequence: Synthetic oligonucleotide
  Sense strand starting at position 3209 of SEQ ID NO: 2119
auaagaucugccugaauaa

SEQ ID NO: 164431 - RNA, 19 nt, Artificial Sequence
  Description of Artificial Sequence: Synthetic oligonucleotide
  Antisense strand to SEQ ID NO: 164430
uuauucaggcagaucuuau

SEQ ID NO: 164432 - RNA, 19 nt, Artificial Sequence
  Description of Artificial Sequence: Synthetic oligonucleotide
  Sense strand starting at position 3524 of SEQ ID NO: 2119
ucgaucuguugugcuauuu

SEQ ID NO: 164433 - RNA, 19 nt, Artificial Sequence
  Description of Artificial Sequence: Synthetic oligonucleotide
  Antisense strand to SEQ ID NO: 164432
aaauagcacaacagaucga

SEQ ID NO: 164434 - RNA, 19 nt, Artificial Sequence
  Description of Artificial Sequence: Synthetic oligonucleotide
  Sense strand starting at position 3571 of SEQ ID NO: 2119
cacucauaaugagagggaa

SEQ ID NO: 164435 - RNA, 19 nt, Artificial Sequence
  Description of Artificial Sequence: Synthetic oligonucleotide
  Antisense strand to SEQ ID NO: 164434
uucccucucauuaugagug

SEQ ID NO: 164436 - RNA, 19 nt, Artificial Sequence
  Description of Artificial Sequence: Synthetic oligonucleotide
  Sense strand starting at position 3704 of SEQ ID NO: 2119
gucuaaaccucuuuguacu

SEQ ID NO: 164437 - RNA, 19 nt, Artificial Sequence
  Description of Artificial Sequence: Synthetic oligonucleotide
  Antisense strand to SEQ ID NO: 164436
aguacaaagagguuuagac

SEQ ID NO: 164438 - RNA, 19 nt, Artificial Sequence
  Description of Artificial Sequence: Synthetic oligonucleotide
  Sense strand starting at position 3768 of SEQ ID NO: 2119
ugaccuaauucugcucagu

SEQ ID NO: 164439 - RNA, 19 nt, Artificial Sequence
  Description of Artificial Sequence: Synthetic oligonucleotide
  Antisense strand to SEQ ID NO: 164438
acugagcagaauuagguca

SEQ ID NO: 164440 - RNA, 19 nt, Artificial Sequence
  Description of Artificial Sequence: Synthetic oligonucleotide
  Sense strand starting at position 3880 of SEQ ID NO: 2119
uccaguaagccagacaugu

SEQ ID NO: 164441 - RNA, 19 nt, Artificial Sequence
  Description of Artificial Sequence: Synthetic oligonucleotide
  Antisense strand to SEQ ID NO: 164440
acaugucuggcuuacugga

SEQ ID NO: 164442 - RNA, 19 nt, Artificial Sequence
  Description of Artificial Sequence: Synthetic oligonucleotide
  Sense strand starting at position 122 of SEQ ID NO: 2118
ugucaaguacuaggagauc

SEQ ID NO: 164443 - RNA, 19 nt, Artificial Sequence
  Description of Artificial Sequence: Synthetic oligonucleotide
  Antisense strand to SEQ ID NO: 164442
gaucuccuaguacuugaca

SEQ ID NO: 164444 - RNA, 19 nt, Artificial Sequence
  Description of Artificial Sequence: Synthetic oligonucleotide
  Sense strand starting at position 169 of SEQ ID NO: 2118
acuugaggucuuuagcaaa

SEQ ID NO: 164445 - RNA, 19 nt, Artificial Sequence
  Description of Artificial Sequence: Synthetic oligonucleotide
  Antisense strand to SEQ ID NO: 164444
uuugcuaaagaccucaagu

SEQ ID NO: 164446 - RNA, 19 nt, Artificial Sequence
  Description of Artificial Sequence: Synthetic oligonucleotide
  Sense strand starting at position 223 of SEQ ID NO: 2118
cugccucauuauguuuaga

SEQ ID NO: 164447 - RNA, 19 nt, Artificial Sequence
  Description of Artificial Sequence: Synthetic oligonucleotide
  Antisense strand to SEQ ID NO: 164446
ucuaaacauaaugaggcag

SEQ ID NO: 164448 - RNA, 19 nt, Artificial Sequence
  Description of Artificial Sequence: Synthetic oligonucleotide
  Sense strand starting at position 225 of SEQ ID NO: 2118
gccucauuauguuuagaac

SEQ ID NO: 164449 - RNA, 19 nt, Artificial Sequence
  Description of Artificial Sequence: Synthetic oligonucleotide
  Antisense strand to SEQ ID NO: 164448
guucuaaacauaaugaggc

SEQ ID NO: 164450 - RNA, 19 nt, Artificial Sequence
  Description of Artificial Sequence: Synthetic oligonucleotide
  Sense strand starting at position 239 of SEQ ID NO: 2118
agaacauaaugugcuuuaa

SEQ ID NO: 164451 - RNA, 19 nt, Artificial Sequence
  Description of Artificial Sequence: Synthetic oligonucleotide
  Antisense strand to SEQ ID NO: 164450
uuaaagcacauuauguucu

SEQ ID NO: 164452 - RNA, 19 nt, Artificial Sequence
  Description of Artificial Sequence: Synthetic oligonucleotide
  Sense strand starting at position 351 of SEQ ID NO: 2118
cauguuacguaauccauga

SEQ ID NO: 164453 - RNA, 19 nt, Artificial Sequence
  Description of Artificial Sequence: Synthetic oligonucleotide
  Antisense strand to SEQ ID NO: 164452
ucauggauuacguaacaug

SEQ ID NO: 164454 - RNA, 19 nt, Artificial Sequence
  Description of Artificial Sequence: Synthetic oligonucleotide
  Sense strand starting at position 356 of SEQ ID NO: 2118
uacguaauccaugagcuuu

SEQ ID NO: 164455 - RNA, 19 nt, Artificial Sequence
  Description of Artificial Sequence: Synthetic oligonucleotide
  Antisense strand to SEQ ID NO: 164454
aaagcucauggauuacgua

SEQ ID NO: 164456 - RNA, 19 nt, Artificial Sequence
  Description of Artificial Sequence: Synthetic oligonucleotide
  Sense strand starting at position 375 of SEQ ID NO: 2118
uuaucuucccuguacaguu

SEQ ID NO: 164457 - RNA, 19 nt, Artificial Sequence
  Description of Artificial Sequence: Synthetic oligonucleotide
  Antisense strand to SEQ ID NO: 164456
aacuguacagggaagauaa

SEQ ID NO: 164458 - RNA, 19 nt, Artificial Sequence
  Description of Artificial Sequence: Synthetic oligonucleotide
  Sense strand starting at position 537 of SEQ ID NO: 2118
ggcagaacagaguguuaaa

SEQ ID NO: 164459 - RNA, 19 nt, Artificial Sequence
  Description of Artificial Sequence: Synthetic oligonucleotide
  Antisense strand to SEQ ID NO: 164458
uuuaacacucuguucugcc

SEQ ID NO: 164460 - RNA, 19 nt, Artificial Sequence
  Description of Artificial Sequence: Synthetic oligonucleotide
  Sense strand starting at position 548 of SEQ ID NO: 2118
guguuaaauuagcuauuag

SEQ ID NO: 164461 - RNA, 19 nt, Artificial Sequence
  Description of Artificial Sequence: Synthetic oligonucleotide
  Antisense strand to SEQ ID NO: 164460
cuaauagcuaauuuaacac

SEQ ID NO: 164462 - RNA, 19 nt, Artificial Sequence
  Description of Artificial Sequence: Synthetic oligonucleotide
  Sense strand starting at position 575 of SEQ ID NO: 2118
acuuguuuagugugaauga

SEQ ID NO: 164463 - RNA, 19 nt, Artificial Sequence
  Description of Artificial Sequence: Synthetic oligonucleotide
  Antisense strand to SEQ ID NO: 164462
ucauucacacuaaacaagu

SEQ ID NO: 164464 - RNA, 19 nt, Artificial Sequence
  Description of Artificial Sequence: Synthetic oligonucleotide
  Sense strand starting at position 829 of SEQ ID NO: 2118
acuguaggaucaccagaau

SEQ ID NO: 164465 - RNA, 19 nt, Artificial Sequence
  Description of Artificial Sequence: Synthetic oligonucleotide
  Antisense strand to SEQ ID NO: 164464
auucuggugauccuacagu

SEQ ID NO: 164466 - RNA, 19 nt, Artificial Sequence
  Description of Artificial Sequence: Synthetic oligonucleotide
  Sense strand starting at position 1065 of SEQ ID NO: 2118
ucaagaacuuuaucagcgu

SEQ ID NO: 164467 - RNA, 19 nt, Artificial Sequence
  Description of Artificial Sequence: Synthetic oligonucleotide
  Antisense strand to SEQ ID NO: 164466
acgcugauaaaguucuuga

SEQ ID NO: 164468 - RNA, 19 nt, Artificial Sequence
  Description of Artificial Sequence: Synthetic oligonucleotide
  Sense strand starting at position 1073 of SEQ ID NO: 2118
uuuaucagcguugcuagua

SEQ ID NO: 164469 - RNA, 19 nt, Artificial Sequence
  Description of Artificial Sequence: Synthetic oligonucleotide
  Antisense strand to SEQ ID NO: 164468
uacuagcaacgcugauaaa

SEQ ID NO: 164470 - RNA, 19 nt, Artificial Sequence
  Description of Artificial Sequence: Synthetic oligonucleotide
  Sense strand starting at position 1083 of SEQ ID NO: 2118
uugcuaguaaucgcaguuu

SEQ ID NO: 164471 - RNA, 19 nt, Artificial Sequence
  Description of Artificial Sequence: Synthetic oligonucleotide
  Antisense strand to SEQ ID NO: 164470
aaacugcgauuacuagcaa

SEQ ID NO: 164472 - RNA, 19 nt, Artificial Sequence
  Description of Artificial Sequence: Synthetic oligonucleotide
  Sense strand starting at position 1118 of SEQ ID NO: 2118
gguccugaaacuggguaau

SEQ ID NO: 164473 - RNA, 19 nt, Artificial Sequence
  Description of Artificial Sequence: Synthetic oligonucleotide
  Antisense strand to SEQ ID NO: 164472
auuacccaguuucaggacc

SEQ ID NO: 164474 - RNA, 19 nt, Artificial Sequence
  Description of Artificial Sequence: Synthetic oligonucleotide
  Sense strand starting at position 1149 of SEQ ID NO: 2118
ccuacauuauacgugcaga

SEQ ID NO: 164475 - RNA, 19 nt, Artificial Sequence
  Description of Artificial Sequence: Synthetic oligonucleotide
  Antisense strand to SEQ ID NO: 164474
ucugcacguauaauguagg

SEQ ID NO: 164476 - RNA, 19 nt, Artificial Sequence
  Description of Artificial Sequence: Synthetic oligonucleotide
  Sense strand starting at position 1265 of SEQ ID NO: 2118
uuuacugucguugacuaua

SEQ ID NO: 164477 - RNA, 19 nt, Artificial Sequence
  Description of Artificial Sequence: Synthetic oligonucleotide
  Antisense strand to SEQ ID NO: 164476
uauagucaacgacaguaaa

SEQ ID NO: 164478 - RNA, 19 nt, Artificial Sequence
  Description of Artificial Sequence: Synthetic oligonucleotide
  Sense strand starting at position 1267 of SEQ ID NO: 2118
uacugucguugacuauaaa

SEQ ID NO: 164479 - RNA, 19 nt, Artificial Sequence
  Description of Artificial Sequence: Synthetic oligonucleotide
  Antisense strand to SEQ ID NO: 164478
uuuauagucaacgacagua

SEQ ID NO: 164480 - RNA, 19 nt, Artificial Sequence
  Description of Artificial Sequence: Synthetic oligonucleotide
  Sense strand starting at position 1344 of SEQ ID NO: 2118
cugccucuuggaugaugua

SEQ ID NO: 164481 - RNA, 19 nt, Artificial Sequence
  Description of Artificial Sequence: Synthetic oligonucleotide
  Antisense strand to SEQ ID NO: 164480
uacaucauccaagaggcag

SEQ ID NO: 164482 - RNA, 19 nt, Artificial Sequence
  Description of Artificial Sequence: Synthetic oligonucleotide
  Sense strand starting at position 1345 of SEQ ID NO: 2118
ugccucuuggaugauguaa

SEQ ID NO: 164483 - RNA, 19 nt, Artificial Sequence
  Description of Artificial Sequence: Synthetic oligonucleotide
  Antisense strand to SEQ ID NO: 164482
uuacaucauccaagaggca

SEQ ID NO: 164484 - RNA, 19 nt, Artificial Sequence
  Description of Artificial Sequence: Synthetic oligonucleotide
  Sense strand starting at position 2484 of SEQ ID NO: 2118
gugcguuugccaaagugga

SEQ ID NO: 164485 - RNA, 19 nt, Artificial Sequence
  Description of Artificial Sequence: Synthetic oligonucleotide
  Antisense strand to SEQ ID NO: 164484
uccacuuuggcaaacgcac

SEQ ID NO: 164486 - RNA, 19 nt, Artificial Sequence
  Description of Artificial Sequence: Synthetic oligonucleotide
  Sense strand starting at position 2561 of SEQ ID NO: 2118
ucgggagucguggaugcaa

SEQ ID NO: 164487 - RNA, 19 nt, Artificial Sequence
  Description of Artificial Sequence: Synthetic oligonucleotide
  Antisense strand to SEQ ID NO: 164486
uugcauccacgacucccga

SEQ ID NO: 164488 - RNA, 19 nt, Artificial Sequence
  Description of Artificial Sequence: Synthetic oligonucleotide
  Sense strand starting at position 2589 of SEQ ID NO: 2118
ccgggagaaaguuauaugu

SEQ ID NO: 164489 - RNA, 19 nt, Artificial Sequence
  Description of Artificial Sequence: Synthetic oligonucleotide
  Antisense strand to SEQ ID NO: 164488
acauauaacuuucucccgg

SEQ ID NO: 164490 - RNA, 19 nt, Artificial Sequence
  Description of Artificial Sequence: Synthetic oligonucleotide
  Sense strand starting at position 2664 of SEQ ID NO: 2118
agaaauagcauucgugaac

SEQ ID NO: 164491 - RNA, 19 nt, Artificial Sequence
  Description of Artificial Sequence: Synthetic oligonucleotide
  Antisense strand to SEQ ID NO: 164490
guucacgaaugcuauuucu

SEQ ID NO: 164492 - RNA, 19 nt, Artificial Sequence
  Description of Artificial Sequence: Synthetic oligonucleotide
  Sense strand starting at position 2665 of SEQ ID NO: 2118
gaaauagcauucgugaacu

SEQ ID NO: 164493 - RNA, 19 nt, Artificial Sequence
  Description of Artificial Sequence: Synthetic oligonucleotide
  Antisense strand to SEQ ID NO: 164492
aguucacgaaugcuauuuc

SEQ ID NO: 164494 - RNA, 19 nt, Artificial Sequence
  Description of Artificial Sequence: Synthetic oligonucleotide
  Sense strand starting at position 2667 of SEQ ID NO: 2118
aauagcauucgugaacuca

SEQ ID NO: 164495 - RNA, 19 nt, Artificial Sequence
  Description of Artificial Sequence: Synthetic oligonucleotide
  Antisense strand to SEQ ID NO: 164494
ugaguucacgaaugcuauu

SEQ ID NO: 164496 - RNA, 19 nt, Artificial Sequence
  Description of Artificial Sequence: Synthetic oligonucleotide
  Sense strand starting at position 2677 of SEQ ID NO: 2118
gugaacucaguuuaugcaa

SEQ ID NO: 164497 - RNA, 19 nt, Artificial Sequence
  Description of Artificial Sequence: Synthetic oligonucleotide
  Antisense strand to SEQ ID NO: 164496
uugcauaaacugaguucac

SEQ ID NO: 164498 - RNA, 19 nt, Artificial Sequence
  Description of Artificial Sequence: Synthetic oligonucleotide
  Sense strand starting at position 3200 of SEQ ID NO: 2118
uggcguuaccauuaacagu

SEQ ID NO: 164499 - RNA, 19 nt, Artificial Sequence
  Description of Artificial Sequence: Synthetic oligonucleotide
  Antisense strand to SEQ ID NO: 164498
acuguuaaugguaacgcca

SEQ ID NO: 164500 - RNA, 19 nt, Artificial Sequence
  Description of Artificial Sequence: Synthetic oligonucleotide
  Sense strand starting at position 3246 of SEQ ID NO: 2118
uuaguugagcucugggaag

SEQ ID NO: 164501 - RNA, 19 nt, Artificial Sequence
  Description of Artificial Sequence: Synthetic oligonucleotide
  Antisense strand to SEQ ID NO: 164500
cuucccagagcucaacuaa

SEQ ID NO: 164502 - RNA, 19 nt, Artificial Sequence
  Description of Artificial Sequence: Synthetic oligonucleotide
  Sense strand starting at position 3248 of SEQ ID NO: 2118
aguugagcucugggaaguu

SEQ ID NO: 164503 - RNA, 19 nt, Artificial Sequence
  Description of Artificial Sequence: Synthetic oligonucleotide
  Antisense strand to SEQ ID NO: 164502
aacuucccagagcucaacu

SEQ ID NO: 164504 - RNA, 19 nt, Artificial Sequence
  Description of Artificial Sequence: Synthetic oligonucleotide
  Sense strand starting at position 3257 of SEQ ID NO: 2118
cugggaaguuuagcucuga

SEQ ID NO: 164505 - RNA, 19 nt, Artificial Sequence
  Description of Artificial Sequence: Synthetic oligonucleotide
  Antisense strand to SEQ ID NO: 164504
ucagagcuaaacuucccag

SEQ ID NO: 164506 - RNA, 19 nt, Artificial Sequence
  Description of Artificial Sequence: Synthetic oligonucleotide
  Sense strand starting at position 3261 of SEQ ID NO: 2118
gaaguuuagcucugaccuc

SEQ ID NO: 164507 - RNA, 19 nt, Artificial Sequence
  Description of Artificial Sequence: Synthetic oligonucleotide
  Antisense strand to SEQ ID NO: 164506
gaggucagagcuaaacuuc

SEQ ID NO: 164508 - RNA, 19 nt, Artificial Sequence
  Description of Artificial Sequence: Synthetic oligonucleotide
  Sense strand starting at position 3295 of SEQ ID NO: 2118
ggaauaagaucugccugaa

SEQ ID NO: 164509 - RNA, 19 nt, Artificial Sequence
  Description of Artificial Sequence: Synthetic oligonucleotide
  Antisense strand to SEQ ID NO: 164508
uucaggcagaucuuauucc

SEQ ID NO: 164510 - RNA, 19 nt, Artificial Sequence
  Description of Artificial Sequence: Synthetic oligonucleotide
  Sense strand starting at position 3298 of SEQ ID NO: 2118
auaagaucugccugaauaa

SEQ ID NO: 164511 - RNA, 19 nt, Artificial Sequence
  Description of Artificial Sequence: Synthetic oligonucleotide
  Antisense strand to SEQ ID NO: 164510
uuauucaggcagaucuuau

SEQ ID NO: 164512 - RNA, 19 nt, Artificial Sequence
  Description of Artificial Sequence: Synthetic oligonucleotide
  Sense strand starting at position 3613 of SEQ ID NO: 2118
ucgaucuguugugcuauuu

SEQ ID NO: 164513 - RNA, 19 nt, Artificial Sequence
  Description of Artificial Sequence: Synthetic oligonucleotide
  Antisense strand to SEQ ID NO: 164512
aaauagcacaacagaucga

SEQ ID NO: 164514 - RNA, 19 nt, Artificial Sequence
  Description of Artificial Sequence: Synthetic oligonucleotide
  Sense strand starting at position 3660 of SEQ ID NO: 2118
cacucauaaugagagggaa

SEQ ID NO: 164515 - RNA, 19 nt, Artificial Sequence
  Description of Artificial Sequence: Synthetic oligonucleotide
  Antisense strand to SEQ ID NO: 164514
uucccucucauuaugagug

SEQ ID NO: 164516 - RNA, 19 nt, Artificial Sequence
  Description of Artificial Sequence: Synthetic oligonucleotide
  Sense strand starting at position 3793 of SEQ ID NO: 2118
gucuaaaccucuuuguacu

SEQ ID NO: 164517 - RNA, 19 nt, Artificial Sequence
  Description of Artificial Sequence: Synthetic oligonucleotide
  Antisense strand to SEQ ID NO: 164516
aguacaaagagguuuagac

SEQ ID NO: 164518 - RNA, 19 nt, Artificial Sequence
  Description of Artificial Sequence: Synthetic oligonucleotide
  Sense strand starting at position 3857 of SEQ ID NO: 2118
ugaccuaauucugcucagu

SEQ ID NO: 164519 - RNA, 19 nt, Artificial Sequence
  Description of Artificial Sequence: Synthetic oligonucleotide
  Antisense strand to SEQ ID NO: 164518
acugagcagaauuagguca

SEQ ID NO: 164520 - RNA, 19 nt, Artificial Sequence
  Description of Artificial Sequence: Synthetic oligonucleotide
  Sense strand starting at position 3969 of SEQ ID NO: 2118
uccaguaagccagacaugu

SEQ ID NO: 164521 - RNA, 19 nt, Artificial Sequence
  Description of Artificial Sequence: Synthetic oligonucleotide
  Antisense strand to SEQ ID NO: 164520
acaugucuggcuuacugga

SEQ ID NO: 164522 - RNA, 19 nt, Artificial Sequence
  Description of Artificial Sequence: Synthetic oligonucleotide
  Sense strand starting at position 3947 of SEQ ID NO: 2120
agccuaugacucuagauac

SEQ ID NO: 164523 - RNA, 19 nt, Artificial Sequence
  Description of Artificial Sequence: Synthetic oligonucleotide
  Antisense strand to SEQ ID NO: 164522
guaucuagagucauaggcu

SEQ ID NO: 164524 - RNA, 19 nt, Artificial Sequence
  Description of Artificial Sequence: Synthetic oligonucleotide
  Sense strand starting at position 3551 of SEQ ID NO: 2120
cggagagcaaucugaggau

SEQ ID NO: 164525 - RNA, 19 nt, Artificial Sequence
  Description of Artificial Sequence: Synthetic oligonucleotide
  Antisense strand to SEQ ID NO: 164524
auccucagauugcucuccg

SEQ ID NO: 164526 - RNA, 19 nt, Artificial Sequence
  Description of Artificial Sequence: Synthetic oligonucleotide
  Sense strand starting at position 3525 of SEQ ID NO: 2120
ggaagcuucucaccaacua

SEQ ID NO: 164527 - RNA, 19 nt, Artificial Sequence
  Description of Artificial Sequence: Synthetic oligonucleotide
  Antisense strand to SEQ ID NO: 164526
uaguuggugagaagcuucc

SEQ ID NO: 164528 - RNA, 19 nt, Artificial Sequence
  Description of Artificial Sequence: Synthetic oligonucleotide
  Sense strand starting at position 3510 of SEQ ID NO: 2120
ugggucuuccuccagggaa

SEQ ID NO: 164529 - RNA, 19 nt, Artificial Sequence
  Description of Artificial Sequence: Synthetic oligonucleotide
  Antisense strand to SEQ ID NO: 164528
uucccuggaggaagaccca

SEQ ID NO: 164530 - RNA, 19 nt, Artificial Sequence
  Description of Artificial Sequence: Synthetic oligonucleotide
  Sense strand starting at position 3505 of SEQ ID NO: 2120
gagauugggucuuccucca

SEQ ID NO: 164531 - RNA, 19 nt, Artificial Sequence
  Description of Artificial Sequence: Synthetic oligonucleotide
  Antisense strand to SEQ ID NO: 164530
uggaggaagacccaaucuc

SEQ ID NO: 164532 - RNA, 19 nt, Artificial Sequence
  Description of Artificial Sequence: Synthetic oligonucleotide
  Sense strand starting at position 3476 of SEQ ID NO: 2120
cuuugaccucagggaucua

SEQ ID NO: 164533 - RNA, 19 nt, Artificial Sequence
  Description of Artificial Sequence: Synthetic oligonucleotide
  Antisense strand to SEQ ID NO: 164532
uagaucccugaggucaaag

SEQ ID NO: 164534 - RNA, 19 nt, Artificial Sequence
  Description of Artificial Sequence: Synthetic oligonucleotide
  Sense strand starting at position 3158 of SEQ ID NO: 2120
guggagugugggcaaagaa

SEQ ID NO: 164535 - RNA, 19 nt, Artificial Sequence
  Description of Artificial Sequence: Synthetic oligonucleotide
  Antisense strand to SEQ ID NO: 164534
uucuuugcccacacuccac

SEQ ID NO: 164536 - RNA, 19 nt, Artificial Sequence
  Description of Artificial Sequence: Synthetic oligonucleotide
  Sense strand starting at position 3086 of SEQ ID NO: 2120
guguucucucaccaaucca

SEQ ID NO: 164537 - RNA, 19 nt, Artificial Sequence
  Description of Artificial Sequence: Synthetic oligonucleotide
  Antisense strand to SEQ ID NO: 164536
uggauuggugagagaacac

SEQ ID NO: 164538 - RNA, 19 nt, Artificial Sequence
  Description of Artificial Sequence: Synthetic oligonucleotide
  Sense strand starting at position 3080 of SEQ ID NO: 2120
ggauuaguguucucucacc

SEQ ID NO: 164539 - RNA, 19 nt, Artificial Sequence
  Description of Artificial Sequence: Synthetic oligonucleotide
  Antisense strand to SEQ ID NO: 164538
ggugagagaacacuaaucc

SEQ ID NO: 164540 - RNA, 19 nt, Artificial Sequence
  Description of Artificial Sequence: Synthetic oligonucleotide
  Sense strand starting at position 3078 of SEQ ID NO: 2120
auggauuaguguucucuca

SEQ ID NO: 164541 - RNA, 19 nt, Artificial Sequence
  Description of Artificial Sequence: Synthetic oligonucleotide
  Antisense strand to SEQ ID NO: 164540
ugagagaacacuaauccau

SEQ ID NO: 164542 - RNA, 19 nt, Artificial Sequence
  Description of Artificial Sequence: Synthetic oligonucleotide
  Sense strand starting at position 3072 of SEQ ID NO: 2120
agauguauggauuaguguu

SEQ ID NO: 164543 - RNA, 19 nt, Artificial Sequence
  Description of Artificial Sequence: Synthetic oligonucleotide
  Antisense strand to SEQ ID NO: 164542
aacacuaauccauacaucu

SEQ ID NO: 164544 - RNA, 19 nt, Artificial Sequence
  Description of Artificial Sequence: Synthetic oligonucleotide
  Sense strand starting at position 3067 of SEQ ID NO: 2120
uccaaagauguauggauua

SEQ ID NO: 164545 - RNA, 19 nt, Artificial Sequence
  Description of Artificial Sequence: Synthetic oligonucleotide
  Antisense strand to SEQ ID NO: 164544
uaauccauacaucuuugga

SEQ ID NO: 164546 - RNA, 19 nt, Artificial Sequence
  Description of Artificial Sequence: Synthetic oligonucleotide
  Sense strand starting at position 2949 of SEQ ID NO: 2120
uggucagcuguugaguaaa

SEQ ID NO: 164547 - RNA, 19 nt, Artificial Sequence
  Description of Artificial Sequence: Synthetic oligonucleotide
  Antisense strand to SEQ ID NO: 164546
uuuacucaacagcugacca

SEQ ID NO: 164548 - RNA, 19 nt, Artificial Sequence
  Description of Artificial Sequence: Synthetic oligonucleotide
  Sense strand starting at position 2903 of SEQ ID NO: 2120
gaguuauuagguugaccaa

SEQ ID NO: 164549 - RNA, 19 nt, Artificial Sequence
  Description of Artificial Sequence: Synthetic oligonucleotide
  Antisense strand to SEQ ID NO: 164548
uuggucaaccuaauaacuc

SEQ ID NO: 164550 - RNA, 19 nt, Artificial Sequence
  Description of Artificial Sequence: Synthetic oligonucleotide
  Sense strand starting at position 2897 of SEQ ID NO: 2120
uccuaagaguuauuagguu

SEQ ID NO: 164551 - RNA, 19 nt, Artificial Sequence
  Description of Artificial Sequence: Synthetic oligonucleotide
  Antisense strand to SEQ ID NO: 164550
aaccuaauaacucuuagga

SEQ ID NO: 164552 - RNA, 19 nt, Artificial Sequence
  Description of Artificial Sequence: Synthetic oligonucleotide
  Sense strand starting at position 2864 of SEQ ID NO: 2120
gucugugugauuuggauca

SEQ ID NO: 164553 - RNA, 19 nt, Artificial Sequence
  Description of Artificial Sequence: Synthetic oligonucleotide
  Antisense strand to SEQ ID NO: 164552
ugauccaaaucacacagac

SEQ ID NO: 164554 - RNA, 19 nt, Artificial Sequence
  Description of Artificial Sequence: Synthetic oligonucleotide
  Sense strand starting at position 2862 of SEQ ID NO: 2120
cggucugugugauuuggau

SEQ ID NO: 164555 - RNA, 19 nt, Artificial Sequence
  Description of Artificial Sequence: Synthetic oligonucleotide
  Antisense strand to SEQ ID NO: 164554
auccaaaucacacagaccg

SEQ ID NO: 164556 - RNA, 19 nt, Artificial Sequence
  Description of Artificial Sequence: Synthetic oligonucleotide
  Sense strand starting at position 2858 of SEQ ID NO: 2120
gggccggucugugugauuu

SEQ ID NO: 164557 - RNA, 19 nt, Artificial Sequence
  Description of Artificial Sequence: Synthetic oligonucleotide
  Antisense strand to SEQ ID NO: 164556
aaaucacacagaccggccc

SEQ ID NO: 164558 - RNA, 19 nt, Artificial Sequence
  Description of Artificial Sequence: Synthetic oligonucleotide
  Sense strand starting at position 2501 of SEQ ID NO: 2120
cguuaagagacucguagaa

SEQ ID NO: 164559 - RNA, 19 nt, Artificial Sequence
  Description of Artificial Sequence: Synthetic oligonucleotide
  Antisense strand to SEQ ID NO: 164558
uucuacgagucucuuaacg

SEQ ID NO: 164560 - RNA, 19 nt, Artificial Sequence
  Description of Artificial Sequence: Synthetic oligonucleotide
  Sense strand starting at position 2254 of SEQ ID NO: 2120
caucgagcugucuagagga

SEQ ID NO: 164561 - RNA, 19 nt, Artificial Sequence
  Description of Artificial Sequence: Synthetic oligonucleotide
  Antisense strand to SEQ ID NO: 164560
uccucuagacagcucgaug

SEQ ID NO: 164562 - RNA, 19 nt, Artificial Sequence
  Description of Artificial Sequence: Synthetic oligonucleotide
  Sense strand starting at position 1789 of SEQ ID NO: 2120
cguuauucgcggucagcca

SEQ ID NO: 164563 - RNA, 19 nt, Artificial Sequence
  Description of Artificial Sequence: Synthetic oligonucleotide
  Antisense strand to SEQ ID NO: 164562
uggcugaccgcgaauaacg

SEQ ID NO: 164564 - RNA, 19 nt, Artificial Sequence
  Description of Artificial Sequence: Synthetic oligonucleotide
  Sense strand starting at position 1179 of SEQ ID NO: 2120
uuccucauacgugaaggaa

SEQ ID NO: 164565 - RNA, 19 nt, Artificial Sequence
  Description of Artificial Sequence: Synthetic oligonucleotide
  Antisense strand to SEQ ID NO: 164564
uuccuucacguaugaggaa

SEQ ID NO: 164566 - RNA, 19 nt, Artificial Sequence
  Description of Artificial Sequence: Synthetic oligonucleotide
  Sense strand starting at position 1178 of SEQ ID NO: 2120
cuuccucauacgugaagga

SEQ ID NO: 164567 - RNA, 19 nt, Artificial Sequence
  Description of Artificial Sequence: Synthetic oligonucleotide
  Antisense strand to SEQ ID NO: 164566
uccuucacguaugaggaag

SEQ ID NO: 164568 - RNA, 19 nt, Artificial Sequence
  Description of Artificial Sequence: Synthetic oligonucleotide
  Sense strand starting at position 920 of SEQ ID NO: 2120
cucuguugacuugaaagua

SEQ ID NO: 164569 - RNA, 19 nt, Artificial Sequence
  Description of Artificial Sequence: Synthetic oligonucleotide
  Antisense strand to SEQ ID NO: 164568
uacuuucaagucaacagag

SEQ ID NO: 164570 - RNA, 19 nt, Artificial Sequence
  Description of Artificial Sequence: Synthetic oligonucleotide
  Sense strand starting at position 917 of SEQ ID NO: 2120
auccucuguugacuugaaa

SEQ ID NO: 164571 - RNA, 19 nt, Artificial Sequence
  Description of Artificial Sequence: Synthetic oligonucleotide
  Antisense strand to SEQ ID NO: 164570
uuucaagucaacagaggau

SEQ ID NO: 164572 - RNA, 19 nt, Artificial Sequence
  Description of Artificial Sequence: Synthetic oligonucleotide
  Sense strand starting at position 848 of SEQ ID NO: 2120
gcuguauugccuuaagaga

SEQ ID NO: 164573 - RNA, 19 nt, Artificial Sequence
  Description of Artificial Sequence: Synthetic oligonucleotide
  Antisense strand to SEQ ID NO: 164572
ucucuuaaggcaauacagc

SEQ ID NO: 164574 - RNA, 19 nt, Artificial Sequence
  Description of Artificial Sequence: Synthetic oligonucleotide
  Sense strand starting at position 771 of SEQ ID NO: 2120
caguuagacacgcgaaaug

SEQ ID NO: 164575 - RNA, 19 nt, Artificial Sequence
  Description of Artificial Sequence: Synthetic oligonucleotide
  Antisense strand to SEQ ID NO: 164574
cauuucgcgugucuaacug

SEQ ID NO: 164576 - RNA, 19 nt, Artificial Sequence
  Description of Artificial Sequence: Synthetic oligonucleotide
  Sense strand starting at position 769 of SEQ ID NO: 2120
gacaguuagacacgcgaaa

SEQ ID NO: 164577 - RNA, 19 nt, Artificial Sequence
  Description of Artificial Sequence: Synthetic oligonucleotide
  Antisense strand to SEQ ID NO: 164576
uuucgcgugucuaacuguc

SEQ ID NO: 164578 - RNA, 19 nt, Artificial Sequence
  Description of Artificial Sequence: Synthetic oligonucleotide
  Sense strand starting at position 752 of SEQ ID NO: 2120
uuauuaaaccaugguuaga

SEQ ID NO: 164579 - RNA, 19 nt, Artificial Sequence
  Description of Artificial Sequence: Synthetic oligonucleotide
  Antisense strand to SEQ ID NO: 164578
ucuaaccaugguuuaauaa

SEQ ID NO: 164580 - RNA, 19 nt, Artificial Sequence
  Description of Artificial Sequence: Synthetic oligonucleotide
  Sense strand starting at position 714 of SEQ ID NO: 2120
gaacaugaaugucuuguuu

SEQ ID NO: 164581 - RNA, 19 nt, Artificial Sequence
  Description of Artificial Sequence: Synthetic oligonucleotide
  Antisense strand to SEQ ID NO: 164580
aaacaagacauucauguuc

SEQ ID NO: 164582 - RNA, 19 nt, Artificial Sequence
  Description of Artificial Sequence: Synthetic oligonucleotide
  Sense strand starting at position 698 of SEQ ID NO: 2120
gucuguuagucucugagaa

SEQ ID NO: 164583 - RNA, 19 nt, Artificial Sequence
  Description of Artificial Sequence: Synthetic oligonucleotide
  Antisense strand to SEQ ID NO: 164582
uucucagagacuaacagac

SEQ ID NO: 164584 - RNA, 19 nt, Artificial Sequence
  Description of Artificial Sequence: Synthetic oligonucleotide
  Sense strand starting at position 690 of SEQ ID NO: 2120
gauacaaagucuguuaguc

SEQ ID NO: 164585 - RNA, 19 nt, Artificial Sequence
  Description of Artificial Sequence: Synthetic oligonucleotide
  Antisense strand to SEQ ID NO: 164584
gacuaacagacuuuguauc

SEQ ID NO: 164586 - RNA, 19 nt, Artificial Sequence
  Description of Artificial Sequence: Synthetic oligonucleotide
  Sense strand starting at position 689 of SEQ ID NO: 2120
ugauacaaagucuguuagu

SEQ ID NO: 164587 - RNA, 19 nt, Artificial Sequence
  Description of Artificial Sequence: Synthetic oligonucleotide
  Antisense strand to SEQ ID NO: 164586
acuaacagacuuuguauca

SEQ ID NO: 164588 - RNA, 19 nt, Artificial Sequence
  Description of Artificial Sequence: Synthetic oligonucleotide
  Sense strand starting at position 677 of SEQ ID NO: 2120
cguuccauugauugauaca

SEQ ID NO: 164589 - RNA, 19 nt, Artificial Sequence
  Description of Artificial Sequence: Synthetic oligonucleotide
  Antisense strand to SEQ ID NO: 164588
uguaucaaucaauggaacg

SEQ ID NO: 164590 - RNA, 19 nt, Artificial Sequence
  Description of Artificial Sequence: Synthetic oligonucleotide
  Sense strand starting at position 674 of SEQ ID NO: 2120
aggcguuccauugauugau

SEQ ID NO: 164591 - RNA, 19 nt, Artificial Sequence
  Description of Artificial Sequence: Synthetic oligonucleotide
  Antisense strand to SEQ ID NO: 164590
aucaaucaauggaacgccu

SEQ ID NO: 164592 - RNA, 19 nt, Artificial Sequence
  Description of Artificial Sequence: Synthetic oligonucleotide
  Sense strand starting at position 593 of SEQ ID NO: 2120
ggcccauuagagcaaguuu

SEQ ID NO: 164593 - RNA, 19 nt, Artificial Sequence
  Description of Artificial Sequence: Synthetic oligonucleotide
  Antisense strand to SEQ ID NO: 164592
aaacuugcucuaaugggcc

SEQ ID NO: 164594 - RNA, 19 nt, Artificial Sequence
  Description of Artificial Sequence: Synthetic oligonucleotide
  Sense strand starting at position 582 of SEQ ID NO: 2120
aguauauuauaggcccauu

SEQ ID NO: 164595 - RNA, 19 nt, Artificial Sequence
  Description of Artificial Sequence: Synthetic oligonucleotide
  Antisense strand to SEQ ID NO: 164594
aaugggccuauaauauacu

SEQ ID NO: 164596 - RNA, 19 nt, Artificial Sequence
  Description of Artificial Sequence: Synthetic oligonucleotide
  Sense strand starting at position 540 of SEQ ID NO: 2120
auaucacaguuaucauugu

SEQ ID NO: 164597 - RNA, 19 nt, Artificial Sequence
  Description of Artificial Sequence: Synthetic oligonucleotide
  Antisense strand to SEQ ID NO: 164596
acaaugauaacugugauau

SEQ ID NO: 164598 - RNA, 19 nt, Artificial Sequence
  Description of Artificial Sequence: Synthetic oligonucleotide
  Sense strand starting at position 253 of SEQ ID NO: 2120
aagguaccucuuggauuaa

SEQ ID NO: 164599 - RNA, 19 nt, Artificial Sequence
  Description of Artificial Sequence: Synthetic oligonucleotide
  Antisense strand to SEQ ID NO: 164598
uuaauccaagagguaccuu

SEQ ID NO: 164600 - RNA, 19 nt, Artificial Sequence
  Description of Artificial Sequence: Synthetic oligonucleotide
  Sense strand starting at position 193 of SEQ ID NO: 2120
gcuacagcuuccuuugaag

SEQ ID NO: 164601 - RNA, 19 nt, Artificial Sequence
  Description of Artificial Sequence: Synthetic oligonucleotide
  Antisense strand to SEQ ID NO: 164600
cuucaaaggaagcuguagc

SEQ ID NO: 164602 - RNA, 19 nt, Artificial Sequence
  Description of Artificial Sequence: Synthetic oligonucleotide
  Sense strand starting at position 3951 of SEQ ID NO: 2121
auagcucuuuauguaaaga

SEQ ID NO: 164603 - RNA, 19 nt, Artificial Sequence
  Description of Artificial Sequence: Synthetic oligonucleotide
  Antisense strand to SEQ ID NO: 164602
ucuuuacauaaagagcuau

SEQ ID NO: 164604 - RNA, 19 nt, Artificial Sequence
  Description of Artificial Sequence: Synthetic oligonucleotide
  Sense strand starting at position 3948 of SEQ ID NO: 2121
augauagcucuuuauguaa

SEQ ID NO: 164605 - RNA, 19 nt, Artificial Sequence
  Description of Artificial Sequence: Synthetic oligonucleotide
  Antisense strand to SEQ ID NO: 164604
uuacauaaagagcuaucau

SEQ ID NO: 164606 - RNA, 19 nt, Artificial Sequence
  Description of Artificial Sequence: Synthetic oligonucleotide
  Sense strand starting at position 3809 of SEQ ID NO: 2121
gguguccuugaucaaguuu

SEQ ID NO: 164607 - RNA, 19 nt, Artificial Sequence
  Description of Artificial Sequence: Synthetic oligonucleotide
  Antisense strand to SEQ ID NO: 164606
aaacuugaucaaggacacc

SEQ ID NO: 164608 - RNA, 19 nt, Artificial Sequence
  Description of Artificial Sequence: Synthetic oligonucleotide
  Sense strand starting at position 3736 of SEQ ID NO: 2121
cuagaaagucuguacaucu

SEQ ID NO: 164609 - RNA, 19 nt, Artificial Sequence
  Description of Artificial Sequence: Synthetic oligonucleotide
  Antisense strand to SEQ ID NO: 164608
agauguacagacuuucuag

SEQ ID NO: 164610 - RNA, 19 nt, Artificial Sequence
  Description of Artificial Sequence: Synthetic oligonucleotide
  Sense strand starting at position 3735 of SEQ ID NO: 2121
ucuagaaagucuguacauc

SEQ ID NO: 164611 - RNA, 19 nt, Artificial Sequence
  Description of Artificial Sequence: Synthetic oligonucleotide
  Antisense strand to SEQ ID NO: 164610
gauguacagacuuucuaga

SEQ ID NO: 164612 - RNA, 19 nt, Artificial Sequence
  Description of Artificial Sequence: Synthetic oligonucleotide
  Sense strand starting at position 3725 of SEQ ID NO: 2121
caucguucucucuagaaag

SEQ ID NO: 164613 - RNA, 19 nt, Artificial Sequence
  Description of Artificial Sequence: Synthetic oligonucleotide
  Antisense strand to SEQ ID NO: 164612
cuuucuagagagaacgaug

SEQ ID NO: 164614 - RNA, 19 nt, Artificial Sequence
  Description of Artificial Sequence: Synthetic oligonucleotide
  Sense strand starting at position 3610 of SEQ ID NO: 2121
ugugcugaggaauauuagu

SEQ ID NO: 164615 - RNA, 19 nt, Artificial Sequence
  Description of Artificial Sequence: Synthetic oligonucleotide
  Antisense strand to SEQ ID NO: 164614
acuaauauuccucagcaca

SEQ ID NO: 164616 - RNA, 19 nt, Artificial Sequence
  Description of Artificial Sequence: Synthetic oligonucleotide
  Sense strand starting at position 3607 of SEQ ID NO: 2121
gucugugcugaggaauauu

SEQ ID NO: 164617 - RNA, 19 nt, Artificial Sequence
  Description of Artificial Sequence: Synthetic oligonucleotide
  Antisense strand to SEQ ID NO: 164616
aauauuccucagcacagac

SEQ ID NO: 164618 - RNA, 19 nt, Artificial Sequence
  Description of Artificial Sequence: Synthetic oligonucleotide
  Sense strand starting at position 3604 of SEQ ID NO: 2121
agggucugugcugaggaau

SEQ ID NO: 164619 - RNA, 19 nt, Artificial Sequence
  Description of Artificial Sequence: Synthetic oligonucleotide
  Antisense strand to SEQ ID NO: 164618
auuccucagcacagacccu

SEQ ID NO: 164620 - RNA, 19 nt, Artificial Sequence
  Description of Artificial Sequence: Synthetic oligonucleotide
  Sense strand starting at position 3465 of SEQ ID NO: 2121
gcucacaguuaagugagaa

SEQ ID NO: 164621 - RNA, 19 nt, Artificial Sequence
  Description of Artificial Sequence: Synthetic oligonucleotide
  Antisense strand to SEQ ID NO: 164620
uucucacuuaacugugagc

SEQ ID NO: 164622 - RNA, 19 nt, Artificial Sequence
  Description of Artificial Sequence: Synthetic oligonucleotide
  Sense strand starting at position 3220 of SEQ ID NO: 2121
gaauucuuuguuugggacu

SEQ ID NO: 164623 - RNA, 19 nt, Artificial Sequence
  Description of Artificial Sequence: Synthetic oligonucleotide
  Antisense strand to SEQ ID NO: 164622
agucccaaacaaagaauuc

SEQ ID NO: 164624 - RNA, 19 nt, Artificial Sequence
  Description of Artificial Sequence: Synthetic oligonucleotide
  Sense strand starting at position 3218 of SEQ ID NO: 2121
aagaauucuuuguuuggga

SEQ ID NO: 164625 - RNA, 19 nt, Artificial Sequence
  Description of Artificial Sequence: Synthetic oligonucleotide
  Antisense strand to SEQ ID NO: 164624
ucccaaacaaagaauucuu

SEQ ID NO: 164626 - RNA, 19 nt, Artificial Sequence
  Description of Artificial Sequence: Synthetic oligonucleotide
  Sense strand starting at position 3216 of SEQ ID NO: 2121
guaagaauucuuuguuugg

SEQ ID NO: 164627 - RNA, 19 nt, Artificial Sequence
  Description of Artificial Sequence: Synthetic oligonucleotide
  Antisense strand to SEQ ID NO: 164626
ccaaacaaagaauucuuac

SEQ ID NO: 164628 - RNA, 19 nt, Artificial Sequence
  Description of Artificial Sequence: Synthetic oligonucleotide
  Sense strand starting at position 2960 of SEQ ID NO: 2121
ucaugagauuggcucacaa

SEQ ID NO: 164629 - RNA, 19 nt, Artificial Sequence
  Description of Artificial Sequence: Synthetic oligonucleotide
  Antisense strand to SEQ ID NO: 164628
uugugagccaaucucauga

SEQ ID NO: 164630 - RNA, 19 nt, Artificial Sequence
  Description of Artificial Sequence: Synthetic oligonucleotide
  Sense strand starting at position 2913 of SEQ ID NO: 2121
cuaguuugccuccauggaa

SEQ ID NO: 164631 - RNA, 19 nt, Artificial Sequence
  Description of Artificial Sequence: Synthetic oligonucleotide
  Antisense strand to SEQ ID NO: 164630
uuccauggaggcaaacuag

SEQ ID NO: 164632 - RNA, 19 nt, Artificial Sequence
  Description of Artificial Sequence: Synthetic oligonucleotide
  Sense strand starting at position 2832 of SEQ ID NO: 2121
accacuuggucugucagaa

SEQ ID NO: 164633 - RNA, 19 nt, Artificial Sequence
  Description of Artificial Sequence: Synthetic oligonucleotide
  Antisense strand to SEQ ID NO: 164632
uucugacagaccaaguggu

SEQ ID NO: 164634 - RNA, 19 nt, Artificial Sequence
  Description of Artificial Sequence: Synthetic oligonucleotide
  Sense strand starting at position 2748 of SEQ ID NO: 2121
ggcuaagagaagcaguuau

SEQ ID NO: 164635 - RNA, 19 nt, Artificial Sequence
  Description of Artificial Sequence: Synthetic oligonucleotide
  Antisense strand to SEQ ID NO: 164634
auaacugcuucucuuagcc

SEQ ID NO: 164636 - RNA, 19 nt, Artificial Sequence
  Description of Artificial Sequence: Synthetic oligonucleotide
  Sense strand starting at position 2703 of SEQ ID NO: 2121
guguacaugauaggacuuu

SEQ ID NO: 164637 - RNA, 19 nt, Artificial Sequence
  Description of Artificial Sequence: Synthetic oligonucleotide
  Antisense strand to SEQ ID NO: 164636
aaaguccuaucauguacac

SEQ ID NO: 164638 - RNA, 19 nt, Artificial Sequence
  Description of Artificial Sequence: Synthetic oligonucleotide
  Sense strand starting at position 2699 of SEQ ID NO: 2121
guauguguacaugauagga

SEQ ID NO: 164639 - RNA, 19 nt, Artificial Sequence
  Description of Artificial Sequence: Synthetic oligonucleotide
  Antisense strand to SEQ ID NO: 164638
uccuaucauguacacauac

SEQ ID NO: 164640 - RNA, 19 nt, Artificial Sequence
  Description of Artificial Sequence: Synthetic oligonucleotide
  Sense strand starting at position 2671 of SEQ ID NO: 2121
gauuguacaguauauguuu

SEQ ID NO: 164641 - RNA, 19 nt, Artificial Sequence
  Description of Artificial Sequence: Synthetic oligonucleotide
  Antisense strand to SEQ ID NO: 164640
aaacauauacuguacaauc

SEQ ID NO: 164642 - RNA, 19 nt, Artificial Sequence
  Description of Artificial Sequence: Synthetic oligonucleotide
  Sense strand starting at position 2669 of SEQ ID NO: 2121
uugauuguacaguauaugu

SEQ ID NO: 164643 - RNA, 19 nt, Artificial Sequence
  Description of Artificial Sequence: Synthetic oligonucleotide
  Antisense strand to SEQ ID NO: 164642
acauauacuguacaaucaa

SEQ ID NO: 164644 - RNA, 19 nt, Artificial Sequence
  Description of Artificial Sequence: Synthetic oligonucleotide
  Sense strand starting at position 2597 of SEQ ID NO: 2121
uuguauaugcaugauauac

SEQ ID NO: 164645 - RNA, 19 nt, Artificial Sequence
  Description of Artificial Sequence: Synthetic oligonucleotide
  Antisense strand to SEQ ID NO: 164644
guauaucaugcauauacaa

SEQ ID NO: 164646 - RNA, 19 nt, Artificial Sequence
  Description of Artificial Sequence: Synthetic oligonucleotide
  Sense strand starting at position 2593 of SEQ ID NO: 2121
gaaauuguauaugcaugau

SEQ ID NO: 164647 - RNA, 19 nt, Artificial Sequence
  Description of Artificial Sequence: Synthetic oligonucleotide
  Antisense strand to SEQ ID NO: 164646
aucaugcauauacaauuuc

SEQ ID NO: 164648 - RNA, 19 nt, Artificial Sequence
  Description of Artificial Sequence: Synthetic oligonucleotide
  Sense strand starting at position 2485 of SEQ ID NO: 2121
ccuuacacucuguauggua

SEQ ID NO: 164649 - RNA, 19 nt, Artificial Sequence
  Description of Artificial Sequence: Synthetic oligonucleotide
  Antisense strand to SEQ ID NO: 164648
uaccauacagaguguaagg

SEQ ID NO: 164650 - RNA, 19 nt, Artificial Sequence
  Description of Artificial Sequence: Synthetic oligonucleotide
  Sense strand starting at position 2440 of SEQ ID NO: 2121
gcuaauaagugagcacaaa

SEQ ID NO: 164651 - RNA, 19 nt, Artificial Sequence
  Description of Artificial Sequence: Synthetic oligonucleotide
  Antisense strand to SEQ ID NO: 164650
uuugugcucacuuauuagc

SEQ ID NO: 164652 - RNA, 19 nt, Artificial Sequence
  Description of Artificial Sequence: Synthetic oligonucleotide
  Sense strand starting at position 2406 of SEQ ID NO: 2121
cugugaugggcuuaucuaa

SEQ ID NO: 164653 - RNA, 19 nt, Artificial Sequence
  Description of Artificial Sequence: Synthetic oligonucleotide
  Antisense strand to SEQ ID NO: 164652
uuagauaagcccaucacag

SEQ ID NO: 164654 - RNA, 19 nt, Artificial Sequence
  Description of Artificial Sequence: Synthetic oligonucleotide
  Sense strand starting at position 2378 of SEQ ID NO: 2121
ugggcuguucaaggauuga

SEQ ID NO: 164655 - RNA, 19 nt, Artificial Sequence
  Description of Artificial Sequence: Synthetic oligonucleotide
  Antisense strand to SEQ ID NO: 164654
ucaauccuugaacagccca

SEQ ID NO: 164656 - RNA, 19 nt, Artificial Sequence
  Description of Artificial Sequence: Synthetic oligonucleotide
  Sense strand starting at position 1223 of SEQ ID NO: 2121
gugagagguucucuacuaa

SEQ ID NO: 164657 - RNA, 19 nt, Artificial Sequence
  Description of Artificial Sequence: Synthetic oligonucleotide
  Antisense strand to SEQ ID NO: 164656
uuaguagagaaccucucac

SEQ ID NO: 164658 - RNA, 19 nt, Artificial Sequence
  Description of Artificial Sequence: Synthetic oligonucleotide
  Sense strand starting at position 1117 of SEQ ID NO: 2121
gaauccggucuuggagaaa

SEQ ID NO: 164659 - RNA, 19 nt, Artificial Sequence
  Description of Artificial Sequence: Synthetic oligonucleotide
  Antisense strand to SEQ ID NO: 164658
uuucuccaagaccggauuc

SEQ ID NO: 164660 - RNA, 19 nt, Artificial Sequence
  Description of Artificial Sequence: Synthetic oligonucleotide
  Sense strand starting at position 959 of SEQ ID NO: 2121
uauguucuuguagaaaggu

SEQ ID NO: 164661 - RNA, 19 nt, Artificial Sequence
  Description of Artificial Sequence: Synthetic oligonucleotide
  Antisense strand to SEQ ID NO: 164660
accuuucuacaagaacaua

SEQ ID NO: 164662 - RNA, 19 nt, Artificial Sequence
  Description of Artificial Sequence: Synthetic oligonucleotide
  Sense strand starting at position 698 of SEQ ID NO: 2121
cgagguuagucucuuauuu

SEQ ID NO: 164663 - RNA, 19 nt, Artificial Sequence
  Description of Artificial Sequence: Synthetic oligonucleotide
  Antisense strand to SEQ ID NO: 164662
aaauaagagacuaaccucg

SEQ ID NO: 164664 - RNA, 19 nt, Artificial Sequence
  Description of Artificial Sequence: Synthetic oligonucleotide
  Sense strand starting at position 686 of SEQ ID NO: 2121
aaacaacuucuacgagguu

SEQ ID NO: 164665 - RNA, 19 nt, Artificial Sequence
  Description of Artificial Sequence: Synthetic oligonucleotide
  Antisense strand to SEQ ID NO: 164664
aaccucguagaaguuguuu

SEQ ID NO: 164666 - RNA, 19 nt, Artificial Sequence
  Description of Artificial Sequence: Synthetic oligonucleotide
  Sense strand starting at position 659 of SEQ ID NO: 2121
ucugaucuccuuuacgcaa

SEQ ID NO: 164667 - RNA, 19 nt, Artificial Sequence
  Description of Artificial Sequence: Synthetic oligonucleotide
  Antisense strand to SEQ ID NO: 164666
uugcguaaaggagaucaga

SEQ ID NO: 164668 - RNA, 19 nt, Artificial Sequence
  Description of Artificial Sequence: Synthetic oligonucleotide
  Sense strand starting at position 652 of SEQ ID NO: 2121
ggaaacuucugaucuccuu

SEQ ID NO: 164669 - RNA, 19 nt, Artificial Sequence
  Description of Artificial Sequence: Synthetic oligonucleotide
  Antisense strand to SEQ ID NO: 164668
aaggagaucagaaguuucc

SEQ ID NO: 164670 - RNA, 19 nt, Artificial Sequence
  Description of Artificial Sequence: Synthetic oligonucleotide
  Sense strand starting at position 587 of SEQ ID NO: 2121
uguauuauuuccucauguc

SEQ ID NO: 164671 - RNA, 19 nt, Artificial Sequence
  Description of Artificial Sequence: Synthetic oligonucleotide
  Antisense strand to SEQ ID NO: 164670
gacaugaggaaauaauaca

SEQ ID NO: 164672 - RNA, 19 nt, Artificial Sequence
  Description of Artificial Sequence: Synthetic oligonucleotide
  Sense strand starting at position 396 of SEQ ID NO: 2121
agauguuuaccacauguau

SEQ ID NO: 164673 - RNA, 19 nt, Artificial Sequence
  Description of Artificial Sequence: Synthetic oligonucleotide
  Antisense strand to SEQ ID NO: 164672
auacaugugguaaacaucu

SEQ ID NO: 164674 - RNA, 19 nt, Artificial Sequence
  Description of Artificial Sequence: Synthetic oligonucleotide
  Sense strand starting at position 335 of SEQ ID NO: 2121
ugugaagugcuagaagaga

SEQ ID NO: 164675 - RNA, 19 nt, Artificial Sequence
  Description of Artificial Sequence: Synthetic oligonucleotide
  Antisense strand to SEQ ID NO: 164674
ucucuucuagcacuucaca

SEQ ID NO: 164676 - RNA, 19 nt, Artificial Sequence
  Description of Artificial Sequence: Synthetic oligonucleotide
  Sense strand starting at position 280 of SEQ ID NO: 2121
guuucaguggagggaagau

SEQ ID NO: 164677 - RNA, 19 nt, Artificial Sequence
  Description of Artificial Sequence: Synthetic oligonucleotide
  Antisense strand to SEQ ID NO: 164676
aucuucccuccacugaaac

SEQ ID NO: 164678 - RNA, 19 nt, Artificial Sequence
  Description of Artificial Sequence: Synthetic oligonucleotide
  Sense strand starting at position 263 of SEQ ID NO: 2121
gucuaaagcccacauuagu

SEQ ID NO: 164679 - RNA, 19 nt, Artificial Sequence
  Description of Artificial Sequence: Synthetic oligonucleotide
  Antisense strand to SEQ ID NO: 164678
acuaaugugggcuuuagac

SEQ ID NO: 164680 - RNA, 19 nt, Artificial Sequence
  Description of Artificial Sequence: Synthetic oligonucleotide
  Sense strand starting at position 247 of SEQ ID NO: 2121
agacauaucuuucugaguc

SEQ ID NO: 164681 - RNA, 19 nt, Artificial Sequence
  Description of Artificial Sequence: Synthetic oligonucleotide
  Antisense strand to SEQ ID NO: 164680
gacucagaaagauaugucu

SEQ ID NO: 164682 - RNA, 19 nt, Artificial Sequence
  Description of Artificial Sequence: Synthetic oligonucleotide
  Sense strand starting at position 3883 of SEQ ID NO: 2122
caggcauucuggcuugaga

SEQ ID NO: 164683 - RNA, 19 nt, Artificial Sequence
  Description of Artificial Sequence: Synthetic oligonucleotide
  Antisense strand to SEQ ID NO: 164682
ucucaagccagaaugccug

SEQ ID NO: 164684 - RNA, 19 nt, Artificial Sequence
  Description of Artificial Sequence: Synthetic oligonucleotide
  Sense strand starting at position 3782 of SEQ ID NO: 2122
ugaaauggccaggguaaau

SEQ ID NO: 164685 - RNA, 19 nt, Artificial Sequence
  Description of Artificial Sequence: Synthetic oligonucleotide
  Antisense strand to SEQ ID NO: 164684
auuuacccuggccauuuca

SEQ ID NO: 164686 - RNA, 19 nt, Artificial Sequence
  Description of Artificial Sequence: Synthetic oligonucleotide
  Sense strand starting at position 3781 of SEQ ID NO: 2122
augaaauggccaggguaaa

SEQ ID NO: 164687 - RNA, 19 nt, Artificial Sequence
  Description of Artificial Sequence: Synthetic oligonucleotide
  Antisense strand to SEQ ID NO: 164686
uuuacccuggccauuucau

SEQ ID NO: 164688 - RNA, 19 nt, Artificial Sequence
  Description of Artificial Sequence: Synthetic oligonucleotide
  Sense strand starting at position 3753 of SEQ ID NO: 2122
agcaguuagcuaguugcua

SEQ ID NO: 164689 - RNA, 19 nt, Artificial Sequence
  Description of Artificial Sequence: Synthetic oligonucleotide
  Antisense strand to SEQ ID NO: 164688
uagcaacuagcuaacugcu

SEQ ID NO: 164690 - RNA, 19 nt, Artificial Sequence
  Description of Artificial Sequence: Synthetic oligonucleotide
  Sense strand starting at position 3697 of SEQ ID NO: 2122
cuguaugucugaccaaauu

SEQ ID NO: 164691 - RNA, 19 nt, Artificial Sequence
  Description of Artificial Sequence: Synthetic oligonucleotide
  Antisense strand to SEQ ID NO: 164690
aauuuggucagacauacag

SEQ ID NO: 164692 - RNA, 19 nt, Artificial Sequence
  Description of Artificial Sequence: Synthetic oligonucleotide
  Sense strand starting at position 3643 of SEQ ID NO: 2122
gaggcaucauaucuaugau

SEQ ID NO: 164693 - RNA, 19 nt, Artificial Sequence
  Description of Artificial Sequence: Synthetic oligonucleotide
  Antisense strand to SEQ ID NO: 164692
aucauagauaugaugccuc

SEQ ID NO: 164694 - RNA, 19 nt, Artificial Sequence
  Description of Artificial Sequence: Synthetic oligonucleotide
  Sense strand starting at position 3594 of SEQ ID NO: 2122
ugcccagugacugaugaaa

SEQ ID NO: 164695 - RNA, 19 nt, Artificial Sequence
  Description of Artificial Sequence: Synthetic oligonucleotide
  Antisense strand to SEQ ID NO: 164694
uuucaucagucacugggca

SEQ ID NO: 164696 - RNA, 19 nt, Artificial Sequence
  Description of Artificial Sequence: Synthetic oligonucleotide
  Sense strand starting at position 3508 of SEQ ID NO: 2122
aucuguguuucuccaggga

SEQ ID NO: 164697 - RNA, 19 nt, Artificial Sequence
  Description of Artificial Sequence: Synthetic oligonucleotide
  Antisense strand to SEQ ID NO: 164696
ucccuggagaaacacagau

SEQ ID NO: 164698 - RNA, 19 nt, Artificial Sequence
  Description of Artificial Sequence: Synthetic oligonucleotide
  Sense strand starting at position 3425 of SEQ ID NO: 2122
ggcaauucuuuauuguaug

SEQ ID NO: 164699 - RNA, 19 nt, Artificial Sequence
  Description of Artificial Sequence: Synthetic oligonucleotide
  Antisense strand to SEQ ID NO: 164698
cauacaauaaagaauugcc

SEQ ID NO: 164700 - RNA, 19 nt, Artificial Sequence
  Description of Artificial Sequence: Synthetic oligonucleotide
  Sense strand starting at position 3423 of SEQ ID NO: 2122
uuggcaauucuuuauugua

SEQ ID NO: 164701 - RNA, 19 nt, Artificial Sequence
  Description of Artificial Sequence: Synthetic oligonucleotide
  Antisense strand to SEQ ID NO: 164700
uacaauaaagaauugccaa

SEQ ID NO: 164702 - RNA, 19 nt, Artificial Sequence
  Description of Artificial Sequence: Synthetic oligonucleotide
  Sense strand starting at position 3413 of SEQ ID NO: 2122
uuaccaggucuuggcaauu

SEQ ID NO: 164703 - RNA, 19 nt, Artificial Sequence
  Description of Artificial Sequence: Synthetic oligonucleotide
  Antisense strand to SEQ ID NO: 164702
aauugccaagaccugguaa

SEQ ID NO: 164704 - RNA, 19 nt, Artificial Sequence
  Description of Artificial Sequence: Synthetic oligonucleotide
  Sense strand starting at position 3404 of SEQ ID NO: 2122
aggagaaucuuaccagguc

SEQ ID NO: 164705 - RNA, 19 nt, Artificial Sequence
  Description of Artificial Sequence: Synthetic oligonucleotide
  Antisense strand to SEQ ID NO: 164704
gaccugguaagauucuccu

SEQ ID NO: 164706 - RNA, 19 nt, Artificial Sequence
  Description of Artificial Sequence: Synthetic oligonucleotide
  Sense strand starting at position 3352 of SEQ ID NO: 2122
ugcuuuaggcaugaauagu

SEQ ID NO: 164707 - RNA, 19 nt, Artificial Sequence
  Description of Artificial Sequence: Synthetic oligonucleotide
  Antisense strand to SEQ ID NO: 164706
acuauucaugccuaaagca

SEQ ID NO: 164708 - RNA, 19 nt, Artificial Sequence
  Description of Artificial Sequence: Synthetic oligonucleotide
  Sense strand starting at position 3349 of SEQ ID NO: 2122
uugugcuuuaggcaugaau

SEQ ID NO: 164709 - RNA, 19 nt, Artificial Sequence
  Description of Artificial Sequence: Synthetic oligonucleotide
  Antisense strand to SEQ ID NO: 164708
auucaugccuaaagcacaa

SEQ ID NO: 164710 - RNA, 19 nt, Artificial Sequence
  Description of Artificial Sequence: Synthetic oligonucleotide
  Sense strand starting at position 3304 of SEQ ID NO: 2122
ggaagcacuguccaacauu

SEQ ID NO: 164711 - RNA, 19 nt, Artificial Sequence
  Description of Artificial Sequence: Synthetic oligonucleotide
  Antisense strand to SEQ ID NO: 164710
aauguuggacagugcuucc

SEQ ID NO: 164712 - RNA, 19 nt, Artificial Sequence
  Description of Artificial Sequence: Synthetic oligonucleotide
  Sense strand starting at position 3223 of SEQ ID NO: 2122
ugcaauaaugaauaucagu

SEQ ID NO: 164713 - RNA, 19 nt, Artificial Sequence
  Description of Artificial Sequence: Synthetic oligonucleotide
  Antisense strand to SEQ ID NO: 164712
acugauauucauuauugca

SEQ ID NO: 164714 - RNA, 19 nt, Artificial Sequence
  Description of Artificial Sequence: Synthetic oligonucleotide
  Sense strand starting at position 2952 of SEQ ID NO: 2122
ugugaaauugcucagugaa

SEQ ID NO: 164715 - RNA, 19 nt, Artificial Sequence
  Description of Artificial Sequence: Synthetic oligonucleotide
  Antisense strand to SEQ ID NO: 164714
uucacugagcaauuucaca

SEQ ID NO: 164716 - RNA, 19 nt, Artificial Sequence
  Description of Artificial Sequence: Synthetic oligonucleotide
  Sense strand starting at position 2951 of SEQ ID NO: 2122
uugugaaauugcucaguga

SEQ ID NO: 164717 - RNA, 19 nt, Artificial Sequence
  Description of Artificial Sequence: Synthetic oligonucleotide
  Antisense strand to SEQ ID NO: 164716
ucacugagcaauuucacaa

SEQ ID NO: 164718 - RNA, 19 nt, Artificial Sequence
  Description of Artificial Sequence: Synthetic oligonucleotide
  Sense strand starting at position 2884 of SEQ ID NO: 2122
cugucuccucugcauugaa

SEQ ID NO: 164719 - RNA, 19 nt, Artificial Sequence
  Description of Artificial Sequence: Synthetic oligonucleotide
  Antisense strand to SEQ ID NO: 164718
uucaaugcagaggagacag

SEQ ID NO: 164720 - RNA, 19 nt, Artificial Sequence
  Description of Artificial Sequence: Synthetic oligonucleotide
  Sense strand starting at position 2702 of SEQ ID NO: 2122
uucugucugcuagagauaa

SEQ ID NO: 164721 - RNA, 19 nt, Artificial Sequence
  Description of Artificial Sequence: Synthetic oligonucleotide
  Antisense strand to SEQ ID NO: 164720
uuaucucuagcagacagaa

SEQ ID NO: 164722 - RNA, 19 nt, Artificial Sequence
  Description of Artificial Sequence: Synthetic oligonucleotide
  Sense strand starting at position 2673 of SEQ ID NO: 2122
guagauucuuccuaauuug

SEQ ID NO: 164723 - RNA, 19 nt, Artificial Sequence
  Description of Artificial Sequence: Synthetic oligonucleotide
  Antisense strand to SEQ ID NO: 164722
caaauuaggaagaaucuac

SEQ ID NO: 164724 - RNA, 19 nt, Artificial Sequence
  Description of Artificial Sequence: Synthetic oligonucleotide
  Sense strand starting at position 2644 of SEQ ID NO: 2122
acgucacagcuacaugauu

SEQ ID NO: 164725 - RNA, 19 nt, Artificial Sequence
  Description of Artificial Sequence: Synthetic oligonucleotide
  Antisense strand to SEQ ID NO: 164724
aaucauguagcugugacgu

SEQ ID NO: 164726 - RNA, 19 nt, Artificial Sequence
  Description of Artificial Sequence: Synthetic oligonucleotide
  Sense strand starting at position 2370 of SEQ ID NO: 2122
guacguagcauagagaaau

SEQ ID NO: 164727 - RNA, 19 nt, Artificial Sequence
  Description of Artificial Sequence: Synthetic oligonucleotide
  Antisense strand to SEQ ID NO: 164726
auuucucuaugcuacguac

SEQ ID NO: 164728 - RNA, 19 nt, Artificial Sequence
  Description of Artificial Sequence: Synthetic oligonucleotide
  Sense strand starting at position 2354 of SEQ ID NO: 2122
uagcguuugcguuuaugua

SEQ ID NO: 164729 - RNA, 19 nt, Artificial Sequence
  Description of Artificial Sequence: Synthetic oligonucleotide
  Antisense strand to SEQ ID NO: 164728
uacauaaacgcaaacgcua

SEQ ID NO: 164730 - RNA, 19 nt, Artificial Sequence
  Description of Artificial Sequence: Synthetic oligonucleotide
  Sense strand starting at position 2259 of SEQ ID NO: 2122
acgugauagccaugugaaa

SEQ ID NO: 164731 - RNA, 19 nt, Artificial Sequence
  Description of Artificial Sequence: Synthetic oligonucleotide
  Antisense strand to SEQ ID NO: 164730
uuucacauggcuaucacgu

SEQ ID NO: 164732 - RNA, 19 nt, Artificial Sequence
  Description of Artificial Sequence: Synthetic oligonucleotide
  Sense strand starting at position 2257 of SEQ ID NO: 2122
gaacgugauagccauguga

SEQ ID NO: 164733 - RNA, 19 nt, Artificial Sequence
  Description of Artificial Sequence: Synthetic oligonucleotide
  Antisense strand to SEQ ID NO: 164732
ucacauggcuaucacguuc

SEQ ID NO: 164734 - RNA, 19 nt, Artificial Sequence
  Description of Artificial Sequence: Synthetic oligonucleotide
  Sense strand starting at position 2248 of SEQ ID NO: 2122
uuggauucugaacgugaua

SEQ ID NO: 164735 - RNA, 19 nt, Artificial Sequence
  Description of Artificial Sequence: Synthetic oligonucleotide
  Antisense strand to SEQ ID NO: 164734
uaucacguucagaauccaa

SEQ ID NO: 164736 - RNA, 19 nt, Artificial Sequence
  Description of Artificial Sequence: Synthetic oligonucleotide
  Sense strand starting at position 2195 of SEQ ID NO: 2122
cgggcuuauuuaucuuuaa

SEQ ID NO: 164737 - RNA, 19 nt, Artificial Sequence
  Description of Artificial Sequence: Synthetic oligonucleotide
  Antisense strand to SEQ ID NO: 164736
uuaaagauaaauaagcccg

SEQ ID NO: 164738 - RNA, 19 nt, Artificial Sequence
  Description of Artificial Sequence: Synthetic oligonucleotide
  Sense strand starting at position 2155 of SEQ ID NO: 2122
gagagaguuaaccgagcca

SEQ ID NO: 164739 - RNA, 19 nt, Artificial Sequence
  Description of Artificial Sequence: Synthetic oligonucleotide
  Antisense strand to SEQ ID NO: 164738
uggcucgguuaacucucuc

SEQ ID NO: 164740 - RNA, 19 nt, Artificial Sequence
  Description of Artificial Sequence: Synthetic oligonucleotide
  Sense strand starting at position 2032 of SEQ ID NO: 2122
ccucguagucucucagcga

SEQ ID NO: 164741 - RNA, 19 nt, Artificial Sequence
  Description of Artificial Sequence: Synthetic oligonucleotide
  Antisense strand to SEQ ID NO: 164740
ucgcugagagacuacgagg

SEQ ID NO: 164742 - RNA, 19 nt, Artificial Sequence
  Description of Artificial Sequence: Synthetic oligonucleotide
  Sense strand starting at position 1989 of SEQ ID NO: 2122
ggcuguugcagagauuaga

SEQ ID NO: 164743 - RNA, 19 nt, Artificial Sequence
  Description of Artificial Sequence: Synthetic oligonucleotide
  Antisense strand to SEQ ID NO: 164742
ucuaaucucugcaacagcc

SEQ ID NO: 164744 - RNA, 19 nt, Artificial Sequence
  Description of Artificial Sequence: Synthetic oligonucleotide
  Sense strand starting at position 1717 of SEQ ID NO: 2122
ggguuaggcgucucggagu

SEQ ID NO: 164745 - RNA, 19 nt, Artificial Sequence
  Description of Artificial Sequence: Synthetic oligonucleotide
  Antisense strand to SEQ ID NO: 164744
acuccgagacgccuaaccc

SEQ ID NO: 164746 - RNA, 19 nt, Artificial Sequence
  Description of Artificial Sequence: Synthetic oligonucleotide
  Sense strand starting at position 1676 of SEQ ID NO: 2122
guagaaaguugucccuuug

SEQ ID NO: 164747 - RNA, 19 nt, Artificial Sequence
  Description of Artificial Sequence: Synthetic oligonucleotide
  Antisense strand to SEQ ID NO: 164746
caaagggacaacuuucuac

SEQ ID NO: 164748 - RNA, 19 nt, Artificial Sequence
  Description of Artificial Sequence: Synthetic oligonucleotide
  Sense strand starting at position 1675 of SEQ ID NO: 2122
gguagaaaguugucccuuu

SEQ ID NO: 164749 - RNA, 19 nt, Artificial Sequence
  Description of Artificial Sequence: Synthetic oligonucleotide
  Antisense strand to SEQ ID NO: 164748
aaagggacaacuuucuacc

SEQ ID NO: 164750 - RNA, 19 nt, Artificial Sequence
  Description of Artificial Sequence: Synthetic oligonucleotide
  Sense strand starting at position 1613 of SEQ ID NO: 2122
ccauccuggcucugggauu

SEQ ID NO: 164751 - RNA, 19 nt, Artificial Sequence
  Description of Artificial Sequence: Synthetic oligonucleotide
  Antisense strand to SEQ ID NO: 164750
aaucccagagccaggaugg

SEQ ID NO: 164752 - RNA, 19 nt, Artificial Sequence
  Description of Artificial Sequence: Synthetic oligonucleotide
  Sense strand starting at position 1223 of SEQ ID NO: 2122
cccagaucucucgguagag

SEQ ID NO: 164753 - RNA, 19 nt, Artificial Sequence
  Description of Artificial Sequence: Synthetic oligonucleotide
  Antisense strand to SEQ ID NO: 164752
cucuaccgagagaucuggg

SEQ ID NO: 164754 - RNA, 19 nt, Artificial Sequence
  Description of Artificial Sequence: Synthetic oligonucleotide
  Sense strand starting at position 279 of SEQ ID NO: 2122
agcaaugcgcuggagagau

SEQ ID NO: 164755 - RNA, 19 nt, Artificial Sequence
  Description of Artificial Sequence: Synthetic oligonucleotide
  Antisense strand to SEQ ID NO: 164754
aucucuccagcgcauugcu

SEQ ID NO: 164756 - RNA, 19 nt, Artificial Sequence
  Description of Artificial Sequence: Synthetic oligonucleotide
  Sense strand starting at position 119 of SEQ ID NO: 2122
ucuuauuaguuauuagcca

SEQ ID NO: 164757 - RNA, 19 nt, Artificial Sequence
  Description of Artificial Sequence: Synthetic oligonucleotide
  Antisense strand to SEQ ID NO: 164756
uggcuaauaacuaauaaga

SEQ ID NO: 164758 - RNA, 19 nt, Artificial Sequence
  Description of Artificial Sequence: Synthetic oligonucleotide
  Sense strand starting at position 39 of SEQ ID NO: 2122
aggauucucccagaggcuu

SEQ ID NO: 164759 - RNA, 19 nt, Artificial Sequence
  Description of Artificial Sequence: Synthetic oligonucleotide
  Antisense strand to SEQ ID NO: 164758
aagccucugggagaauccu

SEQ ID NO: 164760 - RNA, 19 nt, Artificial Sequence
  Description of Artificial Sequence: Synthetic oligonucleotide
  Sense strand starting at position 34 of SEQ ID NO: 2122
ugauuaggauucucccaga

SEQ ID NO: 164761 - RNA, 19 nt, Artificial Sequence
  Description of Artificial Sequence: Synthetic oligonucleotide
  Antisense strand to SEQ ID NO: 164760
ucugggagaauccuaauca

SEQ ID NO: 164762 - RNA, 19 nt, Artificial Sequence
  Description of Artificial Sequence: Synthetic oligonucleotide
  Sense strand starting at position 206 of SEQ ID NO: 2123
aucgcuuaagcagaagagu

SEQ ID NO: 164763 - RNA, 19 nt, Artificial Sequence
  Description of Artificial Sequence: Synthetic oligonucleotide
  Antisense strand to SEQ ID NO: 164762
acucuucugcuuaagcgau

SEQ ID NO: 164764 - RNA, 19 nt, Artificial Sequence
  Description of Artificial Sequence: Synthetic oligonucleotide
  Sense strand starting at position 382 of SEQ ID NO: 2123
cuaaauguugcauaugguu

SEQ ID NO: 164765 - RNA, 19 nt, Artificial Sequence
  Description of Artificial Sequence: Synthetic oligonucleotide
  Antisense strand to SEQ ID NO: 164764
aaccauaugcaacauuuag

SEQ ID NO: 164766 - RNA, 19 nt, Artificial Sequence
  Description of Artificial Sequence: Synthetic oligonucleotide
  Sense strand starting at position 430 of SEQ ID NO: 2123
aguaacacugugcauagaa

SEQ ID NO: 164767 - RNA, 19 nt, Artificial Sequence
  Description of Artificial Sequence: Synthetic oligonucleotide
  Antisense strand to SEQ ID NO: 164766
uucuaugcacaguguuacu

SEQ ID NO: 164768 - RNA, 19 nt, Artificial Sequence
  Description of Artificial Sequence: Synthetic oligonucleotide
  Sense strand starting at position 682 of SEQ ID NO: 2123
acuuauaucuuguucugag

SEQ ID NO: 164769 - RNA, 19 nt, Artificial Sequence
  Description of Artificial Sequence: Synthetic oligonucleotide
  Antisense strand to SEQ ID NO: 164768
cucagaacaagauauaagu

SEQ ID NO: 164770 - RNA, 19 nt, Artificial Sequence
  Description of Artificial Sequence: Synthetic oligonucleotide
  Sense strand starting at position 706 of SEQ ID NO: 2123
ugcucagaucuugagugaa

SEQ ID NO: 164771 - RNA, 19 nt, Artificial Sequence
  Description of Artificial Sequence: Synthetic oligonucleotide
  Antisense strand to SEQ ID NO: 164770
uucacucaagaucugagca

SEQ ID NO: 164772 - RNA, 19 nt, Artificial Sequence
  Description of Artificial Sequence: Synthetic oligonucleotide
  Sense strand starting at position 708 of SEQ ID NO: 2123
cucagaucuugagugaaau

SEQ ID NO: 164773 - RNA, 19 nt, Artificial Sequence
  Description of Artificial Sequence: Synthetic oligonucleotide
  Antisense strand to SEQ ID NO: 164772
auuucacucaagaucugag

SEQ ID NO: 164774 - RNA, 19 nt, Artificial Sequence
  Description of Artificial Sequence: Synthetic oligonucleotide
  Sense strand starting at position 709 of SEQ ID NO: 2123
ucagaucuugagugaaaua

SEQ ID NO: 164775 - RNA, 19 nt, Artificial Sequence
  Description of Artificial Sequence: Synthetic oligonucleotide
  Antisense strand to SEQ ID NO: 164774
uauuucacucaagaucuga

SEQ ID NO: 164776 - RNA, 19 nt, Artificial Sequence
  Description of Artificial Sequence: Synthetic oligonucleotide
  Sense strand starting at position 835 of SEQ ID NO: 2123
ucguauugucagcacagaa

SEQ ID NO: 164777 - RNA, 19 nt, Artificial Sequence
  Description of Artificial Sequence: Synthetic oligonucleotide
  Antisense strand to SEQ ID NO: 164776
uucugugcugacaauacga

SEQ ID NO: 164778 - RNA, 19 nt, Artificial Sequence
  Description of Artificial Sequence: Synthetic oligonucleotide
  Sense strand starting at position 868 of SEQ ID NO: 2123
ucuacagacgucgaaagaa

SEQ ID NO: 164779 - RNA, 19 nt, Artificial Sequence
  Description of Artificial Sequence: Synthetic oligonucleotide
  Antisense strand to SEQ ID NO: 164778
uucuuucgacgucuguaga

SEQ ID NO: 164780 - RNA, 19 nt, Artificial Sequence
  Description of Artificial Sequence: Synthetic oligonucleotide
  Sense strand starting at position 876 of SEQ ID NO: 2123
cgucgaaagaacuagcaaa

SEQ ID NO: 164781 - RNA, 19 nt, Artificial Sequence
  Description of Artificial Sequence: Synthetic oligonucleotide
  Antisense strand to SEQ ID NO: 164780
uuugcuaguucuuucgacg

SEQ ID NO: 164782 - RNA, 19 nt, Artificial Sequence
  Description of Artificial Sequence: Synthetic oligonucleotide
  Sense strand starting at position 981 of SEQ ID NO: 2123
acgauuucuuaacagaacu

SEQ ID NO: 164783 - RNA, 19 nt, Artificial Sequence
  Description of Artificial Sequence: Synthetic oligonucleotide
  Antisense strand to SEQ ID NO: 164782
aguucuguuaagaaaucgu

SEQ ID NO: 164784 - RNA, 19 nt, Artificial Sequence
  Description of Artificial Sequence: Synthetic oligonucleotide
  Sense strand starting at position 1078 of SEQ ID NO: 2123
cuuuguugccuggauauga

SEQ ID NO: 164785 - RNA, 19 nt, Artificial Sequence
  Description of Artificial Sequence: Synthetic oligonucleotide
  Antisense strand to SEQ ID NO: 164784
ucauauccaggcaacaaag

SEQ ID NO: 164786 - RNA, 19 nt, Artificial Sequence
  Description of Artificial Sequence: Synthetic oligonucleotide
  Sense strand starting at position 1177 of SEQ ID NO: 2123
uacguauccuaaucugaga

SEQ ID NO: 164787 - RNA, 19 nt, Artificial Sequence
  Description of Artificial Sequence: Synthetic oligonucleotide
  Antisense strand to SEQ ID NO: 164786
ucucagauuaggauacgua

SEQ ID NO: 164788 - RNA, 19 nt, Artificial Sequence
  Description of Artificial Sequence: Synthetic oligonucleotide
  Sense strand starting at position 1205 of SEQ ID NO: 2123
guccuaauaccugaagcuu

SEQ ID NO: 164789 - RNA, 19 nt, Artificial Sequence
  Description of Artificial Sequence: Synthetic oligonucleotide
  Antisense strand to SEQ ID NO: 164788
aagcuucagguauuaggac

SEQ ID NO: 164790 - RNA, 19 nt, Artificial Sequence
  Description of Artificial Sequence: Synthetic oligonucleotide
  Sense strand starting at position 1282 of SEQ ID NO: 2123
uuaagaguucuacggagga

SEQ ID NO: 164791 - RNA, 19 nt, Artificial Sequence
  Description of Artificial Sequence: Synthetic oligonucleotide
  Antisense strand to SEQ ID NO: 164790
uccuccguagaacucuuaa

SEQ ID NO: 164792 - RNA, 19 nt, Artificial Sequence
  Description of Artificial Sequence: Synthetic oligonucleotide
  Sense strand starting at position 1753 of SEQ ID NO: 2123
ucgggaauccugggauagu

SEQ ID NO: 164793 - RNA, 19 nt, Artificial Sequence
  Description of Artificial Sequence: Synthetic oligonucleotide
  Antisense strand to SEQ ID NO: 164792
acuaucccaggauucccga

SEQ ID NO: 164794 - RNA, 19 nt, Artificial Sequence
  Description of Artificial Sequence: Synthetic oligonucleotide
  Sense strand starting at position 1823 of SEQ ID NO: 2123
cgagaagauuucgaaggug

SEQ ID NO: 164795 - RNA, 19 nt, Artificial Sequence
  Description of Artificial Sequence: Synthetic oligonucleotide
  Antisense strand to SEQ ID NO: 164794
caccuucgaaaucuucucg

SEQ ID NO: 164796 - RNA, 19 nt, Artificial Sequence
  Description of Artificial Sequence: Synthetic oligonucleotide
  Sense strand starting at position 1841 of SEQ ID NO: 2123
ggaggagcgugucucaaga

SEQ ID NO: 164797 - RNA, 19 nt, Artificial Sequence
  Description of Artificial Sequence: Synthetic oligonucleotide
  Antisense strand to SEQ ID NO: 164796
ucuugagacacgcuccucc

SEQ ID NO: 164798 - RNA, 19 nt, Artificial Sequence
  Description of Artificial Sequence: Synthetic oligonucleotide
  Sense strand starting at position 1906 of SEQ ID NO: 2123
gcgccuauucuggaggaac

SEQ ID NO: 164799 - RNA, 19 nt, Artificial Sequence
  Description of Artificial Sequence: Synthetic oligonucleotide
  Antisense strand to SEQ ID NO: 164798
guuccuccagaauaggcgc

SEQ ID NO: 164800 - RNA, 19 nt, Artificial Sequence
  Description of Artificial Sequence: Synthetic oligonucleotide
  Sense strand starting at position 1943 of SEQ ID NO: 2123
cgaaguguuaccgcuucca

SEQ ID NO: 164801 - RNA, 19 nt, Artificial Sequence
  Description of Artificial Sequence: Synthetic oligonucleotide
  Antisense strand to SEQ ID NO: 164800
uggaagcgguaacacuucg

SEQ ID NO: 164802 - RNA, 19 nt, Artificial Sequence
  Description of Artificial Sequence: Synthetic oligonucleotide
  Sense strand starting at position 2721 of SEQ ID NO: 2123
agacguuuccuuuauugga

SEQ ID NO: 164803 - RNA, 19 nt, Artificial Sequence
  Description of Artificial Sequence: Synthetic oligonucleotide
  Antisense strand to SEQ ID NO: 164802
uccaauaaaggaaacgucu

SEQ ID NO: 164804 - RNA, 19 nt, Artificial Sequence
  Description of Artificial Sequence: Synthetic oligonucleotide
  Sense strand starting at position 2729 of SEQ ID NO: 2123
ccuuuauuggaucgugacu

SEQ ID NO: 164805 - RNA, 19 nt, Artificial Sequence
  Description of Artificial Sequence: Synthetic oligonucleotide
  Antisense strand to SEQ ID NO: 164804
agucacgauccaauaaagg

SEQ ID NO: 164806 - RNA, 19 nt, Artificial Sequence
  Description of Artificial Sequence: Synthetic oligonucleotide
  Sense strand starting at position 3028 of SEQ ID NO: 2123
uacugucgccugucugauu

SEQ ID NO: 164807 - RNA, 19 nt, Artificial Sequence
  Description of Artificial Sequence: Synthetic oligonucleotide
  Antisense strand to SEQ ID NO: 164806
aaucagacaggcgacagua

SEQ ID NO: 164808 - RNA, 19 nt, Artificial Sequence
  Description of Artificial Sequence: Synthetic oligonucleotide
  Sense strand starting at position 3040 of SEQ ID NO: 2123
ucugauucgcuauaauaaa

SEQ ID NO: 164809 - RNA, 19 nt, Artificial Sequence
  Description of Artificial Sequence: Synthetic oligonucleotide
  Antisense strand to SEQ ID NO: 164808
uuuauuauagcgaaucaga

SEQ ID NO: 164810 - RNA, 19 nt, Artificial Sequence
  Description of Artificial Sequence: Synthetic oligonucleotide
  Sense strand starting at position 3051 of SEQ ID NO: 2123
auaauaaaucugugagccu

SEQ ID NO: 164811 - RNA, 19 nt, Artificial Sequence
  Description of Artificial Sequence: Synthetic oligonucleotide
  Antisense strand to SEQ ID NO: 164810
aggcucacagauuuauuau

SEQ ID NO: 164812 - RNA, 19 nt, Artificial Sequence
  Description of Artificial Sequence: Synthetic oligonucleotide
  Sense strand starting at position 3096 of SEQ ID NO: 2123
accagucuuucccuauaga

SEQ ID NO: 164813 - RNA, 19 nt, Artificial Sequence
  Description of Artificial Sequence: Synthetic oligonucleotide
  Antisense strand to SEQ ID NO: 164812
ucuauagggaaagacuggu

SEQ ID NO: 164814 - RNA, 19 nt, Artificial Sequence
  Description of Artificial Sequence: Synthetic oligonucleotide
  Sense strand starting at position 3097 of SEQ ID NO: 2123
ccagucuuucccuauagac

SEQ ID NO: 164815 - RNA, 19 nt, Artificial Sequence
  Description of Artificial Sequence: Synthetic oligonucleotide
  Antisense strand to SEQ ID NO: 164814
gucuauagggaaagacugg

SEQ ID NO: 164816 - RNA, 19 nt, Artificial Sequence
  Description of Artificial Sequence: Synthetic oligonucleotide
  Sense strand starting at position 3099 of SEQ ID NO: 2123
agucuuucccuauagacac

SEQ ID NO: 164817 - RNA, 19 nt, Artificial Sequence
  Description of Artificial Sequence: Synthetic oligonucleotide
  Antisense strand to SEQ ID NO: 164816
gugucuauagggaaagacu

SEQ ID NO: 164818 - RNA, 19 nt, Artificial Sequence
  Description of Artificial Sequence: Synthetic oligonucleotide
  Sense strand starting at position 3167 of SEQ ID NO: 2123
uagaauagcugauggauuu

SEQ ID NO: 164819 - RNA, 19 nt, Artificial Sequence
  Description of Artificial Sequence: Synthetic oligonucleotide
  Antisense strand to SEQ ID NO: 164818
aaauccaucagcuauucua

SEQ ID NO: 164820 - RNA, 19 nt, Artificial Sequence
  Description of Artificial Sequence: Synthetic oligonucleotide
  Sense strand starting at position 3284 of SEQ ID NO: 2123
uggagucuuugaucaguug

SEQ ID NO: 164821 - RNA, 19 nt, Artificial Sequence
  Description of Artificial Sequence: Synthetic oligonucleotide
  Antisense strand to SEQ ID NO: 164820
caacugaucaaagacucca

SEQ ID NO: 164822 - RNA, 19 nt, Artificial Sequence
  Description of Artificial Sequence: Synthetic oligonucleotide
  Sense strand starting at position 3285 of SEQ ID NO: 2123
ggagucuuugaucaguuga

SEQ ID NO: 164823 - RNA, 19 nt, Artificial Sequence
  Description of Artificial Sequence: Synthetic oligonucleotide
  Antisense strand to SEQ ID NO: 164822
ucaacugaucaaagacucc

SEQ ID NO: 164824 - RNA, 19 nt, Artificial Sequence
  Description of Artificial Sequence: Synthetic oligonucleotide
  Sense strand starting at position 3287 of SEQ ID NO: 2123
agucuuugaucaguugaau

SEQ ID NO: 164825 - RNA, 19 nt, Artificial Sequence
  Description of Artificial Sequence: Synthetic oligonucleotide
  Antisense strand to SEQ ID NO: 164824
auucaacugaucaaagacu

SEQ ID NO: 164826 - RNA, 19 nt, Artificial Sequence
  Description of Artificial Sequence: Synthetic oligonucleotide
  Sense strand starting at position 3300 of SEQ ID NO: 2123
uugaauuugucagugugca

SEQ ID NO: 164827 - RNA, 19 nt, Artificial Sequence
  Description of Artificial Sequence: Synthetic oligonucleotide
  Antisense strand to SEQ ID NO: 164826
ugcacacugacaaauucaa

SEQ ID NO: 164828 - RNA, 19 nt, Artificial Sequence
  Description of Artificial Sequence: Synthetic oligonucleotide
  Sense strand starting at position 3301 of SEQ ID NO: 2123
ugaauuugucagugugcau

SEQ ID NO: 164829 - RNA, 19 nt, Artificial Sequence
  Description of Artificial Sequence: Synthetic oligonucleotide
  Antisense strand to SEQ ID NO: 164828
augcacacugacaaauuca

SEQ ID NO: 164830 - RNA, 19 nt, Artificial Sequence
  Description of Artificial Sequence: Synthetic oligonucleotide
  Sense strand starting at position 3450 of SEQ ID NO: 2123
gcacguagaacuuagaaug

SEQ ID NO: 164831 - RNA, 19 nt, Artificial Sequence
  Description of Artificial Sequence: Synthetic oligonucleotide
  Antisense strand to SEQ ID NO: 164830
cauucuaaguucuacgugc

SEQ ID NO: 164832 - RNA, 19 nt, Artificial Sequence
  Description of Artificial Sequence: Synthetic oligonucleotide
  Sense strand starting at position 3512 of SEQ ID NO: 2123
ucccacuguggcuauuaga

SEQ ID NO: 164833 - RNA, 19 nt, Artificial Sequence
  Description of Artificial Sequence: Synthetic oligonucleotide
  Antisense strand to SEQ ID NO: 164832
ucuaauagccacaguggga

SEQ ID NO: 164834 - RNA, 19 nt, Artificial Sequence
  Description of Artificial Sequence: Synthetic oligonucleotide
  Sense strand starting at position 3543 of SEQ ID NO: 2123
uugagugcucuguaaaucu

SEQ ID NO: 164835 - RNA, 19 nt, Artificial Sequence
  Description of Artificial Sequence: Synthetic oligonucleotide
  Antisense strand to SEQ ID NO: 164834
agauuuacagagcacucaa

SEQ ID NO: 164836 - RNA, 19 nt, Artificial Sequence
  Description of Artificial Sequence: Synthetic oligonucleotide
  Sense strand starting at position 3555 of SEQ ID NO: 2123
uaaaucuaccuggguguuu

SEQ ID NO: 164837 - RNA, 19 nt, Artificial Sequence
  Description of Artificial Sequence: Synthetic oligonucleotide
  Antisense strand to SEQ ID NO: 164836
aaacacccagguagauuua

SEQ ID NO: 164838 - RNA, 19 nt, Artificial Sequence
  Description of Artificial Sequence: Synthetic oligonucleotide
  Sense strand starting at position 3617 of SEQ ID NO: 2123
auaaguccucuguacggaa

SEQ ID NO: 164839 - RNA, 19 nt, Artificial Sequence
  Description of Artificial Sequence: Synthetic oligonucleotide
  Antisense strand to SEQ ID NO: 164838
uuccguacagaggacuuau

SEQ ID NO: 164840 - RNA, 19 nt, Artificial Sequence
  Description of Artificial Sequence: Synthetic oligonucleotide
  Sense strand starting at position 3619 of SEQ ID NO: 2123
aaguccucuguacggaaua

SEQ ID NO: 164841 - RNA, 19 nt, Artificial Sequence
  Description of Artificial Sequence: Synthetic oligonucleotide
  Antisense strand to SEQ ID NO: 164840
uauuccguacagaggacuu

SEQ ID NO: 164842 - RNA, 19 nt, Artificial Sequence
  Description of Artificial Sequence: Synthetic oligonucleotide
  Sense strand starting at position 410 of SEQ ID NO: 2124
cuuaguacuugguugucau

SEQ ID NO: 164843 - RNA, 19 nt, Artificial Sequence
  Description of Artificial Sequence: Synthetic oligonucleotide
  Antisense strand to SEQ ID NO: 164842
augacaaccaaguacuaag

SEQ ID NO: 164844 - RNA, 19 nt, Artificial Sequence
  Description of Artificial Sequence: Synthetic oligonucleotide
  Sense strand starting at position 411 of SEQ ID NO: 2124
uuaguacuugguugucaug

SEQ ID NO: 164845 - RNA, 19 nt, Artificial Sequence
  Description of Artificial Sequence: Synthetic oligonucleotide
  Antisense strand to SEQ ID NO: 164844
caugacaaccaaguacuaa

SEQ ID NO: 164846 - RNA, 19 nt, Artificial Sequence
  Description of Artificial Sequence: Synthetic oligonucleotide
  Sense strand starting at position 417 of SEQ ID NO: 2124
cuugguugucauggauaac

SEQ ID NO: 164847 - RNA, 19 nt, Artificial Sequence
  Description of Artificial Sequence: Synthetic oligonucleotide
  Antisense strand to SEQ ID NO: 164846
guuauccaugacaaccaag

SEQ ID NO: 164848 - RNA, 19 nt, Artificial Sequence
  Description of Artificial Sequence: Synthetic oligonucleotide
  Sense strand starting at position 418 of SEQ ID NO: 2124
uugguugucauggauaaca

SEQ ID NO: 164849 - RNA, 19 nt, Artificial Sequence
  Description of Artificial Sequence: Synthetic oligonucleotide
  Antisense strand to SEQ ID NO: 164848
uguuauccaugacaaccaa

SEQ ID NO: 164850 - RNA, 19 nt, Artificial Sequence
  Description of Artificial Sequence: Synthetic oligonucleotide
  Sense strand starting at position 420 of SEQ ID NO: 2124
gguugucauggauaacagu

SEQ ID NO: 164851 - RNA, 19 nt, Artificial Sequence
  Description of Artificial Sequence: Synthetic oligonucleotide
  Antisense strand to SEQ ID NO: 164850
acuguuauccaugacaacc

SEQ ID NO: 164852 - RNA, 19 nt, Artificial Sequence
  Description of Artificial Sequence: Synthetic oligonucleotide
  Sense strand starting at position 447 of SEQ ID NO: 2124
ggauaacuguaacucuaca

SEQ ID NO: 164853 - RNA, 19 nt, Artificial Sequence
  Description of Artificial Sequence: Synthetic oligonucleotide
  Antisense strand to SEQ ID NO: 164852
uguagaguuacaguuaucc

SEQ ID NO: 164854 - RNA, 19 nt, Artificial Sequence
  Description of Artificial Sequence: Synthetic oligonucleotide
  Sense strand starting at position 558 of SEQ ID NO: 2124
gauggauaauguugauuuc

SEQ ID NO: 164855 - RNA, 19 nt, Artificial Sequence
  Description of Artificial Sequence: Synthetic oligonucleotide
  Antisense strand to SEQ ID NO: 164854
gaaaucaacauuauccauc

SEQ ID NO: 164856 - RNA, 19 nt, Artificial Sequence
  Description of Artificial Sequence: Synthetic oligonucleotide
  Sense strand starting at position 614 of SEQ ID NO: 2124
gucaguguuguacaagcca

SEQ ID NO: 164857 - RNA, 19 nt, Artificial Sequence
  Description of Artificial Sequence: Synthetic oligonucleotide
  Antisense strand to SEQ ID NO: 164856
uggcuuguacaacacugac

SEQ ID NO: 164858 - RNA, 19 nt, Artificial Sequence
  Description of Artificial Sequence: Synthetic oligonucleotide
  Sense strand starting at position 688 of SEQ ID NO: 2124
cagguaaagucauuaucgu

SEQ ID NO: 164859 - RNA, 19 nt, Artificial Sequence
  Description of Artificial Sequence: Synthetic oligonucleotide
  Antisense strand to SEQ ID NO: 164858
acgauaaugacuuuaccug

SEQ ID NO: 164860 - RNA, 19 nt, Artificial Sequence
  Description of Artificial Sequence: Synthetic oligonucleotide
  Sense strand starting at position 689 of SEQ ID NO: 2124
agguaaagucauuaucgug

SEQ ID NO: 164861 - RNA, 19 nt, Artificial Sequence
  Description of Artificial Sequence: Synthetic oligonucleotide
  Antisense strand to SEQ ID NO: 164860
cacgauaaugacuuuaccu

SEQ ID NO: 164862 - RNA, 19 nt, Artificial Sequence
  Description of Artificial Sequence: Synthetic oligonucleotide
  Sense strand starting at position 696 of SEQ ID NO: 2124
gucauuaucguguacaaua

SEQ ID NO: 164863 - RNA, 19 nt, Artificial Sequence
  Description of Artificial Sequence: Synthetic oligonucleotide
  Antisense strand to SEQ ID NO: 164862
uauuguacacgauaaugac

SEQ ID NO: 164864 - RNA, 19 nt, Artificial Sequence
  Description of Artificial Sequence: Synthetic oligonucleotide
  Sense strand starting at position 698 of SEQ ID NO: 2124
cauuaucguguacaauaga

SEQ ID NO: 164865 - RNA, 19 nt, Artificial Sequence
  Description of Artificial Sequence: Synthetic oligonucleotide
  Antisense strand to SEQ ID NO: 164864
ucuauuguacacgauaaug

SEQ ID NO: 164866 - RNA, 19 nt, Artificial Sequence
  Description of Artificial Sequence: Synthetic oligonucleotide
  Sense strand starting at position 701 of SEQ ID NO: 2124
uaucguguacaauagaaac

SEQ ID NO: 164867 - RNA, 19 nt, Artificial Sequence
  Description of Artificial Sequence: Synthetic oligonucleotide
  Antisense strand to SEQ ID NO: 164866
guuucuauuguacacgaua

SEQ ID NO: 164868 - RNA, 19 nt, Artificial Sequence
  Description of Artificial Sequence: Synthetic oligonucleotide
  Sense strand starting at position 831 of SEQ ID NO: 2124
cuagaagaguguuuccaua

SEQ ID NO: 164869 - RNA, 19 nt, Artificial Sequence
  Description of Artificial Sequence: Synthetic oligonucleotide
  Antisense strand to SEQ ID NO: 164868
uauggaaacacucuucuag

SEQ ID NO: 164870 - RNA, 19 nt, Artificial Sequence
  Description of Artificial Sequence: Synthetic oligonucleotide
  Sense strand starting at position 833 of SEQ ID NO: 2124
agaagaguguuuccauaua

SEQ ID NO: 164871 - RNA, 19 nt, Artificial Sequence
  Description of Artificial Sequence: Synthetic oligonucleotide
  Antisense strand to SEQ ID NO: 164870
uauauggaaacacucuucu

SEQ ID NO: 164872 - RNA, 19 nt, Artificial Sequence
  Description of Artificial Sequence: Synthetic oligonucleotide
  Sense strand starting at position 881 of SEQ ID NO: 2124
aagucaauggcucauguca

SEQ ID NO: 164873 - RNA, 19 nt, Artificial Sequence
  Description of Artificial Sequence: Synthetic oligonucleotide
  Antisense strand to SEQ ID NO: 164872
ugacaugagccauugacuu

SEQ ID NO: 164874 - RNA, 19 nt, Artificial Sequence
  Description of Artificial Sequence: Synthetic oligonucleotide
  Sense strand starting at position 1372 of SEQ ID NO: 2124
cuuggaaugcccuaguaaa

SEQ ID NO: 164875 - RNA, 19 nt, Artificial Sequence
  Description of Artificial Sequence: Synthetic oligonucleotide
  Antisense strand to SEQ ID NO: 164874
uuuacuagggcauuccaag

SEQ ID NO: 164876 - RNA, 19 nt, Artificial Sequence
  Description of Artificial Sequence: Synthetic oligonucleotide
  Sense strand starting at position 1421 of SEQ ID NO: 2124
ugucacuuccucugugaaa

SEQ ID NO: 164877 - RNA, 19 nt, Artificial Sequence
  Description of Artificial Sequence: Synthetic oligonucleotide
  Antisense strand to SEQ ID NO: 164876
uuucacagaggaagugaca

SEQ ID NO: 164878 - RNA, 19 nt, Artificial Sequence
  Description of Artificial Sequence: Synthetic oligonucleotide
  Sense strand starting at position 1422 of SEQ ID NO: 2124
gucacuuccucugugaaac

SEQ ID NO: 164879 - RNA, 19 nt, Artificial Sequence
  Description of Artificial Sequence: Synthetic oligonucleotide
  Antisense strand to SEQ ID NO: 164878
guuucacagaggaagugac

SEQ ID NO: 164880 - RNA, 19 nt, Artificial Sequence
  Description of Artificial Sequence: Synthetic oligonucleotide
  Sense strand starting at position 1433 of SEQ ID NO: 2124
ugugaaaccuucucccaga

SEQ ID NO: 164881 - RNA, 19 nt, Artificial Sequence
  Description of Artificial Sequence: Synthetic oligonucleotide
  Antisense strand to SEQ ID NO: 164880
ucugggagaagguuucaca

SEQ ID NO: 164882 - RNA, 19 nt, Artificial Sequence
  Description of Artificial Sequence: Synthetic oligonucleotide
  Sense strand starting at position 1465 of SEQ ID NO: 2124
guacuauacugucuguacu

SEQ ID NO: 164883 - RNA, 19 nt, Artificial Sequence
  Description of Artificial Sequence: Synthetic oligonucleotide
  Antisense strand to SEQ ID NO: 164882
aguacagacaguauaguac

SEQ ID NO: 164884 - RNA, 19 nt, Artificial Sequence
  Description of Artificial Sequence: Synthetic oligonucleotide
  Sense strand starting at position 1526 of SEQ ID NO: 2124
uccaguaguccaugaacuu

SEQ ID NO: 164885 - RNA, 19 nt, Artificial Sequence
  Description of Artificial Sequence: Synthetic oligonucleotide
  Antisense strand to SEQ ID NO: 164884
aaguucauggacuacugga

SEQ ID NO: 164886 - RNA, 19 nt, Artificial Sequence
  Description of Artificial Sequence: Synthetic oligonucleotide
  Sense strand starting at position 1574 of SEQ ID NO: 2124
cagagugugagccagaaau

SEQ ID NO: 164887 - RNA, 19 nt, Artificial Sequence
  Description of Artificial Sequence: Synthetic oligonucleotide
  Antisense strand to SEQ ID NO: 164886
auuucuggcucacacucug

SEQ ID NO: 164888 - RNA, 19 nt, Artificial Sequence
  Description of Artificial Sequence: Synthetic oligonucleotide
  Sense strand starting at position 1576 of SEQ ID NO: 2124
gagugugagccagaaauug

SEQ ID NO: 164889 - RNA, 19 nt, Artificial Sequence
  Description of Artificial Sequence: Synthetic oligonucleotide
  Antisense strand to SEQ ID NO: 164888
caauuucuggcucacacuc

SEQ ID NO: 164890 - RNA, 19 nt, Artificial Sequence
  Description of Artificial Sequence: Synthetic oligonucleotide
  Sense strand starting at position 1590 of SEQ ID NO: 2124
aauugugaggaaugcaaga

SEQ ID NO: 164891 - RNA, 19 nt, Artificial Sequence
  Description of Artificial Sequence: Synthetic oligonucleotide
  Antisense strand to SEQ ID NO: 164890
ucuugcauuccucacaauu

SEQ ID NO: 164892 - RNA, 19 nt, Artificial Sequence
  Description of Artificial Sequence: Synthetic oligonucleotide
  Sense strand starting at position 1658 of SEQ ID NO: 2124
cuuuaaauggcacguuauc

SEQ ID NO: 164893 - RNA, 19 nt, Artificial Sequence
  Description of Artificial Sequence: Synthetic oligonucleotide
  Antisense strand to SEQ ID NO: 164892
gauaacgugccauuuaaag

SEQ ID NO: 164894 - RNA, 19 nt, Artificial Sequence
  Description of Artificial Sequence: Synthetic oligonucleotide
  Sense strand starting at position 1910 of SEQ ID NO: 2124
gucuguuugcaggguagga

SEQ ID NO: 164895 - RNA, 19 nt, Artificial Sequence
  Description of Artificial Sequence: Synthetic oligonucleotide
  Antisense strand to SEQ ID NO: 164894
uccuacccugcaaacagac

SEQ ID NO: 164896 - RNA, 19 nt, Artificial Sequence
  Description of Artificial Sequence: Synthetic oligonucleotide
  Sense strand starting at position 2044 of SEQ ID NO: 2124
ccugcugacuggucagaaa

SEQ ID NO: 164897 - RNA, 19 nt, Artificial Sequence
  Description of Artificial Sequence: Synthetic oligonucleotide
  Antisense strand to SEQ ID NO: 164896
uuucugaccagucagcagg

SEQ ID NO: 164898 - RNA, 19 nt, Artificial Sequence
  Description of Artificial Sequence: Synthetic oligonucleotide
  Sense strand starting at position 2056 of SEQ ID NO: 2124
ucagaaaccucgccaguca

SEQ ID NO: 164899 - RNA, 19 nt, Artificial Sequence
  Description of Artificial Sequence: Synthetic oligonucleotide
  Antisense strand to SEQ ID NO: 164898
ugacuggcgagguuucuga

SEQ ID NO: 164900 - RNA, 19 nt, Artificial Sequence
  Description of Artificial Sequence: Synthetic oligonucleotide
  Sense strand starting at position 2103 of SEQ ID NO: 2124
gcacggucgccguuacgua

SEQ ID NO: 164901 - RNA, 19 nt, Artificial Sequence
  Description of Artificial Sequence: Synthetic oligonucleotide
  Antisense strand to SEQ ID NO: 164900
uacguaacggcgaccgugc

SEQ ID NO: 164902 - RNA, 19 nt, Artificial Sequence
  Description of Artificial Sequence: Synthetic oligonucleotide
  Sense strand starting at position 2171 of SEQ ID NO: 2124
ucccaagucuucuuggaga

SEQ ID NO: 164903 - RNA, 19 nt, Artificial Sequence
  Description of Artificial Sequence: Synthetic oligonucleotide
  Antisense strand to SEQ ID NO: 164902
ucuccaagaagacuuggga

SEQ ID NO: 164904 - RNA, 19 nt, Artificial Sequence
  Description of Artificial Sequence: Synthetic oligonucleotide
  Sense strand starting at position 2215 of SEQ ID NO: 2124
gaucaaggauccgaggauu

SEQ ID NO: 164905 - RNA, 19 nt, Artificial Sequence
  Description of Artificial Sequence: Synthetic oligonucleotide
  Antisense strand to SEQ ID NO: 164904
aauccucggauccuugauc

SEQ ID NO: 164906 - RNA, 19 nt, Artificial Sequence
  Description of Artificial Sequence: Synthetic oligonucleotide
  Sense strand starting at position 2242 of SEQ ID NO: 2124
ucauuucgucaacgguuaa

SEQ ID NO: 164907 - RNA, 19 nt, Artificial Sequence
  Description of Artificial Sequence: Synthetic oligonucleotide
  Antisense strand to SEQ ID NO: 164906
uuaaccguugacgaaauga

SEQ ID NO: 164908 - RNA, 19 nt, Artificial Sequence
  Description of Artificial Sequence: Synthetic oligonucleotide
  Sense strand starting at position 2340 of SEQ ID NO: 2124
ccggaagugcucuauaaga

SEQ ID NO: 164909 - RNA, 19 nt, Artificial Sequence
  Description of Artificial Sequence: Synthetic oligonucleotide
  Antisense strand to SEQ ID NO: 164908
ucuuauagagcacuuccgg

SEQ ID NO: 164910 - RNA, 19 nt, Artificial Sequence
  Description of Artificial Sequence: Synthetic oligonucleotide
  Sense strand starting at position 2348 of SEQ ID NO: 2124
gcucuauaagaugaucauu

SEQ ID NO: 164911 - RNA, 19 nt, Artificial Sequence
  Description of Artificial Sequence: Synthetic oligonucleotide
  Antisense strand to SEQ ID NO: 164910
aaugaucaucuuauagagc

SEQ ID NO: 164912 - RNA, 19 nt, Artificial Sequence
  Description of Artificial Sequence: Synthetic oligonucleotide
  Sense strand starting at position 2438 of SEQ ID NO: 2124
aaguuagaguuauuccagu

SEQ ID NO: 164913 - RNA, 19 nt, Artificial Sequence
  Description of Artificial Sequence: Synthetic oligonucleotide
  Antisense strand to SEQ ID NO: 164912
acuggaauaacucuaacuu

SEQ ID NO: 164914 - RNA, 19 nt, Artificial Sequence
  Description of Artificial Sequence: Synthetic oligonucleotide
  Sense strand starting at position 2531 of SEQ ID NO: 2124
cuagauuucuuccaguuuc

SEQ ID NO: 164915 - RNA, 19 nt, Artificial Sequence
  Description of Artificial Sequence: Synthetic oligonucleotide
  Antisense strand to SEQ ID NO: 164914
gaaacuggaagaaaucuag

SEQ ID NO: 164916 - RNA, 19 nt, Artificial Sequence
  Description of Artificial Sequence: Synthetic oligonucleotide
  Sense strand starting at position 2541 of SEQ ID NO: 2124
uccaguuucuuuccuagga

SEQ ID NO: 164917 - RNA, 19 nt, Artificial Sequence
  Description of Artificial Sequence: Synthetic oligonucleotide
  Antisense strand to SEQ ID NO: 164916
uccuaggaaagaaacugga

SEQ ID NO: 164918 - RNA, 19 nt, Artificial Sequence
  Description of Artificial Sequence: Synthetic oligonucleotide
  Sense strand starting at position 2542 of SEQ ID NO: 2124
ccaguuucuuuccuaggaa

SEQ ID NO: 164919 - RNA, 19 nt, Artificial Sequence
  Description of Artificial Sequence: Synthetic oligonucleotide
  Antisense strand to SEQ ID NO: 164918
uuccuaggaaagaaacugg

SEQ ID NO: 164920 - RNA, 19 nt, Artificial Sequence
  Description of Artificial Sequence: Synthetic oligonucleotide
  Sense strand starting at position 3531 of SEQ ID NO: 2124
uaaauuccuguugaguaga

SEQ ID NO: 164921 - RNA, 19 nt, Artificial Sequence
  Description of Artificial Sequence: Synthetic oligonucleotide
  Antisense strand to SEQ ID NO: 164920
ucuacucaacaggaauuua

SEQ ID NO: 164922 - RNA, 19 nt, Artificial Sequence
  Description of Artificial Sequence: Synthetic oligonucleotide
  Sense strand starting at position 465 of SEQ ID NO: 2125
acuguaugcuccuugaaau

SEQ ID NO: 164923 - RNA, 19 nt, Artificial Sequence
  Description of Artificial Sequence: Synthetic oligonucleotide
  Antisense strand to SEQ ID NO: 164922
auuucaaggagcauacagu

SEQ ID NO: 164924 - RNA, 19 nt, Artificial Sequence
  Description of Artificial Sequence: Synthetic oligonucleotide
  Sense strand starting at position 466 of SEQ ID NO: 2125
cuguaugcuccuugaaaua

SEQ ID NO: 164925 - RNA, 19 nt, Artificial Sequence
  Description of Artificial Sequence: Synthetic oligonucleotide
  Antisense strand to SEQ ID NO: 164924
uauuucaaggagcauacag

SEQ ID NO: 164926 - RNA, 19 nt, Artificial Sequence
  Description of Artificial Sequence: Synthetic oligonucleotide
  Sense strand starting at position 501 of SEQ ID NO: 2125
auugaauucuuauuacgug

SEQ ID NO: 164927 - RNA, 19 nt, Artificial Sequence
  Description of Artificial Sequence: Synthetic oligonucleotide
  Antisense strand to SEQ ID NO: 164926
cacguaauaagaauucaau

SEQ ID NO: 164928 - RNA, 19 nt, Artificial Sequence
  Description of Artificial Sequence: Synthetic oligonucleotide
  Sense strand starting at position 505 of SEQ ID NO: 2125
aauucuuauuacguggcaa

SEQ ID NO: 164929 - RNA, 19 nt, Artificial Sequence
  Description of Artificial Sequence: Synthetic oligonucleotide
  Antisense strand to SEQ ID NO: 164928
uugccacguaauaagaauu

SEQ ID NO: 164930 - RNA, 19 nt, Artificial Sequence
  Description of Artificial Sequence: Synthetic oligonucleotide
  Sense strand starting at position 654 of SEQ ID NO: 2125
gaaaguugcugagccagaa

SEQ ID NO: 164931 - RNA, 19 nt, Artificial Sequence
  Description of Artificial Sequence: Synthetic oligonucleotide
  Antisense strand to SEQ ID NO: 164930
uucuggcucagcaacuuuc

SEQ ID NO: 164932 - RNA, 19 nt, Artificial Sequence
  Description of Artificial Sequence: Synthetic oligonucleotide
  Sense strand starting at position 681 of SEQ ID NO: 2125
caggaagucuggcuccaaa

SEQ ID NO: 164933 - RNA, 19 nt, Artificial Sequence
  Description of Artificial Sequence: Synthetic oligonucleotide
  Antisense strand to SEQ ID NO: 164932
uuuggagccagacuuccug

SEQ ID NO: 164934 - RNA, 19 nt, Artificial Sequence
  Description of Artificial Sequence: Synthetic oligonucleotide
  Sense strand starting at position 1013 of SEQ ID NO: 2125
gguuuccuccagugacuua

SEQ ID NO: 164935 - RNA, 19 nt, Artificial Sequence
  Description of Artificial Sequence: Synthetic oligonucleotide
  Antisense strand to SEQ ID NO: 164934
uaagucacuggaggaaacc

SEQ ID NO: 164936 - RNA, 19 nt, Artificial Sequence
  Description of Artificial Sequence: Synthetic oligonucleotide
  Sense strand starting at position 1145 of SEQ ID NO: 2125
auccgaaugucccuaccua

SEQ ID NO: 164937 - RNA, 19 nt, Artificial Sequence
  Description of Artificial Sequence: Synthetic oligonucleotide
  Antisense strand to SEQ ID NO: 164936
uagguagggacauucggau

SEQ ID NO: 164938 - RNA, 19 nt, Artificial Sequence
  Description of Artificial Sequence: Synthetic oligonucleotide
  Sense strand starting at position 1146 of SEQ ID NO: 2125
uccgaaugucccuaccuaa

SEQ ID NO: 164939 - RNA, 19 nt, Artificial Sequence
  Description of Artificial Sequence: Synthetic oligonucleotide
  Antisense strand to SEQ ID NO: 164938
uuagguagggacauucgga

SEQ ID NO: 164940 - RNA, 19 nt, Artificial Sequence
  Description of Artificial Sequence: Synthetic oligonucleotide
  Sense strand starting at position 1416 of SEQ ID NO: 2125
ucaagucacccucgggauu

SEQ ID NO: 164941 - RNA, 19 nt, Artificial Sequence
  Description of Artificial Sequence: Synthetic oligonucleotide
  Antisense strand to SEQ ID NO: 164940
aaucccgagggugacuuga

SEQ ID NO: 164942 - RNA, 19 nt, Artificial Sequence
  Description of Artificial Sequence: Synthetic oligonucleotide
  Sense strand starting at position 1417 of SEQ ID NO: 2125
caagucacccucgggauua

SEQ ID NO: 164943 - RNA, 19 nt, Artificial Sequence
  Description of Artificial Sequence: Synthetic oligonucleotide
  Antisense strand to SEQ ID NO: 164942
uaaucccgagggugacuug

SEQ ID NO: 164944 - RNA, 19 nt, Artificial Sequence
  Description of Artificial Sequence: Synthetic oligonucleotide
  Sense strand starting at position 1472 of SEQ ID NO: 2125
gaaagaucuggcuggauuc

SEQ ID NO: 164945 - RNA, 19 nt, Artificial Sequence
  Description of Artificial Sequence: Synthetic oligonucleotide
  Antisense strand to SEQ ID NO: 164944
gaauccagccagaucuuuc

SEQ ID NO: 164946 - RNA, 19 nt, Artificial Sequence
  Description of Artificial Sequence: Synthetic oligonucleotide
  Sense strand starting at position 1801 of SEQ ID NO: 2125
ccggguggucagagcuauu

SEQ ID NO: 164947 - RNA, 19 nt, Artificial Sequence
  Description of Artificial Sequence: Synthetic oligonucleotide
  Antisense strand to SEQ ID NO: 164946
aauagcucugaccacccgg

SEQ ID NO: 164948 - RNA, 19 nt, Artificial Sequence
  Description of Artificial Sequence: Synthetic oligonucleotide
  Sense strand starting at position 2113 of SEQ ID NO: 2125
ggcggaagacuucaggcaa

SEQ ID NO: 164949 - RNA, 19 nt, Artificial Sequence
  Description of Artificial Sequence: Synthetic oligonucleotide
  Antisense strand to SEQ ID NO: 164948
uugccugaagucuuccgcc

SEQ ID NO: 164950 - RNA, 19 nt, Artificial Sequence
  Description of Artificial Sequence: Synthetic oligonucleotide
  Sense strand starting at position 2137 of SEQ ID NO: 2125
cagaguccgauugaggauu

SEQ ID NO: 164951 - RNA, 19 nt, Artificial Sequence
  Description of Artificial Sequence: Synthetic oligonucleotide
  Antisense strand to SEQ ID NO: 164950
aauccucaaucggacucug

SEQ ID NO: 164952 - RNA, 19 nt, Artificial Sequence
  Description of Artificial Sequence: Synthetic oligonucleotide
  Sense strand starting at position 2143 of SEQ ID NO: 2125
ccgauugaggauugguuca

SEQ ID NO: 164953 - RNA, 19 nt, Artificial Sequence
  Description of Artificial Sequence: Synthetic oligonucleotide
  Antisense strand to SEQ ID NO: 164952
ugaaccaauccucaaucgg

SEQ ID NO: 164954 - RNA, 19 nt, Artificial Sequence
  Description of Artificial Sequence: Synthetic oligonucleotide
  Sense strand starting at position 2219 of SEQ ID NO: 2125
guacuuacugcugaucuau

SEQ ID NO: 164955 - RNA, 19 nt, Artificial Sequence
  Description of Artificial Sequence: Synthetic oligonucleotide
  Antisense strand to SEQ ID NO: 164954
auagaucagcaguaaguac

SEQ ID NO: 164956 - RNA, 19 nt, Artificial Sequence
  Description of Artificial Sequence: Synthetic oligonucleotide
  Sense strand starting at position 2334 of SEQ ID NO: 2125
guuggaagaucggccaauu

SEQ ID NO: 164957 - RNA, 19 nt, Artificial Sequence
  Description of Artificial Sequence: Synthetic oligonucleotide
  Antisense strand to SEQ ID NO: 164956
aauuggccgaucuuccaac

SEQ ID NO: 164958 - RNA, 19 nt, Artificial Sequence
  Description of Artificial Sequence: Synthetic oligonucleotide
  Sense strand starting at position 2373 of SEQ ID NO: 2125
gugacucauccuugauccu

SEQ ID NO: 164959 - RNA, 19 nt, Artificial Sequence
  Description of Artificial Sequence: Synthetic oligonucleotide
  Antisense strand to SEQ ID NO: 164958
aggaucaaggaugagucac

SEQ ID NO: 164960 - RNA, 19 nt, Artificial Sequence
  Description of Artificial Sequence: Synthetic oligonucleotide
  Sense strand starting at position 2404 of SEQ ID NO: 2125
uguggaacucugugaggaa

SEQ ID NO: 164961 - RNA, 19 nt, Artificial Sequence
  Description of Artificial Sequence: Synthetic oligonucleotide
  Antisense strand to SEQ ID NO: 164960
uuccucacagaguuccaca

SEQ ID NO: 164962 - RNA, 19 nt, Artificial Sequence
  Description of Artificial Sequence: Synthetic oligonucleotide
  Sense strand starting at position 2416 of SEQ ID NO: 2125
ugaggaaagcccugcaguu

SEQ ID NO: 164963 - RNA, 19 nt, Artificial Sequence
  Description of Artificial Sequence: Synthetic oligonucleotide
  Antisense strand to SEQ ID NO: 164962
aacugcagggcuuuccuca

SEQ ID NO: 164964 - RNA, 19 nt, Artificial Sequence
  Description of Artificial Sequence: Synthetic oligonucleotide
  Sense strand starting at position 2428 of SEQ ID NO: 2125
ugcaguuaggcucaauaaa

SEQ ID NO: 164965 - RNA, 19 nt, Artificial Sequence
  Description of Artificial Sequence: Synthetic oligonucleotide
  Antisense strand to SEQ ID NO: 164964
uuuauugagccuaacugca

SEQ ID NO: 164966 - RNA, 19 nt, Artificial Sequence
  Description of Artificial Sequence: Synthetic oligonucleotide
  Sense strand starting at position 2489 of SEQ ID NO: 2125
uaggucugucgccuuugua

SEQ ID NO: 164967 - RNA, 19 nt, Artificial Sequence
  Description of Artificial Sequence: Synthetic oligonucleotide
  Antisense strand to SEQ ID NO: 164966
uacaaaggcgacagaccua

SEQ ID NO: 164968 - RNA, 19 nt, Artificial Sequence
  Description of Artificial Sequence: Synthetic oligonucleotide
  Sense strand starting at position 2699 of SEQ ID NO: 2125
gcccuuuaaagggauugca

SEQ ID NO: 164969 - RNA, 19 nt, Artificial Sequence
  Description of Artificial Sequence: Synthetic oligonucleotide
  Antisense strand to SEQ ID NO: 164968
ugcaaucccuuuaaagggc

SEQ ID NO: 164970 - RNA, 19 nt, Artificial Sequence
  Description of Artificial Sequence: Synthetic oligonucleotide
  Sense strand starting at position 2702 of SEQ ID NO: 2125
cuuuaaagggauugcauca

SEQ ID NO: 164971 - RNA, 19 nt, Artificial Sequence
  Description of Artificial Sequence: Synthetic oligonucleotide
  Antisense strand to SEQ ID NO: 164970
ugaugcaaucccuuuaaag

SEQ ID NO: 164972 - RNA, 19 nt, Artificial Sequence
  Description of Artificial Sequence: Synthetic oligonucleotide
  Sense strand starting at position 2863 of SEQ ID NO: 2125
gcuuaugaugucuaacucu

SEQ ID NO: 164973 - RNA, 19 nt, Artificial Sequence
  Description of Artificial Sequence: Synthetic oligonucleotide
  Antisense strand to SEQ ID NO: 164972
agaguuagacaucauaagc

SEQ ID NO: 164974 - RNA, 19 nt, Artificial Sequence
  Description of Artificial Sequence: Synthetic oligonucleotide
  Sense strand starting at position 3036 of SEQ ID NO: 2125
agcugauaugagugaaguc

SEQ ID NO: 164975 - RNA, 19 nt, Artificial Sequence
  Description of Artificial Sequence: Synthetic oligonucleotide
  Antisense strand to SEQ ID NO: 164974
gacuucacucauaucagcu

SEQ ID NO: 164976 - RNA, 19 nt, Artificial Sequence
  Description of Artificial Sequence: Synthetic oligonucleotide
  Sense strand starting at position 3037 of SEQ ID NO: 2125
gcugauaugagugaagucu

SEQ ID NO: 164977 - RNA, 19 nt, Artificial Sequence
  Description of Artificial Sequence: Synthetic oligonucleotide
  Antisense strand to SEQ ID NO: 164976
agacuucacucauaucagc

SEQ ID NO: 164978 - RNA, 19 nt, Artificial Sequence
  Description of Artificial Sequence: Synthetic oligonucleotide
  Sense strand starting at position 3107 of SEQ ID NO: 2125
ugcugauagggcugacuaa

SEQ ID NO: 164979 - RNA, 19 nt, Artificial Sequence
  Description of Artificial Sequence: Synthetic oligonucleotide
  Antisense strand to SEQ ID NO: 164978
uuagucagcccuaucagca

SEQ ID NO: 164980 - RNA, 19 nt, Artificial Sequence
  Description of Artificial Sequence: Synthetic oligonucleotide
  Sense strand starting at position 3216 of SEQ ID NO: 2125
gaagccagugcucagagaa

SEQ ID NO: 164981 - RNA, 19 nt, Artificial Sequence
  Description of Artificial Sequence: Synthetic oligonucleotide
  Antisense strand to SEQ ID NO: 164980
uucucugagcacuggcuuc

SEQ ID NO: 164982 - RNA, 19 nt, Artificial Sequence
  Description of Artificial Sequence: Synthetic oligonucleotide
  Sense strand starting at position 3223 of SEQ ID NO: 2125
gugcucagagaaggaaauu

SEQ ID NO: 164983 - RNA, 19 nt, Artificial Sequence
  Description of Artificial Sequence: Synthetic oligonucleotide
  Antisense strand to SEQ ID NO: 164982
aauuuccuucucugagcac

SEQ ID NO: 164984 - RNA, 19 nt, Artificial Sequence
  Description of Artificial Sequence: Synthetic oligonucleotide
  Sense strand starting at position 3235 of SEQ ID NO: 2125
ggaaauuaaugugcccaaa

SEQ ID NO: 164985 - RNA, 19 nt, Artificial Sequence
  Description of Artificial Sequence: Synthetic oligonucleotide
  Antisense strand to SEQ ID NO: 164984
uuugggcacauuaauuucc

SEQ ID NO: 164986 - RNA, 19 nt, Artificial Sequence
  Description of Artificial Sequence: Synthetic oligonucleotide
  Sense strand starting at position 3348 of SEQ ID NO: 2125
cugggugacuaugugcaaa

SEQ ID NO: 164987 - RNA, 19 nt, Artificial Sequence
  Description of Artificial Sequence: Synthetic oligonucleotide
  Antisense strand to SEQ ID NO: 164986
uuugcacauagucacccag

SEQ ID NO: 164988 - RNA, 19 nt, Artificial Sequence
  Description of Artificial Sequence: Synthetic oligonucleotide
  Sense strand starting at position 3350 of SEQ ID NO: 2125
gggugacuaugugcaaauu

SEQ ID NO: 164989 - RNA, 19 nt, Artificial Sequence
  Description of Artificial Sequence: Synthetic oligonucleotide
  Antisense strand to SEQ ID NO: 164988
aauuugcacauagucaccc

SEQ ID NO: 164990 - RNA, 19 nt, Artificial Sequence
  Description of Artificial Sequence: Synthetic oligonucleotide
  Sense strand starting at position 3360 of SEQ ID NO: 2125
gugcaaauugcccaaucuu

SEQ ID NO: 164991 - RNA, 19 nt, Artificial Sequence
  Description of Artificial Sequence: Synthetic oligonucleotide
  Antisense strand to SEQ ID NO: 164990
aagauugggcaauuugcac

SEQ ID NO: 164992 - RNA, 19 nt, Artificial Sequence
  Description of Artificial Sequence: Synthetic oligonucleotide
  Sense strand starting at position 3417 of SEQ ID NO: 2125
cugugaggacucggaguua

SEQ ID NO: 164993 - RNA, 19 nt, Artificial Sequence
  Description of Artificial Sequence: Synthetic oligonucleotide
  Antisense strand to SEQ ID NO: 164992
uaacuccgaguccucacag

SEQ ID NO: 164994 - RNA, 19 nt, Artificial Sequence
  Description of Artificial Sequence: Synthetic oligonucleotide
  Sense strand starting at position 3471 of SEQ ID NO: 2125
auacucaucucaguugaag

SEQ ID NO: 164995 - RNA, 19 nt, Artificial Sequence
  Description of Artificial Sequence: Synthetic oligonucleotide
  Antisense strand to SEQ ID NO: 164994
cuucaacugagaugaguau

SEQ ID NO: 164996 - RNA, 19 nt, Artificial Sequence
  Description of Artificial Sequence: Synthetic oligonucleotide
  Sense strand starting at position 3684 of SEQ ID NO: 2125
aggagacucucagcugauu

SEQ ID NO: 164997 - RNA, 19 nt, Artificial Sequence
  Description of Artificial Sequence: Synthetic oligonucleotide
  Antisense strand to SEQ ID NO: 164996
aaucagcugagagucuccu

SEQ ID NO: 164998 - RNA, 19 nt, Artificial Sequence
  Description of Artificial Sequence: Synthetic oligonucleotide
  Sense strand starting at position 3868 of SEQ ID NO: 2125
ucacacucacgcugacaua

SEQ ID NO: 164999 - RNA, 19 nt, Artificial Sequence
  Description of Artificial Sequence: Synthetic oligonucleotide
  Antisense strand to SEQ ID NO: 164998
uaugucagcgugaguguga

SEQ ID NO: 165000 - RNA, 19 nt, Artificial Sequence
  Description of Artificial Sequence: Synthetic oligonucleotide
  Sense strand starting at position 3961 of SEQ ID NO: 2125
augagaugguggcuugaca

SEQ ID NO: 165001 - RNA, 19 nt, Artificial Sequence
  Description of Artificial Sequence: Synthetic oligonucleotide
  Antisense strand to SEQ ID NO: 165000
ugucaagccaccaucucau

SEQ ID NO: 165002 - RNA, 19 nt, Artificial Sequence
  Description of Artificial Sequence: Synthetic oligonucleotide
  Sense strand starting at position 163 of SEQ ID NO: 2128
agaagaagccauggugaau

SEQ ID NO: 165003 - RNA, 19 nt, Artificial Sequence
  Description of Artificial Sequence: Synthetic oligonucleotide
  Antisense strand to SEQ ID NO: 165002
auucaccauggcuucuucu

SEQ ID NO: 165004 - RNA, 19 nt, Artificial Sequence
  Description of Artificial Sequence: Synthetic oligonucleotide
  Sense strand starting at position 201 of SEQ ID NO: 2128
guguauucugcacaaucaa

SEQ ID NO: 165005 - RNA, 19 nt, Artificial Sequence
  Description of Artificial Sequence: Synthetic oligonucleotide
  Antisense strand to SEQ ID NO: 165004
uugauugugcagaauacac

SEQ ID NO: 165006 - RNA, 19 nt, Artificial Sequence
  Description of Artificial Sequence: Synthetic oligonucleotide
  Sense strand starting at position 272 of SEQ ID NO: 2128
uuugccuuucuauauguca

SEQ ID NO: 165007 - RNA, 19 nt, Artificial Sequence
  Description of Artificial Sequence: Synthetic oligonucleotide
  Antisense strand to SEQ ID NO: 165006
ugacauauagaaaggcaaa

SEQ ID NO: 165008 - RNA, 19 nt, Artificial Sequence
  Description of Artificial Sequence: Synthetic oligonucleotide
  Sense strand starting at position 275 of SEQ ID NO: 2128
gccuuucuauaugucauca

SEQ ID NO: 165009 - RNA, 19 nt, Artificial Sequence
  Description of Artificial Sequence: Synthetic oligonucleotide
  Antisense strand to SEQ ID NO: 165008
ugaugacauauagaaaggc

SEQ ID NO: 165010 - RNA, 19 nt, Artificial Sequence
  Description of Artificial Sequence: Synthetic oligonucleotide
  Sense strand starting at position 318 of SEQ ID NO: 2128
cuacauacaucgucagaaa

SEQ ID NO: 165011 - RNA, 19 nt, Artificial Sequence
  Description of Artificial Sequence: Synthetic oligonucleotide
  Antisense strand to SEQ ID NO: 165010
uuucugacgauguauguag

SEQ ID NO: 165012 - RNA, 19 nt, Artificial Sequence
  Description of Artificial Sequence: Synthetic oligonucleotide
  Sense strand starting at position 342 of SEQ ID NO: 2128
guggaauaaagacgucuaa

SEQ ID NO: 165013 - RNA, 19 nt, Artificial Sequence
  Description of Artificial Sequence: Synthetic oligonucleotide
  Antisense strand to SEQ ID NO: 165012
uuagacgucuuuauuccac

SEQ ID NO: 165014 - RNA, 19 nt, Artificial Sequence
  Description of Artificial Sequence: Synthetic oligonucleotide
  Sense strand starting at position 354 of SEQ ID NO: 2128
cgucuaaauuaaccacgaa

SEQ ID NO: 165015 - RNA, 19 nt, Artificial Sequence
  Description of Artificial Sequence: Synthetic oligonucleotide
  Antisense strand to SEQ ID NO: 165014
uucgugguuaauuuagacg

SEQ ID NO: 165016 - RNA, 19 nt, Artificial Sequence
  Description of Artificial Sequence: Synthetic oligonucleotide
  Sense strand starting at position 420 of SEQ ID NO: 2128
auaugauauugguuccaga

SEQ ID NO: 165017 - RNA, 19 nt, Artificial Sequence
  Description of Artificial Sequence: Synthetic oligonucleotide
  Antisense strand to SEQ ID NO: 165016
ucuggaaccaauaucauau

SEQ ID NO: 165018 - RNA, 19 nt, Artificial Sequence
  Description of Artificial Sequence: Synthetic oligonucleotide
  Sense strand starting at position 449 of SEQ ID NO: 2128
aacugagcuuucucgguca

SEQ ID NO: 165019 - RNA, 19 nt, Artificial Sequence
  Description of Artificial Sequence: Synthetic oligonucleotide
  Antisense strand to SEQ ID NO: 165018
ugaccgagaaagcucaguu

SEQ ID NO: 165020 - RNA, 19 nt, Artificial Sequence
  Description of Artificial Sequence: Synthetic oligonucleotide
  Sense strand starting at position 451 of SEQ ID NO: 2128
cugagcuuucucggucaua

SEQ ID NO: 165021 - RNA, 19 nt, Artificial Sequence
  Description of Artificial Sequence: Synthetic oligonucleotide
  Antisense strand to SEQ ID NO: 165020
uaugaccgagaaagcucag

SEQ ID NO: 165022 - RNA, 19 nt, Artificial Sequence
  Description of Artificial Sequence: Synthetic oligonucleotide
  Sense strand starting at position 452 of SEQ ID NO: 2128
ugagcuuucucggucauaa

SEQ ID NO: 165023 - RNA, 19 nt, Artificial Sequence
  Description of Artificial Sequence: Synthetic oligonucleotide
  Antisense strand to SEQ ID NO: 165022
uuaugaccgagaaagcuca

SEQ ID NO: 165024 - RNA, 19 nt, Artificial Sequence
  Description of Artificial Sequence: Synthetic oligonucleotide
  Sense strand starting at position 546 of SEQ ID NO: 2128
ccgaaacuguaagaagaua

SEQ ID NO: 165025 - RNA, 19 nt, Artificial Sequence
  Description of Artificial Sequence: Synthetic oligonucleotide
  Antisense strand to SEQ ID NO: 165024
uaucuucuuacaguuucgg

SEQ ID NO: 165026 - RNA, 19 nt, Artificial Sequence
  Description of Artificial Sequence: Synthetic oligonucleotide
  Sense strand starting at position 714 of SEQ ID NO: 2128
ccuauugucccucagguuu

SEQ ID NO: 165027 - RNA, 19 nt, Artificial Sequence
  Description of Artificial Sequence: Synthetic oligonucleotide
  Antisense strand to SEQ ID NO: 165026
aaaccugagggacaauagg

SEQ ID NO: 165028 - RNA, 19 nt, Artificial Sequence
  Description of Artificial Sequence: Synthetic oligonucleotide
  Sense strand starting at position 790 of SEQ ID NO: 2128
auuugcugccguuauguca

SEQ ID NO: 165029 - RNA, 19 nt, Artificial Sequence
  Description of Artificial Sequence: Synthetic oligonucleotide
  Antisense strand to SEQ ID NO: 165028
ugacauaacggcagcaaau

SEQ ID NO: 165030 - RNA, 19 nt, Artificial Sequence
  Description of Artificial Sequence: Synthetic oligonucleotide
  Sense strand starting at position 794 of SEQ ID NO: 2128
gcugccguuaugucaugaa

SEQ ID NO: 165031 - RNA, 19 nt, Artificial Sequence
  Description of Artificial Sequence: Synthetic oligonucleotide
  Antisense strand to SEQ ID NO: 165030
uucaugacauaacggcagc

SEQ ID NO: 165032 - RNA, 19 nt, Artificial Sequence
  Description of Artificial Sequence: Synthetic oligonucleotide
  Sense strand starting at position 2501 of SEQ ID NO: 2128
uugugacaucaucguaauu

SEQ ID NO: 165033 - RNA, 19 nt, Artificial Sequence
  Description of Artificial Sequence: Synthetic oligonucleotide
  Antisense strand to SEQ ID NO: 165032
aauuacgaugaugucacaa

SEQ ID NO: 165034 - RNA, 19 nt, Artificial Sequence
  Description of Artificial Sequence: Synthetic oligonucleotide
  Sense strand starting at position 2503 of SEQ ID NO: 2128
gugacaucaucguaauuuc

SEQ ID NO: 165035 - RNA, 19 nt, Artificial Sequence
  Description of Artificial Sequence: Synthetic oligonucleotide
  Antisense strand to SEQ ID NO: 165034
gaaauuacgaugaugucac

SEQ ID NO: 165036 - RNA, 19 nt, Artificial Sequence
  Description of Artificial Sequence: Synthetic oligonucleotide
  Sense strand starting at position 2638 of SEQ ID NO: 2128
ucuggaauuugaucgccuu

SEQ ID NO: 165037 - RNA, 19 nt, Artificial Sequence
  Description of Artificial Sequence: Synthetic oligonucleotide
  Antisense strand to SEQ ID NO: 165036
aaggcgaucaaauuccaga

SEQ ID NO: 165038 - RNA, 19 nt, Artificial Sequence
  Description of Artificial Sequence: Synthetic oligonucleotide
  Sense strand starting at position 2639 of SEQ ID NO: 2128
cuggaauuugaucgccuuu

SEQ ID NO: 165039 - RNA, 19 nt, Artificial Sequence
  Description of Artificial Sequence: Synthetic oligonucleotide
  Antisense strand to SEQ ID NO: 165038
aaaggcgaucaaauuccag

SEQ ID NO: 165040 - RNA, 19 nt, Artificial Sequence
  Description of Artificial Sequence: Synthetic oligonucleotide
  Sense strand starting at position 2648 of SEQ ID NO: 2128
gaucgccuuuggucuaaca

SEQ ID NO: 165041 - RNA, 19 nt, Artificial Sequence
  Description of Artificial Sequence: Synthetic oligonucleotide
  Antisense strand to SEQ ID NO: 165040
uguuagaccaaaggcgauc

SEQ ID NO: 165042 - RNA, 19 nt, Artificial Sequence
  Description of Artificial Sequence: Synthetic oligonucleotide
  Sense strand starting at position 2650 of SEQ ID NO: 2128
ucgccuuuggucuaacaaa

SEQ ID NO: 165043 - RNA, 19 nt, Artificial Sequence
  Description of Artificial Sequence: Synthetic oligonucleotide
  Antisense strand to SEQ ID NO: 165042
uuuguuagaccaaaggcga

SEQ ID NO: 165044 - RNA, 19 nt, Artificial Sequence
  Description of Artificial Sequence: Synthetic oligonucleotide
  Sense strand starting at position 2706 of SEQ ID NO: 2128
aagccuucugcggaugaua

SEQ ID NO: 165045 - RNA, 19 nt, Artificial Sequence
  Description of Artificial Sequence: Synthetic oligonucleotide
  Antisense strand to SEQ ID NO: 165044
uaucauccgcagaaggcuu

SEQ ID NO: 165046 - RNA, 19 nt, Artificial Sequence
  Description of Artificial Sequence: Synthetic oligonucleotide
  Sense strand starting at position 2744 of SEQ ID NO: 2128
cguucuagacuacacagau

SEQ ID NO: 165047 - RNA, 19 nt, Artificial Sequence
  Description of Artificial Sequence: Synthetic oligonucleotide
  Antisense strand to SEQ ID NO: 165046
aucuguguagucuagaacg

SEQ ID NO: 165048 - RNA, 19 nt, Artificial Sequence
  Description of Artificial Sequence: Synthetic oligonucleotide
  Sense strand starting at position 2757 of SEQ ID NO: 2128
acagauugcaguuaagugu

SEQ ID NO: 165049 - RNA, 19 nt, Artificial Sequence
  Description of Artificial Sequence: Synthetic oligonucleotide
  Antisense strand to SEQ ID NO: 165048
acacuuaacugcaaucugu

SEQ ID NO: 165050 - RNA, 19 nt, Artificial Sequence
  Description of Artificial Sequence: Synthetic oligonucleotide
  Sense strand starting at position 2901 of SEQ ID NO: 2128
aggaaauuggucugaccgu

SEQ ID NO: 165051 - RNA, 19 nt, Artificial Sequence
  Description of Artificial Sequence: Synthetic oligonucleotide
  Antisense strand to SEQ ID NO: 165050
acggucagaccaauuuccu

SEQ ID NO: 165052 - RNA, 19 nt, Artificial Sequence
  Description of Artificial Sequence: Synthetic oligonucleotide
  Sense strand starting at position 2910 of SEQ ID NO: 2128
gucugaccgugccuuagaa

SEQ ID NO: 165053 - RNA, 19 nt, Artificial Sequence
  Description of Artificial Sequence: Synthetic oligonucleotide
  Antisense strand to SEQ ID NO: 165052
uucuaaggcacggucagac

SEQ ID NO: 165054 - RNA, 19 nt, Artificial Sequence
  Description of Artificial Sequence: Synthetic oligonucleotide
  Sense strand starting at position 2912 of SEQ ID NO: 2128
cugaccgugccuuagaaua

SEQ ID NO: 165055 - RNA, 19 nt, Artificial Sequence
  Description of Artificial Sequence: Synthetic oligonucleotide
  Antisense strand to SEQ ID NO: 165054
uauucuaaggcacggucag

SEQ ID NO: 165056 - RNA, 19 nt, Artificial Sequence
  Description of Artificial Sequence: Synthetic oligonucleotide
  Sense strand starting at position 3021 of SEQ ID NO: 2128
ucgguugguggucaauaca

SEQ ID NO: 165057 - RNA, 19 nt, Artificial Sequence
  Description of Artificial Sequence: Synthetic oligonucleotide
  Antisense strand to SEQ ID NO: 165056
uguauugaccaccaaccga

SEQ ID NO: 165058 - RNA, 19 nt, Artificial Sequence
  Description of Artificial Sequence: Synthetic oligonucleotide
  Sense strand starting at position 3054 of SEQ ID NO: 2128
uugagaucuugacuaagca

SEQ ID NO: 165059 - RNA, 19 nt, Artificial Sequence
  Description of Artificial Sequence: Synthetic oligonucleotide
  Antisense strand to SEQ ID NO: 165058
ugcuuagucaagaucucaa

SEQ ID NO: 165060 - RNA, 19 nt, Artificial Sequence
  Description of Artificial Sequence: Synthetic oligonucleotide
  Sense strand starting at position 3167 of SEQ ID NO: 2128
agacucucaugccuaguua

SEQ ID NO: 165061 - RNA, 19 nt, Artificial Sequence
  Description of Artificial Sequence: Synthetic oligonucleotide
  Antisense strand to SEQ ID NO: 165060
uaacuaggcaugagagucu

SEQ ID NO: 165062 - RNA, 19 nt, Artificial Sequence
  Description of Artificial Sequence: Synthetic oligonucleotide
  Sense strand starting at position 3178 of SEQ ID NO: 2128
ccuaguuagucaccaggga

SEQ ID NO: 165063 - RNA, 19 nt, Artificial Sequence
  Description of Artificial Sequence: Synthetic oligonucleotide
  Antisense strand to SEQ ID NO: 165062
ucccuggugacuaacuagg

SEQ ID NO: 165064 - RNA, 19 nt, Artificial Sequence
  Description of Artificial Sequence: Synthetic oligonucleotide
  Sense strand starting at position 3179 of SEQ ID NO: 2128
cuaguuagucaccagggau

SEQ ID NO: 165065 - RNA, 19 nt, Artificial Sequence
  Description of Artificial Sequence: Synthetic oligonucleotide
  Antisense strand to SEQ ID NO: 165064
aucccuggugacuaacuag

SEQ ID NO: 165066 - RNA, 19 nt, Artificial Sequence
  Description of Artificial Sequence: Synthetic oligonucleotide
  Sense strand starting at position 3476 of SEQ ID NO: 2128
aggugcuuccgucugucau

SEQ ID NO: 165067 - RNA, 19 nt, Artificial Sequence
  Description of Artificial Sequence: Synthetic oligonucleotide
  Antisense strand to SEQ ID NO: 165066
augacagacggaagcaccu

SEQ ID NO: 165068 - RNA, 19 nt, Artificial Sequence
  Description of Artificial Sequence: Synthetic oligonucleotide
  Sense strand starting at position 3478 of SEQ ID NO: 2128
gugcuuccgucugucauuu

SEQ ID NO: 165069 - RNA, 19 nt, Artificial Sequence
  Description of Artificial Sequence: Synthetic oligonucleotide
  Antisense strand to SEQ ID NO: 165068
aaaugacagacggaagcac

SEQ ID NO: 165070 - RNA, 19 nt, Artificial Sequence
  Description of Artificial Sequence: Synthetic oligonucleotide
  Sense strand starting at position 3500 of SEQ ID NO: 2128
ugaacagaaucucagacau

SEQ ID NO: 165071 - RNA, 19 nt, Artificial Sequence
  Description of Artificial Sequence: Synthetic oligonucleotide
  Antisense strand to SEQ ID NO: 165070
augucugagauucuguuca

SEQ ID NO: 165072 - RNA, 19 nt, Artificial Sequence
  Description of Artificial Sequence: Synthetic oligonucleotide
  Sense strand starting at position 3641 of SEQ ID NO: 2128
ucuugaagucuuuguauuu

SEQ ID NO: 165073 - RNA, 19 nt, Artificial Sequence
  Description of Artificial Sequence: Synthetic oligonucleotide
  Antisense strand to SEQ ID NO: 165072
aaauacaaagacuucaaga

SEQ ID NO: 165074 - RNA, 19 nt, Artificial Sequence
  Description of Artificial Sequence: Synthetic oligonucleotide
  Sense strand starting at position 3733 of SEQ ID NO: 2128
agucucacauuccugacua

SEQ ID NO: 165075 - RNA, 19 nt, Artificial Sequence
  Description of Artificial Sequence: Synthetic oligonucleotide
  Antisense strand to SEQ ID NO: 165074
uagucaggaaugugagacu

SEQ ID NO: 165076 - RNA, 19 nt, Artificial Sequence
  Description of Artificial Sequence: Synthetic oligonucleotide
  Sense strand starting at position 3851 of SEQ ID NO: 2128
gaugucuauuuccauggaa

SEQ ID NO: 165077 - RNA, 19 nt, Artificial Sequence
  Description of Artificial Sequence: Synthetic oligonucleotide
  Antisense strand to SEQ ID NO: 165076
uuccauggaaauagacauc

SEQ ID NO: 165078 - RNA, 19 nt, Artificial Sequence
  Description of Artificial Sequence: Synthetic oligonucleotide
  Sense strand starting at position 3878 of SEQ ID NO: 2128
aaggaacguagauguuaga

SEQ ID NO: 165079 - RNA, 19 nt, Artificial Sequence
  Description of Artificial Sequence: Synthetic oligonucleotide
  Antisense strand to SEQ ID NO: 165078
ucuaacaucuacguuccuu

SEQ ID NO: 165080 - RNA, 19 nt, Artificial Sequence
  Description of Artificial Sequence: Synthetic oligonucleotide
  Sense strand starting at position 3966 of SEQ ID NO: 2128
ucugccagucugugacaau

SEQ ID NO: 165081 - RNA, 19 nt, Artificial Sequence
  Description of Artificial Sequence: Synthetic oligonucleotide
  Antisense strand to SEQ ID NO: 165080
auugucacagacuggcaga

SEQ ID NO: 165082 - RNA, 19 nt, Artificial Sequence
  Description of Artificial Sequence: Synthetic oligonucleotide
  Sense strand starting at position 45 of SEQ ID NO: 2127
auaugauauugguuccaga

SEQ ID NO: 165083 - RNA, 19 nt, Artificial Sequence
  Description of Artificial Sequence: Synthetic oligonucleotide
  Antisense strand to SEQ ID NO: 165082
ucuggaaccaauaucauau

SEQ ID NO: 165084 - RNA, 19 nt, Artificial Sequence
  Description of Artificial Sequence: Synthetic oligonucleotide
  Sense strand starting at position 74 of SEQ ID NO: 2127
aacugagcuuucucgguca

SEQ ID NO: 165085 - RNA, 19 nt, Artificial Sequence
  Description of Artificial Sequence: Synthetic oligonucleotide
  Antisense strand to SEQ ID NO: 165084
ugaccgagaaagcucaguu

SEQ ID NO: 165086 - RNA, 19 nt, Artificial Sequence
  Description of Artificial Sequence: Synthetic oligonucleotide
  Sense strand starting at position 76 of SEQ ID NO: 2127
cugagcuuucucggucaua

SEQ ID NO: 165087 - RNA, 19 nt, Artificial Sequence
  Description of Artificial Sequence: Synthetic oligonucleotide
  Antisense strand to SEQ ID NO: 165086
uaugaccgagaaagcucag

SEQ ID NO: 165088 - RNA, 19 nt, Artificial Sequence
  Description of Artificial Sequence: Synthetic oligonucleotide
  Sense strand starting at position 77 of SEQ ID NO: 2127
ugagcuuucucggucauaa

SEQ ID NO: 165089 - RNA, 19 nt, Artificial Sequence
  Description of Artificial Sequence: Synthetic oligonucleotide
  Antisense strand to SEQ ID NO: 165088
uuaugaccgagaaagcuca

SEQ ID NO: 165090 - RNA, 19 nt, Artificial Sequence
  Description of Artificial Sequence: Synthetic oligonucleotide
  Sense strand starting at position 171 of SEQ ID NO: 2127
ccgaaacuguaagaagaua

SEQ ID NO: 165091 - RNA, 19 nt, Artificial Sequence
  Description of Artificial Sequence: Synthetic oligonucleotide
  Antisense strand to SEQ ID NO: 165090
uaucuucuuacaguuucgg

SEQ ID NO: 165092 - RNA, 19 nt, Artificial Sequence
  Description of Artificial Sequence: Synthetic oligonucleotide
  Sense strand starting at position 339 of SEQ ID NO: 2127
ccuauugucccucagguuu

SEQ ID NO: 165093 - RNA, 19 nt, Artificial Sequence
  Description of Artificial Sequence: Synthetic oligonucleotide
  Antisense strand to SEQ ID NO: 165092
aaaccugagggacaauagg

SEQ ID NO: 165094 - RNA, 19 nt, Artificial Sequence
  Description of Artificial Sequence: Synthetic oligonucleotide
  Sense strand starting at position 415 of SEQ ID NO: 2127
auuugcugccguuauguca

SEQ ID NO: 165095 - RNA, 19 nt, Artificial Sequence
  Description of Artificial Sequence: Synthetic oligonucleotide
  Antisense strand to SEQ ID NO: 165094
ugacauaacggcagcaaau

SEQ ID NO: 165096 - RNA, 19 nt, Artificial Sequence
  Description of Artificial Sequence: Synthetic oligonucleotide
  Sense strand starting at position 419 of SEQ ID NO: 2127
gcugccguuaugucaugaa

SEQ ID NO: 165097 - RNA, 19 nt, Artificial Sequence
  Description of Artificial Sequence: Synthetic oligonucleotide
  Antisense strand to SEQ ID NO: 165096
uucaugacauaacggcagc

SEQ ID NO: 165098 - RNA, 19 nt, Artificial Sequence
  Description of Artificial Sequence: Synthetic oligonucleotide
  Sense strand starting at position 2126 of SEQ ID NO: 2127
uugugacaucaucguaauu

SEQ ID NO: 165099 - RNA, 19 nt, Artificial Sequence
  Description of Artificial Sequence: Synthetic oligonucleotide
  Antisense strand to SEQ ID NO: 165098
aauuacgaugaugucacaa

SEQ ID NO: 165100 - RNA, 19 nt, Artificial Sequence
  Description of Artificial Sequence: Synthetic oligonucleotide
  Sense strand starting at position 2128 of SEQ ID NO: 2127
gugacaucaucguaauuuc

SEQ ID NO: 165101 - RNA, 19 nt, Artificial Sequence
  Description of Artificial Sequence: Synthetic oligonucleotide
  Antisense strand to SEQ ID NO: 165100
gaaauuacgaugaugucac

SEQ ID NO: 165102 - RNA, 19 nt, Artificial Sequence
  Description of Artificial Sequence: Synthetic oligonucleotide
  Sense strand starting at position 2263 of SEQ ID NO: 2127
ucuggaauuugaucgccuu

SEQ ID NO: 165103 - RNA, 19 nt, Artificial Sequence
  Description of Artificial Sequence: Synthetic oligonucleotide
  Antisense strand to SEQ ID NO: 165102
aaggcgaucaaauuccaga

SEQ ID NO: 165104 - RNA, 19 nt, Artificial Sequence
  Description of Artificial Sequence: Synthetic oligonucleotide
  Sense strand starting at position 2264 of SEQ ID NO: 2127
cuggaauuugaucgccuuu

SEQ ID NO: 165105 - RNA, 19 nt, Artificial Sequence
  Description of Artificial Sequence: Synthetic oligonucleotide
  Antisense strand to SEQ ID NO: 165104
aaaggcgaucaaauuccag

SEQ ID NO: 165106 - RNA, 19 nt, Artificial Sequence
  Description of Artificial Sequence: Synthetic oligonucleotide
  Sense strand starting at position 2273 of SEQ ID NO: 2127
gaucgccuuuggucuaaca

SEQ ID NO: 165107 - RNA, 19 nt, Artificial Sequence
  Description of Artificial Sequence: Synthetic oligonucleotide
  Antisense strand to SEQ ID NO: 165106
uguuagaccaaaggcgauc

SEQ ID NO: 165108 - RNA, 19 nt, Artificial Sequence
  Description of Artificial Sequence: Synthetic oligonucleotide
  Sense strand starting at position 2275 of SEQ ID NO: 2127
ucgccuuuggucuaacaaa

SEQ ID NO: 165109 - RNA, 19 nt, Artificial Sequence
  Description of Artificial Sequence: Synthetic oligonucleotide
  Antisense strand to SEQ ID NO: 165108
uuuguuagaccaaaggcga

SEQ ID NO: 165110 - RNA, 19 nt, Artificial Sequence
  Description of Artificial Sequence: Synthetic oligonucleotide
  Sense strand starting at position 2331 of SEQ ID NO: 2127
aagccuucugcggaugaua

SEQ ID NO: 165111 - RNA, 19 nt, Artificial Sequence
  Description of Artificial Sequence: Synthetic oligonucleotide
  Antisense strand to SEQ ID NO: 165110
uaucauccgcagaaggcuu

SEQ ID NO: 165112 - RNA, 19 nt, Artificial Sequence
  Description of Artificial Sequence: Synthetic oligonucleotide
  Sense strand starting at position 2369 of SEQ ID NO: 2127
cguucuagacuacacagau

SEQ ID NO: 165113 - RNA, 19 nt, Artificial Sequence
  Description of Artificial Sequence: Synthetic oligonucleotide
  Antisense strand to SEQ ID NO: 165112
aucuguguagucuagaacg

SEQ ID NO: 165114 - RNA, 19 nt, Artificial Sequence
  Description of Artificial Sequence: Synthetic oligonucleotide
  Sense strand starting at position 2382 of SEQ ID NO: 2127
acagauugcaguuaagugu

SEQ ID NO: 165115 - RNA, 19 nt, Artificial Sequence
  Description of Artificial Sequence: Synthetic oligonucleotide
  Antisense strand to SEQ ID NO: 165114
acacuuaacugcaaucugu

SEQ ID NO: 165116 - RNA, 19 nt, Artificial Sequence
  Description of Artificial Sequence: Synthetic oligonucleotide
  Sense strand starting at position 2526 of SEQ ID NO: 2127
aggaaauuggucugaccgu

SEQ ID NO: 165117 - RNA, 19 nt, Artificial Sequence
  Description of Artificial Sequence: Synthetic oligonucleotide
  Antisense strand to SEQ ID NO: 165116
acggucagaccaauuuccu

SEQ ID NO: 165118 - RNA, 19 nt, Artificial Sequence
  Description of Artificial Sequence: Synthetic oligonucleotide
  Sense strand starting at position 2535 of SEQ ID NO: 2127
gucugaccgugccuuagaa

SEQ ID NO: 165119 - RNA, 19 nt, Artificial Sequence
  Description of Artificial Sequence: Synthetic oligonucleotide
  Antisense strand to SEQ ID NO: 165118
uucuaaggcacggucagac

SEQ ID NO: 165120 - RNA, 19 nt, Artificial Sequence
  Description of Artificial Sequence: Synthetic oligonucleotide
  Sense strand starting at position 2537 of SEQ ID NO: 2127
cugaccgugccuuagaaua

SEQ ID NO: 165121 - RNA, 19 nt, Artificial Sequence
  Description of Artificial Sequence: Synthetic oligonucleotide
  Antisense strand to SEQ ID NO: 165120
uauucuaaggcacggucag

SEQ ID NO: 165122 - RNA, 19 nt, Artificial Sequence
  Description of Artificial Sequence: Synthetic oligonucleotide
  Sense strand starting at position 2646 of SEQ ID NO: 2127
ucgguugguggucaauaca

SEQ ID NO: 165123 - RNA, 19 nt, Artificial Sequence
  Description of Artificial Sequence: Synthetic oligonucleotide
  Antisense strand to SEQ ID NO: 165122
uguauugaccaccaaccga

SEQ ID NO: 165124 - RNA, 19 nt, Artificial Sequence
  Description of Artificial Sequence: Synthetic oligonucleotide
  Sense strand starting at position 2679 of SEQ ID NO: 2127
uugagaucuugacuaagca

SEQ ID NO: 165125 - RNA, 19 nt, Artificial Sequence
  Description of Artificial Sequence: Synthetic oligonucleotide
  Antisense strand to SEQ ID NO: 165124
ugcuuagucaagaucucaa

SEQ ID NO: 165126 - RNA, 19 nt, Artificial Sequence
  Description of Artificial Sequence: Synthetic oligonucleotide
  Sense strand starting at position 2792 of SEQ ID NO: 2127
agacucucaugccuaguua

SEQ ID NO: 165127 - RNA, 19 nt, Artificial Sequence
  Description of Artificial Sequence: Synthetic oligonucleotide
  Antisense strand to SEQ ID NO: 165126
uaacuaggcaugagagucu

SEQ ID NO: 165128 - RNA, 19 nt, Artificial Sequence
  Description of Artificial Sequence: Synthetic oligonucleotide
  Sense strand starting at position 2803 of SEQ ID NO: 2127
ccuaguuagucaccaggga

SEQ ID NO: 165129 - RNA, 19 nt, Artificial Sequence
  Description of Artificial Sequence: Synthetic oligonucleotide
  Antisense strand to SEQ ID NO: 165128
ucccuggugacuaacuagg

SEQ ID NO: 165130 - RNA, 19 nt, Artificial Sequence
  Description of Artificial Sequence: Synthetic oligonucleotide
  Sense strand starting at position 2804 of SEQ ID NO: 2127
cuaguuagucaccagggau

SEQ ID NO: 165131 - RNA, 19 nt, Artificial Sequence
  Description of Artificial Sequence: Synthetic oligonucleotide
  Antisense strand to SEQ ID NO: 165130
aucccuggugacuaacuag

SEQ ID NO: 165132 - RNA, 19 nt, Artificial Sequence
  Description of Artificial Sequence: Synthetic oligonucleotide
  Sense strand starting at position 3101 of SEQ ID NO: 2127
aggugcuuccgucugucau

SEQ ID NO: 165133 - RNA, 19 nt, Artificial Sequence
  Description of Artificial Sequence: Synthetic oligonucleotide
  Antisense strand to SEQ ID NO: 165132
augacagacggaagcaccu

SEQ ID NO: 165134 - RNA, 19 nt, Artificial Sequence
  Description of Artificial Sequence: Synthetic oligonucleotide
  Sense strand starting at position 3103 of SEQ ID NO: 2127
gugcuuccgucugucauuu

SEQ ID NO: 165135 - RNA, 19 nt, Artificial Sequence
  Description of Artificial Sequence: Synthetic oligonucleotide
  Antisense strand to SEQ ID NO: 165134
aaaugacagacggaagcac

SEQ ID NO: 165136 - RNA, 19 nt, Artificial Sequence
  Description of Artificial Sequence: Synthetic oligonucleotide
  Sense strand starting at position 3125 of SEQ ID NO: 2127
ugaacagaaucucagacau

SEQ ID NO: 165137 - RNA, 19 nt, Artificial Sequence
  Description of Artificial Sequence: Synthetic oligonucleotide
  Antisense strand to SEQ ID NO: 165136
augucugagauucuguuca

SEQ ID NO: 165138 - RNA, 19 nt, Artificial Sequence
  Description of Artificial Sequence: Synthetic oligonucleotide
  Sense strand starting at position 3266 of SEQ ID NO: 2127
ucuugaagucuuuguauuu

SEQ ID NO: 165139 - RNA, 19 nt, Artificial Sequence
  Description of Artificial Sequence: Synthetic oligonucleotide
  Antisense strand to SEQ ID NO: 165138
aaauacaaagacuucaaga

SEQ ID NO: 165140 - RNA, 19 nt, Artificial Sequence
  Description of Artificial Sequence: Synthetic oligonucleotide
  Sense strand starting at position 3300 of SEQ ID NO: 2127
agaggaaggucccacucau

SEQ ID NO: 165141 - RNA, 19 nt, Artificial Sequence
  Description of Artificial Sequence: Synthetic oligonucleotide
  Antisense strand to SEQ ID NO: 165140
augagugggaccuuccucu

SEQ ID NO: 165142 - RNA, 19 nt, Artificial Sequence
  Description of Artificial Sequence: Synthetic oligonucleotide
  Sense strand starting at position 3358 of SEQ ID NO: 2127
agucucacauuccugacua

SEQ ID NO: 165143 - RNA, 19 nt, Artificial Sequence
  Description of Artificial Sequence: Synthetic oligonucleotide
  Antisense strand to SEQ ID NO: 165142
uagucaggaaugugagacu

SEQ ID NO: 165144 - RNA, 19 nt, Artificial Sequence
  Description of Artificial Sequence: Synthetic oligonucleotide
  Sense strand starting at position 3476 of SEQ ID NO: 2127
gaugucuauuuccauggaa

SEQ ID NO: 165145 - RNA, 19 nt, Artificial Sequence
  Description of Artificial Sequence: Synthetic oligonucleotide
  Antisense strand to SEQ ID NO: 165144
uuccauggaaauagacauc

SEQ ID NO: 165146 - RNA, 19 nt, Artificial Sequence
  Description of Artificial Sequence: Synthetic oligonucleotide
  Sense strand starting at position 3503 of SEQ ID NO: 2127
aaggaacguagauguuaga

SEQ ID NO: 165147 - RNA, 19 nt, Artificial Sequence
  Description of Artificial Sequence: Synthetic oligonucleotide
  Antisense strand to SEQ ID NO: 165146
ucuaacaucuacguuccuu

SEQ ID NO: 165148 - RNA, 19 nt, Artificial Sequence
  Description of Artificial Sequence: Synthetic oligonucleotide
  Sense strand starting at position 3591 of SEQ ID NO: 2127
ucugccagucugugacaau

SEQ ID NO: 165149 - RNA, 19 nt, Artificial Sequence
  Description of Artificial Sequence: Synthetic oligonucleotide
  Antisense strand to SEQ ID NO: 165148
auugucacagacuggcaga

SEQ ID NO: 165150 - RNA, 19 nt, Artificial Sequence
  Description of Artificial Sequence: Synthetic oligonucleotide
  Sense strand starting at position 3637 of SEQ ID NO: 2127
gacugagagggcuggguua

SEQ ID NO: 165151 - RNA, 19 nt, Artificial Sequence
  Description of Artificial Sequence: Synthetic oligonucleotide
  Antisense strand to SEQ ID NO: 165150
uaacccagcccucucaguc

SEQ ID NO: 165152 - RNA, 19 nt, Artificial Sequence
  Description of Artificial Sequence: Synthetic oligonucleotide
  Sense strand starting at position 3639 of SEQ ID NO: 2127
cugagagggcuggguuaaa

SEQ ID NO: 165153 - RNA, 19 nt, Artificial Sequence
  Description of Artificial Sequence: Synthetic oligonucleotide
  Antisense strand to SEQ ID NO: 165152
uuuaacccagcccucucag

SEQ ID NO: 165154 - RNA, 19 nt, Artificial Sequence
  Description of Artificial Sequence: Synthetic oligonucleotide
  Sense strand starting at position 3897 of SEQ ID NO: 2127
gucugauccuuguucuuua

SEQ ID NO: 165155 - RNA, 19 nt, Artificial Sequence
  Description of Artificial Sequence: Synthetic oligonucleotide
  Antisense strand to SEQ ID NO: 165154
uaaagaacaaggaucagac

SEQ ID NO: 165156 - RNA, 19 nt, Artificial Sequence
  Description of Artificial Sequence: Synthetic oligonucleotide
  Sense strand starting at position 3948 of SEQ ID NO: 2127
agcucauuauugucagcuu

SEQ ID NO: 165157 - RNA, 19 nt, Artificial Sequence
  Description of Artificial Sequence: Synthetic oligonucleotide
  Antisense strand to SEQ ID NO: 165156
aagcugacaauaaugagcu

SEQ ID NO: 165158 - RNA, 19 nt, Artificial Sequence
  Description of Artificial Sequence: Synthetic oligonucleotide
  Sense strand starting at position 3969 of SEQ ID NO: 2127
guggguguccuauauaagc

SEQ ID NO: 165159 - RNA, 19 nt, Artificial Sequence
  Description of Artificial Sequence: Synthetic oligonucleotide
  Antisense strand to SEQ ID NO: 165158
gcuuauauaggacacccac

SEQ ID NO: 165160 - RNA, 19 nt, Artificial Sequence
  Description of Artificial Sequence: Synthetic oligonucleotide
  Sense strand starting at position 3978 of SEQ ID NO: 2127
cuauauaagccuuggaaua

SEQ ID NO: 165161 - RNA, 19 nt, Artificial Sequence
  Description of Artificial Sequence: Synthetic oligonucleotide
  Antisense strand to SEQ ID NO: 165160
uauuccaaggcuuauauag

SEQ ID NO: 165162 - RNA, 19 nt, Artificial Sequence
  Description of Artificial Sequence: Synthetic oligonucleotide
  Sense strand starting at position 38 of SEQ ID NO: 2126
ucgauagucccagaugcua

SEQ ID NO: 165163 - RNA, 19 nt, Artificial Sequence
  Description of Artificial Sequence: Synthetic oligonucleotide
  Antisense strand to SEQ ID NO: 165162
uagcaucugggacuaucga

SEQ ID NO: 165164 - RNA, 19 nt, Artificial Sequence
  Description of Artificial Sequence: Synthetic oligonucleotide
  Sense strand starting at position 87 of SEQ ID NO: 2126
ccacuugagcuccagaagu

SEQ ID NO: 165165 - RNA, 19 nt, Artificial Sequence
  Description of Artificial Sequence: Synthetic oligonucleotide
  Antisense strand to SEQ ID NO: 165164
acuucuggagcucaagugg

SEQ ID NO: 165166 - RNA, 19 nt, Artificial Sequence
  Description of Artificial Sequence: Synthetic oligonucleotide
  Sense strand starting at position 89 of SEQ ID NO: 2126
acuugagcuccagaaguca

SEQ ID NO: 165167 - RNA, 19 nt, Artificial Sequence
  Description of Artificial Sequence: Synthetic oligonucleotide
  Antisense strand to SEQ ID NO: 165166
ugacuucuggagcucaagu

SEQ ID NO: 165168 - RNA, 19 nt, Artificial Sequence
  Description of Artificial Sequence: Synthetic oligonucleotide
  Sense strand starting at position 112 of SEQ ID NO: 2126
ugcaaugagcuauaauuaa

SEQ ID NO: 165169 - RNA, 19 nt, Artificial Sequence
  Description of Artificial Sequence: Synthetic oligonucleotide
  Antisense strand to SEQ ID NO: 165168
uuaauuauagcucauugca

SEQ ID NO: 165170 - RNA, 19 nt, Artificial Sequence
  Description of Artificial Sequence: Synthetic oligonucleotide
  Sense strand starting at position 512 of SEQ ID NO: 2126
agaagaagccauggugaau

SEQ ID NO: 165171 - RNA, 19 nt, Artificial Sequence
  Description of Artificial Sequence: Synthetic oligonucleotide
  Antisense strand to SEQ ID NO: 165170
auucaccauggcuucuucu

SEQ ID NO: 165172 - RNA, 19 nt, Artificial Sequence
  Description of Artificial Sequence: Synthetic oligonucleotide
  Sense strand starting at position 550 of SEQ ID NO: 2126
guguauucugcacaaucaa

SEQ ID NO: 165173 - RNA, 19 nt, Artificial Sequence
  Description of Artificial Sequence: Synthetic oligonucleotide
  Antisense strand to SEQ ID NO: 165172
uugauugugcagaauacac

SEQ ID NO: 165174 - RNA, 19 nt, Artificial Sequence
  Description of Artificial Sequence: Synthetic oligonucleotide
  Sense strand starting at position 621 of SEQ ID NO: 2126
uuugccuuucuauauguca

SEQ ID NO: 165175 - RNA, 19 nt, Artificial Sequence
  Description of Artificial Sequence: Synthetic oligonucleotide
  Antisense strand to SEQ ID NO: 165174
ugacauauagaaaggcaaa

SEQ ID NO: 165176 - RNA, 19 nt, Artificial Sequence
  Description of Artificial Sequence: Synthetic oligonucleotide
  Sense strand starting at position 624 of SEQ ID NO: 2126
gccuuucuauaugucauca

SEQ ID NO: 165177 - RNA, 19 nt, Artificial Sequence
  Description of Artificial Sequence: Synthetic oligonucleotide
  Antisense strand to SEQ ID NO: 165176
ugaugacauauagaaaggc

SEQ ID NO: 165178 - RNA, 19 nt, Artificial Sequence
  Description of Artificial Sequence: Synthetic oligonucleotide
  Sense strand starting at position 667 of SEQ ID NO: 2126
cuacauacaucgucagaaa

SEQ ID NO: 165179 - RNA, 19 nt, Artificial Sequence
  Description of Artificial Sequence: Synthetic oligonucleotide
  Antisense strand to SEQ ID NO: 165178
uuucugacgauguauguag

SEQ ID NO: 165180 - RNA, 19 nt, Artificial Sequence
  Description of Artificial Sequence: Synthetic oligonucleotide
  Sense strand starting at position 691 of SEQ ID NO: 2126
guggaauaaagacgucuaa

SEQ ID NO: 165181 - RNA, 19 nt, Artificial Sequence
  Description of Artificial Sequence: Synthetic oligonucleotide
  Antisense strand to SEQ ID NO: 165180
uuagacgucuuuauuccac

SEQ ID NO: 165182 - RNA, 19 nt, Artificial Sequence
  Description of Artificial Sequence: Synthetic oligonucleotide
  Sense strand starting at position 703 of SEQ ID NO: 2126
cgucuaaauuaaccacgaa

SEQ ID NO: 165183 - RNA, 19 nt, Artificial Sequence
  Description of Artificial Sequence: Synthetic oligonucleotide
  Antisense strand to SEQ ID NO: 165182
uucgugguuaauuuagacg

SEQ ID NO: 165184 - RNA, 19 nt, Artificial Sequence
  Description of Artificial Sequence: Synthetic oligonucleotide
  Sense strand starting at position 769 of SEQ ID NO: 2126
auaugauauugguuccaga

SEQ ID NO: 165185 - RNA, 19 nt, Artificial Sequence
  Description of Artificial Sequence: Synthetic oligonucleotide
  Antisense strand to SEQ ID NO: 165184
ucuggaaccaauaucauau

SEQ ID NO: 165186 - RNA, 19 nt, Artificial Sequence
  Description of Artificial Sequence: Synthetic oligonucleotide
  Sense strand starting at position 798 of SEQ ID NO: 2126
aacugagcuuucucgguca

SEQ ID NO: 165187 - RNA, 19 nt, Artificial Sequence
  Description of Artificial Sequence: Synthetic oligonucleotide
  Antisense strand to SEQ ID NO: 165186
ugaccgagaaagcucaguu

SEQ ID NO: 165188 - RNA, 19 nt, Artificial Sequence
  Description of Artificial Sequence: Synthetic oligonucleotide
  Sense strand starting at position 800 of SEQ ID NO: 2126
cugagcuuucucggucaua

SEQ ID NO: 165189 - RNA, 19 nt, Artificial Sequence
  Description of Artificial Sequence: Synthetic oligonucleotide
  Antisense strand to SEQ ID NO: 165188
uaugaccgagaaagcucag

SEQ ID NO: 165190 - RNA, 19 nt, Artificial Sequence
  Description of Artificial Sequence: Synthetic oligonucleotide
  Sense strand starting at position 801 of SEQ ID NO: 2126
ugagcuuucucggucauaa

SEQ ID NO: 165191 - RNA, 19 nt, Artificial Sequence
  Description of Artificial Sequence: Synthetic oligonucleotide
  Antisense strand to SEQ ID NO: 165190
uuaugaccgagaaagcuca

SEQ ID NO: 165192 - RNA, 19 nt, Artificial Sequence
  Description of Artificial Sequence: Synthetic oligonucleotide
  Sense strand starting at position 895 of SEQ ID NO: 2126
ccgaaacuguaagaagaua

SEQ ID NO: 165193 - RNA, 19 nt, Artificial Sequence
  Description of Artificial Sequence: Synthetic oligonucleotide
  Antisense strand to SEQ ID NO: 165192
uaucuucuuacaguuucgg

SEQ ID NO: 165194 - RNA, 19 nt, Artificial Sequence
  Description of Artificial Sequence: Synthetic oligonucleotide
  Sense strand starting at position 1063 of SEQ ID NO: 2126
ccuauugucccucagguuu

SEQ ID NO: 165195 - RNA, 19 nt, Artificial Sequence
  Description of Artificial Sequence: Synthetic oligonucleotide
  Antisense strand to SEQ ID NO: 165194
aaaccugagggacaauagg

SEQ ID NO: 165196 - RNA, 19 nt, Artificial Sequence
  Description of Artificial Sequence: Synthetic oligonucleotide
  Sense strand starting at position 1139 of SEQ ID NO: 2126
auuugcugccguuauguca

SEQ ID NO: 165197 - RNA, 19 nt, Artificial Sequence
  Description of Artificial Sequence: Synthetic oligonucleotide
  Antisense strand to SEQ ID NO: 165196
ugacauaacggcagcaaau

SEQ ID NO: 165198 - RNA, 19 nt, Artificial Sequence
  Description of Artificial Sequence: Synthetic oligonucleotide
  Sense strand starting at position 1143 of SEQ ID NO: 2126
gcugccguuaugucaugaa

SEQ ID NO: 165199 - RNA, 19 nt, Artificial Sequence
  Description of Artificial Sequence: Synthetic oligonucleotide
  Antisense strand to SEQ ID NO: 165198
uucaugacauaacggcagc

SEQ ID NO: 165200 - RNA, 19 nt, Artificial Sequence
  Description of Artificial Sequence: Synthetic oligonucleotide
  Sense strand starting at position 2836 of SEQ ID NO: 2126
gcgugucacccauauugug

SEQ ID NO: 165201 - RNA, 19 nt, Artificial Sequence
  Description of Artificial Sequence: Synthetic oligonucleotide
  Antisense strand to SEQ ID NO: 165200
cacaauaugggugacacgc

SEQ ID NO: 165202 - RNA, 19 nt, Artificial Sequence
  Description of Artificial Sequence: Synthetic oligonucleotide
  Sense strand starting at position 2850 of SEQ ID NO: 2126
uugugacaucaucguaauu

SEQ ID NO: 165203 - RNA, 19 nt, Artificial Sequence
  Description of Artificial Sequence: Synthetic oligonucleotide
  Antisense strand to SEQ ID NO: 165202
aauuacgaugaugucacaa

SEQ ID NO: 165204 - RNA, 19 nt, Artificial Sequence
  Description of Artificial Sequence: Synthetic oligonucleotide
  Sense strand starting at position 2852 of SEQ ID NO: 2126
gugacaucaucguaauuuc

SEQ ID NO: 165205 - RNA, 19 nt, Artificial Sequence
  Description of Artificial Sequence: Synthetic oligonucleotide
  Antisense strand to SEQ ID NO: 165204
gaaauuacgaugaugucac

SEQ ID NO: 165206 - RNA, 19 nt, Artificial Sequence
  Description of Artificial Sequence: Synthetic oligonucleotide
  Sense strand starting at position 2987 of SEQ ID NO: 2126
ucuggaauuugaucgccuu

SEQ ID NO: 165207 - RNA, 19 nt, Artificial Sequence
  Description of Artificial Sequence: Synthetic oligonucleotide
  Antisense strand to SEQ ID NO: 165206
aaggcgaucaaauuccaga

SEQ ID NO: 165208 - RNA, 19 nt, Artificial Sequence
  Description of Artificial Sequence: Synthetic oligonucleotide
  Sense strand starting at position 2988 of SEQ ID NO: 2126
cuggaauuugaucgccuuu

SEQ ID NO: 165209 - RNA, 19 nt, Artificial Sequence
  Description of Artificial Sequence: Synthetic oligonucleotide
  Antisense strand to SEQ ID NO: 165208
aaaggcgaucaaauuccag

SEQ ID NO: 165210 - RNA, 19 nt, Artificial Sequence
  Description of Artificial Sequence: Synthetic oligonucleotide
  Sense strand starting at position 2997 of SEQ ID NO: 2126
gaucgccuuuggucuaaca

SEQ ID NO: 165211 - RNA, 19 nt, Artificial Sequence
  Description of Artificial Sequence: Synthetic oligonucleotide
  Antisense strand to SEQ ID NO: 165210
uguuagaccaaaggcgauc

SEQ ID NO: 165212 - RNA, 19 nt, Artificial Sequence
  Description of Artificial Sequence: Synthetic oligonucleotide
  Sense strand starting at position 2999 of SEQ ID NO: 2126
ucgccuuuggucuaacaaa

SEQ ID NO: 165213 - RNA, 19 nt, Artificial Sequence
  Description of Artificial Sequence: Synthetic oligonucleotide
  Antisense strand to SEQ ID NO: 165212
uuuguuagaccaaaggcga

SEQ ID NO: 165214 - RNA, 19 nt, Artificial Sequence
  Description of Artificial Sequence: Synthetic oligonucleotide
  Sense strand starting at position 3055 of SEQ ID NO: 2126
aagccuucugcggaugaua

SEQ ID NO: 165215 - RNA, 19 nt, Artificial Sequence
  Description of Artificial Sequence: Synthetic oligonucleotide
  Antisense strand to SEQ ID NO: 165214
uaucauccgcagaaggcuu

SEQ ID NO: 165216 - RNA, 19 nt, Artificial Sequence
  Description of Artificial Sequence: Synthetic oligonucleotide
  Sense strand starting at position 3093 of SEQ ID NO: 2126
cguucuagacuacacagau

SEQ ID NO: 165217 - RNA, 19 nt, Artificial Sequence
  Description of Artificial Sequence: Synthetic oligonucleotide
  Antisense strand to SEQ ID NO: 165216
aucuguguagucuagaacg

SEQ ID NO: 165218 - RNA, 19 nt, Artificial Sequence
  Description of Artificial Sequence: Synthetic oligonucleotide
  Sense strand starting at position 3106 of SEQ ID NO: 2126
acagauugcaguuaagugu

SEQ ID NO: 165219 - RNA, 19 nt, Artificial Sequence
  Description of Artificial Sequence: Synthetic oligonucleotide
  Antisense strand to SEQ ID NO: 165218
acacuuaacugcaaucugu

SEQ ID NO: 165220 - RNA, 19 nt, Artificial Sequence
  Description of Artificial Sequence: Synthetic oligonucleotide
  Sense strand starting at position 3250 of SEQ ID NO: 2126
aggaaauuggucugaccgu

SEQ ID NO: 165221 - RNA, 19 nt, Artificial Sequence
  Description of Artificial Sequence: Synthetic oligonucleotide
  Antisense strand to SEQ ID NO: 165220
acggucagaccaauuuccu

SEQ ID NO: 165222 - RNA, 19 nt, Artificial Sequence
  Description of Artificial Sequence: Synthetic oligonucleotide
  Sense strand starting at position 3259 of SEQ ID NO: 2126
gucugaccgugccuuagaa

SEQ ID NO: 165223 - RNA, 19 nt, Artificial Sequence
  Description of Artificial Sequence: Synthetic oligonucleotide
  Antisense strand to SEQ ID NO: 165222
uucuaaggcacggucagac

SEQ ID NO: 165224 - RNA, 19 nt, Artificial Sequence
  Description of Artificial Sequence: Synthetic oligonucleotide
  Sense strand starting at position 3261 of SEQ ID NO: 2126
cugaccgugccuuagaaua

SEQ ID NO: 165225 - RNA, 19 nt, Artificial Sequence
  Description of Artificial Sequence: Synthetic oligonucleotide
  Antisense strand to SEQ ID NO: 165224
uauucuaaggcacggucag

SEQ ID NO: 165226 - RNA, 19 nt, Artificial Sequence
  Description of Artificial Sequence: Synthetic oligonucleotide
  Sense strand starting at position 3370 of SEQ ID NO: 2126
ucgguugguggucaauaca

SEQ ID NO: 165227 - RNA, 19 nt, Artificial Sequence
  Description of Artificial Sequence: Synthetic oligonucleotide
  Antisense strand to SEQ ID NO: 165226
uguauugaccaccaaccga

SEQ ID NO: 165228 - RNA, 19 nt, Artificial Sequence
  Description of Artificial Sequence: Synthetic oligonucleotide
  Sense strand starting at position 3403 of SEQ ID NO: 2126
uugagaucuugacuaagca

SEQ ID NO: 165229 - RNA, 19 nt, Artificial Sequence
  Description of Artificial Sequence: Synthetic oligonucleotide
  Antisense strand to SEQ ID NO: 165228
ugcuuagucaagaucucaa

SEQ ID NO: 165230 - RNA, 19 nt, Artificial Sequence
  Description of Artificial Sequence: Synthetic oligonucleotide
  Sense strand starting at position 3516 of SEQ ID NO: 2126
agacucucaugccuaguua

SEQ ID NO: 165231 - RNA, 19 nt, Artificial Sequence
  Description of Artificial Sequence: Synthetic oligonucleotide
  Antisense strand to SEQ ID NO: 165230
uaacuaggcaugagagucu

SEQ ID NO: 165232 - RNA, 19 nt, Artificial Sequence
  Description of Artificial Sequence: Synthetic oligonucleotide
  Sense strand starting at position 3527 of SEQ ID NO: 2126
ccuaguuagucaccaggga

SEQ ID NO: 165233 - RNA, 19 nt, Artificial Sequence
  Description of Artificial Sequence: Synthetic oligonucleotide
  Antisense strand to SEQ ID NO: 165232
ucccuggugacuaacuagg

SEQ ID NO: 165234 - RNA, 19 nt, Artificial Sequence
  Description of Artificial Sequence: Synthetic oligonucleotide
  Sense strand starting at position 3528 of SEQ ID NO: 2126
cuaguuagucaccagggau

SEQ ID NO: 165235 - RNA, 19 nt, Artificial Sequence
  Description of Artificial Sequence: Synthetic oligonucleotide
  Antisense strand to SEQ ID NO: 165234
aucccuggugacuaacuag

SEQ ID NO: 165236 - RNA, 19 nt, Artificial Sequence
  Description of Artificial Sequence: Synthetic oligonucleotide
  Sense strand starting at position 3825 of SEQ ID NO: 2126
aggugcuuccgucugucau

SEQ ID NO: 165237 - RNA, 19 nt, Artificial Sequence
  Description of Artificial Sequence: Synthetic oligonucleotide
  Antisense strand to SEQ ID NO: 165236
augacagacggaagcaccu

SEQ ID NO: 165238 - RNA, 19 nt, Artificial Sequence
  Description of Artificial Sequence: Synthetic oligonucleotide
  Sense strand starting at position 3827 of SEQ ID NO: 2126
gugcuuccgucugucauuu

SEQ ID NO: 165239 - RNA, 19 nt, Artificial Sequence
  Description of Artificial Sequence: Synthetic oligonucleotide
  Antisense strand to SEQ ID NO: 165238
aaaugacagacggaagcac

SEQ ID NO: 165240 - RNA, 19 nt, Artificial Sequence
  Description of Artificial Sequence: Synthetic oligonucleotide
  Sense strand starting at position 3849 of SEQ ID NO: 2126
ugaacagaaucucagacau

SEQ ID NO: 165241 - RNA, 19 nt, Artificial Sequence
  Description of Artificial Sequence: Synthetic oligonucleotide
  Antisense strand to SEQ ID NO: 165240
augucugagauucuguuca

SEQ ID NO: 165242 - RNA, 19 nt, Artificial Sequence
  Description of Artificial Sequence: Synthetic oligonucleotide
  Sense strand starting at position 81 of SEQ ID NO: 2130
gaaauuuagcggcgggcua

SEQ ID NO: 165243 - RNA, 19 nt, Artificial Sequence
  Description of Artificial Sequence: Synthetic oligonucleotide
  Antisense strand to SEQ ID NO: 165242
uagcccgccgcuaaauuuc

SEQ ID NO: 165244 - RNA, 19 nt, Artificial Sequence
  Description of Artificial Sequence: Synthetic oligonucleotide
  Sense strand starting at position 200 of SEQ ID NO: 2130
gugaaccuaugaguagaga

SEQ ID NO: 165245 - RNA, 19 nt, Artificial Sequence
  Description of Artificial Sequence: Synthetic oligonucleotide
  Antisense strand to SEQ ID NO: 165244
ucucuacucauagguucac

SEQ ID NO: 165246 - RNA, 19 nt, Artificial Sequence
  Description of Artificial Sequence: Synthetic oligonucleotide
  Sense strand starting at position 829 of SEQ ID NO: 2130
gagguuuaucuaggccaug

SEQ ID NO: 165247 - RNA, 19 nt, Artificial Sequence
  Description of Artificial Sequence: Synthetic oligonucleotide
  Antisense strand to SEQ ID NO: 165246
cauggccuagauaaaccuc

SEQ ID NO: 165248 - RNA, 19 nt, Artificial Sequence
  Description of Artificial Sequence: Synthetic oligonucleotide
  Sense strand starting at position 1284 of SEQ ID NO: 2130
auugacaugggcgacuaua

SEQ ID NO: 165249 - RNA, 19 nt, Artificial Sequence
  Description of Artificial Sequence: Synthetic oligonucleotide
  Antisense strand to SEQ ID NO: 165248
uauagucgcccaugucaau

SEQ ID NO: 165250 - RNA, 19 nt, Artificial Sequence
  Description of Artificial Sequence: Synthetic oligonucleotide
  Sense strand starting at position 1305 of SEQ ID NO: 2130
agggcagccacuuaguauu

SEQ ID NO: 165251 - RNA, 19 nt, Artificial Sequence
  Description of Artificial Sequence: Synthetic oligonucleotide
  Antisense strand to SEQ ID NO: 165250
aauacuaaguggcugcccu

SEQ ID NO: 165252 - RNA, 19 nt, Artificial Sequence
  Description of Artificial Sequence: Synthetic oligonucleotide
  Sense strand starting at position 1311 of SEQ ID NO: 2130
gccacuuaguauuccagga

SEQ ID NO: 165253 - RNA, 19 nt, Artificial Sequence
  Description of Artificial Sequence: Synthetic oligonucleotide
  Antisense strand to SEQ ID NO: 165252
uccuggaauacuaaguggc

SEQ ID NO: 165254 - RNA, 19 nt, Artificial Sequence
  Description of Artificial Sequence: Synthetic oligonucleotide
  Sense strand starting at position 1384 of SEQ ID NO: 2130
ugcuuaaaguccuccaaug

SEQ ID NO: 165255 - RNA, 19 nt, Artificial Sequence
  Description of Artificial Sequence: Synthetic oligonucleotide
  Antisense strand to SEQ ID NO: 165254
cauuggaggacuuuaagca

SEQ ID NO: 165256 - RNA, 19 nt, Artificial Sequence
  Description of Artificial Sequence: Synthetic oligonucleotide
  Sense strand starting at position 1400 of SEQ ID NO: 2130
auggcucgccuuuaaauuu

SEQ ID NO: 165257 - RNA, 19 nt, Artificial Sequence
  Description of Artificial Sequence: Synthetic oligonucleotide
  Antisense strand to SEQ ID NO: 165256
aaauuuaaaggcgagccau

SEQ ID NO: 165258 - RNA, 19 nt, Artificial Sequence
  Description of Artificial Sequence: Synthetic oligonucleotide
  Sense strand starting at position 1409 of SEQ ID NO: 2130
cuuuaaauuuagggugaaa

SEQ ID NO: 165259 - RNA, 19 nt, Artificial Sequence
  Description of Artificial Sequence: Synthetic oligonucleotide
  Antisense strand to SEQ ID NO: 165258
uuucacccuaaauuuaaag

SEQ ID NO: 165260 - RNA, 19 nt, Artificial Sequence
  Description of Artificial Sequence: Synthetic oligonucleotide
  Sense strand starting at position 1931 of SEQ ID NO: 2130
gaugucuaggcccaaauga

SEQ ID NO: 165261 - RNA, 19 nt, Artificial Sequence
  Description of Artificial Sequence: Synthetic oligonucleotide
  Antisense strand to SEQ ID NO: 165260
ucauuugggccuagacauc

SEQ ID NO: 165262 - RNA, 19 nt, Artificial Sequence
  Description of Artificial Sequence: Synthetic oligonucleotide
  Sense strand starting at position 2026 of SEQ ID NO: 2130
caacgugugagcgaugaga

SEQ ID NO: 165263 - RNA, 19 nt, Artificial Sequence
  Description of Artificial Sequence: Synthetic oligonucleotide
  Antisense strand to SEQ ID NO: 165262
ucucaucgcucacacguug

SEQ ID NO: 165264 - RNA, 19 nt, Artificial Sequence
  Description of Artificial Sequence: Synthetic oligonucleotide
  Sense strand starting at position 2039 of SEQ ID NO: 2130
augagaagcuugucaucug

SEQ ID NO: 165265 - RNA, 19 nt, Artificial Sequence
  Description of Artificial Sequence: Synthetic oligonucleotide
  Antisense strand to SEQ ID NO: 165264
cagaugacaagcuucucau

SEQ ID NO: 165266 - RNA, 19 nt, Artificial Sequence
  Description of Artificial Sequence: Synthetic oligonucleotide
  Sense strand starting at position 2042 of SEQ ID NO: 2130
agaagcuugucaucuguaa

SEQ ID NO: 165267 - RNA, 19 nt, Artificial Sequence
  Description of Artificial Sequence: Synthetic oligonucleotide
  Antisense strand to SEQ ID NO: 165266
uuacagaugacaagcuucu

SEQ ID NO: 165268 - RNA, 19 nt, Artificial Sequence
  Description of Artificial Sequence: Synthetic oligonucleotide
  Sense strand starting at position 2078 of SEQ ID NO: 2130
aauuaucauggccgugaua

SEQ ID NO: 165269 - RNA, 19 nt, Artificial Sequence
  Description of Artificial Sequence: Synthetic oligonucleotide
  Antisense strand to SEQ ID NO: 165268
uaucacggccaugauaauu

SEQ ID NO: 165270 - RNA, 19 nt, Artificial Sequence
  Description of Artificial Sequence: Synthetic oligonucleotide
  Sense strand starting at position 2081 of SEQ ID NO: 2130
uaucauggccgugauaauu

SEQ ID NO: 165271 - RNA, 19 nt, Artificial Sequence
  Description of Artificial Sequence: Synthetic oligonucleotide
  Antisense strand to SEQ ID NO: 165270
aauuaucacggccaugaua

SEQ ID NO: 165272 - RNA, 19 nt, Artificial Sequence
  Description of Artificial Sequence: Synthetic oligonucleotide
  Sense strand starting at position 2087 of SEQ ID NO: 2130
ggccgugauaauuauguac

SEQ ID NO: 165273 - RNA, 19 nt, Artificial Sequence
  Description of Artificial Sequence: Synthetic oligonucleotide
  Antisense strand to SEQ ID NO: 165272
guacauaauuaucacggcc

SEQ ID NO: 165274 - RNA, 19 nt, Artificial Sequence
  Description of Artificial Sequence: Synthetic oligonucleotide
  Sense strand starting at position 2090 of SEQ ID NO: 2130
cgugauaauuauguacauu

SEQ ID NO: 165275 - RNA, 19 nt, Artificial Sequence
  Description of Artificial Sequence: Synthetic oligonucleotide
  Antisense strand to SEQ ID NO: 165274
aauguacauaauuaucacg

SEQ ID NO: 165276 - RNA, 19 nt, Artificial Sequence
  Description of Artificial Sequence: Synthetic oligonucleotide
  Sense strand starting at position 2205 of SEQ ID NO: 2130
gagauauguuuggucccaa

SEQ ID NO: 165277 - RNA, 19 nt, Artificial Sequence
  Description of Artificial Sequence: Synthetic oligonucleotide
  Antisense strand to SEQ ID NO: 165276
uugggaccaaacauaucuc

SEQ ID NO: 165278 - RNA, 19 nt, Artificial Sequence
  Description of Artificial Sequence: Synthetic oligonucleotide
  Sense strand starting at position 2206 of SEQ ID NO: 2130
agauauguuuggucccaag

SEQ ID NO: 165279 - RNA, 19 nt, Artificial Sequence
  Description of Artificial Sequence: Synthetic oligonucleotide
  Antisense strand to SEQ ID NO: 165278
cuugggaccaaacauaucu

SEQ ID NO: 165280 - RNA, 19 nt, Artificial Sequence
  Description of Artificial Sequence: Synthetic oligonucleotide
  Sense strand starting at position 2411 of SEQ ID NO: 2130
accuaagcucucugggaca

SEQ ID NO: 165281 - RNA, 19 nt, Artificial Sequence
  Description of Artificial Sequence: Synthetic oligonucleotide
  Antisense strand to SEQ ID NO: 165280
ugucccagagagcuuaggu

SEQ ID NO: 165282 - RNA, 19 nt, Artificial Sequence
  Description of Artificial Sequence: Synthetic oligonucleotide
  Sense strand starting at position 2612 of SEQ ID NO: 2130
cgcgaaaugccugccaacu

SEQ ID NO: 165283 - RNA, 19 nt, Artificial Sequence
  Description of Artificial Sequence: Synthetic oligonucleotide
  Antisense strand to SEQ ID NO: 165282
aguuggcaggcauuucgcg

SEQ ID NO: 165284 - RNA, 19 nt, Artificial Sequence
  Description of Artificial Sequence: Synthetic oligonucleotide
  Sense strand starting at position 2803 of SEQ ID NO: 2130
cgccggugaguagugauua

SEQ ID NO: 165285 - RNA, 19 nt, Artificial Sequence
  Description of Artificial Sequence: Synthetic oligonucleotide
  Antisense strand to SEQ ID NO: 165284
uaaucacuacucaccggcg

SEQ ID NO: 165286 - RNA, 19 nt, Artificial Sequence
  Description of Artificial Sequence: Synthetic oligonucleotide
  Sense strand starting at position 2815 of SEQ ID NO: 2130
gugauuaacaccgggagga

SEQ ID NO: 165287 - RNA, 19 nt, Artificial Sequence
  Description of Artificial Sequence: Synthetic oligonucleotide
  Antisense strand to SEQ ID NO: 165286
uccucccgguguuaaucac

SEQ ID NO: 165288 - RNA, 19 nt, Artificial Sequence
  Description of Artificial Sequence: Synthetic oligonucleotide
  Sense strand starting at position 3042 of SEQ ID NO: 2130
caggaagugacauggaguu

SEQ ID NO: 165289 - RNA, 19 nt, Artificial Sequence
  Description of Artificial Sequence: Synthetic oligonucleotide
  Antisense strand to SEQ ID NO: 165288
aacuccaugucacuuccug

SEQ ID NO: 165290 - RNA, 19 nt, Artificial Sequence
  Description of Artificial Sequence: Synthetic oligonucleotide
  Sense strand starting at position 3048 of SEQ ID NO: 2130
gugacauggaguuaacuuu

SEQ ID NO: 165291 - RNA, 19 nt, Artificial Sequence
  Description of Artificial Sequence: Synthetic oligonucleotide
  Antisense strand to SEQ ID NO: 165290
aaaguuaacuccaugucac

SEQ ID NO: 165292 - RNA, 19 nt, Artificial Sequence
  Description of Artificial Sequence: Synthetic oligonucleotide
  Sense strand starting at position 3054 of SEQ ID NO: 2130
uggaguuaacuuugccaga

SEQ ID NO: 165293 - RNA, 19 nt, Artificial Sequence
  Description of Artificial Sequence: Synthetic oligonucleotide
  Antisense strand to SEQ ID NO: 165292
ucuggcaaaguuaacucca

SEQ ID NO: 165294 - RNA, 19 nt, Artificial Sequence
  Description of Artificial Sequence: Synthetic oligonucleotide
  Sense strand starting at position 3055 of SEQ ID NO: 2130
ggaguuaacuuugccagaa

SEQ ID NO: 165295 - RNA, 19 nt, Artificial Sequence
  Description of Artificial Sequence: Synthetic oligonucleotide
  Antisense strand to SEQ ID NO: 165294
uucuggcaaaguuaacucc

SEQ ID NO: 165296 - RNA, 19 nt, Artificial Sequence
  Description of Artificial Sequence: Synthetic oligonucleotide
  Sense strand starting at position 3056 of SEQ ID NO: 2130
gaguuaacuuugccagaau

SEQ ID NO: 165297 - RNA, 19 nt, Artificial Sequence
  Description of Artificial Sequence: Synthetic oligonucleotide
  Antisense strand to SEQ ID NO: 165296
auucuggcaaaguuaacuc

SEQ ID NO: 165298 - RNA, 19 nt, Artificial Sequence
  Description of Artificial Sequence: Synthetic oligonucleotide
  Sense strand starting at position 3240 of SEQ ID NO: 2130
uaaccuucucgugagccaa

SEQ ID NO: 165299 - RNA, 19 nt, Artificial Sequence
  Description of Artificial Sequence: Synthetic oligonucleotide
  Antisense strand to SEQ ID NO: 165298
uuggcucacgagaagguua

SEQ ID NO: 165300 - RNA, 19 nt, Artificial Sequence
  Description of Artificial Sequence: Synthetic oligonucleotide
  Sense strand starting at position 3390 of SEQ ID NO: 2130
acggcugucucauuuguaa

SEQ ID NO: 165301 - RNA, 19 nt, Artificial Sequence
  Description of Artificial Sequence: Synthetic oligonucleotide
  Antisense strand to SEQ ID NO: 165300
uuacaaaugagacagccgu

SEQ ID NO: 165302 - RNA, 19 nt, Artificial Sequence
  Description of Artificial Sequence: Synthetic oligonucleotide
  Sense strand starting at position 3415 of SEQ ID NO: 2130
cucugugggauuggugaaa

SEQ ID NO: 165303 - RNA, 19 nt, Artificial Sequence
  Description of Artificial Sequence: Synthetic oligonucleotide
  Antisense strand to SEQ ID NO: 165302
uuucaccaaucccacagag

SEQ ID NO: 165304 - RNA, 19 nt, Artificial Sequence
  Description of Artificial Sequence: Synthetic oligonucleotide
  Sense strand starting at position 3420 of SEQ ID NO: 2130
ugggauuggugaaauccgu

SEQ ID NO: 165305 - RNA, 19 nt, Artificial Sequence
  Description of Artificial Sequence: Synthetic oligonucleotide
  Antisense strand to SEQ ID NO: 165304
acggauuucaccaauccca

SEQ ID NO: 165306 - RNA, 19 nt, Artificial Sequence
  Description of Artificial Sequence: Synthetic oligonucleotide
  Sense strand starting at position 3427 of SEQ ID NO: 2130
ggugaaauccgucaucgag

SEQ ID NO: 165307 - RNA, 19 nt, Artificial Sequence
  Description of Artificial Sequence: Synthetic oligonucleotide
  Antisense strand to SEQ ID NO: 165306
cucgaugacggauuucacc

SEQ ID NO: 165308 - RNA, 19 nt, Artificial Sequence
  Description of Artificial Sequence: Synthetic oligonucleotide
  Sense strand starting at position 3429 of SEQ ID NO: 2130
ugaaauccgucaucgagau

SEQ ID NO: 165309 - RNA, 19 nt, Artificial Sequence
  Description of Artificial Sequence: Synthetic oligonucleotide
  Antisense strand to SEQ ID NO: 165308
aucucgaugacggauuuca

SEQ ID NO: 165310 - RNA, 19 nt, Artificial Sequence
  Description of Artificial Sequence: Synthetic oligonucleotide
  Sense strand starting at position 3430 of SEQ ID NO: 2130
gaaauccgucaucgagaua

SEQ ID NO: 165311 - RNA, 19 nt, Artificial Sequence
  Description of Artificial Sequence: Synthetic oligonucleotide
  Antisense strand to SEQ ID NO: 165310
uaucucgaugacggauuuc

SEQ ID NO: 165312 - RNA, 19 nt, Artificial Sequence
  Description of Artificial Sequence: Synthetic oligonucleotide
  Sense strand starting at position 3433 of SEQ ID NO: 2130
auccgucaucgagauaaac

SEQ ID NO: 165313 - RNA, 19 nt, Artificial Sequence
  Description of Artificial Sequence: Synthetic oligonucleotide
  Antisense strand to SEQ ID NO: 165312
guuuaucucgaugacggau

SEQ ID NO: 165314 - RNA, 19 nt, Artificial Sequence
  Description of Artificial Sequence: Synthetic oligonucleotide
  Sense strand starting at position 3582 of SEQ ID NO: 2130
gaagaaaugcuucgaaauc

SEQ ID NO: 165315 - RNA, 19 nt, Artificial Sequence
  Description of Artificial Sequence: Synthetic oligonucleotide
  Antisense strand to SEQ ID NO: 165314
gauuucgaagcauuucuuc

SEQ ID NO: 165316 - RNA, 19 nt, Artificial Sequence
  Description of Artificial Sequence: Synthetic oligonucleotide
  Sense strand starting at position 3631 of SEQ ID NO: 2130
gugucuuauaagggaguac

SEQ ID NO: 165317 - RNA, 19 nt, Artificial Sequence
  Description of Artificial Sequence: Synthetic oligonucleotide
  Antisense strand to SEQ ID NO: 165316
guacucccuuauaagacac

SEQ ID NO: 165318 - RNA, 19 nt, Artificial Sequence
  Description of Artificial Sequence: Synthetic oligonucleotide
  Sense strand starting at position 3843 of SEQ ID NO: 2130
ggcaaacuacucugaagga

SEQ ID NO: 165319 - RNA, 19 nt, Artificial Sequence
  Description of Artificial Sequence: Synthetic oligonucleotide
  Antisense strand to SEQ ID NO: 165318
uccuucagaguaguuugcc

SEQ ID NO: 165320 - RNA, 19 nt, Artificial Sequence
  Description of Artificial Sequence: Synthetic oligonucleotide
  Sense strand starting at position 3973 of SEQ ID NO: 2130
uggaguugugguugauuag

SEQ ID NO: 165321 - RNA, 19 nt, Artificial Sequence
  Description of Artificial Sequence: Synthetic oligonucleotide
  Antisense strand to SEQ ID NO: 165320
cuaaucaaccacaacucca

SEQ ID NO: 165322 - RNA, 19 nt, Artificial Sequence
  Description of Artificial Sequence: Synthetic oligonucleotide
  Sense strand starting at position 144 of SEQ ID NO: 2129
cuagaaaguuccuuccugu

SEQ ID NO: 165323 - RNA, 19 nt, Artificial Sequence
  Description of Artificial Sequence: Synthetic oligonucleotide
  Antisense strand to SEQ ID NO: 165322
acaggaaggaacuuucuag

SEQ ID NO: 165324 - RNA, 19 nt, Artificial Sequence
  Description of Artificial Sequence: Synthetic oligonucleotide
  Sense strand starting at position 150 of SEQ ID NO: 2129
aguuccuuccuguaucaaa

SEQ ID NO: 165325 - RNA, 19 nt, Artificial Sequence
  Description of Artificial Sequence: Synthetic oligonucleotide
  Antisense strand to SEQ ID NO: 165324
uuugauacaggaaggaacu

SEQ ID NO: 165326 - RNA, 19 nt, Artificial Sequence
  Description of Artificial Sequence: Synthetic oligonucleotide
  Sense strand starting at position 248 of SEQ ID NO: 2129
ucucuuccacauuggugau

SEQ ID NO: 165327 - RNA, 19 nt, Artificial Sequence
  Description of Artificial Sequence: Synthetic oligonucleotide
  Antisense strand to SEQ ID NO: 165326
aucaccaauguggaagaga

SEQ ID NO: 165328 - RNA, 19 nt, Artificial Sequence
  Description of Artificial Sequence: Synthetic oligonucleotide
  Sense strand starting at position 314 of SEQ ID NO: 2129
ugucauaugcgugugugca

SEQ ID NO: 165329 - RNA, 19 nt, Artificial Sequence
  Description of Artificial Sequence: Synthetic oligonucleotide
  Antisense strand to SEQ ID NO: 165328
ugcacacacgcauaugaca

SEQ ID NO: 165330 - RNA, 19 nt, Artificial Sequence
  Description of Artificial Sequence: Synthetic oligonucleotide
  Sense strand starting at position 389 of SEQ ID NO: 2129
gccacuguucuauaugacu

SEQ ID NO: 165331 - RNA, 19 nt, Artificial Sequence
  Description of Artificial Sequence: Synthetic oligonucleotide
  Antisense strand to SEQ ID NO: 165330
agucauauagaacaguggc

SEQ ID NO: 165332 - RNA, 19 nt, Artificial Sequence
  Description of Artificial Sequence: Synthetic oligonucleotide
  Sense strand starting at position 459 of SEQ ID NO: 2129
ucuucuucuccacauggga

SEQ ID NO: 165333 - RNA, 19 nt, Artificial Sequence
  Description of Artificial Sequence: Synthetic oligonucleotide
  Antisense strand to SEQ ID NO: 165332
ucccauguggagaagaaga

SEQ ID NO: 165334 - RNA, 19 nt, Artificial Sequence
  Description of Artificial Sequence: Synthetic oligonucleotide
  Sense strand starting at position 572 of SEQ ID NO: 2129
acgagacucucugcucaaa

SEQ ID NO: 165335 - RNA, 19 nt, Artificial Sequence
  Description of Artificial Sequence: Synthetic oligonucleotide
  Antisense strand to SEQ ID NO: 165334
uuugagcagagagucucgu

SEQ ID NO: 165336 - RNA, 19 nt, Artificial Sequence
  Description of Artificial Sequence: Synthetic oligonucleotide
  Sense strand starting at position 584 of SEQ ID NO: 2129
gcucaaaccuucuuaggga

SEQ ID NO: 165337 - RNA, 19 nt, Artificial Sequence
  Description of Artificial Sequence: Synthetic oligonucleotide
  Antisense strand to SEQ ID NO: 165336
ucccuaagaagguuugagc

SEQ ID NO: 165338 - RNA, 19 nt, Artificial Sequence
  Description of Artificial Sequence: Synthetic oligonucleotide
  Sense strand starting at position 970 of SEQ ID NO: 2129
ucauaaauauugguggaau

SEQ ID NO: 165339 - RNA, 19 nt, Artificial Sequence
  Description of Artificial Sequence: Synthetic oligonucleotide
  Antisense strand to SEQ ID NO: 165338
auuccaccaauauuuauga

SEQ ID NO: 165340 - RNA, 19 nt, Artificial Sequence
  Description of Artificial Sequence: Synthetic oligonucleotide
  Sense strand starting at position 1037 of SEQ ID NO: 2129
uacagcugugcucagaaua

SEQ ID NO: 165341 - RNA, 19 nt, Artificial Sequence
  Description of Artificial Sequence: Synthetic oligonucleotide
  Antisense strand to SEQ ID NO: 165340
uauucugagcacagcugua

SEQ ID NO: 165342 - RNA, 19 nt, Artificial Sequence
  Description of Artificial Sequence: Synthetic oligonucleotide
  Sense strand starting at position 1212 of SEQ ID NO: 2129
uguacuaaacuauguauac

SEQ ID NO: 165343 - RNA, 19 nt, Artificial Sequence
  Description of Artificial Sequence: Synthetic oligonucleotide
  Antisense strand to SEQ ID NO: 165342
guauacauaguuuaguaca

SEQ ID NO: 165344 - RNA, 19 nt, Artificial Sequence
  Description of Artificial Sequence: Synthetic oligonucleotide
  Sense strand starting at position 1213 of SEQ ID NO: 2129
guacuaaacuauguauacu

SEQ ID NO: 165345 - RNA, 19 nt, Artificial Sequence
  Description of Artificial Sequence: Synthetic oligonucleotide
  Antisense strand to SEQ ID NO: 165344
aguauacauaguuuaguac

SEQ ID NO: 165346 - RNA, 19 nt, Artificial Sequence
  Description of Artificial Sequence: Synthetic oligonucleotide
  Sense strand starting at position 1224 of SEQ ID NO: 2129
uguauacuguuacuuuaga

SEQ ID NO: 165347 - RNA, 19 nt, Artificial Sequence
  Description of Artificial Sequence: Synthetic oligonucleotide
  Antisense strand to SEQ ID NO: 165346
ucuaaaguaacaguauaca

SEQ ID NO: 165348 - RNA, 19 nt, Artificial Sequence
  Description of Artificial Sequence: Synthetic oligonucleotide
  Sense strand starting at position 1225 of SEQ ID NO: 2129
guauacuguuacuuuagau

SEQ ID NO: 165349 - RNA, 19 nt, Artificial Sequence
  Description of Artificial Sequence: Synthetic oligonucleotide
  Antisense strand to SEQ ID NO: 165348
aucuaaaguaacaguauac

SEQ ID NO: 165350 - RNA, 19 nt, Artificial Sequence
  Description of Artificial Sequence: Synthetic oligonucleotide
  Sense strand starting at position 1252 of SEQ ID NO: 2129
uuuggauguccugaguagu

SEQ ID NO: 165351 - RNA, 19 nt, Artificial Sequence
  Description of Artificial Sequence: Synthetic oligonucleotide
  Antisense strand to SEQ ID NO: 165350
acuacucaggacauccaaa

SEQ ID NO: 165352 - RNA, 19 nt, Artificial Sequence
  Description of Artificial Sequence: Synthetic oligonucleotide
  Sense strand starting at position 1255 of SEQ ID NO: 2129
ggauguccugaguaguuuc

SEQ ID NO: 165353 - RNA, 19 nt, Artificial Sequence
  Description of Artificial Sequence: Synthetic oligonucleotide
  Antisense strand to SEQ ID NO: 165352
gaaacuacucaggacaucc

SEQ ID NO: 165354 - RNA, 19 nt, Artificial Sequence
  Description of Artificial Sequence: Synthetic oligonucleotide
  Sense strand starting at position 1406 of SEQ ID NO: 2129
gaaauuuagcggcgggcua

SEQ ID NO: 165355 - RNA, 19 nt, Artificial Sequence
  Description of Artificial Sequence: Synthetic oligonucleotide
  Antisense strand to SEQ ID NO: 165354
uagcccgccgcuaaauuuc

SEQ ID NO: 165356 - RNA, 19 nt, Artificial Sequence
  Description of Artificial Sequence: Synthetic oligonucleotide
  Sense strand starting at position 1525 of SEQ ID NO: 2129
gugaaccuaugaguagaga

SEQ ID NO: 165357 - RNA, 19 nt, Artificial Sequence
  Description of Artificial Sequence: Synthetic oligonucleotide
  Antisense strand to SEQ ID NO: 165356
ucucuacucauagguucac

SEQ ID NO: 165358 - RNA, 19 nt, Artificial Sequence
  Description of Artificial Sequence: Synthetic oligonucleotide
  Sense strand starting at position 2154 of SEQ ID NO: 2129
gagguuuaucuaggccaug

SEQ ID NO: 165359 - RNA, 19 nt, Artificial Sequence
  Description of Artificial Sequence: Synthetic oligonucleotide
  Antisense strand to SEQ ID NO: 165358
cauggccuagauaaaccuc

SEQ ID NO: 165360 - RNA, 19 nt, Artificial Sequence
  Description of Artificial Sequence: Synthetic oligonucleotide
  Sense strand starting at position 2609 of SEQ ID NO: 2129
auugacaugggcgacuaua

SEQ ID NO: 165361 - RNA, 19 nt, Artificial Sequence
  Description of Artificial Sequence: Synthetic oligonucleotide
  Antisense strand to SEQ ID NO: 165360
uauagucgcccaugucaau

SEQ ID NO: 165362 - RNA, 19 nt, Artificial Sequence
  Description of Artificial Sequence: Synthetic oligonucleotide
  Sense strand starting at position 2630 of SEQ ID NO: 2129
agggcagccacuuaguauu

SEQ ID NO: 165363 - RNA, 19 nt, Artificial Sequence
  Description of Artificial Sequence: Synthetic oligonucleotide
  Antisense strand to SEQ ID NO: 165362
aauacuaaguggcugcccu

SEQ ID NO: 165364 - RNA, 19 nt, Artificial Sequence
  Description of Artificial Sequence: Synthetic oligonucleotide
  Sense strand starting at position 2636 of SEQ ID NO: 2129
gccacuuaguauuccagga

SEQ ID NO: 165365 - RNA, 19 nt, Artificial Sequence
  Description of Artificial Sequence: Synthetic oligonucleotide
  Antisense strand to SEQ ID NO: 165364
uccuggaauacuaaguggc

SEQ ID NO: 165366 - RNA, 19 nt, Artificial Sequence
  Description of Artificial Sequence: Synthetic oligonucleotide
  Sense strand starting at position 2709 of SEQ ID NO: 2129
ugcuuaaaguccuccaaug

SEQ ID NO: 165367 - RNA, 19 nt, Artificial Sequence
  Description of Artificial Sequence: Synthetic oligonucleotide
  Antisense strand to SEQ ID NO: 165366
cauuggaggacuuuaagca

SEQ ID NO: 165368 - RNA, 19 nt, Artificial Sequence
  Description of Artificial Sequence: Synthetic oligonucleotide
  Sense strand starting at position 2725 of SEQ ID NO: 2129
auggcucgccuuuaaauuu

SEQ ID NO: 165369 - RNA, 19 nt, Artificial Sequence
  Description of Artificial Sequence: Synthetic oligonucleotide
  Antisense strand to SEQ ID NO: 165368
aaauuuaaaggcgagccau

SEQ ID NO: 165370 - RNA, 19 nt, Artificial Sequence
  Description of Artificial Sequence: Synthetic oligonucleotide
  Sense strand starting at position 2734 of SEQ ID NO: 2129
cuuuaaauuuagggugaaa

SEQ ID NO: 165371 - RNA, 19 nt, Artificial Sequence
  Description of Artificial Sequence: Synthetic oligonucleotide
  Antisense strand to SEQ ID NO: 165370
uuucacccuaaauuuaaag

SEQ ID NO: 165372 - RNA, 19 nt, Artificial Sequence
  Description of Artificial Sequence: Synthetic oligonucleotide
  Sense strand starting at position 3191 of SEQ ID NO: 2129
ccauguucccaaggagcuu

SEQ ID NO: 165373 - RNA, 19 nt, Artificial Sequence
  Description of Artificial Sequence: Synthetic oligonucleotide
  Antisense strand to SEQ ID NO: 165372
aagcuccuugggaacaugg

SEQ ID NO: 165374 - RNA, 19 nt, Artificial Sequence
  Description of Artificial Sequence: Synthetic oligonucleotide
  Sense strand starting at position 3253 of SEQ ID NO: 2129
guugaugucuaggcccaaa

SEQ ID NO: 165375 - RNA, 19 nt, Artificial Sequence
  Description of Artificial Sequence: Synthetic oligonucleotide
  Antisense strand to SEQ ID NO: 165374
uuugggccuagacaucaac

SEQ ID NO: 165376 - RNA, 19 nt, Artificial Sequence
  Description of Artificial Sequence: Synthetic oligonucleotide
  Sense strand starting at position 3256 of SEQ ID NO: 2129
gaugucuaggcccaaauga

SEQ ID NO: 165377 - RNA, 19 nt, Artificial Sequence
  Description of Artificial Sequence: Synthetic oligonucleotide
  Antisense strand to SEQ ID NO: 165376
ucauuugggccuagacauc

SEQ ID NO: 165378 - RNA, 19 nt, Artificial Sequence
  Description of Artificial Sequence: Synthetic oligonucleotide
  Sense strand starting at position 3351 of SEQ ID NO: 2129
caacgugugagcgaugaga

SEQ ID NO: 165379 - RNA, 19 nt, Artificial Sequence
  Description of Artificial Sequence: Synthetic oligonucleotide
  Antisense strand to SEQ ID NO: 165378
ucucaucgcucacacguug

SEQ ID NO: 165380 - RNA, 19 nt, Artificial Sequence
  Description of Artificial Sequence: Synthetic oligonucleotide
  Sense strand starting at position 3364 of SEQ ID NO: 2129
augagaagcuugucaucug

SEQ ID NO: 165381 - RNA, 19 nt, Artificial Sequence
  Description of Artificial Sequence: Synthetic oligonucleotide
  Antisense strand to SEQ ID NO: 165380
cagaugacaagcuucucau

SEQ ID NO: 165382 - RNA, 19 nt, Artificial Sequence
  Description of Artificial Sequence: Synthetic oligonucleotide
  Sense strand starting at position 3367 of SEQ ID NO: 2129
agaagcuugucaucuguaa

SEQ ID NO: 165383 - RNA, 19 nt, Artificial Sequence
  Description of Artificial Sequence: Synthetic oligonucleotide
  Antisense strand to SEQ ID NO: 165382
uuacagaugacaagcuucu

SEQ ID NO: 165384 - RNA, 19 nt, Artificial Sequence
  Description of Artificial Sequence: Synthetic oligonucleotide
  Sense strand starting at position 3403 of SEQ ID NO: 2129
aauuaucauggccgugaua

SEQ ID NO: 165385 - RNA, 19 nt, Artificial Sequence
  Description of Artificial Sequence: Synthetic oligonucleotide
  Antisense strand to SEQ ID NO: 165384
uaucacggccaugauaauu

SEQ ID NO: 165386 - RNA, 19 nt, Artificial Sequence
  Description of Artificial Sequence: Synthetic oligonucleotide
  Sense strand starting at position 3406 of SEQ ID NO: 2129
uaucauggccgugauaauu

SEQ ID NO: 165387 - RNA, 19 nt, Artificial Sequence
  Description of Artificial Sequence: Synthetic oligonucleotide
  Antisense strand to SEQ ID NO: 165386
aauuaucacggccaugaua

SEQ ID NO: 165388 - RNA, 19 nt, Artificial Sequence
  Description of Artificial Sequence: Synthetic oligonucleotide
  Sense strand starting at position 3412 of SEQ ID NO: 2129
ggccgugauaauuauguac

SEQ ID NO: 165389 - RNA, 19 nt, Artificial Sequence
  Description of Artificial Sequence: Synthetic oligonucleotide
  Antisense strand to SEQ ID NO: 165388
guacauaauuaucacggcc

SEQ ID NO: 165390 - RNA, 19 nt, Artificial Sequence
  Description of Artificial Sequence: Synthetic oligonucleotide
  Sense strand starting at position 3415 of SEQ ID NO: 2129
cgugauaauuauguacauu

SEQ ID NO: 165391 - RNA, 19 nt, Artificial Sequence
  Description of Artificial Sequence: Synthetic oligonucleotide
  Antisense strand to SEQ ID NO: 165390
aauguacauaauuaucacg

SEQ ID NO: 165392 - RNA, 19 nt, Artificial Sequence
  Description of Artificial Sequence: Synthetic oligonucleotide
  Sense strand starting at position 3491 of SEQ ID NO: 2129
cuugguauccgacaggugu

SEQ ID NO: 165393 - RNA, 19 nt, Artificial Sequence
  Description of Artificial Sequence: Synthetic oligonucleotide
  Antisense strand to SEQ ID NO: 165392
acaccugucggauaccaag

SEQ ID NO: 165394 - RNA, 19 nt, Artificial Sequence
  Description of Artificial Sequence: Synthetic oligonucleotide
  Sense strand starting at position 3530 of SEQ ID NO: 2129
gagauauguuuggucccaa

SEQ ID NO: 165395 - RNA, 19 nt, Artificial Sequence
  Description of Artificial Sequence: Synthetic oligonucleotide
  Antisense strand to SEQ ID NO: 165394
uugggaccaaacauaucuc

SEQ ID NO: 165396 - RNA, 19 nt, Artificial Sequence
  Description of Artificial Sequence: Synthetic oligonucleotide
  Sense strand starting at position 3531 of SEQ ID NO: 2129
agauauguuuggucccaag

SEQ ID NO: 165397 - RNA, 19 nt, Artificial Sequence
  Description of Artificial Sequence: Synthetic oligonucleotide
  Antisense strand to SEQ ID NO: 165396
cuugggaccaaacauaucu

SEQ ID NO: 165398 - RNA, 19 nt, Artificial Sequence
  Description of Artificial Sequence: Synthetic oligonucleotide
  Sense strand starting at position 3736 of SEQ ID NO: 2129
accuaagcucucugggaca

SEQ ID NO: 165399 - RNA, 19 nt, Artificial Sequence
  Description of Artificial Sequence: Synthetic oligonucleotide
  Antisense strand to SEQ ID NO: 165398
ugucccagagagcuuaggu

SEQ ID NO: 165400 - RNA, 19 nt, Artificial Sequence
  Description of Artificial Sequence: Synthetic oligonucleotide
  Sense strand starting at position 3937 of SEQ ID NO: 2129
cgcgaaaugccugccaacu

SEQ ID NO: 165401 - RNA, 19 nt, Artificial Sequence
  Description of Artificial Sequence: Synthetic oligonucleotide
  Antisense strand to SEQ ID NO: 165400
aguuggcaggcauuucgcg

SEQ ID NO: 165402 - RNA, 19 nt, Artificial Sequence
  Description of Artificial Sequence: Synthetic oligonucleotide
  Sense strand starting at position 3915 of SEQ ID NO: 2132
auuccuucuggaggacauu

SEQ ID NO: 165403 - RNA, 19 nt, Artificial Sequence
  Description of Artificial Sequence: Synthetic oligonucleotide
  Antisense strand to SEQ ID NO: 165402
aauguccuccagaaggaau

SEQ ID NO: 165404 - RNA, 19 nt, Artificial Sequence
  Description of Artificial Sequence: Synthetic oligonucleotide
  Sense strand starting at position 3699 of SEQ ID NO: 2132
cugggaaauucucaauuuc

SEQ ID NO: 165405 - RNA, 19 nt, Artificial Sequence
  Description of Artificial Sequence: Synthetic oligonucleotide
  Antisense strand to SEQ ID NO: 165404
gaaauugagaauuucccag

SEQ ID NO: 165406 - RNA, 19 nt, Artificial Sequence
  Description of Artificial Sequence: Synthetic oligonucleotide
  Sense strand starting at position 3370 of SEQ ID NO: 2132
guaaucauagcgcuuuggu

SEQ ID NO: 165407 - RNA, 19 nt, Artificial Sequence
  Description of Artificial Sequence: Synthetic oligonucleotide
  Antisense strand to SEQ ID NO: 165406
accaaagcgcuaugauuac

SEQ ID NO: 165408 - RNA, 19 nt, Artificial Sequence
  Description of Artificial Sequence: Synthetic oligonucleotide
  Sense strand starting at position 3270 of SEQ ID NO: 2132
ucugucucaggucagauua

SEQ ID NO: 165409 - RNA, 19 nt, Artificial Sequence
  Description of Artificial Sequence: Synthetic oligonucleotide
  Antisense strand to SEQ ID NO: 165408
uaaucugaccugagacaga

SEQ ID NO: 165410 - RNA, 19 nt, Artificial Sequence
  Description of Artificial Sequence: Synthetic oligonucleotide
  Sense strand starting at position 3151 of SEQ ID NO: 2132
aguucucuccauuaauggu

SEQ ID NO: 165411 - RNA, 19 nt, Artificial Sequence
  Description of Artificial Sequence: Synthetic oligonucleotide
  Antisense strand to SEQ ID NO: 165410
accauuaauggagagaacu

SEQ ID NO: 165412 - RNA, 19 nt, Artificial Sequence
  Description of Artificial Sequence: Synthetic oligonucleotide
  Sense strand starting at position 3148 of SEQ ID NO: 2132
uggaguucucuccauuaau

SEQ ID NO: 165413 - RNA, 19 nt, Artificial Sequence
  Description of Artificial Sequence: Synthetic oligonucleotide
  Antisense strand to SEQ ID NO: 165412
auuaauggagagaacucca

SEQ ID NO: 165414 - RNA, 19 nt, Artificial Sequence
  Description of Artificial Sequence: Synthetic oligonucleotide
  Sense strand starting at position 3066 of SEQ ID NO: 2132
ugaaaugcucaguauuaaa

SEQ ID NO: 165415 - RNA, 19 nt, Artificial Sequence
  Description of Artificial Sequence: Synthetic oligonucleotide
  Antisense strand to SEQ ID NO: 165414
uuuaauacugagcauuuca

SEQ ID NO: 165416 - RNA, 19 nt, Artificial Sequence
  Description of Artificial Sequence: Synthetic oligonucleotide
  Sense strand starting at position 3065 of SEQ ID NO: 2132
cugaaaugcucaguauuaa

SEQ ID NO: 165417 - RNA, 19 nt, Artificial Sequence
  Description of Artificial Sequence: Synthetic oligonucleotide
  Antisense strand to SEQ ID NO: 165416
uuaauacugagcauuucag

SEQ ID NO: 165418 - RNA, 19 nt, Artificial Sequence
  Description of Artificial Sequence: Synthetic oligonucleotide
  Sense strand starting at position 3054 of SEQ ID NO: 2132
auugcuggucacugaaaug

SEQ ID NO: 165419 - RNA, 19 nt, Artificial Sequence
  Description of Artificial Sequence: Synthetic oligonucleotide
  Antisense strand to SEQ ID NO: 165418
cauuucagugaccagcaau

SEQ ID NO: 165420 - RNA, 19 nt, Artificial Sequence
  Description of Artificial Sequence: Synthetic oligonucleotide
  Sense strand starting at position 3051 of SEQ ID NO: 2132
uacauugcuggucacugaa

SEQ ID NO: 165421 - RNA, 19 nt, Artificial Sequence
  Description of Artificial Sequence: Synthetic oligonucleotide
  Antisense strand to SEQ ID NO: 165420
uucagugaccagcaaugua

SEQ ID NO: 165422 - RNA, 19 nt, Artificial Sequence
  Description of Artificial Sequence: Synthetic oligonucleotide
  Sense strand starting at position 2975 of SEQ ID NO: 2132
auugauaccuaaguauaug

SEQ ID NO: 165423 - RNA, 19 nt, Artificial Sequence
  Description of Artificial Sequence: Synthetic oligonucleotide
  Antisense strand to SEQ ID NO: 165422
cauauacuuagguaucaau

SEQ ID NO: 165424 - RNA, 19 nt, Artificial Sequence
  Description of Artificial Sequence: Synthetic oligonucleotide
  Sense strand starting at position 2912 of SEQ ID NO: 2132
aggaaacuggcauguauuc

SEQ ID NO: 165425 - RNA, 19 nt, Artificial Sequence
  Description of Artificial Sequence: Synthetic oligonucleotide
  Antisense strand to SEQ ID NO: 165424
gaauacaugccaguuuccu

SEQ ID NO: 165426 - RNA, 19 nt, Artificial Sequence
  Description of Artificial Sequence: Synthetic oligonucleotide
  Sense strand starting at position 2769 of SEQ ID NO: 2132
ggugauacccaaggugaga

SEQ ID NO: 165427 - RNA, 19 nt, Artificial Sequence
  Description of Artificial Sequence: Synthetic oligonucleotide
  Antisense strand to SEQ ID NO: 165426
ucucaccuuggguaucacc

SEQ ID NO: 165428 - RNA, 19 nt, Artificial Sequence
  Description of Artificial Sequence: Synthetic oligonucleotide
  Sense strand starting at position 2479 of SEQ ID NO: 2132
uugagacccuuuccuguaa

SEQ ID NO: 165429 - RNA, 19 nt, Artificial Sequence
  Description of Artificial Sequence: Synthetic oligonucleotide
  Antisense strand to SEQ ID NO: 165428
uuacaggaaagggucucaa

SEQ ID NO: 165430 - RNA, 19 nt, Artificial Sequence
  Description of Artificial Sequence: Synthetic oligonucleotide
  Sense strand starting at position 2241 of SEQ ID NO: 2132
aauguuaucccagaugguc

SEQ ID NO: 165431 - RNA, 19 nt, Artificial Sequence
  Description of Artificial Sequence: Synthetic oligonucleotide
  Antisense strand to SEQ ID NO: 165430
gaccaucugggauaacauu

SEQ ID NO: 165432 - RNA, 19 nt, Artificial Sequence
  Description of Artificial Sequence: Synthetic oligonucleotide
  Sense strand starting at position 2237 of SEQ ID NO: 2132
ccagaauguuaucccagau

SEQ ID NO: 165433 - RNA, 19 nt, Artificial Sequence
  Description of Artificial Sequence: Synthetic oligonucleotide
  Antisense strand to SEQ ID NO: 165432
aucugggauaacauucugg

SEQ ID NO: 165434 - RNA, 19 nt, Artificial Sequence
  Description of Artificial Sequence: Synthetic oligonucleotide
  Sense strand starting at position 2236 of SEQ ID NO: 2132
accagaauguuaucccaga

SEQ ID NO: 165435 - RNA, 19 nt, Artificial Sequence
  Description of Artificial Sequence: Synthetic oligonucleotide
  Antisense strand to SEQ ID NO: 165434
ucugggauaacauucuggu

SEQ ID NO: 165436 - RNA, 19 nt, Artificial Sequence
  Description of Artificial Sequence: Synthetic oligonucleotide
  Sense strand starting at position 2039 of SEQ ID NO: 2132
agagcauucuuagucacag

SEQ ID NO: 165437 - RNA, 19 nt, Artificial Sequence
  Description of Artificial Sequence: Synthetic oligonucleotide
  Antisense strand to SEQ ID NO: 165436
cugugacuaagaaugcucu

SEQ ID NO: 165438 - RNA, 19 nt, Artificial Sequence
  Description of Artificial Sequence: Synthetic oligonucleotide
  Sense strand starting at position 2036 of SEQ ID NO: 2132
auuagagcauucuuaguca

SEQ ID NO: 165439 - RNA, 19 nt, Artificial Sequence
  Description of Artificial Sequence: Synthetic oligonucleotide
  Antisense strand to SEQ ID NO: 165438
ugacuaagaaugcucuaau

SEQ ID NO: 165440 - RNA, 19 nt, Artificial Sequence
  Description of Artificial Sequence: Synthetic oligonucleotide
  Sense strand starting at position 1857 of SEQ ID NO: 2132
gagaguagaagcuguagaa

SEQ ID NO: 165441 - RNA, 19 nt, Artificial Sequence
  Description of Artificial Sequence: Synthetic oligonucleotide
  Antisense strand to SEQ ID NO: 165440
uucuacagcuucuacucuc

SEQ ID NO: 165442 - RNA, 19 nt, Artificial Sequence
  Description of Artificial Sequence: Synthetic oligonucleotide
  Sense strand starting at position 1816 of SEQ ID NO: 2132
ucuaacuugcuaggaaacu

SEQ ID NO: 165443 - RNA, 19 nt, Artificial Sequence
  Description of Artificial Sequence: Synthetic oligonucleotide
  Antisense strand to SEQ ID NO: 165442
aguuuccuagcaaguuaga

SEQ ID NO: 165444 - RNA, 19 nt, Artificial Sequence
  Description of Artificial Sequence: Synthetic oligonucleotide
  Sense strand starting at position 1801 of SEQ ID NO: 2132
uggagagcucacuacucua

SEQ ID NO: 165445 - RNA, 19 nt, Artificial Sequence
  Description of Artificial Sequence: Synthetic oligonucleotide
  Antisense strand to SEQ ID NO: 165444
uagaguagugagcucucca

SEQ ID NO: 165446 - RNA, 19 nt, Artificial Sequence
  Description of Artificial Sequence: Synthetic oligonucleotide
  Sense strand starting at position 1481 of SEQ ID NO: 2132
uaguguaaaguugggauca

SEQ ID NO: 165447 - RNA, 19 nt, Artificial Sequence
  Description of Artificial Sequence: Synthetic oligonucleotide
  Antisense strand to SEQ ID NO: 165446
ugaucccaacuuuacacua

SEQ ID NO: 165448 - RNA, 19 nt, Artificial Sequence
  Description of Artificial Sequence: Synthetic oligonucleotide
  Sense strand starting at position 1440 of SEQ ID NO: 2132
aagauagguguaugauaau

SEQ ID NO: 165449 - RNA, 19 nt, Artificial Sequence
  Description of Artificial Sequence: Synthetic oligonucleotide
  Antisense strand to SEQ ID NO: 165448
auuaucauacaccuaucuu

SEQ ID NO: 165450 - RNA, 19 nt, Artificial Sequence
  Description of Artificial Sequence: Synthetic oligonucleotide
  Sense strand starting at position 1192 of SEQ ID NO: 2132
ugauacaacucuccaguga

SEQ ID NO: 165451 - RNA, 19 nt, Artificial Sequence
  Description of Artificial Sequence: Synthetic oligonucleotide
  Antisense strand to SEQ ID NO: 165450
ucacuggagaguuguauca

SEQ ID NO: 165452 - RNA, 19 nt, Artificial Sequence
  Description of Artificial Sequence: Synthetic oligonucleotide
  Sense strand starting at position 1178 of SEQ ID NO: 2132
ccagaaagucccugugaua

SEQ ID NO: 165453 - RNA, 19 nt, Artificial Sequence
  Description of Artificial Sequence: Synthetic oligonucleotide
  Antisense strand to SEQ ID NO: 165452
uaucacagggacuuucugg

SEQ ID NO: 165454 - RNA, 19 nt, Artificial Sequence
  Description of Artificial Sequence: Synthetic oligonucleotide
  Sense strand starting at position 1177 of SEQ ID NO: 2132
uccagaaagucccugugau

SEQ ID NO: 165455 - RNA, 19 nt, Artificial Sequence
  Description of Artificial Sequence: Synthetic oligonucleotide
  Antisense strand to SEQ ID NO: 165454
aucacagggacuuucugga

SEQ ID NO: 165456 - RNA, 19 nt, Artificial Sequence
  Description of Artificial Sequence: Synthetic oligonucleotide
  Sense strand starting at position 959 of SEQ ID NO: 2132
aaguaagcucgagaguaag

SEQ ID NO: 165457 - RNA, 19 nt, Artificial Sequence
  Description of Artificial Sequence: Synthetic oligonucleotide
  Antisense strand to SEQ ID NO: 165456
cuuacucucgagcuuacuu

SEQ ID NO: 165458 - RNA, 19 nt, Artificial Sequence
  Description of Artificial Sequence: Synthetic oligonucleotide
  Sense strand starting at position 957 of SEQ ID NO: 2132
auaaguaagcucgagagua

SEQ ID NO: 165459 - RNA, 19 nt, Artificial Sequence
  Description of Artificial Sequence: Synthetic oligonucleotide
  Antisense strand to SEQ ID NO: 165458
uacucucgagcuuacuuau

SEQ ID NO: 165460 - RNA, 19 nt, Artificial Sequence
  Description of Artificial Sequence: Synthetic oligonucleotide
  Sense strand starting at position 931 of SEQ ID NO: 2132
aguggauggcuguaucacu

SEQ ID NO: 165461 - RNA, 19 nt, Artificial Sequence
  Description of Artificial Sequence: Synthetic oligonucleotide
  Antisense strand to SEQ ID NO: 165460
agugauacagccauccacu

SEQ ID NO: 165462 - RNA, 19 nt, Artificial Sequence
  Description of Artificial Sequence: Synthetic oligonucleotide
  Sense strand starting at position 814 of SEQ ID NO: 2132
ggagcauuggguugauauu

SEQ ID NO: 165463 - RNA, 19 nt, Artificial Sequence
  Description of Artificial Sequence: Synthetic oligonucleotide
  Antisense strand to SEQ ID NO: 165462
aauaucaacccaaugcucc

SEQ ID NO: 165464 - RNA, 19 nt, Artificial Sequence
  Description of Artificial Sequence: Synthetic oligonucleotide
  Sense strand starting at position 668 of SEQ ID NO: 2132
guguuaaccagggagaugu

SEQ ID NO: 165465 - RNA, 19 nt, Artificial Sequence
  Description of Artificial Sequence: Synthetic oligonucleotide
  Antisense strand to SEQ ID NO: 165464
acaucucccugguuaacac

SEQ ID NO: 165466 - RNA, 19 nt, Artificial Sequence
  Description of Artificial Sequence: Synthetic oligonucleotide
  Sense strand starting at position 667 of SEQ ID NO: 2132
gguguuaaccagggagaug

SEQ ID NO: 165467 - RNA, 19 nt, Artificial Sequence
  Description of Artificial Sequence: Synthetic oligonucleotide
  Antisense strand to SEQ ID NO: 165466
caucucccugguuaacacc

SEQ ID NO: 165468 - RNA, 19 nt, Artificial Sequence
  Description of Artificial Sequence: Synthetic oligonucleotide
  Sense strand starting at position 666 of SEQ ID NO: 2132
ggguguuaaccagggagau

SEQ ID NO: 165469 - RNA, 19 nt, Artificial Sequence
  Description of Artificial Sequence: Synthetic oligonucleotide
  Antisense strand to SEQ ID NO: 165468
aucucccugguuaacaccc

SEQ ID NO: 165470 - RNA, 19 nt, Artificial Sequence
  Description of Artificial Sequence: Synthetic oligonucleotide
  Sense strand starting at position 655 of SEQ ID NO: 2132
aaaccauucgaggguguua

SEQ ID NO: 165471 - RNA, 19 nt, Artificial Sequence
  Description of Artificial Sequence: Synthetic oligonucleotide
  Antisense strand to SEQ ID NO: 165470
uaacacccucgaaugguuu

SEQ ID NO: 165472 - RNA, 19 nt, Artificial Sequence
  Description of Artificial Sequence: Synthetic oligonucleotide
  Sense strand starting at position 525 of SEQ ID NO: 2132
ucuggaauugagugagcca

SEQ ID NO: 165473 - RNA, 19 nt, Artificial Sequence
  Description of Artificial Sequence: Synthetic oligonucleotide
  Antisense strand to SEQ ID NO: 165472
uggcucacucaauuccaga

SEQ ID NO: 165474 - RNA, 19 nt, Artificial Sequence
  Description of Artificial Sequence: Synthetic oligonucleotide
  Sense strand starting at position 521 of SEQ ID NO: 2132
agugucuggaauugaguga

SEQ ID NO: 165475 - RNA, 19 nt, Artificial Sequence
  Description of Artificial Sequence: Synthetic oligonucleotide
  Antisense strand to SEQ ID NO: 165474
ucacucaauuccagacacu

SEQ ID NO: 165476 - RNA, 19 nt, Artificial Sequence
  Description of Artificial Sequence: Synthetic oligonucleotide
  Sense strand starting at position 449 of SEQ ID NO: 2132
ggagaagcccugcaaaguu

SEQ ID NO: 165477 - RNA, 19 nt, Artificial Sequence
  Description of Artificial Sequence: Synthetic oligonucleotide
  Antisense strand to SEQ ID NO: 165476
aacuuugcagggcuucucc

SEQ ID NO: 165478 - RNA, 19 nt, Artificial Sequence
  Description of Artificial Sequence: Synthetic oligonucleotide
  Sense strand starting at position 364 of SEQ ID NO: 2132
cggagaauguggcuauaau

SEQ ID NO: 165479 - RNA, 19 nt, Artificial Sequence
  Description of Artificial Sequence: Synthetic oligonucleotide
  Antisense strand to SEQ ID NO: 165478
auuauagccacauucuccg

SEQ ID NO: 165480 - RNA, 19 nt, Artificial Sequence
  Description of Artificial Sequence: Synthetic oligonucleotide
  Sense strand starting at position 158 of SEQ ID NO: 2132
ggauuaagacgccaagagu

SEQ ID NO: 165481 - RNA, 19 nt, Artificial Sequence
  Description of Artificial Sequence: Synthetic oligonucleotide
  Antisense strand to SEQ ID NO: 165480
acucuuggcgucuuaaucc

SEQ ID NO: 165482 - RNA, 19 nt, Artificial Sequence
  Description of Artificial Sequence: Synthetic oligonucleotide
  Sense strand starting at position 3983 of SEQ ID NO: 2131
aaguaagcucgagaguaag

SEQ ID NO: 165483 - RNA, 19 nt, Artificial Sequence
  Description of Artificial Sequence: Synthetic oligonucleotide
  Antisense strand to SEQ ID NO: 165482
cuuacucucgagcuuacuu

SEQ ID NO: 165484 - RNA, 19 nt, Artificial Sequence
  Description of Artificial Sequence: Synthetic oligonucleotide
  Sense strand starting at position 3981 of SEQ ID NO: 2131
auaaguaagcucgagagua

SEQ ID NO: 165485 - RNA, 19 nt, Artificial Sequence
  Description of Artificial Sequence: Synthetic oligonucleotide
  Antisense strand to SEQ ID NO: 165484
uacucucgagcuuacuuau

SEQ ID NO: 165486 - RNA, 19 nt, Artificial Sequence
  Description of Artificial Sequence: Synthetic oligonucleotide
  Sense strand starting at position 3955 of SEQ ID NO: 2131
aguggauggcuguaucacu

SEQ ID NO: 165487 - RNA, 19 nt, Artificial Sequence
  Description of Artificial Sequence: Synthetic oligonucleotide
  Antisense strand to SEQ ID NO: 165486
agugauacagccauccacu

SEQ ID NO: 165488 - RNA, 19 nt, Artificial Sequence
  Description of Artificial Sequence: Synthetic oligonucleotide
  Sense strand starting at position 3838 of SEQ ID NO: 2131
ggagcauuggguugauauu

SEQ ID NO: 165489 - RNA, 19 nt, Artificial Sequence
  Description of Artificial Sequence: Synthetic oligonucleotide
  Antisense strand to SEQ ID NO: 165488
aauaucaacccaaugcucc

SEQ ID NO: 165490 - RNA, 19 nt, Artificial Sequence
  Description of Artificial Sequence: Synthetic oligonucleotide
  Sense strand starting at position 3692 of SEQ ID NO: 2131
guguuaaccagggagaugu

SEQ ID NO: 165491 - RNA, 19 nt, Artificial Sequence
  Description of Artificial Sequence: Synthetic oligonucleotide
  Antisense strand to SEQ ID NO: 165490
acaucucccugguuaacac

SEQ ID NO: 165492 - RNA, 19 nt, Artificial Sequence
  Description of Artificial Sequence: Synthetic oligonucleotide
  Sense strand starting at position 3691 of SEQ ID NO: 2131
gguguuaaccagggagaug

SEQ ID NO: 165493 - RNA, 19 nt, Artificial Sequence
  Description of Artificial Sequence: Synthetic oligonucleotide
  Antisense strand to SEQ ID NO: 165492
caucucccugguuaacacc

SEQ ID NO: 165494 - RNA, 19 nt, Artificial Sequence
  Description of Artificial Sequence: Synthetic oligonucleotide
  Sense strand starting at position 3690 of SEQ ID NO: 2131
ggguguuaaccagggagau

SEQ ID NO: 165495 - RNA, 19 nt, Artificial Sequence
  Description of Artificial Sequence: Synthetic oligonucleotide
  Antisense strand to SEQ ID NO: 165494
aucucccugguuaacaccc

SEQ ID NO: 165496 - RNA, 19 nt, Artificial Sequence
  Description of Artificial Sequence: Synthetic oligonucleotide
  Sense strand starting at position 3679 of SEQ ID NO: 2131
aaaccauucgaggguguua

SEQ ID NO: 165497 - RNA, 19 nt, Artificial Sequence
  Description of Artificial Sequence: Synthetic oligonucleotide
  Antisense strand to SEQ ID NO: 165496
uaacacccucgaaugguuu

SEQ ID NO: 165498 - RNA, 19 nt, Artificial Sequence
  Description of Artificial Sequence: Synthetic oligonucleotide
  Sense strand starting at position 3549 of SEQ ID NO: 2131
ucuggaauugagugagcca

SEQ ID NO: 165499 - RNA, 19 nt, Artificial Sequence
  Description of Artificial Sequence: Synthetic oligonucleotide
  Antisense strand to SEQ ID NO: 165498
uggcucacucaauuccaga

SEQ ID NO: 165500 - RNA, 19 nt, Artificial Sequence
  Description of Artificial Sequence: Synthetic oligonucleotide
  Sense strand starting at position 3545 of SEQ ID NO: 2131
agugucuggaauugaguga

SEQ ID NO: 165501 - RNA, 19 nt, Artificial Sequence
  Description of Artificial Sequence: Synthetic oligonucleotide
  Antisense strand to SEQ ID NO: 165500
ucacucaauuccagacacu

SEQ ID NO: 165502 - RNA, 19 nt, Artificial Sequence
  Description of Artificial Sequence: Synthetic oligonucleotide
  Sense strand starting at position 3473 of SEQ ID NO: 2131
ggagaagcccugcaaaguu

SEQ ID NO: 165503 - RNA, 19 nt, Artificial Sequence
  Description of Artificial Sequence: Synthetic oligonucleotide
  Antisense strand to SEQ ID NO: 165502
aacuuugcagggcuucucc

SEQ ID NO: 165504 - RNA, 19 nt, Artificial Sequence
  Description of Artificial Sequence: Synthetic oligonucleotide
  Sense strand starting at position 3388 of SEQ ID NO: 2131
cggagaauguggcuauaau

SEQ ID NO: 165505 - RNA, 19 nt, Artificial Sequence
  Description of Artificial Sequence: Synthetic oligonucleotide
  Antisense strand to SEQ ID NO: 165504
auuauagccacauucuccg

SEQ ID NO: 165506 - RNA, 19 nt, Artificial Sequence
  Description of Artificial Sequence: Synthetic oligonucleotide
  Sense strand starting at position 3182 of SEQ ID NO: 2131
ggauuaagacgccaagagu

SEQ ID NO: 165507 - RNA, 19 nt, Artificial Sequence
  Description of Artificial Sequence: Synthetic oligonucleotide
  Antisense strand to SEQ ID NO: 165506
acucuuggcgucuuaaucc

SEQ ID NO: 165508 - RNA, 19 nt, Artificial Sequence
  Description of Artificial Sequence: Synthetic oligonucleotide
  Sense strand starting at position 2849 of SEQ ID NO: 2131
auuccauacguuggaaacu

SEQ ID NO: 165509 - RNA, 19 nt, Artificial Sequence
  Description of Artificial Sequence: Synthetic oligonucleotide
  Antisense strand to SEQ ID NO: 165508
aguuuccaacguauggaau

SEQ ID NO: 165510 - RNA, 19 nt, Artificial Sequence
  Description of Artificial Sequence: Synthetic oligonucleotide
  Sense strand starting at position 2799 of SEQ ID NO: 2131
uguugaggguggucagaua

SEQ ID NO: 165511 - RNA, 19 nt, Artificial Sequence
  Description of Artificial Sequence: Synthetic oligonucleotide
  Antisense strand to SEQ ID NO: 165510
uaucugaccacccucaaca

SEQ ID NO: 165512 - RNA, 19 nt, Artificial Sequence
  Description of Artificial Sequence: Synthetic oligonucleotide
  Sense strand starting at position 2764 of SEQ ID NO: 2131
aggauuauugcugaaagca

SEQ ID NO: 165513 - RNA, 19 nt, Artificial Sequence
  Description of Artificial Sequence: Synthetic oligonucleotide
  Antisense strand to SEQ ID NO: 165512
ugcuuucagcaauaauccu

SEQ ID NO: 165514 - RNA, 19 nt, Artificial Sequence
  Description of Artificial Sequence: Synthetic oligonucleotide
  Sense strand starting at position 2762 of SEQ ID NO: 2131
acaggauuauugcugaaag

SEQ ID NO: 165515 - RNA, 19 nt, Artificial Sequence
  Description of Artificial Sequence: Synthetic oligonucleotide
  Antisense strand to SEQ ID NO: 165514
cuuucagcaauaauccugu

SEQ ID NO: 165516 - RNA, 19 nt, Artificial Sequence
  Description of Artificial Sequence: Synthetic oligonucleotide
  Sense strand starting at position 2737 of SEQ ID NO: 2131
agaaguuucuugcuaaacu

SEQ ID NO: 165517 - RNA, 19 nt, Artificial Sequence
  Description of Artificial Sequence: Synthetic oligonucleotide
  Antisense strand to SEQ ID NO: 165516
aguuuagcaagaaacuucu

SEQ ID NO: 165518 - RNA, 19 nt, Artificial Sequence
  Description of Artificial Sequence: Synthetic oligonucleotide
  Sense strand starting at position 2609 of SEQ ID NO: 2131
cagaucuugcagugaagaa

SEQ ID NO: 165519 - RNA, 19 nt, Artificial Sequence
  Description of Artificial Sequence: Synthetic oligonucleotide
  Antisense strand to SEQ ID NO: 165518
uucuucacugcaagaucug

SEQ ID NO: 165520 - RNA, 19 nt, Artificial Sequence
  Description of Artificial Sequence: Synthetic oligonucleotide
  Sense strand starting at position 2570 of SEQ ID NO: 2131
aagagagcccauggugaua

SEQ ID NO: 165521 - RNA, 19 nt, Artificial Sequence
  Description of Artificial Sequence: Synthetic oligonucleotide
  Antisense strand to SEQ ID NO: 165520
uaucaccaugggcucucuu

SEQ ID NO: 165522 - RNA, 19 nt, Artificial Sequence
  Description of Artificial Sequence: Synthetic oligonucleotide
  Sense strand starting at position 2556 of SEQ ID NO: 2131
ggcagacuuuauguaagag

SEQ ID NO: 165523 - RNA, 19 nt, Artificial Sequence
  Description of Artificial Sequence: Synthetic oligonucleotide
  Antisense strand to SEQ ID NO: 165522
cucuuacauaaagucugcc

SEQ ID NO: 165524 - RNA, 19 nt, Artificial Sequence
  Description of Artificial Sequence: Synthetic oligonucleotide
  Sense strand starting at position 2553 of SEQ ID NO: 2131
uaaggcagacuuuauguaa

SEQ ID NO: 165525 - RNA, 19 nt, Artificial Sequence
  Description of Artificial Sequence: Synthetic oligonucleotide
  Antisense strand to SEQ ID NO: 165524
uuacauaaagucugccuua

SEQ ID NO: 165526 - RNA, 19 nt, Artificial Sequence
  Description of Artificial Sequence: Synthetic oligonucleotide
  Sense strand starting at position 2107 of SEQ ID NO: 2131
cgcgauauucugucugcag

SEQ ID NO: 165527 - RNA, 19 nt, Artificial Sequence
  Description of Artificial Sequence: Synthetic oligonucleotide
  Antisense strand to SEQ ID NO: 165526
cugcagacagaauaucgcg

SEQ ID NO: 165528 - RNA, 19 nt, Artificial Sequence
  Description of Artificial Sequence: Synthetic oligonucleotide
  Sense strand starting at position 2084 of SEQ ID NO: 2131
gccaucuuggcugaccaau

SEQ ID NO: 165529 - RNA, 19 nt, Artificial Sequence
  Description of Artificial Sequence: Synthetic oligonucleotide
  Antisense strand to SEQ ID NO: 165528
auuggucagccaagauggc

SEQ ID NO: 165530 - RNA, 19 nt, Artificial Sequence
  Description of Artificial Sequence: Synthetic oligonucleotide
  Sense strand starting at position 2010 of SEQ ID NO: 2131
gaugcaacucucgcgugau

SEQ ID NO: 165531 - RNA, 19 nt, Artificial Sequence
  Description of Artificial Sequence: Synthetic oligonucleotide
  Antisense strand to SEQ ID NO: 165530
aucacgcgagaguugcauc

SEQ ID NO: 165532 - RNA, 19 nt, Artificial Sequence
  Description of Artificial Sequence: Synthetic oligonucleotide
  Sense strand starting at position 1640 of SEQ ID NO: 2131
gcuccuuucgcuguauagu

SEQ ID NO: 165533 - RNA, 19 nt, Artificial Sequence
  Description of Artificial Sequence: Synthetic oligonucleotide
  Antisense strand to SEQ ID NO: 165532
acuauacagcgaaaggagc

SEQ ID NO: 165534 - RNA, 19 nt, Artificial Sequence
  Description of Artificial Sequence: Synthetic oligonucleotide
  Sense strand starting at position 1389 of SEQ ID NO: 2131
acagacgcccgagaugauu

SEQ ID NO: 165535 - RNA, 19 nt, Artificial Sequence
  Description of Artificial Sequence: Synthetic oligonucleotide
  Antisense strand to SEQ ID NO: 165534
aaucaucucgggcgucugu

SEQ ID NO: 165536 - RNA, 19 nt, Artificial Sequence
  Description of Artificial Sequence: Synthetic oligonucleotide
  Sense strand starting at position 1100 of SEQ ID NO: 2131
aaggaauguuggguccuaa

SEQ ID NO: 165537 - RNA, 19 nt, Artificial Sequence
  Description of Artificial Sequence: Synthetic oligonucleotide
  Antisense strand to SEQ ID NO: 165536
uuaggacccaacauuccuu

SEQ ID NO: 165538 - RNA, 19 nt, Artificial Sequence
  Description of Artificial Sequence: Synthetic oligonucleotide
  Sense strand starting at position 1040 of SEQ ID NO: 2131
uagucaguuccagacuaug

SEQ ID NO: 165539 - RNA, 19 nt, Artificial Sequence
  Description of Artificial Sequence: Synthetic oligonucleotide
  Antisense strand to SEQ ID NO: 165538
cauagucuggaacugacua

SEQ ID NO: 165540 - RNA, 19 nt, Artificial Sequence
  Description of Artificial Sequence: Synthetic oligonucleotide
  Sense strand starting at position 931 of SEQ ID NO: 2131
ggaaccugcucauuaagaa

SEQ ID NO: 165541 - RNA, 19 nt, Artificial Sequence
  Description of Artificial Sequence: Synthetic oligonucleotide
  Antisense strand to SEQ ID NO: 165540
uucuuaaugagcagguucc

SEQ ID NO: 165542 - RNA, 19 nt, Artificial Sequence
  Description of Artificial Sequence: Synthetic oligonucleotide
  Sense strand starting at position 867 of SEQ ID NO: 2131
ucauuaacuuggcugauca

SEQ ID NO: 165543 - RNA, 19 nt, Artificial Sequence
  Description of Artificial Sequence: Synthetic oligonucleotide
  Antisense strand to SEQ ID NO: 165542
ugaucagccaaguuaauga

SEQ ID NO: 165544 - RNA, 19 nt, Artificial Sequence
  Description of Artificial Sequence: Synthetic oligonucleotide
  Sense strand starting at position 834 of SEQ ID NO: 2131
guacauuaugcuuggacaa

SEQ ID NO: 165545 - RNA, 19 nt, Artificial Sequence
  Description of Artificial Sequence: Synthetic oligonucleotide
  Antisense strand to SEQ ID NO: 165544
uuguccaagcauaauguac

SEQ ID NO: 165546 - RNA, 19 nt, Artificial Sequence
  Description of Artificial Sequence: Synthetic oligonucleotide
  Sense strand starting at position 833 of SEQ ID NO: 2131
gguacauuaugcuuggaca

SEQ ID NO: 165547 - RNA, 19 nt, Artificial Sequence
  Description of Artificial Sequence: Synthetic oligonucleotide
  Antisense strand to SEQ ID NO: 165546
uguccaagcauaauguacc

SEQ ID NO: 165548 - RNA, 19 nt, Artificial Sequence
  Description of Artificial Sequence: Synthetic oligonucleotide
  Sense strand starting at position 822 of SEQ ID NO: 2131
ugguaugaauugguacauu

SEQ ID NO: 165549 - RNA, 19 nt, Artificial Sequence
  Description of Artificial Sequence: Synthetic oligonucleotide
  Antisense strand to SEQ ID NO: 165548
aauguaccaauucauacca

SEQ ID NO: 165550 - RNA, 19 nt, Artificial Sequence
  Description of Artificial Sequence: Synthetic oligonucleotide
  Sense strand starting at position 821 of SEQ ID NO: 2131
uugguaugaauugguacau

SEQ ID NO: 165551 - RNA, 19 nt, Artificial Sequence
  Description of Artificial Sequence: Synthetic oligonucleotide
  Antisense strand to SEQ ID NO: 165550
auguaccaauucauaccaa

SEQ ID NO: 165552 - RNA, 19 nt, Artificial Sequence
  Description of Artificial Sequence: Synthetic oligonucleotide
  Sense strand starting at position 820 of SEQ ID NO: 2131
uuugguaugaauugguaca

SEQ ID NO: 165553 - RNA, 19 nt, Artificial Sequence
  Description of Artificial Sequence: Synthetic oligonucleotide
  Antisense strand to SEQ ID NO: 165552
uguaccaauucauaccaaa

SEQ ID NO: 165554 - RNA, 19 nt, Artificial Sequence
  Description of Artificial Sequence: Synthetic oligonucleotide
  Sense strand starting at position 646 of SEQ ID NO: 2131
cuccuaaauggucaguguu

SEQ ID NO: 165555 - RNA, 19 nt, Artificial Sequence
  Description of Artificial Sequence: Synthetic oligonucleotide
  Antisense strand to SEQ ID NO: 165554
aacacugaccauuuaggag

SEQ ID NO: 165556 - RNA, 19 nt, Artificial Sequence
  Description of Artificial Sequence: Synthetic oligonucleotide
  Sense strand starting at position 470 of SEQ ID NO: 2131
uucgucagaggguaucuau

SEQ ID NO: 165557 - RNA, 19 nt, Artificial Sequence
  Description of Artificial Sequence: Synthetic oligonucleotide
  Antisense strand to SEQ ID NO: 165556
auagauacccucugacgaa

SEQ ID NO: 165558 - RNA, 19 nt, Artificial Sequence
  Description of Artificial Sequence: Synthetic oligonucleotide
  Sense strand starting at position 428 of SEQ ID NO: 2131
ggccucuauguggaaauua

SEQ ID NO: 165559 - RNA, 19 nt, Artificial Sequence
  Description of Artificial Sequence: Synthetic oligonucleotide
  Antisense strand to SEQ ID NO: 165558
uaauuuccacauagaggcc

SEQ ID NO: 165560 - RNA, 19 nt, Artificial Sequence
  Description of Artificial Sequence: Synthetic oligonucleotide
  Sense strand starting at position 81 of SEQ ID NO: 2131
gcuuaaauguguccauuug

SEQ ID NO: 165561 - RNA, 19 nt, Artificial Sequence
  Description of Artificial Sequence: Synthetic oligonucleotide
  Antisense strand to SEQ ID NO: 165560
caaauggacacauuuaagc

SEQ ID NO: 165562 - RNA, 19 nt, Artificial Sequence
  Description of Artificial Sequence: Synthetic oligonucleotide
  Sense strand starting at position 3828 of SEQ ID NO: 2133
uucuuagaaucuguaguuu

SEQ ID NO: 165563 - RNA, 19 nt, Artificial Sequence
  Description of Artificial Sequence: Synthetic oligonucleotide
  Antisense strand to SEQ ID NO: 165562
aaacuacagauucuaagaa

SEQ ID NO: 165564 - RNA, 19 nt, Artificial Sequence
  Description of Artificial Sequence: Synthetic oligonucleotide
  Sense strand starting at position 3819 of SEQ ID NO: 2133
ccuuaccguuucuuagaau

SEQ ID NO: 165565 - RNA, 19 nt, Artificial Sequence
  Description of Artificial Sequence: Synthetic oligonucleotide
  Antisense strand to SEQ ID NO: 165564
auucuaagaaacgguaagg

SEQ ID NO: 165566 - RNA, 19 nt, Artificial Sequence
  Description of Artificial Sequence: Synthetic oligonucleotide
  Sense strand starting at position 3818 of SEQ ID NO: 2133
accuuaccguuucuuagaa

SEQ ID NO: 165567 - RNA, 19 nt, Artificial Sequence
  Description of Artificial Sequence: Synthetic oligonucleotide
  Antisense strand to SEQ ID NO: 165566
uucuaagaaacgguaaggu

SEQ ID NO: 165568 - RNA, 19 nt, Artificial Sequence
  Description of Artificial Sequence: Synthetic oligonucleotide
  Sense strand starting at position 3419 of SEQ ID NO: 2133
gagaauuuaugagagcauu

SEQ ID NO: 165569 - RNA, 19 nt, Artificial Sequence
  Description of Artificial Sequence: Synthetic oligonucleotide
  Antisense strand to SEQ ID NO: 165568
aaugcucucauaaauucuc

SEQ ID NO: 165570 - RNA, 19 nt, Artificial Sequence
  Description of Artificial Sequence: Synthetic oligonucleotide
  Sense strand starting at position 3417 of SEQ ID NO: 2133
uggagaauuuaugagagca

SEQ ID NO: 165571 - RNA, 19 nt, Artificial Sequence
  Description of Artificial Sequence: Synthetic oligonucleotide
  Antisense strand to SEQ ID NO: 165570
ugcucucauaaauucucca

SEQ ID NO: 165572 - RNA, 19 nt, Artificial Sequence
  Description of Artificial Sequence: Synthetic oligonucleotide
  Sense strand starting at position 3392 of SEQ ID NO: 2133
aagggugacuaucucuauu

SEQ ID NO: 165573 - RNA, 19 nt, Artificial Sequence
  Description of Artificial Sequence: Synthetic oligonucleotide
  Antisense strand to SEQ ID NO: 165572
aauagagauagucacccuu

SEQ ID NO: 165574 - RNA, 19 nt, Artificial Sequence
  Description of Artificial Sequence: Synthetic oligonucleotide
  Sense strand starting at position 3105 of SEQ ID NO: 2133
uguauauggccuuaggauu

SEQ ID NO: 165575 - RNA, 19 nt, Artificial Sequence
  Description of Artificial Sequence: Synthetic oligonucleotide
  Antisense strand to SEQ ID NO: 165574
aauccuaaggccauauaca

SEQ ID NO: 165576 - RNA, 19 nt, Artificial Sequence
  Description of Artificial Sequence: Synthetic oligonucleotide
  Sense strand starting at position 3093 of SEQ ID NO: 2133
agugaaugagccuguauau

SEQ ID NO: 165577 - RNA, 19 nt, Artificial Sequence
  Description of Artificial Sequence: Synthetic oligonucleotide
  Antisense strand to SEQ ID NO: 165576
auauacaggcucauucacu

SEQ ID NO: 165578 - RNA, 19 nt, Artificial Sequence
  Description of Artificial Sequence: Synthetic oligonucleotide
  Sense strand starting at position 3064 of SEQ ID NO: 2133
gcugcuugccuggaugaaa

SEQ ID NO: 165579 - RNA, 19 nt, Artificial Sequence
  Description of Artificial Sequence: Synthetic oligonucleotide
  Antisense strand to SEQ ID NO: 165578
uuucauccaggcaagcagc

SEQ ID NO: 165580 - RNA, 19 nt, Artificial Sequence
  Description of Artificial Sequence: Synthetic oligonucleotide
  Sense strand starting at position 2987 of SEQ ID NO: 2133
gcguuuccuguguucuaca

SEQ ID NO: 165581 - RNA, 19 nt, Artificial Sequence
  Description of Artificial Sequence: Synthetic oligonucleotide
  Antisense strand to SEQ ID NO: 165580
uguagaacacaggaaacgc

SEQ ID NO: 165582 - RNA, 19 nt, Artificial Sequence
  Description of Artificial Sequence: Synthetic oligonucleotide
  Sense strand starting at position 2903 of SEQ ID NO: 2133
uuuguaagccuauguuaaa

SEQ ID NO: 165583 - RNA, 19 nt, Artificial Sequence
  Description of Artificial Sequence: Synthetic oligonucleotide
  Antisense strand to SEQ ID NO: 165582
uuuaacauaggcuuacaaa

SEQ ID NO: 165584 - RNA, 19 nt, Artificial Sequence
  Description of Artificial Sequence: Synthetic oligonucleotide
  Sense strand starting at position 2863 of SEQ ID NO: 2133
uggaaugcaugaccucaau

SEQ ID NO: 165585 - RNA, 19 nt, Artificial Sequence
  Description of Artificial Sequence: Synthetic oligonucleotide
  Antisense strand to SEQ ID NO: 165584
auugaggucaugcauucca

SEQ ID NO: 165586 - RNA, 19 nt, Artificial Sequence
  Description of Artificial Sequence: Synthetic oligonucleotide
  Sense strand starting at position 2853 of SEQ ID NO: 2133
uuaaguaauuuggaaugca

SEQ ID NO: 165587 - RNA, 19 nt, Artificial Sequence
  Description of Artificial Sequence: Synthetic oligonucleotide
  Antisense strand to SEQ ID NO: 165586
ugcauuccaaauuacuuaa

SEQ ID NO: 165588 - RNA, 19 nt, Artificial Sequence
  Description of Artificial Sequence: Synthetic oligonucleotide
  Sense strand starting at position 2805 of SEQ ID NO: 2133
ccgggauaucuuggagaac

SEQ ID NO: 165589 - RNA, 19 nt, Artificial Sequence
  Description of Artificial Sequence: Synthetic oligonucleotide
  Antisense strand to SEQ ID NO: 165588
guucuccaagauaucccgg

SEQ ID NO: 165590 - RNA, 19 nt, Artificial Sequence
  Description of Artificial Sequence: Synthetic oligonucleotide
  Sense strand starting at position 2678 of SEQ ID NO: 2133
guucgccuugcugaaauuu

SEQ ID NO: 165591 - RNA, 19 nt, Artificial Sequence
  Description of Artificial Sequence: Synthetic oligonucleotide
  Antisense strand to SEQ ID NO: 165590
aaauuucagcaaggcgaac

SEQ ID NO: 165592 - RNA, 19 nt, Artificial Sequence
  Description of Artificial Sequence: Synthetic oligonucleotide
  Sense strand starting at position 2658 of SEQ ID NO: 2133
aauuaagaccagcgagguu

SEQ ID NO: 165593 - RNA, 19 nt, Artificial Sequence
  Description of Artificial Sequence: Synthetic oligonucleotide
  Antisense strand to SEQ ID NO: 165592
aaccucgcuggucuuaauu

SEQ ID NO: 165594 - RNA, 19 nt, Artificial Sequence
  Description of Artificial Sequence: Synthetic oligonucleotide
  Sense strand starting at position 2640 of SEQ ID NO: 2133
cccucuuaccgaugagaaa

SEQ ID NO: 165595 - RNA, 19 nt, Artificial Sequence
  Description of Artificial Sequence: Synthetic oligonucleotide
  Antisense strand to SEQ ID NO: 165594
uuucucaucgguaagaggg

SEQ ID NO: 165596 - RNA, 19 nt, Artificial Sequence
  Description of Artificial Sequence: Synthetic oligonucleotide
  Sense strand starting at position 2488 of SEQ ID NO: 2133
ugugaauccucaccgcaau

SEQ ID NO: 165597 - RNA, 19 nt, Artificial Sequence
  Description of Artificial Sequence: Synthetic oligonucleotide
  Antisense strand to SEQ ID NO: 165596
auugcggugaggauucaca

SEQ ID NO: 165598 - RNA, 19 nt, Artificial Sequence
  Description of Artificial Sequence: Synthetic oligonucleotide
  Sense strand starting at position 2476 of SEQ ID NO: 2133
gagcacauacuaugugaau

SEQ ID NO: 165599 - RNA, 19 nt, Artificial Sequence
  Description of Artificial Sequence: Synthetic oligonucleotide
  Antisense strand to SEQ ID NO: 165598
auucacauaguaugugcuc

SEQ ID NO: 165600 - RNA, 19 nt, Artificial Sequence
  Description of Artificial Sequence: Synthetic oligonucleotide
  Sense strand starting at position 2348 of SEQ ID NO: 2133
accaaaucguaacccgaaa

SEQ ID NO: 165601 - RNA, 19 nt, Artificial Sequence
  Description of Artificial Sequence: Synthetic oligonucleotide
  Antisense strand to SEQ ID NO: 165600
uuucggguuacgauuuggu

SEQ ID NO: 165602 - RNA, 19 nt, Artificial Sequence
  Description of Artificial Sequence: Synthetic oligonucleotide
  Sense strand starting at position 2316 of SEQ ID NO: 2133
gggagaauucaacguugaa

SEQ ID NO: 165603 - RNA, 19 nt, Artificial Sequence
  Description of Artificial Sequence: Synthetic oligonucleotide
  Antisense strand to SEQ ID NO: 165602
uucaacguugaauucuccc

SEQ ID NO: 165604 - RNA, 19 nt, Artificial Sequence
  Description of Artificial Sequence: Synthetic oligonucleotide
  Sense strand starting at position 2281 of SEQ ID NO: 2133
auccuauucuguucugaga

SEQ ID NO: 165605 - RNA, 19 nt, Artificial Sequence
  Description of Artificial Sequence: Synthetic oligonucleotide
  Antisense strand to SEQ ID NO: 165604
ucucagaacagaauaggau

SEQ ID NO: 165606 - RNA, 19 nt, Artificial Sequence
  Description of Artificial Sequence: Synthetic oligonucleotide
  Sense strand starting at position 1451 of SEQ ID NO: 2133
cacagcucucgaggugaca

SEQ ID NO: 165607 - RNA, 19 nt, Artificial Sequence
  Description of Artificial Sequence: Synthetic oligonucleotide
  Antisense strand to SEQ ID NO: 165606
ugucaccucgagagcugug

SEQ ID NO: 165608 - RNA, 19 nt, Artificial Sequence
  Description of Artificial Sequence: Synthetic oligonucleotide
  Sense strand starting at position 1291 of SEQ ID NO: 2133
gcugauuuccgaggagcca

SEQ ID NO: 165609 - RNA, 19 nt, Artificial Sequence
  Description of Artificial Sequence: Synthetic oligonucleotide
  Antisense strand to SEQ ID NO: 165608
uggcuccucggaaaucagc

SEQ ID NO: 165610 - RNA, 19 nt, Artificial Sequence
  Description of Artificial Sequence: Synthetic oligonucleotide
  Sense strand starting at position 1227 of SEQ ID NO: 2133
caggaagaacuguguauga

SEQ ID NO: 165611 - RNA, 19 nt, Artificial Sequence
  Description of Artificial Sequence: Synthetic oligonucleotide
  Antisense strand to SEQ ID NO: 165610
ucauacacaguucuuccug

SEQ ID NO: 165612 - RNA, 19 nt, Artificial Sequence
  Description of Artificial Sequence: Synthetic oligonucleotide
  Sense strand starting at position 1203 of SEQ ID NO: 2133
ugugucugauuuccgaauu

SEQ ID NO: 165613 - RNA, 19 nt, Artificial Sequence
  Description of Artificial Sequence: Synthetic oligonucleotide
  Antisense strand to SEQ ID NO: 165612
aauucggaaaucagacaca

SEQ ID NO: 165614 - RNA, 19 nt, Artificial Sequence
  Description of Artificial Sequence: Synthetic oligonucleotide
  Sense strand starting at position 1200 of SEQ ID NO: 2133
cauugugucugauuuccga

SEQ ID NO: 165615 - RNA, 19 nt, Artificial Sequence
  Description of Artificial Sequence: Synthetic oligonucleotide
  Antisense strand to SEQ ID NO: 165614
ucggaaaucagacacaaug

SEQ ID NO: 165616 - RNA, 19 nt, Artificial Sequence
  Description of Artificial Sequence: Synthetic oligonucleotide
  Sense strand starting at position 1196 of SEQ ID NO: 2133
cagucauugugucugauuu

SEQ ID NO: 165617 - RNA, 19 nt, Artificial Sequence
  Description of Artificial Sequence: Synthetic oligonucleotide
  Antisense strand to SEQ ID NO: 165616
aaaucagacacaaugacug

SEQ ID NO: 165618 - RNA, 19 nt, Artificial Sequence
  Description of Artificial Sequence: Synthetic oligonucleotide
  Sense strand starting at position 1194 of SEQ ID NO: 2133
accagucauugugucugau

SEQ ID NO: 165619 - RNA, 19 nt, Artificial Sequence
  Description of Artificial Sequence: Synthetic oligonucleotide
  Antisense strand to SEQ ID NO: 165618
aucagacacaaugacuggu

SEQ ID NO: 165620 - RNA, 19 nt, Artificial Sequence
  Description of Artificial Sequence: Synthetic oligonucleotide
  Sense strand starting at position 1150 of SEQ ID NO: 2133
ggugaauucucuuuauuaa

SEQ ID NO: 165621 - RNA, 19 nt, Artificial Sequence
  Description of Artificial Sequence: Synthetic oligonucleotide
  Antisense strand to SEQ ID NO: 165620
uuaauaaagagaauucacc

SEQ ID NO: 165622 - RNA, 19 nt, Artificial Sequence
  Description of Artificial Sequence: Synthetic oligonucleotide
  Sense strand starting at position 1147 of SEQ ID NO: 2133
guuggugaauucucuuuau

SEQ ID NO: 165623 - RNA, 19 nt, Artificial Sequence
  Description of Artificial Sequence: Synthetic oligonucleotide
  Antisense strand to SEQ ID NO: 165622
auaaagagaauucaccaac

SEQ ID NO: 165624 - RNA, 19 nt, Artificial Sequence
  Description of Artificial Sequence: Synthetic oligonucleotide
  Sense strand starting at position 1138 of SEQ ID NO: 2133
ugaaaugcuguuggugaau

SEQ ID NO: 165625 - RNA, 19 nt, Artificial Sequence
  Description of Artificial Sequence: Synthetic oligonucleotide
  Antisense strand to SEQ ID NO: 165624
auucaccaacagcauuuca

SEQ ID NO: 165626 - RNA, 19 nt, Artificial Sequence
  Description of Artificial Sequence: Synthetic oligonucleotide
  Sense strand starting at position 1071 of SEQ ID NO: 2133
gccucaucugccugaaauc

SEQ ID NO: 165627 - RNA, 19 nt, Artificial Sequence
  Description of Artificial Sequence: Synthetic oligonucleotide
  Antisense strand to SEQ ID NO: 165626
gauuucaggcagaugaggc

SEQ ID NO: 165628 - RNA, 19 nt, Artificial Sequence
  Description of Artificial Sequence: Synthetic oligonucleotide
  Sense strand starting at position 1070 of SEQ ID NO: 2133
agccucaucugccugaaau

SEQ ID NO: 165629 - RNA, 19 nt, Artificial Sequence
  Description of Artificial Sequence: Synthetic oligonucleotide
  Antisense strand to SEQ ID NO: 165628
auuucaggcagaugaggcu

SEQ ID NO: 165630 - RNA, 19 nt, Artificial Sequence
  Description of Artificial Sequence: Synthetic oligonucleotide
  Sense strand starting at position 823 of SEQ ID NO: 2133
cugaucuccuguuuauaag

SEQ ID NO: 165631 - RNA, 19 nt, Artificial Sequence
  Description of Artificial Sequence: Synthetic oligonucleotide
  Antisense strand to SEQ ID NO: 165630
cuuauaaacaggagaucag

SEQ ID NO: 165632 - RNA, 19 nt, Artificial Sequence
  Description of Artificial Sequence: Synthetic oligonucleotide
  Sense strand starting at position 472 of SEQ ID NO: 2133
aguagacucugucucgaaa

SEQ ID NO: 165633 - RNA, 19 nt, Artificial Sequence
  Description of Artificial Sequence: Synthetic oligonucleotide
  Antisense strand to SEQ ID NO: 165632
uuucgagacagagucuacu

SEQ ID NO: 165634 - RNA, 19 nt, Artificial Sequence
  Description of Artificial Sequence: Synthetic oligonucleotide
  Sense strand starting at position 386 of SEQ ID NO: 2133
cagcaagcugaucaggaau

SEQ ID NO: 165635 - RNA, 19 nt, Artificial Sequence
  Description of Artificial Sequence: Synthetic oligonucleotide
  Antisense strand to SEQ ID NO: 165634
auuccugaucagcuugcug

SEQ ID NO: 165636 - RNA, 19 nt, Artificial Sequence
  Description of Artificial Sequence: Synthetic oligonucleotide
  Sense strand starting at position 148 of SEQ ID NO: 2133
cuaaccaguggucauauua

SEQ ID NO: 165637 - RNA, 19 nt, Artificial Sequence
  Description of Artificial Sequence: Synthetic oligonucleotide
  Antisense strand to SEQ ID NO: 165636
uaauaugaccacugguuag

SEQ ID NO: 165638 - RNA, 19 nt, Artificial Sequence
  Description of Artificial Sequence: Synthetic oligonucleotide
  Sense strand starting at position 147 of SEQ ID NO: 2133
ucuaaccaguggucauauu

SEQ ID NO: 165639 - RNA, 19 nt, Artificial Sequence
  Description of Artificial Sequence: Synthetic oligonucleotide
  Antisense strand to SEQ ID NO: 165638
aauaugaccacugguuaga

SEQ ID NO: 165640 - RNA, 19 nt, Artificial Sequence
  Description of Artificial Sequence: Synthetic oligonucleotide
  Sense strand starting at position 10 of SEQ ID NO: 2133
augaauauuucgcaaauag

SEQ ID NO: 165641 - RNA, 19 nt, Artificial Sequence
  Description of Artificial Sequence: Synthetic oligonucleotide
  Antisense strand to SEQ ID NO: 165640
cuauuugcgaaauauucau

SEQ ID NO: 165642 - RNA, 19 nt, Artificial Sequence
  Description of Artificial Sequence: Synthetic oligonucleotide
  Sense strand starting at position 77 of SEQ ID NO: 2134
gaucucuaccgccagagau

SEQ ID NO: 165643 - RNA, 19 nt, Artificial Sequence
  Description of Artificial Sequence: Synthetic oligonucleotide
  Antisense strand to SEQ ID NO: 165642
aucucuggcgguagagauc

SEQ ID NO: 165644 - RNA, 19 nt, Artificial Sequence
  Description of Artificial Sequence: Synthetic oligonucleotide
  Sense strand starting at position 79 of SEQ ID NO: 2134
ucucuaccgccagagauaa

SEQ ID NO: 165645 - RNA, 19 nt, Artificial Sequence
  Description of Artificial Sequence: Synthetic oligonucleotide
  Antisense strand to SEQ ID NO: 165644
uuaucucuggcgguagaga

SEQ ID NO: 165646 - RNA, 19 nt, Artificial Sequence
  Description of Artificial Sequence: Synthetic oligonucleotide
  Sense strand starting at position 90 of SEQ ID NO: 2134
agagauaaccuuugccaac

SEQ ID NO: 165647 - RNA, 19 nt, Artificial Sequence
  Description of Artificial Sequence: Synthetic oligonucleotide
  Antisense strand to SEQ ID NO: 165646
guuggcaaagguuaucucu

SEQ ID NO: 165648 - RNA, 19 nt, Artificial Sequence
  Description of Artificial Sequence: Synthetic oligonucleotide
  Sense strand starting at position 286 of SEQ ID NO: 2134
gggaaauauuaagaaguag

SEQ ID NO: 165649 - RNA, 19 nt, Artificial Sequence
  Description of Artificial Sequence: Synthetic oligonucleotide
  Antisense strand to SEQ ID NO: 165648
cuacuucuuaauauuuccc

SEQ ID NO: 165650 - RNA, 19 nt, Artificial Sequence
  Description of Artificial Sequence: Synthetic oligonucleotide
  Sense strand starting at position 316 of SEQ ID NO: 2134
uuuacugcauaaucgauaa

SEQ ID NO: 165651 - RNA, 19 nt, Artificial Sequence
  Description of Artificial Sequence: Synthetic oligonucleotide
  Antisense strand to SEQ ID NO: 165650
uuaucgauuaugcaguaaa

SEQ ID NO: 165652 - RNA, 19 nt, Artificial Sequence
  Description of Artificial Sequence: Synthetic oligonucleotide
  Sense strand starting at position 320 of SEQ ID NO: 2134
cugcauaaucgauaaagua

SEQ ID NO: 165653 - RNA, 19 nt, Artificial Sequence
  Description of Artificial Sequence: Synthetic oligonucleotide
  Antisense strand to SEQ ID NO: 165652
uacuuuaucgauuaugcag

SEQ ID NO: 165654 - RNA, 19 nt, Artificial Sequence
  Description of Artificial Sequence: Synthetic oligonucleotide
  Sense strand starting at position 442 of SEQ ID NO: 2134
agggacauucuguggugau

SEQ ID NO: 165655 - RNA, 19 nt, Artificial Sequence
  Description of Artificial Sequence: Synthetic oligonucleotide
  Antisense strand to SEQ ID NO: 165654
aucaccacagaaugucccu

SEQ ID NO: 165656 - RNA, 19 nt, Artificial Sequence
  Description of Artificial Sequence: Synthetic oligonucleotide
  Sense strand starting at position 446 of SEQ ID NO: 2134
acauucuguggugaucagu

SEQ ID NO: 165657 - RNA, 19 nt, Artificial Sequence
  Description of Artificial Sequence: Synthetic oligonucleotide
  Antisense strand to SEQ ID NO: 165656
acugaucaccacagaaugu

SEQ ID NO: 165658 - RNA, 19 nt, Artificial Sequence
  Description of Artificial Sequence: Synthetic oligonucleotide
  Sense strand starting at position 460 of SEQ ID NO: 2134
ucaguacugaccugggaac

SEQ ID NO: 165659 - RNA, 19 nt, Artificial Sequence
  Description of Artificial Sequence: Synthetic oligonucleotide
  Antisense strand to SEQ ID NO: 165658
guucccaggucaguacuga

SEQ ID NO: 165660 - RNA, 19 nt, Artificial Sequence
  Description of Artificial Sequence: Synthetic oligonucleotide
  Sense strand starting at position 462 of SEQ ID NO: 2134
aguacugaccugggaacuu

SEQ ID NO: 165661 - RNA, 19 nt, Artificial Sequence
  Description of Artificial Sequence: Synthetic oligonucleotide
  Antisense strand to SEQ ID NO: 165660
aaguucccaggucaguacu

SEQ ID NO: 165662 - RNA, 19 nt, Artificial Sequence
  Description of Artificial Sequence: Synthetic oligonucleotide
  Sense strand starting at position 579 of SEQ ID NO: 2134
guguuuaauggcuacgaag

SEQ ID NO: 165663 - RNA, 19 nt, Artificial Sequence
  Description of Artificial Sequence: Synthetic oligonucleotide
  Antisense strand to SEQ ID NO: 165662
cuucguagccauuaaacac

SEQ ID NO: 165664 - RNA, 19 nt, Artificial Sequence
  Description of Artificial Sequence: Synthetic oligonucleotide
  Sense strand starting at position 660 of SEQ ID NO: 2134
gagcuaggauagcuuguaa

SEQ ID NO: 165665 - RNA, 19 nt, Artificial Sequence
  Description of Artificial Sequence: Synthetic oligonucleotide
  Antisense strand to SEQ ID NO: 165664
uuacaagcuauccuagcuc

SEQ ID NO: 165666 - RNA, 19 nt, Artificial Sequence
  Description of Artificial Sequence: Synthetic oligonucleotide
  Sense strand starting at position 825 of SEQ ID NO: 2134
aggaaaguuugguuuggcu

SEQ ID NO: 165667 - RNA, 19 nt, Artificial Sequence
  Description of Artificial Sequence: Synthetic oligonucleotide
  Antisense strand to SEQ ID NO: 165666
agccaaaccaaacuuuccu

SEQ ID NO: 165668 - RNA, 19 nt, Artificial Sequence
  Description of Artificial Sequence: Synthetic oligonucleotide
  Sense strand starting at position 1368 of SEQ ID NO: 2134
ggucauggcccucaagacu

SEQ ID NO: 165669 - RNA, 19 nt, Artificial Sequence
  Description of Artificial Sequence: Synthetic oligonucleotide
  Antisense strand to SEQ ID NO: 165668
agucuugagggccaugacc

SEQ ID NO: 165670 - RNA, 19 nt, Artificial Sequence
  Description of Artificial Sequence: Synthetic oligonucleotide
  Sense strand starting at position 2189 of SEQ ID NO: 2134
uguaguuguaccugauuug

SEQ ID NO: 165671 - RNA, 19 nt, Artificial Sequence
  Description of Artificial Sequence: Synthetic oligonucleotide
  Antisense strand to SEQ ID NO: 165670
caaaucagguacaacuaca

SEQ ID NO: 165672 - RNA, 19 nt, Artificial Sequence
  Description of Artificial Sequence: Synthetic oligonucleotide
  Sense strand starting at position 2192 of SEQ ID NO: 2134
aguuguaccugauuugcaa

SEQ ID NO: 165673 - RNA, 19 nt, Artificial Sequence
  Description of Artificial Sequence: Synthetic oligonucleotide
  Antisense strand to SEQ ID NO: 165672
uugcaaaucagguacaacu

SEQ ID NO: 165674 - RNA, 19 nt, Artificial Sequence
  Description of Artificial Sequence: Synthetic oligonucleotide
  Sense strand starting at position 2267 of SEQ ID NO: 2134
aaaucuaucugguccucga

SEQ ID NO: 165675 - RNA, 19 nt, Artificial Sequence
  Description of Artificial Sequence: Synthetic oligonucleotide
  Antisense strand to SEQ ID NO: 165674
ucgaggaccagauagauuu

SEQ ID NO: 165676 - RNA, 19 nt, Artificial Sequence
  Description of Artificial Sequence: Synthetic oligonucleotide
  Sense strand starting at position 2294 of SEQ ID NO: 2134
gaagcauaguaucugauua

SEQ ID NO: 165677 - RNA, 19 nt, Artificial Sequence
  Description of Artificial Sequence: Synthetic oligonucleotide
  Antisense strand to SEQ ID NO: 165676
uaaucagauacuaugcuuc

SEQ ID NO: 165678 - RNA, 19 nt, Artificial Sequence
  Description of Artificial Sequence: Synthetic oligonucleotide
  Sense strand starting at position 2335 of SEQ ID NO: 2134
guaggucuugcuuuguguu

SEQ ID NO: 165679 - RNA, 19 nt, Artificial Sequence
  Description of Artificial Sequence: Synthetic oligonucleotide
  Antisense strand to SEQ ID NO: 165678
aacacaaagcaagaccuac

SEQ ID NO: 165680 - RNA, 19 nt, Artificial Sequence
  Description of Artificial Sequence: Synthetic oligonucleotide
  Sense strand starting at position 2359 of SEQ ID NO: 2134
gugugcuaaagguugugua

SEQ ID NO: 165681 - RNA, 19 nt, Artificial Sequence
  Description of Artificial Sequence: Synthetic oligonucleotide
  Antisense strand to SEQ ID NO: 165680
uacacaaccuuuagcacac

SEQ ID NO: 165682 - RNA, 19 nt, Artificial Sequence
  Description of Artificial Sequence: Synthetic oligonucleotide
  Sense strand starting at position 2371 of SEQ ID NO: 2134
uuguguaugcaucaucuca

SEQ ID NO: 165683 - RNA, 19 nt, Artificial Sequence
  Description of Artificial Sequence: Synthetic oligonucleotide
  Antisense strand to SEQ ID NO: 165682
ugagaugaugcauacacaa

SEQ ID NO: 165684 - RNA, 19 nt, Artificial Sequence
  Description of Artificial Sequence: Synthetic oligonucleotide
  Sense strand starting at position 2379 of SEQ ID NO: 2134
gcaucaucucaguauccuu

SEQ ID NO: 165685 - RNA, 19 nt, Artificial Sequence
  Description of Artificial Sequence: Synthetic oligonucleotide
  Antisense strand to SEQ ID NO: 165684
aaggauacugagaugaugc

SEQ ID NO: 165686 - RNA, 19 nt, Artificial Sequence
  Description of Artificial Sequence: Synthetic oligonucleotide
  Sense strand starting at position 2757 of SEQ ID NO: 2134
cuugaagacuuccuguagu

SEQ ID NO: 165687 - RNA, 19 nt, Artificial Sequence
  Description of Artificial Sequence: Synthetic oligonucleotide
  Antisense strand to SEQ ID NO: 165686
acuacaggaagucuucaag

SEQ ID NO: 165688 - RNA, 19 nt, Artificial Sequence
  Description of Artificial Sequence: Synthetic oligonucleotide
  Sense strand starting at position 2760 of SEQ ID NO: 2134
gaagacuuccuguagucac

SEQ ID NO: 165689 - RNA, 19 nt, Artificial Sequence
  Description of Artificial Sequence: Synthetic oligonucleotide
  Antisense strand to SEQ ID NO: 165688
gugacuacaggaagucuuc

SEQ ID NO: 165690 - RNA, 19 nt, Artificial Sequence
  Description of Artificial Sequence: Synthetic oligonucleotide
  Sense strand starting at position 2856 of SEQ ID NO: 2134
ugcaaauaaccauguaaag

SEQ ID NO: 165691 - RNA, 19 nt, Artificial Sequence
  Description of Artificial Sequence: Synthetic oligonucleotide
  Antisense strand to SEQ ID NO: 165690
cuuuacaugguuauuugca

SEQ ID NO: 165692 - RNA, 19 nt, Artificial Sequence
  Description of Artificial Sequence: Synthetic oligonucleotide
  Sense strand starting at position 2911 of SEQ ID NO: 2134
gcacaccuucgaggaauaa

SEQ ID NO: 165693 - RNA, 19 nt, Artificial Sequence
  Description of Artificial Sequence: Synthetic oligonucleotide
  Antisense strand to SEQ ID NO: 165692
uuauuccucgaaggugugc

SEQ ID NO: 165694 - RNA, 19 nt, Artificial Sequence
  Description of Artificial Sequence: Synthetic oligonucleotide
  Sense strand starting at position 3021 of SEQ ID NO: 2134
cuagauaugcuaugaaauu

SEQ ID NO: 165695 - RNA, 19 nt, Artificial Sequence
  Description of Artificial Sequence: Synthetic oligonucleotide
  Antisense strand to SEQ ID NO: 165694
aauuucauagcauaucuag

SEQ ID NO: 165696 - RNA, 19 nt, Artificial Sequence
  Description of Artificial Sequence: Synthetic oligonucleotide
  Sense strand starting at position 3053 of SEQ ID NO: 2134
uguggacuuugauugcuga

SEQ ID NO: 165697 - RNA, 19 nt, Artificial Sequence
  Description of Artificial Sequence: Synthetic oligonucleotide
  Antisense strand to SEQ ID NO: 165696
ucagcaaucaaaguccaca

SEQ ID NO: 165698 - RNA, 19 nt, Artificial Sequence
  Description of Artificial Sequence: Synthetic oligonucleotide
  Sense strand starting at position 3054 of SEQ ID NO: 2134
guggacuuugauugcugaa

SEQ ID NO: 165699 - RNA, 19 nt, Artificial Sequence
  Description of Artificial Sequence: Synthetic oligonucleotide
  Antisense strand to SEQ ID NO: 165698
uucagcaaucaaaguccac

SEQ ID NO: 165700 - RNA, 19 nt, Artificial Sequence
  Description of Artificial Sequence: Synthetic oligonucleotide
  Sense strand starting at position 3118 of SEQ ID NO: 2134
guguuaucucaguugcucu

SEQ ID NO: 165701 - RNA, 19 nt, Artificial Sequence
  Description of Artificial Sequence: Synthetic oligonucleotide
  Antisense strand to SEQ ID NO: 165700
agagcaacugagauaacac

SEQ ID NO: 165702 - RNA, 19 nt, Artificial Sequence
  Description of Artificial Sequence: Synthetic oligonucleotide
  Sense strand starting at position 3130 of SEQ ID NO: 2134
uugcucuuacaaugugaua

SEQ ID NO: 165703 - RNA, 19 nt, Artificial Sequence
  Description of Artificial Sequence: Synthetic oligonucleotide
  Antisense strand to SEQ ID NO: 165702
uaucacauuguaagagcaa

SEQ ID NO: 165704 - RNA, 19 nt, Artificial Sequence
  Description of Artificial Sequence: Synthetic oligonucleotide
  Sense strand starting at position 3141 of SEQ ID NO: 2134
augugauaauuacugcuau

SEQ ID NO: 165705 - RNA, 19 nt, Artificial Sequence
  Description of Artificial Sequence: Synthetic oligonucleotide
  Antisense strand to SEQ ID NO: 165704
auagcaguaauuaucacau

SEQ ID NO: 165706 - RNA, 19 nt, Artificial Sequence
  Description of Artificial Sequence: Synthetic oligonucleotide
  Sense strand starting at position 3356 of SEQ ID NO: 2134
guguguaaaccucaagauc

SEQ ID NO: 165707 - RNA, 19 nt, Artificial Sequence
  Description of Artificial Sequence: Synthetic oligonucleotide
  Antisense strand to SEQ ID NO: 165706
gaucuugagguuuacacac

SEQ ID NO: 165708 - RNA, 19 nt, Artificial Sequence
  Description of Artificial Sequence: Synthetic oligonucleotide
  Sense strand starting at position 3456 of SEQ ID NO: 2134
ccaggaugacagcgauuga

SEQ ID NO: 165709 - RNA, 19 nt, Artificial Sequence
  Description of Artificial Sequence: Synthetic oligonucleotide
  Antisense strand to SEQ ID NO: 165708
ucaaucgcugucauccugg

SEQ ID NO: 165710 - RNA, 19 nt, Artificial Sequence
  Description of Artificial Sequence: Synthetic oligonucleotide
  Sense strand starting at position 3488 of SEQ ID NO: 2134
gugaaucugacagauguuu

SEQ ID NO: 165711 - RNA, 19 nt, Artificial Sequence
  Description of Artificial Sequence: Synthetic oligonucleotide
  Antisense strand to SEQ ID NO: 165710
aaacaucugucagauucac

SEQ ID NO: 165712 - RNA, 19 nt, Artificial Sequence
  Description of Artificial Sequence: Synthetic oligonucleotide
  Sense strand starting at position 3635 of SEQ ID NO: 2134
ggaagcaguguccaauacu

SEQ ID NO: 165713 - RNA, 19 nt, Artificial Sequence
  Description of Artificial Sequence: Synthetic oligonucleotide
  Antisense strand to SEQ ID NO: 165712
aguauuggacacugcuucc

SEQ ID NO: 165714 - RNA, 19 nt, Artificial Sequence
  Description of Artificial Sequence: Synthetic oligonucleotide
  Sense strand starting at position 3638 of SEQ ID NO: 2134
agcaguguccaauacuagu

SEQ ID NO: 165715 - RNA, 19 nt, Artificial Sequence
  Description of Artificial Sequence: Synthetic oligonucleotide
  Antisense strand to SEQ ID NO: 165714
acuaguauuggacacugcu

SEQ ID NO: 165716 - RNA, 19 nt, Artificial Sequence
  Description of Artificial Sequence: Synthetic oligonucleotide
  Sense strand starting at position 3801 of SEQ ID NO: 2134
gcuugaguucugcugcuuc

SEQ ID NO: 165717 - RNA, 19 nt, Artificial Sequence
  Description of Artificial Sequence: Synthetic oligonucleotide
  Antisense strand to SEQ ID NO: 165716
gaagcagcagaacucaagc

SEQ ID NO: 165718 - RNA, 19 nt, Artificial Sequence
  Description of Artificial Sequence: Synthetic oligonucleotide
  Sense strand starting at position 3868 of SEQ ID NO: 2134
cugugaaauagacaccgua

SEQ ID NO: 165719 - RNA, 19 nt, Artificial Sequence
  Description of Artificial Sequence: Synthetic oligonucleotide
  Antisense strand to SEQ ID NO: 165718
uacggugucuauuucacag

SEQ ID NO: 165720 - RNA, 19 nt, Artificial Sequence
  Description of Artificial Sequence: Synthetic oligonucleotide
  Sense strand starting at position 3871 of SEQ ID NO: 2134
ugaaauagacaccguaaua

SEQ ID NO: 165721 - RNA, 19 nt, Artificial Sequence
  Description of Artificial Sequence: Synthetic oligonucleotide
  Antisense strand to SEQ ID NO: 165720
uauuacggugucuauuuca

SEQ ID NO: 165722 - RNA, 19 nt, Artificial Sequence
  Description of Artificial Sequence: Synthetic oligonucleotide
  Sense strand starting at position 3926 of SEQ ID NO: 2135
guuugacucuggucacaug

SEQ ID NO: 165723 - RNA, 19 nt, Artificial Sequence
  Description of Artificial Sequence: Synthetic oligonucleotide
  Antisense strand to SEQ ID NO: 165722
caugugaccagagucaaac

SEQ ID NO: 165724 - RNA, 19 nt, Artificial Sequence
  Description of Artificial Sequence: Synthetic oligonucleotide
  Sense strand starting at position 3085 of SEQ ID NO: 2135
ucaaguaacuugccaagga

SEQ ID NO: 165725 - RNA, 19 nt, Artificial Sequence
  Description of Artificial Sequence: Synthetic oligonucleotide
  Antisense strand to SEQ ID NO: 165724
uccuuggcaaguuacuuga

SEQ ID NO: 165726 - RNA, 19 nt, Artificial Sequence
  Description of Artificial Sequence: Synthetic oligonucleotide
  Sense strand starting at position 2938 of SEQ ID NO: 2135
aguagaagugguuagauac

SEQ ID NO: 165727 - RNA, 19 nt, Artificial Sequence
  Description of Artificial Sequence: Synthetic oligonucleotide
  Antisense strand to SEQ ID NO: 165726
guaucuaaccacuucuacu

SEQ ID NO: 165728 - RNA, 19 nt, Artificial Sequence
  Description of Artificial Sequence: Synthetic oligonucleotide
  Sense strand starting at position 2935 of SEQ ID NO: 2135
ggaaguagaagugguuaga

SEQ ID NO: 165729 - RNA, 19 nt, Artificial Sequence
  Description of Artificial Sequence: Synthetic oligonucleotide
  Antisense strand to SEQ ID NO: 165728
ucuaaccacuucuacuucc

SEQ ID NO: 165730 - RNA, 19 nt, Artificial Sequence
  Description of Artificial Sequence: Synthetic oligonucleotide
  Sense strand starting at position 2868 of SEQ ID NO: 2135
aaaguaggcuuuccuagaa

SEQ ID NO: 165731 - RNA, 19 nt, Artificial Sequence
  Description of Artificial Sequence: Synthetic oligonucleotide
  Antisense strand to SEQ ID NO: 165730
uucuaggaaagccuacuuu

SEQ ID NO: 165732 - RNA, 19 nt, Artificial Sequence
  Description of Artificial Sequence: Synthetic oligonucleotide
  Sense strand starting at position 2855 of SEQ ID NO: 2135
gugacauuggcagaaagua

SEQ ID NO: 165733 - RNA, 19 nt, Artificial Sequence
  Description of Artificial Sequence: Synthetic oligonucleotide
  Antisense strand to SEQ ID NO: 165732
uacuuucugccaaugucac

SEQ ID NO: 165734 - RNA, 19 nt, Artificial Sequence
  Description of Artificial Sequence: Synthetic oligonucleotide
  Sense strand starting at position 2851 of SEQ ID NO: 2135
ccaugugacauuggcagaa

SEQ ID NO: 165735 - RNA, 19 nt, Artificial Sequence
  Description of Artificial Sequence: Synthetic oligonucleotide
  Antisense strand to SEQ ID NO: 165734
uucugccaaugucacaugg

SEQ ID NO: 165736 - RNA, 19 nt, Artificial Sequence
  Description of Artificial Sequence: Synthetic oligonucleotide
  Sense strand starting at position 2842 of SEQ ID NO: 2135
gugagauaaccaugugaca

SEQ ID NO: 165737 - RNA, 19 nt, Artificial Sequence
  Description of Artificial Sequence: Synthetic oligonucleotide
  Antisense strand to SEQ ID NO: 165736
ugucacaugguuaucucac

SEQ ID NO: 165738 - RNA, 19 nt, Artificial Sequence
  Description of Artificial Sequence: Synthetic oligonucleotide
  Sense strand starting at position 2831 of SEQ ID NO: 2135
gagcccuaacugugagaua

SEQ ID NO: 165739 - RNA, 19 nt, Artificial Sequence
  Description of Artificial Sequence: Synthetic oligonucleotide
  Antisense strand to SEQ ID NO: 165738
uaucucacaguuagggcuc

SEQ ID NO: 165740 - RNA, 19 nt, Artificial Sequence
  Description of Artificial Sequence: Synthetic oligonucleotide
  Sense strand starting at position 2825 of SEQ ID NO: 2135
ugcuaagagcccuaacugu

SEQ ID NO: 165741 - RNA, 19 nt, Artificial Sequence
  Description of Artificial Sequence: Synthetic oligonucleotide
  Antisense strand to SEQ ID NO: 165740
acaguuagggcucuuagca

SEQ ID NO: 165742 - RNA, 19 nt, Artificial Sequence
  Description of Artificial Sequence: Synthetic oligonucleotide
  Sense strand starting at position 2797 of SEQ ID NO: 2135
aaucaaacguaagugagau

SEQ ID NO: 165743 - RNA, 19 nt, Artificial Sequence
  Description of Artificial Sequence: Synthetic oligonucleotide
  Antisense strand to SEQ ID NO: 165742
aucucacuuacguuugauu

SEQ ID NO: 165744 - RNA, 19 nt, Artificial Sequence
  Description of Artificial Sequence: Synthetic oligonucleotide
  Sense strand starting at position 2794 of SEQ ID NO: 2135
aguaaucaaacguaaguga

SEQ ID NO: 165745 - RNA, 19 nt, Artificial Sequence
  Description of Artificial Sequence: Synthetic oligonucleotide
  Antisense strand to SEQ ID NO: 165744
ucacuuacguuugauuacu

SEQ ID NO: 165746 - RNA, 19 nt, Artificial Sequence
  Description of Artificial Sequence: Synthetic oligonucleotide
  Sense strand starting at position 2764 of SEQ ID NO: 2135
ugagaugguuccuuuggga

SEQ ID NO: 165747 - RNA, 19 nt, Artificial Sequence
  Description of Artificial Sequence: Synthetic oligonucleotide
  Antisense strand to SEQ ID NO: 165746
ucccaaaggaaccaucuca

SEQ ID NO: 165748 - RNA, 19 nt, Artificial Sequence
  Description of Artificial Sequence: Synthetic oligonucleotide
  Sense strand starting at position 2751 of SEQ ID NO: 2135
gagaucuguuuacugagau

SEQ ID NO: 165749 - RNA, 19 nt, Artificial Sequence
  Description of Artificial Sequence: Synthetic oligonucleotide
  Antisense strand to SEQ ID NO: 165748
aucucaguaaacagaucuc

SEQ ID NO: 165750 - RNA, 19 nt, Artificial Sequence
  Description of Artificial Sequence: Synthetic oligonucleotide
  Sense strand starting at position 2535 of SEQ ID NO: 2135
gcacaauuccuggaaugcu

SEQ ID NO: 165751 - RNA, 19 nt, Artificial Sequence
  Description of Artificial Sequence: Synthetic oligonucleotide
  Antisense strand to SEQ ID NO: 165750
agcauuccaggaauugugc

SEQ ID NO: 165752 - RNA, 19 nt, Artificial Sequence
  Description of Artificial Sequence: Synthetic oligonucleotide
  Sense strand starting at position 2532 of SEQ ID NO: 2135
agagcacaauuccuggaau

SEQ ID NO: 165753 - RNA, 19 nt, Artificial Sequence
  Description of Artificial Sequence: Synthetic oligonucleotide
  Antisense strand to SEQ ID NO: 165752
auuccaggaauugugcucu

SEQ ID NO: 165754 - RNA, 19 nt, Artificial Sequence
  Description of Artificial Sequence: Synthetic oligonucleotide
  Sense strand starting at position 2411 of SEQ ID NO: 2135
acaguaauugcguagaacu

SEQ ID NO: 165755 - RNA, 19 nt, Artificial Sequence
  Description of Artificial Sequence: Synthetic oligonucleotide
  Antisense strand to SEQ ID NO: 165754
aguucuacgcaauuacugu

SEQ ID NO: 165756 - RNA, 19 nt, Artificial Sequence
  Description of Artificial Sequence: Synthetic oligonucleotide
  Sense strand starting at position 2123 of SEQ ID NO: 2135
gguggaaccuccgugggaa

SEQ ID NO: 165757 - RNA, 19 nt, Artificial Sequence
  Description of Artificial Sequence: Synthetic oligonucleotide
  Antisense strand to SEQ ID NO: 165756
uucccacggagguuccacc

SEQ ID NO: 165758 - RNA, 19 nt, Artificial Sequence
  Description of Artificial Sequence: Synthetic oligonucleotide
  Sense strand starting at position 1699 of SEQ ID NO: 2135
uggugcuggcaaggaauaa

SEQ ID NO: 165759 - RNA, 19 nt, Artificial Sequence
  Description of Artificial Sequence: Synthetic oligonucleotide
  Antisense strand to SEQ ID NO: 165758
uuauuccuugccagcacca

SEQ ID NO: 165760 - RNA, 19 nt, Artificial Sequence
  Description of Artificial Sequence: Synthetic oligonucleotide
  Sense strand starting at position 1363 of SEQ ID NO: 2135
cuguuaaacagugagguuu

SEQ ID NO: 165761 - RNA, 19 nt, Artificial Sequence
  Description of Artificial Sequence: Synthetic oligonucleotide
  Antisense strand to SEQ ID NO: 165760
aaaccucacuguuuaacag

SEQ ID NO: 165762 - RNA, 19 nt, Artificial Sequence
  Description of Artificial Sequence: Synthetic oligonucleotide
  Sense strand starting at position 1362 of SEQ ID NO: 2135
ucuguuaaacagugagguu

SEQ ID NO: 165763 - RNA, 19 nt, Artificial Sequence
  Description of Artificial Sequence: Synthetic oligonucleotide
  Antisense strand to SEQ ID NO: 165762
aaccucacuguuuaacaga

SEQ ID NO: 165764 - RNA, 19 nt, Artificial Sequence
  Description of Artificial Sequence: Synthetic oligonucleotide
  Sense strand starting at position 1353 of SEQ ID NO: 2135
gaagaugagucuguuaaac

SEQ ID NO: 165765 - RNA, 19 nt, Artificial Sequence
  Description of Artificial Sequence: Synthetic oligonucleotide
  Antisense strand to SEQ ID NO: 165764
guuuaacagacucaucuuc

SEQ ID NO: 165766 - RNA, 19 nt, Artificial Sequence
  Description of Artificial Sequence: Synthetic oligonucleotide
  Sense strand starting at position 1352 of SEQ ID NO: 2135
ggaagaugagucuguuaaa

SEQ ID NO: 165767 - RNA, 19 nt, Artificial Sequence
  Description of Artificial Sequence: Synthetic oligonucleotide
  Antisense strand to SEQ ID NO: 165766
uuuaacagacucaucuucc

SEQ ID NO: 165768 - RNA, 19 nt, Artificial Sequence
  Description of Artificial Sequence: Synthetic oligonucleotide
  Sense strand starting at position 1285 of SEQ ID NO: 2135
ggacaccggucauuccaau

SEQ ID NO: 165769 - RNA, 19 nt, Artificial Sequence
  Description of Artificial Sequence: Synthetic oligonucleotide
  Antisense strand to SEQ ID NO: 165768
auuggaaugaccggugucc

SEQ ID NO: 165770 - RNA, 19 nt, Artificial Sequence
  Description of Artificial Sequence: Synthetic oligonucleotide
  Sense strand starting at position 1269 of SEQ ID NO: 2135
ggaagaugucacggcugga

SEQ ID NO: 165771 - RNA, 19 nt, Artificial Sequence
  Description of Artificial Sequence: Synthetic oligonucleotide
  Antisense strand to SEQ ID NO: 165770
uccagccgugacaucuucc

SEQ ID NO: 165772 - RNA, 19 nt, Artificial Sequence
  Description of Artificial Sequence: Synthetic oligonucleotide
  Sense strand starting at position 1144 of SEQ ID NO: 2135
guuuaugaaaguuguggau

SEQ ID NO: 165773 - RNA, 19 nt, Artificial Sequence
  Description of Artificial Sequence: Synthetic oligonucleotide
  Antisense strand to SEQ ID NO: 165772
auccacaacuuucauaaac

SEQ ID NO: 165774 - RNA, 19 nt, Artificial Sequence
  Description of Artificial Sequence: Synthetic oligonucleotide
  Sense strand starting at position 1135 of SEQ ID NO: 2135
uggagcgauguuuaugaaa

SEQ ID NO: 165775 - RNA, 19 nt, Artificial Sequence
  Description of Artificial Sequence: Synthetic oligonucleotide
  Antisense strand to SEQ ID NO: 165774
uuucauaaacaucgcucca

SEQ ID NO: 165776 - RNA, 19 nt, Artificial Sequence
  Description of Artificial Sequence: Synthetic oligonucleotide
  Sense strand starting at position 1075 of SEQ ID NO: 2135
caaugaugguuauuccugu

SEQ ID NO: 165777 - RNA, 19 nt, Artificial Sequence
  Description of Artificial Sequence: Synthetic oligonucleotide
  Antisense strand to SEQ ID NO: 165776
acaggaauaaccaucauug

SEQ ID NO: 165778 - RNA, 19 nt, Artificial Sequence
  Description of Artificial Sequence: Synthetic oligonucleotide
  Sense strand starting at position 1070 of SEQ ID NO: 2135
ccaaacaaugaugguuauu

SEQ ID NO: 165779 - RNA, 19 nt, Artificial Sequence
  Description of Artificial Sequence: Synthetic oligonucleotide
  Antisense strand to SEQ ID NO: 165778
aauaaccaucauuguuugg

SEQ ID NO: 165780 - RNA, 19 nt, Artificial Sequence
  Description of Artificial Sequence: Synthetic oligonucleotide
  Sense strand starting at position 1042 of SEQ ID NO: 2135
ggccauaauuaucuugaac

SEQ ID NO: 165781 - RNA, 19 nt, Artificial Sequence
  Description of Artificial Sequence: Synthetic oligonucleotide
  Antisense strand to SEQ ID NO: 165780
guucaagauaauuauggcc

SEQ ID NO: 165782 - RNA, 19 nt, Artificial Sequence
  Description of Artificial Sequence: Synthetic oligonucleotide
  Sense strand starting at position 1041 of SEQ ID NO: 2135
aggccauaauuaucuugaa

SEQ ID NO: 165783 - RNA, 19 nt, Artificial Sequence
  Description of Artificial Sequence: Synthetic oligonucleotide
  Antisense strand to SEQ ID NO: 165782
uucaagauaauuauggccu

SEQ ID NO: 165784 - RNA, 19 nt, Artificial Sequence
  Description of Artificial Sequence: Synthetic oligonucleotide
  Sense strand starting at position 874 of SEQ ID NO: 2135
ugcuuagugccugcuauau

SEQ ID NO: 165785 - RNA, 19 nt, Artificial Sequence
  Description of Artificial Sequence: Synthetic oligonucleotide
  Antisense strand to SEQ ID NO: 165784
auauagcaggcacuaagca

SEQ ID NO: 165786 - RNA, 19 nt, Artificial Sequence
  Description of Artificial Sequence: Synthetic oligonucleotide
  Sense strand starting at position 672 of SEQ ID NO: 2135
gcggauguuaaucacauau

SEQ ID NO: 165787 - RNA, 19 nt, Artificial Sequence
  Description of Artificial Sequence: Synthetic oligonucleotide
  Antisense strand to SEQ ID NO: 165786
auaugugauuaacauccgc

SEQ ID NO: 165788 - RNA, 19 nt, Artificial Sequence
  Description of Artificial Sequence: Synthetic oligonucleotide
  Sense strand starting at position 663 of SEQ ID NO: 2135
uacauacaugcggauguua

SEQ ID NO: 165789 - RNA, 19 nt, Artificial Sequence
  Description of Artificial Sequence: Synthetic oligonucleotide
  Antisense strand to SEQ ID NO: 165788
uaacauccgcauguaugua

SEQ ID NO: 165790 - RNA, 19 nt, Artificial Sequence
  Description of Artificial Sequence: Synthetic oligonucleotide
  Sense strand starting at position 583 of SEQ ID NO: 2135
ucuuuaucuguaugaggau

SEQ ID NO: 165791 - RNA, 19 nt, Artificial Sequence
  Description of Artificial Sequence: Synthetic oligonucleotide
  Antisense strand to SEQ ID NO: 165790
auccucauacagauaaaga

SEQ ID NO: 165792 - RNA, 19 nt, Artificial Sequence
  Description of Artificial Sequence: Synthetic oligonucleotide
  Sense strand starting at position 487 of SEQ ID NO: 2135
uaauuacgagauugugaag

SEQ ID NO: 165793 - RNA, 19 nt, Artificial Sequence
  Description of Artificial Sequence: Synthetic oligonucleotide
  Antisense strand to SEQ ID NO: 165792
cuucacaaucucguaauua

SEQ ID NO: 165794 - RNA, 19 nt, Artificial Sequence
  Description of Artificial Sequence: Synthetic oligonucleotide
  Sense strand starting at position 484 of SEQ ID NO: 2135
uguuaauuacgagauugug

SEQ ID NO: 165795 - RNA, 19 nt, Artificial Sequence
  Description of Artificial Sequence: Synthetic oligonucleotide
  Antisense strand to SEQ ID NO: 165794
cacaaucucguaauuaaca

SEQ ID NO: 165796 - RNA, 19 nt, Artificial Sequence
  Description of Artificial Sequence: Synthetic oligonucleotide
  Sense strand starting at position 274 of SEQ ID NO: 2135
gucaccaaacaugguuaau

SEQ ID NO: 165797 - RNA, 19 nt, Artificial Sequence
  Description of Artificial Sequence: Synthetic oligonucleotide
  Antisense strand to SEQ ID NO: 165796
auuaaccauguuuggugac

SEQ ID NO: 165798 - RNA, 19 nt, Artificial Sequence
  Description of Artificial Sequence: Synthetic oligonucleotide
  Sense strand starting at position 267 of SEQ ID NO: 2135
ggugcaugucaccaaacau

SEQ ID NO: 165799 - RNA, 19 nt, Artificial Sequence
  Description of Artificial Sequence: Synthetic oligonucleotide
  Antisense strand to SEQ ID NO: 165798
auguuuggugacaugcacc

SEQ ID NO: 165800 - RNA, 19 nt, Artificial Sequence
  Description of Artificial Sequence: Synthetic oligonucleotide
  Sense strand starting at position 112 of SEQ ID NO: 2135
ggcuuacgcuagcuauuua

SEQ ID NO: 165801 - RNA, 19 nt, Artificial Sequence
  Description of Artificial Sequence: Synthetic oligonucleotide
  Antisense strand to SEQ ID NO: 165800
uaaauagcuagcguaagcc

SEQ ID NO: 165802 - RNA, 19 nt, Artificial Sequence
  Description of Artificial Sequence: Synthetic oligonucleotide
  Sense strand starting at position 3801 of SEQ ID NO: 2137
guuggagcuuuauuaauac

SEQ ID NO: 165803 - RNA, 19 nt, Artificial Sequence
  Description of Artificial Sequence: Synthetic oligonucleotide
  Antisense strand to SEQ ID NO: 165802
guauuaauaaagcuccaac

SEQ ID NO: 165804 - RNA, 19 nt, Artificial Sequence
  Description of Artificial Sequence: Synthetic oligonucleotide
  Sense strand starting at position 3598 of SEQ ID NO: 2137
aucucaaaucuaggaaguu

SEQ ID NO: 165805 - RNA, 19 nt, Artificial Sequence
  Description of Artificial Sequence: Synthetic oligonucleotide
  Antisense strand to SEQ ID NO: 165804
aacuuccuagauuugagau

SEQ ID NO: 165806 - RNA, 19 nt, Artificial Sequence
  Description of Artificial Sequence: Synthetic oligonucleotide
  Sense strand starting at position 3585 of SEQ ID NO: 2137
agaauacgugcuuaucuca

SEQ ID NO: 165807 - RNA, 19 nt, Artificial Sequence
  Description of Artificial Sequence: Synthetic oligonucleotide
  Antisense strand to SEQ ID NO: 165806
ugagauaagcacguauucu

SEQ ID NO: 165808 - RNA, 19 nt, Artificial Sequence
  Description of Artificial Sequence: Synthetic oligonucleotide
  Sense strand starting at position 3580 of SEQ ID NO: 2137
auauuagaauacgugcuua

SEQ ID NO: 165809 - RNA, 19 nt, Artificial Sequence
  Description of Artificial Sequence: Synthetic oligonucleotide
  Antisense strand to SEQ ID NO: 165808
uaagcacguauucuaauau

SEQ ID NO: 165810 - RNA, 19 nt, Artificial Sequence
  Description of Artificial Sequence: Synthetic oligonucleotide
  Sense strand starting at position 3533 of SEQ ID NO: 2137
ugagguaucccucagcuga

SEQ ID NO: 165811 - RNA, 19 nt, Artificial Sequence
  Description of Artificial Sequence: Synthetic oligonucleotide
  Antisense strand to SEQ ID NO: 165810
ucagcugagggauaccuca

SEQ ID NO: 165812 - RNA, 19 nt, Artificial Sequence
  Description of Artificial Sequence: Synthetic oligonucleotide
  Sense strand starting at position 3462 of SEQ ID NO: 2137
ugacauucuuuaccauguu

SEQ ID NO: 165813 - RNA, 19 nt, Artificial Sequence
  Description of Artificial Sequence: Synthetic oligonucleotide
  Antisense strand to SEQ ID NO: 165812
aacaugguaaagaauguca

SEQ ID NO: 165814 - RNA, 19 nt, Artificial Sequence
  Description of Artificial Sequence: Synthetic oligonucleotide
  Sense strand starting at position 3358 of SEQ ID NO: 2137
caccuauugcgggaagcaa

SEQ ID NO: 165815 - RNA, 19 nt, Artificial Sequence
  Description of Artificial Sequence: Synthetic oligonucleotide
  Antisense strand to SEQ ID NO: 165814
uugcuucccgcaauaggug

SEQ ID NO: 165816 - RNA, 19 nt, Artificial Sequence
  Description of Artificial Sequence: Synthetic oligonucleotide
  Sense strand starting at position 3284 of SEQ ID NO: 2137
gcaguaauuagguacaguu

SEQ ID NO: 165817 - RNA, 19 nt, Artificial Sequence
  Description of Artificial Sequence: Synthetic oligonucleotide
  Antisense strand to SEQ ID NO: 165816
aacuguaccuaauuacugc

SEQ ID NO: 165818 - RNA, 19 nt, Artificial Sequence
  Description of Artificial Sequence: Synthetic oligonucleotide
  Sense strand starting at position 3206 of SEQ ID NO: 2137
ucaauuugauguuagagaa

SEQ ID NO: 165819 - RNA, 19 nt, Artificial Sequence
  Description of Artificial Sequence: Synthetic oligonucleotide
  Antisense strand to SEQ ID NO: 165818
uucucuaacaucaaauuga

SEQ ID NO: 165820 - RNA, 19 nt, Artificial Sequence
  Description of Artificial Sequence: Synthetic oligonucleotide
  Sense strand starting at position 3188 of SEQ ID NO: 2137
gugauucuuggauauaagu

SEQ ID NO: 165821 - RNA, 19 nt, Artificial Sequence
  Description of Artificial Sequence: Synthetic oligonucleotide
  Antisense strand to SEQ ID NO: 165820
acuuauauccaagaaucac

SEQ ID NO: 165822 - RNA, 19 nt, Artificial Sequence
  Description of Artificial Sequence: Synthetic oligonucleotide
  Sense strand starting at position 3145 of SEQ ID NO: 2137
uguuaauuauagucccaaa

SEQ ID NO: 165823 - RNA, 19 nt, Artificial Sequence
  Description of Artificial Sequence: Synthetic oligonucleotide
  Antisense strand to SEQ ID NO: 165822
uuugggacuauaauuaaca

SEQ ID NO: 165824 - RNA, 19 nt, Artificial Sequence
  Description of Artificial Sequence: Synthetic oligonucleotide
  Sense strand starting at position 3133 of SEQ ID NO: 2137
aguugaauuggauguuaau

SEQ ID NO: 165825 - RNA, 19 nt, Artificial Sequence
  Description of Artificial Sequence: Synthetic oligonucleotide
  Antisense strand to SEQ ID NO: 165824
auuaacauccaauucaacu

SEQ ID NO: 165826 - RNA, 19 nt, Artificial Sequence
  Description of Artificial Sequence: Synthetic oligonucleotide
  Sense strand starting at position 3122 of SEQ ID NO: 2137
ugaaccuucuaaguugaau

SEQ ID NO: 165827 - RNA, 19 nt, Artificial Sequence
  Description of Artificial Sequence: Synthetic oligonucleotide
  Antisense strand to SEQ ID NO: 165826
auucaacuuagaagguuca

SEQ ID NO: 165828 - RNA, 19 nt, Artificial Sequence
  Description of Artificial Sequence: Synthetic oligonucleotide
  Sense strand starting at position 3107 of SEQ ID NO: 2137
cgcggaauuuccuuaugaa

SEQ ID NO: 165829 - RNA, 19 nt, Artificial Sequence
  Description of Artificial Sequence: Synthetic oligonucleotide
  Antisense strand to SEQ ID NO: 165828
uucauaaggaaauuccgcg

SEQ ID NO: 165830 - RNA, 19 nt, Artificial Sequence
  Description of Artificial Sequence: Synthetic oligonucleotide
  Sense strand starting at position 3022 of SEQ ID NO: 2137
guuuaaaggacggguuacu

SEQ ID NO: 165831 - RNA, 19 nt, Artificial Sequence
  Description of Artificial Sequence: Synthetic oligonucleotide
  Antisense strand to SEQ ID NO: 165830
aguaacccguccuuuaaac

SEQ ID NO: 165832 - RNA, 19 nt, Artificial Sequence
  Description of Artificial Sequence: Synthetic oligonucleotide
  Sense strand starting at position 3020 of SEQ ID NO: 2137
auguuuaaaggacggguua

SEQ ID NO: 165833 - RNA, 19 nt, Artificial Sequence
  Description of Artificial Sequence: Synthetic oligonucleotide
  Antisense strand to SEQ ID NO: 165832
uaacccguccuuuaaacau

SEQ ID NO: 165834 - RNA, 19 nt, Artificial Sequence
  Description of Artificial Sequence: Synthetic oligonucleotide
  Sense strand starting at position 2283 of SEQ ID NO: 2137
cccagugauccucagcauu

SEQ ID NO: 165835 - RNA, 19 nt, Artificial Sequence
  Description of Artificial Sequence: Synthetic oligonucleotide
  Antisense strand to SEQ ID NO: 165834
aaugcugaggaucacuggg

SEQ ID NO: 165836 - RNA, 19 nt, Artificial Sequence
  Description of Artificial Sequence: Synthetic oligonucleotide
  Sense strand starting at position 2276 of SEQ ID NO: 2137
ggaggagcccagugauccu

SEQ ID NO: 165837 - RNA, 19 nt, Artificial Sequence
  Description of Artificial Sequence: Synthetic oligonucleotide
  Antisense strand to SEQ ID NO: 165836
aggaucacugggcuccucc

SEQ ID NO: 165838 - RNA, 19 nt, Artificial Sequence
  Description of Artificial Sequence: Synthetic oligonucleotide
  Sense strand starting at position 2253 of SEQ ID NO: 2137
gcuggcuugcguucagaaa

SEQ ID NO: 165839 - RNA, 19 nt, Artificial Sequence
  Description of Artificial Sequence: Synthetic oligonucleotide
  Antisense strand to SEQ ID NO: 165838
uuucugaacgcaagccagc

SEQ ID NO: 165840 - RNA, 19 nt, Artificial Sequence
  Description of Artificial Sequence: Synthetic oligonucleotide
  Sense strand starting at position 2025 of SEQ ID NO: 2137
gcguacucgccucucaaca

SEQ ID NO: 165841 - RNA, 19 nt, Artificial Sequence
  Description of Artificial Sequence: Synthetic oligonucleotide
  Antisense strand to SEQ ID NO: 165840
uguugagaggcgaguacgc

SEQ ID NO: 165842 - RNA, 19 nt, Artificial Sequence
  Description of Artificial Sequence: Synthetic oligonucleotide
  Sense strand starting at position 1400 of SEQ ID NO: 2137
cccacugagucucuguaaa

SEQ ID NO: 165843 - RNA, 19 nt, Artificial Sequence
  Description of Artificial Sequence: Synthetic oligonucleotide
  Antisense strand to SEQ ID NO: 165842
uuuacagagacucaguggg

SEQ ID NO: 165844 - RNA, 19 nt, Artificial Sequence
  Description of Artificial Sequence: Synthetic oligonucleotide
  Sense strand starting at position 1279 of SEQ ID NO: 2137
ggagcaacuuacuuaccau

SEQ ID NO: 165845 - RNA, 19 nt, Artificial Sequence
  Description of Artificial Sequence: Synthetic oligonucleotide
  Antisense strand to SEQ ID NO: 165844
augguaaguaaguugcucc

SEQ ID NO: 165846 - RNA, 19 nt, Artificial Sequence
  Description of Artificial Sequence: Synthetic oligonucleotide
  Sense strand starting at position 1271 of SEQ ID NO: 2137
ggcaaaucggagcaacuua

SEQ ID NO: 165847 - RNA, 19 nt, Artificial Sequence
  Description of Artificial Sequence: Synthetic oligonucleotide
  Antisense strand to SEQ ID NO: 165846
uaaguugcuccgauuugcc

SEQ ID NO: 165848 - RNA, 19 nt, Artificial Sequence
  Description of Artificial Sequence: Synthetic oligonucleotide
  Sense strand starting at position 1132 of SEQ ID NO: 2137
gcgagaaauguccaggaga

SEQ ID NO: 165849 - RNA, 19 nt, Artificial Sequence
  Description of Artificial Sequence: Synthetic oligonucleotide
  Antisense strand to SEQ ID NO: 165848
ucuccuggacauuucucgc

SEQ ID NO: 165850 - RNA, 19 nt, Artificial Sequence
  Description of Artificial Sequence: Synthetic oligonucleotide
  Sense strand starting at position 1105 of SEQ ID NO: 2137
ccgaguguacuugggauca

SEQ ID NO: 165851 - RNA, 19 nt, Artificial Sequence
  Description of Artificial Sequence: Synthetic oligonucleotide
  Antisense strand to SEQ ID NO: 165850
ugaucccaaguacacucgg

SEQ ID NO: 165852 - RNA, 19 nt, Artificial Sequence
  Description of Artificial Sequence: Synthetic oligonucleotide
  Sense strand starting at position 921 of SEQ ID NO: 2137
gugcuuuagggacaaagca

SEQ ID NO: 165853 - RNA, 19 nt, Artificial Sequence
  Description of Artificial Sequence: Synthetic oligonucleotide
  Antisense strand to SEQ ID NO: 165852
ugcuuugucccuaaagcac

SEQ ID NO: 165854 - RNA, 19 nt, Artificial Sequence
  Description of Artificial Sequence: Synthetic oligonucleotide
  Sense strand starting at position 910 of SEQ ID NO: 2137
aaacuuaaggagugcuuua

SEQ ID NO: 165855 - RNA, 19 nt, Artificial Sequence
  Description of Artificial Sequence: Synthetic oligonucleotide
  Antisense strand to SEQ ID NO: 165854
uaaagcacuccuuaaguuu

SEQ ID NO: 165856 - RNA, 19 nt, Artificial Sequence
  Description of Artificial Sequence: Synthetic oligonucleotide
  Sense strand starting at position 877 of SEQ ID NO: 2137
ccagaagugccugggauua

SEQ ID NO: 165857 - RNA, 19 nt, Artificial Sequence
  Description of Artificial Sequence: Synthetic oligonucleotide
  Antisense strand to SEQ ID NO: 165856
uaaucccaggcacuucugg

SEQ ID NO: 165858 - RNA, 19 nt, Artificial Sequence
  Description of Artificial Sequence: Synthetic oligonucleotide
  Sense strand starting at position 876 of SEQ ID NO: 2137
uccagaagugccugggauu

SEQ ID NO: 165859 - RNA, 19 nt, Artificial Sequence
  Description of Artificial Sequence: Synthetic oligonucleotide
  Antisense strand to SEQ ID NO: 165858
aaucccaggcacuucugga

SEQ ID NO: 165860 - RNA, 19 nt, Artificial Sequence
  Description of Artificial Sequence: Synthetic oligonucleotide
  Sense strand starting at position 789 of SEQ ID NO: 2137
gaaauucccugggaggaaa

SEQ ID NO: 165861 - RNA, 19 nt, Artificial Sequence
  Description of Artificial Sequence: Synthetic oligonucleotide
  Antisense strand to SEQ ID NO: 165860
uuuccucccagggaauuuc

SEQ ID NO: 165862 - RNA, 19 nt, Artificial Sequence
  Description of Artificial Sequence: Synthetic oligonucleotide
  Sense strand starting at position 773 of SEQ ID NO: 2137
gucacacaucuuugaagaa

SEQ ID NO: 165863 - RNA, 19 nt, Artificial Sequence
  Description of Artificial Sequence: Synthetic oligonucleotide
  Antisense strand to SEQ ID NO: 165862
uucuucaaagaugugugac

SEQ ID NO: 165864 - RNA, 19 nt, Artificial Sequence
  Description of Artificial Sequence: Synthetic oligonucleotide
  Sense strand starting at position 772 of SEQ ID NO: 2137
ugucacacaucuuugaaga

SEQ ID NO: 165865 - RNA, 19 nt, Artificial Sequence
  Description of Artificial Sequence: Synthetic oligonucleotide
  Antisense strand to SEQ ID NO: 165864
ucuucaaagaugugugaca

SEQ ID NO: 165866 - RNA, 19 nt, Artificial Sequence
  Description of Artificial Sequence: Synthetic oligonucleotide
  Sense strand starting at position 762 of SEQ ID NO: 2137
agucaucaauugucacaca

SEQ ID NO: 165867 - RNA, 19 nt, Artificial Sequence
  Description of Artificial Sequence: Synthetic oligonucleotide
  Antisense strand to SEQ ID NO: 165866
ugugugacaauugaugacu

SEQ ID NO: 165868 - RNA, 19 nt, Artificial Sequence
  Description of Artificial Sequence: Synthetic oligonucleotide
  Sense strand starting at position 730 of SEQ ID NO: 2137
gcaaaucgccuagacugaa

SEQ ID NO: 165869 - RNA, 19 nt, Artificial Sequence
  Description of Artificial Sequence: Synthetic oligonucleotide
  Antisense strand to SEQ ID NO: 165868
uucagucuaggcgauuugc

SEQ ID NO: 165870 - RNA, 19 nt, Artificial Sequence
  Description of Artificial Sequence: Synthetic oligonucleotide
  Sense strand starting at position 670 of SEQ ID NO: 2137
uggugcuuugcagaaauaa

SEQ ID NO: 165871 - RNA, 19 nt, Artificial Sequence
  Description of Artificial Sequence: Synthetic oligonucleotide
  Antisense strand to SEQ ID NO: 165870
uuauuucugcaaagcacca

SEQ ID NO: 165872 - RNA, 19 nt, Artificial Sequence
  Description of Artificial Sequence: Synthetic oligonucleotide
  Sense strand starting at position 405 of SEQ ID NO: 2137
ggcacuucuccguacccaa

SEQ ID NO: 165873 - RNA, 19 nt, Artificial Sequence
  Description of Artificial Sequence: Synthetic oligonucleotide
  Antisense strand to SEQ ID NO: 165872
uuggguacggagaagugcc

SEQ ID NO: 165874 - RNA, 19 nt, Artificial Sequence
  Description of Artificial Sequence: Synthetic oligonucleotide
  Sense strand starting at position 251 of SEQ ID NO: 2137
gguuuaaagaugggcaaga

SEQ ID NO: 165875 - RNA, 19 nt, Artificial Sequence
  Description of Artificial Sequence: Synthetic oligonucleotide
  Antisense strand to SEQ ID NO: 165874
ucuugcccaucuuuaaacc

SEQ ID NO: 165876 - RNA, 19 nt, Artificial Sequence
  Description of Artificial Sequence: Synthetic oligonucleotide
  Sense strand starting at position 116 of SEQ ID NO: 2137
uugcuugauuucguuuaca

SEQ ID NO: 165877 - RNA, 19 nt, Artificial Sequence
  Description of Artificial Sequence: Synthetic oligonucleotide
  Antisense strand to SEQ ID NO: 165876
uguaaacgaaaucaagcaa

SEQ ID NO: 165878 - RNA, 19 nt, Artificial Sequence
  Description of Artificial Sequence: Synthetic oligonucleotide
  Sense strand starting at position 16 of SEQ ID NO: 2137
uacugaggguuagcuuaau

SEQ ID NO: 165879 - RNA, 19 nt, Artificial Sequence
  Description of Artificial Sequence: Synthetic oligonucleotide
  Antisense strand to SEQ ID NO: 165878
auuaagcuaacccucagua

SEQ ID NO: 165880 - RNA, 19 nt, Artificial Sequence
  Description of Artificial Sequence: Synthetic oligonucleotide
  Sense strand starting at position 14 of SEQ ID NO: 2137
cauacugaggguuagcuua

SEQ ID NO: 165881 - RNA, 19 nt, Artificial Sequence
  Description of Artificial Sequence: Synthetic oligonucleotide
  Antisense strand to SEQ ID NO: 165880
uaagcuaacccucaguaug

SEQ ID NO: 165882 - RNA, 19 nt, Artificial Sequence
  Description of Artificial Sequence: Synthetic oligonucleotide
  Sense strand starting at position 3940 of SEQ ID NO: 2136
gaaacccugcuguaacaga

SEQ ID NO: 165883 - RNA, 19 nt, Artificial Sequence
  Description of Artificial Sequence: Synthetic oligonucleotide
  Antisense strand to SEQ ID NO: 165882
ucuguuacagcaggguuuc

SEQ ID NO: 165884 - RNA, 19 nt, Artificial Sequence
  Description of Artificial Sequence: Synthetic oligonucleotide
  Sense strand starting at position 3805 of SEQ ID NO: 2136
gcuugucacauuggagaag

SEQ ID NO: 165885 - RNA, 19 nt, Artificial Sequence
  Description of Artificial Sequence: Synthetic oligonucleotide
  Antisense strand to SEQ ID NO: 165884
cuucuccaaugugacaagc

SEQ ID NO: 165886 - RNA, 19 nt, Artificial Sequence
  Description of Artificial Sequence: Synthetic oligonucleotide
  Sense strand starting at position 3690 of SEQ ID NO: 2136
uaaggcuuaggcuaaguaa

SEQ ID NO: 165887 - RNA, 19 nt, Artificial Sequence
  Description of Artificial Sequence: Synthetic oligonucleotide
  Antisense strand to SEQ ID NO: 165886
uuacuuagccuaagccuua

SEQ ID NO: 165888 - RNA, 19 nt, Artificial Sequence
  Description of Artificial Sequence: Synthetic oligonucleotide
  Sense strand starting at position 3567 of SEQ ID NO: 2136
agaugaaugucaccauacu

SEQ ID NO: 165889 - RNA, 19 nt, Artificial Sequence
  Description of Artificial Sequence: Synthetic oligonucleotide
  Antisense strand to SEQ ID NO: 165888
aguauggugacauucaucu

SEQ ID NO: 165890 - RNA, 19 nt, Artificial Sequence
  Description of Artificial Sequence: Synthetic oligonucleotide
  Sense strand starting at position 3523 of SEQ ID NO: 2136
aguauaagaaagugaguaa

SEQ ID NO: 165891 - RNA, 19 nt, Artificial Sequence
  Description of Artificial Sequence: Synthetic oligonucleotide
  Antisense strand to SEQ ID NO: 165890
uuacucacuuucuuauacu

SEQ ID NO: 165892 - RNA, 19 nt, Artificial Sequence
  Description of Artificial Sequence: Synthetic oligonucleotide
  Sense strand starting at position 3412 of SEQ ID NO: 2136
auagaaguuccauagagcu

SEQ ID NO: 165893 - RNA, 19 nt, Artificial Sequence
  Description of Artificial Sequence: Synthetic oligonucleotide
  Antisense strand to SEQ ID NO: 165892
agcucuauggaacuucuau

SEQ ID NO: 165894 - RNA, 19 nt, Artificial Sequence
  Description of Artificial Sequence: Synthetic oligonucleotide
  Sense strand starting at position 3360 of SEQ ID NO: 2136
cuuucuauauuuguguuga

SEQ ID NO: 165895 - RNA, 19 nt, Artificial Sequence
  Description of Artificial Sequence: Synthetic oligonucleotide
  Antisense strand to SEQ ID NO: 165894
ucaacacaaauauagaaag

SEQ ID NO: 165896 - RNA, 19 nt, Artificial Sequence
  Description of Artificial Sequence: Synthetic oligonucleotide
  Sense strand starting at position 3271 of SEQ ID NO: 2136
guaguugcuggacauauua

SEQ ID NO: 165897 - RNA, 19 nt, Artificial Sequence
  Description of Artificial Sequence: Synthetic oligonucleotide
  Antisense strand to SEQ ID NO: 165896
uaauauguccagcaacuac

SEQ ID NO: 165898 - RNA, 19 nt, Artificial Sequence
  Description of Artificial Sequence: Synthetic oligonucleotide
  Sense strand starting at position 3268 of SEQ ID NO: 2136
caaguaguugcuggacaua

SEQ ID NO: 165899 - RNA, 19 nt, Artificial Sequence
  Description of Artificial Sequence: Synthetic oligonucleotide
  Antisense strand to SEQ ID NO: 165898
uauguccagcaacuacuug

SEQ ID NO: 165900 - RNA, 19 nt, Artificial Sequence
  Description of Artificial Sequence: Synthetic oligonucleotide
  Sense strand starting at position 3032 of SEQ ID NO: 2136
guuggagcuuuauuaauac

SEQ ID NO: 165901 - RNA, 19 nt, Artificial Sequence
  Description of Artificial Sequence: Synthetic oligonucleotide
  Antisense strand to SEQ ID NO: 165900
guauuaauaaagcuccaac

SEQ ID NO: 165902 - RNA, 19 nt, Artificial Sequence
  Description of Artificial Sequence: Synthetic oligonucleotide
  Sense strand starting at position 2829 of SEQ ID NO: 2136
aucucaaaucuaggaaguu

SEQ ID NO: 165903 - RNA, 19 nt, Artificial Sequence
  Description of Artificial Sequence: Synthetic oligonucleotide
  Antisense strand to SEQ ID NO: 165902
aacuuccuagauuugagau

SEQ ID NO: 165904 - RNA, 19 nt, Artificial Sequence
  Description of Artificial Sequence: Synthetic oligonucleotide
  Sense strand starting at position 2816 of SEQ ID NO: 2136
agaauacgugcuuaucuca

SEQ ID NO: 165905 - RNA, 19 nt, Artificial Sequence
  Description of Artificial Sequence: Synthetic oligonucleotide
  Antisense strand to SEQ ID NO: 165904
ugagauaagcacguauucu

SEQ ID NO: 165906 - RNA, 19 nt, Artificial Sequence
  Description of Artificial Sequence: Synthetic oligonucleotide
  Sense strand starting at position 2811 of SEQ ID NO: 2136
auauuagaauacgugcuua

SEQ ID NO: 165907 - RNA, 19 nt, Artificial Sequence
  Description of Artificial Sequence: Synthetic oligonucleotide
  Antisense strand to SEQ ID NO: 165906
uaagcacguauucuaauau

SEQ ID NO: 165908 - RNA, 19 nt, Artificial Sequence
  Description of Artificial Sequence: Synthetic oligonucleotide
  Sense strand starting at position 2764 of SEQ ID NO: 2136
ugagguaucccucagcuga

SEQ ID NO: 165909 - RNA, 19 nt, Artificial Sequence
  Description of Artificial Sequence: Synthetic oligonucleotide
  Antisense strand to SEQ ID NO: 165908
ucagcugagggauaccuca

SEQ ID NO: 165910 - RNA, 19 nt, Artificial Sequence
  Description of Artificial Sequence: Synthetic oligonucleotide
  Sense strand starting at position 2693 of SEQ ID NO: 2136
ugacauucuuuaccauguu

SEQ ID NO: 165911 - RNA, 19 nt, Artificial Sequence
  Description of Artificial Sequence: Synthetic oligonucleotide
  Antisense strand to SEQ ID NO: 165910
aacaugguaaagaauguca

SEQ ID NO: 165912 - RNA, 19 nt, Artificial Sequence
  Description of Artificial Sequence: Synthetic oligonucleotide
  Sense strand starting at position 2589 of SEQ ID NO: 2136
caccuauugcgggaagcaa

SEQ ID NO: 165913 - RNA, 19 nt, Artificial Sequence
  Description of Artificial Sequence: Synthetic oligonucleotide
  Antisense strand to SEQ ID NO: 165912
uugcuucccgcaauaggug

SEQ ID NO: 165914 - RNA, 19 nt, Artificial Sequence
  Description of Artificial Sequence: Synthetic oligonucleotide
  Sense strand starting at position 2515 of SEQ ID NO: 2136
gcaguaauuagguacaguu

SEQ ID NO: 165915 - RNA, 19 nt, Artificial Sequence
  Description of Artificial Sequence: Synthetic oligonucleotide
  Antisense strand to SEQ ID NO: 165914
aacuguaccuaauuacugc

SEQ ID NO: 165916 - RNA, 19 nt, Artificial Sequence
  Description of Artificial Sequence: Synthetic oligonucleotide
  Sense strand starting at position 2437 of SEQ ID NO: 2136
ucaauuugauguuagagaa

SEQ ID NO: 165917 - RNA, 19 nt, Artificial Sequence
  Description of Artificial Sequence: Synthetic oligonucleotide
  Antisense strand to SEQ ID NO: 165916
uucucuaacaucaaauuga

SEQ ID NO: 165918 - RNA, 19 nt, Artificial Sequence
  Description of Artificial Sequence: Synthetic oligonucleotide
  Sense strand starting at position 2419 of SEQ ID NO: 2136
gugauucuuggauauaagu

SEQ ID NO: 165919 - RNA, 19 nt, Artificial Sequence
  Description of Artificial Sequence: Synthetic oligonucleotide
  Antisense strand to SEQ ID NO: 165918
acuuauauccaagaaucac

SEQ ID NO: 165920 - RNA, 19 nt, Artificial Sequence
  Description of Artificial Sequence: Synthetic oligonucleotide
  Sense strand starting at position 2376 of SEQ ID NO: 2136
uguuaauuauagucccaaa

SEQ ID NO: 165921 - RNA, 19 nt, Artificial Sequence
  Description of Artificial Sequence: Synthetic oligonucleotide
  Antisense strand to SEQ ID NO: 165920
uuugggacuauaauuaaca

SEQ ID NO: 165922 - RNA, 19 nt, Artificial Sequence
  Description of Artificial Sequence: Synthetic oligonucleotide
  Sense strand starting at position 2364 of SEQ ID NO: 2136
aguugaauuggauguuaau

SEQ ID NO: 165923 - RNA, 19 nt, Artificial Sequence
  Description of Artificial Sequence: Synthetic oligonucleotide
  Antisense strand to SEQ ID NO: 165922
auuaacauccaauucaacu

SEQ ID NO: 165924 - RNA, 19 nt, Artificial Sequence
  Description of Artificial Sequence: Synthetic oligonucleotide
  Sense strand starting at position 2353 of SEQ ID NO: 2136
ugaaccuucuaaguugaau

SEQ ID NO: 165925 - RNA, 19 nt, Artificial Sequence
  Description of Artificial Sequence: Synthetic oligonucleotide
  Antisense strand to SEQ ID NO: 165924
auucaacuuagaagguuca

SEQ ID NO: 165926 - RNA, 19 nt, Artificial Sequence
  Description of Artificial Sequence: Synthetic oligonucleotide
  Sense strand starting at position 2338 of SEQ ID NO: 2136
cgcggaauuuccuuaugaa

SEQ ID NO: 165927 - RNA, 19 nt, Artificial Sequence
  Description of Artificial Sequence: Synthetic oligonucleotide
  Antisense strand to SEQ ID NO: 165926
uucauaaggaaauuccgcg

SEQ ID NO: 165928 - RNA, 19 nt, Artificial Sequence
  Description of Artificial Sequence: Synthetic oligonucleotide
  Sense strand starting at position 2253 of SEQ ID NO: 2136
guuuaaaggacggguuacu

SEQ ID NO: 165929 - RNA, 19 nt, Artificial Sequence
  Description of Artificial Sequence: Synthetic oligonucleotide
  Antisense strand to SEQ ID NO: 165928
aguaacccguccuuuaaac

SEQ ID NO: 165930 - RNA, 19 nt, Artificial Sequence
  Description of Artificial Sequence: Synthetic oligonucleotide
  Sense strand starting at position 2251 of SEQ ID NO: 2136
auguuuaaaggacggguua

SEQ ID NO: 165931 - RNA, 19 nt, Artificial Sequence
  Description of Artificial Sequence: Synthetic oligonucleotide
  Antisense strand to SEQ ID NO: 165930
uaacccguccuuuaaacau

SEQ ID NO: 165932 - RNA, 19 nt, Artificial Sequence
  Description of Artificial Sequence: Synthetic oligonucleotide
  Sense strand starting at position 1514 of SEQ ID NO: 2136
cccagugauccucagcauu

SEQ ID NO: 165933 - RNA, 19 nt, Artificial Sequence
  Description of Artificial Sequence: Synthetic oligonucleotide
  Antisense strand to SEQ ID NO: 165932
aaugcugaggaucacuggg

SEQ ID NO: 165934 - RNA, 19 nt, Artificial Sequence
  Description of Artificial Sequence: Synthetic oligonucleotide
  Sense strand starting at position 1507 of SEQ ID NO: 2136
ggaggagcccagugauccu

SEQ ID NO: 165935 - RNA, 19 nt, Artificial Sequence
  Description of Artificial Sequence: Synthetic oligonucleotide
  Antisense strand to SEQ ID NO: 165934
aggaucacugggcuccucc

SEQ ID NO: 165936 - RNA, 19 nt, Artificial Sequence
  Description of Artificial Sequence: Synthetic oligonucleotide
  Sense strand starting at position 1484 of SEQ ID NO: 2136
gcuggcuugcguucagaaa

SEQ ID NO: 165937 - RNA, 19 nt, Artificial Sequence
  Description of Artificial Sequence: Synthetic oligonucleotide
  Antisense strand to SEQ ID NO: 165936
uuucugaacgcaagccagc

SEQ ID NO: 165938 - RNA, 19 nt, Artificial Sequence
  Description of Artificial Sequence: Synthetic oligonucleotide
  Sense strand starting at position 1256 of SEQ ID NO: 2136
gcguacucgccucucaaca

SEQ ID NO: 165939 - RNA, 19 nt, Artificial Sequence
  Description of Artificial Sequence: Synthetic oligonucleotide
  Antisense strand to SEQ ID NO: 165938
uguugagaggcgaguacgc

SEQ ID NO: 165940 - RNA, 19 nt, Artificial Sequence
  Description of Artificial Sequence: Synthetic oligonucleotide
  Sense strand starting at position 631 of SEQ ID NO: 2136
cccacugagucucuguaaa

SEQ ID NO: 165941 - RNA, 19 nt, Artificial Sequence
  Description of Artificial Sequence: Synthetic oligonucleotide
  Antisense strand to SEQ ID NO: 165940
uuuacagagacucaguggg

SEQ ID NO: 165942 - RNA, 19 nt, Artificial Sequence
  Description of Artificial Sequence: Synthetic oligonucleotide
  Sense strand starting at position 510 of SEQ ID NO: 2136
ggagcaacuuacuuaccau

SEQ ID NO: 165943 - RNA, 19 nt, Artificial Sequence
  Description of Artificial Sequence: Synthetic oligonucleotide
  Antisense strand to SEQ ID NO: 165942
augguaaguaaguugcucc

SEQ ID NO: 165944 - RNA, 19 nt, Artificial Sequence
  Description of Artificial Sequence: Synthetic oligonucleotide
  Sense strand starting at position 502 of SEQ ID NO: 2136
ggcaaaucggagcaacuua

SEQ ID NO: 165945 - RNA, 19 nt, Artificial Sequence
  Description of Artificial Sequence: Synthetic oligonucleotide
  Antisense strand to SEQ ID NO: 165944
uaaguugcuccgauuugcc

SEQ ID NO: 165946 - RNA, 19 nt, Artificial Sequence
  Description of Artificial Sequence: Synthetic oligonucleotide
  Sense strand starting at position 363 of SEQ ID NO: 2136
gcgagaaauguccaggaga

SEQ ID NO: 165947 - RNA, 19 nt, Artificial Sequence
  Description of Artificial Sequence: Synthetic oligonucleotide
  Antisense strand to SEQ ID NO: 165946
ucuccuggacauuucucgc

SEQ ID NO: 165948 - RNA, 19 nt, Artificial Sequence
  Description of Artificial Sequence: Synthetic oligonucleotide
  Sense strand starting at position 152 of SEQ ID NO: 2136
gugcuuuagggacaaagca

SEQ ID NO: 165949 - RNA, 19 nt, Artificial Sequence
  Description of Artificial Sequence: Synthetic oligonucleotide
  Antisense strand to SEQ ID NO: 165948
ugcuuugucccuaaagcac

SEQ ID NO: 165950 - RNA, 19 nt, Artificial Sequence
  Description of Artificial Sequence: Synthetic oligonucleotide
  Sense strand starting at position 141 of SEQ ID NO: 2136
aaacuuaaggagugcuuua

SEQ ID NO: 165951 - RNA, 19 nt, Artificial Sequence
  Description of Artificial Sequence: Synthetic oligonucleotide
  Antisense strand to SEQ ID NO: 165950
uaaagcacuccuuaaguuu

SEQ ID NO: 165952 - RNA, 19 nt, Artificial Sequence
  Description of Artificial Sequence: Synthetic oligonucleotide
  Sense strand starting at position 108 of SEQ ID NO: 2136
ccagaagugccugggauua

SEQ ID NO: 165953 - RNA, 19 nt, Artificial Sequence
  Description of Artificial Sequence: Synthetic oligonucleotide
  Antisense strand to SEQ ID NO: 165952
uaaucccaggcacuucugg

SEQ ID NO: 165954 - RNA, 19 nt, Artificial Sequence
  Description of Artificial Sequence: Synthetic oligonucleotide
  Sense strand starting at position 107 of SEQ ID NO: 2136
uccagaagugccugggauu

SEQ ID NO: 165955 - RNA, 19 nt, Artificial Sequence
  Description of Artificial Sequence: Synthetic oligonucleotide
  Antisense strand to SEQ ID NO: 165954
aaucccaggcacuucugga

SEQ ID NO: 165956 - RNA, 19 nt, Artificial Sequence
  Description of Artificial Sequence: Synthetic oligonucleotide
  Sense strand starting at position 20 of SEQ ID NO: 2136
gaaauucccugggaggaaa

SEQ ID NO: 165957 - RNA, 19 nt, Artificial Sequence
  Description of Artificial Sequence: Synthetic oligonucleotide
  Antisense strand to SEQ ID NO: 165956
uuuccucccagggaauuuc

SEQ ID NO: 165958 - RNA, 19 nt, Artificial Sequence
  Description of Artificial Sequence: Synthetic oligonucleotide
  Sense strand starting at position 4 of SEQ ID NO: 2136
gucacacaucuuugaagaa

SEQ ID NO: 165959 - RNA, 19 nt, Artificial Sequence
  Description of Artificial Sequence: Synthetic oligonucleotide
  Antisense strand to SEQ ID NO: 165958
uucuucaaagaugugugac

SEQ ID NO: 165960 - RNA, 19 nt, Artificial Sequence
  Description of Artificial Sequence: Synthetic oligonucleotide
  Sense strand starting at position 3 of SEQ ID NO: 2136
ugucacacaucuuugaaga

SEQ ID NO: 165961 - RNA, 19 nt, Artificial Sequence
  Description of Artificial Sequence: Synthetic oligonucleotide
  Antisense strand to SEQ ID NO: 165960
ucuucaaagaugugugaca

SEQ ID NO: 165962 - RNA, 19 nt, Artificial Sequence
  Description of Artificial Sequence: Synthetic oligonucleotide
  Sense strand starting at position 198 of SEQ ID NO: 2138
aucagcaagcucuagagaa

SEQ ID NO: 165963 - RNA, 19 nt, Artificial Sequence
  Description of Artificial Sequence: Synthetic oligonucleotide
  Antisense strand to SEQ ID NO: 165962
uucucuagagcuugcugau

SEQ ID NO: 165964 - RNA, 19 nt, Artificial Sequence
  Description of Artificial Sequence: Synthetic oligonucleotide
  Sense strand starting at position 202 of SEQ ID NO: 2138
gcaagcucuagagaacguu

SEQ ID NO: 165965 - RNA, 19 nt, Artificial Sequence
  Description of Artificial Sequence: Synthetic oligonucleotide
  Antisense strand to SEQ ID NO: 165964
aacguucucuagagcuugc

SEQ ID NO: 165966 - RNA, 19 nt, Artificial Sequence
  Description of Artificial Sequence: Synthetic oligonucleotide
  Sense strand starting at position 214 of SEQ ID NO: 2138
gaacguuugcaauggacag

SEQ ID NO: 165967 - RNA, 19 nt, Artificial Sequence
  Description of Artificial Sequence: Synthetic oligonucleotide
  Antisense strand to SEQ ID NO: 165966
cuguccauugcaaacguuc

SEQ ID NO: 165968 - RNA, 19 nt, Artificial Sequence
  Description of Artificial Sequence: Synthetic oligonucleotide
  Sense strand starting at position 372 of SEQ ID NO: 2138
ggaggcugaggcuaucaau

SEQ ID NO: 165969 - RNA, 19 nt, Artificial Sequence
  Description of Artificial Sequence: Synthetic oligonucleotide
  Antisense strand to SEQ ID NO: 165968
auugauagccucagccucc

SEQ ID NO: 165970 - RNA, 19 nt, Artificial Sequence
  Description of Artificial Sequence: Synthetic oligonucleotide
  Sense strand starting at position 440 of SEQ ID NO: 2138
cugaaaucauaccucgaug

SEQ ID NO: 165971 - RNA, 19 nt, Artificial Sequence
  Description of Artificial Sequence: Synthetic oligonucleotide
  Antisense strand to SEQ ID NO: 165970
caucgagguaugauuucag

SEQ ID NO: 165972 - RNA, 19 nt, Artificial Sequence
  Description of Artificial Sequence: Synthetic oligonucleotide
  Sense strand starting at position 442 of SEQ ID NO: 2138
gaaaucauaccucgaugag

SEQ ID NO: 165973 - RNA, 19 nt, Artificial Sequence
  Description of Artificial Sequence: Synthetic oligonucleotide
  Antisense strand to SEQ ID NO: 165972
cucaucgagguaugauuuc

SEQ ID NO: 165974 - RNA, 19 nt, Artificial Sequence
  Description of Artificial Sequence: Synthetic oligonucleotide
  Sense strand starting at position 445 of SEQ ID NO: 2138
aucauaccucgaugagcaa

SEQ ID NO: 165975 - RNA, 19 nt, Artificial Sequence
  Description of Artificial Sequence: Synthetic oligonucleotide
  Antisense strand to SEQ ID NO: 165974
uugcucaucgagguaugau

SEQ ID NO: 165976 - RNA, 19 nt, Artificial Sequence
  Description of Artificial Sequence: Synthetic oligonucleotide
  Sense strand starting at position 446 of SEQ ID NO: 2138
ucauaccucgaugagcaaa

SEQ ID NO: 165977 - RNA, 19 nt, Artificial Sequence
  Description of Artificial Sequence: Synthetic oligonucleotide
  Antisense strand to SEQ ID NO: 165976
uuugcucaucgagguauga

SEQ ID NO: 165978 - RNA, 19 nt, Artificial Sequence
  Description of Artificial Sequence: Synthetic oligonucleotide
  Sense strand starting at position 659 of SEQ ID NO: 2138
gcugaaaucugaccucuau

SEQ ID NO: 165979 - RNA, 19 nt, Artificial Sequence
  Description of Artificial Sequence: Synthetic oligonucleotide
  Antisense strand to SEQ ID NO: 165978
auagaggucagauuucagc

SEQ ID NO: 165980 - RNA, 19 nt, Artificial Sequence
  Description of Artificial Sequence: Synthetic oligonucleotide
  Sense strand starting at position 777 of SEQ ID NO: 2138
ggaauaaugggccaggcuu

SEQ ID NO: 165981 - RNA, 19 nt, Artificial Sequence
  Description of Artificial Sequence: Synthetic oligonucleotide
  Antisense strand to SEQ ID NO: 165980
aagccuggcccauuauucc

SEQ ID NO: 165982 - RNA, 19 nt, Artificial Sequence
  Description of Artificial Sequence: Synthetic oligonucleotide
  Sense strand starting at position 797 of SEQ ID NO: 2138
auugucuuuccuugggaga

SEQ ID NO: 165983 - RNA, 19 nt, Artificial Sequence
  Description of Artificial Sequence: Synthetic oligonucleotide
  Antisense strand to SEQ ID NO: 165982
ucucccaaggaaagacaau

SEQ ID NO: 165984 - RNA, 19 nt, Artificial Sequence
  Description of Artificial Sequence: Synthetic oligonucleotide
  Sense strand starting at position 798 of SEQ ID NO: 2138
uugucuuuccuugggagaa

SEQ ID NO: 165985 - RNA, 19 nt, Artificial Sequence
  Description of Artificial Sequence: Synthetic oligonucleotide
  Antisense strand to SEQ ID NO: 165984
uucucccaaggaaagacaa

SEQ ID NO: 165986 - RNA, 19 nt, Artificial Sequence
  Description of Artificial Sequence: Synthetic oligonucleotide
  Sense strand starting at position 848 of SEQ ID NO: 2138
acagaauguggguguguga

SEQ ID NO: 165987 - RNA, 19 nt, Artificial Sequence
  Description of Artificial Sequence: Synthetic oligonucleotide
  Antisense strand to SEQ ID NO: 165986
ucacacacccacauucugu

SEQ ID NO: 165988 - RNA, 19 nt, Artificial Sequence
  Description of Artificial Sequence: Synthetic oligonucleotide
  Sense strand starting at position 955 of SEQ ID NO: 2138
guugucagauccuccugaa

SEQ ID NO: 165989 - RNA, 19 nt, Artificial Sequence
  Description of Artificial Sequence: Synthetic oligonucleotide
  Antisense strand to SEQ ID NO: 165988
uucaggaggaucugacaac

SEQ ID NO: 165990 - RNA, 19 nt, Artificial Sequence
  Description of Artificial Sequence: Synthetic oligonucleotide
  Sense strand starting at position 968 of SEQ ID NO: 2138
ccugaagucuggguguaug

SEQ ID NO: 165991 - RNA, 19 nt, Artificial Sequence
  Description of Artificial Sequence: Synthetic oligonucleotide
  Antisense strand to SEQ ID NO: 165990
cauacacccagacuucagg

SEQ ID NO: 165992 - RNA, 19 nt, Artificial Sequence
  Description of Artificial Sequence: Synthetic oligonucleotide
  Sense strand starting at position 1721 of SEQ ID NO: 2138
gugagauuucucugcgcug

SEQ ID NO: 165993 - RNA, 19 nt, Artificial Sequence
  Description of Artificial Sequence: Synthetic oligonucleotide
  Antisense strand to SEQ ID NO: 165992
cagcgcagagaaaucucac

SEQ ID NO: 165994 - RNA, 19 nt, Artificial Sequence
  Description of Artificial Sequence: Synthetic oligonucleotide
  Sense strand starting at position 1722 of SEQ ID NO: 2138
ugagauuucucugcgcugu

SEQ ID NO: 165995 - RNA, 19 nt, Artificial Sequence
  Description of Artificial Sequence: Synthetic oligonucleotide
  Antisense strand to SEQ ID NO: 165994
acagcgcagagaaaucuca

SEQ ID NO: 165996 - RNA, 19 nt, Artificial Sequence
  Description of Artificial Sequence: Synthetic oligonucleotide
  Sense strand starting at position 1724 of SEQ ID NO: 2138
agauuucucugcgcuguca

SEQ ID NO: 165997 - RNA, 19 nt, Artificial Sequence
  Description of Artificial Sequence: Synthetic oligonucleotide
  Antisense strand to SEQ ID NO: 165996
ugacagcgcagagaaaucu

SEQ ID NO: 165998 - RNA, 19 nt, Artificial Sequence
  Description of Artificial Sequence: Synthetic oligonucleotide
  Sense strand starting at position 1726 of SEQ ID NO: 2138
auuucucugcgcugucaaa

SEQ ID NO: 165999 - RNA, 19 nt, Artificial Sequence
  Description of Artificial Sequence: Synthetic oligonucleotide
  Antisense strand to SEQ ID NO: 165998
uuugacagcgcagagaaau

SEQ ID NO: 166000 - RNA, 19 nt, Artificial Sequence
  Description of Artificial Sequence: Synthetic oligonucleotide
  Sense strand starting at position 2565 of SEQ ID NO: 2138
ccagaacucucgccacaga

SEQ ID NO: 166001 - RNA, 19 nt, Artificial Sequence
  Description of Artificial Sequence: Synthetic oligonucleotide
  Antisense strand to SEQ ID NO: 166000
ucuguggcgagaguucugg

SEQ ID NO: 166002 - RNA, 19 nt, Artificial Sequence
  Description of Artificial Sequence: Synthetic oligonucleotide
  Sense strand starting at position 2620 of SEQ ID NO: 2138
cuuaauuucccgcguuaac

SEQ ID NO: 166003 - RNA, 19 nt, Artificial Sequence
  Description of Artificial Sequence: Synthetic oligonucleotide
  Antisense strand to SEQ ID NO: 166002
guuaacgcgggaaauuaag

SEQ ID NO: 166004 - RNA, 19 nt, Artificial Sequence
  Description of Artificial Sequence: Synthetic oligonucleotide
  Sense strand starting at position 3117 of SEQ ID NO: 2138
cagugauuaagagguguca

SEQ ID NO: 166005 - RNA, 19 nt, Artificial Sequence
  Description of Artificial Sequence: Synthetic oligonucleotide
  Antisense strand to SEQ ID NO: 166004
ugacaccucuuaaucacug

SEQ ID NO: 166006 - RNA, 19 nt, Artificial Sequence
  Description of Artificial Sequence: Synthetic oligonucleotide
  Sense strand starting at position 3126 of SEQ ID NO: 2138
agaggugucagcuaaugag

SEQ ID NO: 166007 - RNA, 19 nt, Artificial Sequence
  Description of Artificial Sequence: Synthetic oligonucleotide
  Antisense strand to SEQ ID NO: 166006
cucauuagcugacaccucu

SEQ ID NO: 166008 - RNA, 19 nt, Artificial Sequence
  Description of Artificial Sequence: Synthetic oligonucleotide
  Sense strand starting at position 3174 of SEQ ID NO: 2138
agugacacuccaugauucu

SEQ ID NO: 166009 - RNA, 19 nt, Artificial Sequence
  Description of Artificial Sequence: Synthetic oligonucleotide
  Antisense strand to SEQ ID NO: 166008
agaaucauggagugucacu

SEQ ID NO: 166010 - RNA, 19 nt, Artificial Sequence
  Description of Artificial Sequence: Synthetic oligonucleotide
  Sense strand starting at position 3181 of SEQ ID NO: 2138
cuccaugauucuguagcaa

SEQ ID NO: 166011 - RNA, 19 nt, Artificial Sequence
  Description of Artificial Sequence: Synthetic oligonucleotide
  Antisense strand to SEQ ID NO: 166010
uugcuacagaaucauggag

SEQ ID NO: 166012 - RNA, 19 nt, Artificial Sequence
  Description of Artificial Sequence: Synthetic oligonucleotide
  Sense strand starting at position 3190 of SEQ ID NO: 2138
ucuguagcaauuuguggau

SEQ ID NO: 166013 - RNA, 19 nt, Artificial Sequence
  Description of Artificial Sequence: Synthetic oligonucleotide
  Antisense strand to SEQ ID NO: 166012
auccacaaauugcuacaga

SEQ ID NO: 166014 - RNA, 19 nt, Artificial Sequence
  Description of Artificial Sequence: Synthetic oligonucleotide
  Sense strand starting at position 3279 of SEQ ID NO: 2138
uacugaugguaguugggaa

SEQ ID NO: 166015 - RNA, 19 nt, Artificial Sequence
  Description of Artificial Sequence: Synthetic oligonucleotide
  Antisense strand to SEQ ID NO: 166014
uucccaacuaccaucagua

SEQ ID NO: 166016 - RNA, 19 nt, Artificial Sequence
  Description of Artificial Sequence: Synthetic oligonucleotide
  Sense strand starting at position 3280 of SEQ ID NO: 2138
acugaugguaguugggaaa

SEQ ID NO: 166017 - RNA, 19 nt, Artificial Sequence
  Description of Artificial Sequence: Synthetic oligonucleotide
  Antisense strand to SEQ ID NO: 166016
uuucccaacuaccaucagu

SEQ ID NO: 166018 - RNA, 19 nt, Artificial Sequence
  Description of Artificial Sequence: Synthetic oligonucleotide
  Sense strand starting at position 3318 of SEQ ID NO: 2138
ucagcucuuacugggagua

SEQ ID NO: 166019 - RNA, 19 nt, Artificial Sequence
  Description of Artificial Sequence: Synthetic oligonucleotide
  Antisense strand to SEQ ID NO: 166018
uacucccaguaagagcuga

SEQ ID NO: 166020 - RNA, 19 nt, Artificial Sequence
  Description of Artificial Sequence: Synthetic oligonucleotide
  Sense strand starting at position 3319 of SEQ ID NO: 2138
cagcucuuacugggaguaa

SEQ ID NO: 166021 - RNA, 19 nt, Artificial Sequence
  Description of Artificial Sequence: Synthetic oligonucleotide
  Antisense strand to SEQ ID NO: 166020
uuacucccaguaagagcug

SEQ ID NO: 166022 - RNA, 19 nt, Artificial Sequence
  Description of Artificial Sequence: Synthetic oligonucleotide
  Sense strand starting at position 3379 of SEQ ID NO: 2138
aagucaagcuccguuauuu

SEQ ID NO: 166023 - RNA, 19 nt, Artificial Sequence
  Description of Artificial Sequence: Synthetic oligonucleotide
  Antisense strand to SEQ ID NO: 166022
aaauaacggagcuugacuu

SEQ ID NO: 166024 - RNA, 19 nt, Artificial Sequence
  Description of Artificial Sequence: Synthetic oligonucleotide
  Sense strand starting at position 3454 of SEQ ID NO: 2138
caagauguugacuagcaca

SEQ ID NO: 166025 - RNA, 19 nt, Artificial Sequence
  Description of Artificial Sequence: Synthetic oligonucleotide
  Antisense strand to SEQ ID NO: 166024
ugugcuagucaacaucuug

SEQ ID NO: 166026 - RNA, 19 nt, Artificial Sequence
  Description of Artificial Sequence: Synthetic oligonucleotide
  Sense strand starting at position 3548 of SEQ ID NO: 2138
gugacuguccucuacaguu

SEQ ID NO: 166027 - RNA, 19 nt, Artificial Sequence
  Description of Artificial Sequence: Synthetic oligonucleotide
  Antisense strand to SEQ ID NO: 166026
aacuguagaggacagucac

SEQ ID NO: 166028 - RNA, 19 nt, Artificial Sequence
  Description of Artificial Sequence: Synthetic oligonucleotide
  Sense strand starting at position 3685 of SEQ ID NO: 2138
agauauaucuaagugccau

SEQ ID NO: 166029 - RNA, 19 nt, Artificial Sequence
  Description of Artificial Sequence: Synthetic oligonucleotide
  Antisense strand to SEQ ID NO: 166028
auggcacuuagauauaucu

SEQ ID NO: 166030 - RNA, 19 nt, Artificial Sequence
  Description of Artificial Sequence: Synthetic oligonucleotide
  Sense strand starting at position 3712 of SEQ ID NO: 2138
guucuuuggcuggaguaca

SEQ ID NO: 166031 - RNA, 19 nt, Artificial Sequence
  Description of Artificial Sequence: Synthetic oligonucleotide
  Antisense strand to SEQ ID NO: 166030
uguacuccagccaaagaac

SEQ ID NO: 166032 - RNA, 19 nt, Artificial Sequence
  Description of Artificial Sequence: Synthetic oligonucleotide
  Sense strand starting at position 3793 of SEQ ID NO: 2138
ugggaucuaugcuugaguu

SEQ ID NO: 166033 - RNA, 19 nt, Artificial Sequence
  Description of Artificial Sequence: Synthetic oligonucleotide
  Antisense strand to SEQ ID NO: 166032
aacucaagcauagauccca

SEQ ID NO: 166034 - RNA, 19 nt, Artificial Sequence
  Description of Artificial Sequence: Synthetic oligonucleotide
  Sense strand starting at position 3794 of SEQ ID NO: 2138
gggaucuaugcuugaguuu

SEQ ID NO: 166035 - RNA, 19 nt, Artificial Sequence
  Description of Artificial Sequence: Synthetic oligonucleotide
  Antisense strand to SEQ ID NO: 166034
aaacucaagcauagauccc

SEQ ID NO: 166036 - RNA, 19 nt, Artificial Sequence
  Description of Artificial Sequence: Synthetic oligonucleotide
  Sense strand starting at position 3795 of SEQ ID NO: 2138
ggaucuaugcuugaguuuc

SEQ ID NO: 166037 - RNA, 19 nt, Artificial Sequence
  Description of Artificial Sequence: Synthetic oligonucleotide
  Antisense strand to SEQ ID NO: 166036
gaaacucaagcauagaucc

SEQ ID NO: 166038 - RNA, 19 nt, Artificial Sequence
  Description of Artificial Sequence: Synthetic oligonucleotide
  Sense strand starting at position 3806 of SEQ ID NO: 2138
ugaguuuccucucugacau

SEQ ID NO: 166039 - RNA, 19 nt, Artificial Sequence
  Description of Artificial Sequence: Synthetic oligonucleotide
  Antisense strand to SEQ ID NO: 166038
augucagagaggaaacuca

SEQ ID NO: 166040 - RNA, 19 nt, Artificial Sequence
  Description of Artificial Sequence: Synthetic oligonucleotide
  Sense strand starting at position 3850 of SEQ ID NO: 2138
acugaauacucaucaaggu

SEQ ID NO: 166041 - RNA, 19 nt, Artificial Sequence
  Description of Artificial Sequence: Synthetic oligonucleotide
  Antisense strand to SEQ ID NO: 166040
accuugaugaguauucagu

SEQ ID NO: 166042 - RNA, 19 nt, Artificial Sequence
  Description of Artificial Sequence: Synthetic oligonucleotide
  Sense strand starting at position 119 of SEQ ID NO: 2140
ggugauucccacgaaggau

SEQ ID NO: 166043 - RNA, 19 nt, Artificial Sequence
  Description of Artificial Sequence: Synthetic oligonucleotide
  Antisense strand to SEQ ID NO: 166042
auccuucgugggaaucacc

SEQ ID NO: 166044 - RNA, 19 nt, Artificial Sequence
  Description of Artificial Sequence: Synthetic oligonucleotide
  Sense strand starting at position 127 of SEQ ID NO: 2140
ccacgaaggaugugaagau

SEQ ID NO: 166045 - RNA, 19 nt, Artificial Sequence
  Description of Artificial Sequence: Synthetic oligonucleotide
  Antisense strand to SEQ ID NO: 166044
aucuucacauccuucgugg

SEQ ID NO: 166046 - RNA, 19 nt, Artificial Sequence
  Description of Artificial Sequence: Synthetic oligonucleotide
  Sense strand starting at position 319 of SEQ ID NO: 2140
gagagaagguuggagagau

SEQ ID NO: 166047 - RNA, 19 nt, Artificial Sequence
  Description of Artificial Sequence: Synthetic oligonucleotide
  Antisense strand to SEQ ID NO: 166046
aucucuccaaccuucucuc

SEQ ID NO: 166048 - RNA, 19 nt, Artificial Sequence
  Description of Artificial Sequence: Synthetic oligonucleotide
  Sense strand starting at position 350 of SEQ ID NO: 2140
ggauguacaccaggaaugu

SEQ ID NO: 166049 - RNA, 19 nt, Artificial Sequence
  Description of Artificial Sequence: Synthetic oligonucleotide
  Antisense strand to SEQ ID NO: 166048
acauuccugguguacaucc

SEQ ID NO: 166050 - RNA, 19 nt, Artificial Sequence
  Description of Artificial Sequence: Synthetic oligonucleotide
  Sense strand starting at position 354 of SEQ ID NO: 2140
guacaccaggaauguaaau

SEQ ID NO: 166051 - RNA, 19 nt, Artificial Sequence
  Description of Artificial Sequence: Synthetic oligonucleotide
  Antisense strand to SEQ ID NO: 166050
auuuacauuccugguguac

SEQ ID NO: 166052 - RNA, 19 nt, Artificial Sequence
  Description of Artificial Sequence: Synthetic oligonucleotide
  Sense strand starting at position 780 of SEQ ID NO: 2140
ggaaauguauauccucuca

SEQ ID NO: 166053 - RNA, 19 nt, Artificial Sequence
  Description of Artificial Sequence: Synthetic oligonucleotide
  Antisense strand to SEQ ID NO: 166052
ugagaggauauacauuucc

SEQ ID NO: 166054 - RNA, 19 nt, Artificial Sequence
  Description of Artificial Sequence: Synthetic oligonucleotide
  Sense strand starting at position 928 of SEQ ID NO: 2140
agcgcauuccaggaugcaa

SEQ ID NO: 166055 - RNA, 19 nt, Artificial Sequence
  Description of Artificial Sequence: Synthetic oligonucleotide
  Antisense strand to SEQ ID NO: 166054
uugcauccuggaaugcgcu

SEQ ID NO: 166056 - RNA, 19 nt, Artificial Sequence
  Description of Artificial Sequence: Synthetic oligonucleotide
  Sense strand starting at position 986 of SEQ ID NO: 2140
ccgacucacuguucccaaa

SEQ ID NO: 166057 - RNA, 19 nt, Artificial Sequence
  Description of Artificial Sequence: Synthetic oligonucleotide
  Antisense strand to SEQ ID NO: 166056
uuugggaacagugagucgg

SEQ ID NO: 166058 - RNA, 19 nt, Artificial Sequence
  Description of Artificial Sequence: Synthetic oligonucleotide
  Sense strand starting at position 1144 of SEQ ID NO: 2140
ggaugagacuuguuccgaa

SEQ ID NO: 166059 - RNA, 19 nt, Artificial Sequence
  Description of Artificial Sequence: Synthetic oligonucleotide
  Antisense strand to SEQ ID NO: 166058
uucggaacaagucucaucc

SEQ ID NO: 166060 - RNA, 19 nt, Artificial Sequence
  Description of Artificial Sequence: Synthetic oligonucleotide
  Sense strand starting at position 1278 of SEQ ID NO: 2140
ggcaauugaugcuuuacau

SEQ ID NO: 166061 - RNA, 19 nt, Artificial Sequence
  Description of Artificial Sequence: Synthetic oligonucleotide
  Antisense strand to SEQ ID NO: 166060
auguaaagcaucaauugcc

SEQ ID NO: 166062 - RNA, 19 nt, Artificial Sequence
  Description of Artificial Sequence: Synthetic oligonucleotide
  Sense strand starting at position 1551 of SEQ ID NO: 2140
ggaacucucugaccaaucu

SEQ ID NO: 166063 - RNA, 19 nt, Artificial Sequence
  Description of Artificial Sequence: Synthetic oligonucleotide
  Antisense strand to SEQ ID NO: 166062
agauuggucagagaguucc

SEQ ID NO: 166064 - RNA, 19 nt, Artificial Sequence
  Description of Artificial Sequence: Synthetic oligonucleotide
  Sense strand starting at position 1703 of SEQ ID NO: 2140
acgauauucccaggaagca

SEQ ID NO: 166065 - RNA, 19 nt, Artificial Sequence
  Description of Artificial Sequence: Synthetic oligonucleotide
  Antisense strand to SEQ ID NO: 166064
ugcuuccugggaauaucgu

SEQ ID NO: 166066 - RNA, 19 nt, Artificial Sequence
  Description of Artificial Sequence: Synthetic oligonucleotide
  Sense strand starting at position 1801 of SEQ ID NO: 2140
cuccuuguugugcaggaau

SEQ ID NO: 166067 - RNA, 19 nt, Artificial Sequence
  Description of Artificial Sequence: Synthetic oligonucleotide
  Antisense strand to SEQ ID NO: 166066
auuccugcacaacaaggag

SEQ ID NO: 166068 - RNA, 19 nt, Artificial Sequence
  Description of Artificial Sequence: Synthetic oligonucleotide
  Sense strand starting at position 1804 of SEQ ID NO: 2140
cuuguugugcaggaaugua

SEQ ID NO: 166069 - RNA, 19 nt, Artificial Sequence
  Description of Artificial Sequence: Synthetic oligonucleotide
  Antisense strand to SEQ ID NO: 166068
uacauuccugcacaacaag

SEQ ID NO: 166070 - RNA, 19 nt, Artificial Sequence
  Description of Artificial Sequence: Synthetic oligonucleotide
  Sense strand starting at position 1816 of SEQ ID NO: 2140
gaauguacuguuuaucaga

SEQ ID NO: 166071 - RNA, 19 nt, Artificial Sequence
  Description of Artificial Sequence: Synthetic oligonucleotide
  Antisense strand to SEQ ID NO: 166070
ucugauaaacaguacauuc

SEQ ID NO: 166072 - RNA, 19 nt, Artificial Sequence
  Description of Artificial Sequence: Synthetic oligonucleotide
  Sense strand starting at position 1844 of SEQ ID NO: 2140
acaaacuuguacucgaaca

SEQ ID NO: 166073 - RNA, 19 nt, Artificial Sequence
  Description of Artificial Sequence: Synthetic oligonucleotide
  Antisense strand to SEQ ID NO: 166072
uguucgaguacaaguuugu

SEQ ID NO: 166074 - RNA, 19 nt, Artificial Sequence
  Description of Artificial Sequence: Synthetic oligonucleotide
  Sense strand starting at position 1894 of SEQ ID NO: 2140
agucauagcagaugggaga

SEQ ID NO: 166075 - RNA, 19 nt, Artificial Sequence
  Description of Artificial Sequence: Synthetic oligonucleotide
  Antisense strand to SEQ ID NO: 166074
ucucccaucugcuaugacu

SEQ ID NO: 166076 - RNA, 19 nt, Artificial Sequence
  Description of Artificial Sequence: Synthetic oligonucleotide
  Sense strand starting at position 1939 of SEQ ID NO: 2140
gggcucugcauguaugaaa

SEQ ID NO: 166077 - RNA, 19 nt, Artificial Sequence
  Description of Artificial Sequence: Synthetic oligonucleotide
  Antisense strand to SEQ ID NO: 166076
uuucauacaugcagagccc

SEQ ID NO: 166078 - RNA, 19 nt, Artificial Sequence
  Description of Artificial Sequence: Synthetic oligonucleotide
  Sense strand starting at position 2055 of SEQ ID NO: 2140
ccaucaucuguccaacagu

SEQ ID NO: 166079 - RNA, 19 nt, Artificial Sequence
  Description of Artificial Sequence: Synthetic oligonucleotide
  Antisense strand to SEQ ID NO: 166078
acuguuggacagaugaugg

SEQ ID NO: 166080 - RNA, 19 nt, Artificial Sequence
  Description of Artificial Sequence: Synthetic oligonucleotide
  Sense strand starting at position 2142 of SEQ ID NO: 2140
gacuauaagcaguagcgau

SEQ ID NO: 166081 - RNA, 19 nt, Artificial Sequence
  Description of Artificial Sequence: Synthetic oligonucleotide
  Antisense strand to SEQ ID NO: 166080
aucgcuacugcuuauaguc

SEQ ID NO: 166082 - RNA, 19 nt, Artificial Sequence
  Description of Artificial Sequence: Synthetic oligonucleotide
  Sense strand starting at position 2253 of SEQ ID NO: 2140
cccaguaugaggugggaaa

SEQ ID NO: 166083 - RNA, 19 nt, Artificial Sequence
  Description of Artificial Sequence: Synthetic oligonucleotide
  Antisense strand to SEQ ID NO: 166082
uuucccaccucauacuggg

SEQ ID NO: 166084 - RNA, 19 nt, Artificial Sequence
  Description of Artificial Sequence: Synthetic oligonucleotide
  Sense strand starting at position 2254 of SEQ ID NO: 2140
ccaguaugaggugggaaau

SEQ ID NO: 166085 - RNA, 19 nt, Artificial Sequence
  Description of Artificial Sequence: Synthetic oligonucleotide
  Antisense strand to SEQ ID NO: 166084
auuucccaccucauacugg

SEQ ID NO: 166086 - RNA, 19 nt, Artificial Sequence
  Description of Artificial Sequence: Synthetic oligonucleotide
  Sense strand starting at position 2255 of SEQ ID NO: 2140
caguaugaggugggaaauu

SEQ ID NO: 166087 - RNA, 19 nt, Artificial Sequence
  Description of Artificial Sequence: Synthetic oligonucleotide
  Antisense strand to SEQ ID NO: 166086
aauuucccaccucauacug

SEQ ID NO: 166088 - RNA, 19 nt, Artificial Sequence
  Description of Artificial Sequence: Synthetic oligonucleotide
  Sense strand starting at position 2294 of SEQ ID NO: 2140
agcauuucgugugcauaua

SEQ ID NO: 166089 - RNA, 19 nt, Artificial Sequence
  Description of Artificial Sequence: Synthetic oligonucleotide
  Antisense strand to SEQ ID NO: 166088
uauaugcacacgaaaugcu

SEQ ID NO: 166090 - RNA, 19 nt, Artificial Sequence
  Description of Artificial Sequence: Synthetic oligonucleotide
  Sense strand starting at position 2309 of SEQ ID NO: 2140
uauacugaaguuugagaau

SEQ ID NO: 166091 - RNA, 19 nt, Artificial Sequence
  Description of Artificial Sequence: Synthetic oligonucleotide
  Antisense strand to SEQ ID NO: 166090
auucucaaacuucaguaua

SEQ ID NO: 166092 - RNA, 19 nt, Artificial Sequence
  Description of Artificial Sequence: Synthetic oligonucleotide
  Sense strand starting at position 2318 of SEQ ID NO: 2140
guuugagaaucacuauuaa

SEQ ID NO: 166093 - RNA, 19 nt, Artificial Sequence
  Description of Artificial Sequence: Synthetic oligonucleotide
  Antisense strand to SEQ ID NO: 166092
uuaauagugauucucaaac

SEQ ID NO: 166094 - RNA, 19 nt, Artificial Sequence
  Description of Artificial Sequence: Synthetic oligonucleotide
  Sense strand starting at position 2352 of SEQ ID NO: 2140
ugcaaugauccgcaccaaa

SEQ ID NO: 166095 - RNA, 19 nt, Artificial Sequence
  Description of Artificial Sequence: Synthetic oligonucleotide
  Antisense strand to SEQ ID NO: 166094
uuuggugcggaucauugca

SEQ ID NO: 166096 - RNA, 19 nt, Artificial Sequence
  Description of Artificial Sequence: Synthetic oligonucleotide
  Sense strand starting at position 2549 of SEQ ID NO: 2140
ucagaauuauuggugguag

SEQ ID NO: 166097 - RNA, 19 nt, Artificial Sequence
  Description of Artificial Sequence: Synthetic oligonucleotide
  Antisense strand to SEQ ID NO: 166096
cuaccaccaauaauucuga

SEQ ID NO: 166098 - RNA, 19 nt, Artificial Sequence
  Description of Artificial Sequence: Synthetic oligonucleotide
  Sense strand starting at position 2551 of SEQ ID NO: 2140
agaauuauuggugguagcu

SEQ ID NO: 166099 - RNA, 19 nt, Artificial Sequence
  Description of Artificial Sequence: Synthetic oligonucleotide
  Antisense strand to SEQ ID NO: 166098
agcuaccaccaauaauucu

SEQ ID NO: 166100 - RNA, 19 nt, Artificial Sequence
  Description of Artificial Sequence: Synthetic oligonucleotide
  Sense strand starting at position 2605 of SEQ ID NO: 2140
gggaucucagcuugagaac

SEQ ID NO: 166101 - RNA, 19 nt, Artificial Sequence
  Description of Artificial Sequence: Synthetic oligonucleotide
  Antisense strand to SEQ ID NO: 166100
guucucaagcugagauccc

SEQ ID NO: 166102 - RNA, 19 nt, Artificial Sequence
  Description of Artificial Sequence: Synthetic oligonucleotide
  Sense strand starting at position 2645 of SEQ ID NO: 2140
gguuccuucucaucaaggu

SEQ ID NO: 166103 - RNA, 19 nt, Artificial Sequence
  Description of Artificial Sequence: Synthetic oligonucleotide
  Antisense strand to SEQ ID NO: 166102
accuugaugagaaggaacc

SEQ ID NO: 166104 - RNA, 19 nt, Artificial Sequence
  Description of Artificial Sequence: Synthetic oligonucleotide
  Sense strand starting at position 2715 of SEQ ID NO: 2140
uauagaacacaguguugau

SEQ ID NO: 166105 - RNA, 19 nt, Artificial Sequence
  Description of Artificial Sequence: Synthetic oligonucleotide
  Antisense strand to SEQ ID NO: 166104
aucaacacuguguucuaua

SEQ ID NO: 166106 - RNA, 19 nt, Artificial Sequence
  Description of Artificial Sequence: Synthetic oligonucleotide
  Sense strand starting at position 2897 of SEQ ID NO: 2140
agacucacucuuuagcgaa

SEQ ID NO: 166107 - RNA, 19 nt, Artificial Sequence
  Description of Artificial Sequence: Synthetic oligonucleotide
  Antisense strand to SEQ ID NO: 166106
uucgcuaaagagugagucu

SEQ ID NO: 166108 - RNA, 19 nt, Artificial Sequence
  Description of Artificial Sequence: Synthetic oligonucleotide
  Sense strand starting at position 2962 of SEQ ID NO: 2140
ccaaaugucuugucuugaa

SEQ ID NO: 166109 - RNA, 19 nt, Artificial Sequence
  Description of Artificial Sequence: Synthetic oligonucleotide
  Antisense strand to SEQ ID NO: 166108
uucaagacaagacauuugg

SEQ ID NO: 166110 - RNA, 19 nt, Artificial Sequence
  Description of Artificial Sequence: Synthetic oligonucleotide
  Sense strand starting at position 3042 of SEQ ID NO: 2140
cccacauacuugucauuga

SEQ ID NO: 166111 - RNA, 19 nt, Artificial Sequence
  Description of Artificial Sequence: Synthetic oligonucleotide
  Antisense strand to SEQ ID NO: 166110
ucaaugacaaguauguggg

SEQ ID NO: 166112 - RNA, 19 nt, Artificial Sequence
  Description of Artificial Sequence: Synthetic oligonucleotide
  Sense strand starting at position 3079 of SEQ ID NO: 2140
ggaucugauucuccaacgu

SEQ ID NO: 166113 - RNA, 19 nt, Artificial Sequence
  Description of Artificial Sequence: Synthetic oligonucleotide
  Antisense strand to SEQ ID NO: 166112
acguuggagaaucagaucc

SEQ ID NO: 166114 - RNA, 19 nt, Artificial Sequence
  Description of Artificial Sequence: Synthetic oligonucleotide
  Sense strand starting at position 3083 of SEQ ID NO: 2140
cugauucuccaacgugaag

SEQ ID NO: 166115 - RNA, 19 nt, Artificial Sequence
  Description of Artificial Sequence: Synthetic oligonucleotide
  Antisense strand to SEQ ID NO: 166114
cuucacguuggagaaucag

SEQ ID NO: 166116 - RNA, 19 nt, Artificial Sequence
  Description of Artificial Sequence: Synthetic oligonucleotide
  Sense strand starting at position 3206 of SEQ ID NO: 2140
gccauaguagcugaagagu

SEQ ID NO: 166117 - RNA, 19 nt, Artificial Sequence
  Description of Artificial Sequence: Synthetic oligonucleotide
  Antisense strand to SEQ ID NO: 166116
acucuucagcuacuauggc

SEQ ID NO: 166118 - RNA, 19 nt, Artificial Sequence
  Description of Artificial Sequence: Synthetic oligonucleotide
  Sense strand starting at position 3293 of SEQ ID NO: 2140
aacggaaauguguaucauc

SEQ ID NO: 166119 - RNA, 19 nt, Artificial Sequence
  Description of Artificial Sequence: Synthetic oligonucleotide
  Antisense strand to SEQ ID NO: 166118
gaugauacacauuuccguu

SEQ ID NO: 166120 - RNA, 19 nt, Artificial Sequence
  Description of Artificial Sequence: Synthetic oligonucleotide
  Sense strand starting at position 3331 of SEQ ID NO: 2140
gagucaaccucuguuagga

SEQ ID NO: 166121 - RNA, 19 nt, Artificial Sequence
  Description of Artificial Sequence: Synthetic oligonucleotide
  Antisense strand to SEQ ID NO: 166120
uccuaacagagguugacuc

SEQ ID NO: 166122 - RNA, 19 nt, Artificial Sequence
  Description of Artificial Sequence: Synthetic oligonucleotide
  Sense strand starting at position 64 of SEQ ID NO: 2139
uaagcaaugcuaugugguu

SEQ ID NO: 166123 - RNA, 19 nt, Artificial Sequence
  Description of Artificial Sequence: Synthetic oligonucleotide
  Antisense strand to SEQ ID NO: 166122
aaccacauagcauugcuua

SEQ ID NO: 166124 - RNA, 19 nt, Artificial Sequence
  Description of Artificial Sequence: Synthetic oligonucleotide
  Sense strand starting at position 73 of SEQ ID NO: 2139
cuaugugguucagagagaa

SEQ ID NO: 166125 - RNA, 19 nt, Artificial Sequence
  Description of Artificial Sequence: Synthetic oligonucleotide
  Antisense strand to SEQ ID NO: 166124
uucucucugaaccacauag

SEQ ID NO: 166126 - RNA, 19 nt, Artificial Sequence
  Description of Artificial Sequence: Synthetic oligonucleotide
  Sense strand starting at position 319 of SEQ ID NO: 2139
ggagccauacucuauguuu

SEQ ID NO: 166127 - RNA, 19 nt, Artificial Sequence
  Description of Artificial Sequence: Synthetic oligonucleotide
  Antisense strand to SEQ ID NO: 166126
aaacauagaguauggcucc

SEQ ID NO: 166128 - RNA, 19 nt, Artificial Sequence
  Description of Artificial Sequence: Synthetic oligonucleotide
  Sense strand starting at position 321 of SEQ ID NO: 2139
agccauacucuauguuugu

SEQ ID NO: 166129 - RNA, 19 nt, Artificial Sequence
  Description of Artificial Sequence: Synthetic oligonucleotide
  Antisense strand to SEQ ID NO: 166128
acaaacauagaguauggcu

SEQ ID NO: 166130 - RNA, 19 nt, Artificial Sequence
  Description of Artificial Sequence: Synthetic oligonucleotide
  Sense strand starting at position 322 of SEQ ID NO: 2139
gccauacucuauguuuguu

SEQ ID NO: 166131 - RNA, 19 nt, Artificial Sequence
  Description of Artificial Sequence: Synthetic oligonucleotide
  Antisense strand to SEQ ID NO: 166130
aacaaacauagaguauggc

SEQ ID NO: 166132 - RNA, 19 nt, Artificial Sequence
  Description of Artificial Sequence: Synthetic oligonucleotide
  Sense strand starting at position 469 of SEQ ID NO: 2139
agacaaauucuuugagcug

SEQ ID NO: 166133 - RNA, 19 nt, Artificial Sequence
  Description of Artificial Sequence: Synthetic oligonucleotide
  Antisense strand to SEQ ID NO: 166132
cagcucaaagaauuugucu

SEQ ID NO: 166134 - RNA, 19 nt, Artificial Sequence
  Description of Artificial Sequence: Synthetic oligonucleotide
  Sense strand starting at position 965 of SEQ ID NO: 2139
uaccaagguuaggaagaua

SEQ ID NO: 166135 - RNA, 19 nt, Artificial Sequence
  Description of Artificial Sequence: Synthetic oligonucleotide
  Antisense strand to SEQ ID NO: 166134
uaucuuccuaaccuuggua

SEQ ID NO: 166136 - RNA, 19 nt, Artificial Sequence
  Description of Artificial Sequence: Synthetic oligonucleotide
  Sense strand starting at position 1014 of SEQ ID NO: 2139
gagggugucagcugagaau

SEQ ID NO: 166137 - RNA, 19 nt, Artificial Sequence
  Description of Artificial Sequence: Synthetic oligonucleotide
  Antisense strand to SEQ ID NO: 166136
auucucagcugacacccuc

SEQ ID NO: 166138 - RNA, 19 nt, Artificial Sequence
  Description of Artificial Sequence: Synthetic oligonucleotide
  Sense strand starting at position 1146 of SEQ ID NO: 2139
uugccucagcuccggaaua

SEQ ID NO: 166139 - RNA, 19 nt, Artificial Sequence
  Description of Artificial Sequence: Synthetic oligonucleotide
  Antisense strand to SEQ ID NO: 166138
uauuccggagcugaggcaa

SEQ ID NO: 166140 - RNA, 19 nt, Artificial Sequence
  Description of Artificial Sequence: Synthetic oligonucleotide
  Sense strand starting at position 1587 of SEQ ID NO: 2139
gggacuugguuaagguaga

SEQ ID NO: 166141 - RNA, 19 nt, Artificial Sequence
  Description of Artificial Sequence: Synthetic oligonucleotide
  Antisense strand to SEQ ID NO: 166140
ucuaccuuaaccaaguccc

SEQ ID NO: 166142 - RNA, 19 nt, Artificial Sequence
  Description of Artificial Sequence: Synthetic oligonucleotide
  Sense strand starting at position 1762 of SEQ ID NO: 2139
agcaaagcaucggaggaua

SEQ ID NO: 166143 - RNA, 19 nt, Artificial Sequence
  Description of Artificial Sequence: Synthetic oligonucleotide
  Antisense strand to SEQ ID NO: 166142
uauccuccgaugcuuugcu

SEQ ID NO: 166144 - RNA, 19 nt, Artificial Sequence
  Description of Artificial Sequence: Synthetic oligonucleotide
  Sense strand starting at position 2198 of SEQ ID NO: 2139
cagugauguuaggaagaca

SEQ ID NO: 166145 - RNA, 19 nt, Artificial Sequence
  Description of Artificial Sequence: Synthetic oligonucleotide
  Antisense strand to SEQ ID NO: 166144
ugucuuccuaacaucacug

SEQ ID NO: 166146 - RNA, 19 nt, Artificial Sequence
  Description of Artificial Sequence: Synthetic oligonucleotide
  Sense strand starting at position 2382 of SEQ ID NO: 2139
gagugcuccuauuccaagu

SEQ ID NO: 166147 - RNA, 19 nt, Artificial Sequence
  Description of Artificial Sequence: Synthetic oligonucleotide
  Antisense strand to SEQ ID NO: 166146
acuuggaauaggagcacuc

SEQ ID NO: 166148 - RNA, 19 nt, Artificial Sequence
  Description of Artificial Sequence: Synthetic oligonucleotide
  Sense strand starting at position 2395 of SEQ ID NO: 2139
ccaaguuuaccuggacauu

SEQ ID NO: 166149 - RNA, 19 nt, Artificial Sequence
  Description of Artificial Sequence: Synthetic oligonucleotide
  Antisense strand to SEQ ID NO: 166148
aauguccagguaaacuugg

SEQ ID NO: 166150 - RNA, 19 nt, Artificial Sequence
  Description of Artificial Sequence: Synthetic oligonucleotide
  Sense strand starting at position 2426 of SEQ ID NO: 2139
gagauaacaaggugugguu

SEQ ID NO: 166151 - RNA, 19 nt, Artificial Sequence
  Description of Artificial Sequence: Synthetic oligonucleotide
  Antisense strand to SEQ ID NO: 166150
aaccacaccuuguuaucuc

SEQ ID NO: 166152 - RNA, 19 nt, Artificial Sequence
  Description of Artificial Sequence: Synthetic oligonucleotide
  Sense strand starting at position 2438 of SEQ ID NO: 2139
ugugguuucuauccugaac

SEQ ID NO: 166153 - RNA, 19 nt, Artificial Sequence
  Description of Artificial Sequence: Synthetic oligonucleotide
  Antisense strand to SEQ ID NO: 166152
guucaggauagaaaccaca

SEQ ID NO: 166154 - RNA, 19 nt, Artificial Sequence
  Description of Artificial Sequence: Synthetic oligonucleotide
  Sense strand starting at position 2830 of SEQ ID NO: 2139
ggugacacuugaugaccau

SEQ ID NO: 166155 - RNA, 19 nt, Artificial Sequence
  Description of Artificial Sequence: Synthetic oligonucleotide
  Antisense strand to SEQ ID NO: 166154
auggucaucaagugucacc

SEQ ID NO: 166156 - RNA, 19 nt, Artificial Sequence
  Description of Artificial Sequence: Synthetic oligonucleotide
  Sense strand starting at position 2866 of SEQ ID NO: 2139
gagggaauauggugauuug

SEQ ID NO: 166157 - RNA, 19 nt, Artificial Sequence
  Description of Artificial Sequence: Synthetic oligonucleotide
  Antisense strand to SEQ ID NO: 166156
caaaucaccauauucccuc

SEQ ID NO: 166158 - RNA, 19 nt, Artificial Sequence
  Description of Artificial Sequence: Synthetic oligonucleotide
  Sense strand starting at position 2886 of SEQ ID NO: 2139
ggaaauacauccugaaugu

SEQ ID NO: 166159 - RNA, 19 nt, Artificial Sequence
  Description of Artificial Sequence: Synthetic oligonucleotide
  Antisense strand to SEQ ID NO: 166158
acauucaggauguauuucc

SEQ ID NO: 166160 - RNA, 19 nt, Artificial Sequence
  Description of Artificial Sequence: Synthetic oligonucleotide
  Sense strand starting at position 2896 of SEQ ID NO: 2139
ccugaaugugucuaugcca

SEQ ID NO: 166161 - RNA, 19 nt, Artificial Sequence
  Description of Artificial Sequence: Synthetic oligonucleotide
  Antisense strand to SEQ ID NO: 166160
uggcauagacacauucagg

SEQ ID NO: 166162 - RNA, 19 nt, Artificial Sequence
  Description of Artificial Sequence: Synthetic oligonucleotide
  Sense strand starting at position 2899 of SEQ ID NO: 2139
gaaugugucuaugccagau

SEQ ID NO: 166163 - RNA, 19 nt, Artificial Sequence
  Description of Artificial Sequence: Synthetic oligonucleotide
  Antisense strand to SEQ ID NO: 166162
aucuggcauagacacauuc

SEQ ID NO: 166164 - RNA, 19 nt, Artificial Sequence
  Description of Artificial Sequence: Synthetic oligonucleotide
  Sense strand starting at position 2903 of SEQ ID NO: 2139
gugucuaugccagauaagg

SEQ ID NO: 166165 - RNA, 19 nt, Artificial Sequence
  Description of Artificial Sequence: Synthetic oligonucleotide
  Antisense strand to SEQ ID NO: 166164
ccuuaucuggcauagacac

SEQ ID NO: 166166 - RNA, 19 nt, Artificial Sequence
  Description of Artificial Sequence: Synthetic oligonucleotide
  Sense strand starting at position 2905 of SEQ ID NO: 2139
gucuaugccagauaagguc

SEQ ID NO: 166167 - RNA, 19 nt, Artificial Sequence
  Description of Artificial Sequence: Synthetic oligonucleotide
  Antisense strand to SEQ ID NO: 166166
gaccuuaucuggcauagac

SEQ ID NO: 166168 - RNA, 19 nt, Artificial Sequence
  Description of Artificial Sequence: Synthetic oligonucleotide
  Sense strand starting at position 2959 of SEQ ID NO: 2139
cuggguucucacugcuaac

SEQ ID NO: 166169 - RNA, 19 nt, Artificial Sequence
  Description of Artificial Sequence: Synthetic oligonucleotide
  Antisense strand to SEQ ID NO: 166168
guuagcagugagaacccag

SEQ ID NO: 166170 - RNA, 19 nt, Artificial Sequence
  Description of Artificial Sequence: Synthetic oligonucleotide
  Sense strand starting at position 2962 of SEQ ID NO: 2139
gguucucacugcuaacaag

SEQ ID NO: 166171 - RNA, 19 nt, Artificial Sequence
  Description of Artificial Sequence: Synthetic oligonucleotide
  Antisense strand to SEQ ID NO: 166170
cuuguuagcagugagaacc

SEQ ID NO: 166172 - RNA, 19 nt, Artificial Sequence
  Description of Artificial Sequence: Synthetic oligonucleotide
  Sense strand starting at position 2982 of SEQ ID NO: 2139
ugucaacucuuggucaagu

SEQ ID NO: 166173 - RNA, 19 nt, Artificial Sequence
  Description of Artificial Sequence: Synthetic oligonucleotide
  Antisense strand to SEQ ID NO: 166172
acuugaccaagaguugaca

SEQ ID NO: 166174 - RNA, 19 nt, Artificial Sequence
  Description of Artificial Sequence: Synthetic oligonucleotide
  Sense strand starting at position 2983 of SEQ ID NO: 2139
gucaacucuuggucaaguu

SEQ ID NO: 166175 - RNA, 19 nt, Artificial Sequence
  Description of Artificial Sequence: Synthetic oligonucleotide
  Antisense strand to SEQ ID NO: 166174
aacuugaccaagaguugac

SEQ ID NO: 166176 - RNA, 19 nt, Artificial Sequence
  Description of Artificial Sequence: Synthetic oligonucleotide
  Sense strand starting at position 2991 of SEQ ID NO: 2139
uuggucaaguucuccacau

SEQ ID NO: 166177 - RNA, 19 nt, Artificial Sequence
  Description of Artificial Sequence: Synthetic oligonucleotide
  Antisense strand to SEQ ID NO: 166176
auguggagaacuugaccaa

SEQ ID NO: 166178 - RNA, 19 nt, Artificial Sequence
  Description of Artificial Sequence: Synthetic oligonucleotide
  Sense strand starting at position 2992 of SEQ ID NO: 2139
uggucaaguucuccacauc

SEQ ID NO: 166179 - RNA, 19 nt, Artificial Sequence
  Description of Artificial Sequence: Synthetic oligonucleotide
  Antisense strand to SEQ ID NO: 166178
gauguggagaacuugacca

SEQ ID NO: 166180 - RNA, 19 nt, Artificial Sequence
  Description of Artificial Sequence: Synthetic oligonucleotide
  Sense strand starting at position 2993 of SEQ ID NO: 2139
ggucaaguucuccacaucu

SEQ ID NO: 166181 - RNA, 19 nt, Artificial Sequence
  Description of Artificial Sequence: Synthetic oligonucleotide
  Antisense strand to SEQ ID NO: 166180
agauguggagaacuugacc

SEQ ID NO: 166182 - RNA, 19 nt, Artificial Sequence
  Description of Artificial Sequence: Synthetic oligonucleotide
  Sense strand starting at position 2995 of SEQ ID NO: 2139
ucaaguucuccacaucugu

SEQ ID NO: 166183 - RNA, 19 nt, Artificial Sequence
  Description of Artificial Sequence: Synthetic oligonucleotide
  Antisense strand to SEQ ID NO: 166182
acagauguggagaacuuga

SEQ ID NO: 166184 - RNA, 19 nt, Artificial Sequence
  Description of Artificial Sequence: Synthetic oligonucleotide
  Sense strand starting at position 3066 of SEQ ID NO: 2139
aggucccucucagaucuaa

SEQ ID NO: 166185 - RNA, 19 nt, Artificial Sequence
  Description of Artificial Sequence: Synthetic oligonucleotide
  Antisense strand to SEQ ID NO: 166184
uuagaucugagagggaccu

SEQ ID NO: 166186 - RNA, 19 nt, Artificial Sequence
  Description of Artificial Sequence: Synthetic oligonucleotide
  Sense strand starting at position 3078 of SEQ ID NO: 2139
gaucuaauagcgugugauu

SEQ ID NO: 166187 - RNA, 19 nt, Artificial Sequence
  Description of Artificial Sequence: Synthetic oligonucleotide
  Antisense strand to SEQ ID NO: 166186
aaucacacgcuauuagauc

SEQ ID NO: 166188 - RNA, 19 nt, Artificial Sequence
  Description of Artificial Sequence: Synthetic oligonucleotide
  Sense strand starting at position 3080 of SEQ ID NO: 2139
ucuaauagcgugugauucu

SEQ ID NO: 166189 - RNA, 19 nt, Artificial Sequence
  Description of Artificial Sequence: Synthetic oligonucleotide
  Antisense strand to SEQ ID NO: 166188
agaaucacacgcuauuaga

SEQ ID NO: 166190 - RNA, 19 nt, Artificial Sequence
  Description of Artificial Sequence: Synthetic oligonucleotide
  Sense strand starting at position 3087 of SEQ ID NO: 2139
gcgugugauucugccuuac

SEQ ID NO: 166191 - RNA, 19 nt, Artificial Sequence
  Description of Artificial Sequence: Synthetic oligonucleotide
  Antisense strand to SEQ ID NO: 166190
guaaggcagaaucacacgc

SEQ ID NO: 166192 - RNA, 19 nt, Artificial Sequence
  Description of Artificial Sequence: Synthetic oligonucleotide
  Sense strand starting at position 3089 of SEQ ID NO: 2139
gugugauucugccuuacua

SEQ ID NO: 166193 - RNA, 19 nt, Artificial Sequence
  Description of Artificial Sequence: Synthetic oligonucleotide
  Antisense strand to SEQ ID NO: 166192
uaguaaggcagaaucacac

SEQ ID NO: 166194 - RNA, 19 nt, Artificial Sequence
  Description of Artificial Sequence: Synthetic oligonucleotide
  Sense strand starting at position 3091 of SEQ ID NO: 2139
gugauucugccuuacuaaa

SEQ ID NO: 166195 - RNA, 19 nt, Artificial Sequence
  Description of Artificial Sequence: Synthetic oligonucleotide
  Antisense strand to SEQ ID NO: 166194
uuuaguaaggcagaaucac

SEQ ID NO: 166196 - RNA, 19 nt, Artificial Sequence
  Description of Artificial Sequence: Synthetic oligonucleotide
  Sense strand starting at position 3155 of SEQ ID NO: 2139
caggcuauguccgaagaga

SEQ ID NO: 166197 - RNA, 19 nt, Artificial Sequence
  Description of Artificial Sequence: Synthetic oligonucleotide
  Antisense strand to SEQ ID NO: 166196
ucucuucggacauagccug

SEQ ID NO: 166198 - RNA, 19 nt, Artificial Sequence
  Description of Artificial Sequence: Synthetic oligonucleotide
  Sense strand starting at position 3436 of SEQ ID NO: 2139
caaugacauuacuggagga

SEQ ID NO: 166199 - RNA, 19 nt, Artificial Sequence
  Description of Artificial Sequence: Synthetic oligonucleotide
  Antisense strand to SEQ ID NO: 166198
uccuccaguaaugucauug

SEQ ID NO: 166200 - RNA, 19 nt, Artificial Sequence
  Description of Artificial Sequence: Synthetic oligonucleotide
  Sense strand starting at position 3577 of SEQ ID NO: 2139
ccuggacuacucugaaugu

SEQ ID NO: 166201 - RNA, 19 nt, Artificial Sequence
  Description of Artificial Sequence: Synthetic oligonucleotide
  Antisense strand to SEQ ID NO: 166200
acauucagaguaguccagg

SEQ ID NO: 166202 - RNA, 19 nt, Artificial Sequence
  Description of Artificial Sequence: Synthetic oligonucleotide
  Sense strand starting at position 3947 of SEQ ID NO: 2141
aaugcauuaguaggacaaa

SEQ ID NO: 166203 - RNA, 19 nt, Artificial Sequence
  Description of Artificial Sequence: Synthetic oligonucleotide
  Antisense strand to SEQ ID NO: 166202
uuuguccuacuaaugcauu

SEQ ID NO: 166204 - RNA, 19 nt, Artificial Sequence
  Description of Artificial Sequence: Synthetic oligonucleotide
  Sense strand starting at position 3821 of SEQ ID NO: 2141
gggaaaugcaugcauucuc

SEQ ID NO: 166205 - RNA, 19 nt, Artificial Sequence
  Description of Artificial Sequence: Synthetic oligonucleotide
  Antisense strand to SEQ ID NO: 166204
gagaaugcaugcauuuccc

SEQ ID NO: 166206 - RNA, 19 nt, Artificial Sequence
  Description of Artificial Sequence: Synthetic oligonucleotide
  Sense strand starting at position 3788 of SEQ ID NO: 2141
guuuauauuagucagaagu

SEQ ID NO: 166207 - RNA, 19 nt, Artificial Sequence
  Description of Artificial Sequence: Synthetic oligonucleotide
  Antisense strand to SEQ ID NO: 166206
acuucugacuaauauaaac

SEQ ID NO: 166208 - RNA, 19 nt, Artificial Sequence
  Description of Artificial Sequence: Synthetic oligonucleotide
  Sense strand starting at position 3787 of SEQ ID NO: 2141
uguuuauauuagucagaag

SEQ ID NO: 166209 - RNA, 19 nt, Artificial Sequence
  Description of Artificial Sequence: Synthetic oligonucleotide
  Antisense strand to SEQ ID NO: 166208
cuucugacuaauauaaaca

SEQ ID NO: 166210 - RNA, 19 nt, Artificial Sequence
  Description of Artificial Sequence: Synthetic oligonucleotide
  Sense strand starting at position 3775 of SEQ ID NO: 2141
cgaaguuguauuuguuuau

SEQ ID NO: 166211 - RNA, 19 nt, Artificial Sequence
  Description of Artificial Sequence: Synthetic oligonucleotide
  Antisense strand to SEQ ID NO: 166210
auaaacaaauacaacuucg

SEQ ID NO: 166212 - RNA, 19 nt, Artificial Sequence
  Description of Artificial Sequence: Synthetic oligonucleotide
  Sense strand starting at position 3658 of SEQ ID NO: 2141
cagagcuuguagguacaaa

SEQ ID NO: 166213 - RNA, 19 nt, Artificial Sequence
  Description of Artificial Sequence: Synthetic oligonucleotide
  Antisense strand to SEQ ID NO: 166212
uuuguaccuacaagcucug

SEQ ID NO: 166214 - RNA, 19 nt, Artificial Sequence
  Description of Artificial Sequence: Synthetic oligonucleotide
  Sense strand starting at position 3519 of SEQ ID NO: 2141
aagguuagauaguuauaga

SEQ ID NO: 166215 - RNA, 19 nt, Artificial Sequence
  Description of Artificial Sequence: Synthetic oligonucleotide
  Antisense strand to SEQ ID NO: 166214
ucuauaacuaucuaaccuu

SEQ ID NO: 166216 - RNA, 19 nt, Artificial Sequence
  Description of Artificial Sequence: Synthetic oligonucleotide
  Sense strand starting at position 3416 of SEQ ID NO: 2141
gucauaaguugaccuuuau

SEQ ID NO: 166217 - RNA, 19 nt, Artificial Sequence
  Description of Artificial Sequence: Synthetic oligonucleotide
  Antisense strand to SEQ ID NO: 166216
auaaaggucaacuuaugac

SEQ ID NO: 166218 - RNA, 19 nt, Artificial Sequence
  Description of Artificial Sequence: Synthetic oligonucleotide
  Sense strand starting at position 3328 of SEQ ID NO: 2141
aguaacacuuucuuaagga

SEQ ID NO: 166219 - RNA, 19 nt, Artificial Sequence
  Description of Artificial Sequence: Synthetic oligonucleotide
  Antisense strand to SEQ ID NO: 166218
uccuuaagaaaguguuacu

SEQ ID NO: 166220 - RNA, 19 nt, Artificial Sequence
  Description of Artificial Sequence: Synthetic oligonucleotide
  Sense strand starting at position 3298 of SEQ ID NO: 2141
uggaccauauaggaauuua

SEQ ID NO: 166221 - RNA, 19 nt, Artificial Sequence
  Description of Artificial Sequence: Synthetic oligonucleotide
  Antisense strand to SEQ ID NO: 166220
uaaauuccuauauggucca

SEQ ID NO: 166222 - RNA, 19 nt, Artificial Sequence
  Description of Artificial Sequence: Synthetic oligonucleotide
  Sense strand starting at position 3140 of SEQ ID NO: 2141
uuaggaaagagucgacuaa

SEQ ID NO: 166223 - RNA, 19 nt, Artificial Sequence
  Description of Artificial Sequence: Synthetic oligonucleotide
  Antisense strand to SEQ ID NO: 166222
uuagucgacucuuuccuaa

SEQ ID NO: 166224 - RNA, 19 nt, Artificial Sequence
  Description of Artificial Sequence: Synthetic oligonucleotide
  Sense strand starting at position 3129 of SEQ ID NO: 2141
ugaguaguaguuuaggaaa

SEQ ID NO: 166225 - RNA, 19 nt, Artificial Sequence
  Description of Artificial Sequence: Synthetic oligonucleotide
  Antisense strand to SEQ ID NO: 166224
uuuccuaaacuacuacuca

SEQ ID NO: 166226 - RNA, 19 nt, Artificial Sequence
  Description of Artificial Sequence: Synthetic oligonucleotide
  Sense strand starting at position 3051 of SEQ ID NO: 2141
gccacaaggagaugaguuu

SEQ ID NO: 166227 - RNA, 19 nt, Artificial Sequence
  Description of Artificial Sequence: Synthetic oligonucleotide
  Antisense strand to SEQ ID NO: 166226
aaacucaucuccuuguggc

SEQ ID NO: 166228 - RNA, 19 nt, Artificial Sequence
  Description of Artificial Sequence: Synthetic oligonucleotide
  Sense strand starting at position 2976 of SEQ ID NO: 2141
accuguuuacgguaguaga

SEQ ID NO: 166229 - RNA, 19 nt, Artificial Sequence
  Description of Artificial Sequence: Synthetic oligonucleotide
  Antisense strand to SEQ ID NO: 166228
ucuacuaccguaaacaggu

SEQ ID NO: 166230 - RNA, 19 nt, Artificial Sequence
  Description of Artificial Sequence: Synthetic oligonucleotide
  Sense strand starting at position 2925 of SEQ ID NO: 2141
gucugccaugguuaacuaa

SEQ ID NO: 166231 - RNA, 19 nt, Artificial Sequence
  Description of Artificial Sequence: Synthetic oligonucleotide
  Antisense strand to SEQ ID NO: 166230
uuaguuaaccauggcagac

SEQ ID NO: 166232 - RNA, 19 nt, Artificial Sequence
  Description of Artificial Sequence: Synthetic oligonucleotide
  Sense strand starting at position 2780 of SEQ ID NO: 2141
ggaugucacggugagggau

SEQ ID NO: 166233 - RNA, 19 nt, Artificial Sequence
  Description of Artificial Sequence: Synthetic oligonucleotide
  Antisense strand to SEQ ID NO: 166232
aucccucaccgugacaucc

SEQ ID NO: 166234 - RNA, 19 nt, Artificial Sequence
  Description of Artificial Sequence: Synthetic oligonucleotide
  Sense strand starting at position 2605 of SEQ ID NO: 2141
cuuucugcugcagaagaga

SEQ ID NO: 166235 - RNA, 19 nt, Artificial Sequence
  Description of Artificial Sequence: Synthetic oligonucleotide
  Antisense strand to SEQ ID NO: 166234
ucucuucugcagcagaaag

SEQ ID NO: 166236 - RNA, 19 nt, Artificial Sequence
  Description of Artificial Sequence: Synthetic oligonucleotide
  Sense strand starting at position 2603 of SEQ ID NO: 2141
aucuuucugcugcagaaga

SEQ ID NO: 166237 - RNA, 19 nt, Artificial Sequence
  Description of Artificial Sequence: Synthetic oligonucleotide
  Antisense strand to SEQ ID NO: 166236
ucuucugcagcagaaagau

SEQ ID NO: 166238 - RNA, 19 nt, Artificial Sequence
  Description of Artificial Sequence: Synthetic oligonucleotide
  Sense strand starting at position 2590 of SEQ ID NO: 2141
gcagaaggcccagaucuuu

SEQ ID NO: 166239 - RNA, 19 nt, Artificial Sequence
  Description of Artificial Sequence: Synthetic oligonucleotide
  Antisense strand to SEQ ID NO: 166238
aaagaucugggccuucugc

SEQ ID NO: 166240 - RNA, 19 nt, Artificial Sequence
  Description of Artificial Sequence: Synthetic oligonucleotide
  Sense strand starting at position 2340 of SEQ ID NO: 2141
gcgguaacuauggagaaua

SEQ ID NO: 166241 - RNA, 19 nt, Artificial Sequence
  Description of Artificial Sequence: Synthetic oligonucleotide
  Antisense strand to SEQ ID NO: 166240
uauucuccauaguuaccgc

SEQ ID NO: 166242 - RNA, 19 nt, Artificial Sequence
  Description of Artificial Sequence: Synthetic oligonucleotide
  Sense strand starting at position 2093 of SEQ ID NO: 2141
guuugugguggcgucguaa

SEQ ID NO: 166243 - RNA, 19 nt, Artificial Sequence
  Description of Artificial Sequence: Synthetic oligonucleotide
  Antisense strand to SEQ ID NO: 166242
uuacgacgccaccacaaac

SEQ ID NO: 166244 - RNA, 19 nt, Artificial Sequence
  Description of Artificial Sequence: Synthetic oligonucleotide
  Sense strand starting at position 1631 of SEQ ID NO: 2141
guccgugugacuccugagu

SEQ ID NO: 166245 - RNA, 19 nt, Artificial Sequence
  Description of Artificial Sequence: Synthetic oligonucleotide
  Antisense strand to SEQ ID NO: 166244
acucaggagucacacggac

SEQ ID NO: 166246 - RNA, 19 nt, Artificial Sequence
  Description of Artificial Sequence: Synthetic oligonucleotide
  Sense strand starting at position 1467 of SEQ ID NO: 2141
gcucgucagcugcuaguaa

SEQ ID NO: 166247 - RNA, 19 nt, Artificial Sequence
  Description of Artificial Sequence: Synthetic oligonucleotide
  Antisense strand to SEQ ID NO: 166246
uuacuagcagcugacgagc

SEQ ID NO: 166248 - RNA, 19 nt, Artificial Sequence
  Description of Artificial Sequence: Synthetic oligonucleotide
  Sense strand starting at position 1411 of SEQ ID NO: 2141
gagggugcgaaaugaagaa

SEQ ID NO: 166249 - RNA, 19 nt, Artificial Sequence
  Description of Artificial Sequence: Synthetic oligonucleotide
  Antisense strand to SEQ ID NO: 166248
uucuucauuucgcacccuc

SEQ ID NO: 166250 - RNA, 19 nt, Artificial Sequence
  Description of Artificial Sequence: Synthetic oligonucleotide
  Sense strand starting at position 1252 of SEQ ID NO: 2141
cagagcucugguuauuaaa

SEQ ID NO: 166251 - RNA, 19 nt, Artificial Sequence
  Description of Artificial Sequence: Synthetic oligonucleotide
  Antisense strand to SEQ ID NO: 166250
uuuaauaaccagagcucug

SEQ ID NO: 166252 - RNA, 19 nt, Artificial Sequence
  Description of Artificial Sequence: Synthetic oligonucleotide
  Sense strand starting at position 1137 of SEQ ID NO: 2141
ucaaguaggcacuaagagu

SEQ ID NO: 166253 - RNA, 19 nt, Artificial Sequence
  Description of Artificial Sequence: Synthetic oligonucleotide
  Antisense strand to SEQ ID NO: 166252
acucuuagugccuacuuga

SEQ ID NO: 166254 - RNA, 19 nt, Artificial Sequence
  Description of Artificial Sequence: Synthetic oligonucleotide
  Sense strand starting at position 1119 of SEQ ID NO: 2141
acaagaaaggcucgaaugu

SEQ ID NO: 166255 - RNA, 19 nt, Artificial Sequence
  Description of Artificial Sequence: Synthetic oligonucleotide
  Antisense strand to SEQ ID NO: 166254
acauucgagccuuucuugu

SEQ ID NO: 166256 - RNA, 19 nt, Artificial Sequence
  Description of Artificial Sequence: Synthetic oligonucleotide
  Sense strand starting at position 1011 of SEQ ID NO: 2141
cccugaugccuagaagguu

SEQ ID NO: 166257 - RNA, 19 nt, Artificial Sequence
  Description of Artificial Sequence: Synthetic oligonucleotide
  Antisense strand to SEQ ID NO: 166256
aaccuucuaggcaucaggg

SEQ ID NO: 166258 - RNA, 19 nt, Artificial Sequence
  Description of Artificial Sequence: Synthetic oligonucleotide
  Sense strand starting at position 969 of SEQ ID NO: 2141
gcgcgucuuguucuugaga

SEQ ID NO: 166259 - RNA, 19 nt, Artificial Sequence
  Description of Artificial Sequence: Synthetic oligonucleotide
  Antisense strand to SEQ ID NO: 166258
ucucaagaacaagacgcgc

SEQ ID NO: 166260 - RNA, 19 nt, Artificial Sequence
  Description of Artificial Sequence: Synthetic oligonucleotide
  Sense strand starting at position 920 of SEQ ID NO: 2141
aagauuggcguuuaucaac

SEQ ID NO: 166261 - RNA, 19 nt, Artificial Sequence
  Description of Artificial Sequence: Synthetic oligonucleotide
  Antisense strand to SEQ ID NO: 166260
guugauaaacgccaaucuu

SEQ ID NO: 166262 - RNA, 19 nt, Artificial Sequence
  Description of Artificial Sequence: Synthetic oligonucleotide
  Sense strand starting at position 915 of SEQ ID NO: 2141
ccaagaagauuggcguuua

SEQ ID NO: 166263 - RNA, 19 nt, Artificial Sequence
  Description of Artificial Sequence: Synthetic oligonucleotide
  Antisense strand to SEQ ID NO: 166262
uaaacgccaaucuucuugg

SEQ ID NO: 166264 - RNA, 19 nt, Artificial Sequence
  Description of Artificial Sequence: Synthetic oligonucleotide
  Sense strand starting at position 742 of SEQ ID NO: 2141
gggauaaucuguucccauu

SEQ ID NO: 166265 - RNA, 19 nt, Artificial Sequence
  Description of Artificial Sequence: Synthetic oligonucleotide
  Antisense strand to SEQ ID NO: 166264
aaugggaacagauuauccc

SEQ ID NO: 166266 - RNA, 19 nt, Artificial Sequence
  Description of Artificial Sequence: Synthetic oligonucleotide
  Sense strand starting at position 740 of SEQ ID NO: 2141
cagggauaaucuguuccca

SEQ ID NO: 166267 - RNA, 19 nt, Artificial Sequence
  Description of Artificial Sequence: Synthetic oligonucleotide
  Antisense strand to SEQ ID NO: 166266
ugggaacagauuaucccug

SEQ ID NO: 166268 - RNA, 19 nt, Artificial Sequence
  Description of Artificial Sequence: Synthetic oligonucleotide
  Sense strand starting at position 731 of SEQ ID NO: 2141
gaagcuccacagggauaau

SEQ ID NO: 166269 - RNA, 19 nt, Artificial Sequence
  Description of Artificial Sequence: Synthetic oligonucleotide
  Antisense strand to SEQ ID NO: 166268
auuaucccuguggagcuuc

SEQ ID NO: 166270 - RNA, 19 nt, Artificial Sequence
  Description of Artificial Sequence: Synthetic oligonucleotide
  Sense strand starting at position 595 of SEQ ID NO: 2141
gcauuucuguaaguuauag

SEQ ID NO: 166271 - RNA, 19 nt, Artificial Sequence
  Description of Artificial Sequence: Synthetic oligonucleotide
  Antisense strand to SEQ ID NO: 166270
cuauaacuuacagaaaugc

SEQ ID NO: 166272 - RNA, 19 nt, Artificial Sequence
  Description of Artificial Sequence: Synthetic oligonucleotide
  Sense strand starting at position 591 of SEQ ID NO: 2141
guuagcauuucuguaaguu

SEQ ID NO: 166273 - RNA, 19 nt, Artificial Sequence
  Description of Artificial Sequence: Synthetic oligonucleotide
  Antisense strand to SEQ ID NO: 166272
aacuuacagaaaugcuaac

SEQ ID NO: 166274 - RNA, 19 nt, Artificial Sequence
  Description of Artificial Sequence: Synthetic oligonucleotide
  Sense strand starting at position 589 of SEQ ID NO: 2141
uaguuagcauuucuguaag

SEQ ID NO: 166275 - RNA, 19 nt, Artificial Sequence
  Description of Artificial Sequence: Synthetic oligonucleotide
  Antisense strand to SEQ ID NO: 166274
cuuacagaaaugcuaacua

SEQ ID NO: 166276 - RNA, 19 nt, Artificial Sequence
  Description of Artificial Sequence: Synthetic oligonucleotide
  Sense strand starting at position 564 of SEQ ID NO: 2141
agaauuauuggaugaugca

SEQ ID NO: 166277 - RNA, 19 nt, Artificial Sequence
  Description of Artificial Sequence: Synthetic oligonucleotide
  Antisense strand to SEQ ID NO: 166276
ugcaucauccaauaauucu

SEQ ID NO: 166278 - RNA, 19 nt, Artificial Sequence
  Description of Artificial Sequence: Synthetic oligonucleotide
  Sense strand starting at position 294 of SEQ ID NO: 2141
gcaguagcaauagaugaau

SEQ ID NO: 166279 - RNA, 19 nt, Artificial Sequence
  Description of Artificial Sequence: Synthetic oligonucleotide
  Antisense strand to SEQ ID NO: 166278
auucaucuauugcuacugc

SEQ ID NO: 166280 - RNA, 19 nt, Artificial Sequence
  Description of Artificial Sequence: Synthetic oligonucleotide
  Sense strand starting at position 44 of SEQ ID NO: 2141
acuggcaucuugccaacaa

SEQ ID NO: 166281 - RNA, 19 nt, Artificial Sequence
  Description of Artificial Sequence: Synthetic oligonucleotide
  Antisense strand to SEQ ID NO: 166280
uuguuggcaagaugccagu

SEQ ID NO: 166282 - RNA, 19 nt, Artificial Sequence
  Description of Artificial Sequence: Synthetic oligonucleotide
  Sense strand starting at position 3920 of SEQ ID NO: 2142
gggaaaugcaugcauucuc

SEQ ID NO: 166283 - RNA, 19 nt, Artificial Sequence
  Description of Artificial Sequence: Synthetic oligonucleotide
  Antisense strand to SEQ ID NO: 166282
gagaaugcaugcauuuccc

SEQ ID NO: 166284 - RNA, 19 nt, Artificial Sequence
  Description of Artificial Sequence: Synthetic oligonucleotide
  Sense strand starting at position 3887 of SEQ ID NO: 2142
guuuauauuagucagaagu

SEQ ID NO: 166285 - RNA, 19 nt, Artificial Sequence
  Description of Artificial Sequence: Synthetic oligonucleotide
  Antisense strand to SEQ ID NO: 166284
acuucugacuaauauaaac

SEQ ID NO: 166286 - RNA, 19 nt, Artificial Sequence
  Description of Artificial Sequence: Synthetic oligonucleotide
  Sense strand starting at position 3886 of SEQ ID NO: 2142
uguuuauauuagucagaag

SEQ ID NO: 166287 - RNA, 19 nt, Artificial Sequence
  Description of Artificial Sequence: Synthetic oligonucleotide
  Antisense strand to SEQ ID NO: 166286
cuucugacuaauauaaaca

SEQ ID NO: 166288 - RNA, 19 nt, Artificial Sequence
  Description of Artificial Sequence: Synthetic oligonucleotide
  Sense strand starting at position 3874 of SEQ ID NO: 2142
cgaaguuguauuuguuuau

SEQ ID NO: 166289 - RNA, 19 nt, Artificial Sequence
  Description of Artificial Sequence: Synthetic oligonucleotide
  Antisense strand to SEQ ID NO: 166288
auaaacaaauacaacuucg

SEQ ID NO: 166290 - RNA, 19 nt, Artificial Sequence
  Description of Artificial Sequence: Synthetic oligonucleotide
  Sense strand starting at position 3757 of SEQ ID NO: 2142
cagagcuuguagguacaaa

SEQ ID NO: 166291 - RNA, 19 nt, Artificial Sequence
  Description of Artificial Sequence: Synthetic oligonucleotide
  Antisense strand to SEQ ID NO: 166290
uuuguaccuacaagcucug

SEQ ID NO: 166292 - RNA, 19 nt, Artificial Sequence
  Description of Artificial Sequence: Synthetic oligonucleotide
  Sense strand starting at position 3618 of SEQ ID NO: 2142
aagguuagauaguuauaga

SEQ ID NO: 166293 - RNA, 19 nt, Artificial Sequence
  Description of Artificial Sequence: Synthetic oligonucleotide
  Antisense strand to SEQ ID NO: 166292
ucuauaacuaucuaaccuu

SEQ ID NO: 166294 - RNA, 19 nt, Artificial Sequence
  Description of Artificial Sequence: Synthetic oligonucleotide
  Sense strand starting at position 3515 of SEQ ID NO: 2142
gucauaaguugaccuuuau

SEQ ID NO: 166295 - RNA, 19 nt, Artificial Sequence
  Description of Artificial Sequence: Synthetic oligonucleotide
  Antisense strand to SEQ ID NO: 166294
auaaaggucaacuuaugac

SEQ ID NO: 166296 - RNA, 19 nt, Artificial Sequence
  Description of Artificial Sequence: Synthetic oligonucleotide
  Sense strand starting at position 3427 of SEQ ID NO: 2142
aguaacacuuucuuaagga

SEQ ID NO: 166297 - RNA, 19 nt, Artificial Sequence
  Description of Artificial Sequence: Synthetic oligonucleotide
  Antisense strand to SEQ ID NO: 166296
uccuuaagaaaguguuacu

SEQ ID NO: 166298 - RNA, 19 nt, Artificial Sequence
  Description of Artificial Sequence: Synthetic oligonucleotide
  Sense strand starting at position 3397 of SEQ ID NO: 2142
uggaccauauaggaauuua

SEQ ID NO: 166299 - RNA, 19 nt, Artificial Sequence
  Description of Artificial Sequence: Synthetic oligonucleotide
  Antisense strand to SEQ ID NO: 166298
uaaauuccuauauggucca

SEQ ID NO: 166300 - RNA, 19 nt, Artificial Sequence
  Description of Artificial Sequence: Synthetic oligonucleotide
  Sense strand starting at position 3239 of SEQ ID NO: 2142
uuaggaaagagucgacuaa

SEQ ID NO: 166301 - RNA, 19 nt, Artificial Sequence
  Description of Artificial Sequence: Synthetic oligonucleotide
  Antisense strand to SEQ ID NO: 166300
uuagucgacucuuuccuaa

SEQ ID NO: 166302 - RNA, 19 nt, Artificial Sequence
  Description of Artificial Sequence: Synthetic oligonucleotide
  Sense strand starting at position 3228 of SEQ ID NO: 2142
ugaguaguaguuuaggaaa

SEQ ID NO: 166303 - RNA, 19 nt, Artificial Sequence
  Description of Artificial Sequence: Synthetic oligonucleotide
  Antisense strand to SEQ ID NO: 166302
uuuccuaaacuacuacuca

SEQ ID NO: 166304 - RNA, 19 nt, Artificial Sequence
  Description of Artificial Sequence: Synthetic oligonucleotide
  Sense strand starting at position 3150 of SEQ ID NO: 2142
gccacaaggagaugaguuu

SEQ ID NO: 166305 - RNA, 19 nt, Artificial Sequence
  Description of Artificial Sequence: Synthetic oligonucleotide
  Antisense strand to SEQ ID NO: 166304
aaacucaucuccuuguggc

SEQ ID NO: 166306 - RNA, 19 nt, Artificial Sequence
  Description of Artificial Sequence: Synthetic oligonucleotide
  Sense strand starting at position 3075 of SEQ ID NO: 2142
accuguuuacgguaguaga

SEQ ID NO: 166307 - RNA, 19 nt, Artificial Sequence
  Description of Artificial Sequence: Synthetic oligonucleotide
  Antisense strand to SEQ ID NO: 166306
ucuacuaccguaaacaggu

SEQ ID NO: 166308 - RNA, 19 nt, Artificial Sequence
  Description of Artificial Sequence: Synthetic oligonucleotide
  Sense strand starting at position 3024 of SEQ ID NO: 2142
gucugccaugguuaacuaa

SEQ ID NO: 166309 - RNA, 19 nt, Artificial Sequence
  Description of Artificial Sequence: Synthetic oligonucleotide
  Antisense strand to SEQ ID NO: 166308
uuaguuaaccauggcagac

SEQ ID NO: 166310 - RNA, 19 nt, Artificial Sequence
  Description of Artificial Sequence: Synthetic oligonucleotide
  Sense strand starting at position 2879 of SEQ ID NO: 2142
ggaugucacggugagggau

SEQ ID NO: 166311 - RNA, 19 nt, Artificial Sequence
  Description of Artificial Sequence: Synthetic oligonucleotide
  Antisense strand to SEQ ID NO: 166310
aucccucaccgugacaucc

SEQ ID NO: 166312 - RNA, 19 nt, Artificial Sequence
  Description of Artificial Sequence: Synthetic oligonucleotide
  Sense strand starting at position 2704 of SEQ ID NO: 2142
cuuucugcugcagaagaga

SEQ ID NO: 166313 - RNA, 19 nt, Artificial Sequence
  Description of Artificial Sequence: Synthetic oligonucleotide
  Antisense strand to SEQ ID NO: 166312
ucucuucugcagcagaaag

SEQ ID NO: 166314 - RNA, 19 nt, Artificial Sequence
  Description of Artificial Sequence: Synthetic oligonucleotide
  Sense strand starting at position 2702 of SEQ ID NO: 2142
aucuuucugcugcagaaga

SEQ ID NO: 166315 - RNA, 19 nt, Artificial Sequence
  Description of Artificial Sequence: Synthetic oligonucleotide
  Antisense strand to SEQ ID NO: 166314
ucuucugcagcagaaagau

SEQ ID NO: 166316 - RNA, 19 nt, Artificial Sequence
  Description of Artificial Sequence: Synthetic oligonucleotide
  Sense strand starting at position 2689 of SEQ ID NO: 2142
gcagaaggcccagaucuuu

SEQ ID NO: 166317 - RNA, 19 nt, Artificial Sequence
  Description of Artificial Sequence: Synthetic oligonucleotide
  Antisense strand to SEQ ID NO: 166316
aaagaucugggccuucugc

SEQ ID NO: 166318 - RNA, 19 nt, Artificial Sequence
  Description of Artificial Sequence: Synthetic oligonucleotide
  Sense strand starting at position 2439 of SEQ ID NO: 2142
gcgguaacuauggagaaua

SEQ ID NO: 166319 - RNA, 19 nt, Artificial Sequence
  Description of Artificial Sequence: Synthetic oligonucleotide
  Antisense strand to SEQ ID NO: 166318
uauucuccauaguuaccgc

SEQ ID NO: 166320 - RNA, 19 nt, Artificial Sequence
  Description of Artificial Sequence: Synthetic oligonucleotide
  Sense strand starting at position 1730 of SEQ ID NO: 2142
guccgugugacuccugagu

SEQ ID NO: 166321 - RNA, 19 nt, Artificial Sequence
  Description of Artificial Sequence: Synthetic oligonucleotide
  Antisense strand to SEQ ID NO: 166320
acucaggagucacacggac

SEQ ID NO: 166322 - RNA, 19 nt, Artificial Sequence
  Description of Artificial Sequence: Synthetic oligonucleotide
  Sense strand starting at position 1566 of SEQ ID NO: 2142
gcucgucagcugcuaguaa

SEQ ID NO: 166323 - RNA, 19 nt, Artificial Sequence
  Description of Artificial Sequence: Synthetic oligonucleotide
  Antisense strand to SEQ ID NO: 166322
uuacuagcagcugacgagc

SEQ ID NO: 166324 - RNA, 19 nt, Artificial Sequence
  Description of Artificial Sequence: Synthetic oligonucleotide
  Sense strand starting at position 1510 of SEQ ID NO: 2142
gagggugcgaaaugaagaa

SEQ ID NO: 166325 - RNA, 19 nt, Artificial Sequence
  Description of Artificial Sequence: Synthetic oligonucleotide
  Antisense strand to SEQ ID NO: 166324
uucuucauuucgcacccuc

SEQ ID NO: 166326 - RNA, 19 nt, Artificial Sequence
  Description of Artificial Sequence: Synthetic oligonucleotide
  Sense strand starting at position 1351 of SEQ ID NO: 2142
cagagcucugguuauuaaa

SEQ ID NO: 166327 - RNA, 19 nt, Artificial Sequence
  Description of Artificial Sequence: Synthetic oligonucleotide
  Antisense strand to SEQ ID NO: 166326
uuuaauaaccagagcucug

SEQ ID NO: 166328 - RNA, 19 nt, Artificial Sequence
  Description of Artificial Sequence: Synthetic oligonucleotide
  Sense strand starting at position 1236 of SEQ ID NO: 2142
ucaaguaggcacuaagagu

SEQ ID NO: 166329 - RNA, 19 nt, Artificial Sequence
  Description of Artificial Sequence: Synthetic oligonucleotide
  Antisense strand to SEQ ID NO: 166328
acucuuagugccuacuuga

SEQ ID NO: 166330 - RNA, 19 nt, Artificial Sequence
  Description of Artificial Sequence: Synthetic oligonucleotide
  Sense strand starting at position 1218 of SEQ ID NO: 2142
acaagaaaggcucgaaugu

SEQ ID NO: 166331 - RNA, 19 nt, Artificial Sequence
  Description of Artificial Sequence: Synthetic oligonucleotide
  Antisense strand to SEQ ID NO: 166330
acauucgagccuuucuugu

SEQ ID NO: 166332 - RNA, 19 nt, Artificial Sequence
  Description of Artificial Sequence: Synthetic oligonucleotide
  Sense strand starting at position 1110 of SEQ ID NO: 2142
cccugaugccuagaagguu

SEQ ID NO: 166333 - RNA, 19 nt, Artificial Sequence
  Description of Artificial Sequence: Synthetic oligonucleotide
  Antisense strand to SEQ ID NO: 166332
aaccuucuaggcaucaggg

SEQ ID NO: 166334 - RNA, 19 nt, Artificial Sequence
  Description of Artificial Sequence: Synthetic oligonucleotide
  Sense strand starting at position 1068 of SEQ ID NO: 2142
gcgcgucuuguucuugaga

SEQ ID NO: 166335 - RNA, 19 nt, Artificial Sequence
  Description of Artificial Sequence: Synthetic oligonucleotide
  Antisense strand to SEQ ID NO: 166334
ucucaagaacaagacgcgc

SEQ ID NO: 166336 - RNA, 19 nt, Artificial Sequence
  Description of Artificial Sequence: Synthetic oligonucleotide
  Sense strand starting at position 1019 of SEQ ID NO: 2142
aagauuggcguuuaucaac

SEQ ID NO: 166337 - RNA, 19 nt, Artificial Sequence
  Description of Artificial Sequence: Synthetic oligonucleotide
  Antisense strand to SEQ ID NO: 166336
guugauaaacgccaaucuu

SEQ ID NO: 166338 - RNA, 19 nt, Artificial Sequence
  Description of Artificial Sequence: Synthetic oligonucleotide
  Sense strand starting at position 1014 of SEQ ID NO: 2142
ccaagaagauuggcguuua

SEQ ID NO: 166339 - RNA, 19 nt, Artificial Sequence
  Description of Artificial Sequence: Synthetic oligonucleotide
  Antisense strand to SEQ ID NO: 166338
uaaacgccaaucuucuugg

SEQ ID NO: 166340 - RNA, 19 nt, Artificial Sequence
  Description of Artificial Sequence: Synthetic oligonucleotide
  Sense strand starting at position 841 of SEQ ID NO: 2142
gggauaaucuguucccauu

SEQ ID NO: 166341 - RNA, 19 nt, Artificial Sequence
  Description of Artificial Sequence: Synthetic oligonucleotide
  Antisense strand to SEQ ID NO: 166340
aaugggaacagauuauccc

SEQ ID NO: 166342 - RNA, 19 nt, Artificial Sequence
  Description of Artificial Sequence: Synthetic oligonucleotide
  Sense strand starting at position 839 of SEQ ID NO: 2142
cagggauaaucuguuccca

SEQ ID NO: 166343 - RNA, 19 nt, Artificial Sequence
  Description of Artificial Sequence: Synthetic oligonucleotide
  Antisense strand to SEQ ID NO: 166342
ugggaacagauuaucccug

SEQ ID NO: 166344 - RNA, 19 nt, Artificial Sequence
  Description of Artificial Sequence: Synthetic oligonucleotide
  Sense strand starting at position 830 of SEQ ID NO: 2142
gaagcuccacagggauaau

SEQ ID NO: 166345 - RNA, 19 nt, Artificial Sequence
  Description of Artificial Sequence: Synthetic oligonucleotide
  Antisense strand to SEQ ID NO: 166344
auuaucccuguggagcuuc

SEQ ID NO: 166346 - RNA, 19 nt, Artificial Sequence
  Description of Artificial Sequence: Synthetic oligonucleotide
  Sense strand starting at position 694 of SEQ ID NO: 2142
gcauuucuguaaguuauag

SEQ ID NO: 166347 - RNA, 19 nt, Artificial Sequence
  Description of Artificial Sequence: Synthetic oligonucleotide
  Antisense strand to SEQ ID NO: 166346
cuauaacuuacagaaaugc

SEQ ID NO: 166348 - RNA, 19 nt, Artificial Sequence
  Description of Artificial Sequence: Synthetic oligonucleotide
  Sense strand starting at position 690 of SEQ ID NO: 2142
guuagcauuucuguaaguu

SEQ ID NO: 166349 - RNA, 19 nt, Artificial Sequence
  Description of Artificial Sequence: Synthetic oligonucleotide
  Antisense strand to SEQ ID NO: 166348
aacuuacagaaaugcuaac

SEQ ID NO: 166350 - RNA, 19 nt, Artificial Sequence
  Description of Artificial Sequence: Synthetic oligonucleotide
  Sense strand starting at position 688 of SEQ ID NO: 2142
uaguuagcauuucuguaag

SEQ ID NO: 166351 - RNA, 19 nt, Artificial Sequence
  Description of Artificial Sequence: Synthetic oligonucleotide
  Antisense strand to SEQ ID NO: 166350
cuuacagaaaugcuaacua

SEQ ID NO: 166352 - RNA, 19 nt, Artificial Sequence
  Description of Artificial Sequence: Synthetic oligonucleotide
  Sense strand starting at position 663 of SEQ ID NO: 2142
agaauuauuggaugaugca

SEQ ID NO: 166353 - RNA, 19 nt, Artificial Sequence
  Description of Artificial Sequence: Synthetic oligonucleotide
  Antisense strand to SEQ ID NO: 166352
ugcaucauccaauaauucu

SEQ ID NO: 166354 - RNA, 19 nt, Artificial Sequence
  Description of Artificial Sequence: Synthetic oligonucleotide
  Sense strand starting at position 393 of SEQ ID NO: 2142
gcaguagcaauagaugaau

SEQ ID NO: 166355 - RNA, 19 nt, Artificial Sequence
  Description of Artificial Sequence: Synthetic oligonucleotide
  Antisense strand to SEQ ID NO: 166354
auucaucuauugcuacugc

SEQ ID NO: 166356 - RNA, 19 nt, Artificial Sequence
  Description of Artificial Sequence: Synthetic oligonucleotide
  Sense strand starting at position 143 of SEQ ID NO: 2142
acuggcaucuugccaacaa

SEQ ID NO: 166357 - RNA, 19 nt, Artificial Sequence
  Description of Artificial Sequence: Synthetic oligonucleotide
  Antisense strand to SEQ ID NO: 166356
uuguuggcaagaugccagu

SEQ ID NO: 166358 - RNA, 19 nt, Artificial Sequence
  Description of Artificial Sequence: Synthetic oligonucleotide
  Sense strand starting at position 30 of SEQ ID NO: 2142
auaagauaucaugacgucu

SEQ ID NO: 166359 - RNA, 19 nt, Artificial Sequence
  Description of Artificial Sequence: Synthetic oligonucleotide
  Antisense strand to SEQ ID NO: 166358
agacgucaugauaucuuau

SEQ ID NO: 166360 - RNA, 19 nt, Artificial Sequence
  Description of Artificial Sequence: Synthetic oligonucleotide
  Sense strand starting at position 10 of SEQ ID NO: 2142
gugguauguggcuaaauca

SEQ ID NO: 166361 - RNA, 19 nt, Artificial Sequence
  Description of Artificial Sequence: Synthetic oligonucleotide
  Antisense strand to SEQ ID NO: 166360
ugauuuagccacauaccac

SEQ ID NO: 166362 - RNA, 19 nt, Artificial Sequence
  Description of Artificial Sequence: Synthetic oligonucleotide
  Sense strand starting at position 3919 of SEQ ID NO: 2143
ggcaauaauugaucuaauu

SEQ ID NO: 166363 - RNA, 19 nt, Artificial Sequence
  Description of Artificial Sequence: Synthetic oligonucleotide
  Antisense strand to SEQ ID NO: 166362
aauuagaucaauuauugcc

SEQ ID NO: 166364 - RNA, 19 nt, Artificial Sequence
  Description of Artificial Sequence: Synthetic oligonucleotide
  Sense strand starting at position 3880 of SEQ ID NO: 2143
gagagaugauacuaagaau

SEQ ID NO: 166365 - RNA, 19 nt, Artificial Sequence
  Description of Artificial Sequence: Synthetic oligonucleotide
  Antisense strand to SEQ ID NO: 166364
auucuuaguaucaucucuc

SEQ ID NO: 166366 - RNA, 19 nt, Artificial Sequence
  Description of Artificial Sequence: Synthetic oligonucleotide
  Sense strand starting at position 3842 of SEQ ID NO: 2143
gagucuagauacucugaaa

SEQ ID NO: 166367 - RNA, 19 nt, Artificial Sequence
  Description of Artificial Sequence: Synthetic oligonucleotide
  Antisense strand to SEQ ID NO: 166366
uuucagaguaucuagacuc

SEQ ID NO: 166368 - RNA, 19 nt, Artificial Sequence
  Description of Artificial Sequence: Synthetic oligonucleotide
  Sense strand starting at position 3792 of SEQ ID NO: 2143
aguaaaggaugauccaguu

SEQ ID NO: 166369 - RNA, 19 nt, Artificial Sequence
  Description of Artificial Sequence: Synthetic oligonucleotide
  Antisense strand to SEQ ID NO: 166368
aacuggaucauccuuuacu

SEQ ID NO: 166370 - RNA, 19 nt, Artificial Sequence
  Description of Artificial Sequence: Synthetic oligonucleotide
  Sense strand starting at position 3709 of SEQ ID NO: 2143
uucuaaggacuuuagcaau

SEQ ID NO: 166371 - RNA, 19 nt, Artificial Sequence
  Description of Artificial Sequence: Synthetic oligonucleotide
  Antisense strand to SEQ ID NO: 166370
auugcuaaaguccuuagaa

SEQ ID NO: 166372 - RNA, 19 nt, Artificial Sequence
  Description of Artificial Sequence: Synthetic oligonucleotide
  Sense strand starting at position 3677 of SEQ ID NO: 2143
uucucugggcaucauaaua

SEQ ID NO: 166373 - RNA, 19 nt, Artificial Sequence
  Description of Artificial Sequence: Synthetic oligonucleotide
  Antisense strand to SEQ ID NO: 166372
uauuaugaugcccagagaa

SEQ ID NO: 166374 - RNA, 19 nt, Artificial Sequence
  Description of Artificial Sequence: Synthetic oligonucleotide
  Sense strand starting at position 3674 of SEQ ID NO: 2143
acuuucucugggcaucaua

SEQ ID NO: 166375 - RNA, 19 nt, Artificial Sequence
  Description of Artificial Sequence: Synthetic oligonucleotide
  Antisense strand to SEQ ID NO: 166374
uaugaugcccagagaaagu

SEQ ID NO: 166376 - RNA, 19 nt, Artificial Sequence
  Description of Artificial Sequence: Synthetic oligonucleotide
  Sense strand starting at position 3601 of SEQ ID NO: 2143
gugcuaaguuacuuaauuu

SEQ ID NO: 166377 - RNA, 19 nt, Artificial Sequence
  Description of Artificial Sequence: Synthetic oligonucleotide
  Antisense strand to SEQ ID NO: 166376
aaauuaaguaacuuagcac

SEQ ID NO: 166378 - RNA, 19 nt, Artificial Sequence
  Description of Artificial Sequence: Synthetic oligonucleotide
  Sense strand starting at position 3428 of SEQ ID NO: 2143
gagcuaugacacggacagu

SEQ ID NO: 166379 - RNA, 19 nt, Artificial Sequence
  Description of Artificial Sequence: Synthetic oligonucleotide
  Antisense strand to SEQ ID NO: 166378
acuguccgugucauagcuc

SEQ ID NO: 166380 - RNA, 19 nt, Artificial Sequence
  Description of Artificial Sequence: Synthetic oligonucleotide
  Sense strand starting at position 3398 of SEQ ID NO: 2143
uuuaauagccugggugaga

SEQ ID NO: 166381 - RNA, 19 nt, Artificial Sequence
  Description of Artificial Sequence: Synthetic oligonucleotide
  Antisense strand to SEQ ID NO: 166380
ucucacccaggcuauuaaa

SEQ ID NO: 166382 - RNA, 19 nt, Artificial Sequence
  Description of Artificial Sequence: Synthetic oligonucleotide
  Sense strand starting at position 3355 of SEQ ID NO: 2143
ugaagaaugguuuaggcuu

SEQ ID NO: 166383 - RNA, 19 nt, Artificial Sequence
  Description of Artificial Sequence: Synthetic oligonucleotide
  Antisense strand to SEQ ID NO: 166382
aagccuaaaccauucuuca

SEQ ID NO: 166384 - RNA, 19 nt, Artificial Sequence
  Description of Artificial Sequence: Synthetic oligonucleotide
  Sense strand starting at position 3350 of SEQ ID NO: 2143
uaguaugaagaaugguuua

SEQ ID NO: 166385 - RNA, 19 nt, Artificial Sequence
  Description of Artificial Sequence: Synthetic oligonucleotide
  Antisense strand to SEQ ID NO: 166384
uaaaccauucuucauacua

SEQ ID NO: 166386 - RNA, 19 nt, Artificial Sequence
  Description of Artificial Sequence: Synthetic oligonucleotide
  Sense strand starting at position 3343 of SEQ ID NO: 2143
aaacuuguaguaugaagaa

SEQ ID NO: 166387 - RNA, 19 nt, Artificial Sequence
  Description of Artificial Sequence: Synthetic oligonucleotide
  Antisense strand to SEQ ID NO: 166386
uucuucauacuacaaguuu

SEQ ID NO: 166388 - RNA, 19 nt, Artificial Sequence
  Description of Artificial Sequence: Synthetic oligonucleotide
  Sense strand starting at position 3277 of SEQ ID NO: 2143
ugacuuuguggacggagau

SEQ ID NO: 166389 - RNA, 19 nt, Artificial Sequence
  Description of Artificial Sequence: Synthetic oligonucleotide
  Antisense strand to SEQ ID NO: 166388
aucuccguccacaaaguca

SEQ ID NO: 166390 - RNA, 19 nt, Artificial Sequence
  Description of Artificial Sequence: Synthetic oligonucleotide
  Sense strand starting at position 2847 of SEQ ID NO: 2143
gcguucugugugaggauua

SEQ ID NO: 166391 - RNA, 19 nt, Artificial Sequence
  Description of Artificial Sequence: Synthetic oligonucleotide
  Antisense strand to SEQ ID NO: 166390
uaauccucacacagaacgc

SEQ ID NO: 166392 - RNA, 19 nt, Artificial Sequence
  Description of Artificial Sequence: Synthetic oligonucleotide
  Sense strand starting at position 2802 of SEQ ID NO: 2143
aggcauuggaguugugaga

SEQ ID NO: 166393 - RNA, 19 nt, Artificial Sequence
  Description of Artificial Sequence: Synthetic oligonucleotide
  Antisense strand to SEQ ID NO: 166392
ucucacaacuccaaugccu

SEQ ID NO: 166394 - RNA, 19 nt, Artificial Sequence
  Description of Artificial Sequence: Synthetic oligonucleotide
  Sense strand starting at position 2796 of SEQ ID NO: 2143
gagcaaaggcauuggaguu

SEQ ID NO: 166395 - RNA, 19 nt, Artificial Sequence
  Description of Artificial Sequence: Synthetic oligonucleotide
  Antisense strand to SEQ ID NO: 166394
aacuccaaugccuuugcuc

SEQ ID NO: 166396 - RNA, 19 nt, Artificial Sequence
  Description of Artificial Sequence: Synthetic oligonucleotide
  Sense strand starting at position 2238 of SEQ ID NO: 2143
ggguaauuccuaugauaag

SEQ ID NO: 166397 - RNA, 19 nt, Artificial Sequence
  Description of Artificial Sequence: Synthetic oligonucleotide
  Antisense strand to SEQ ID NO: 166396
cuuaucauaggaauuaccc

SEQ ID NO: 166398 - RNA, 19 nt, Artificial Sequence
  Description of Artificial Sequence: Synthetic oligonucleotide
  Sense strand starting at position 2117 of SEQ ID NO: 2143
acugucaggcucuaugaca

SEQ ID NO: 166399 - RNA, 19 nt, Artificial Sequence
  Description of Artificial Sequence: Synthetic oligonucleotide
  Antisense strand to SEQ ID NO: 166398
ugucauagagccugacagu

SEQ ID NO: 166400 - RNA, 19 nt, Artificial Sequence
  Description of Artificial Sequence: Synthetic oligonucleotide
  Sense strand starting at position 2055 of SEQ ID NO: 2143
ucuguauuuccuuggagug

SEQ ID NO: 166401 - RNA, 19 nt, Artificial Sequence
  Description of Artificial Sequence: Synthetic oligonucleotide
  Antisense strand to SEQ ID NO: 166400
cacuccaaggaaauacaga

SEQ ID NO: 166402 - RNA, 19 nt, Artificial Sequence
  Description of Artificial Sequence: Synthetic oligonucleotide
  Sense strand starting at position 2054 of SEQ ID NO: 2143
uucuguauuuccuuggagu

SEQ ID NO: 166403 - RNA, 19 nt, Artificial Sequence
  Description of Artificial Sequence: Synthetic oligonucleotide
  Antisense strand to SEQ ID NO: 166402
acuccaaggaaauacagaa

SEQ ID NO: 166404 - RNA, 19 nt, Artificial Sequence
  Description of Artificial Sequence: Synthetic oligonucleotide
  Sense strand starting at position 2037 of SEQ ID NO: 2143
aacaauuguuucccggauu

SEQ ID NO: 166405 - RNA, 19 nt, Artificial Sequence
  Description of Artificial Sequence: Synthetic oligonucleotide
  Antisense strand to SEQ ID NO: 166404
aauccgggaaacaauuguu

SEQ ID NO: 166406 - RNA, 19 nt, Artificial Sequence
  Description of Artificial Sequence: Synthetic oligonucleotide
  Sense strand starting at position 2036 of SEQ ID NO: 2143
gaacaauuguuucccggau

SEQ ID NO: 166407 - RNA, 19 nt, Artificial Sequence
  Description of Artificial Sequence: Synthetic oligonucleotide
  Antisense strand to SEQ ID NO: 166406
auccgggaaacaauuguuc

SEQ ID NO: 166408 - RNA, 19 nt, Artificial Sequence
  Description of Artificial Sequence: Synthetic oligonucleotide
  Sense strand starting at position 2023 of SEQ ID NO: 2143
cccuaaucgcuaggaacaa

SEQ ID NO: 166409 - RNA, 19 nt, Artificial Sequence
  Description of Artificial Sequence: Synthetic oligonucleotide
  Antisense strand to SEQ ID NO: 166408
uuguuccuagcgauuaggg

SEQ ID NO: 166410 - RNA, 19 nt, Artificial Sequence
  Description of Artificial Sequence: Synthetic oligonucleotide
  Sense strand starting at position 2014 of SEQ ID NO: 2143
gcgagauuucccuaaucgc

SEQ ID NO: 166411 - RNA, 19 nt, Artificial Sequence
  Description of Artificial Sequence: Synthetic oligonucleotide
  Antisense strand to SEQ ID NO: 166410
gcgauuagggaaaucucgc

SEQ ID NO: 166412 - RNA, 19 nt, Artificial Sequence
  Description of Artificial Sequence: Synthetic oligonucleotide
  Sense strand starting at position 2012 of SEQ ID NO: 2143
ucgcgagauuucccuaauc

SEQ ID NO: 166413 - RNA, 19 nt, Artificial Sequence
  Description of Artificial Sequence: Synthetic oligonucleotide
  Antisense strand to SEQ ID NO: 166412
gauuagggaaaucucgcga

SEQ ID NO: 166414 - RNA, 19 nt, Artificial Sequence
  Description of Artificial Sequence: Synthetic oligonucleotide
  Sense strand starting at position 1777 of SEQ ID NO: 2143
ugcccucaccuuugaagaa

SEQ ID NO: 166415 - RNA, 19 nt, Artificial Sequence
  Description of Artificial Sequence: Synthetic oligonucleotide
  Antisense strand to SEQ ID NO: 166414
uucuucaaaggugagggca

SEQ ID NO: 166416 - RNA, 19 nt, Artificial Sequence
  Description of Artificial Sequence: Synthetic oligonucleotide
  Sense strand starting at position 1426 of SEQ ID NO: 2143
cuauguauucuuuaaagug

SEQ ID NO: 166417 - RNA, 19 nt, Artificial Sequence
  Description of Artificial Sequence: Synthetic oligonucleotide
  Antisense strand to SEQ ID NO: 166416
cacuuuaaagaauacauag

SEQ ID NO: 166418 - RNA, 19 nt, Artificial Sequence
  Description of Artificial Sequence: Synthetic oligonucleotide
  Sense strand starting at position 1119 of SEQ ID NO: 2143
gagaccauuuauugagaag

SEQ ID NO: 166419 - RNA, 19 nt, Artificial Sequence
  Description of Artificial Sequence: Synthetic oligonucleotide
  Antisense strand to SEQ ID NO: 166418
cuucucaauaaauggucuc

SEQ ID NO: 166420 - RNA, 19 nt, Artificial Sequence
  Description of Artificial Sequence: Synthetic oligonucleotide
  Sense strand starting at position 954 of SEQ ID NO: 2143
auaaguugccacgaaucaa

SEQ ID NO: 166421 - RNA, 19 nt, Artificial Sequence
  Description of Artificial Sequence: Synthetic oligonucleotide
  Antisense strand to SEQ ID NO: 166420
uugauucguggcaacuuau

SEQ ID NO: 166422 - RNA, 19 nt, Artificial Sequence
  Description of Artificial Sequence: Synthetic oligonucleotide
  Sense strand starting at position 943 of SEQ ID NO: 2143
guaucuguccuauaaguug

SEQ ID NO: 166423 - RNA, 19 nt, Artificial Sequence
  Description of Artificial Sequence: Synthetic oligonucleotide
  Antisense strand to SEQ ID NO: 166422
caacuuauaggacagauac

SEQ ID NO: 166424 - RNA, 19 nt, Artificial Sequence
  Description of Artificial Sequence: Synthetic oligonucleotide
  Sense strand starting at position 731 of SEQ ID NO: 2143
cugagaaacuugguauaau

SEQ ID NO: 166425 - RNA, 19 nt, Artificial Sequence
  Description of Artificial Sequence: Synthetic oligonucleotide
  Antisense strand to SEQ ID NO: 166424
auuauaccaaguuucucag

SEQ ID NO: 166426 - RNA, 19 nt, Artificial Sequence
  Description of Artificial Sequence: Synthetic oligonucleotide
  Sense strand starting at position 682 of SEQ ID NO: 2143
ggauccacaugauaaauuu

SEQ ID NO: 166427 - RNA, 19 nt, Artificial Sequence
  Description of Artificial Sequence: Synthetic oligonucleotide
  Antisense strand to SEQ ID NO: 166426
aaauuuaucauguggaucc

SEQ ID NO: 166428 - RNA, 19 nt, Artificial Sequence
  Description of Artificial Sequence: Synthetic oligonucleotide
  Sense strand starting at position 571 of SEQ ID NO: 2143
gucuuuauugaauagcauu

SEQ ID NO: 166429 - RNA, 19 nt, Artificial Sequence
  Description of Artificial Sequence: Synthetic oligonucleotide
  Antisense strand to SEQ ID NO: 166428
aaugcuauucaauaaagac

SEQ ID NO: 166430 - RNA, 19 nt, Artificial Sequence
  Description of Artificial Sequence: Synthetic oligonucleotide
  Sense strand starting at position 477 of SEQ ID NO: 2143
gguauucgagaauaauagu

SEQ ID NO: 166431 - RNA, 19 nt, Artificial Sequence
  Description of Artificial Sequence: Synthetic oligonucleotide
  Antisense strand to SEQ ID NO: 166430
acuauuauucucgaauacc

SEQ ID NO: 166432 - RNA, 19 nt, Artificial Sequence
  Description of Artificial Sequence: Synthetic oligonucleotide
  Sense strand starting at position 474 of SEQ ID NO: 2143
guagguauucgagaauaau

SEQ ID NO: 166433 - RNA, 19 nt, Artificial Sequence
  Description of Artificial Sequence: Synthetic oligonucleotide
  Antisense strand to SEQ ID NO: 166432
auuauucucgaauaccuac

SEQ ID NO: 166434 - RNA, 19 nt, Artificial Sequence
  Description of Artificial Sequence: Synthetic oligonucleotide
  Sense strand starting at position 354 of SEQ ID NO: 2143
auguacauacaguguuuaa

SEQ ID NO: 166435 - RNA, 19 nt, Artificial Sequence
  Description of Artificial Sequence: Synthetic oligonucleotide
  Antisense strand to SEQ ID NO: 166434
uuaaacacuguauguacau

SEQ ID NO: 166436 - RNA, 19 nt, Artificial Sequence
  Description of Artificial Sequence: Synthetic oligonucleotide
  Sense strand starting at position 106 of SEQ ID NO: 2143
guuucuauauaagcugaua

SEQ ID NO: 166437 - RNA, 19 nt, Artificial Sequence
  Description of Artificial Sequence: Synthetic oligonucleotide
  Antisense strand to SEQ ID NO: 166436
uaucagcuuauauagaaac

SEQ ID NO: 166438 - RNA, 19 nt, Artificial Sequence
  Description of Artificial Sequence: Synthetic oligonucleotide
  Sense strand starting at position 96 of SEQ ID NO: 2143
guaacacaauguuucuaua

SEQ ID NO: 166439 - RNA, 19 nt, Artificial Sequence
  Description of Artificial Sequence: Synthetic oligonucleotide
  Antisense strand to SEQ ID NO: 166438
uauagaaacauuguguuac

SEQ ID NO: 166440 - RNA, 19 nt, Artificial Sequence
  Description of Artificial Sequence: Synthetic oligonucleotide
  Sense strand starting at position 79 of SEQ ID NO: 2143
aauaacuaucgauguaugu

SEQ ID NO: 166441 - RNA, 19 nt, Artificial Sequence
  Description of Artificial Sequence: Synthetic oligonucleotide
  Antisense strand to SEQ ID NO: 166440
acauacaucgauaguuauu

SEQ ID NO: 166442 - RNA, 19 nt, Artificial Sequence
  Description of Artificial Sequence: Synthetic oligonucleotide
  Sense strand starting at position 68 of SEQ ID NO: 2144
uguguuuauugguuaaaca

SEQ ID NO: 166443 - RNA, 19 nt, Artificial Sequence
  Description of Artificial Sequence: Synthetic oligonucleotide
  Antisense strand to SEQ ID NO: 166442
uguuuaaccaauaaacaca

SEQ ID NO: 166444 - RNA, 19 nt, Artificial Sequence
  Description of Artificial Sequence: Synthetic oligonucleotide
  Sense strand starting at position 69 of SEQ ID NO: 2144
guguuuauugguuaaacaa

SEQ ID NO: 166445 - RNA, 19 nt, Artificial Sequence
  Description of Artificial Sequence: Synthetic oligonucleotide
  Antisense strand to SEQ ID NO: 166444
uuguuuaaccaauaaacac

SEQ ID NO: 166446 - RNA, 19 nt, Artificial Sequence
  Description of Artificial Sequence: Synthetic oligonucleotide
  Sense strand starting at position 102 of SEQ ID NO: 2144
aauccaguccuguaggauu

SEQ ID NO: 166447 - RNA, 19 nt, Artificial Sequence
  Description of Artificial Sequence: Synthetic oligonucleotide
  Antisense strand to SEQ ID NO: 166446
aauccuacaggacuggauu

SEQ ID NO: 166448 - RNA, 19 nt, Artificial Sequence
  Description of Artificial Sequence: Synthetic oligonucleotide
  Sense strand starting at position 266 of SEQ ID NO: 2144
uuuggcucacuuugaagau

SEQ ID NO: 166449 - RNA, 19 nt, Artificial Sequence
  Description of Artificial Sequence: Synthetic oligonucleotide
  Antisense strand to SEQ ID NO: 166448
aucuucaaagugagccaaa

SEQ ID NO: 166450 - RNA, 19 nt, Artificial Sequence
  Description of Artificial Sequence: Synthetic oligonucleotide
  Sense strand starting at position 270 of SEQ ID NO: 2144
gcucacuuugaagauauua

SEQ ID NO: 166451 - RNA, 19 nt, Artificial Sequence
  Description of Artificial Sequence: Synthetic oligonucleotide
  Antisense strand to SEQ ID NO: 166450
uaauaucuucaaagugagc

SEQ ID NO: 166452 - RNA, 19 nt, Artificial Sequence
  Description of Artificial Sequence: Synthetic oligonucleotide
  Sense strand starting at position 328 of SEQ ID NO: 2144
auugacugguuucuagaau

SEQ ID NO: 166453 - RNA, 19 nt, Artificial Sequence
  Description of Artificial Sequence: Synthetic oligonucleotide
  Antisense strand to SEQ ID NO: 166452
auucuagaaaccagucaau

SEQ ID NO: 166454 - RNA, 19 nt, Artificial Sequence
  Description of Artificial Sequence: Synthetic oligonucleotide
  Sense strand starting at position 465 of SEQ ID NO: 2144
gauuuaaguuugcaaauga

SEQ ID NO: 166455 - RNA, 19 nt, Artificial Sequence
  Description of Artificial Sequence: Synthetic oligonucleotide
  Antisense strand to SEQ ID NO: 166454
ucauuugcaaacuuaaauc

SEQ ID NO: 166456 - RNA, 19 nt, Artificial Sequence
  Description of Artificial Sequence: Synthetic oligonucleotide
  Sense strand starting at position 473 of SEQ ID NO: 2144
uuugcaaaugacugcuuua

SEQ ID NO: 166457 - RNA, 19 nt, Artificial Sequence
  Description of Artificial Sequence: Synthetic oligonucleotide
  Antisense strand to SEQ ID NO: 166456
uaaagcagucauuugcaaa

SEQ ID NO: 166458 - RNA, 19 nt, Artificial Sequence
  Description of Artificial Sequence: Synthetic oligonucleotide
  Sense strand starting at position 530 of SEQ ID NO: 2144
aaauguuaguguccuugau

SEQ ID NO: 166459 - RNA, 19 nt, Artificial Sequence
  Description of Artificial Sequence: Synthetic oligonucleotide
  Antisense strand to SEQ ID NO: 166458
aucaaggacacuaacauuu

SEQ ID NO: 166460 - RNA, 19 nt, Artificial Sequence
  Description of Artificial Sequence: Synthetic oligonucleotide
  Sense strand starting at position 532 of SEQ ID NO: 2144
auguuaguguccuugauuu

SEQ ID NO: 166461 - RNA, 19 nt, Artificial Sequence
  Description of Artificial Sequence: Synthetic oligonucleotide
  Antisense strand to SEQ ID NO: 166460
aaaucaaggacacuaacau

SEQ ID NO: 166462 - RNA, 19 nt, Artificial Sequence
  Description of Artificial Sequence: Synthetic oligonucleotide
  Sense strand starting at position 562 of SEQ ID NO: 2144
aagauuacuuuguugaggu

SEQ ID NO: 166463 - RNA, 19 nt, Artificial Sequence
  Description of Artificial Sequence: Synthetic oligonucleotide
  Antisense strand to SEQ ID NO: 166462
accucaacaaaguaaucuu

SEQ ID NO: 166464 - RNA, 19 nt, Artificial Sequence
  Description of Artificial Sequence: Synthetic oligonucleotide
  Sense strand starting at position 564 of SEQ ID NO: 2144
gauuacuuuguugagguuu

SEQ ID NO: 166465 - RNA, 19 nt, Artificial Sequence
  Description of Artificial Sequence: Synthetic oligonucleotide
  Antisense strand to SEQ ID NO: 166464
aaaccucaacaaaguaauc

SEQ ID NO: 166466 - RNA, 19 nt, Artificial Sequence
  Description of Artificial Sequence: Synthetic oligonucleotide
  Sense strand starting at position 604 of SEQ ID NO: 2144
ggagagaugguguauguga

SEQ ID NO: 166467 - RNA, 19 nt, Artificial Sequence
  Description of Artificial Sequence: Synthetic oligonucleotide
  Antisense strand to SEQ ID NO: 166466
ucacauacaccaucucucc

SEQ ID NO: 166468 - RNA, 19 nt, Artificial Sequence
  Description of Artificial Sequence: Synthetic oligonucleotide
  Sense strand starting at position 606 of SEQ ID NO: 2144
agagaugguguaugugaaa

SEQ ID NO: 166469 - RNA, 19 nt, Artificial Sequence
  Description of Artificial Sequence: Synthetic oligonucleotide
  Antisense strand to SEQ ID NO: 166468
uuucacauacaccaucucu

SEQ ID NO: 166470 - RNA, 19 nt, Artificial Sequence
  Description of Artificial Sequence: Synthetic oligonucleotide
  Sense strand starting at position 619 of SEQ ID NO: 2144
gugaaauacuaccugacua

SEQ ID NO: 166471 - RNA, 19 nt, Artificial Sequence
  Description of Artificial Sequence: Synthetic oligonucleotide
  Antisense strand to SEQ ID NO: 166470
uagucagguaguauuucac

SEQ ID NO: 166472 - RNA, 19 nt, Artificial Sequence
  Description of Artificial Sequence: Synthetic oligonucleotide
  Sense strand starting at position 668 of SEQ ID NO: 2144
guuugauuuguuuggguuu

SEQ ID NO: 166473 - RNA, 19 nt, Artificial Sequence
  Description of Artificial Sequence: Synthetic oligonucleotide
  Antisense strand to SEQ ID NO: 166472
aaacccaaacaaaucaaac

SEQ ID NO: 166474 - RNA, 19 nt, Artificial Sequence
  Description of Artificial Sequence: Synthetic oligonucleotide
  Sense strand starting at position 834 of SEQ ID NO: 2144
ugccuagagcuacaaagaa

SEQ ID NO: 166475 - RNA, 19 nt, Artificial Sequence
  Description of Artificial Sequence: Synthetic oligonucleotide
  Antisense strand to SEQ ID NO: 166474
uucuuuguagcucuaggca

SEQ ID NO: 166476 - RNA, 19 nt, Artificial Sequence
  Description of Artificial Sequence: Synthetic oligonucleotide
  Sense strand starting at position 983 of SEQ ID NO: 2144
ucaugccauugucugauua

SEQ ID NO: 166477 - RNA, 19 nt, Artificial Sequence
  Description of Artificial Sequence: Synthetic oligonucleotide
  Antisense strand to SEQ ID NO: 166476
uaaucagacaauggcauga

SEQ ID NO: 166478 - RNA, 19 nt, Artificial Sequence
  Description of Artificial Sequence: Synthetic oligonucleotide
  Sense strand starting at position 1050 of SEQ ID NO: 2144
ccgaaauuacuuuaagcug

SEQ ID NO: 166479 - RNA, 19 nt, Artificial Sequence
  Description of Artificial Sequence: Synthetic oligonucleotide
  Antisense strand to SEQ ID NO: 166478
cagcuuaaaguaauuucgg

SEQ ID NO: 166480 - RNA, 19 nt, Artificial Sequence
  Description of Artificial Sequence: Synthetic oligonucleotide
  Sense strand starting at position 1214 of SEQ ID NO: 2144
cguaauucuuuggucugga

SEQ ID NO: 166481 - RNA, 19 nt, Artificial Sequence
  Description of Artificial Sequence: Synthetic oligonucleotide
  Antisense strand to SEQ ID NO: 166480
uccagaccaaagaauuacg

SEQ ID NO: 166482 - RNA, 19 nt, Artificial Sequence
  Description of Artificial Sequence: Synthetic oligonucleotide
  Sense strand starting at position 1215 of SEQ ID NO: 2144
guaauucuuuggucuggag

SEQ ID NO: 166483 - RNA, 19 nt, Artificial Sequence
  Description of Artificial Sequence: Synthetic oligonucleotide
  Antisense strand to SEQ ID NO: 166482
cuccagaccaaagaauuac

SEQ ID NO: 166484 - RNA, 19 nt, Artificial Sequence
  Description of Artificial Sequence: Synthetic oligonucleotide
  Sense strand starting at position 1951 of SEQ ID NO: 2144
uggccuggaucagcagaua

SEQ ID NO: 166485 - RNA, 19 nt, Artificial Sequence
  Description of Artificial Sequence: Synthetic oligonucleotide
  Antisense strand to SEQ ID NO: 166484
uaucugcugauccaggcca

SEQ ID NO: 166486 - RNA, 19 nt, Artificial Sequence
  Description of Artificial Sequence: Synthetic oligonucleotide
  Sense strand starting at position 3084 of SEQ ID NO: 2144
caaguccuagcuugagaga

SEQ ID NO: 166487 - RNA, 19 nt, Artificial Sequence
  Description of Artificial Sequence: Synthetic oligonucleotide
  Antisense strand to SEQ ID NO: 166486
ucucucaagcuaggacuug

SEQ ID NO: 166488 - RNA, 19 nt, Artificial Sequence
  Description of Artificial Sequence: Synthetic oligonucleotide
  Sense strand starting at position 3153 of SEQ ID NO: 2144
gcauguguucuagaaaugu

SEQ ID NO: 166489 - RNA, 19 nt, Artificial Sequence
  Description of Artificial Sequence: Synthetic oligonucleotide
  Antisense strand to SEQ ID NO: 166488
acauuucuagaacacaugc

SEQ ID NO: 166490 - RNA, 19 nt, Artificial Sequence
  Description of Artificial Sequence: Synthetic oligonucleotide
  Sense strand starting at position 3157 of SEQ ID NO: 2144
guguucuagaaauguauca

SEQ ID NO: 166491 - RNA, 19 nt, Artificial Sequence
  Description of Artificial Sequence: Synthetic oligonucleotide
  Antisense strand to SEQ ID NO: 166490
ugauacauuucuagaacac

SEQ ID NO: 166492 - RNA, 19 nt, Artificial Sequence
  Description of Artificial Sequence: Synthetic oligonucleotide
  Sense strand starting at position 3491 of SEQ ID NO: 2144
gaaguugagacacagugua

SEQ ID NO: 166493 - RNA, 19 nt, Artificial Sequence
  Description of Artificial Sequence: Synthetic oligonucleotide
  Antisense strand to SEQ ID NO: 166492
uacacugugucucaacuuc

SEQ ID NO: 166494 - RNA, 19 nt, Artificial Sequence
  Description of Artificial Sequence: Synthetic oligonucleotide
  Sense strand starting at position 3499 of SEQ ID NO: 2144
gacacaguguaaucuagaa

SEQ ID NO: 166495 - RNA, 19 nt, Artificial Sequence
  Description of Artificial Sequence: Synthetic oligonucleotide
  Antisense strand to SEQ ID NO: 166494
uucuagauuacacuguguc

SEQ ID NO: 166496 - RNA, 19 nt, Artificial Sequence
  Description of Artificial Sequence: Synthetic oligonucleotide
  Sense strand starting at position 3584 of SEQ ID NO: 2144
cucguugccagagauuaau

SEQ ID NO: 166497 - RNA, 19 nt, Artificial Sequence
  Description of Artificial Sequence: Synthetic oligonucleotide
  Antisense strand to SEQ ID NO: 166496
auuaaucucuggcaacgag

SEQ ID NO: 166498 - RNA, 19 nt, Artificial Sequence
  Description of Artificial Sequence: Synthetic oligonucleotide
  Sense strand starting at position 3587 of SEQ ID NO: 2144
guugccagagauuaauuga

SEQ ID NO: 166499 - RNA, 19 nt, Artificial Sequence
  Description of Artificial Sequence: Synthetic oligonucleotide
  Antisense strand to SEQ ID NO: 166498
ucaauuaaucucuggcaac

SEQ ID NO: 166500 - RNA, 19 nt, Artificial Sequence
  Description of Artificial Sequence: Synthetic oligonucleotide
  Sense strand starting at position 3590 of SEQ ID NO: 2144
gccagagauuaauugauuc

SEQ ID NO: 166501 - RNA, 19 nt, Artificial Sequence
  Description of Artificial Sequence: Synthetic oligonucleotide
  Antisense strand to SEQ ID NO: 166500
gaaucaauuaaucucuggc

SEQ ID NO: 166502 - RNA, 19 nt, Artificial Sequence
  Description of Artificial Sequence: Synthetic oligonucleotide
  Sense strand starting at position 3617 of SEQ ID NO: 2144
auaagaaucagucgugcua

SEQ ID NO: 166503 - RNA, 19 nt, Artificial Sequence
  Description of Artificial Sequence: Synthetic oligonucleotide
  Antisense strand to SEQ ID NO: 166502
uagcacgacugauucuuau

SEQ ID NO: 166504 - RNA, 19 nt, Artificial Sequence
  Description of Artificial Sequence: Synthetic oligonucleotide
  Sense strand starting at position 3630 of SEQ ID NO: 2144
gugcuaucaucccugauuu

SEQ ID NO: 166505 - RNA, 19 nt, Artificial Sequence
  Description of Artificial Sequence: Synthetic oligonucleotide
  Antisense strand to SEQ ID NO: 166504
aaaucagggaugauagcac

SEQ ID NO: 166506 - RNA, 19 nt, Artificial Sequence
  Description of Artificial Sequence: Synthetic oligonucleotide
  Sense strand starting at position 3884 of SEQ ID NO: 2144
ggcuccaaucucugaaugu

SEQ ID NO: 166507 - RNA, 19 nt, Artificial Sequence
  Description of Artificial Sequence: Synthetic oligonucleotide
  Antisense strand to SEQ ID NO: 166506
acauucagagauuggagcc

SEQ ID NO: 166508 - RNA, 19 nt, Artificial Sequence
  Description of Artificial Sequence: Synthetic oligonucleotide
  Sense strand starting at position 3893 of SEQ ID NO: 2144
cucugaaugugcuuugacu

SEQ ID NO: 166509 - RNA, 19 nt, Artificial Sequence
  Description of Artificial Sequence: Synthetic oligonucleotide
  Antisense strand to SEQ ID NO: 166508
agucaaagcacauucagag

SEQ ID NO: 166510 - RNA, 19 nt, Artificial Sequence
  Description of Artificial Sequence: Synthetic oligonucleotide
  Sense strand starting at position 3895 of SEQ ID NO: 2144
cugaaugugcuuugacuau

SEQ ID NO: 166511 - RNA, 19 nt, Artificial Sequence
  Description of Artificial Sequence: Synthetic oligonucleotide
  Antisense strand to SEQ ID NO: 166510
auagucaaagcacauucag

SEQ ID NO: 166512 - RNA, 19 nt, Artificial Sequence
  Description of Artificial Sequence: Synthetic oligonucleotide
  Sense strand starting at position 3933 of SEQ ID NO: 2144
agucucugcuuucuggaau

SEQ ID NO: 166513 - RNA, 19 nt, Artificial Sequence
  Description of Artificial Sequence: Synthetic oligonucleotide
  Antisense strand to SEQ ID NO: 166512
auuccagaaagcagagacu

SEQ ID NO: 166514 - RNA, 19 nt, Artificial Sequence
  Description of Artificial Sequence: Synthetic oligonucleotide
  Sense strand starting at position 3936 of SEQ ID NO: 2144
cucugcuuucuggaauaau

SEQ ID NO: 166515 - RNA, 19 nt, Artificial Sequence
  Description of Artificial Sequence: Synthetic oligonucleotide
  Antisense strand to SEQ ID NO: 166514
auuauuccagaaagcagag

SEQ ID NO: 166516 - RNA, 19 nt, Artificial Sequence
  Description of Artificial Sequence: Synthetic oligonucleotide
  Sense strand starting at position 3939 of SEQ ID NO: 2144
ugcuuucuggaauaauugu

SEQ ID NO: 166517 - RNA, 19 nt, Artificial Sequence
  Description of Artificial Sequence: Synthetic oligonucleotide
  Antisense strand to SEQ ID NO: 166516
acaauuauuccagaaagca

SEQ ID NO: 166518 - RNA, 19 nt, Artificial Sequence
  Description of Artificial Sequence: Synthetic oligonucleotide
  Sense strand starting at position 3957 of SEQ ID NO: 2144
uuaccugcaucugagauuu

SEQ ID NO: 166519 - RNA, 19 nt, Artificial Sequence
  Description of Artificial Sequence: Synthetic oligonucleotide
  Antisense strand to SEQ ID NO: 166518
aaaucucagaugcagguaa

SEQ ID NO: 166520 - RNA, 19 nt, Artificial Sequence
  Description of Artificial Sequence: Synthetic oligonucleotide
  Sense strand starting at position 3965 of SEQ ID NO: 2144
aucugagauuugcagauaa

SEQ ID NO: 166521 - RNA, 19 nt, Artificial Sequence
  Description of Artificial Sequence: Synthetic oligonucleotide
  Antisense strand to SEQ ID NO: 166520
uuaucugcaaaucucagau

SEQ ID NO: 166522 - RNA, 19 nt, Artificial Sequence
  Description of Artificial Sequence: Synthetic oligonucleotide
  Sense strand starting at position 122 of SEQ ID NO: 2145
gagucuguugcacagaaga

SEQ ID NO: 166523 - RNA, 19 nt, Artificial Sequence
  Description of Artificial Sequence: Synthetic oligonucleotide
  Antisense strand to SEQ ID NO: 166522
ucuucugugcaacagacuc

SEQ ID NO: 166524 - RNA, 19 nt, Artificial Sequence
  Description of Artificial Sequence: Synthetic oligonucleotide
  Sense strand starting at position 124 of SEQ ID NO: 2145
gucuguugcacagaagaga

SEQ ID NO: 166525 - RNA, 19 nt, Artificial Sequence
  Description of Artificial Sequence: Synthetic oligonucleotide
  Antisense strand to SEQ ID NO: 166524
ucucuucugugcaacagac

SEQ ID NO: 166526 - RNA, 19 nt, Artificial Sequence
  Description of Artificial Sequence: Synthetic oligonucleotide
  Sense strand starting at position 210 of SEQ ID NO: 2145
guuuguaucaggugacuga

SEQ ID NO: 166527 - RNA, 19 nt, Artificial Sequence
  Description of Artificial Sequence: Synthetic oligonucleotide
  Antisense strand to SEQ ID NO: 166526
ucagucaccugauacaaac

SEQ ID NO: 166528 - RNA, 19 nt, Artificial Sequence
  Description of Artificial Sequence: Synthetic oligonucleotide
  Sense strand starting at position 232 of SEQ ID NO: 2145
gaggguuaaggauguggau

SEQ ID NO: 166529 - RNA, 19 nt, Artificial Sequence
  Description of Artificial Sequence: Synthetic oligonucleotide
  Antisense strand to SEQ ID NO: 166528
auccacauccuuaacccuc

SEQ ID NO: 166530 - RNA, 19 nt, Artificial Sequence
  Description of Artificial Sequence: Synthetic oligonucleotide
  Sense strand starting at position 280 of SEQ ID NO: 2145
acaauuagguaucuuagau

SEQ ID NO: 166531 - RNA, 19 nt, Artificial Sequence
  Description of Artificial Sequence: Synthetic oligonucleotide
  Antisense strand to SEQ ID NO: 166530
aucuaagauaccuaauugu

SEQ ID NO: 166532 - RNA, 19 nt, Artificial Sequence
  Description of Artificial Sequence: Synthetic oligonucleotide
  Sense strand starting at position 613 of SEQ ID NO: 2145
gaaguaacggagugagacu

SEQ ID NO: 166533 - RNA, 19 nt, Artificial Sequence
  Description of Artificial Sequence: Synthetic oligonucleotide
  Antisense strand to SEQ ID NO: 166532
agucucacuccguuacuuc

SEQ ID NO: 166534 - RNA, 19 nt, Artificial Sequence
  Description of Artificial Sequence: Synthetic oligonucleotide
  Sense strand starting at position 648 of SEQ ID NO: 2145
auaacagucacugguguua

SEQ ID NO: 166535 - RNA, 19 nt, Artificial Sequence
  Description of Artificial Sequence: Synthetic oligonucleotide
  Antisense strand to SEQ ID NO: 166534
uaacaccagugacuguuau

SEQ ID NO: 166536 - RNA, 19 nt, Artificial Sequence
  Description of Artificial Sequence: Synthetic oligonucleotide
  Sense strand starting at position 657 of SEQ ID NO: 2145
acugguguuagucagaaga

SEQ ID NO: 166537 - RNA, 19 nt, Artificial Sequence
  Description of Artificial Sequence: Synthetic oligonucleotide
  Antisense strand to SEQ ID NO: 166536
ucuucugacuaacaccagu

SEQ ID NO: 166538 - RNA, 19 nt, Artificial Sequence
  Description of Artificial Sequence: Synthetic oligonucleotide
  Sense strand starting at position 677 of SEQ ID NO: 2145
agaaauauguggucauucu

SEQ ID NO: 166539 - RNA, 19 nt, Artificial Sequence
  Description of Artificial Sequence: Synthetic oligonucleotide
  Antisense strand to SEQ ID NO: 166538
agaaugaccacauauuucu

SEQ ID NO: 166540 - RNA, 19 nt, Artificial Sequence
  Description of Artificial Sequence: Synthetic oligonucleotide
  Sense strand starting at position 678 of SEQ ID NO: 2145
gaaauauguggucauucuu

SEQ ID NO: 166541 - RNA, 19 nt, Artificial Sequence
  Description of Artificial Sequence: Synthetic oligonucleotide
  Antisense strand to SEQ ID NO: 166540
aagaaugaccacauauuuc

SEQ ID NO: 166542 - RNA, 19 nt, Artificial Sequence
  Description of Artificial Sequence: Synthetic oligonucleotide
  Sense strand starting at position 780 of SEQ ID NO: 2145
caggucacuccauggugaa

SEQ ID NO: 166543 - RNA, 19 nt, Artificial Sequence
  Description of Artificial Sequence: Synthetic oligonucleotide
  Antisense strand to SEQ ID NO: 166542
uucaccauggagugaccug

SEQ ID NO: 166544 - RNA, 19 nt, Artificial Sequence
  Description of Artificial Sequence: Synthetic oligonucleotide
  Sense strand starting at position 781 of SEQ ID NO: 2145
aggucacuccauggugaaa

SEQ ID NO: 166545 - RNA, 19 nt, Artificial Sequence
  Description of Artificial Sequence: Synthetic oligonucleotide
  Antisense strand to SEQ ID NO: 166544
uuucaccauggagugaccu

SEQ ID NO: 166546 - RNA, 19 nt, Artificial Sequence
  Description of Artificial Sequence: Synthetic oligonucleotide
  Sense strand starting at position 847 of SEQ ID NO: 2145
gcuggacucuuaucccuaa

SEQ ID NO: 166547 - RNA, 19 nt, Artificial Sequence
  Description of Artificial Sequence: Synthetic oligonucleotide
  Antisense strand to SEQ ID NO: 166546
uuagggauaagaguccagc

SEQ ID NO: 166548 - RNA, 19 nt, Artificial Sequence
  Description of Artificial Sequence: Synthetic oligonucleotide
  Sense strand starting at position 1051 of SEQ ID NO: 2145
cuaucaacuggcugaacua

SEQ ID NO: 166549 - RNA, 19 nt, Artificial Sequence
  Description of Artificial Sequence: Synthetic oligonucleotide
  Antisense strand to SEQ ID NO: 166548
uaguucagccaguugauag

SEQ ID NO: 166550 - RNA, 19 nt, Artificial Sequence
  Description of Artificial Sequence: Synthetic oligonucleotide
  Sense strand starting at position 1244 of SEQ ID NO: 2145
ugucucuagcucuacauau

SEQ ID NO: 166551 - RNA, 19 nt, Artificial Sequence
  Description of Artificial Sequence: Synthetic oligonucleotide
  Antisense strand to SEQ ID NO: 166550
auauguagagcuagagaca

SEQ ID NO: 166552 - RNA, 19 nt, Artificial Sequence
  Description of Artificial Sequence: Synthetic oligonucleotide
  Sense strand starting at position 1309 of SEQ ID NO: 2145
guuguuaguaauggagacu

SEQ ID NO: 166553 - RNA, 19 nt, Artificial Sequence
  Description of Artificial Sequence: Synthetic oligonucleotide
  Antisense strand to SEQ ID NO: 166552
agucuccauuacuaacaac

SEQ ID NO: 166554 - RNA, 19 nt, Artificial Sequence
  Description of Artificial Sequence: Synthetic oligonucleotide
  Sense strand starting at position 1410 of SEQ ID NO: 2145
gaaugaucccaaugugcug

SEQ ID NO: 166555 - RNA, 19 nt, Artificial Sequence
  Description of Artificial Sequence: Synthetic oligonucleotide
  Antisense strand to SEQ ID NO: 166554
cagcacauugggaucauuc

SEQ ID NO: 166556 - RNA, 19 nt, Artificial Sequence
  Description of Artificial Sequence: Synthetic oligonucleotide
  Sense strand starting at position 1590 of SEQ ID NO: 2145
ggugcagcucccggaauuu

SEQ ID NO: 166557 - RNA, 19 nt, Artificial Sequence
  Description of Artificial Sequence: Synthetic oligonucleotide
  Antisense strand to SEQ ID NO: 166556
aaauuccgggagcugcacc

SEQ ID NO: 166558 - RNA, 19 nt, Artificial Sequence
  Description of Artificial Sequence: Synthetic oligonucleotide
  Sense strand starting at position 1984 of SEQ ID NO: 2145
gagcacuuccgucaaccuu

SEQ ID NO: 166559 - RNA, 19 nt, Artificial Sequence
  Description of Artificial Sequence: Synthetic oligonucleotide
  Antisense strand to SEQ ID NO: 166558
aagguugacggaagugcuc

SEQ ID NO: 166560 - RNA, 19 nt, Artificial Sequence
  Description of Artificial Sequence: Synthetic oligonucleotide
  Sense strand starting at position 2022 of SEQ ID NO: 2145
guacgaaugggcuaccaua

SEQ ID NO: 166561 - RNA, 19 nt, Artificial Sequence
  Description of Artificial Sequence: Synthetic oligonucleotide
  Antisense strand to SEQ ID NO: 166560
uaugguagcccauucguac

SEQ ID NO: 166562 - RNA, 19 nt, Artificial Sequence
  Description of Artificial Sequence: Synthetic oligonucleotide
  Sense strand starting at position 2154 of SEQ ID NO: 2145
ggagguaagucgccaagaa

SEQ ID NO: 166563 - RNA, 19 nt, Artificial Sequence
  Description of Artificial Sequence: Synthetic oligonucleotide
  Antisense strand to SEQ ID NO: 166562
uucuuggcgacuuaccucc

SEQ ID NO: 166564 - RNA, 19 nt, Artificial Sequence
  Description of Artificial Sequence: Synthetic oligonucleotide
  Sense strand starting at position 2155 of SEQ ID NO: 2145
gagguaagucgccaagaaa

SEQ ID NO: 166565 - RNA, 19 nt, Artificial Sequence
  Description of Artificial Sequence: Synthetic oligonucleotide
  Antisense strand to SEQ ID NO: 166564
uuucuuggcgacuuaccuc

SEQ ID NO: 166566 - RNA, 19 nt, Artificial Sequence
  Description of Artificial Sequence: Synthetic oligonucleotide
  Sense strand starting at position 2273 of SEQ ID NO: 2145
caaagacagugagagaaau

SEQ ID NO: 166567 - RNA, 19 nt, Artificial Sequence
  Description of Artificial Sequence: Synthetic oligonucleotide
  Antisense strand to SEQ ID NO: 166566
auuucucucacugucuuug

SEQ ID NO: 166568 - RNA, 19 nt, Artificial Sequence
  Description of Artificial Sequence: Synthetic oligonucleotide
  Sense strand starting at position 2343 of SEQ ID NO: 2145
gcucauuccugggcauaaa

SEQ ID NO: 166569 - RNA, 19 nt, Artificial Sequence
  Description of Artificial Sequence: Synthetic oligonucleotide
  Antisense strand to SEQ ID NO: 166568
uuuaugcccaggaaugagc

SEQ ID NO: 166570 - RNA, 19 nt, Artificial Sequence
  Description of Artificial Sequence: Synthetic oligonucleotide
  Sense strand starting at position 2399 of SEQ ID NO: 2145
aagcaaggaugaucauagu

SEQ ID NO: 166571 - RNA, 19 nt, Artificial Sequence
  Description of Artificial Sequence: Synthetic oligonucleotide
  Antisense strand to SEQ ID NO: 166570
acuaugaucauccuugcuu

SEQ ID NO: 166572 - RNA, 19 nt, Artificial Sequence
  Description of Artificial Sequence: Synthetic oligonucleotide
  Sense strand starting at position 2543 of SEQ ID NO: 2145
cauuguuucggaggacauc

SEQ ID NO: 166573 - RNA, 19 nt, Artificial Sequence
  Description of Artificial Sequence: Synthetic oligonucleotide
  Antisense strand to SEQ ID NO: 166572
gauguccuccgaaacaaug

SEQ ID NO: 166574 - RNA, 19 nt, Artificial Sequence
  Description of Artificial Sequence: Synthetic oligonucleotide
  Sense strand starting at position 2553 of SEQ ID NO: 2145
gaggacaucggauguguaa

SEQ ID NO: 166575 - RNA, 19 nt, Artificial Sequence
  Description of Artificial Sequence: Synthetic oligonucleotide
  Antisense strand to SEQ ID NO: 166574
uuacacauccgauguccuc

SEQ ID NO: 166576 - RNA, 19 nt, Artificial Sequence
  Description of Artificial Sequence: Synthetic oligonucleotide
  Sense strand starting at position 2555 of SEQ ID NO: 2145
ggacaucggauguguaacu

SEQ ID NO: 166577 - RNA, 19 nt, Artificial Sequence
  Description of Artificial Sequence: Synthetic oligonucleotide
  Antisense strand to SEQ ID NO: 166576
aguuacacauccgaugucc

SEQ ID NO: 166578 - RNA, 19 nt, Artificial Sequence
  Description of Artificial Sequence: Synthetic oligonucleotide
  Sense strand starting at position 2766 of SEQ ID NO: 2145
gugauugcaucuccaacca

SEQ ID NO: 166579 - RNA, 19 nt, Artificial Sequence
  Description of Artificial Sequence: Synthetic oligonucleotide
  Antisense strand to SEQ ID NO: 166578
ugguuggagaugcaaucac

SEQ ID NO: 166580 - RNA, 19 nt, Artificial Sequence
  Description of Artificial Sequence: Synthetic oligonucleotide
  Sense strand starting at position 2863 of SEQ ID NO: 2145
aaacuuacuugagugguaa

SEQ ID NO: 166581 - RNA, 19 nt, Artificial Sequence
  Description of Artificial Sequence: Synthetic oligonucleotide
  Antisense strand to SEQ ID NO: 166580
uuaccacucaaguaaguuu

SEQ ID NO: 166582 - RNA, 19 nt, Artificial Sequence
  Description of Artificial Sequence: Synthetic oligonucleotide
  Sense strand starting at position 2864 of SEQ ID NO: 2145
aacuuacuugagugguaac

SEQ ID NO: 166583 - RNA, 19 nt, Artificial Sequence
  Description of Artificial Sequence: Synthetic oligonucleotide
  Antisense strand to SEQ ID NO: 166582
guuaccacucaaguaaguu

SEQ ID NO: 166584 - RNA, 19 nt, Artificial Sequence
  Description of Artificial Sequence: Synthetic oligonucleotide
  Sense strand starting at position 3001 of SEQ ID NO: 2145
aguggaaaguucuuuccau

SEQ ID NO: 166585 - RNA, 19 nt, Artificial Sequence
  Description of Artificial Sequence: Synthetic oligonucleotide
  Antisense strand to SEQ ID NO: 166584
auggaaagaacuuuccacu

SEQ ID NO: 166586 - RNA, 19 nt, Artificial Sequence
  Description of Artificial Sequence: Synthetic oligonucleotide
  Sense strand starting at position 3002 of SEQ ID NO: 2145
guggaaaguucuuuccauu

SEQ ID NO: 166587 - RNA, 19 nt, Artificial Sequence
  Description of Artificial Sequence: Synthetic oligonucleotide
  Antisense strand to SEQ ID NO: 166586
aauggaaagaacuuuccac

SEQ ID NO: 166588 - RNA, 19 nt, Artificial Sequence
  Description of Artificial Sequence: Synthetic oligonucleotide
  Sense strand starting at position 3571 of SEQ ID NO: 2145
acugucauuugacacuauu

SEQ ID NO: 166589 - RNA, 19 nt, Artificial Sequence
  Description of Artificial Sequence: Synthetic oligonucleotide
  Antisense strand to SEQ ID NO: 166588
aauagugucaaaugacagu

SEQ ID NO: 166590 - RNA, 19 nt, Artificial Sequence
  Description of Artificial Sequence: Synthetic oligonucleotide
  Sense strand starting at position 3650 of SEQ ID NO: 2145
agcguuauuacuggagaac

SEQ ID NO: 166591 - RNA, 19 nt, Artificial Sequence
  Description of Artificial Sequence: Synthetic oligonucleotide
  Antisense strand to SEQ ID NO: 166590
guucuccaguaauaacgcu

SEQ ID NO: 166592 - RNA, 19 nt, Artificial Sequence
  Description of Artificial Sequence: Synthetic oligonucleotide
  Sense strand starting at position 3651 of SEQ ID NO: 2145
gcguuauuacuggagaaca

SEQ ID NO: 166593 - RNA, 19 nt, Artificial Sequence
  Description of Artificial Sequence: Synthetic oligonucleotide
  Antisense strand to SEQ ID NO: 166592
uguucuccaguaauaacgc

SEQ ID NO: 166594 - RNA, 19 nt, Artificial Sequence
  Description of Artificial Sequence: Synthetic oligonucleotide
  Sense strand starting at position 3695 of SEQ ID NO: 2145
cuuacaugcucagcagaga

SEQ ID NO: 166595 - RNA, 19 nt, Artificial Sequence
  Description of Artificial Sequence: Synthetic oligonucleotide
  Antisense strand to SEQ ID NO: 166594
ucucugcugagcauguaag

SEQ ID NO: 166596 - RNA, 19 nt, Artificial Sequence
  Description of Artificial Sequence: Synthetic oligonucleotide
  Sense strand starting at position 3712 of SEQ ID NO: 2145
gaggcaaugccagaauuac

SEQ ID NO: 166597 - RNA, 19 nt, Artificial Sequence
  Description of Artificial Sequence: Synthetic oligonucleotide
  Antisense strand to SEQ ID NO: 166596
guaauucuggcauugccuc

SEQ ID NO: 166598 - RNA, 19 nt, Artificial Sequence
  Description of Artificial Sequence: Synthetic oligonucleotide
  Sense strand starting at position 3736 of SEQ ID NO: 2145
gugcuaaaguuacuaagau

SEQ ID NO: 166599 - RNA, 19 nt, Artificial Sequence
  Description of Artificial Sequence: Synthetic oligonucleotide
  Antisense strand to SEQ ID NO: 166598
aucuuaguaacuuuagcac

SEQ ID NO: 166600 - RNA, 19 nt, Artificial Sequence
  Description of Artificial Sequence: Synthetic oligonucleotide
  Sense strand starting at position 3755 of SEQ ID NO: 2145
aaguaaggugcuggauaua

SEQ ID NO: 166601 - RNA, 19 nt, Artificial Sequence
  Description of Artificial Sequence: Synthetic oligonucleotide
  Antisense strand to SEQ ID NO: 166600
uauauccagcaccuuacuu

SEQ ID NO: 166602 - RNA, 19 nt, Artificial Sequence
  Description of Artificial Sequence: Synthetic oligonucleotide
  Sense strand starting at position 55 of SEQ ID NO: 2146
ggagaaggccugcaguauu

SEQ ID NO: 166603 - RNA, 19 nt, Artificial Sequence
  Description of Artificial Sequence: Synthetic oligonucleotide
  Antisense strand to SEQ ID NO: 166602
aauacugcaggccuucucc

SEQ ID NO: 166604 - RNA, 19 nt, Artificial Sequence
  Description of Artificial Sequence: Synthetic oligonucleotide
  Sense strand starting at position 515 of SEQ ID NO: 2146
ucaucucuuccguaaagua

SEQ ID NO: 166605 - RNA, 19 nt, Artificial Sequence
  Description of Artificial Sequence: Synthetic oligonucleotide
  Antisense strand to SEQ ID NO: 166604
uacuuuacggaagagauga

SEQ ID NO: 166606 - RNA, 19 nt, Artificial Sequence
  Description of Artificial Sequence: Synthetic oligonucleotide
  Sense strand starting at position 621 of SEQ ID NO: 2146
gucugucucccugauagug

SEQ ID NO: 166607 - RNA, 19 nt, Artificial Sequence
  Description of Artificial Sequence: Synthetic oligonucleotide
  Antisense strand to SEQ ID NO: 166606
cacuaucagggagacagac

SEQ ID NO: 166608 - RNA, 19 nt, Artificial Sequence
  Description of Artificial Sequence: Synthetic oligonucleotide
  Sense strand starting at position 635 of SEQ ID NO: 2146
uagugaguuuccuaaggac

SEQ ID NO: 166609 - RNA, 19 nt, Artificial Sequence
  Description of Artificial Sequence: Synthetic oligonucleotide
  Antisense strand to SEQ ID NO: 166608
guccuuaggaaacucacua

SEQ ID NO: 166610 - RNA, 19 nt, Artificial Sequence
  Description of Artificial Sequence: Synthetic oligonucleotide
  Sense strand starting at position 638 of SEQ ID NO: 2146
ugaguuuccuaaggacaag

SEQ ID NO: 166611 - RNA, 19 nt, Artificial Sequence
  Description of Artificial Sequence: Synthetic oligonucleotide
  Antisense strand to SEQ ID NO: 166610
cuuguccuuaggaaacuca

SEQ ID NO: 166612 - RNA, 19 nt, Artificial Sequence
  Description of Artificial Sequence: Synthetic oligonucleotide
  Sense strand starting at position 734 of SEQ ID NO: 2146
gaggaaaucugcccaaggu

SEQ ID NO: 166613 - RNA, 19 nt, Artificial Sequence
  Description of Artificial Sequence: Synthetic oligonucleotide
  Antisense strand to SEQ ID NO: 166612
accuugggcagauuuccuc

SEQ ID NO: 166614 - RNA, 19 nt, Artificial Sequence
  Description of Artificial Sequence: Synthetic oligonucleotide
  Sense strand starting at position 1095 of SEQ ID NO: 2146
guccgugugucugacugua

SEQ ID NO: 166615 - RNA, 19 nt, Artificial Sequence
  Description of Artificial Sequence: Synthetic oligonucleotide
  Antisense strand to SEQ ID NO: 166614
uacagucagacacacggac

SEQ ID NO: 166616 - RNA, 19 nt, Artificial Sequence
  Description of Artificial Sequence: Synthetic oligonucleotide
  Sense strand starting at position 1151 of SEQ ID NO: 2146
guguaagaccgcucagcuu

SEQ ID NO: 166617 - RNA, 19 nt, Artificial Sequence
  Description of Artificial Sequence: Synthetic oligonucleotide
  Antisense strand to SEQ ID NO: 166616
aagcugagcggucuuacac

SEQ ID NO: 166618 - RNA, 19 nt, Artificial Sequence
  Description of Artificial Sequence: Synthetic oligonucleotide
  Sense strand starting at position 1194 of SEQ ID NO: 2146
ggugucgggagcuauguau

SEQ ID NO: 166619 - RNA, 19 nt, Artificial Sequence
  Description of Artificial Sequence: Synthetic oligonucleotide
  Antisense strand to SEQ ID NO: 166618
auacauagcucccgacacc

SEQ ID NO: 166620 - RNA, 19 nt, Artificial Sequence
  Description of Artificial Sequence: Synthetic oligonucleotide
  Sense strand starting at position 1529 of SEQ ID NO: 2146
gcuagcgagaagugucuuu

SEQ ID NO: 166621 - RNA, 19 nt, Artificial Sequence
  Description of Artificial Sequence: Synthetic oligonucleotide
  Antisense strand to SEQ ID NO: 166620
aaagacacuucucgcuagc

SEQ ID NO: 166622 - RNA, 19 nt, Artificial Sequence
  Description of Artificial Sequence: Synthetic oligonucleotide
  Sense strand starting at position 1534 of SEQ ID NO: 2146
cgagaagugucuuuggcug

SEQ ID NO: 166623 - RNA, 19 nt, Artificial Sequence
  Description of Artificial Sequence: Synthetic oligonucleotide
  Antisense strand to SEQ ID NO: 166622
cagccaaagacacuucucg

SEQ ID NO: 166624 - RNA, 19 nt, Artificial Sequence
  Description of Artificial Sequence: Synthetic oligonucleotide
  Sense strand starting at position 2174 of SEQ ID NO: 2146
ccucgucuucccgaaccuu

SEQ ID NO: 166625 - RNA, 19 nt, Artificial Sequence
  Description of Artificial Sequence: Synthetic oligonucleotide
  Antisense strand to SEQ ID NO: 166624
aagguucgggaagacgagg

SEQ ID NO: 166626 - RNA, 19 nt, Artificial Sequence
  Description of Artificial Sequence: Synthetic oligonucleotide
  Sense strand starting at position 2563 of SEQ ID NO: 2146
ggaggaguuuacgccuauc

SEQ ID NO: 166627 - RNA, 19 nt, Artificial Sequence
  Description of Artificial Sequence: Synthetic oligonucleotide
  Antisense strand to SEQ ID NO: 166626
gauaggcguaaacuccucc

SEQ ID NO: 166628 - RNA, 19 nt, Artificial Sequence
  Description of Artificial Sequence: Synthetic oligonucleotide
  Sense strand starting at position 2566 of SEQ ID NO: 2146
ggaguuuacgccuaucaca

SEQ ID NO: 166629 - RNA, 19 nt, Artificial Sequence
  Description of Artificial Sequence: Synthetic oligonucleotide
  Antisense strand to SEQ ID NO: 166628
ugugauaggcguaaacucc

SEQ ID NO: 166630 - RNA, 19 nt, Artificial Sequence
  Description of Artificial Sequence: Synthetic oligonucleotide
  Sense strand starting at position 2577 of SEQ ID NO: 2146
cuaucacauugaguccaua

SEQ ID NO: 166631 - RNA, 19 nt, Artificial Sequence
  Description of Artificial Sequence: Synthetic oligonucleotide
  Antisense strand to SEQ ID NO: 166630
uauggacucaaugugauag

SEQ ID NO: 166632 - RNA, 19 nt, Artificial Sequence
  Description of Artificial Sequence: Synthetic oligonucleotide
  Sense strand starting at position 2717 of SEQ ID NO: 2146
ccacuagugugagggucaa

SEQ ID NO: 166633 - RNA, 19 nt, Artificial Sequence
  Description of Artificial Sequence: Synthetic oligonucleotide
  Antisense strand to SEQ ID NO: 166632
uugacccucacacuagugg

SEQ ID NO: 166634 - RNA, 19 nt, Artificial Sequence
  Description of Artificial Sequence: Synthetic oligonucleotide
  Sense strand starting at position 2800 of SEQ ID NO: 2146
aggcguucuuccuucggau

SEQ ID NO: 166635 - RNA, 19 nt, Artificial Sequence
  Description of Artificial Sequence: Synthetic oligonucleotide
  Antisense strand to SEQ ID NO: 166634
auccgaaggaagaacgccu

SEQ ID NO: 166636 - RNA, 19 nt, Artificial Sequence
  Description of Artificial Sequence: Synthetic oligonucleotide
  Sense strand starting at position 2801 of SEQ ID NO: 2146
ggcguucuuccuucggauu

SEQ ID NO: 166637 - RNA, 19 nt, Artificial Sequence
  Description of Artificial Sequence: Synthetic oligonucleotide
  Antisense strand to SEQ ID NO: 166636
aauccgaaggaagaacgcc

SEQ ID NO: 166638 - RNA, 19 nt, Artificial Sequence
  Description of Artificial Sequence: Synthetic oligonucleotide
  Sense strand starting at position 2848 of SEQ ID NO: 2146
ggaggucuuugacucaauc

SEQ ID NO: 166639 - RNA, 19 nt, Artificial Sequence
  Description of Artificial Sequence: Synthetic oligonucleotide
  Antisense strand to SEQ ID NO: 166638
gauugagucaaagaccucc

SEQ ID NO: 166640 - RNA, 19 nt, Artificial Sequence
  Description of Artificial Sequence: Synthetic oligonucleotide
  Sense strand starting at position 2856 of SEQ ID NO: 2146
uugacucaaucgcagaaga

SEQ ID NO: 166641 - RNA, 19 nt, Artificial Sequence
  Description of Artificial Sequence: Synthetic oligonucleotide
  Antisense strand to SEQ ID NO: 166640
ucuucugcgauugagucaa

SEQ ID NO: 166642 - RNA, 19 nt, Artificial Sequence
  Description of Artificial Sequence: Synthetic oligonucleotide
  Sense strand starting at position 2870 of SEQ ID NO: 2146
gaagaaugcuggcaccaua

SEQ ID NO: 166643 - RNA, 19 nt, Artificial Sequence
  Description of Artificial Sequence: Synthetic oligonucleotide
  Antisense strand to SEQ ID NO: 166642
uauggugccagcauucuuc

SEQ ID NO: 166644 - RNA, 19 nt, Artificial Sequence
  Description of Artificial Sequence: Synthetic oligonucleotide
  Sense strand starting at position 2928 of SEQ ID NO: 2146
ggaagcaugccgugguguu

SEQ ID NO: 166645 - RNA, 19 nt, Artificial Sequence
  Description of Artificial Sequence: Synthetic oligonucleotide
  Antisense strand to SEQ ID NO: 166644
aacaccacggcaugcuucc

SEQ ID NO: 166646 - RNA, 19 nt, Artificial Sequence
  Description of Artificial Sequence: Synthetic oligonucleotide
  Sense strand starting at position 2973 of SEQ ID NO: 2146
gugugacucugcggugauu

SEQ ID NO: 166647 - RNA, 19 nt, Artificial Sequence
  Description of Artificial Sequence: Synthetic oligonucleotide
  Antisense strand to SEQ ID NO: 166646
aaucaccgcagagucacac

SEQ ID NO: 166648 - RNA, 19 nt, Artificial Sequence
  Description of Artificial Sequence: Synthetic oligonucleotide
  Sense strand starting at position 3033 of SEQ ID NO: 2146
gugugaucucagggugaau

SEQ ID NO: 166649 - RNA, 19 nt, Artificial Sequence
  Description of Artificial Sequence: Synthetic oligonucleotide
  Antisense strand to SEQ ID NO: 166648
auucacccugagaucacac

SEQ ID NO: 166650 - RNA, 19 nt, Artificial Sequence
  Description of Artificial Sequence: Synthetic oligonucleotide
  Sense strand starting at position 3035 of SEQ ID NO: 2146
gugaucucagggugaaugu

SEQ ID NO: 166651 - RNA, 19 nt, Artificial Sequence
  Description of Artificial Sequence: Synthetic oligonucleotide
  Antisense strand to SEQ ID NO: 166650
acauucacccugagaucac

SEQ ID NO: 166652 - RNA, 19 nt, Artificial Sequence
  Description of Artificial Sequence: Synthetic oligonucleotide
  Sense strand starting at position 3059 of SEQ ID NO: 2146
gugauugugccauggugga

SEQ ID NO: 166653 - RNA, 19 nt, Artificial Sequence
  Description of Artificial Sequence: Synthetic oligonucleotide
  Antisense strand to SEQ ID NO: 166652
uccaccauggcacaaucac

SEQ ID NO: 166654 - RNA, 19 nt, Artificial Sequence
  Description of Artificial Sequence: Synthetic oligonucleotide
  Sense strand starting at position 3209 of SEQ ID NO: 2146
cugccuguggcuguauauu

SEQ ID NO: 166655 - RNA, 19 nt, Artificial Sequence
  Description of Artificial Sequence: Synthetic oligonucleotide
  Antisense strand to SEQ ID NO: 166654
aauauacagccacaggcag

SEQ ID NO: 166656 - RNA, 19 nt, Artificial Sequence
  Description of Artificial Sequence: Synthetic oligonucleotide
  Sense strand starting at position 3215 of SEQ ID NO: 2146
guggcuguauauuuauauu

SEQ ID NO: 166657 - RNA, 19 nt, Artificial Sequence
  Description of Artificial Sequence: Synthetic oligonucleotide
  Antisense strand to SEQ ID NO: 166656
aauauaaauauacagccac

SEQ ID NO: 166658 - RNA, 19 nt, Artificial Sequence
  Description of Artificial Sequence: Synthetic oligonucleotide
  Sense strand starting at position 3458 of SEQ ID NO: 2146
ggcucuguuugcuguggua

SEQ ID NO: 166659 - RNA, 19 nt, Artificial Sequence
  Description of Artificial Sequence: Synthetic oligonucleotide
  Antisense strand to SEQ ID NO: 166658
uaccacagcaaacagagcc

SEQ ID NO: 166660 - RNA, 19 nt, Artificial Sequence
  Description of Artificial Sequence: Synthetic oligonucleotide
  Sense strand starting at position 3603 of SEQ ID NO: 2146
gcgcuucuuuaggcugaaa

SEQ ID NO: 166661 - RNA, 19 nt, Artificial Sequence
  Description of Artificial Sequence: Synthetic oligonucleotide
  Antisense strand to SEQ ID NO: 166660
uuucagccuaaagaagcgc

SEQ ID NO: 166662 - RNA, 19 nt, Artificial Sequence
  Description of Artificial Sequence: Synthetic oligonucleotide
  Sense strand starting at position 3814 of SEQ ID NO: 2147
augugaaugccacacuaca

SEQ ID NO: 166663 - RNA, 19 nt, Artificial Sequence
  Description of Artificial Sequence: Synthetic oligonucleotide
  Antisense strand to SEQ ID NO: 166662
uguaguguggcauucacau

SEQ ID NO: 166664 - RNA, 19 nt, Artificial Sequence
  Description of Artificial Sequence: Synthetic oligonucleotide
  Sense strand starting at position 3809 of SEQ ID NO: 2147
gauauaugugaaugccaca

SEQ ID NO: 166665 - RNA, 19 nt, Artificial Sequence
  Description of Artificial Sequence: Synthetic oligonucleotide
  Antisense strand to SEQ ID NO: 166664
uguggcauucacauauauc

SEQ ID NO: 166666 - RNA, 19 nt, Artificial Sequence
  Description of Artificial Sequence: Synthetic oligonucleotide
  Sense strand starting at position 3805 of SEQ ID NO: 2147
gugugauauaugugaaugc

SEQ ID NO: 166667 - RNA, 19 nt, Artificial Sequence
  Description of Artificial Sequence: Synthetic oligonucleotide
  Antisense strand to SEQ ID NO: 166666
gcauucacauauaucacac

SEQ ID NO: 166668 - RNA, 19 nt, Artificial Sequence
  Description of Artificial Sequence: Synthetic oligonucleotide
  Sense strand starting at position 3732 of SEQ ID NO: 2147
guuccuguucuauggaaua

SEQ ID NO: 166669 - RNA, 19 nt, Artificial Sequence
  Description of Artificial Sequence: Synthetic oligonucleotide
  Antisense strand to SEQ ID NO: 166668
uauuccauagaacaggaac

SEQ ID NO: 166670 - RNA, 19 nt, Artificial Sequence
  Description of Artificial Sequence: Synthetic oligonucleotide
  Sense strand starting at position 3629 of SEQ ID NO: 2147
gaaggaaacuucuccagug

SEQ ID NO: 166671 - RNA, 19 nt, Artificial Sequence
  Description of Artificial Sequence: Synthetic oligonucleotide
  Antisense strand to SEQ ID NO: 166670
cacuggagaaguuuccuuc

SEQ ID NO: 166672 - RNA, 19 nt, Artificial Sequence
  Description of Artificial Sequence: Synthetic oligonucleotide
  Sense strand starting at position 3558 of SEQ ID NO: 2147
uucccagagccuugggauu

SEQ ID NO: 166673 - RNA, 19 nt, Artificial Sequence
  Description of Artificial Sequence: Synthetic oligonucleotide
  Antisense strand to SEQ ID NO: 166672
aaucccaaggcucugggaa

SEQ ID NO: 166674 - RNA, 19 nt, Artificial Sequence
  Description of Artificial Sequence: Synthetic oligonucleotide
  Sense strand starting at position 3516 of SEQ ID NO: 2147
ggcuauuaucuauacaagu

SEQ ID NO: 166675 - RNA, 19 nt, Artificial Sequence
  Description of Artificial Sequence: Synthetic oligonucleotide
  Antisense strand to SEQ ID NO: 166674
acuuguauagauaauagcc

SEQ ID NO: 166676 - RNA, 19 nt, Artificial Sequence
  Description of Artificial Sequence: Synthetic oligonucleotide
  Sense strand starting at position 3394 of SEQ ID NO: 2147
gacaaauuccugugcacug

SEQ ID NO: 166677 - RNA, 19 nt, Artificial Sequence
  Description of Artificial Sequence: Synthetic oligonucleotide
  Antisense strand to SEQ ID NO: 166676
cagugcacaggaauuuguc

SEQ ID NO: 166678 - RNA, 19 nt, Artificial Sequence
  Description of Artificial Sequence: Synthetic oligonucleotide
  Sense strand starting at position 3342 of SEQ ID NO: 2147
gguuuacgagagcauaaau

SEQ ID NO: 166679 - RNA, 19 nt, Artificial Sequence
  Description of Artificial Sequence: Synthetic oligonucleotide
  Antisense strand to SEQ ID NO: 166678
auuuaugcucucguaaacc

SEQ ID NO: 166680 - RNA, 19 nt, Artificial Sequence
  Description of Artificial Sequence: Synthetic oligonucleotide
  Sense strand starting at position 3339 of SEQ ID NO: 2147
cuugguuuacgagagcaua

SEQ ID NO: 166681 - RNA, 19 nt, Artificial Sequence
  Description of Artificial Sequence: Synthetic oligonucleotide
  Antisense strand to SEQ ID NO: 166680
uaugcucucguaaaccaag

SEQ ID NO: 166682 - RNA, 19 nt, Artificial Sequence
  Description of Artificial Sequence: Synthetic oligonucleotide
  Sense strand starting at position 3334 of SEQ ID NO: 2147
ccacacuugguuuacgaga

SEQ ID NO: 166683 - RNA, 19 nt, Artificial Sequence
  Description of Artificial Sequence: Synthetic oligonucleotide
  Antisense strand to SEQ ID NO: 166682
ucucguaaaccaagugugg

SEQ ID NO: 166684 - RNA, 19 nt, Artificial Sequence
  Description of Artificial Sequence: Synthetic oligonucleotide
  Sense strand starting at position 3318 of SEQ ID NO: 2147
agcaguugagaauauucca

SEQ ID NO: 166685 - RNA, 19 nt, Artificial Sequence
  Description of Artificial Sequence: Synthetic oligonucleotide
  Antisense strand to SEQ ID NO: 166684
uggaauauucucaacugcu

SEQ ID NO: 166686 - RNA, 19 nt, Artificial Sequence
  Description of Artificial Sequence: Synthetic oligonucleotide
  Sense strand starting at position 3313 of SEQ ID NO: 2147
gggugagcaguugagaaua

SEQ ID NO: 166687 - RNA, 19 nt, Artificial Sequence
  Description of Artificial Sequence: Synthetic oligonucleotide
  Antisense strand to SEQ ID NO: 166686
uauucucaacugcucaccc

SEQ ID NO: 166688 - RNA, 19 nt, Artificial Sequence
  Description of Artificial Sequence: Synthetic oligonucleotide
  Sense strand starting at position 3276 of SEQ ID NO: 2147
guaacuuggucucuaacuu

SEQ ID NO: 166689 - RNA, 19 nt, Artificial Sequence
  Description of Artificial Sequence: Synthetic oligonucleotide
  Antisense strand to SEQ ID NO: 166688
aaguuagagaccaaguuac

SEQ ID NO: 166690 - RNA, 19 nt, Artificial Sequence
  Description of Artificial Sequence: Synthetic oligonucleotide
  Sense strand starting at position 3273 of SEQ ID NO: 2147
acuguaacuuggucucuaa

SEQ ID NO: 166691 - RNA, 19 nt, Artificial Sequence
  Description of Artificial Sequence: Synthetic oligonucleotide
  Antisense strand to SEQ ID NO: 166690
uuagagaccaaguuacagu

SEQ ID NO: 166692 - RNA, 19 nt, Artificial Sequence
  Description of Artificial Sequence: Synthetic oligonucleotide
  Sense strand starting at position 3249 of SEQ ID NO: 2147
gguugaagucguugcauuu

SEQ ID NO: 166693 - RNA, 19 nt, Artificial Sequence
  Description of Artificial Sequence: Synthetic oligonucleotide
  Antisense strand to SEQ ID NO: 166692
aaaugcaacgacuucaacc

SEQ ID NO: 166694 - RNA, 19 nt, Artificial Sequence
  Description of Artificial Sequence: Synthetic oligonucleotide
  Sense strand starting at position 2767 of SEQ ID NO: 2147
ccauuuaaaugagagugaa

SEQ ID NO: 166695 - RNA, 19 nt, Artificial Sequence
  Description of Artificial Sequence: Synthetic oligonucleotide
  Antisense strand to SEQ ID NO: 166694
uucacucucauuuaaaugg

SEQ ID NO: 166696 - RNA, 19 nt, Artificial Sequence
  Description of Artificial Sequence: Synthetic oligonucleotide
  Sense strand starting at position 2272 of SEQ ID NO: 2147
gguucuaagccucacgauu

SEQ ID NO: 166697 - RNA, 19 nt, Artificial Sequence
  Description of Artificial Sequence: Synthetic oligonucleotide
  Antisense strand to SEQ ID NO: 166696
aaucgugaggcuuagaacc

SEQ ID NO: 166698 - RNA, 19 nt, Artificial Sequence
  Description of Artificial Sequence: Synthetic oligonucleotide
  Sense strand starting at position 2252 of SEQ ID NO: 2147
cgaucagggcugugaaaca

SEQ ID NO: 166699 - RNA, 19 nt, Artificial Sequence
  Description of Artificial Sequence: Synthetic oligonucleotide
  Antisense strand to SEQ ID NO: 166698
uguuucacagcccugaucg

SEQ ID NO: 166700 - RNA, 19 nt, Artificial Sequence
  Description of Artificial Sequence: Synthetic oligonucleotide
  Sense strand starting at position 2250 of SEQ ID NO: 2147
cacgaucagggcugugaaa

SEQ ID NO: 166701 - RNA, 19 nt, Artificial Sequence
  Description of Artificial Sequence: Synthetic oligonucleotide
  Antisense strand to SEQ ID NO: 166700
uuucacagcccugaucgug

SEQ ID NO: 166702 - RNA, 19 nt, Artificial Sequence
  Description of Artificial Sequence: Synthetic oligonucleotide
  Sense strand starting at position 2147 of SEQ ID NO: 2147
ucagguuuauccuucccua

SEQ ID NO: 166703 - RNA, 19 nt, Artificial Sequence
  Description of Artificial Sequence: Synthetic oligonucleotide
  Antisense strand to SEQ ID NO: 166702
uagggaaggauaaaccuga

SEQ ID NO: 166704 - RNA, 19 nt, Artificial Sequence
  Description of Artificial Sequence: Synthetic oligonucleotide
  Sense strand starting at position 1041 of SEQ ID NO: 2147
gaguucuggaaagguuaca

SEQ ID NO: 166705 - RNA, 19 nt, Artificial Sequence
  Description of Artificial Sequence: Synthetic oligonucleotide
  Antisense strand to SEQ ID NO: 166704
uguaaccuuuccagaacuc

SEQ ID NO: 166706 - RNA, 19 nt, Artificial Sequence
  Description of Artificial Sequence: Synthetic oligonucleotide
  Sense strand starting at position 1024 of SEQ ID NO: 2147
ugguaugugcaggaucaga

SEQ ID NO: 166707 - RNA, 19 nt, Artificial Sequence
  Description of Artificial Sequence: Synthetic oligonucleotide
  Antisense strand to SEQ ID NO: 166706
ucugauccugcacauacca

SEQ ID NO: 166708 - RNA, 19 nt, Artificial Sequence
  Description of Artificial Sequence: Synthetic oligonucleotide
  Sense strand starting at position 957 of SEQ ID NO: 2147
gcuucccucuuggugaaga

SEQ ID NO: 166709 - RNA, 19 nt, Artificial Sequence
  Description of Artificial Sequence: Synthetic oligonucleotide
  Antisense strand to SEQ ID NO: 166708
ucuucaccaagagggaagc

SEQ ID NO: 166710 - RNA, 19 nt, Artificial Sequence
  Description of Artificial Sequence: Synthetic oligonucleotide
  Sense strand starting at position 868 of SEQ ID NO: 2147
ccaguacuugcaggaucau

SEQ ID NO: 166711 - RNA, 19 nt, Artificial Sequence
  Description of Artificial Sequence: Synthetic oligonucleotide
  Antisense strand to SEQ ID NO: 166710
augauccugcaaguacugg

SEQ ID NO: 166712 - RNA, 19 nt, Artificial Sequence
  Description of Artificial Sequence: Synthetic oligonucleotide
  Sense strand starting at position 812 of SEQ ID NO: 2147
ggauuacuccagugaccuc

SEQ ID NO: 166713 - RNA, 19 nt, Artificial Sequence
  Description of Artificial Sequence: Synthetic oligonucleotide
  Antisense strand to SEQ ID NO: 166712
gaggucacuggaguaaucc

SEQ ID NO: 166714 - RNA, 19 nt, Artificial Sequence
  Description of Artificial Sequence: Synthetic oligonucleotide
  Sense strand starting at position 809 of SEQ ID NO: 2147
cucggauuacuccagugac

SEQ ID NO: 166715 - RNA, 19 nt, Artificial Sequence
  Description of Artificial Sequence: Synthetic oligonucleotide
  Antisense strand to SEQ ID NO: 166714
gucacuggaguaauccgag

SEQ ID NO: 166716 - RNA, 19 nt, Artificial Sequence
  Description of Artificial Sequence: Synthetic oligonucleotide
  Sense strand starting at position 666 of SEQ ID NO: 2147
uucucagaucaguguucca

SEQ ID NO: 166717 - RNA, 19 nt, Artificial Sequence
  Description of Artificial Sequence: Synthetic oligonucleotide
  Antisense strand to SEQ ID NO: 166716
uggaacacugaucugagaa

SEQ ID NO: 166718 - RNA, 19 nt, Artificial Sequence
  Description of Artificial Sequence: Synthetic oligonucleotide
  Sense strand starting at position 603 of SEQ ID NO: 2147
ugaauugcccaaggugaca

SEQ ID NO: 166719 - RNA, 19 nt, Artificial Sequence
  Description of Artificial Sequence: Synthetic oligonucleotide
  Antisense strand to SEQ ID NO: 166718
ugucaccuugggcaauuca

SEQ ID NO: 166720 - RNA, 19 nt, Artificial Sequence
  Description of Artificial Sequence: Synthetic oligonucleotide
  Sense strand starting at position 570 of SEQ ID NO: 2147
cuaacuaguguuggaaauu

SEQ ID NO: 166721 - RNA, 19 nt, Artificial Sequence
  Description of Artificial Sequence: Synthetic oligonucleotide
  Antisense strand to SEQ ID NO: 166720
aauuuccaacacuaguuag

SEQ ID NO: 166722 - RNA, 19 nt, Artificial Sequence
  Description of Artificial Sequence: Synthetic oligonucleotide
  Sense strand starting at position 403 of SEQ ID NO: 2147
ggccuagugaagcaagaua

SEQ ID NO: 166723 - RNA, 19 nt, Artificial Sequence
  Description of Artificial Sequence: Synthetic oligonucleotide
  Antisense strand to SEQ ID NO: 166722
uaucuugcuucacuaggcc

SEQ ID NO: 166724 - RNA, 19 nt, Artificial Sequence
  Description of Artificial Sequence: Synthetic oligonucleotide
  Sense strand starting at position 344 of SEQ ID NO: 2147
ugagaaauugacugcaccu

SEQ ID NO: 166725 - RNA, 19 nt, Artificial Sequence
  Description of Artificial Sequence: Synthetic oligonucleotide
  Antisense strand to SEQ ID NO: 166724
aggugcagucaauuucuca

SEQ ID NO: 166726 - RNA, 19 nt, Artificial Sequence
  Description of Artificial Sequence: Synthetic oligonucleotide
  Sense strand starting at position 328 of SEQ ID NO: 2147
acaagucuuuaugauuuga

SEQ ID NO: 166727 - RNA, 19 nt, Artificial Sequence
  Description of Artificial Sequence: Synthetic oligonucleotide
  Antisense strand to SEQ ID NO: 166726
ucaaaucauaaagacuugu

SEQ ID NO: 166728 - RNA, 19 nt, Artificial Sequence
  Description of Artificial Sequence: Synthetic oligonucleotide
  Sense strand starting at position 301 of SEQ ID NO: 2147
ucugcaauagugcacuaaa

SEQ ID NO: 166729 - RNA, 19 nt, Artificial Sequence
  Description of Artificial Sequence: Synthetic oligonucleotide
  Antisense strand to SEQ ID NO: 166728
uuuagugcacuauugcaga

SEQ ID NO: 166730 - RNA, 19 nt, Artificial Sequence
  Description of Artificial Sequence: Synthetic oligonucleotide
  Sense strand starting at position 272 of SEQ ID NO: 2147
guauguggauugucuaauu

SEQ ID NO: 166731 - RNA, 19 nt, Artificial Sequence
  Description of Artificial Sequence: Synthetic oligonucleotide
  Antisense strand to SEQ ID NO: 166730
aauuagacaauccacauac

SEQ ID NO: 166732 - RNA, 19 nt, Artificial Sequence
  Description of Artificial Sequence: Synthetic oligonucleotide
  Sense strand starting at position 270 of SEQ ID NO: 2147
ugguauguggauugucuaa

SEQ ID NO: 166733 - RNA, 19 nt, Artificial Sequence
  Description of Artificial Sequence: Synthetic oligonucleotide
  Antisense strand to SEQ ID NO: 166732
uuagacaauccacauacca

SEQ ID NO: 166734 - RNA, 19 nt, Artificial Sequence
  Description of Artificial Sequence: Synthetic oligonucleotide
  Sense strand starting at position 237 of SEQ ID NO: 2147
agagcacauuaauuaaguu

SEQ ID NO: 166735 - RNA, 19 nt, Artificial Sequence
  Description of Artificial Sequence: Synthetic oligonucleotide
  Antisense strand to SEQ ID NO: 166734
aacuuaauuaaugugcucu

SEQ ID NO: 166736 - RNA, 19 nt, Artificial Sequence
  Description of Artificial Sequence: Synthetic oligonucleotide
  Sense strand starting at position 220 of SEQ ID NO: 2147
agcugaauucuguacugag

SEQ ID NO: 166737 - RNA, 19 nt, Artificial Sequence
  Description of Artificial Sequence: Synthetic oligonucleotide
  Antisense strand to SEQ ID NO: 166736
cucaguacagaauucagcu

SEQ ID NO: 166738 - RNA, 19 nt, Artificial Sequence
  Description of Artificial Sequence: Synthetic oligonucleotide
  Sense strand starting at position 164 of SEQ ID NO: 2147
ucuccaaagcccuguagaa

SEQ ID NO: 166739 - RNA, 19 nt, Artificial Sequence
  Description of Artificial Sequence: Synthetic oligonucleotide
  Antisense strand to SEQ ID NO: 166738
uucuacagggcuuuggaga

SEQ ID NO: 166740 - RNA, 19 nt, Artificial Sequence
  Description of Artificial Sequence: Synthetic oligonucleotide
  Sense strand starting at position 97 of SEQ ID NO: 2147
gguuccagauuugauuauu

SEQ ID NO: 166741 - RNA, 19 nt, Artificial Sequence
  Description of Artificial Sequence: Synthetic oligonucleotide
  Antisense strand to SEQ ID NO: 166740
aauaaucaaaucuggaacc

SEQ ID NO: 166742 - RNA, 19 nt, Artificial Sequence
  Description of Artificial Sequence: Synthetic oligonucleotide
  Sense strand starting at position 3413 of SEQ ID NO: 2148
gucuguguaccguugugaa

SEQ ID NO: 166743 - RNA, 19 nt, Artificial Sequence
  Description of Artificial Sequence: Synthetic oligonucleotide
  Antisense strand to SEQ ID NO: 166742
uucacaacgguacacagac

SEQ ID NO: 166744 - RNA, 19 nt, Artificial Sequence
  Description of Artificial Sequence: Synthetic oligonucleotide
  Sense strand starting at position 3394 of SEQ ID NO: 2148
cugauucuccuugauagcu

SEQ ID NO: 166745 - RNA, 19 nt, Artificial Sequence
  Description of Artificial Sequence: Synthetic oligonucleotide
  Antisense strand to SEQ ID NO: 166744
agcuaucaaggagaaucag

SEQ ID NO: 166746 - RNA, 19 nt, Artificial Sequence
  Description of Artificial Sequence: Synthetic oligonucleotide
  Sense strand starting at position 3392 of SEQ ID NO: 2148
accugauucuccuugauag

SEQ ID NO: 166747 - RNA, 19 nt, Artificial Sequence
  Description of Artificial Sequence: Synthetic oligonucleotide
  Antisense strand to SEQ ID NO: 166746
cuaucaaggagaaucaggu

SEQ ID NO: 166748 - RNA, 19 nt, Artificial Sequence
  Description of Artificial Sequence: Synthetic oligonucleotide
  Sense strand starting at position 3363 of SEQ ID NO: 2148
cauuauuagcuagaguuag

SEQ ID NO: 166749 - RNA, 19 nt, Artificial Sequence
  Description of Artificial Sequence: Synthetic oligonucleotide
  Antisense strand to SEQ ID NO: 166748
cuaacucuagcuaauaaug

SEQ ID NO: 166750 - RNA, 19 nt, Artificial Sequence
  Description of Artificial Sequence: Synthetic oligonucleotide
  Sense strand starting at position 3303 of SEQ ID NO: 2148
cguauugaauuauugaaca

SEQ ID NO: 166751 - RNA, 19 nt, Artificial Sequence
  Description of Artificial Sequence: Synthetic oligonucleotide
  Antisense strand to SEQ ID NO: 166750
uguucaauaauucaauacg

SEQ ID NO: 166752 - RNA, 19 nt, Artificial Sequence
  Description of Artificial Sequence: Synthetic oligonucleotide
  Sense strand starting at position 3219 of SEQ ID NO: 2148
guggauuccagacauuguu

SEQ ID NO: 166753 - RNA, 19 nt, Artificial Sequence
  Description of Artificial Sequence: Synthetic oligonucleotide
  Antisense strand to SEQ ID NO: 166752
aacaaugucuggaauccac

SEQ ID NO: 166754 - RNA, 19 nt, Artificial Sequence
  Description of Artificial Sequence: Synthetic oligonucleotide
  Sense strand starting at position 3126 of SEQ ID NO: 2148
aaauuuguguuggugguuu

SEQ ID NO: 166755 - RNA, 19 nt, Artificial Sequence
  Description of Artificial Sequence: Synthetic oligonucleotide
  Antisense strand to SEQ ID NO: 166754
aaaccaccaacacaaauuu

SEQ ID NO: 166756 - RNA, 19 nt, Artificial Sequence
  Description of Artificial Sequence: Synthetic oligonucleotide
  Sense strand starting at position 3125 of SEQ ID NO: 2148
uaaauuuguguuggugguu

SEQ ID NO: 166757 - RNA, 19 nt, Artificial Sequence
  Description of Artificial Sequence: Synthetic oligonucleotide
  Antisense strand to SEQ ID NO: 166756
aaccaccaacacaaauuua

SEQ ID NO: 166758 - RNA, 19 nt, Artificial Sequence
  Description of Artificial Sequence: Synthetic oligonucleotide
  Sense strand starting at position 3122 of SEQ ID NO: 2148
guauaaauuuguguuggug

SEQ ID NO: 166759 - RNA, 19 nt, Artificial Sequence
  Description of Artificial Sequence: Synthetic oligonucleotide
  Antisense strand to SEQ ID NO: 166758
caccaacacaaauuuauac

SEQ ID NO: 166760 - RNA, 19 nt, Artificial Sequence
  Description of Artificial Sequence: Synthetic oligonucleotide
  Sense strand starting at position 3087 of SEQ ID NO: 2148
guuggauucuguuuacaga

SEQ ID NO: 166761 - RNA, 19 nt, Artificial Sequence
  Description of Artificial Sequence: Synthetic oligonucleotide
  Antisense strand to SEQ ID NO: 166760
ucuguaaacagaauccaac

SEQ ID NO: 166762 - RNA, 19 nt, Artificial Sequence
  Description of Artificial Sequence: Synthetic oligonucleotide
  Sense strand starting at position 2997 of SEQ ID NO: 2148
uugggagaguuggugugau

SEQ ID NO: 166763 - RNA, 19 nt, Artificial Sequence
  Description of Artificial Sequence: Synthetic oligonucleotide
  Antisense strand to SEQ ID NO: 166762
aucacaccaacucucccaa

SEQ ID NO: 166764 - RNA, 19 nt, Artificial Sequence
  Description of Artificial Sequence: Synthetic oligonucleotide
  Sense strand starting at position 2980 of SEQ ID NO: 2148
ggagucuuccuugguauuu

SEQ ID NO: 166765 - RNA, 19 nt, Artificial Sequence
  Description of Artificial Sequence: Synthetic oligonucleotide
  Antisense strand to SEQ ID NO: 166764
aaauaccaaggaagacucc

SEQ ID NO: 166766 - RNA, 19 nt, Artificial Sequence
  Description of Artificial Sequence: Synthetic oligonucleotide
  Sense strand starting at position 2933 of SEQ ID NO: 2148
uguauucuguaggucaaag

SEQ ID NO: 166767 - RNA, 19 nt, Artificial Sequence
  Description of Artificial Sequence: Synthetic oligonucleotide
  Antisense strand to SEQ ID NO: 166766
cuuugaccuacagaauaca

SEQ ID NO: 166768 - RNA, 19 nt, Artificial Sequence
  Description of Artificial Sequence: Synthetic oligonucleotide
  Sense strand starting at position 2923 of SEQ ID NO: 2148
gaaagaucuguguauucug

SEQ ID NO: 166769 - RNA, 19 nt, Artificial Sequence
  Description of Artificial Sequence: Synthetic oligonucleotide
  Antisense strand to SEQ ID NO: 166768
cagaauacacagaucuuuc

SEQ ID NO: 166770 - RNA, 19 nt, Artificial Sequence
  Description of Artificial Sequence: Synthetic oligonucleotide
  Sense strand starting at position 2920 of SEQ ID NO: 2148
accgaaagaucuguguauu

SEQ ID NO: 166771 - RNA, 19 nt, Artificial Sequence
  Description of Artificial Sequence: Synthetic oligonucleotide
  Antisense strand to SEQ ID NO: 166770
aauacacagaucuuucggu

SEQ ID NO: 166772 - RNA, 19 nt, Artificial Sequence
  Description of Artificial Sequence: Synthetic oligonucleotide
  Sense strand starting at position 2895 of SEQ ID NO: 2148
uaggguuucguaugagaga

SEQ ID NO: 166773 - RNA, 19 nt, Artificial Sequence
  Description of Artificial Sequence: Synthetic oligonucleotide
  Antisense strand to SEQ ID NO: 166772
ucucucauacgaaacccua

SEQ ID NO: 166774 - RNA, 19 nt, Artificial Sequence
  Description of Artificial Sequence: Synthetic oligonucleotide
  Sense strand starting at position 2851 of SEQ ID NO: 2148
caaaguuaaucaguguuga

SEQ ID NO: 166775 - RNA, 19 nt, Artificial Sequence
  Description of Artificial Sequence: Synthetic oligonucleotide
  Antisense strand to SEQ ID NO: 166774
ucaacacugauuaacuuug

SEQ ID NO: 166776 - RNA, 19 nt, Artificial Sequence
  Description of Artificial Sequence: Synthetic oligonucleotide
  Sense strand starting at position 2792 of SEQ ID NO: 2148
gauauugugguaugcaaag

SEQ ID NO: 166777 - RNA, 19 nt, Artificial Sequence
  Description of Artificial Sequence: Synthetic oligonucleotide
  Antisense strand to SEQ ID NO: 166776
cuuugcauaccacaauauc

SEQ ID NO: 166778 - RNA, 19 nt, Artificial Sequence
  Description of Artificial Sequence: Synthetic oligonucleotide
  Sense strand starting at position 2383 of SEQ ID NO: 2148
gauggaaacugucuuaaac

SEQ ID NO: 166779 - RNA, 19 nt, Artificial Sequence
  Description of Artificial Sequence: Synthetic oligonucleotide
  Antisense strand to SEQ ID NO: 166778
guuuaagacaguuuccauc

SEQ ID NO: 166780 - RNA, 19 nt, Artificial Sequence
  Description of Artificial Sequence: Synthetic oligonucleotide
  Sense strand starting at position 2334 of SEQ ID NO: 2148
cgcuaaagguuauuacaga

SEQ ID NO: 166781 - RNA, 19 nt, Artificial Sequence
  Description of Artificial Sequence: Synthetic oligonucleotide
  Antisense strand to SEQ ID NO: 166780
ucuguaauaaccuuuagcg

SEQ ID NO: 166782 - RNA, 19 nt, Artificial Sequence
  Description of Artificial Sequence: Synthetic oligonucleotide
  Sense strand starting at position 2332 of SEQ ID NO: 2148
accgcuaaagguuauuaca

SEQ ID NO: 166783 - RNA, 19 nt, Artificial Sequence
  Description of Artificial Sequence: Synthetic oligonucleotide
  Antisense strand to SEQ ID NO: 166782
uguaauaaccuuuagcggu

SEQ ID NO: 166784 - RNA, 19 nt, Artificial Sequence
  Description of Artificial Sequence: Synthetic oligonucleotide
  Sense strand starting at position 2325 of SEQ ID NO: 2148
uucugagaccgcuaaaggu

SEQ ID NO: 166785 - RNA, 19 nt, Artificial Sequence
  Description of Artificial Sequence: Synthetic oligonucleotide
  Antisense strand to SEQ ID NO: 166784
accuuuagcggucucagaa

SEQ ID NO: 166786 - RNA, 19 nt, Artificial Sequence
  Description of Artificial Sequence: Synthetic oligonucleotide
  Sense strand starting at position 2280 of SEQ ID NO: 2148
uucuguacugccuggauuu

SEQ ID NO: 166787 - RNA, 19 nt, Artificial Sequence
  Description of Artificial Sequence: Synthetic oligonucleotide
  Antisense strand to SEQ ID NO: 166786
aaauccaggcaguacagaa

SEQ ID NO: 166788 - RNA, 19 nt, Artificial Sequence
  Description of Artificial Sequence: Synthetic oligonucleotide
  Sense strand starting at position 2220 of SEQ ID NO: 2148
gcuuuaauacagcagcaaa

SEQ ID NO: 166789 - RNA, 19 nt, Artificial Sequence
  Description of Artificial Sequence: Synthetic oligonucleotide
  Antisense strand to SEQ ID NO: 166788
uuugcugcuguauuaaagc

SEQ ID NO: 166790 - RNA, 19 nt, Artificial Sequence
  Description of Artificial Sequence: Synthetic oligonucleotide
  Sense strand starting at position 2168 of SEQ ID NO: 2148
uaagaagcauagguagauu

SEQ ID NO: 166791 - RNA, 19 nt, Artificial Sequence
  Description of Artificial Sequence: Synthetic oligonucleotide
  Antisense strand to SEQ ID NO: 166790
aaucuaccuaugcuucuua

SEQ ID NO: 166792 - RNA, 19 nt, Artificial Sequence
  Description of Artificial Sequence: Synthetic oligonucleotide
  Sense strand starting at position 2167 of SEQ ID NO: 2148
guaagaagcauagguagau

SEQ ID NO: 166793 - RNA, 19 nt, Artificial Sequence
  Description of Artificial Sequence: Synthetic oligonucleotide
  Antisense strand to SEQ ID NO: 166792
aucuaccuaugcuucuuac

SEQ ID NO: 166794 - RNA, 19 nt, Artificial Sequence
  Description of Artificial Sequence: Synthetic oligonucleotide
  Sense strand starting at position 1659 of SEQ ID NO: 2148
ucccgagucuacuuaccaa

SEQ ID NO: 166795 - RNA, 19 nt, Artificial Sequence
  Description of Artificial Sequence: Synthetic oligonucleotide
  Antisense strand to SEQ ID NO: 166794
uugguaaguagacucggga

SEQ ID NO: 166796 - RNA, 19 nt, Artificial Sequence
  Description of Artificial Sequence: Synthetic oligonucleotide
  Sense strand starting at position 1377 of SEQ ID NO: 2148
gcacgcuugcuguuucuca

SEQ ID NO: 166797 - RNA, 19 nt, Artificial Sequence
  Description of Artificial Sequence: Synthetic oligonucleotide
  Antisense strand to SEQ ID NO: 166796
ugagaaacagcaagcgugc

SEQ ID NO: 166798 - RNA, 19 nt, Artificial Sequence
  Description of Artificial Sequence: Synthetic oligonucleotide
  Sense strand starting at position 786 of SEQ ID NO: 2148
ucugaaaugacguaaugcu

SEQ ID NO: 166799 - RNA, 19 nt, Artificial Sequence
  Description of Artificial Sequence: Synthetic oligonucleotide
  Antisense strand to SEQ ID NO: 166798
agcauuacgucauuucaga

SEQ ID NO: 166800 - RNA, 19 nt, Artificial Sequence
  Description of Artificial Sequence: Synthetic oligonucleotide
  Sense strand starting at position 511 of SEQ ID NO: 2148
auaagaagguucuuuggca

SEQ ID NO: 166801 - RNA, 19 nt, Artificial Sequence
  Description of Artificial Sequence: Synthetic oligonucleotide
  Antisense strand to SEQ ID NO: 166800
ugccaaagaaccuucuuau

SEQ ID NO: 166802 - RNA, 19 nt, Artificial Sequence
  Description of Artificial Sequence: Synthetic oligonucleotide
  Sense strand starting at position 417 of SEQ ID NO: 2148
gccauuuccuagcuggauu

SEQ ID NO: 166803 - RNA, 19 nt, Artificial Sequence
  Description of Artificial Sequence: Synthetic oligonucleotide
  Antisense strand to SEQ ID NO: 166802
aauccagcuaggaaauggc

SEQ ID NO: 166804 - RNA, 19 nt, Artificial Sequence
  Description of Artificial Sequence: Synthetic oligonucleotide
  Sense strand starting at position 304 of SEQ ID NO: 2148
gaagaucaguuaucugaac

SEQ ID NO: 166805 - RNA, 19 nt, Artificial Sequence
  Description of Artificial Sequence: Synthetic oligonucleotide
  Antisense strand to SEQ ID NO: 166804
guucagauaacugaucuuc

SEQ ID NO: 166806 - RNA, 19 nt, Artificial Sequence
  Description of Artificial Sequence: Synthetic oligonucleotide
  Sense strand starting at position 300 of SEQ ID NO: 2148
gugugaagaucaguuaucu

SEQ ID NO: 166807 - RNA, 19 nt, Artificial Sequence
  Description of Artificial Sequence: Synthetic oligonucleotide
  Antisense strand to SEQ ID NO: 166806
agauaacugaucuucacac

SEQ ID NO: 166808 - RNA, 19 nt, Artificial Sequence
  Description of Artificial Sequence: Synthetic oligonucleotide
  Sense strand starting at position 298 of SEQ ID NO: 2148
gagugugaagaucaguuau

SEQ ID NO: 166809 - RNA, 19 nt, Artificial Sequence
  Description of Artificial Sequence: Synthetic oligonucleotide
  Antisense strand to SEQ ID NO: 166808
auaacugaucuucacacuc

SEQ ID NO: 166810 - RNA, 19 nt, Artificial Sequence
  Description of Artificial Sequence: Synthetic oligonucleotide
  Sense strand starting at position 291 of SEQ ID NO: 2148
aguuaaugagugugaagau

SEQ ID NO: 166811 - RNA, 19 nt, Artificial Sequence
  Description of Artificial Sequence: Synthetic oligonucleotide
  Antisense strand to SEQ ID NO: 166810
aucuucacacucauuaacu

SEQ ID NO: 166812 - RNA, 19 nt, Artificial Sequence
  Description of Artificial Sequence: Synthetic oligonucleotide
  Sense strand starting at position 289 of SEQ ID NO: 2148
guaguuaaugagugugaag

SEQ ID NO: 166813 - RNA, 19 nt, Artificial Sequence
  Description of Artificial Sequence: Synthetic oligonucleotide
  Antisense strand to SEQ ID NO: 166812
cuucacacucauuaacuac

SEQ ID NO: 166814 - RNA, 19 nt, Artificial Sequence
  Description of Artificial Sequence: Synthetic oligonucleotide
  Sense strand starting at position 288 of SEQ ID NO: 2148
aguaguuaaugagugugaa

SEQ ID NO: 166815 - RNA, 19 nt, Artificial Sequence
  Description of Artificial Sequence: Synthetic oligonucleotide
  Antisense strand to SEQ ID NO: 166814
uucacacucauuaacuacu

SEQ ID NO: 166816 - RNA, 19 nt, Artificial Sequence
  Description of Artificial Sequence: Synthetic oligonucleotide
  Sense strand starting at position 264 of SEQ ID NO: 2148
agccuuguggaauaaguga

SEQ ID NO: 166817 - RNA, 19 nt, Artificial Sequence
  Description of Artificial Sequence: Synthetic oligonucleotide
  Antisense strand to SEQ ID NO: 166816
ucacuuauuccacaaggcu

SEQ ID NO: 166818 - RNA, 19 nt, Artificial Sequence
  Description of Artificial Sequence: Synthetic oligonucleotide
  Sense strand starting at position 164 of SEQ ID NO: 2148
ugcucaugugaucaugaaa

SEQ ID NO: 166819 - RNA, 19 nt, Artificial Sequence
  Description of Artificial Sequence: Synthetic oligonucleotide
  Antisense strand to SEQ ID NO: 166818
uuucaugaucacaugagca

SEQ ID NO: 166820 - RNA, 19 nt, Artificial Sequence
  Description of Artificial Sequence: Synthetic oligonucleotide
  Sense strand starting at position 163 of SEQ ID NO: 2148
uugcucaugugaucaugaa

SEQ ID NO: 166821 - RNA, 19 nt, Artificial Sequence
  Description of Artificial Sequence: Synthetic oligonucleotide
  Antisense strand to SEQ ID NO: 166820
uucaugaucacaugagcaa

SEQ ID NO: 166822 - RNA, 19 nt, Artificial Sequence
  Description of Artificial Sequence: Synthetic oligonucleotide
  Sense strand starting at position 3626 of SEQ ID NO: 2149
agauuaacaucgcuacuau

SEQ ID NO: 166823 - RNA, 19 nt, Artificial Sequence
  Description of Artificial Sequence: Synthetic oligonucleotide
  Antisense strand to SEQ ID NO: 166822
auaguagcgauguuaaucu

SEQ ID NO: 166824 - RNA, 19 nt, Artificial Sequence
  Description of Artificial Sequence: Synthetic oligonucleotide
  Sense strand starting at position 3605 of SEQ ID NO: 2149
uuaugugaguuuccauaac

SEQ ID NO: 166825 - RNA, 19 nt, Artificial Sequence
  Description of Artificial Sequence: Synthetic oligonucleotide
  Antisense strand to SEQ ID NO: 166824
guuauggaaacucacauaa

SEQ ID NO: 166826 - RNA, 19 nt, Artificial Sequence
  Description of Artificial Sequence: Synthetic oligonucleotide
  Sense strand starting at position 3601 of SEQ ID NO: 2149
cagauuaugugaguuucca

SEQ ID NO: 166827 - RNA, 19 nt, Artificial Sequence
  Description of Artificial Sequence: Synthetic oligonucleotide
  Antisense strand to SEQ ID NO: 166826
uggaaacucacauaaucug

SEQ ID NO: 166828 - RNA, 19 nt, Artificial Sequence
  Description of Artificial Sequence: Synthetic oligonucleotide
  Sense strand starting at position 3597 of SEQ ID NO: 2149
uaaccagauuaugugaguu

SEQ ID NO: 166829 - RNA, 19 nt, Artificial Sequence
  Description of Artificial Sequence: Synthetic oligonucleotide
  Antisense strand to SEQ ID NO: 166828
aacucacauaaucugguua

SEQ ID NO: 166830 - RNA, 19 nt, Artificial Sequence
  Description of Artificial Sequence: Synthetic oligonucleotide
  Sense strand starting at position 3494 of SEQ ID NO: 2149
aguucugaguaacccaauu

SEQ ID NO: 166831 - RNA, 19 nt, Artificial Sequence
  Description of Artificial Sequence: Synthetic oligonucleotide
  Antisense strand to SEQ ID NO: 166830
aauuggguuacucagaacu

SEQ ID NO: 166832 - RNA, 19 nt, Artificial Sequence
  Description of Artificial Sequence: Synthetic oligonucleotide
  Sense strand starting at position 3491 of SEQ ID NO: 2149
gcuaguucugaguaaccca

SEQ ID NO: 166833 - RNA, 19 nt, Artificial Sequence
  Description of Artificial Sequence: Synthetic oligonucleotide
  Antisense strand to SEQ ID NO: 166832
uggguuacucagaacuagc

SEQ ID NO: 166834 - RNA, 19 nt, Artificial Sequence
  Description of Artificial Sequence: Synthetic oligonucleotide
  Sense strand starting at position 3354 of SEQ ID NO: 2149
agaguuuaugauggacauc

SEQ ID NO: 166835 - RNA, 19 nt, Artificial Sequence
  Description of Artificial Sequence: Synthetic oligonucleotide
  Antisense strand to SEQ ID NO: 166834
gauguccaucauaaacucu

SEQ ID NO: 166836 - RNA, 19 nt, Artificial Sequence
  Description of Artificial Sequence: Synthetic oligonucleotide
  Sense strand starting at position 3343 of SEQ ID NO: 2149
agcuccaugagagaguuua

SEQ ID NO: 166837 - RNA, 19 nt, Artificial Sequence
  Description of Artificial Sequence: Synthetic oligonucleotide
  Antisense strand to SEQ ID NO: 166836
uaaacucucucauggagcu

SEQ ID NO: 166838 - RNA, 19 nt, Artificial Sequence
  Description of Artificial Sequence: Synthetic oligonucleotide
  Sense strand starting at position 3274 of SEQ ID NO: 2149
auuguuauugaaggaucaa

SEQ ID NO: 166839 - RNA, 19 nt, Artificial Sequence
  Description of Artificial Sequence: Synthetic oligonucleotide
  Antisense strand to SEQ ID NO: 166838
uugauccuucaauaacaau

SEQ ID NO: 166840 - RNA, 19 nt, Artificial Sequence
  Description of Artificial Sequence: Synthetic oligonucleotide
  Sense strand starting at position 3094 of SEQ ID NO: 2149
acacuuauguaaguaaggu

SEQ ID NO: 166841 - RNA, 19 nt, Artificial Sequence
  Description of Artificial Sequence: Synthetic oligonucleotide
  Antisense strand to SEQ ID NO: 166840
accuuacuuacauaagugu

SEQ ID NO: 166842 - RNA, 19 nt, Artificial Sequence
  Description of Artificial Sequence: Synthetic oligonucleotide
  Sense strand starting at position 3035 of SEQ ID NO: 2149
ugcuaauuccuagagcaaa

SEQ ID NO: 166843 - RNA, 19 nt, Artificial Sequence
  Description of Artificial Sequence: Synthetic oligonucleotide
  Antisense strand to SEQ ID NO: 166842
uuugcucuaggaauuagca

SEQ ID NO: 166844 - RNA, 19 nt, Artificial Sequence
  Description of Artificial Sequence: Synthetic oligonucleotide
  Sense strand starting at position 2951 of SEQ ID NO: 2149
uuaguaauuugagaaccug

SEQ ID NO: 166845 - RNA, 19 nt, Artificial Sequence
  Description of Artificial Sequence: Synthetic oligonucleotide
  Antisense strand to SEQ ID NO: 166844
cagguucucaaauuacuaa

SEQ ID NO: 166846 - RNA, 19 nt, Artificial Sequence
  Description of Artificial Sequence: Synthetic oligonucleotide
  Sense strand starting at position 2835 of SEQ ID NO: 2149
accugugaccauugugaac

SEQ ID NO: 166847 - RNA, 19 nt, Artificial Sequence
  Description of Artificial Sequence: Synthetic oligonucleotide
  Antisense strand to SEQ ID NO: 166846
guucacaauggucacaggu

SEQ ID NO: 166848 - RNA, 19 nt, Artificial Sequence
  Description of Artificial Sequence: Synthetic oligonucleotide
  Sense strand starting at position 2828 of SEQ ID NO: 2149
uuuguaaaccugugaccau

SEQ ID NO: 166849 - RNA, 19 nt, Artificial Sequence
  Description of Artificial Sequence: Synthetic oligonucleotide
  Antisense strand to SEQ ID NO: 166848
auggucacagguuuacaaa

SEQ ID NO: 166850 - RNA, 19 nt, Artificial Sequence
  Description of Artificial Sequence: Synthetic oligonucleotide
  Sense strand starting at position 2704 of SEQ ID NO: 2149
ggaacucugaguuggaauu

SEQ ID NO: 166851 - RNA, 19 nt, Artificial Sequence
  Description of Artificial Sequence: Synthetic oligonucleotide
  Antisense strand to SEQ ID NO: 166850
aauuccaacucagaguucc

SEQ ID NO: 166852 - RNA, 19 nt, Artificial Sequence
  Description of Artificial Sequence: Synthetic oligonucleotide
  Sense strand starting at position 2702 of SEQ ID NO: 2149
uuggaacucugaguuggaa

SEQ ID NO: 166853 - RNA, 19 nt, Artificial Sequence
  Description of Artificial Sequence: Synthetic oligonucleotide
  Antisense strand to SEQ ID NO: 166852
uuccaacucagaguuccaa

SEQ ID NO: 166854 - RNA, 19 nt, Artificial Sequence
  Description of Artificial Sequence: Synthetic oligonucleotide
  Sense strand starting at position 2430 of SEQ ID NO: 2149
cagauuugguaauaguaag

SEQ ID NO: 166855 - RNA, 19 nt, Artificial Sequence
  Description of Artificial Sequence: Synthetic oligonucleotide
  Antisense strand to SEQ ID NO: 166854
cuuacuauuaccaaaucug

SEQ ID NO: 166856 - RNA, 19 nt, Artificial Sequence
  Description of Artificial Sequence: Synthetic oligonucleotide
  Sense strand starting at position 2389 of SEQ ID NO: 2149
caggucuccuugguugaaa

SEQ ID NO: 166857 - RNA, 19 nt, Artificial Sequence
  Description of Artificial Sequence: Synthetic oligonucleotide
  Antisense strand to SEQ ID NO: 166856
uuucaaccaaggagaccug

SEQ ID NO: 166858 - RNA, 19 nt, Artificial Sequence
  Description of Artificial Sequence: Synthetic oligonucleotide
  Sense strand starting at position 2388 of SEQ ID NO: 2149
acaggucuccuugguugaa

SEQ ID NO: 166859 - RNA, 19 nt, Artificial Sequence
  Description of Artificial Sequence: Synthetic oligonucleotide
  Antisense strand to SEQ ID NO: 166858
uucaaccaaggagaccugu

SEQ ID NO: 166860 - RNA, 19 nt, Artificial Sequence
  Description of Artificial Sequence: Synthetic oligonucleotide
  Sense strand starting at position 1456 of SEQ ID NO: 2149
guggguauugcggaaggau

SEQ ID NO: 166861 - RNA, 19 nt, Artificial Sequence
  Description of Artificial Sequence: Synthetic oligonucleotide
  Antisense strand to SEQ ID NO: 166860
auccuuccgcaauacccac

SEQ ID NO: 166862 - RNA, 19 nt, Artificial Sequence
  Description of Artificial Sequence: Synthetic oligonucleotide
  Sense strand starting at position 1222 of SEQ ID NO: 2149
gugcuuguuguaaagacgu

SEQ ID NO: 166863 - RNA, 19 nt, Artificial Sequence
  Description of Artificial Sequence: Synthetic oligonucleotide
  Antisense strand to SEQ ID NO: 166862
acgucuuuacaacaagcac

SEQ ID NO: 166864 - RNA, 19 nt, Artificial Sequence
  Description of Artificial Sequence: Synthetic oligonucleotide
  Sense strand starting at position 1009 of SEQ ID NO: 2149
gugugaaauuaauucucac

SEQ ID NO: 166865 - RNA, 19 nt, Artificial Sequence
  Description of Artificial Sequence: Synthetic oligonucleotide
  Antisense strand to SEQ ID NO: 166864
gugagaauuaauuucacac

SEQ ID NO: 166866 - RNA, 19 nt, Artificial Sequence
  Description of Artificial Sequence: Synthetic oligonucleotide
  Sense strand starting at position 998 of SEQ ID NO: 2149
auauccuagacgugugaaa

SEQ ID NO: 166867 - RNA, 19 nt, Artificial Sequence
  Description of Artificial Sequence: Synthetic oligonucleotide
  Antisense strand to SEQ ID NO: 166866
uuucacacgucuaggauau

SEQ ID NO: 166868 - RNA, 19 nt, Artificial Sequence
  Description of Artificial Sequence: Synthetic oligonucleotide
  Sense strand starting at position 994 of SEQ ID NO: 2149
auaaauauccuagacgugu

SEQ ID NO: 166869 - RNA, 19 nt, Artificial Sequence
  Description of Artificial Sequence: Synthetic oligonucleotide
  Antisense strand to SEQ ID NO: 166868
acacgucuaggauauuuau

SEQ ID NO: 166870 - RNA, 19 nt, Artificial Sequence
  Description of Artificial Sequence: Synthetic oligonucleotide
  Sense strand starting at position 795 of SEQ ID NO: 2149
agugauugaucacuuagaa

SEQ ID NO: 166871 - RNA, 19 nt, Artificial Sequence
  Description of Artificial Sequence: Synthetic oligonucleotide
  Antisense strand to SEQ ID NO: 166870
uucuaagugaucaaucacu

SEQ ID NO: 166872 - RNA, 19 nt, Artificial Sequence
  Description of Artificial Sequence: Synthetic oligonucleotide
  Sense strand starting at position 792 of SEQ ID NO: 2149
accagugauugaucacuua

SEQ ID NO: 166873 - RNA, 19 nt, Artificial Sequence
  Description of Artificial Sequence: Synthetic oligonucleotide
  Antisense strand to SEQ ID NO: 166872
uaagugaucaaucacuggu

SEQ ID NO: 166874 - RNA, 19 nt, Artificial Sequence
  Description of Artificial Sequence: Synthetic oligonucleotide
  Sense strand starting at position 785 of SEQ ID NO: 2149
gcauacuaccagugauuga

SEQ ID NO: 166875 - RNA, 19 nt, Artificial Sequence
  Description of Artificial Sequence: Synthetic oligonucleotide
  Antisense strand to SEQ ID NO: 166874
ucaaucacugguaguaugc

SEQ ID NO: 166876 - RNA, 19 nt, Artificial Sequence
  Description of Artificial Sequence: Synthetic oligonucleotide
  Sense strand starting at position 670 of SEQ ID NO: 2149
augugucuugcauacaaua

SEQ ID NO: 166877 - RNA, 19 nt, Artificial Sequence
  Description of Artificial Sequence: Synthetic oligonucleotide
  Antisense strand to SEQ ID NO: 166876
uauuguaugcaagacacau

SEQ ID NO: 166878 - RNA, 19 nt, Artificial Sequence
  Description of Artificial Sequence: Synthetic oligonucleotide
  Sense strand starting at position 655 of SEQ ID NO: 2149
uuugaaacugucugaaugu

SEQ ID NO: 166879 - RNA, 19 nt, Artificial Sequence
  Description of Artificial Sequence: Synthetic oligonucleotide
  Antisense strand to SEQ ID NO: 166878
acauucagacaguuucaaa

SEQ ID NO: 166880 - RNA, 19 nt, Artificial Sequence
  Description of Artificial Sequence: Synthetic oligonucleotide
  Sense strand starting at position 605 of SEQ ID NO: 2149
cauagauuauagguagauc

SEQ ID NO: 166881 - RNA, 19 nt, Artificial Sequence
  Description of Artificial Sequence: Synthetic oligonucleotide
  Antisense strand to SEQ ID NO: 166880
gaucuaccuauaaucuaug

SEQ ID NO: 166882 - RNA, 19 nt, Artificial Sequence
  Description of Artificial Sequence: Synthetic oligonucleotide
  Sense strand starting at position 579 of SEQ ID NO: 2149
aguacugcugcagauaaca

SEQ ID NO: 166883 - RNA, 19 nt, Artificial Sequence
  Description of Artificial Sequence: Synthetic oligonucleotide
  Antisense strand to SEQ ID NO: 166882
uguuaucugcagcaguacu

SEQ ID NO: 166884 - RNA, 19 nt, Artificial Sequence
  Description of Artificial Sequence: Synthetic oligonucleotide
  Sense strand starting at position 577 of SEQ ID NO: 2149
aaaguacugcugcagauaa

SEQ ID NO: 166885 - RNA, 19 nt, Artificial Sequence
  Description of Artificial Sequence: Synthetic oligonucleotide
  Antisense strand to SEQ ID NO: 166884
uuaucugcagcaguacuuu

SEQ ID NO: 166886 - RNA, 19 nt, Artificial Sequence
  Description of Artificial Sequence: Synthetic oligonucleotide
  Sense strand starting at position 518 of SEQ ID NO: 2149
ggguuugguuucuugauuu

SEQ ID NO: 166887 - RNA, 19 nt, Artificial Sequence
  Description of Artificial Sequence: Synthetic oligonucleotide
  Antisense strand to SEQ ID NO: 166886
aaaucaagaaaccaaaccc

SEQ ID NO: 166888 - RNA, 19 nt, Artificial Sequence
  Description of Artificial Sequence: Synthetic oligonucleotide
  Sense strand starting at position 505 of SEQ ID NO: 2149
aacauaaaucaguggguuu

SEQ ID NO: 166889 - RNA, 19 nt, Artificial Sequence
  Description of Artificial Sequence: Synthetic oligonucleotide
  Antisense strand to SEQ ID NO: 166888
aaacccacugauuuauguu

SEQ ID NO: 166890 - RNA, 19 nt, Artificial Sequence
  Description of Artificial Sequence: Synthetic oligonucleotide
  Sense strand starting at position 365 of SEQ ID NO: 2149
uggcaucugccugaaggau

SEQ ID NO: 166891 - RNA, 19 nt, Artificial Sequence
  Description of Artificial Sequence: Synthetic oligonucleotide
  Antisense strand to SEQ ID NO: 166890
auccuucaggcagaugcca

SEQ ID NO: 166892 - RNA, 19 nt, Artificial Sequence
  Description of Artificial Sequence: Synthetic oligonucleotide
  Sense strand starting at position 364 of SEQ ID NO: 2149
auggcaucugccugaagga

SEQ ID NO: 166893 - RNA, 19 nt, Artificial Sequence
  Description of Artificial Sequence: Synthetic oligonucleotide
  Antisense strand to SEQ ID NO: 166892
uccuucaggcagaugccau

SEQ ID NO: 166894 - RNA, 19 nt, Artificial Sequence
  Description of Artificial Sequence: Synthetic oligonucleotide
  Sense strand starting at position 169 of SEQ ID NO: 2149
aucucuagaaugugaggau

SEQ ID NO: 166895 - RNA, 19 nt, Artificial Sequence
  Description of Artificial Sequence: Synthetic oligonucleotide
  Antisense strand to SEQ ID NO: 166894
auccucacauucuagagau

SEQ ID NO: 166896 - RNA, 19 nt, Artificial Sequence
  Description of Artificial Sequence: Synthetic oligonucleotide
  Sense strand starting at position 142 of SEQ ID NO: 2149
uuaugagaguaucucaaac

SEQ ID NO: 166897 - RNA, 19 nt, Artificial Sequence
  Description of Artificial Sequence: Synthetic oligonucleotide
  Antisense strand to SEQ ID NO: 166896
guuugagauacucucauaa

SEQ ID NO: 166898 - RNA, 19 nt, Artificial Sequence
  Description of Artificial Sequence: Synthetic oligonucleotide
  Sense strand starting at position 88 of SEQ ID NO: 2149
auuccugaucuuuguauua

SEQ ID NO: 166899 - RNA, 19 nt, Artificial Sequence
  Description of Artificial Sequence: Synthetic oligonucleotide
  Antisense strand to SEQ ID NO: 166898
uaauacaaagaucaggaau

SEQ ID NO: 166900 - RNA, 19 nt, Artificial Sequence
  Description of Artificial Sequence: Synthetic oligonucleotide
  Sense strand starting at position 24 of SEQ ID NO: 2149
cugccaucuuuaucugaag

SEQ ID NO: 166901 - RNA, 19 nt, Artificial Sequence
  Description of Artificial Sequence: Synthetic oligonucleotide
  Antisense strand to SEQ ID NO: 166900
cuucagauaaagauggcag

SEQ ID NO: 166902 - RNA, 19 nt, Artificial Sequence
  Description of Artificial Sequence: Synthetic oligonucleotide
  Sense strand starting at position 85 of SEQ ID NO: 2151
ccuaaugcccaguaagaag

SEQ ID NO: 166903 - RNA, 19 nt, Artificial Sequence
  Description of Artificial Sequence: Synthetic oligonucleotide
  Antisense strand to SEQ ID NO: 166902
cuucuuacugggcauuagg

SEQ ID NO: 166904 - RNA, 19 nt, Artificial Sequence
  Description of Artificial Sequence: Synthetic oligonucleotide
  Sense strand starting at position 96 of SEQ ID NO: 2151
guaagaaguuauugucuca

SEQ ID NO: 166905 - RNA, 19 nt, Artificial Sequence
  Description of Artificial Sequence: Synthetic oligonucleotide
  Antisense strand to SEQ ID NO: 166904
ugagacaauaacuucuuac

SEQ ID NO: 166906 - RNA, 19 nt, Artificial Sequence
  Description of Artificial Sequence: Synthetic oligonucleotide
  Sense strand starting at position 99 of SEQ ID NO: 2151
agaaguuauugucucaucu

SEQ ID NO: 166907 - RNA, 19 nt, Artificial Sequence
  Description of Artificial Sequence: Synthetic oligonucleotide
  Antisense strand to SEQ ID NO: 166906
agaugagacaauaacuucu

SEQ ID NO: 166908 - RNA, 19 nt, Artificial Sequence
  Description of Artificial Sequence: Synthetic oligonucleotide
  Sense strand starting at position 347 of SEQ ID NO: 2151
uagucaucugucugucaca

SEQ ID NO: 166909 - RNA, 19 nt, Artificial Sequence
  Description of Artificial Sequence: Synthetic oligonucleotide
  Antisense strand to SEQ ID NO: 166908
ugugacagacagaugacua

SEQ ID NO: 166910 - RNA, 19 nt, Artificial Sequence
  Description of Artificial Sequence: Synthetic oligonucleotide
  Sense strand starting at position 366 of SEQ ID NO: 2151
gccaaccuuucucuaggaa

SEQ ID NO: 166911 - RNA, 19 nt, Artificial Sequence
  Description of Artificial Sequence: Synthetic oligonucleotide
  Antisense strand to SEQ ID NO: 166910
uuccuagagaaagguuggc

SEQ ID NO: 166912 - RNA, 19 nt, Artificial Sequence
  Description of Artificial Sequence: Synthetic oligonucleotide
  Sense strand starting at position 370 of SEQ ID NO: 2151
accuuucucuaggaaagaa

SEQ ID NO: 166913 - RNA, 19 nt, Artificial Sequence
  Description of Artificial Sequence: Synthetic oligonucleotide
  Antisense strand to SEQ ID NO: 166912
uucuuuccuagagaaaggu

SEQ ID NO: 166914 - RNA, 19 nt, Artificial Sequence
  Description of Artificial Sequence: Synthetic oligonucleotide
  Sense strand starting at position 442 of SEQ ID NO: 2151
ucagcuggauucugaaagu

SEQ ID NO: 166915 - RNA, 19 nt, Artificial Sequence
  Description of Artificial Sequence: Synthetic oligonucleotide
  Antisense strand to SEQ ID NO: 166914
acuuucagaauccagcuga

SEQ ID NO: 166916 - RNA, 19 nt, Artificial Sequence
  Description of Artificial Sequence: Synthetic oligonucleotide
  Sense strand starting at position 556 of SEQ ID NO: 2151
aggucauucuacccagcua

SEQ ID NO: 166917 - RNA, 19 nt, Artificial Sequence
  Description of Artificial Sequence: Synthetic oligonucleotide
  Antisense strand to SEQ ID NO: 166916
uagcuggguagaaugaccu

SEQ ID NO: 166918 - RNA, 19 nt, Artificial Sequence
  Description of Artificial Sequence: Synthetic oligonucleotide
  Sense strand starting at position 941 of SEQ ID NO: 2151
gcaccaugcgcuccaucau

SEQ ID NO: 166919 - RNA, 19 nt, Artificial Sequence
  Description of Artificial Sequence: Synthetic oligonucleotide
  Antisense strand to SEQ ID NO: 166918
augauggagcgcauggugc

SEQ ID NO: 166920 - RNA, 19 nt, Artificial Sequence
  Description of Artificial Sequence: Synthetic oligonucleotide
  Sense strand starting at position 950 of SEQ ID NO: 2151
gcuccaucauccugagauu

SEQ ID NO: 166921 - RNA, 19 nt, Artificial Sequence
  Description of Artificial Sequence: Synthetic oligonucleotide
  Antisense strand to SEQ ID NO: 166920
aaucucaggaugauggagc

SEQ ID NO: 166922 - RNA, 19 nt, Artificial Sequence
  Description of Artificial Sequence: Synthetic oligonucleotide
  Sense strand starting at position 975 of SEQ ID NO: 2151
ggugcaguagcuuguccaa

SEQ ID NO: 166923 - RNA, 19 nt, Artificial Sequence
  Description of Artificial Sequence: Synthetic oligonucleotide
  Antisense strand to SEQ ID NO: 166922
uuggacaagcuacugcacc

SEQ ID NO: 166924 - RNA, 19 nt, Artificial Sequence
  Description of Artificial Sequence: Synthetic oligonucleotide
  Sense strand starting at position 1137 of SEQ ID NO: 2151
ugggaaaguucccgggaga

SEQ ID NO: 166925 - RNA, 19 nt, Artificial Sequence
  Description of Artificial Sequence: Synthetic oligonucleotide
  Antisense strand to SEQ ID NO: 166924
ucucccgggaacuuuccca

SEQ ID NO: 166926 - RNA, 19 nt, Artificial Sequence
  Description of Artificial Sequence: Synthetic oligonucleotide
  Sense strand starting at position 1138 of SEQ ID NO: 2151
gggaaaguucccgggagag

SEQ ID NO: 166927 - RNA, 19 nt, Artificial Sequence
  Description of Artificial Sequence: Synthetic oligonucleotide
  Antisense strand to SEQ ID NO: 166926
cucucccgggaacuuuccc

SEQ ID NO: 166928 - RNA, 19 nt, Artificial Sequence
  Description of Artificial Sequence: Synthetic oligonucleotide
  Sense strand starting at position 1575 of SEQ ID NO: 2151
cgggucuagccagguaauu

SEQ ID NO: 166929 - RNA, 19 nt, Artificial Sequence
  Description of Artificial Sequence: Synthetic oligonucleotide
  Antisense strand to SEQ ID NO: 166928
aauuaccuggcuagacccg

SEQ ID NO: 166930 - RNA, 19 nt, Artificial Sequence
  Description of Artificial Sequence: Synthetic oligonucleotide
  Sense strand starting at position 2365 of SEQ ID NO: 2151
cccgauucugccgaggagu

SEQ ID NO: 166931 - RNA, 19 nt, Artificial Sequence
  Description of Artificial Sequence: Synthetic oligonucleotide
  Antisense strand to SEQ ID NO: 166930
acuccucggcagaaucggg

SEQ ID NO: 166932 - RNA, 19 nt, Artificial Sequence
  Description of Artificial Sequence: Synthetic oligonucleotide
  Sense strand starting at position 2366 of SEQ ID NO: 2151
ccgauucugccgaggaguc

SEQ ID NO: 166933 - RNA, 19 nt, Artificial Sequence
  Description of Artificial Sequence: Synthetic oligonucleotide
  Antisense strand to SEQ ID NO: 166932
gacuccucggcagaaucgg

SEQ ID NO: 166934 - RNA, 19 nt, Artificial Sequence
  Description of Artificial Sequence: Synthetic oligonucleotide
  Sense strand starting at position 2526 of SEQ ID NO: 2151
acgauuugcuucgggagau

SEQ ID NO: 166935 - RNA, 19 nt, Artificial Sequence
  Description of Artificial Sequence: Synthetic oligonucleotide
  Antisense strand to SEQ ID NO: 166934
aucucccgaagcaaaucgu

SEQ ID NO: 166936 - RNA, 19 nt, Artificial Sequence
  Description of Artificial Sequence: Synthetic oligonucleotide
  Sense strand starting at position 2527 of SEQ ID NO: 2151
cgauuugcuucgggagaua

SEQ ID NO: 166937 - RNA, 19 nt, Artificial Sequence
  Description of Artificial Sequence: Synthetic oligonucleotide
  Antisense strand to SEQ ID NO: 166936
uaucucccgaagcaaaucg

SEQ ID NO: 166938 - RNA, 19 nt, Artificial Sequence
  Description of Artificial Sequence: Synthetic oligonucleotide
  Sense strand starting at position 3061 of SEQ ID NO: 2151
gcugcuguccggccauuaa

SEQ ID NO: 166939 - RNA, 19 nt, Artificial Sequence
  Description of Artificial Sequence: Synthetic oligonucleotide
  Antisense strand to SEQ ID NO: 166938
uuaauggccggacagcagc

SEQ ID NO: 166940 - RNA, 19 nt, Artificial Sequence
  Description of Artificial Sequence: Synthetic oligonucleotide
  Sense strand starting at position 3768 of SEQ ID NO: 2151
gcuacacucccguaaccua

SEQ ID NO: 166941 - RNA, 19 nt, Artificial Sequence
  Description of Artificial Sequence: Synthetic oligonucleotide
  Antisense strand to SEQ ID NO: 166940
uagguuacgggaguguagc

SEQ ID NO: 166942 - RNA, 19 nt, Artificial Sequence
  Description of Artificial Sequence: Synthetic oligonucleotide
  Sense strand starting at position 46 of SEQ ID NO: 2150
gggaguccuagagggugaa

SEQ ID NO: 166943 - RNA, 19 nt, Artificial Sequence
  Description of Artificial Sequence: Synthetic oligonucleotide
  Antisense strand to SEQ ID NO: 166942
uucacccucuaggacuccc

SEQ ID NO: 166944 - RNA, 19 nt, Artificial Sequence
  Description of Artificial Sequence: Synthetic oligonucleotide
  Sense strand starting at position 407 of SEQ ID NO: 2150
cucugcuggucacagagau

SEQ ID NO: 166945 - RNA, 19 nt, Artificial Sequence
  Description of Artificial Sequence: Synthetic oligonucleotide
  Antisense strand to SEQ ID NO: 166944
aucucugugaccagcagag

SEQ ID NO: 166946 - RNA, 19 nt, Artificial Sequence
  Description of Artificial Sequence: Synthetic oligonucleotide
  Sense strand starting at position 446 of SEQ ID NO: 2150
uggacuuagucuuaaguag

SEQ ID NO: 166947 - RNA, 19 nt, Artificial Sequence
  Description of Artificial Sequence: Synthetic oligonucleotide
  Antisense strand to SEQ ID NO: 166946
cuacuuaagacuaagucca

SEQ ID NO: 166948 - RNA, 19 nt, Artificial Sequence
  Description of Artificial Sequence: Synthetic oligonucleotide
  Sense strand starting at position 453 of SEQ ID NO: 2150
agucuuaaguagggagaga

SEQ ID NO: 166949 - RNA, 19 nt, Artificial Sequence
  Description of Artificial Sequence: Synthetic oligonucleotide
  Antisense strand to SEQ ID NO: 166948
ucucucccuacuuaagacu

SEQ ID NO: 166950 - RNA, 19 nt, Artificial Sequence
  Description of Artificial Sequence: Synthetic oligonucleotide
  Sense strand starting at position 516 of SEQ ID NO: 2150
aaugaagugccagguuaug

SEQ ID NO: 166951 - RNA, 19 nt, Artificial Sequence
  Description of Artificial Sequence: Synthetic oligonucleotide
  Antisense strand to SEQ ID NO: 166950
cauaaccuggcacuucauu

SEQ ID NO: 166952 - RNA, 19 nt, Artificial Sequence
  Description of Artificial Sequence: Synthetic oligonucleotide
  Sense strand starting at position 969 of SEQ ID NO: 2150
ggcuuagugggaugugaaa

SEQ ID NO: 166953 - RNA, 19 nt, Artificial Sequence
  Description of Artificial Sequence: Synthetic oligonucleotide
  Antisense strand to SEQ ID NO: 166952
uuucacaucccacuaagcc

SEQ ID NO: 166954 - RNA, 19 nt, Artificial Sequence
  Description of Artificial Sequence: Synthetic oligonucleotide
  Sense strand starting at position 1185 of SEQ ID NO: 2150
cuaggucgugcugagucau

SEQ ID NO: 166955 - RNA, 19 nt, Artificial Sequence
  Description of Artificial Sequence: Synthetic oligonucleotide
  Antisense strand to SEQ ID NO: 166954
augacucagcacgaccuag

SEQ ID NO: 166956 - RNA, 19 nt, Artificial Sequence
  Description of Artificial Sequence: Synthetic oligonucleotide
  Sense strand starting at position 1468 of SEQ ID NO: 2150
guggguucgucccagggaa

SEQ ID NO: 166957 - RNA, 19 nt, Artificial Sequence
  Description of Artificial Sequence: Synthetic oligonucleotide
  Antisense strand to SEQ ID NO: 166956
uucccugggacgaacccac

SEQ ID NO: 166958 - RNA, 19 nt, Artificial Sequence
  Description of Artificial Sequence: Synthetic oligonucleotide
  Sense strand starting at position 1470 of SEQ ID NO: 2150
ggguucgucccagggaaag

SEQ ID NO: 166959 - RNA, 19 nt, Artificial Sequence
  Description of Artificial Sequence: Synthetic oligonucleotide
  Antisense strand to SEQ ID NO: 166958
cuuucccugggacgaaccc

SEQ ID NO: 166960 - RNA, 19 nt, Artificial Sequence
  Description of Artificial Sequence: Synthetic oligonucleotide
  Sense strand starting at position 1993 of SEQ ID NO: 2150
gugccuuugccgcaagacu

SEQ ID NO: 166961 - RNA, 19 nt, Artificial Sequence
  Description of Artificial Sequence: Synthetic oligonucleotide
  Antisense strand to SEQ ID NO: 166960
agucuugcggcaaaggcac

SEQ ID NO: 166962 - RNA, 19 nt, Artificial Sequence
  Description of Artificial Sequence: Synthetic oligonucleotide
  Sense strand starting at position 2004 of SEQ ID NO: 2150
gcaagacuugcugagcuua

SEQ ID NO: 166963 - RNA, 19 nt, Artificial Sequence
  Description of Artificial Sequence: Synthetic oligonucleotide
  Antisense strand to SEQ ID NO: 166962
uaagcucagcaagucuugc

SEQ ID NO: 166964 - RNA, 19 nt, Artificial Sequence
  Description of Artificial Sequence: Synthetic oligonucleotide
  Sense strand starting at position 2350 of SEQ ID NO: 2150
gcagcucaaggcuaaauua

SEQ ID NO: 166965 - RNA, 19 nt, Artificial Sequence
  Description of Artificial Sequence: Synthetic oligonucleotide
  Antisense strand to SEQ ID NO: 166964
uaauuuagccuugagcugc

SEQ ID NO: 166966 - RNA, 19 nt, Artificial Sequence
  Description of Artificial Sequence: Synthetic oligonucleotide
  Sense strand starting at position 2359 of SEQ ID NO: 2150
ggcuaaauuauugggcuca

SEQ ID NO: 166967 - RNA, 19 nt, Artificial Sequence
  Description of Artificial Sequence: Synthetic oligonucleotide
  Antisense strand to SEQ ID NO: 166966
ugagcccaauaauuuagcc

SEQ ID NO: 166968 - RNA, 19 nt, Artificial Sequence
  Description of Artificial Sequence: Synthetic oligonucleotide
  Sense strand starting at position 2485 of SEQ ID NO: 2150
ggcuucugagccuaaaggu

SEQ ID NO: 166969 - RNA, 19 nt, Artificial Sequence
  Description of Artificial Sequence: Synthetic oligonucleotide
  Antisense strand to SEQ ID NO: 166968
accuuuaggcucagaagcc

SEQ ID NO: 166970 - RNA, 19 nt, Artificial Sequence
  Description of Artificial Sequence: Synthetic oligonucleotide
  Sense strand starting at position 2494 of SEQ ID NO: 2150
gccuaaagguugggugaga

SEQ ID NO: 166971 - RNA, 19 nt, Artificial Sequence
  Description of Artificial Sequence: Synthetic oligonucleotide
  Antisense strand to SEQ ID NO: 166970
ucucacccaaccuuuaggc

SEQ ID NO: 166972 - RNA, 19 nt, Artificial Sequence
  Description of Artificial Sequence: Synthetic oligonucleotide
  Sense strand starting at position 2517 of SEQ ID NO: 2150
ggaggaugcuugagagaag

SEQ ID NO: 166973 - RNA, 19 nt, Artificial Sequence
  Description of Artificial Sequence: Synthetic oligonucleotide
  Antisense strand to SEQ ID NO: 166972
cuucucucaagcauccucc

SEQ ID NO: 166974 - RNA, 19 nt, Artificial Sequence
  Description of Artificial Sequence: Synthetic oligonucleotide
  Sense strand starting at position 2518 of SEQ ID NO: 2150
gaggaugcuugagagaaga

SEQ ID NO: 166975 - RNA, 19 nt, Artificial Sequence
  Description of Artificial Sequence: Synthetic oligonucleotide
  Antisense strand to SEQ ID NO: 166974
ucuucucucaagcauccuc

SEQ ID NO: 166976 - RNA, 19 nt, Artificial Sequence
  Description of Artificial Sequence: Synthetic oligonucleotide
  Sense strand starting at position 2542 of SEQ ID NO: 2150
gugccugaggccuauggaa

SEQ ID NO: 166977 - RNA, 19 nt, Artificial Sequence
  Description of Artificial Sequence: Synthetic oligonucleotide
  Antisense strand to SEQ ID NO: 166976
uuccauaggccucaggcac

SEQ ID NO: 166978 - RNA, 19 nt, Artificial Sequence
  Description of Artificial Sequence: Synthetic oligonucleotide
  Sense strand starting at position 2544 of SEQ ID NO: 2150
gccugaggccuauggaaau

SEQ ID NO: 166979 - RNA, 19 nt, Artificial Sequence
  Description of Artificial Sequence: Synthetic oligonucleotide
  Antisense strand to SEQ ID NO: 166978
auuuccauaggccucaggc

SEQ ID NO: 166980 - RNA, 19 nt, Artificial Sequence
  Description of Artificial Sequence: Synthetic oligonucleotide
  Sense strand starting at position 2636 of SEQ ID NO: 2150
gaggacgcuacugguuauu

SEQ ID NO: 166981 - RNA, 19 nt, Artificial Sequence
  Description of Artificial Sequence: Synthetic oligonucleotide
  Antisense strand to SEQ ID NO: 166980
aauaaccaguagcguccuc

SEQ ID NO: 166982 - RNA, 19 nt, Artificial Sequence
  Description of Artificial Sequence: Synthetic oligonucleotide
  Sense strand starting at position 2638 of SEQ ID NO: 2150
ggacgcuacugguuauuaa

SEQ ID NO: 166983 - RNA, 19 nt, Artificial Sequence
  Description of Artificial Sequence: Synthetic oligonucleotide
  Antisense strand to SEQ ID NO: 166982
uuaauaaccaguagcgucc

SEQ ID NO: 166984 - RNA, 19 nt, Artificial Sequence
  Description of Artificial Sequence: Synthetic oligonucleotide
  Sense strand starting at position 2639 of SEQ ID NO: 2150
gacgcuacugguuauuaaa

SEQ ID NO: 166985 - RNA, 19 nt, Artificial Sequence
  Description of Artificial Sequence: Synthetic oligonucleotide
  Antisense strand to SEQ ID NO: 166984
uuuaauaaccaguagcguc

SEQ ID NO: 166986 - RNA, 19 nt, Artificial Sequence
  Description of Artificial Sequence: Synthetic oligonucleotide
  Sense strand starting at position 2641 of SEQ ID NO: 2150
cgcuacugguuauuaaaga

SEQ ID NO: 166987 - RNA, 19 nt, Artificial Sequence
  Description of Artificial Sequence: Synthetic oligonucleotide
  Antisense strand to SEQ ID NO: 166986
ucuuuaauaaccaguagcg

SEQ ID NO: 166988 - RNA, 19 nt, Artificial Sequence
  Description of Artificial Sequence: Synthetic oligonucleotide
  Sense strand starting at position 2642 of SEQ ID NO: 2150
gcuacugguuauuaaagac

SEQ ID NO: 166989 - RNA, 19 nt, Artificial Sequence
  Description of Artificial Sequence: Synthetic oligonucleotide
  Antisense strand to SEQ ID NO: 166988
gucuuuaauaaccaguagc

SEQ ID NO: 166990 - RNA, 19 nt, Artificial Sequence
  Description of Artificial Sequence: Synthetic oligonucleotide
  Sense strand starting at position 2672 of SEQ ID NO: 2150
acauguuaguuugcuuaau

SEQ ID NO: 166991 - RNA, 19 nt, Artificial Sequence
  Description of Artificial Sequence: Synthetic oligonucleotide
  Antisense strand to SEQ ID NO: 166990
auuaagcaaacuaacaugu

SEQ ID NO: 166992 - RNA, 19 nt, Artificial Sequence
  Description of Artificial Sequence: Synthetic oligonucleotide
  Sense strand starting at position 2674 of SEQ ID NO: 2150
auguuaguuugcuuaauac

SEQ ID NO: 166993 - RNA, 19 nt, Artificial Sequence
  Description of Artificial Sequence: Synthetic oligonucleotide
  Antisense strand to SEQ ID NO: 166992
guauuaagcaaacuaacau

SEQ ID NO: 166994 - RNA, 19 nt, Artificial Sequence
  Description of Artificial Sequence: Synthetic oligonucleotide
  Sense strand starting at position 2680 of SEQ ID NO: 2150
guuugcuuaauacguaaga

SEQ ID NO: 166995 - RNA, 19 nt, Artificial Sequence
  Description of Artificial Sequence: Synthetic oligonucleotide
  Antisense strand to SEQ ID NO: 166994
ucuuacguauuaagcaaac

SEQ ID NO: 166996 - RNA, 19 nt, Artificial Sequence
  Description of Artificial Sequence: Synthetic oligonucleotide
  Sense strand starting at position 2752 of SEQ ID NO: 2150
cccugaauggugcguugga

SEQ ID NO: 166997 - RNA, 19 nt, Artificial Sequence
  Description of Artificial Sequence: Synthetic oligonucleotide
  Antisense strand to SEQ ID NO: 166996
uccaacgcaccauucaggg

SEQ ID NO: 166998 - RNA, 19 nt, Artificial Sequence
  Description of Artificial Sequence: Synthetic oligonucleotide
  Sense strand starting at position 2786 of SEQ ID NO: 2150
caguuaagugguggcauuu

SEQ ID NO: 166999 - RNA, 19 nt, Artificial Sequence
  Description of Artificial Sequence: Synthetic oligonucleotide
  Antisense strand to SEQ ID NO: 166998
aaaugccaccacuuaacug

SEQ ID NO: 167000 - RNA, 19 nt, Artificial Sequence
  Description of Artificial Sequence: Synthetic oligonucleotide
  Sense strand starting at position 3240 of SEQ ID NO: 2150
ugcgcuuggccuggaguua

SEQ ID NO: 167001 - RNA, 19 nt, Artificial Sequence
  Description of Artificial Sequence: Synthetic oligonucleotide
  Antisense strand to SEQ ID NO: 167000
uaacuccaggccaagcgca

SEQ ID NO: 167002 - RNA, 19 nt, Artificial Sequence
  Description of Artificial Sequence: Synthetic oligonucleotide
  Sense strand starting at position 3241 of SEQ ID NO: 2150
gcgcuuggccuggaguuaa

SEQ ID NO: 167003 - RNA, 19 nt, Artificial Sequence
  Description of Artificial Sequence: Synthetic oligonucleotide
  Antisense strand to SEQ ID NO: 167002
uuaacuccaggccaagcgc

SEQ ID NO: 167004 - RNA, 19 nt, Artificial Sequence
  Description of Artificial Sequence: Synthetic oligonucleotide
  Sense strand starting at position 3334 of SEQ ID NO: 2150
auacguacuaggugaguga

SEQ ID NO: 167005 - RNA, 19 nt, Artificial Sequence
  Description of Artificial Sequence: Synthetic oligonucleotide
  Antisense strand to SEQ ID NO: 167004
ucacucaccuaguacguau

SEQ ID NO: 167006 - RNA, 19 nt, Artificial Sequence
  Description of Artificial Sequence: Synthetic oligonucleotide
  Sense strand starting at position 3456 of SEQ ID NO: 2150
ccaauaauaccagguguua

SEQ ID NO: 167007 - RNA, 19 nt, Artificial Sequence
  Description of Artificial Sequence: Synthetic oligonucleotide
  Antisense strand to SEQ ID NO: 167006
uaacaccugguauuauugg

SEQ ID NO: 167008 - RNA, 19 nt, Artificial Sequence
  Description of Artificial Sequence: Synthetic oligonucleotide
  Sense strand starting at position 3467 of SEQ ID NO: 2150
agguguuacuggcagacca

SEQ ID NO: 167009 - RNA, 19 nt, Artificial Sequence
  Description of Artificial Sequence: Synthetic oligonucleotide
  Antisense strand to SEQ ID NO: 167008
uggucugccaguaacaccu

SEQ ID NO: 167010 - RNA, 19 nt, Artificial Sequence
  Description of Artificial Sequence: Synthetic oligonucleotide
  Sense strand starting at position 3507 of SEQ ID NO: 2150
caguuuggcuugccucaga

SEQ ID NO: 167011 - RNA, 19 nt, Artificial Sequence
  Description of Artificial Sequence: Synthetic oligonucleotide
  Antisense strand to SEQ ID NO: 167010
ucugaggcaagccaaacug

SEQ ID NO: 167012 - RNA, 19 nt, Artificial Sequence
  Description of Artificial Sequence: Synthetic oligonucleotide
  Sense strand starting at position 3549 of SEQ ID NO: 2150
cucaguggauguuacgaaa

SEQ ID NO: 167013 - RNA, 19 nt, Artificial Sequence
  Description of Artificial Sequence: Synthetic oligonucleotide
  Antisense strand to SEQ ID NO: 167012
uuucguaacauccacugag

SEQ ID NO: 167014 - RNA, 19 nt, Artificial Sequence
  Description of Artificial Sequence: Synthetic oligonucleotide
  Sense strand starting at position 3603 of SEQ ID NO: 2150
ggcugaagcugugcucaca

SEQ ID NO: 167015 - RNA, 19 nt, Artificial Sequence
  Description of Artificial Sequence: Synthetic oligonucleotide
  Antisense strand to SEQ ID NO: 167014
ugugagcacagcuucagcc

SEQ ID NO: 167016 - RNA, 19 nt, Artificial Sequence
  Description of Artificial Sequence: Synthetic oligonucleotide
  Sense strand starting at position 3761 of SEQ ID NO: 2150
ccagguguguuccaggacu

SEQ ID NO: 167017 - RNA, 19 nt, Artificial Sequence
  Description of Artificial Sequence: Synthetic oligonucleotide
  Antisense strand to SEQ ID NO: 167016
aguccuggaacacaccugg

SEQ ID NO: 167018 - RNA, 19 nt, Artificial Sequence
  Description of Artificial Sequence: Synthetic oligonucleotide
  Sense strand starting at position 3955 of SEQ ID NO: 2150
gccuacuguucugaucaaa

SEQ ID NO: 167019 - RNA, 19 nt, Artificial Sequence
  Description of Artificial Sequence: Synthetic oligonucleotide
  Antisense strand to SEQ ID NO: 167018
uuugaucagaacaguaggc

SEQ ID NO: 167020 - RNA, 19 nt, Artificial Sequence
  Description of Artificial Sequence: Synthetic oligonucleotide
  Sense strand starting at position 3966 of SEQ ID NO: 2150
ugaucaaagccuuguguca

SEQ ID NO: 167021 - RNA, 19 nt, Artificial Sequence
  Description of Artificial Sequence: Synthetic oligonucleotide
  Antisense strand to SEQ ID NO: 167020
ugacacaaggcuuugauca

SEQ ID NO: 167022 - RNA, 19 nt, Artificial Sequence
  Description of Artificial Sequence: Synthetic oligonucleotide
  Sense strand starting at position 2 of SEQ ID NO: 2152
uaauguguucugcgaaucu

SEQ ID NO: 167023 - RNA, 19 nt, Artificial Sequence
  Description of Artificial Sequence: Synthetic oligonucleotide
  Antisense strand to SEQ ID NO: 167022
agauucgcagaacacauua

SEQ ID NO: 167024 - RNA, 19 nt, Artificial Sequence
  Description of Artificial Sequence: Synthetic oligonucleotide
  Sense strand starting at position 77 of SEQ ID NO: 2152
cuuuaugucuaaccucagu

SEQ ID NO: 167025 - RNA, 19 nt, Artificial Sequence
  Description of Artificial Sequence: Synthetic oligonucleotide
  Antisense strand to SEQ ID NO: 167024
acugagguuagacauaaag

SEQ ID NO: 167026 - RNA, 19 nt, Artificial Sequence
  Description of Artificial Sequence: Synthetic oligonucleotide
  Sense strand starting at position 273 of SEQ ID NO: 2152
acggguaucuaccucuaua

SEQ ID NO: 167027 - RNA, 19 nt, Artificial Sequence
  Description of Artificial Sequence: Synthetic oligonucleotide
  Antisense strand to SEQ ID NO: 167026
uauagagguagauacccgu

SEQ ID NO: 167028 - RNA, 19 nt, Artificial Sequence
  Description of Artificial Sequence: Synthetic oligonucleotide
  Sense strand starting at position 276 of SEQ ID NO: 2152
gguaucuaccucuauauac

SEQ ID NO: 167029 - RNA, 19 nt, Artificial Sequence
  Description of Artificial Sequence: Synthetic oligonucleotide
  Antisense strand to SEQ ID NO: 167028
guauauagagguagauacc

SEQ ID NO: 167030 - RNA, 19 nt, Artificial Sequence
  Description of Artificial Sequence: Synthetic oligonucleotide
  Sense strand starting at position 615 of SEQ ID NO: 2152
gcauuaucuccaggccucu

SEQ ID NO: 167031 - RNA, 19 nt, Artificial Sequence
  Description of Artificial Sequence: Synthetic oligonucleotide
  Antisense strand to SEQ ID NO: 167030
agaggccuggagauaaugc

SEQ ID NO: 167032 - RNA, 19 nt, Artificial Sequence
  Description of Artificial Sequence: Synthetic oligonucleotide
  Sense strand starting at position 695 of SEQ ID NO: 2152
ccuccagauaucgggacaa

SEQ ID NO: 167033 - RNA, 19 nt, Artificial Sequence
  Description of Artificial Sequence: Synthetic oligonucleotide
  Antisense strand to SEQ ID NO: 167032
uugucccgauaucuggagg

SEQ ID NO: 167034 - RNA, 19 nt, Artificial Sequence
  Description of Artificial Sequence: Synthetic oligonucleotide
  Sense strand starting at position 1254 of SEQ ID NO: 2152
ccaaguuucucccggagag

SEQ ID NO: 167035 - RNA, 19 nt, Artificial Sequence
  Description of Artificial Sequence: Synthetic oligonucleotide
  Antisense strand to SEQ ID NO: 167034
cucuccgggagaaacuugg

SEQ ID NO: 167036 - RNA, 19 nt, Artificial Sequence
  Description of Artificial Sequence: Synthetic oligonucleotide
  Sense strand starting at position 1255 of SEQ ID NO: 2152
caaguuucucccggagaga

SEQ ID NO: 167037 - RNA, 19 nt, Artificial Sequence
  Description of Artificial Sequence: Synthetic oligonucleotide
  Antisense strand to SEQ ID NO: 167036
ucucuccgggagaaacuug

SEQ ID NO: 167038 - RNA, 19 nt, Artificial Sequence
  Description of Artificial Sequence: Synthetic oligonucleotide
  Sense strand starting at position 1256 of SEQ ID NO: 2152
aaguuucucccggagagac

SEQ ID NO: 167039 - RNA, 19 nt, Artificial Sequence
  Description of Artificial Sequence: Synthetic oligonucleotide
  Antisense strand to SEQ ID NO: 167038
gucucuccgggagaaacuu

SEQ ID NO: 167040 - RNA, 19 nt, Artificial Sequence
  Description of Artificial Sequence: Synthetic oligonucleotide
  Sense strand starting at position 1287 of SEQ ID NO: 2152
cgcguucaccgcgagaaca

SEQ ID NO: 167041 - RNA, 19 nt, Artificial Sequence
  Description of Artificial Sequence: Synthetic oligonucleotide
  Antisense strand to SEQ ID NO: 167040
uguucucgcggugaacgcg

SEQ ID NO: 167042 - RNA, 19 nt, Artificial Sequence
  Description of Artificial Sequence: Synthetic oligonucleotide
  Sense strand starting at position 1518 of SEQ ID NO: 2152
ccgcauuccgcaguaguaa

SEQ ID NO: 167043 - RNA, 19 nt, Artificial Sequence
  Description of Artificial Sequence: Synthetic oligonucleotide
  Antisense strand to SEQ ID NO: 167042
uuacuacugcggaaugcgg

SEQ ID NO: 167044 - RNA, 19 nt, Artificial Sequence
  Description of Artificial Sequence: Synthetic oligonucleotide
  Sense strand starting at position 1519 of SEQ ID NO: 2152
cgcauuccgcaguaguaau

SEQ ID NO: 167045 - RNA, 19 nt, Artificial Sequence
  Description of Artificial Sequence: Synthetic oligonucleotide
  Antisense strand to SEQ ID NO: 167044
auuacuacugcggaaugcg

SEQ ID NO: 167046 - RNA, 19 nt, Artificial Sequence
  Description of Artificial Sequence: Synthetic oligonucleotide
  Sense strand starting at position 1656 of SEQ ID NO: 2152
gggaguucucucuagguuc

SEQ ID NO: 167047 - RNA, 19 nt, Artificial Sequence
  Description of Artificial Sequence: Synthetic oligonucleotide
  Antisense strand to SEQ ID NO: 167046
gaaccuagagagaacuccc

SEQ ID NO: 167048 - RNA, 19 nt, Artificial Sequence
  Description of Artificial Sequence: Synthetic oligonucleotide
  Sense strand starting at position 2290 of SEQ ID NO: 2152
cuccguaaaggagguguaa

SEQ ID NO: 167049 - RNA, 19 nt, Artificial Sequence
  Description of Artificial Sequence: Synthetic oligonucleotide
  Antisense strand to SEQ ID NO: 167048
uuacaccuccuuuacggag

SEQ ID NO: 167050 - RNA, 19 nt, Artificial Sequence
  Description of Artificial Sequence: Synthetic oligonucleotide
  Sense strand starting at position 2292 of SEQ ID NO: 2152
ccguaaaggagguguaaug

SEQ ID NO: 167051 - RNA, 19 nt, Artificial Sequence
  Description of Artificial Sequence: Synthetic oligonucleotide
  Antisense strand to SEQ ID NO: 167050
cauuacaccuccuuuacgg

SEQ ID NO: 167052 - RNA, 19 nt, Artificial Sequence
  Description of Artificial Sequence: Synthetic oligonucleotide
  Sense strand starting at position 2340 of SEQ ID NO: 2152
auagaaagaucguguuugu

SEQ ID NO: 167053 - RNA, 19 nt, Artificial Sequence
  Description of Artificial Sequence: Synthetic oligonucleotide
  Antisense strand to SEQ ID NO: 167052
acaaacacgaucuuucuau

SEQ ID NO: 167054 - RNA, 19 nt, Artificial Sequence
  Description of Artificial Sequence: Synthetic oligonucleotide
  Sense strand starting at position 2343 of SEQ ID NO: 2152
gaaagaucguguuugugaa

SEQ ID NO: 167055 - RNA, 19 nt, Artificial Sequence
  Description of Artificial Sequence: Synthetic oligonucleotide
  Antisense strand to SEQ ID NO: 167054
uucacaaacacgaucuuuc

SEQ ID NO: 167056 - RNA, 19 nt, Artificial Sequence
  Description of Artificial Sequence: Synthetic oligonucleotide
  Sense strand starting at position 2344 of SEQ ID NO: 2152
aaagaucguguuugugaaa

SEQ ID NO: 167057 - RNA, 19 nt, Artificial Sequence
  Description of Artificial Sequence: Synthetic oligonucleotide
  Antisense strand to SEQ ID NO: 167056
uuucacaaacacgaucuuu

SEQ ID NO: 167058 - RNA, 19 nt, Artificial Sequence
  Description of Artificial Sequence: Synthetic oligonucleotide
  Sense strand starting at position 2720 of SEQ ID NO: 2152
cuccuugcuucggugaaac

SEQ ID NO: 167059 - RNA, 19 nt, Artificial Sequence
  Description of Artificial Sequence: Synthetic oligonucleotide
  Antisense strand to SEQ ID NO: 167058
guuucaccgaagcaaggag

SEQ ID NO: 167060 - RNA, 19 nt, Artificial Sequence
  Description of Artificial Sequence: Synthetic oligonucleotide
  Sense strand starting at position 2754 of SEQ ID NO: 2152
guaucuuucugcuaagcau

SEQ ID NO: 167061 - RNA, 19 nt, Artificial Sequence
  Description of Artificial Sequence: Synthetic oligonucleotide
  Antisense strand to SEQ ID NO: 167060
augcuuagcagaaagauac

SEQ ID NO: 167062 - RNA, 19 nt, Artificial Sequence
  Description of Artificial Sequence: Synthetic oligonucleotide
  Sense strand starting at position 2832 of SEQ ID NO: 2152
cucagaaacuguggaguga

SEQ ID NO: 167063 - RNA, 19 nt, Artificial Sequence
  Description of Artificial Sequence: Synthetic oligonucleotide
  Antisense strand to SEQ ID NO: 167062
ucacuccacaguuucugag

SEQ ID NO: 167064 - RNA, 19 nt, Artificial Sequence
  Description of Artificial Sequence: Synthetic oligonucleotide
  Sense strand starting at position 2898 of SEQ ID NO: 2152
gcuggaagucugugagcca

SEQ ID NO: 167065 - RNA, 19 nt, Artificial Sequence
  Description of Artificial Sequence: Synthetic oligonucleotide
  Antisense strand to SEQ ID NO: 167064
uggcucacagacuuccagc

SEQ ID NO: 167066 - RNA, 19 nt, Artificial Sequence
  Description of Artificial Sequence: Synthetic oligonucleotide
  Sense strand starting at position 2899 of SEQ ID NO: 2152
cuggaagucugugagccau

SEQ ID NO: 167067 - RNA, 19 nt, Artificial Sequence
  Description of Artificial Sequence: Synthetic oligonucleotide
  Antisense strand to SEQ ID NO: 167066
auggcucacagacuuccag

SEQ ID NO: 167068 - RNA, 19 nt, Artificial Sequence
  Description of Artificial Sequence: Synthetic oligonucleotide
  Sense strand starting at position 2960 of SEQ ID NO: 2152
ucgggagucucuugaucua

SEQ ID NO: 167069 - RNA, 19 nt, Artificial Sequence
  Description of Artificial Sequence: Synthetic oligonucleotide
  Antisense strand to SEQ ID NO: 167068
uagaucaagagacucccga

SEQ ID NO: 167070 - RNA, 19 nt, Artificial Sequence
  Description of Artificial Sequence: Synthetic oligonucleotide
  Sense strand starting at position 2963 of SEQ ID NO: 2152
ggagucucuugaucuacac

SEQ ID NO: 167071 - RNA, 19 nt, Artificial Sequence
  Description of Artificial Sequence: Synthetic oligonucleotide
  Antisense strand to SEQ ID NO: 167070
guguagaucaagagacucc

SEQ ID NO: 167072 - RNA, 19 nt, Artificial Sequence
  Description of Artificial Sequence: Synthetic oligonucleotide
  Sense strand starting at position 3100 of SEQ ID NO: 2152
gguguaugcccgaguggcu

SEQ ID NO: 167073 - RNA, 19 nt, Artificial Sequence
  Description of Artificial Sequence: Synthetic oligonucleotide
  Antisense strand to SEQ ID NO: 167072
agccacucgggcauacacc

SEQ ID NO: 167074 - RNA, 19 nt, Artificial Sequence
  Description of Artificial Sequence: Synthetic oligonucleotide
  Sense strand starting at position 3125 of SEQ ID NO: 2152
ggagaaaggucuugccucu

SEQ ID NO: 167075 - RNA, 19 nt, Artificial Sequence
  Description of Artificial Sequence: Synthetic oligonucleotide
  Antisense strand to SEQ ID NO: 167074
agaggcaagaccuuucucc

SEQ ID NO: 167076 - RNA, 19 nt, Artificial Sequence
  Description of Artificial Sequence: Synthetic oligonucleotide
  Sense strand starting at position 3132 of SEQ ID NO: 2152
ggucuugccucuuaauuaa

SEQ ID NO: 167077 - RNA, 19 nt, Artificial Sequence
  Description of Artificial Sequence: Synthetic oligonucleotide
  Antisense strand to SEQ ID NO: 167076
uuaauuaagaggcaagacc

SEQ ID NO: 167078 - RNA, 19 nt, Artificial Sequence
  Description of Artificial Sequence: Synthetic oligonucleotide
  Sense strand starting at position 3195 of SEQ ID NO: 2152
ggaggagauucggagccuu

SEQ ID NO: 167079 - RNA, 19 nt, Artificial Sequence
  Description of Artificial Sequence: Synthetic oligonucleotide
  Antisense strand to SEQ ID NO: 167078
aaggcuccgaaucuccucc

SEQ ID NO: 167080 - RNA, 19 nt, Artificial Sequence
  Description of Artificial Sequence: Synthetic oligonucleotide
  Sense strand starting at position 3408 of SEQ ID NO: 2152
ucgcgugggcauaaguuua

SEQ ID NO: 167081 - RNA, 19 nt, Artificial Sequence
  Description of Artificial Sequence: Synthetic oligonucleotide
  Antisense strand to SEQ ID NO: 167080
uaaacuuaugcccacgcga

SEQ ID NO: 167082 - RNA, 19 nt, Artificial Sequence
  Description of Artificial Sequence: Synthetic oligonucleotide
  Sense strand starting at position 3435 of SEQ ID NO: 2152
gggagaggcaauuguugaa

SEQ ID NO: 167083 - RNA, 19 nt, Artificial Sequence
  Description of Artificial Sequence: Synthetic oligonucleotide
  Antisense strand to SEQ ID NO: 167082
uucaacaauugccucuccc

SEQ ID NO: 167084 - RNA, 19 nt, Artificial Sequence
  Description of Artificial Sequence: Synthetic oligonucleotide
  Sense strand starting at position 3439 of SEQ ID NO: 2152
gaggcaauuguugaagguu

SEQ ID NO: 167085 - RNA, 19 nt, Artificial Sequence
  Description of Artificial Sequence: Synthetic oligonucleotide
  Antisense strand to SEQ ID NO: 167084
aaccuucaacaauugccuc

SEQ ID NO: 167086 - RNA, 19 nt, Artificial Sequence
  Description of Artificial Sequence: Synthetic oligonucleotide
  Sense strand starting at position 3578 of SEQ ID NO: 2152
uuugguugcuguuccaaga

SEQ ID NO: 167087 - RNA, 19 nt, Artificial Sequence
  Description of Artificial Sequence: Synthetic oligonucleotide
  Antisense strand to SEQ ID NO: 167086
ucuuggaacagcaaccaaa

SEQ ID NO: 167088 - RNA, 19 nt, Artificial Sequence
  Description of Artificial Sequence: Synthetic oligonucleotide
  Sense strand starting at position 3712 of SEQ ID NO: 2152
agaagagccucuggcuaaa

SEQ ID NO: 167089 - RNA, 19 nt, Artificial Sequence
  Description of Artificial Sequence: Synthetic oligonucleotide
  Antisense strand to SEQ ID NO: 167088
uuuagccagaggcucuucu

SEQ ID NO: 167090 - RNA, 19 nt, Artificial Sequence
  Description of Artificial Sequence: Synthetic oligonucleotide
  Sense strand starting at position 3751 of SEQ ID NO: 2152
aguggcagguuuguguuua

SEQ ID NO: 167091 - RNA, 19 nt, Artificial Sequence
  Description of Artificial Sequence: Synthetic oligonucleotide
  Antisense strand to SEQ ID NO: 167090
uaaacacaaaccugccacu

SEQ ID NO: 167092 - RNA, 19 nt, Artificial Sequence
  Description of Artificial Sequence: Synthetic oligonucleotide
  Sense strand starting at position 3755 of SEQ ID NO: 2152
gcagguuuguguuuaugua

SEQ ID NO: 167093 - RNA, 19 nt, Artificial Sequence
  Description of Artificial Sequence: Synthetic oligonucleotide
  Antisense strand to SEQ ID NO: 167092
uacauaaacacaaaccugc

SEQ ID NO: 167094 - RNA, 19 nt, Artificial Sequence
  Description of Artificial Sequence: Synthetic oligonucleotide
  Sense strand starting at position 3756 of SEQ ID NO: 2152
cagguuuguguuuauguaa

SEQ ID NO: 167095 - RNA, 19 nt, Artificial Sequence
  Description of Artificial Sequence: Synthetic oligonucleotide
  Antisense strand to SEQ ID NO: 167094
uuacauaaacacaaaccug

SEQ ID NO: 167096 - RNA, 19 nt, Artificial Sequence
  Description of Artificial Sequence: Synthetic oligonucleotide
  Sense strand starting at position 3791 of SEQ ID NO: 2152
ugcucuuugcccguguuua

SEQ ID NO: 167097 - RNA, 19 nt, Artificial Sequence
  Description of Artificial Sequence: Synthetic oligonucleotide
  Antisense strand to SEQ ID NO: 167096
uaaacacgggcaaagagca

SEQ ID NO: 167098 - RNA, 19 nt, Artificial Sequence
  Description of Artificial Sequence: Synthetic oligonucleotide
  Sense strand starting at position 3792 of SEQ ID NO: 2152
gcucuuugcccguguuuau

SEQ ID NO: 167099 - RNA, 19 nt, Artificial Sequence
  Description of Artificial Sequence: Synthetic oligonucleotide
  Antisense strand to SEQ ID NO: 167098
auaaacacgggcaaagagc

SEQ ID NO: 167100 - RNA, 19 nt, Artificial Sequence
  Description of Artificial Sequence: Synthetic oligonucleotide
  Sense strand starting at position 3940 of SEQ ID NO: 2152
accugugaugcagggaaau

SEQ ID NO: 167101 - RNA, 19 nt, Artificial Sequence
  Description of Artificial Sequence: Synthetic oligonucleotide
  Antisense strand to SEQ ID NO: 167100
auuucccugcaucacaggu

SEQ ID NO: 167102 - RNA, 19 nt, Artificial Sequence
  Description of Artificial Sequence: Synthetic oligonucleotide
  Sense strand starting at position 9 of SEQ ID NO: 2153
ccauccuuccagugagaag

SEQ ID NO: 167103 - RNA, 19 nt, Artificial Sequence
  Description of Artificial Sequence: Synthetic oligonucleotide
  Antisense strand to SEQ ID NO: 167102
cuucucacuggaaggaugg

SEQ ID NO: 167104 - RNA, 19 nt, Artificial Sequence
  Description of Artificial Sequence: Synthetic oligonucleotide
  Sense strand starting at position 209 of SEQ ID NO: 2153
ugcagcuuggcuuauggaa

SEQ ID NO: 167105 - RNA, 19 nt, Artificial Sequence
  Description of Artificial Sequence: Synthetic oligonucleotide
  Antisense strand to SEQ ID NO: 167104
uuccauaagccaagcugca

SEQ ID NO: 167106 - RNA, 19 nt, Artificial Sequence
  Description of Artificial Sequence: Synthetic oligonucleotide
  Sense strand starting at position 270 of SEQ ID NO: 2153
uggagaacugcuuauuagu

SEQ ID NO: 167107 - RNA, 19 nt, Artificial Sequence
  Description of Artificial Sequence: Synthetic oligonucleotide
  Antisense strand to SEQ ID NO: 167106
acuaauaagcaguucucca

SEQ ID NO: 167108 - RNA, 19 nt, Artificial Sequence
  Description of Artificial Sequence: Synthetic oligonucleotide
  Sense strand starting at position 272 of SEQ ID NO: 2153
gagaacugcuuauuagugu

SEQ ID NO: 167109 - RNA, 19 nt, Artificial Sequence
  Description of Artificial Sequence: Synthetic oligonucleotide
  Antisense strand to SEQ ID NO: 167108
acacuaauaagcaguucuc

SEQ ID NO: 167110 - RNA, 19 nt, Artificial Sequence
  Description of Artificial Sequence: Synthetic oligonucleotide
  Sense strand starting at position 308 of SEQ ID NO: 2153
aggagaauagcaggccuau

SEQ ID NO: 167111 - RNA, 19 nt, Artificial Sequence
  Description of Artificial Sequence: Synthetic oligonucleotide
  Antisense strand to SEQ ID NO: 167110
auaggccugcuauucuccu

SEQ ID NO: 167112 - RNA, 19 nt, Artificial Sequence
  Description of Artificial Sequence: Synthetic oligonucleotide
  Sense strand starting at position 320 of SEQ ID NO: 2153
ggccuauggcuucagaguu

SEQ ID NO: 167113 - RNA, 19 nt, Artificial Sequence
  Description of Artificial Sequence: Synthetic oligonucleotide
  Antisense strand to SEQ ID NO: 167112
aacucugaagccauaggcc

SEQ ID NO: 167114 - RNA, 19 nt, Artificial Sequence
  Description of Artificial Sequence: Synthetic oligonucleotide
  Sense strand starting at position 396 of SEQ ID NO: 2153
caagucagggucugauuaa

SEQ ID NO: 167115 - RNA, 19 nt, Artificial Sequence
  Description of Artificial Sequence: Synthetic oligonucleotide
  Antisense strand to SEQ ID NO: 167114
uuaaucagacccugacuug

SEQ ID NO: 167116 - RNA, 19 nt, Artificial Sequence
  Description of Artificial Sequence: Synthetic oligonucleotide
  Sense strand starting at position 397 of SEQ ID NO: 2153
aagucagggucugauuaac

SEQ ID NO: 167117 - RNA, 19 nt, Artificial Sequence
  Description of Artificial Sequence: Synthetic oligonucleotide
  Antisense strand to SEQ ID NO: 167116
guuaaucagacccugacuu

SEQ ID NO: 167118 - RNA, 19 nt, Artificial Sequence
  Description of Artificial Sequence: Synthetic oligonucleotide
  Sense strand starting at position 417 of SEQ ID NO: 2153
gagacuuccugugcaauuc

SEQ ID NO: 167119 - RNA, 19 nt, Artificial Sequence
  Description of Artificial Sequence: Synthetic oligonucleotide
  Antisense strand to SEQ ID NO: 167118
gaauugcacaggaagucuc

SEQ ID NO: 167120 - RNA, 19 nt, Artificial Sequence
  Description of Artificial Sequence: Synthetic oligonucleotide
  Sense strand starting at position 457 of SEQ ID NO: 2153
agaggagucucagcaaaug

SEQ ID NO: 167121 - RNA, 19 nt, Artificial Sequence
  Description of Artificial Sequence: Synthetic oligonucleotide
  Antisense strand to SEQ ID NO: 167120
cauuugcugagacuccucu

SEQ ID NO: 167122 - RNA, 19 nt, Artificial Sequence
  Description of Artificial Sequence: Synthetic oligonucleotide
  Sense strand starting at position 509 of SEQ ID NO: 2153
acuagaaaucuguaagcua

SEQ ID NO: 167123 - RNA, 19 nt, Artificial Sequence
  Description of Artificial Sequence: Synthetic oligonucleotide
  Antisense strand to SEQ ID NO: 167122
uagcuuacagauuucuagu

SEQ ID NO: 167124 - RNA, 19 nt, Artificial Sequence
  Description of Artificial Sequence: Synthetic oligonucleotide
  Sense strand starting at position 516 of SEQ ID NO: 2153
aucuguaagcuagagacuu

SEQ ID NO: 167125 - RNA, 19 nt, Artificial Sequence
  Description of Artificial Sequence: Synthetic oligonucleotide
  Antisense strand to SEQ ID NO: 167124
aagucucuagcuuacagau

SEQ ID NO: 167126 - RNA, 19 nt, Artificial Sequence
  Description of Artificial Sequence: Synthetic oligonucleotide
  Sense strand starting at position 635 of SEQ ID NO: 2153
uagcauugugcugguugga

SEQ ID NO: 167127 - RNA, 19 nt, Artificial Sequence
  Description of Artificial Sequence: Synthetic oligonucleotide
  Antisense strand to SEQ ID NO: 167126
uccaaccagcacaaugcua

SEQ ID NO: 167128 - RNA, 19 nt, Artificial Sequence
  Description of Artificial Sequence: Synthetic oligonucleotide
  Sense strand starting at position 638 of SEQ ID NO: 2153
cauugugcugguuggagaa

SEQ ID NO: 167129 - RNA, 19 nt, Artificial Sequence
  Description of Artificial Sequence: Synthetic oligonucleotide
  Antisense strand to SEQ ID NO: 167128
uucuccaaccagcacaaug

SEQ ID NO: 167130 - RNA, 19 nt, Artificial Sequence
  Description of Artificial Sequence: Synthetic oligonucleotide
  Sense strand starting at position 1019 of SEQ ID NO: 2153
ccugucauuccagauuaug

SEQ ID NO: 167131 - RNA, 19 nt, Artificial Sequence
  Description of Artificial Sequence: Synthetic oligonucleotide
  Antisense strand to SEQ ID NO: 167130
cauaaucuggaaugacagg

SEQ ID NO: 167132 - RNA, 19 nt, Artificial Sequence
  Description of Artificial Sequence: Synthetic oligonucleotide
  Sense strand starting at position 1028 of SEQ ID NO: 2153
ccagauuauggguaucucu

SEQ ID NO: 167133 - RNA, 19 nt, Artificial Sequence
  Description of Artificial Sequence: Synthetic oligonucleotide
  Antisense strand to SEQ ID NO: 167132
agagauacccauaaucugg

SEQ ID NO: 167134 - RNA, 19 nt, Artificial Sequence
  Description of Artificial Sequence: Synthetic oligonucleotide
  Sense strand starting at position 1035 of SEQ ID NO: 2153
auggguaucucuguggagu

SEQ ID NO: 167135 - RNA, 19 nt, Artificial Sequence
  Description of Artificial Sequence: Synthetic oligonucleotide
  Antisense strand to SEQ ID NO: 167134
acuccacagagauacccau

SEQ ID NO: 167136 - RNA, 19 nt, Artificial Sequence
  Description of Artificial Sequence: Synthetic oligonucleotide
  Sense strand starting at position 1036 of SEQ ID NO: 2153
uggguaucucuguggaguc

SEQ ID NO: 167137 - RNA, 19 nt, Artificial Sequence
  Description of Artificial Sequence: Synthetic oligonucleotide
  Antisense strand to SEQ ID NO: 167136
gacuccacagagauaccca

SEQ ID NO: 167138 - RNA, 19 nt, Artificial Sequence
  Description of Artificial Sequence: Synthetic oligonucleotide
  Sense strand starting at position 1078 of SEQ ID NO: 2153
caagaugugcugcacacau

SEQ ID NO: 167139 - RNA, 19 nt, Artificial Sequence
  Description of Artificial Sequence: Synthetic oligonucleotide
  Antisense strand to SEQ ID NO: 167138
augugugcagcacaucuug

SEQ ID NO: 167140 - RNA, 19 nt, Artificial Sequence
  Description of Artificial Sequence: Synthetic oligonucleotide
  Sense strand starting at position 1139 of SEQ ID NO: 2153
gcauuucugcccugaacag

SEQ ID NO: 167141 - RNA, 19 nt, Artificial Sequence
  Description of Artificial Sequence: Synthetic oligonucleotide
  Antisense strand to SEQ ID NO: 167140
cuguucagggcagaaaugc

SEQ ID NO: 167142 - RNA, 19 nt, Artificial Sequence
  Description of Artificial Sequence: Synthetic oligonucleotide
  Sense strand starting at position 1170 of SEQ ID NO: 2153
gcuuccaucccagauggaa

SEQ ID NO: 167143 - RNA, 19 nt, Artificial Sequence
  Description of Artificial Sequence: Synthetic oligonucleotide
  Antisense strand to SEQ ID NO: 167142
uuccaucugggauggaagc

SEQ ID NO: 167144 - RNA, 19 nt, Artificial Sequence
  Description of Artificial Sequence: Synthetic oligonucleotide
  Sense strand starting at position 1306 of SEQ ID NO: 2153
ggaagaggcucccugauag

SEQ ID NO: 167145 - RNA, 19 nt, Artificial Sequence
  Description of Artificial Sequence: Synthetic oligonucleotide
  Antisense strand to SEQ ID NO: 167144
cuaucagggagccucuucc

SEQ ID NO: 167146 - RNA, 19 nt, Artificial Sequence
  Description of Artificial Sequence: Synthetic oligonucleotide
  Sense strand starting at position 1310 of SEQ ID NO: 2153
gaggcucccugauagggaa

SEQ ID NO: 167147 - RNA, 19 nt, Artificial Sequence
  Description of Artificial Sequence: Synthetic oligonucleotide
  Antisense strand to SEQ ID NO: 167146
uucccuaucagggagccuc

SEQ ID NO: 167148 - RNA, 19 nt, Artificial Sequence
  Description of Artificial Sequence: Synthetic oligonucleotide
  Sense strand starting at position 1397 of SEQ ID NO: 2153
auaacuuguuaggccuaau

SEQ ID NO: 167149 - RNA, 19 nt, Artificial Sequence
  Description of Artificial Sequence: Synthetic oligonucleotide
  Antisense strand to SEQ ID NO: 167148
auuaggccuaacaaguuau

SEQ ID NO: 167150 - RNA, 19 nt, Artificial Sequence
  Description of Artificial Sequence: Synthetic oligonucleotide
  Sense strand starting at position 1409 of SEQ ID NO: 2153
gccuaauguguucugcgaa

SEQ ID NO: 167151 - RNA, 19 nt, Artificial Sequence
  Description of Artificial Sequence: Synthetic oligonucleotide
  Antisense strand to SEQ ID NO: 167150
uucgcagaacacauuaggc

SEQ ID NO: 167152 - RNA, 19 nt, Artificial Sequence
  Description of Artificial Sequence: Synthetic oligonucleotide
  Sense strand starting at position 1412 of SEQ ID NO: 2153
uaauguguucugcgaaucu

SEQ ID NO: 167153 - RNA, 19 nt, Artificial Sequence
  Description of Artificial Sequence: Synthetic oligonucleotide
  Antisense strand to SEQ ID NO: 167152
agauucgcagaacacauua

SEQ ID NO: 167154 - RNA, 19 nt, Artificial Sequence
  Description of Artificial Sequence: Synthetic oligonucleotide
  Sense strand starting at position 1487 of SEQ ID NO: 2153
cuuuaugucuaaccucagu

SEQ ID NO: 167155 - RNA, 19 nt, Artificial Sequence
  Description of Artificial Sequence: Synthetic oligonucleotide
  Antisense strand to SEQ ID NO: 167154
acugagguuagacauaaag

SEQ ID NO: 167156 - RNA, 19 nt, Artificial Sequence
  Description of Artificial Sequence: Synthetic oligonucleotide
  Sense strand starting at position 1683 of SEQ ID NO: 2153
acggguaucuaccucuaua

SEQ ID NO: 167157 - RNA, 19 nt, Artificial Sequence
  Description of Artificial Sequence: Synthetic oligonucleotide
  Antisense strand to SEQ ID NO: 167156
uauagagguagauacccgu

SEQ ID NO: 167158 - RNA, 19 nt, Artificial Sequence
  Description of Artificial Sequence: Synthetic oligonucleotide
  Sense strand starting at position 1686 of SEQ ID NO: 2153
gguaucuaccucuauauac

SEQ ID NO: 167159 - RNA, 19 nt, Artificial Sequence
  Description of Artificial Sequence: Synthetic oligonucleotide
  Antisense strand to SEQ ID NO: 167158
guauauagagguagauacc

SEQ ID NO: 167160 - RNA, 19 nt, Artificial Sequence
  Description of Artificial Sequence: Synthetic oligonucleotide
  Sense strand starting at position 2025 of SEQ ID NO: 2153
gcauuaucuccaggccucu

SEQ ID NO: 167161 - RNA, 19 nt, Artificial Sequence
  Description of Artificial Sequence: Synthetic oligonucleotide
  Antisense strand to SEQ ID NO: 167160
agaggccuggagauaaugc

SEQ ID NO: 167162 - RNA, 19 nt, Artificial Sequence
  Description of Artificial Sequence: Synthetic oligonucleotide
  Sense strand starting at position 2105 of SEQ ID NO: 2153
ccuccagauaucgggacaa

SEQ ID NO: 167163 - RNA, 19 nt, Artificial Sequence
  Description of Artificial Sequence: Synthetic oligonucleotide
  Antisense strand to SEQ ID NO: 167162
uugucccgauaucuggagg

SEQ ID NO: 167164 - RNA, 19 nt, Artificial Sequence
  Description of Artificial Sequence: Synthetic oligonucleotide
  Sense strand starting at position 2665 of SEQ ID NO: 2153
caaguuucucccggagaga

SEQ ID NO: 167165 - RNA, 19 nt, Artificial Sequence
  Description of Artificial Sequence: Synthetic oligonucleotide
  Antisense strand to SEQ ID NO: 167164
ucucuccgggagaaacuug

SEQ ID NO: 167166 - RNA, 19 nt, Artificial Sequence
  Description of Artificial Sequence: Synthetic oligonucleotide
  Sense strand starting at position 2666 of SEQ ID NO: 2153
aaguuucucccggagagac

SEQ ID NO: 167167 - RNA, 19 nt, Artificial Sequence
  Description of Artificial Sequence: Synthetic oligonucleotide
  Antisense strand to SEQ ID NO: 167166
gucucuccgggagaaacuu

SEQ ID NO: 167168 - RNA, 19 nt, Artificial Sequence
  Description of Artificial Sequence: Synthetic oligonucleotide
  Sense strand starting at position 2928 of SEQ ID NO: 2153
ccgcauuccgcaguaguaa

SEQ ID NO: 167169 - RNA, 19 nt, Artificial Sequence
  Description of Artificial Sequence: Synthetic oligonucleotide
  Antisense strand to SEQ ID NO: 167168
uuacuacugcggaaugcgg

SEQ ID NO: 167170 - RNA, 19 nt, Artificial Sequence
  Description of Artificial Sequence: Synthetic oligonucleotide
  Sense strand starting at position 2929 of SEQ ID NO: 2153
cgcauuccgcaguaguaau

SEQ ID NO: 167171 - RNA, 19 nt, Artificial Sequence
  Description of Artificial Sequence: Synthetic oligonucleotide
  Antisense strand to SEQ ID NO: 167170
auuacuacugcggaaugcg

SEQ ID NO: 167172 - RNA, 19 nt, Artificial Sequence
  Description of Artificial Sequence: Synthetic oligonucleotide
  Sense strand starting at position 3066 of SEQ ID NO: 2153
gggaguucucucuagguuc

SEQ ID NO: 167173 - RNA, 19 nt, Artificial Sequence
  Description of Artificial Sequence: Synthetic oligonucleotide
  Antisense strand to SEQ ID NO: 167172
gaaccuagagagaacuccc

SEQ ID NO: 167174 - RNA, 19 nt, Artificial Sequence
  Description of Artificial Sequence: Synthetic oligonucleotide
  Sense strand starting at position 3700 of SEQ ID NO: 2153
cuccguaaaggagguguaa

SEQ ID NO: 167175 - RNA, 19 nt, Artificial Sequence
  Description of Artificial Sequence: Synthetic oligonucleotide
  Antisense strand to SEQ ID NO: 167174
uuacaccuccuuuacggag

SEQ ID NO: 167176 - RNA, 19 nt, Artificial Sequence
  Description of Artificial Sequence: Synthetic oligonucleotide
  Sense strand starting at position 3702 of SEQ ID NO: 2153
ccguaaaggagguguaaug

SEQ ID NO: 167177 - RNA, 19 nt, Artificial Sequence
  Description of Artificial Sequence: Synthetic oligonucleotide
  Antisense strand to SEQ ID NO: 167176
cauuacaccuccuuuacgg

SEQ ID NO: 167178 - RNA, 19 nt, Artificial Sequence
  Description of Artificial Sequence: Synthetic oligonucleotide
  Sense strand starting at position 3753 of SEQ ID NO: 2153
gaaagaucguguuugugaa

SEQ ID NO: 167179 - RNA, 19 nt, Artificial Sequence
  Description of Artificial Sequence: Synthetic oligonucleotide
  Antisense strand to SEQ ID NO: 167178
uucacaaacacgaucuuuc

SEQ ID NO: 167180 - RNA, 19 nt, Artificial Sequence
  Description of Artificial Sequence: Synthetic oligonucleotide
  Sense strand starting at position 3754 of SEQ ID NO: 2153
aaagaucguguuugugaaa

SEQ ID NO: 167181 - RNA, 19 nt, Artificial Sequence
  Description of Artificial Sequence: Synthetic oligonucleotide
  Antisense strand to SEQ ID NO: 167180
uuucacaaacacgaucuuu

SEQ ID NO: 167182 - RNA, 19 nt, Artificial Sequence
  Description of Artificial Sequence: Synthetic oligonucleotide
  Sense strand starting at position 3670 of SEQ ID NO: 2154
cagugagauccuugcagac

SEQ ID NO: 167183 - RNA, 19 nt, Artificial Sequence
  Description of Artificial Sequence: Synthetic oligonucleotide
  Antisense strand to SEQ ID NO: 167182
gucugcaaggaucucacug

SEQ ID NO: 167184 - RNA, 19 nt, Artificial Sequence
  Description of Artificial Sequence: Synthetic oligonucleotide
  Sense strand starting at position 3636 of SEQ ID NO: 2154
gguaaucucuccuuagagg

SEQ ID NO: 167185 - RNA, 19 nt, Artificial Sequence
  Description of Artificial Sequence: Synthetic oligonucleotide
  Antisense strand to SEQ ID NO: 167184
ccucuaaggagagauuacc

SEQ ID NO: 167186 - RNA, 19 nt, Artificial Sequence
  Description of Artificial Sequence: Synthetic oligonucleotide
  Sense strand starting at position 3338 of SEQ ID NO: 2154
cagcuauuucccgaguagc

SEQ ID NO: 167187 - RNA, 19 nt, Artificial Sequence
  Description of Artificial Sequence: Synthetic oligonucleotide
  Antisense strand to SEQ ID NO: 167186
gcuacucgggaaauagcug

SEQ ID NO: 167188 - RNA, 19 nt, Artificial Sequence
  Description of Artificial Sequence: Synthetic oligonucleotide
  Sense strand starting at position 3337 of SEQ ID NO: 2154
ccagcuauuucccgaguag

SEQ ID NO: 167189 - RNA, 19 nt, Artificial Sequence
  Description of Artificial Sequence: Synthetic oligonucleotide
  Antisense strand to SEQ ID NO: 167188
cuacucgggaaauagcugg

SEQ ID NO: 167190 - RNA, 19 nt, Artificial Sequence
  Description of Artificial Sequence: Synthetic oligonucleotide
  Sense strand starting at position 3336 of SEQ ID NO: 2154
cccagcuauuucccgagua

SEQ ID NO: 167191 - RNA, 19 nt, Artificial Sequence
  Description of Artificial Sequence: Synthetic oligonucleotide
  Antisense strand to SEQ ID NO: 167190
uacucgggaaauagcuggg

SEQ ID NO: 167192 - RNA, 19 nt, Artificial Sequence
  Description of Artificial Sequence: Synthetic oligonucleotide
  Sense strand starting at position 2929 of SEQ ID NO: 2154
ggcggaucacucuaggaca

SEQ ID NO: 167193 - RNA, 19 nt, Artificial Sequence
  Description of Artificial Sequence: Synthetic oligonucleotide
  Antisense strand to SEQ ID NO: 167192
uguccuagagugauccgcc

SEQ ID NO: 167194 - RNA, 19 nt, Artificial Sequence
  Description of Artificial Sequence: Synthetic oligonucleotide
  Sense strand starting at position 2789 of SEQ ID NO: 2154
aaccuagggccauggauua

SEQ ID NO: 167195 - RNA, 19 nt, Artificial Sequence
  Description of Artificial Sequence: Synthetic oligonucleotide
  Antisense strand to SEQ ID NO: 167194
uaauccauggcccuagguu

SEQ ID NO: 167196 - RNA, 19 nt, Artificial Sequence
  Description of Artificial Sequence: Synthetic oligonucleotide
  Sense strand starting at position 2692 of SEQ ID NO: 2154
gguugucuugggcacaaga

SEQ ID NO: 167197 - RNA, 19 nt, Artificial Sequence
  Description of Artificial Sequence: Synthetic oligonucleotide
  Antisense strand to SEQ ID NO: 167196
ucuugugcccaagacaacc

SEQ ID NO: 167198 - RNA, 19 nt, Artificial Sequence
  Description of Artificial Sequence: Synthetic oligonucleotide
  Sense strand starting at position 2689 of SEQ ID NO: 2154
cuggguugucuugggcaca

SEQ ID NO: 167199 - RNA, 19 nt, Artificial Sequence
  Description of Artificial Sequence: Synthetic oligonucleotide
  Antisense strand to SEQ ID NO: 167198
ugugcccaagacaacccag

SEQ ID NO: 167200 - RNA, 19 nt, Artificial Sequence
  Description of Artificial Sequence: Synthetic oligonucleotide
  Sense strand starting at position 2645 of SEQ ID NO: 2154
agguuugggcccuagauua

SEQ ID NO: 167201 - RNA, 19 nt, Artificial Sequence
  Description of Artificial Sequence: Synthetic oligonucleotide
  Antisense strand to SEQ ID NO: 167200
uaaucuagggcccaaaccu

SEQ ID NO: 167202 - RNA, 19 nt, Artificial Sequence
  Description of Artificial Sequence: Synthetic oligonucleotide
  Sense strand starting at position 2330 of SEQ ID NO: 2154
gugcaaggagccuauacua

SEQ ID NO: 167203 - RNA, 19 nt, Artificial Sequence
  Description of Artificial Sequence: Synthetic oligonucleotide
  Antisense strand to SEQ ID NO: 167202
uaguauaggcuccuugcac

SEQ ID NO: 167204 - RNA, 19 nt, Artificial Sequence
  Description of Artificial Sequence: Synthetic oligonucleotide
  Sense strand starting at position 2265 of SEQ ID NO: 2154
gggugugugaugugaccuu

SEQ ID NO: 167205 - RNA, 19 nt, Artificial Sequence
  Description of Artificial Sequence: Synthetic oligonucleotide
  Antisense strand to SEQ ID NO: 167204
aaggucacaucacacaccc

SEQ ID NO: 167206 - RNA, 19 nt, Artificial Sequence
  Description of Artificial Sequence: Synthetic oligonucleotide
  Sense strand starting at position 2157 of SEQ ID NO: 2154
ucgcuuugaaagcaaguua

SEQ ID NO: 167207 - RNA, 19 nt, Artificial Sequence
  Description of Artificial Sequence: Synthetic oligonucleotide
  Antisense strand to SEQ ID NO: 167206
uaacuugcuuucaaagcga

SEQ ID NO: 167208 - RNA, 19 nt, Artificial Sequence
  Description of Artificial Sequence: Synthetic oligonucleotide
  Sense strand starting at position 1718 of SEQ ID NO: 2154
guuccaguuccagacaugu

SEQ ID NO: 167209 - RNA, 19 nt, Artificial Sequence
  Description of Artificial Sequence: Synthetic oligonucleotide
  Antisense strand to SEQ ID NO: 167208
acaugucuggaacuggaac

SEQ ID NO: 167210 - RNA, 19 nt, Artificial Sequence
  Description of Artificial Sequence: Synthetic oligonucleotide
  Sense strand starting at position 1635 of SEQ ID NO: 2154
guaggaguuuggucuucuc

SEQ ID NO: 167211 - RNA, 19 nt, Artificial Sequence
  Description of Artificial Sequence: Synthetic oligonucleotide
  Antisense strand to SEQ ID NO: 167210
gagaagaccaaacuccuac

SEQ ID NO: 167212 - RNA, 19 nt, Artificial Sequence
  Description of Artificial Sequence: Synthetic oligonucleotide
  Sense strand starting at position 1626 of SEQ ID NO: 2154
cagaguuagguaggaguuu

SEQ ID NO: 167213 - RNA, 19 nt, Artificial Sequence
  Description of Artificial Sequence: Synthetic oligonucleotide
  Antisense strand to SEQ ID NO: 167212
aaacuccuaccuaacucug

SEQ ID NO: 167214 - RNA, 19 nt, Artificial Sequence
  Description of Artificial Sequence: Synthetic oligonucleotide
  Sense strand starting at position 1624 of SEQ ID NO: 2154
accagaguuagguaggagu

SEQ ID NO: 167215 - RNA, 19 nt, Artificial Sequence
  Description of Artificial Sequence: Synthetic oligonucleotide
  Antisense strand to SEQ ID NO: 167214
acuccuaccuaacucuggu

SEQ ID NO: 167216 - RNA, 19 nt, Artificial Sequence
  Description of Artificial Sequence: Synthetic oligonucleotide
  Sense strand starting at position 1614 of SEQ ID NO: 2154
agaaucuccuaccagaguu

SEQ ID NO: 167217 - RNA, 19 nt, Artificial Sequence
  Description of Artificial Sequence: Synthetic oligonucleotide
  Antisense strand to SEQ ID NO: 167216
aacucugguaggagauucu

SEQ ID NO: 167218 - RNA, 19 nt, Artificial Sequence
  Description of Artificial Sequence: Synthetic oligonucleotide
  Sense strand starting at position 1611 of SEQ ID NO: 2154
ggcagaaucuccuaccaga

SEQ ID NO: 167219 - RNA, 19 nt, Artificial Sequence
  Description of Artificial Sequence: Synthetic oligonucleotide
  Antisense strand to SEQ ID NO: 167218
ucugguaggagauucugcc

SEQ ID NO: 167220 - RNA, 19 nt, Artificial Sequence
  Description of Artificial Sequence: Synthetic oligonucleotide
  Sense strand starting at position 1490 of SEQ ID NO: 2154
ggacguucggcagaacuga

SEQ ID NO: 167221 - RNA, 19 nt, Artificial Sequence
  Description of Artificial Sequence: Synthetic oligonucleotide
  Antisense strand to SEQ ID NO: 167220
ucaguucugccgaacgucc

SEQ ID NO: 167222 - RNA, 19 nt, Artificial Sequence
  Description of Artificial Sequence: Synthetic oligonucleotide
  Sense strand starting at position 1460 of SEQ ID NO: 2154
ugugugucugaguguggau

SEQ ID NO: 167223 - RNA, 19 nt, Artificial Sequence
  Description of Artificial Sequence: Synthetic oligonucleotide
  Antisense strand to SEQ ID NO: 167222
auccacacucagacacaca

SEQ ID NO: 167224 - RNA, 19 nt, Artificial Sequence
  Description of Artificial Sequence: Synthetic oligonucleotide
  Sense strand starting at position 1367 of SEQ ID NO: 2154
uacaguaugcauugugcau

SEQ ID NO: 167225 - RNA, 19 nt, Artificial Sequence
  Description of Artificial Sequence: Synthetic oligonucleotide
  Antisense strand to SEQ ID NO: 167224
augcacaaugcauacugua

SEQ ID NO: 167226 - RNA, 19 nt, Artificial Sequence
  Description of Artificial Sequence: Synthetic oligonucleotide
  Sense strand starting at position 1360 of SEQ ID NO: 2154
ggguguguacaguaugcau

SEQ ID NO: 167227 - RNA, 19 nt, Artificial Sequence
  Description of Artificial Sequence: Synthetic oligonucleotide
  Antisense strand to SEQ ID NO: 167226
augcauacuguacacaccc

SEQ ID NO: 167228 - RNA, 19 nt, Artificial Sequence
  Description of Artificial Sequence: Synthetic oligonucleotide
  Sense strand starting at position 1331 of SEQ ID NO: 2154
agugacuuucuaggugaca

SEQ ID NO: 167229 - RNA, 19 nt, Artificial Sequence
  Description of Artificial Sequence: Synthetic oligonucleotide
  Antisense strand to SEQ ID NO: 167228
ugucaccuagaaagucacu

SEQ ID NO: 167230 - RNA, 19 nt, Artificial Sequence
  Description of Artificial Sequence: Synthetic oligonucleotide
  Sense strand starting at position 1321 of SEQ ID NO: 2154
ugguguguucagugacuuu

SEQ ID NO: 167231 - RNA, 19 nt, Artificial Sequence
  Description of Artificial Sequence: Synthetic oligonucleotide
  Antisense strand to SEQ ID NO: 167230
aaagucacugaacacacca

SEQ ID NO: 167232 - RNA, 19 nt, Artificial Sequence
  Description of Artificial Sequence: Synthetic oligonucleotide
  Sense strand starting at position 1306 of SEQ ID NO: 2154
acuauauugucuguguggu

SEQ ID NO: 167233 - RNA, 19 nt, Artificial Sequence
  Description of Artificial Sequence: Synthetic oligonucleotide
  Antisense strand to SEQ ID NO: 167232
accacacagacaauauagu

SEQ ID NO: 167234 - RNA, 19 nt, Artificial Sequence
  Description of Artificial Sequence: Synthetic oligonucleotide
  Sense strand starting at position 1303 of SEQ ID NO: 2154
gugacuauauugucugugu

SEQ ID NO: 167235 - RNA, 19 nt, Artificial Sequence
  Description of Artificial Sequence: Synthetic oligonucleotide
  Antisense strand to SEQ ID NO: 167234
acacagacaauauagucac

SEQ ID NO: 167236 - RNA, 19 nt, Artificial Sequence
  Description of Artificial Sequence: Synthetic oligonucleotide
  Sense strand starting at position 1295 of SEQ ID NO: 2154
gcugcauggugacuauauu

SEQ ID NO: 167237 - RNA, 19 nt, Artificial Sequence
  Description of Artificial Sequence: Synthetic oligonucleotide
  Antisense strand to SEQ ID NO: 167236
aauauagucaccaugcagc

SEQ ID NO: 167238 - RNA, 19 nt, Artificial Sequence
  Description of Artificial Sequence: Synthetic oligonucleotide
  Sense strand starting at position 1288 of SEQ ID NO: 2154
gugugaugcugcaugguga

SEQ ID NO: 167239 - RNA, 19 nt, Artificial Sequence
  Description of Artificial Sequence: Synthetic oligonucleotide
  Antisense strand to SEQ ID NO: 167238
ucaccaugcagcaucacac

SEQ ID NO: 167240 - RNA, 19 nt, Artificial Sequence
  Description of Artificial Sequence: Synthetic oligonucleotide
  Sense strand starting at position 1276 of SEQ ID NO: 2154
uguccuguugcagugugau

SEQ ID NO: 167241 - RNA, 19 nt, Artificial Sequence
  Description of Artificial Sequence: Synthetic oligonucleotide
  Antisense strand to SEQ ID NO: 167240
aucacacugcaacaggaca

SEQ ID NO: 167242 - RNA, 19 nt, Artificial Sequence
  Description of Artificial Sequence: Synthetic oligonucleotide
  Sense strand starting at position 1271 of SEQ ID NO: 2154
cuuuguguccuguugcagu

SEQ ID NO: 167243 - RNA, 19 nt, Artificial Sequence
  Description of Artificial Sequence: Synthetic oligonucleotide
  Antisense strand to SEQ ID NO: 167242
acugcaacaggacacaaag

SEQ ID NO: 167244 - RNA, 19 nt, Artificial Sequence
  Description of Artificial Sequence: Synthetic oligonucleotide
  Sense strand starting at position 1071 of SEQ ID NO: 2154
ccuggacuucuguggccaa

SEQ ID NO: 167245 - RNA, 19 nt, Artificial Sequence
  Description of Artificial Sequence: Synthetic oligonucleotide
  Antisense strand to SEQ ID NO: 167244
uuggccacagaaguccagg

SEQ ID NO: 167246 - RNA, 19 nt, Artificial Sequence
  Description of Artificial Sequence: Synthetic oligonucleotide
  Sense strand starting at position 1044 of SEQ ID NO: 2154
accugugugcuccacaaca

SEQ ID NO: 167247 - RNA, 19 nt, Artificial Sequence
  Description of Artificial Sequence: Synthetic oligonucleotide
  Antisense strand to SEQ ID NO: 167246
uguuguggagcacacaggu

SEQ ID NO: 167248 - RNA, 19 nt, Artificial Sequence
  Description of Artificial Sequence: Synthetic oligonucleotide
  Sense strand starting at position 1042 of SEQ ID NO: 2154
auaccugugugcuccacaa

SEQ ID NO: 167249 - RNA, 19 nt, Artificial Sequence
  Description of Artificial Sequence: Synthetic oligonucleotide
  Antisense strand to SEQ ID NO: 167248
uuguggagcacacagguau

SEQ ID NO: 167250 - RNA, 19 nt, Artificial Sequence
  Description of Artificial Sequence: Synthetic oligonucleotide
  Sense strand starting at position 528 of SEQ ID NO: 2154
acuuccucuccugagguaa

SEQ ID NO: 167251 - RNA, 19 nt, Artificial Sequence
  Description of Artificial Sequence: Synthetic oligonucleotide
  Antisense strand to SEQ ID NO: 167250
uuaccucaggagaggaagu

SEQ ID NO: 167252 - RNA, 19 nt, Artificial Sequence
  Description of Artificial Sequence: Synthetic oligonucleotide
  Sense strand starting at position 310 of SEQ ID NO: 2154
gcagaaauaugccugcaca

SEQ ID NO: 167253 - RNA, 19 nt, Artificial Sequence
  Description of Artificial Sequence: Synthetic oligonucleotide
  Antisense strand to SEQ ID NO: 167252
ugugcaggcauauuucugc

SEQ ID NO: 167254 - RNA, 19 nt, Artificial Sequence
  Description of Artificial Sequence: Synthetic oligonucleotide
  Sense strand starting at position 274 of SEQ ID NO: 2154
acaacagaugguugguaaa

SEQ ID NO: 167255 - RNA, 19 nt, Artificial Sequence
  Description of Artificial Sequence: Synthetic oligonucleotide
  Antisense strand to SEQ ID NO: 167254
uuuaccaaccaucuguugu

SEQ ID NO: 167256 - RNA, 19 nt, Artificial Sequence
  Description of Artificial Sequence: Synthetic oligonucleotide
  Sense strand starting at position 145 of SEQ ID NO: 2154
uaugucccucgauaaagau

SEQ ID NO: 167257 - RNA, 19 nt, Artificial Sequence
  Description of Artificial Sequence: Synthetic oligonucleotide
  Antisense strand to SEQ ID NO: 167256
aucuuuaucgagggacaua

SEQ ID NO: 167258 - RNA, 19 nt, Artificial Sequence
  Description of Artificial Sequence: Synthetic oligonucleotide
  Sense strand starting at position 140 of SEQ ID NO: 2154
acaaauaugucccucgaua

SEQ ID NO: 167259 - RNA, 19 nt, Artificial Sequence
  Description of Artificial Sequence: Synthetic oligonucleotide
  Antisense strand to SEQ ID NO: 167258
uaucgagggacauauuugu

SEQ ID NO: 167260 - RNA, 19 nt, Artificial Sequence
  Description of Artificial Sequence: Synthetic oligonucleotide
  Sense strand starting at position 138 of SEQ ID NO: 2154
ggacaaauaugucccucga

SEQ ID NO: 167261 - RNA, 19 nt, Artificial Sequence
  Description of Artificial Sequence: Synthetic oligonucleotide
  Antisense strand to SEQ ID NO: 167260
ucgagggacauauuugucc

SEQ ID NO: 167262 - RNA, 19 nt, Artificial Sequence
  Description of Artificial Sequence: Synthetic oligonucleotide
  Sense strand starting at position 3849 of SEQ ID NO: 2155
guuaucugacuuggaaugu

SEQ ID NO: 167263 - RNA, 19 nt, Artificial Sequence
  Description of Artificial Sequence: Synthetic oligonucleotide
  Antisense strand to SEQ ID NO: 167262
acauuccaagucagauaac

SEQ ID NO: 167264 - RNA, 19 nt, Artificial Sequence
  Description of Artificial Sequence: Synthetic oligonucleotide
  Sense strand starting at position 3848 of SEQ ID NO: 2155
aguuaucugacuuggaaug

SEQ ID NO: 167265 - RNA, 19 nt, Artificial Sequence
  Description of Artificial Sequence: Synthetic oligonucleotide
  Antisense strand to SEQ ID NO: 167264
cauuccaagucagauaacu

SEQ ID NO: 167266 - RNA, 19 nt, Artificial Sequence
  Description of Artificial Sequence: Synthetic oligonucleotide
  Sense strand starting at position 3846 of SEQ ID NO: 2155
caaguuaucugacuuggaa

SEQ ID NO: 167267 - RNA, 19 nt, Artificial Sequence
  Description of Artificial Sequence: Synthetic oligonucleotide
  Antisense strand to SEQ ID NO: 167266
uuccaagucagauaacuug

SEQ ID NO: 167268 - RNA, 19 nt, Artificial Sequence
  Description of Artificial Sequence: Synthetic oligonucleotide
  Sense strand starting at position 3825 of SEQ ID NO: 2155
guugcauuuggcugcuaua

SEQ ID NO: 167269 - RNA, 19 nt, Artificial Sequence
  Description of Artificial Sequence: Synthetic oligonucleotide
  Antisense strand to SEQ ID NO: 167268
uauagcagccaaaugcaac

SEQ ID NO: 167270 - RNA, 19 nt, Artificial Sequence
  Description of Artificial Sequence: Synthetic oligonucleotide
  Sense strand starting at position 3759 of SEQ ID NO: 2155
guguuuauauucuuacuga

SEQ ID NO: 167271 - RNA, 19 nt, Artificial Sequence
  Description of Artificial Sequence: Synthetic oligonucleotide
  Antisense strand to SEQ ID NO: 167270
ucaguaagaauauaaacac

SEQ ID NO: 167272 - RNA, 19 nt, Artificial Sequence
  Description of Artificial Sequence: Synthetic oligonucleotide
  Sense strand starting at position 3391 of SEQ ID NO: 2155
uugucacuucuguaaucau

SEQ ID NO: 167273 - RNA, 19 nt, Artificial Sequence
  Description of Artificial Sequence: Synthetic oligonucleotide
  Antisense strand to SEQ ID NO: 167272
augauuacagaagugacaa

SEQ ID NO: 167274 - RNA, 19 nt, Artificial Sequence
  Description of Artificial Sequence: Synthetic oligonucleotide
  Sense strand starting at position 3390 of SEQ ID NO: 2155
auugucacuucuguaauca

SEQ ID NO: 167275 - RNA, 19 nt, Artificial Sequence
  Description of Artificial Sequence: Synthetic oligonucleotide
  Antisense strand to SEQ ID NO: 167274
ugauuacagaagugacaau

SEQ ID NO: 167276 - RNA, 19 nt, Artificial Sequence
  Description of Artificial Sequence: Synthetic oligonucleotide
  Sense strand starting at position 3376 of SEQ ID NO: 2155
gaggaagauuuauaauugu

SEQ ID NO: 167277 - RNA, 19 nt, Artificial Sequence
  Description of Artificial Sequence: Synthetic oligonucleotide
  Antisense strand to SEQ ID NO: 167276
acaauuauaaaucuuccuc

SEQ ID NO: 167278 - RNA, 19 nt, Artificial Sequence
  Description of Artificial Sequence: Synthetic oligonucleotide
  Sense strand starting at position 3331 of SEQ ID NO: 2155
uccuaaggguuagcuauua

SEQ ID NO: 167279 - RNA, 19 nt, Artificial Sequence
  Description of Artificial Sequence: Synthetic oligonucleotide
  Antisense strand to SEQ ID NO: 167278
uaauagcuaacccuuagga

SEQ ID NO: 167280 - RNA, 19 nt, Artificial Sequence
  Description of Artificial Sequence: Synthetic oligonucleotide
  Sense strand starting at position 3329 of SEQ ID NO: 2155
aguccuaaggguuagcuau

SEQ ID NO: 167281 - RNA, 19 nt, Artificial Sequence
  Description of Artificial Sequence: Synthetic oligonucleotide
  Antisense strand to SEQ ID NO: 167280
auagcuaacccuuaggacu

SEQ ID NO: 167282 - RNA, 19 nt, Artificial Sequence
  Description of Artificial Sequence: Synthetic oligonucleotide
  Sense strand starting at position 3293 of SEQ ID NO: 2155
cugaaaugccuagaacagu

SEQ ID NO: 167283 - RNA, 19 nt, Artificial Sequence
  Description of Artificial Sequence: Synthetic oligonucleotide
  Antisense strand to SEQ ID NO: 167282
acuguucuaggcauuucag

SEQ ID NO: 167284 - RNA, 19 nt, Artificial Sequence
  Description of Artificial Sequence: Synthetic oligonucleotide
  Sense strand starting at position 3291 of SEQ ID NO: 2155
ugcugaaaugccuagaaca

SEQ ID NO: 167285 - RNA, 19 nt, Artificial Sequence
  Description of Artificial Sequence: Synthetic oligonucleotide
  Antisense strand to SEQ ID NO: 167284
uguucuaggcauuucagca

SEQ ID NO: 167286 - RNA, 19 nt, Artificial Sequence
  Description of Artificial Sequence: Synthetic oligonucleotide
  Sense strand starting at position 3280 of SEQ ID NO: 2155
accaguuacuaugcugaaa

SEQ ID NO: 167287 - RNA, 19 nt, Artificial Sequence
  Description of Artificial Sequence: Synthetic oligonucleotide
  Antisense strand to SEQ ID NO: 167286
uuucagcauaguaacuggu

SEQ ID NO: 167288 - RNA, 19 nt, Artificial Sequence
  Description of Artificial Sequence: Synthetic oligonucleotide
  Sense strand starting at position 3207 of SEQ ID NO: 2155
aggauucuaugucucaguu

SEQ ID NO: 167289 - RNA, 19 nt, Artificial Sequence
  Description of Artificial Sequence: Synthetic oligonucleotide
  Antisense strand to SEQ ID NO: 167288
aacugagacauagaauccu

SEQ ID NO: 167290 - RNA, 19 nt, Artificial Sequence
  Description of Artificial Sequence: Synthetic oligonucleotide
  Sense strand starting at position 3193 of SEQ ID NO: 2155
acgcaaguuacauaaggau

SEQ ID NO: 167291 - RNA, 19 nt, Artificial Sequence
  Description of Artificial Sequence: Synthetic oligonucleotide
  Antisense strand to SEQ ID NO: 167290
auccuuauguaacuugcgu

SEQ ID NO: 167292 - RNA, 19 nt, Artificial Sequence
  Description of Artificial Sequence: Synthetic oligonucleotide
  Sense strand starting at position 3184 of SEQ ID NO: 2155
gugaucuuaacgcaaguua

SEQ ID NO: 167293 - RNA, 19 nt, Artificial Sequence
  Description of Artificial Sequence: Synthetic oligonucleotide
  Antisense strand to SEQ ID NO: 167292
uaacuugcguuaagaucac

SEQ ID NO: 167294 - RNA, 19 nt, Artificial Sequence
  Description of Artificial Sequence: Synthetic oligonucleotide
  Sense strand starting at position 3176 of SEQ ID NO: 2155
aaagcugugugaucuuaac

SEQ ID NO: 167295 - RNA, 19 nt, Artificial Sequence
  Description of Artificial Sequence: Synthetic oligonucleotide
  Antisense strand to SEQ ID NO: 167294
guuaagaucacacagcuuu

SEQ ID NO: 167296 - RNA, 19 nt, Artificial Sequence
  Description of Artificial Sequence: Synthetic oligonucleotide
  Sense strand starting at position 2400 of SEQ ID NO: 2155
guagauaaauacguuagua

SEQ ID NO: 167297 - RNA, 19 nt, Artificial Sequence
  Description of Artificial Sequence: Synthetic oligonucleotide
  Antisense strand to SEQ ID NO: 167296
uacuaacguauuuaucuac

SEQ ID NO: 167298 - RNA, 19 nt, Artificial Sequence
  Description of Artificial Sequence: Synthetic oligonucleotide
  Sense strand starting at position 2399 of SEQ ID NO: 2155
gguagauaaauacguuagu

SEQ ID NO: 167299 - RNA, 19 nt, Artificial Sequence
  Description of Artificial Sequence: Synthetic oligonucleotide
  Antisense strand to SEQ ID NO: 167298
acuaacguauuuaucuacc

SEQ ID NO: 167300 - RNA, 19 nt, Artificial Sequence
  Description of Artificial Sequence: Synthetic oligonucleotide
  Sense strand starting at position 2397 of SEQ ID NO: 2155
augguagauaaauacguua

SEQ ID NO: 167301 - RNA, 19 nt, Artificial Sequence
  Description of Artificial Sequence: Synthetic oligonucleotide
  Antisense strand to SEQ ID NO: 167300
uaacguauuuaucuaccau

SEQ ID NO: 167302 - RNA, 19 nt, Artificial Sequence
  Description of Artificial Sequence: Synthetic oligonucleotide
  Sense strand starting at position 2387 of SEQ ID NO: 2155
ugggucuuuaaugguagau

SEQ ID NO: 167303 - RNA, 19 nt, Artificial Sequence
  Description of Artificial Sequence: Synthetic oligonucleotide
  Antisense strand to SEQ ID NO: 167302
aucuaccauuaaagaccca

SEQ ID NO: 167304 - RNA, 19 nt, Artificial Sequence
  Description of Artificial Sequence: Synthetic oligonucleotide
  Sense strand starting at position 2226 of SEQ ID NO: 2155
uauuucugauagggugaaa

SEQ ID NO: 167305 - RNA, 19 nt, Artificial Sequence
  Description of Artificial Sequence: Synthetic oligonucleotide
  Antisense strand to SEQ ID NO: 167304
uuucacccuaucagaaaua

SEQ ID NO: 167306 - RNA, 19 nt, Artificial Sequence
  Description of Artificial Sequence: Synthetic oligonucleotide
  Sense strand starting at position 2223 of SEQ ID NO: 2155
uauuauuucugauagggug

SEQ ID NO: 167307 - RNA, 19 nt, Artificial Sequence
  Description of Artificial Sequence: Synthetic oligonucleotide
  Antisense strand to SEQ ID NO: 167306
cacccuaucagaaauaaua

SEQ ID NO: 167308 - RNA, 19 nt, Artificial Sequence
  Description of Artificial Sequence: Synthetic oligonucleotide
  Sense strand starting at position 2051 of SEQ ID NO: 2155
guguguucuguggaaccau

SEQ ID NO: 167309 - RNA, 19 nt, Artificial Sequence
  Description of Artificial Sequence: Synthetic oligonucleotide
  Antisense strand to SEQ ID NO: 167308
augguuccacagaacacac

SEQ ID NO: 167310 - RNA, 19 nt, Artificial Sequence
  Description of Artificial Sequence: Synthetic oligonucleotide
  Sense strand starting at position 1991 of SEQ ID NO: 2155
acgcguuaucugucuuaca

SEQ ID NO: 167311 - RNA, 19 nt, Artificial Sequence
  Description of Artificial Sequence: Synthetic oligonucleotide
  Antisense strand to SEQ ID NO: 167310
uguaagacagauaacgcgu

SEQ ID NO: 167312 - RNA, 19 nt, Artificial Sequence
  Description of Artificial Sequence: Synthetic oligonucleotide
  Sense strand starting at position 1387 of SEQ ID NO: 2155
ccacaaggcucaucggaaa

SEQ ID NO: 167313 - RNA, 19 nt, Artificial Sequence
  Description of Artificial Sequence: Synthetic oligonucleotide
  Antisense strand to SEQ ID NO: 167312
uuuccgaugagccuugugg

SEQ ID NO: 167314 - RNA, 19 nt, Artificial Sequence
  Description of Artificial Sequence: Synthetic oligonucleotide
  Sense strand starting at position 1089 of SEQ ID NO: 2155
cagagcuuucgguugcuuu

SEQ ID NO: 167315 - RNA, 19 nt, Artificial Sequence
  Description of Artificial Sequence: Synthetic oligonucleotide
  Antisense strand to SEQ ID NO: 167314
aaagcaaccgaaagcucug

SEQ ID NO: 167316 - RNA, 19 nt, Artificial Sequence
  Description of Artificial Sequence: Synthetic oligonucleotide
  Sense strand starting at position 890 of SEQ ID NO: 2155
acagauccucuuugagaua

SEQ ID NO: 167317 - RNA, 19 nt, Artificial Sequence
  Description of Artificial Sequence: Synthetic oligonucleotide
  Antisense strand to SEQ ID NO: 167316
uaucucaaagaggaucugu

SEQ ID NO: 167318 - RNA, 19 nt, Artificial Sequence
  Description of Artificial Sequence: Synthetic oligonucleotide
  Sense strand starting at position 889 of SEQ ID NO: 2155
gacagauccucuuugagau

SEQ ID NO: 167319 - RNA, 19 nt, Artificial Sequence
  Description of Artificial Sequence: Synthetic oligonucleotide
  Antisense strand to SEQ ID NO: 167318
aucucaaagaggaucuguc

SEQ ID NO: 167320 - RNA, 19 nt, Artificial Sequence
  Description of Artificial Sequence: Synthetic oligonucleotide
  Sense strand starting at position 886 of SEQ ID NO: 2155
auugacagauccucuuuga

SEQ ID NO: 167321 - RNA, 19 nt, Artificial Sequence
  Description of Artificial Sequence: Synthetic oligonucleotide
  Antisense strand to SEQ ID NO: 167320
ucaaagaggaucugucaau

SEQ ID NO: 167322 - RNA, 19 nt, Artificial Sequence
  Description of Artificial Sequence: Synthetic oligonucleotide
  Sense strand starting at position 595 of SEQ ID NO: 2155
ucaacauucccguagagcu

SEQ ID NO: 167323 - RNA, 19 nt, Artificial Sequence
  Description of Artificial Sequence: Synthetic oligonucleotide
  Antisense strand to SEQ ID NO: 167322
agcucuacgggaauguuga

SEQ ID NO: 167324 - RNA, 19 nt, Artificial Sequence
  Description of Artificial Sequence: Synthetic oligonucleotide
  Sense strand starting at position 548 of SEQ ID NO: 2155
cguugagagaaaugcugaa

SEQ ID NO: 167325 - RNA, 19 nt, Artificial Sequence
  Description of Artificial Sequence: Synthetic oligonucleotide
  Antisense strand to SEQ ID NO: 167324
uucagcauuucucucaacg

SEQ ID NO: 167326 - RNA, 19 nt, Artificial Sequence
  Description of Artificial Sequence: Synthetic oligonucleotide
  Sense strand starting at position 539 of SEQ ID NO: 2155
auaaacaaccguugagaga

SEQ ID NO: 167327 - RNA, 19 nt, Artificial Sequence
  Description of Artificial Sequence: Synthetic oligonucleotide
  Antisense strand to SEQ ID NO: 167326
ucucucaacgguuguuuau

SEQ ID NO: 167328 - RNA, 19 nt, Artificial Sequence
  Description of Artificial Sequence: Synthetic oligonucleotide
  Sense strand starting at position 480 of SEQ ID NO: 2155
cuaaauauccucugaacga

SEQ ID NO: 167329 - RNA, 19 nt, Artificial Sequence
  Description of Artificial Sequence: Synthetic oligonucleotide
  Antisense strand to SEQ ID NO: 167328
ucguucagaggauauuuag

SEQ ID NO: 167330 - RNA, 19 nt, Artificial Sequence
  Description of Artificial Sequence: Synthetic oligonucleotide
  Sense strand starting at position 451 of SEQ ID NO: 2155
gaaagaugguugucacauu

SEQ ID NO: 167331 - RNA, 19 nt, Artificial Sequence
  Description of Artificial Sequence: Synthetic oligonucleotide
  Antisense strand to SEQ ID NO: 167330
aaugugacaaccaucuuuc

SEQ ID NO: 167332 - RNA, 19 nt, Artificial Sequence
  Description of Artificial Sequence: Synthetic oligonucleotide
  Sense strand starting at position 449 of SEQ ID NO: 2155
aagaaagaugguugucaca

SEQ ID NO: 167333 - RNA, 19 nt, Artificial Sequence
  Description of Artificial Sequence: Synthetic oligonucleotide
  Antisense strand to SEQ ID NO: 167332
ugugacaaccaucuuucuu

SEQ ID NO: 167334 - RNA, 19 nt, Artificial Sequence
  Description of Artificial Sequence: Synthetic oligonucleotide
  Sense strand starting at position 320 of SEQ ID NO: 2155
gcacaaagucacugauaag

SEQ ID NO: 167335 - RNA, 19 nt, Artificial Sequence
  Description of Artificial Sequence: Synthetic oligonucleotide
  Antisense strand to SEQ ID NO: 167334
cuuaucagugacuuugugc

SEQ ID NO: 167336 - RNA, 19 nt, Artificial Sequence
  Description of Artificial Sequence: Synthetic oligonucleotide
  Sense strand starting at position 319 of SEQ ID NO: 2155
ggcacaaagucacugauaa

SEQ ID NO: 167337 - RNA, 19 nt, Artificial Sequence
  Description of Artificial Sequence: Synthetic oligonucleotide
  Antisense strand to SEQ ID NO: 167336
uuaucagugacuuugugcc

SEQ ID NO: 167338 - RNA, 19 nt, Artificial Sequence
  Description of Artificial Sequence: Synthetic oligonucleotide
  Sense strand starting at position 272 of SEQ ID NO: 2155
auuagugguaggcaauaaa

SEQ ID NO: 167339 - RNA, 19 nt, Artificial Sequence
  Description of Artificial Sequence: Synthetic oligonucleotide
  Antisense strand to SEQ ID NO: 167338
uuuauugccuaccacuaau

SEQ ID NO: 167340 - RNA, 19 nt, Artificial Sequence
  Description of Artificial Sequence: Synthetic oligonucleotide
  Sense strand starting at position 270 of SEQ ID NO: 2155
agauuagugguaggcaaua

SEQ ID NO: 167341 - RNA, 19 nt, Artificial Sequence
  Description of Artificial Sequence: Synthetic oligonucleotide
  Antisense strand to SEQ ID NO: 167340
uauugccuaccacuaaucu

SEQ ID NO: 167342 - RNA, 19 nt, Artificial Sequence
  Description of Artificial Sequence: Synthetic oligonucleotide
  Sense strand starting at position 3895 of SEQ ID NO: 2156
cucugaaguguggaucuua

SEQ ID NO: 167343 - RNA, 19 nt, Artificial Sequence
  Description of Artificial Sequence: Synthetic oligonucleotide
  Antisense strand to SEQ ID NO: 167342
uaagauccacacuucagag

SEQ ID NO: 167344 - RNA, 19 nt, Artificial Sequence
  Description of Artificial Sequence: Synthetic oligonucleotide
  Sense strand starting at position 3862 of SEQ ID NO: 2156
acagauguggcugagucuu

SEQ ID NO: 167345 - RNA, 19 nt, Artificial Sequence
  Description of Artificial Sequence: Synthetic oligonucleotide
  Antisense strand to SEQ ID NO: 167344
aagacucagccacaucugu

SEQ ID NO: 167346 - RNA, 19 nt, Artificial Sequence
  Description of Artificial Sequence: Synthetic oligonucleotide
  Sense strand starting at position 3851 of SEQ ID NO: 2156
gaucucuugccacagaugu

SEQ ID NO: 167347 - RNA, 19 nt, Artificial Sequence
  Description of Artificial Sequence: Synthetic oligonucleotide
  Antisense strand to SEQ ID NO: 167346
acaucuguggcaagagauc

SEQ ID NO: 167348 - RNA, 19 nt, Artificial Sequence
  Description of Artificial Sequence: Synthetic oligonucleotide
  Sense strand starting at position 3848 of SEQ ID NO: 2156
cuggaucucuugccacaga

SEQ ID NO: 167349 - RNA, 19 nt, Artificial Sequence
  Description of Artificial Sequence: Synthetic oligonucleotide
  Antisense strand to SEQ ID NO: 167348
ucuguggcaagagauccag

SEQ ID NO: 167350 - RNA, 19 nt, Artificial Sequence
  Description of Artificial Sequence: Synthetic oligonucleotide
  Sense strand starting at position 3836 of SEQ ID NO: 2156
gcucuauucgugcuggauc

SEQ ID NO: 167351 - RNA, 19 nt, Artificial Sequence
  Description of Artificial Sequence: Synthetic oligonucleotide
  Antisense strand to SEQ ID NO: 167350
gauccagcacgaauagagc

SEQ ID NO: 167352 - RNA, 19 nt, Artificial Sequence
  Description of Artificial Sequence: Synthetic oligonucleotide
  Sense strand starting at position 3698 of SEQ ID NO: 2156
agagcuggguuuccuaaca

SEQ ID NO: 167353 - RNA, 19 nt, Artificial Sequence
  Description of Artificial Sequence: Synthetic oligonucleotide
  Antisense strand to SEQ ID NO: 167352
uguuaggaaacccagcucu

SEQ ID NO: 167354 - RNA, 19 nt, Artificial Sequence
  Description of Artificial Sequence: Synthetic oligonucleotide
  Sense strand starting at position 3691 of SEQ ID NO: 2156
uuuggaaagagcuggguuu

SEQ ID NO: 167355 - RNA, 19 nt, Artificial Sequence
  Description of Artificial Sequence: Synthetic oligonucleotide
  Antisense strand to SEQ ID NO: 167354
aaacccagcucuuuccaaa

SEQ ID NO: 167356 - RNA, 19 nt, Artificial Sequence
  Description of Artificial Sequence: Synthetic oligonucleotide
  Sense strand starting at position 3639 of SEQ ID NO: 2156
auaggacauuucuaaugau

SEQ ID NO: 167357 - RNA, 19 nt, Artificial Sequence
  Description of Artificial Sequence: Synthetic oligonucleotide
  Antisense strand to SEQ ID NO: 167356
aucauuagaaauguccuau

SEQ ID NO: 167358 - RNA, 19 nt, Artificial Sequence
  Description of Artificial Sequence: Synthetic oligonucleotide
  Sense strand starting at position 3468 of SEQ ID NO: 2156
agcagcuugaggcaucauu

SEQ ID NO: 167359 - RNA, 19 nt, Artificial Sequence
  Description of Artificial Sequence: Synthetic oligonucleotide
  Antisense strand to SEQ ID NO: 167358
aaugaugccucaagcugcu

SEQ ID NO: 167360 - RNA, 19 nt, Artificial Sequence
  Description of Artificial Sequence: Synthetic oligonucleotide
  Sense strand starting at position 3343 of SEQ ID NO: 2156
augagauccuguguuaccu

SEQ ID NO: 167361 - RNA, 19 nt, Artificial Sequence
  Description of Artificial Sequence: Synthetic oligonucleotide
  Antisense strand to SEQ ID NO: 167360
agguaacacaggaucucau

SEQ ID NO: 167362 - RNA, 19 nt, Artificial Sequence
  Description of Artificial Sequence: Synthetic oligonucleotide
  Sense strand starting at position 3332 of SEQ ID NO: 2156
auccuaugccaaugagauc

SEQ ID NO: 167363 - RNA, 19 nt, Artificial Sequence
  Description of Artificial Sequence: Synthetic oligonucleotide
  Antisense strand to SEQ ID NO: 167362
gaucucauuggcauaggau

SEQ ID NO: 167364 - RNA, 19 nt, Artificial Sequence
  Description of Artificial Sequence: Synthetic oligonucleotide
  Sense strand starting at position 3226 of SEQ ID NO: 2156
aaggaaucaguugguggaa

SEQ ID NO: 167365 - RNA, 19 nt, Artificial Sequence
  Description of Artificial Sequence: Synthetic oligonucleotide
  Antisense strand to SEQ ID NO: 167364
uuccaccaacugauuccuu

SEQ ID NO: 167366 - RNA, 19 nt, Artificial Sequence
  Description of Artificial Sequence: Synthetic oligonucleotide
  Sense strand starting at position 3225 of SEQ ID NO: 2156
aaaggaaucaguuggugga

SEQ ID NO: 167367 - RNA, 19 nt, Artificial Sequence
  Description of Artificial Sequence: Synthetic oligonucleotide
  Antisense strand to SEQ ID NO: 167366
uccaccaacugauuccuuu

SEQ ID NO: 167368 - RNA, 19 nt, Artificial Sequence
  Description of Artificial Sequence: Synthetic oligonucleotide
  Sense strand starting at position 3118 of SEQ ID NO: 2156
agagaaugaucuccuggca

SEQ ID NO: 167369 - RNA, 19 nt, Artificial Sequence
  Description of Artificial Sequence: Synthetic oligonucleotide
  Antisense strand to SEQ ID NO: 167368
ugccaggagaucauucucu

SEQ ID NO: 167370 - RNA, 19 nt, Artificial Sequence
  Description of Artificial Sequence: Synthetic oligonucleotide
  Sense strand starting at position 2891 of SEQ ID NO: 2156
gagauagaugauugcauau

SEQ ID NO: 167371 - RNA, 19 nt, Artificial Sequence
  Description of Artificial Sequence: Synthetic oligonucleotide
  Antisense strand to SEQ ID NO: 167370
auaugcaaucaucuaucuc

SEQ ID NO: 167372 - RNA, 19 nt, Artificial Sequence
  Description of Artificial Sequence: Synthetic oligonucleotide
  Sense strand starting at position 2840 of SEQ ID NO: 2156
auguuaauggguugacuga

SEQ ID NO: 167373 - RNA, 19 nt, Artificial Sequence
  Description of Artificial Sequence: Synthetic oligonucleotide
  Antisense strand to SEQ ID NO: 167372
ucagucaacccauuaacau

SEQ ID NO: 167374 - RNA, 19 nt, Artificial Sequence
  Description of Artificial Sequence: Synthetic oligonucleotide
  Sense strand starting at position 2838 of SEQ ID NO: 2156
aaauguuaauggguugacu

SEQ ID NO: 167375 - RNA, 19 nt, Artificial Sequence
  Description of Artificial Sequence: Synthetic oligonucleotide
  Antisense strand to SEQ ID NO: 167374
agucaacccauuaacauuu

SEQ ID NO: 167376 - RNA, 19 nt, Artificial Sequence
  Description of Artificial Sequence: Synthetic oligonucleotide
  Sense strand starting at position 2757 of SEQ ID NO: 2156
uuuguuuguccagugcuua

SEQ ID NO: 167377 - RNA, 19 nt, Artificial Sequence
  Description of Artificial Sequence: Synthetic oligonucleotide
  Antisense strand to SEQ ID NO: 167376
uaagcacuggacaaacaaa

SEQ ID NO: 167378 - RNA, 19 nt, Artificial Sequence
  Description of Artificial Sequence: Synthetic oligonucleotide
  Sense strand starting at position 2752 of SEQ ID NO: 2156
uuuaauuuguuuguccagu

SEQ ID NO: 167379 - RNA, 19 nt, Artificial Sequence
  Description of Artificial Sequence: Synthetic oligonucleotide
  Antisense strand to SEQ ID NO: 167378
acuggacaaacaaauuaaa

SEQ ID NO: 167380 - RNA, 19 nt, Artificial Sequence
  Description of Artificial Sequence: Synthetic oligonucleotide
  Sense strand starting at position 2724 of SEQ ID NO: 2156
aaggaaaugcuuugcagac

SEQ ID NO: 167381 - RNA, 19 nt, Artificial Sequence
  Description of Artificial Sequence: Synthetic oligonucleotide
  Antisense strand to SEQ ID NO: 167380
gucugcaaagcauuuccuu

SEQ ID NO: 167382 - RNA, 19 nt, Artificial Sequence
  Description of Artificial Sequence: Synthetic oligonucleotide
  Sense strand starting at position 2676 of SEQ ID NO: 2156
aguuguuaagggugaagaa

SEQ ID NO: 167383 - RNA, 19 nt, Artificial Sequence
  Description of Artificial Sequence: Synthetic oligonucleotide
  Antisense strand to SEQ ID NO: 167382
uucuucacccuuaacaacu

SEQ ID NO: 167384 - RNA, 19 nt, Artificial Sequence
  Description of Artificial Sequence: Synthetic oligonucleotide
  Sense strand starting at position 2512 of SEQ ID NO: 2156
gggaucuaauuggaaagaa

SEQ ID NO: 167385 - RNA, 19 nt, Artificial Sequence
  Description of Artificial Sequence: Synthetic oligonucleotide
  Antisense strand to SEQ ID NO: 167384
uucuuuccaauuagauccc

SEQ ID NO: 167386 - RNA, 19 nt, Artificial Sequence
  Description of Artificial Sequence: Synthetic oligonucleotide
  Sense strand starting at position 2385 of SEQ ID NO: 2156
aaaggauuagguuguaaua

SEQ ID NO: 167387 - RNA, 19 nt, Artificial Sequence
  Description of Artificial Sequence: Synthetic oligonucleotide
  Antisense strand to SEQ ID NO: 167386
uauuacaaccuaauccuuu

SEQ ID NO: 167388 - RNA, 19 nt, Artificial Sequence
  Description of Artificial Sequence: Synthetic oligonucleotide
  Sense strand starting at position 1647 of SEQ ID NO: 2156
gugacaugucaguaaacaa

SEQ ID NO: 167389 - RNA, 19 nt, Artificial Sequence
  Description of Artificial Sequence: Synthetic oligonucleotide
  Antisense strand to SEQ ID NO: 167388
uuguuuacugacaugucac

SEQ ID NO: 167390 - RNA, 19 nt, Artificial Sequence
  Description of Artificial Sequence: Synthetic oligonucleotide
  Sense strand starting at position 1646 of SEQ ID NO: 2156
ggugacaugucaguaaaca

SEQ ID NO: 167391 - RNA, 19 nt, Artificial Sequence
  Description of Artificial Sequence: Synthetic oligonucleotide
  Antisense strand to SEQ ID NO: 167390
uguuuacugacaugucacc

SEQ ID NO: 167392 - RNA, 19 nt, Artificial Sequence
  Description of Artificial Sequence: Synthetic oligonucleotide
  Sense strand starting at position 1514 of SEQ ID NO: 2156
guauuccaaugccuaaaga

SEQ ID NO: 167393 - RNA, 19 nt, Artificial Sequence
  Description of Artificial Sequence: Synthetic oligonucleotide
  Antisense strand to SEQ ID NO: 167392
ucuuuaggcauuggaauac

SEQ ID NO: 167394 - RNA, 19 nt, Artificial Sequence
  Description of Artificial Sequence: Synthetic oligonucleotide
  Sense strand starting at position 1511 of SEQ ID NO: 2156
augguauuccaaugccuaa

SEQ ID NO: 167395 - RNA, 19 nt, Artificial Sequence
  Description of Artificial Sequence: Synthetic oligonucleotide
  Antisense strand to SEQ ID NO: 167394
uuaggcauuggaauaccau

SEQ ID NO: 167396 - RNA, 19 nt, Artificial Sequence
  Description of Artificial Sequence: Synthetic oligonucleotide
  Sense strand starting at position 1506 of SEQ ID NO: 2156
uguuuaugguauuccaaug

SEQ ID NO: 167397 - RNA, 19 nt, Artificial Sequence
  Description of Artificial Sequence: Synthetic oligonucleotide
  Antisense strand to SEQ ID NO: 167396
cauuggaauaccauaaaca

SEQ ID NO: 167398 - RNA, 19 nt, Artificial Sequence
  Description of Artificial Sequence: Synthetic oligonucleotide
  Sense strand starting at position 1475 of SEQ ID NO: 2156
gcaugagcccuagaacuaa

SEQ ID NO: 167399 - RNA, 19 nt, Artificial Sequence
  Description of Artificial Sequence: Synthetic oligonucleotide
  Antisense strand to SEQ ID NO: 167398
uuaguucuagggcucaugc

SEQ ID NO: 167400 - RNA, 19 nt, Artificial Sequence
  Description of Artificial Sequence: Synthetic oligonucleotide
  Sense strand starting at position 1394 of SEQ ID NO: 2156
acaugacagcgccaauauu

SEQ ID NO: 167401 - RNA, 19 nt, Artificial Sequence
  Description of Artificial Sequence: Synthetic oligonucleotide
  Antisense strand to SEQ ID NO: 167400
aauauuggcgcugucaugu

SEQ ID NO: 167402 - RNA, 19 nt, Artificial Sequence
  Description of Artificial Sequence: Synthetic oligonucleotide
  Sense strand starting at position 1285 of SEQ ID NO: 2156
accuuucugguuuauuaca

SEQ ID NO: 167403 - RNA, 19 nt, Artificial Sequence
  Description of Artificial Sequence: Synthetic oligonucleotide
  Antisense strand to SEQ ID NO: 167402
uguaauaaaccagaaaggu

SEQ ID NO: 167404 - RNA, 19 nt, Artificial Sequence
  Description of Artificial Sequence: Synthetic oligonucleotide
  Sense strand starting at position 1250 of SEQ ID NO: 2156
gcauguuccuuagcauuua

SEQ ID NO: 167405 - RNA, 19 nt, Artificial Sequence
  Description of Artificial Sequence: Synthetic oligonucleotide
  Antisense strand to SEQ ID NO: 167404
uaaaugcuaaggaacaugc

SEQ ID NO: 167406 - RNA, 19 nt, Artificial Sequence
  Description of Artificial Sequence: Synthetic oligonucleotide
  Sense strand starting at position 1236 of SEQ ID NO: 2156
auauaagguuccuugcaug

SEQ ID NO: 167407 - RNA, 19 nt, Artificial Sequence
  Description of Artificial Sequence: Synthetic oligonucleotide
  Antisense strand to SEQ ID NO: 167406
caugcaaggaaccuuauau

SEQ ID NO: 167408 - RNA, 19 nt, Artificial Sequence
  Description of Artificial Sequence: Synthetic oligonucleotide
  Sense strand starting at position 1209 of SEQ ID NO: 2156
cuugcacaagucugaauga

SEQ ID NO: 167409 - RNA, 19 nt, Artificial Sequence
  Description of Artificial Sequence: Synthetic oligonucleotide
  Antisense strand to SEQ ID NO: 167408
ucauucagacuugugcaag

SEQ ID NO: 167410 - RNA, 19 nt, Artificial Sequence
  Description of Artificial Sequence: Synthetic oligonucleotide
  Sense strand starting at position 989 of SEQ ID NO: 2156
ugcaguaaugaauacuauu

SEQ ID NO: 167411 - RNA, 19 nt, Artificial Sequence
  Description of Artificial Sequence: Synthetic oligonucleotide
  Antisense strand to SEQ ID NO: 167410
aauaguauucauuacugca

SEQ ID NO: 167412 - RNA, 19 nt, Artificial Sequence
  Description of Artificial Sequence: Synthetic oligonucleotide
  Sense strand starting at position 982 of SEQ ID NO: 2156
guauguaugcaguaaugaa

SEQ ID NO: 167413 - RNA, 19 nt, Artificial Sequence
  Description of Artificial Sequence: Synthetic oligonucleotide
  Antisense strand to SEQ ID NO: 167412
uucauuacugcauacauac

SEQ ID NO: 167414 - RNA, 19 nt, Artificial Sequence
  Description of Artificial Sequence: Synthetic oligonucleotide
  Sense strand starting at position 413 of SEQ ID NO: 2156
aucccagugaacuggagau

SEQ ID NO: 167415 - RNA, 19 nt, Artificial Sequence
  Description of Artificial Sequence: Synthetic oligonucleotide
  Antisense strand to SEQ ID NO: 167414
aucuccaguucacugggau

SEQ ID NO: 167416 - RNA, 19 nt, Artificial Sequence
  Description of Artificial Sequence: Synthetic oligonucleotide
  Sense strand starting at position 338 of SEQ ID NO: 2156
cucugugaacaugacuauu

SEQ ID NO: 167417 - RNA, 19 nt, Artificial Sequence
  Description of Artificial Sequence: Synthetic oligonucleotide
  Antisense strand to SEQ ID NO: 167416
aauagucauguucacagag

SEQ ID NO: 167418 - RNA, 19 nt, Artificial Sequence
  Description of Artificial Sequence: Synthetic oligonucleotide
  Sense strand starting at position 293 of SEQ ID NO: 2156
gauugaucuugauugauau

SEQ ID NO: 167419 - RNA, 19 nt, Artificial Sequence
  Description of Artificial Sequence: Synthetic oligonucleotide
  Antisense strand to SEQ ID NO: 167418
auaucaaucaagaucaauc

SEQ ID NO: 167420 - RNA, 19 nt, Artificial Sequence
  Description of Artificial Sequence: Synthetic oligonucleotide
  Sense strand starting at position 161 of SEQ ID NO: 2156
gguguuguccuagacuauc

SEQ ID NO: 167421 - RNA, 19 nt, Artificial Sequence
  Description of Artificial Sequence: Synthetic oligonucleotide
  Antisense strand to SEQ ID NO: 167420
gauagucuaggacaacacc

SEQ ID NO: 167422 - RNA, 19 nt, Artificial Sequence
  Description of Artificial Sequence: Synthetic oligonucleotide
  Sense strand starting at position 39 of SEQ ID NO: 2157
uaccaauaucaguggcagu

SEQ ID NO: 167423 - RNA, 19 nt, Artificial Sequence
  Description of Artificial Sequence: Synthetic oligonucleotide
  Antisense strand to SEQ ID NO: 167422
acugccacugauauuggua

SEQ ID NO: 167424 - RNA, 19 nt, Artificial Sequence
  Description of Artificial Sequence: Synthetic oligonucleotide
  Sense strand starting at position 94 of SEQ ID NO: 2157
ggcaaugucuguccucaaa

SEQ ID NO: 167425 - RNA, 19 nt, Artificial Sequence
  Description of Artificial Sequence: Synthetic oligonucleotide
  Antisense strand to SEQ ID NO: 167424
uuugaggacagacauugcc

SEQ ID NO: 167426 - RNA, 19 nt, Artificial Sequence
  Description of Artificial Sequence: Synthetic oligonucleotide
  Sense strand starting at position 143 of SEQ ID NO: 2157
caggcuucuuucccaguga

SEQ ID NO: 167427 - RNA, 19 nt, Artificial Sequence
  Description of Artificial Sequence: Synthetic oligonucleotide
  Antisense strand to SEQ ID NO: 167426
ucacugggaaagaagccug

SEQ ID NO: 167428 - RNA, 19 nt, Artificial Sequence
  Description of Artificial Sequence: Synthetic oligonucleotide
  Sense strand starting at position 147 of SEQ ID NO: 2157
cuucuuucccagugacaag

SEQ ID NO: 167429 - RNA, 19 nt, Artificial Sequence
  Description of Artificial Sequence: Synthetic oligonucleotide
  Antisense strand to SEQ ID NO: 167428
cuugucacugggaaagaag

SEQ ID NO: 167430 - RNA, 19 nt, Artificial Sequence
  Description of Artificial Sequence: Synthetic oligonucleotide
  Sense strand starting at position 163 of SEQ ID NO: 2157
aagcauauguggucaguaa

SEQ ID NO: 167431 - RNA, 19 nt, Artificial Sequence
  Description of Artificial Sequence: Synthetic oligonucleotide
  Antisense strand to SEQ ID NO: 167430
uuacugaccacauaugcuu

SEQ ID NO: 167432 - RNA, 19 nt, Artificial Sequence
  Description of Artificial Sequence: Synthetic oligonucleotide
  Sense strand starting at position 164 of SEQ ID NO: 2157
agcauauguggucaguaau

SEQ ID NO: 167433 - RNA, 19 nt, Artificial Sequence
  Description of Artificial Sequence: Synthetic oligonucleotide
  Antisense strand to SEQ ID NO: 167432
auuacugaccacauaugcu

SEQ ID NO: 167434 - RNA, 19 nt, Artificial Sequence
  Description of Artificial Sequence: Synthetic oligonucleotide
  Sense strand starting at position 167 of SEQ ID NO: 2157
auauguggucaguaauaca

SEQ ID NO: 167435 - RNA, 19 nt, Artificial Sequence
  Description of Artificial Sequence: Synthetic oligonucleotide
  Antisense strand to SEQ ID NO: 167434
uguauuacugaccacauau

SEQ ID NO: 167436 - RNA, 19 nt, Artificial Sequence
  Description of Artificial Sequence: Synthetic oligonucleotide
  Sense strand starting at position 240 of SEQ ID NO: 2157
ucggguaggccaugauaca

SEQ ID NO: 167437 - RNA, 19 nt, Artificial Sequence
  Description of Artificial Sequence: Synthetic oligonucleotide
  Antisense strand to SEQ ID NO: 167436
uguaucauggccuacccga

SEQ ID NO: 167438 - RNA, 19 nt, Artificial Sequence
  Description of Artificial Sequence: Synthetic oligonucleotide
  Sense strand starting at position 241 of SEQ ID NO: 2157
cggguaggccaugauacaa

SEQ ID NO: 167439 - RNA, 19 nt, Artificial Sequence
  Description of Artificial Sequence: Synthetic oligonucleotide
  Antisense strand to SEQ ID NO: 167438
uuguaucauggccuacccg

SEQ ID NO: 167440 - RNA, 19 nt, Artificial Sequence
  Description of Artificial Sequence: Synthetic oligonucleotide
  Sense strand starting at position 371 of SEQ ID NO: 2157
cggguugucauacagauac

SEQ ID NO: 167441 - RNA, 19 nt, Artificial Sequence
  Description of Artificial Sequence: Synthetic oligonucleotide
  Antisense strand to SEQ ID NO: 167440
guaucuguaugacaacccg

SEQ ID NO: 167442 - RNA, 19 nt, Artificial Sequence
  Description of Artificial Sequence: Synthetic oligonucleotide
  Sense strand starting at position 532 of SEQ ID NO: 2157
ucuauuaaaccuggugugu

SEQ ID NO: 167443 - RNA, 19 nt, Artificial Sequence
  Description of Artificial Sequence: Synthetic oligonucleotide
  Antisense strand to SEQ ID NO: 167442
acacaccagguuuaauaga

SEQ ID NO: 167444 - RNA, 19 nt, Artificial Sequence
  Description of Artificial Sequence: Synthetic oligonucleotide
  Sense strand starting at position 868 of SEQ ID NO: 2157
gggaaucucguccagguaa

SEQ ID NO: 167445 - RNA, 19 nt, Artificial Sequence
  Description of Artificial Sequence: Synthetic oligonucleotide
  Antisense strand to SEQ ID NO: 167444
uuaccuggacgagauuccc

SEQ ID NO: 167446 - RNA, 19 nt, Artificial Sequence
  Description of Artificial Sequence: Synthetic oligonucleotide
  Sense strand starting at position 870 of SEQ ID NO: 2157
gaaucucguccagguaaua

SEQ ID NO: 167447 - RNA, 19 nt, Artificial Sequence
  Description of Artificial Sequence: Synthetic oligonucleotide
  Antisense strand to SEQ ID NO: 167446
uauuaccuggacgagauuc

SEQ ID NO: 167448 - RNA, 19 nt, Artificial Sequence
  Description of Artificial Sequence: Synthetic oligonucleotide
  Sense strand starting at position 1143 of SEQ ID NO: 2157
cguccaggucugagugguu

SEQ ID NO: 167449 - RNA, 19 nt, Artificial Sequence
  Description of Artificial Sequence: Synthetic oligonucleotide
  Antisense strand to SEQ ID NO: 167448
aaccacucagaccuggacg

SEQ ID NO: 167450 - RNA, 19 nt, Artificial Sequence
  Description of Artificial Sequence: Synthetic oligonucleotide
  Sense strand starting at position 1146 of SEQ ID NO: 2157
ccaggucugagugguugaa

SEQ ID NO: 167451 - RNA, 19 nt, Artificial Sequence
  Description of Artificial Sequence: Synthetic oligonucleotide
  Antisense strand to SEQ ID NO: 167450
uucaaccacucagaccugg

SEQ ID NO: 167452 - RNA, 19 nt, Artificial Sequence
  Description of Artificial Sequence: Synthetic oligonucleotide
  Sense strand starting at position 1780 of SEQ ID NO: 2157
gcucuuauacucuacccga

SEQ ID NO: 167453 - RNA, 19 nt, Artificial Sequence
  Description of Artificial Sequence: Synthetic oligonucleotide
  Antisense strand to SEQ ID NO: 167452
ucggguagaguauaagagc

SEQ ID NO: 167454 - RNA, 19 nt, Artificial Sequence
  Description of Artificial Sequence: Synthetic oligonucleotide
  Sense strand starting at position 1901 of SEQ ID NO: 2157
ccgcgauaggaucagaaca

SEQ ID NO: 167455 - RNA, 19 nt, Artificial Sequence
  Description of Artificial Sequence: Synthetic oligonucleotide
  Antisense strand to SEQ ID NO: 167454
uguucugauccuaucgcgg

SEQ ID NO: 167456 - RNA, 19 nt, Artificial Sequence
  Description of Artificial Sequence: Synthetic oligonucleotide
  Sense strand starting at position 2040 of SEQ ID NO: 2157
gccgcucucccggcagaaa

SEQ ID NO: 167457 - RNA, 19 nt, Artificial Sequence
  Description of Artificial Sequence: Synthetic oligonucleotide
  Antisense strand to SEQ ID NO: 167456
uuucugccgggagagcggc

SEQ ID NO: 167458 - RNA, 19 nt, Artificial Sequence
  Description of Artificial Sequence: Synthetic oligonucleotide
  Sense strand starting at position 2301 of SEQ ID NO: 2157
ggcuuaaagaccugaaguc

SEQ ID NO: 167459 - RNA, 19 nt, Artificial Sequence
  Description of Artificial Sequence: Synthetic oligonucleotide
  Antisense strand to SEQ ID NO: 167458
gacuucaggucuuuaagcc

SEQ ID NO: 167460 - RNA, 19 nt, Artificial Sequence
  Description of Artificial Sequence: Synthetic oligonucleotide
  Sense strand starting at position 2302 of SEQ ID NO: 2157
gcuuaaagaccugaaguca

SEQ ID NO: 167461 - RNA, 19 nt, Artificial Sequence
  Description of Artificial Sequence: Synthetic oligonucleotide
  Antisense strand to SEQ ID NO: 167460
ugacuucaggucuuuaagc

SEQ ID NO: 167462 - RNA, 19 nt, Artificial Sequence
  Description of Artificial Sequence: Synthetic oligonucleotide
  Sense strand starting at position 2367 of SEQ ID NO: 2157
cugccuaggagugaugaga

SEQ ID NO: 167463 - RNA, 19 nt, Artificial Sequence
  Description of Artificial Sequence: Synthetic oligonucleotide
  Antisense strand to SEQ ID NO: 167462
ucucaucacuccuaggcag

SEQ ID NO: 167464 - RNA, 19 nt, Artificial Sequence
  Description of Artificial Sequence: Synthetic oligonucleotide
  Sense strand starting at position 2390 of SEQ ID NO: 2157
aaauaaaguguuuguggac

SEQ ID NO: 167465 - RNA, 19 nt, Artificial Sequence
  Description of Artificial Sequence: Synthetic oligonucleotide
  Antisense strand to SEQ ID NO: 167464
guccacaaacacuuuauuu

SEQ ID NO: 167466 - RNA, 19 nt, Artificial Sequence
  Description of Artificial Sequence: Synthetic oligonucleotide
  Sense strand starting at position 2391 of SEQ ID NO: 2157
aauaaaguguuuguggaca

SEQ ID NO: 167467 - RNA, 19 nt, Artificial Sequence
  Description of Artificial Sequence: Synthetic oligonucleotide
  Antisense strand to SEQ ID NO: 167466
uguccacaaacacuuuauu

SEQ ID NO: 167468 - RNA, 19 nt, Artificial Sequence
  Description of Artificial Sequence: Synthetic oligonucleotide
  Sense strand starting at position 2489 of SEQ ID NO: 2157
ugguguccagaggguuaaa

SEQ ID NO: 167469 - RNA, 19 nt, Artificial Sequence
  Description of Artificial Sequence: Synthetic oligonucleotide
  Antisense strand to SEQ ID NO: 167468
uuuaacccucuggacacca

SEQ ID NO: 167470 - RNA, 19 nt, Artificial Sequence
  Description of Artificial Sequence: Synthetic oligonucleotide
  Sense strand starting at position 2578 of SEQ ID NO: 2157
uuauuugugcacuggcuau

SEQ ID NO: 167471 - RNA, 19 nt, Artificial Sequence
  Description of Artificial Sequence: Synthetic oligonucleotide
  Antisense strand to SEQ ID NO: 167470
auagccagugcacaaauaa

SEQ ID NO: 167472 - RNA, 19 nt, Artificial Sequence
  Description of Artificial Sequence: Synthetic oligonucleotide
  Sense strand starting at position 2736 of SEQ ID NO: 2157
aagaauggagccugugaga

SEQ ID NO: 167473 - RNA, 19 nt, Artificial Sequence
  Description of Artificial Sequence: Synthetic oligonucleotide
  Antisense strand to SEQ ID NO: 167472
ucucacaggcuccauucuu

SEQ ID NO: 167474 - RNA, 19 nt, Artificial Sequence
  Description of Artificial Sequence: Synthetic oligonucleotide
  Sense strand starting at position 2749 of SEQ ID NO: 2157
gugagaaauugcuugucug

SEQ ID NO: 167475 - RNA, 19 nt, Artificial Sequence
  Description of Artificial Sequence: Synthetic oligonucleotide
  Antisense strand to SEQ ID NO: 167474
cagacaagcaauuucucac

SEQ ID NO: 167476 - RNA, 19 nt, Artificial Sequence
  Description of Artificial Sequence: Synthetic oligonucleotide
  Sense strand starting at position 2752 of SEQ ID NO: 2157
agaaauugcuugucugcca

SEQ ID NO: 167477 - RNA, 19 nt, Artificial Sequence
  Description of Artificial Sequence: Synthetic oligonucleotide
  Antisense strand to SEQ ID NO: 167476
uggcagacaagcaauuucu

SEQ ID NO: 167478 - RNA, 19 nt, Artificial Sequence
  Description of Artificial Sequence: Synthetic oligonucleotide
  Sense strand starting at position 2944 of SEQ ID NO: 2157
cgugcaaggguguuguuua

SEQ ID NO: 167479 - RNA, 19 nt, Artificial Sequence
  Description of Artificial Sequence: Synthetic oligonucleotide
  Antisense strand to SEQ ID NO: 167478
uaaacaacacccuugcacg

SEQ ID NO: 167480 - RNA, 19 nt, Artificial Sequence
  Description of Artificial Sequence: Synthetic oligonucleotide
  Sense strand starting at position 2949 of SEQ ID NO: 2157
aaggguguuguuuagcaga

SEQ ID NO: 167481 - RNA, 19 nt, Artificial Sequence
  Description of Artificial Sequence: Synthetic oligonucleotide
  Antisense strand to SEQ ID NO: 167480
ucugcuaaacaacacccuu

SEQ ID NO: 167482 - RNA, 19 nt, Artificial Sequence
  Description of Artificial Sequence: Synthetic oligonucleotide
  Sense strand starting at position 2954 of SEQ ID NO: 2157
uguuguuuagcagaugaaa

SEQ ID NO: 167483 - RNA, 19 nt, Artificial Sequence
  Description of Artificial Sequence: Synthetic oligonucleotide
  Antisense strand to SEQ ID NO: 167482
uuucaucugcuaaacaaca

SEQ ID NO: 167484 - RNA, 19 nt, Artificial Sequence
  Description of Artificial Sequence: Synthetic oligonucleotide
  Sense strand starting at position 3659 of SEQ ID NO: 2157
gggacaauuucuuauccac

SEQ ID NO: 167485 - RNA, 19 nt, Artificial Sequence
  Description of Artificial Sequence: Synthetic oligonucleotide
  Antisense strand to SEQ ID NO: 167484
guggauaagaaauuguccc

SEQ ID NO: 167486 - RNA, 19 nt, Artificial Sequence
  Description of Artificial Sequence: Synthetic oligonucleotide
  Sense strand starting at position 3683 of SEQ ID NO: 2157
ugaggaauugugggauagu

SEQ ID NO: 167487 - RNA, 19 nt, Artificial Sequence
  Description of Artificial Sequence: Synthetic oligonucleotide
  Antisense strand to SEQ ID NO: 167486
acuaucccacaauuccuca

SEQ ID NO: 167488 - RNA, 19 nt, Artificial Sequence
  Description of Artificial Sequence: Synthetic oligonucleotide
  Sense strand starting at position 3686 of SEQ ID NO: 2157
ggaauugugggauaguccu

SEQ ID NO: 167489 - RNA, 19 nt, Artificial Sequence
  Description of Artificial Sequence: Synthetic oligonucleotide
  Antisense strand to SEQ ID NO: 167488
aggacuaucccacaauucc

SEQ ID NO: 167490 - RNA, 19 nt, Artificial Sequence
  Description of Artificial Sequence: Synthetic oligonucleotide
  Sense strand starting at position 3692 of SEQ ID NO: 2157
gugggauaguccucugcug

SEQ ID NO: 167491 - RNA, 19 nt, Artificial Sequence
  Description of Artificial Sequence: Synthetic oligonucleotide
  Antisense strand to SEQ ID NO: 167490
cagcagaggacuaucccac

SEQ ID NO: 167492 - RNA, 19 nt, Artificial Sequence
  Description of Artificial Sequence: Synthetic oligonucleotide
  Sense strand starting at position 3732 of SEQ ID NO: 2157
caggucuuccuuggacaga

SEQ ID NO: 167493 - RNA, 19 nt, Artificial Sequence
  Description of Artificial Sequence: Synthetic oligonucleotide
  Antisense strand to SEQ ID NO: 167492
ucuguccaaggaagaccug

SEQ ID NO: 167494 - RNA, 19 nt, Artificial Sequence
  Description of Artificial Sequence: Synthetic oligonucleotide
  Sense strand starting at position 3735 of SEQ ID NO: 2157
gucuuccuuggacagauau

SEQ ID NO: 167495 - RNA, 19 nt, Artificial Sequence
  Description of Artificial Sequence: Synthetic oligonucleotide
  Antisense strand to SEQ ID NO: 167494
auaucuguccaaggaagac

SEQ ID NO: 167496 - RNA, 19 nt, Artificial Sequence
  Description of Artificial Sequence: Synthetic oligonucleotide
  Sense strand starting at position 3743 of SEQ ID NO: 2157
uggacagauaucugaguca

SEQ ID NO: 167497 - RNA, 19 nt, Artificial Sequence
  Description of Artificial Sequence: Synthetic oligonucleotide
  Antisense strand to SEQ ID NO: 167496
ugacucagauaucugucca

SEQ ID NO: 167498 - RNA, 19 nt, Artificial Sequence
  Description of Artificial Sequence: Synthetic oligonucleotide
  Sense strand starting at position 3845 of SEQ ID NO: 2157
ccucucuguuaaguagagu

SEQ ID NO: 167499 - RNA, 19 nt, Artificial Sequence
  Description of Artificial Sequence: Synthetic oligonucleotide
  Antisense strand to SEQ ID NO: 167498
acucuacuuaacagagagg

SEQ ID NO: 167500 - RNA, 19 nt, Artificial Sequence
  Description of Artificial Sequence: Synthetic oligonucleotide
  Sense strand starting at position 3934 of SEQ ID NO: 2157
ugauguuauaggcaagcua

SEQ ID NO: 167501 - RNA, 19 nt, Artificial Sequence
  Description of Artificial Sequence: Synthetic oligonucleotide
  Antisense strand to SEQ ID NO: 167500
uagcuugccuauaacauca

SEQ ID NO: 167502 - RNA, 19 nt, Artificial Sequence
  Description of Artificial Sequence: Synthetic oligonucleotide
  Sense strand starting at position 249 of SEQ ID NO: 2158
caguuauaggcucacagca

SEQ ID NO: 167503 - RNA, 19 nt, Artificial Sequence
  Description of Artificial Sequence: Synthetic oligonucleotide
  Antisense strand to SEQ ID NO: 167502
ugcugugagccuauaacug

SEQ ID NO: 167504 - RNA, 19 nt, Artificial Sequence
  Description of Artificial Sequence: Synthetic oligonucleotide
  Sense strand starting at position 291 of SEQ ID NO: 2158
agaucaagguugcugugaa

SEQ ID NO: 167505 - RNA, 19 nt, Artificial Sequence
  Description of Artificial Sequence: Synthetic oligonucleotide
  Antisense strand to SEQ ID NO: 167504
uucacagcaaccuugaucu

SEQ ID NO: 167506 - RNA, 19 nt, Artificial Sequence
  Description of Artificial Sequence: Synthetic oligonucleotide
  Sense strand starting at position 303 of SEQ ID NO: 2158
cugugaacugugugaucag

SEQ ID NO: 167507 - RNA, 19 nt, Artificial Sequence
  Description of Artificial Sequence: Synthetic oligonucleotide
  Antisense strand to SEQ ID NO: 167506
cugaucacacaguucacag

SEQ ID NO: 167508 - RNA, 19 nt, Artificial Sequence
  Description of Artificial Sequence: Synthetic oligonucleotide
  Sense strand starting at position 312 of SEQ ID NO: 2158
gugugaucaggccacugua

SEQ ID NO: 167509 - RNA, 19 nt, Artificial Sequence
  Description of Artificial Sequence: Synthetic oligonucleotide
  Antisense strand to SEQ ID NO: 167508
uacaguggccugaucacac

SEQ ID NO: 167510 - RNA, 19 nt, Artificial Sequence
  Description of Artificial Sequence: Synthetic oligonucleotide
  Sense strand starting at position 380 of SEQ ID NO: 2158
aacauaucucugggcguaa

SEQ ID NO: 167511 - RNA, 19 nt, Artificial Sequence
  Description of Artificial Sequence: Synthetic oligonucleotide
  Antisense strand to SEQ ID NO: 167510
uuacgcccagagauauguu

SEQ ID NO: 167512 - RNA, 19 nt, Artificial Sequence
  Description of Artificial Sequence: Synthetic oligonucleotide
  Sense strand starting at position 381 of SEQ ID NO: 2158
acauaucucugggcguaaa

SEQ ID NO: 167513 - RNA, 19 nt, Artificial Sequence
  Description of Artificial Sequence: Synthetic oligonucleotide
  Antisense strand to SEQ ID NO: 167512
uuuacgcccagagauaugu

SEQ ID NO: 167514 - RNA, 19 nt, Artificial Sequence
  Description of Artificial Sequence: Synthetic oligonucleotide
  Sense strand starting at position 384 of SEQ ID NO: 2158
uaucucugggcguaaauaa

SEQ ID NO: 167515 - RNA, 19 nt, Artificial Sequence
  Description of Artificial Sequence: Synthetic oligonucleotide
  Antisense strand to SEQ ID NO: 167514
uuauuuacgcccagagaua

SEQ ID NO: 167516 - RNA, 19 nt, Artificial Sequence
  Description of Artificial Sequence: Synthetic oligonucleotide
  Sense strand starting at position 681 of SEQ ID NO: 2158
guaugcauccacugaguaa

SEQ ID NO: 167517 - RNA, 19 nt, Artificial Sequence
  Description of Artificial Sequence: Synthetic oligonucleotide
  Antisense strand to SEQ ID NO: 167516
uuacucaguggaugcauac

SEQ ID NO: 167518 - RNA, 19 nt, Artificial Sequence
  Description of Artificial Sequence: Synthetic oligonucleotide
  Sense strand starting at position 685 of SEQ ID NO: 2158
gcauccacugaguaaugca

SEQ ID NO: 167519 - RNA, 19 nt, Artificial Sequence
  Description of Artificial Sequence: Synthetic oligonucleotide
  Antisense strand to SEQ ID NO: 167518
ugcauuacucaguggaugc

SEQ ID NO: 167520 - RNA, 19 nt, Artificial Sequence
  Description of Artificial Sequence: Synthetic oligonucleotide
  Sense strand starting at position 694 of SEQ ID NO: 2158
gaguaaugcaaauguguag

SEQ ID NO: 167521 - RNA, 19 nt, Artificial Sequence
  Description of Artificial Sequence: Synthetic oligonucleotide
  Antisense strand to SEQ ID NO: 167520
cuacacauuugcauuacuc

SEQ ID NO: 167522 - RNA, 19 nt, Artificial Sequence
  Description of Artificial Sequence: Synthetic oligonucleotide
  Sense strand starting at position 697 of SEQ ID NO: 2158
uaaugcaaauguguagaau

SEQ ID NO: 167523 - RNA, 19 nt, Artificial Sequence
  Description of Artificial Sequence: Synthetic oligonucleotide
  Antisense strand to SEQ ID NO: 167522
auucuacacauuugcauua

SEQ ID NO: 167524 - RNA, 19 nt, Artificial Sequence
  Description of Artificial Sequence: Synthetic oligonucleotide
  Sense strand starting at position 698 of SEQ ID NO: 2158
aaugcaaauguguagaaua

SEQ ID NO: 167525 - RNA, 19 nt, Artificial Sequence
  Description of Artificial Sequence: Synthetic oligonucleotide
  Antisense strand to SEQ ID NO: 167524
uauucuacacauuugcauu

SEQ ID NO: 167526 - RNA, 19 nt, Artificial Sequence
  Description of Artificial Sequence: Synthetic oligonucleotide
  Sense strand starting at position 764 of SEQ ID NO: 2158
cguuuauauuugcuuccua

SEQ ID NO: 167527 - RNA, 19 nt, Artificial Sequence
  Description of Artificial Sequence: Synthetic oligonucleotide
  Antisense strand to SEQ ID NO: 167526
uaggaagcaaauauaaacg

SEQ ID NO: 167528 - RNA, 19 nt, Artificial Sequence
  Description of Artificial Sequence: Synthetic oligonucleotide
  Sense strand starting at position 765 of SEQ ID NO: 2158
guuuauauuugcuuccuau

SEQ ID NO: 167529 - RNA, 19 nt, Artificial Sequence
  Description of Artificial Sequence: Synthetic oligonucleotide
  Antisense strand to SEQ ID NO: 167528
auaggaagcaaauauaaac

SEQ ID NO: 167530 - RNA, 19 nt, Artificial Sequence
  Description of Artificial Sequence: Synthetic oligonucleotide
  Sense strand starting at position 837 of SEQ ID NO: 2158
ccuuguaucccagagguuc

SEQ ID NO: 167531 - RNA, 19 nt, Artificial Sequence
  Description of Artificial Sequence: Synthetic oligonucleotide
  Antisense strand to SEQ ID NO: 167530
gaaccucugggauacaagg

SEQ ID NO: 167532 - RNA, 19 nt, Artificial Sequence
  Description of Artificial Sequence: Synthetic oligonucleotide
  Sense strand starting at position 874 of SEQ ID NO: 2158
uuggcuuugacuggauacu

SEQ ID NO: 167533 - RNA, 19 nt, Artificial Sequence
  Description of Artificial Sequence: Synthetic oligonucleotide
  Antisense strand to SEQ ID NO: 167532
aguauccagucaaagccaa

SEQ ID NO: 167534 - RNA, 19 nt, Artificial Sequence
  Description of Artificial Sequence: Synthetic oligonucleotide
  Sense strand starting at position 943 of SEQ ID NO: 2158
cugccauaaccuggaugaa

SEQ ID NO: 167535 - RNA, 19 nt, Artificial Sequence
  Description of Artificial Sequence: Synthetic oligonucleotide
  Antisense strand to SEQ ID NO: 167534
uucauccagguuauggcag

SEQ ID NO: 167536 - RNA, 19 nt, Artificial Sequence
  Description of Artificial Sequence: Synthetic oligonucleotide
  Sense strand starting at position 1004 of SEQ ID NO: 2158
ugcaucagucgggaaucaa

SEQ ID NO: 167537 - RNA, 19 nt, Artificial Sequence
  Description of Artificial Sequence: Synthetic oligonucleotide
  Antisense strand to SEQ ID NO: 167536
uugauucccgacugaugca

SEQ ID NO: 167538 - RNA, 19 nt, Artificial Sequence
  Description of Artificial Sequence: Synthetic oligonucleotide
  Sense strand starting at position 1278 of SEQ ID NO: 2158
accaauaauccguagcaga

SEQ ID NO: 167539 - RNA, 19 nt, Artificial Sequence
  Description of Artificial Sequence: Synthetic oligonucleotide
  Antisense strand to SEQ ID NO: 167538
ucugcuacggauuauuggu

SEQ ID NO: 167540 - RNA, 19 nt, Artificial Sequence
  Description of Artificial Sequence: Synthetic oligonucleotide
  Sense strand starting at position 2216 of SEQ ID NO: 2158
aaguaaaugcaguaucagu

SEQ ID NO: 167541 - RNA, 19 nt, Artificial Sequence
  Description of Artificial Sequence: Synthetic oligonucleotide
  Antisense strand to SEQ ID NO: 167540
acugauacugcauuuacuu

SEQ ID NO: 167542 - RNA, 19 nt, Artificial Sequence
  Description of Artificial Sequence: Synthetic oligonucleotide
  Sense strand starting at position 2308 of SEQ ID NO: 2158
aauguuauggcucgaggac

SEQ ID NO: 167543 - RNA, 19 nt, Artificial Sequence
  Description of Artificial Sequence: Synthetic oligonucleotide
  Antisense strand to SEQ ID NO: 167542
guccucgagccauaacauu

SEQ ID NO: 167544 - RNA, 19 nt, Artificial Sequence
  Description of Artificial Sequence: Synthetic oligonucleotide
  Sense strand starting at position 2309 of SEQ ID NO: 2158
auguuauggcucgaggaca

SEQ ID NO: 167545 - RNA, 19 nt, Artificial Sequence
  Description of Artificial Sequence: Synthetic oligonucleotide
  Antisense strand to SEQ ID NO: 167544
uguccucgagccauaacau

SEQ ID NO: 167546 - RNA, 19 nt, Artificial Sequence
  Description of Artificial Sequence: Synthetic oligonucleotide
  Sense strand starting at position 2352 of SEQ ID NO: 2158
cccgcaauucucuagagca

SEQ ID NO: 167547 - RNA, 19 nt, Artificial Sequence
  Description of Artificial Sequence: Synthetic oligonucleotide
  Antisense strand to SEQ ID NO: 167546
ugcucuagagaauugcggg

SEQ ID NO: 167548 - RNA, 19 nt, Artificial Sequence
  Description of Artificial Sequence: Synthetic oligonucleotide
  Sense strand starting at position 2599 of SEQ ID NO: 2158
guauuacauugucuuuaga

SEQ ID NO: 167549 - RNA, 19 nt, Artificial Sequence
  Description of Artificial Sequence: Synthetic oligonucleotide
  Antisense strand to SEQ ID NO: 167548
ucuaaagacaauguaauac

SEQ ID NO: 167550 - RNA, 19 nt, Artificial Sequence
  Description of Artificial Sequence: Synthetic oligonucleotide
  Sense strand starting at position 2691 of SEQ ID NO: 2158
guguccauuucuucucuau

SEQ ID NO: 167551 - RNA, 19 nt, Artificial Sequence
  Description of Artificial Sequence: Synthetic oligonucleotide
  Antisense strand to SEQ ID NO: 167550
auagagaagaaauggacac

SEQ ID NO: 167552 - RNA, 19 nt, Artificial Sequence
  Description of Artificial Sequence: Synthetic oligonucleotide
  Sense strand starting at position 2795 of SEQ ID NO: 2158
ggauuauuacuuuagcaua

SEQ ID NO: 167553 - RNA, 19 nt, Artificial Sequence
  Description of Artificial Sequence: Synthetic oligonucleotide
  Antisense strand to SEQ ID NO: 167552
uaugcuaaaguaauaaucc

SEQ ID NO: 167554 - RNA, 19 nt, Artificial Sequence
  Description of Artificial Sequence: Synthetic oligonucleotide
  Sense strand starting at position 2838 of SEQ ID NO: 2158
aucaaaugaugggaauauu

SEQ ID NO: 167555 - RNA, 19 nt, Artificial Sequence
  Description of Artificial Sequence: Synthetic oligonucleotide
  Antisense strand to SEQ ID NO: 167554
aauauucccaucauuugau

SEQ ID NO: 167556 - RNA, 19 nt, Artificial Sequence
  Description of Artificial Sequence: Synthetic oligonucleotide
  Sense strand starting at position 2868 of SEQ ID NO: 2158
ugguguauauugucaaauu

SEQ ID NO: 167557 - RNA, 19 nt, Artificial Sequence
  Description of Artificial Sequence: Synthetic oligonucleotide
  Antisense strand to SEQ ID NO: 167556
aauuugacaauauacacca

SEQ ID NO: 167558 - RNA, 19 nt, Artificial Sequence
  Description of Artificial Sequence: Synthetic oligonucleotide
  Sense strand starting at position 3078 of SEQ ID NO: 2158
ucuggaacucuuugaguac

SEQ ID NO: 167559 - RNA, 19 nt, Artificial Sequence
  Description of Artificial Sequence: Synthetic oligonucleotide
  Antisense strand to SEQ ID NO: 167558
guacucaaagaguuccaga

SEQ ID NO: 167560 - RNA, 19 nt, Artificial Sequence
  Description of Artificial Sequence: Synthetic oligonucleotide
  Sense strand starting at position 3215 of SEQ ID NO: 2158
ccacgcucugcugaacaaa

SEQ ID NO: 167561 - RNA, 19 nt, Artificial Sequence
  Description of Artificial Sequence: Synthetic oligonucleotide
  Antisense strand to SEQ ID NO: 167560
uuuguucagcagagcgugg

SEQ ID NO: 167562 - RNA, 19 nt, Artificial Sequence
  Description of Artificial Sequence: Synthetic oligonucleotide
  Sense strand starting at position 3408 of SEQ ID NO: 2158
ugagacuuaugguuggcua

SEQ ID NO: 167563 - RNA, 19 nt, Artificial Sequence
  Description of Artificial Sequence: Synthetic oligonucleotide
  Antisense strand to SEQ ID NO: 167562
uagccaaccauaagucuca

SEQ ID NO: 167564 - RNA, 19 nt, Artificial Sequence
  Description of Artificial Sequence: Synthetic oligonucleotide
  Sense strand starting at position 3409 of SEQ ID NO: 2158
gagacuuaugguuggcuac

SEQ ID NO: 167565 - RNA, 19 nt, Artificial Sequence
  Description of Artificial Sequence: Synthetic oligonucleotide
  Antisense strand to SEQ ID NO: 167564
guagccaaccauaagucuc

SEQ ID NO: 167566 - RNA, 19 nt, Artificial Sequence
  Description of Artificial Sequence: Synthetic oligonucleotide
  Sense strand starting at position 3506 of SEQ ID NO: 2158
cagauaguuggguacaucu

SEQ ID NO: 167567 - RNA, 19 nt, Artificial Sequence
  Description of Artificial Sequence: Synthetic oligonucleotide
  Antisense strand to SEQ ID NO: 167566
agauguacccaacuaucug

SEQ ID NO: 167568 - RNA, 19 nt, Artificial Sequence
  Description of Artificial Sequence: Synthetic oligonucleotide
  Sense strand starting at position 3537 of SEQ ID NO: 2158
cccuguuucucauuugucu

SEQ ID NO: 167569 - RNA, 19 nt, Artificial Sequence
  Description of Artificial Sequence: Synthetic oligonucleotide
  Antisense strand to SEQ ID NO: 167568
agacaaaugagaaacaggg

SEQ ID NO: 167570 - RNA, 19 nt, Artificial Sequence
  Description of Artificial Sequence: Synthetic oligonucleotide
  Sense strand starting at position 3544 of SEQ ID NO: 2158
ucucauuugucucuagcca

SEQ ID NO: 167571 - RNA, 19 nt, Artificial Sequence
  Description of Artificial Sequence: Synthetic oligonucleotide
  Antisense strand to SEQ ID NO: 167570
uggcuagagacaaaugaga

SEQ ID NO: 167572 - RNA, 19 nt, Artificial Sequence
  Description of Artificial Sequence: Synthetic oligonucleotide
  Sense strand starting at position 3548 of SEQ ID NO: 2158
auuugucucuagccacgaa

SEQ ID NO: 167573 - RNA, 19 nt, Artificial Sequence
  Description of Artificial Sequence: Synthetic oligonucleotide
  Antisense strand to SEQ ID NO: 167572
uucguggcuagagacaaau

SEQ ID NO: 167574 - RNA, 19 nt, Artificial Sequence
  Description of Artificial Sequence: Synthetic oligonucleotide
  Sense strand starting at position 3551 of SEQ ID NO: 2158
ugucucuagccacgaagaa

SEQ ID NO: 167575 - RNA, 19 nt, Artificial Sequence
  Description of Artificial Sequence: Synthetic oligonucleotide
  Antisense strand to SEQ ID NO: 167574
uucuucguggcuagagaca

SEQ ID NO: 167576 - RNA, 19 nt, Artificial Sequence
  Description of Artificial Sequence: Synthetic oligonucleotide
  Sense strand starting at position 3552 of SEQ ID NO: 2158
gucucuagccacgaagaaa

SEQ ID NO: 167577 - RNA, 19 nt, Artificial Sequence
  Description of Artificial Sequence: Synthetic oligonucleotide
  Antisense strand to SEQ ID NO: 167576
uuucuucguggcuagagac

SEQ ID NO: 167578 - RNA, 19 nt, Artificial Sequence
  Description of Artificial Sequence: Synthetic oligonucleotide
  Sense strand starting at position 3595 of SEQ ID NO: 2158
ugaacccaugcuugacaau

SEQ ID NO: 167579 - RNA, 19 nt, Artificial Sequence
  Description of Artificial Sequence: Synthetic oligonucleotide
  Antisense strand to SEQ ID NO: 167578
auugucaagcauggguuca

SEQ ID NO: 167580 - RNA, 19 nt, Artificial Sequence
  Description of Artificial Sequence: Synthetic oligonucleotide
  Sense strand starting at position 3618 of SEQ ID NO: 2158
auacgucuagcucaauuaa

SEQ ID NO: 167581 - RNA, 19 nt, Artificial Sequence
  Description of Artificial Sequence: Synthetic oligonucleotide
  Antisense strand to SEQ ID NO: 167580
uuaauugagcuagacguau

SEQ ID NO: 167582 - RNA, 19 nt, Artificial Sequence
  Description of Artificial Sequence: Synthetic oligonucleotide
  Sense strand starting at position 175 of SEQ ID NO: 2159
agaucaggaguucgaaaca

SEQ ID NO: 167583 - RNA, 19 nt, Artificial Sequence
  Description of Artificial Sequence: Synthetic oligonucleotide
  Antisense strand to SEQ ID NO: 167582
uguuucgaacuccugaucu

SEQ ID NO: 167584 - RNA, 19 nt, Artificial Sequence
  Description of Artificial Sequence: Synthetic oligonucleotide
  Sense strand starting at position 585 of SEQ ID NO: 2159
ccagcuacucaggagguau

SEQ ID NO: 167585 - RNA, 19 nt, Artificial Sequence
  Description of Artificial Sequence: Synthetic oligonucleotide
  Antisense strand to SEQ ID NO: 167584
auaccuccugaguagcugg

SEQ ID NO: 167586 - RNA, 19 nt, Artificial Sequence
  Description of Artificial Sequence: Synthetic oligonucleotide
  Sense strand starting at position 723 of SEQ ID NO: 2159
auucccuccugaguuugaa

SEQ ID NO: 167587 - RNA, 19 nt, Artificial Sequence
  Description of Artificial Sequence: Synthetic oligonucleotide
  Antisense strand to SEQ ID NO: 167586
uucaaacucaggagggaau

SEQ ID NO: 167588 - RNA, 19 nt, Artificial Sequence
  Description of Artificial Sequence: Synthetic oligonucleotide
  Sense strand starting at position 759 of SEQ ID NO: 2159
agaagcauuuaaggaacau

SEQ ID NO: 167589 - RNA, 19 nt, Artificial Sequence
  Description of Artificial Sequence: Synthetic oligonucleotide
  Antisense strand to SEQ ID NO: 167588
auguuccuuaaaugcuucu

SEQ ID NO: 167590 - RNA, 19 nt, Artificial Sequence
  Description of Artificial Sequence: Synthetic oligonucleotide
  Sense strand starting at position 789 of SEQ ID NO: 2159
cucauuugcuacgcacaga

SEQ ID NO: 167591 - RNA, 19 nt, Artificial Sequence
  Description of Artificial Sequence: Synthetic oligonucleotide
  Antisense strand to SEQ ID NO: 167590
ucugugcguagcaaaugag

SEQ ID NO: 167592 - RNA, 19 nt, Artificial Sequence
  Description of Artificial Sequence: Synthetic oligonucleotide
  Sense strand starting at position 1016 of SEQ ID NO: 2159
guacauaacugaguuccaa

SEQ ID NO: 167593 - RNA, 19 nt, Artificial Sequence
  Description of Artificial Sequence: Synthetic oligonucleotide
  Antisense strand to SEQ ID NO: 167592
uuggaacucaguuauguac

SEQ ID NO: 167594 - RNA, 19 nt, Artificial Sequence
  Description of Artificial Sequence: Synthetic oligonucleotide
  Sense strand starting at position 1076 of SEQ ID NO: 2159
aaaugaagauguuugcaua

SEQ ID NO: 167595 - RNA, 19 nt, Artificial Sequence
  Description of Artificial Sequence: Synthetic oligonucleotide
  Antisense strand to SEQ ID NO: 167594
uaugcaaacaucuucauuu

SEQ ID NO: 167596 - RNA, 19 nt, Artificial Sequence
  Description of Artificial Sequence: Synthetic oligonucleotide
  Sense strand starting at position 1077 of SEQ ID NO: 2159
aaugaagauguuugcauau

SEQ ID NO: 167597 - RNA, 19 nt, Artificial Sequence
  Description of Artificial Sequence: Synthetic oligonucleotide
  Antisense strand to SEQ ID NO: 167596
auaugcaaacaucuucauu

SEQ ID NO: 167598 - RNA, 19 nt, Artificial Sequence
  Description of Artificial Sequence: Synthetic oligonucleotide
  Sense strand starting at position 1097 of SEQ ID NO: 2159
ggcuuccuagauugaguau

SEQ ID NO: 167599 - RNA, 19 nt, Artificial Sequence
  Description of Artificial Sequence: Synthetic oligonucleotide
  Antisense strand to SEQ ID NO: 167598
auacucaaucuaggaagcc

SEQ ID NO: 167600 - RNA, 19 nt, Artificial Sequence
  Description of Artificial Sequence: Synthetic oligonucleotide
  Sense strand starting at position 1262 of SEQ ID NO: 2159
uuuguaggcugaucucaua

SEQ ID NO: 167601 - RNA, 19 nt, Artificial Sequence
  Description of Artificial Sequence: Synthetic oligonucleotide
  Antisense strand to SEQ ID NO: 167600
uaugagaucagccuacaaa

SEQ ID NO: 167602 - RNA, 19 nt, Artificial Sequence
  Description of Artificial Sequence: Synthetic oligonucleotide
  Sense strand starting at position 1480 of SEQ ID NO: 2159
guuucugaauccuuaggag

SEQ ID NO: 167603 - RNA, 19 nt, Artificial Sequence
  Description of Artificial Sequence: Synthetic oligonucleotide
  Antisense strand to SEQ ID NO: 167602
cuccuaaggauucagaaac

SEQ ID NO: 167604 - RNA, 19 nt, Artificial Sequence
  Description of Artificial Sequence: Synthetic oligonucleotide
  Sense strand starting at position 1732 of SEQ ID NO: 2159
cgucuucuccgagccugau

SEQ ID NO: 167605 - RNA, 19 nt, Artificial Sequence
  Description of Artificial Sequence: Synthetic oligonucleotide
  Antisense strand to SEQ ID NO: 167604
aucaggcucggagaagacg

SEQ ID NO: 167606 - RNA, 19 nt, Artificial Sequence
  Description of Artificial Sequence: Synthetic oligonucleotide
  Sense strand starting at position 2225 of SEQ ID NO: 2159
ucccgacgcugcuuauuua

SEQ ID NO: 167607 - RNA, 19 nt, Artificial Sequence
  Description of Artificial Sequence: Synthetic oligonucleotide
  Antisense strand to SEQ ID NO: 167606
uaaauaagcagcgucggga

SEQ ID NO: 167608 - RNA, 19 nt, Artificial Sequence
  Description of Artificial Sequence: Synthetic oligonucleotide
  Sense strand starting at position 2229 of SEQ ID NO: 2159
gacgcugcuuauuuaucua

SEQ ID NO: 167609 - RNA, 19 nt, Artificial Sequence
  Description of Artificial Sequence: Synthetic oligonucleotide
  Antisense strand to SEQ ID NO: 167608
uagauaaauaagcagcguc

SEQ ID NO: 167610 - RNA, 19 nt, Artificial Sequence
  Description of Artificial Sequence: Synthetic oligonucleotide
  Sense strand starting at position 2239 of SEQ ID NO: 2159
auuuaucuaucgguagcau

SEQ ID NO: 167611 - RNA, 19 nt, Artificial Sequence
  Description of Artificial Sequence: Synthetic oligonucleotide
  Antisense strand to SEQ ID NO: 167610
augcuaccgauagauaaau

SEQ ID NO: 167612 - RNA, 19 nt, Artificial Sequence
  Description of Artificial Sequence: Synthetic oligonucleotide
  Sense strand starting at position 2252 of SEQ ID NO: 2159
uagcaugacggguaauuga

SEQ ID NO: 167613 - RNA, 19 nt, Artificial Sequence
  Description of Artificial Sequence: Synthetic oligonucleotide
  Antisense strand to SEQ ID NO: 167612
ucaauuacccgucaugcua

SEQ ID NO: 167614 - RNA, 19 nt, Artificial Sequence
  Description of Artificial Sequence: Synthetic oligonucleotide
  Sense strand starting at position 2320 of SEQ ID NO: 2159
uggugucaggacugggaua

SEQ ID NO: 167615 - RNA, 19 nt, Artificial Sequence
  Description of Artificial Sequence: Synthetic oligonucleotide
  Antisense strand to SEQ ID NO: 167614
uaucccaguccugacacca

SEQ ID NO: 167616 - RNA, 19 nt, Artificial Sequence
  Description of Artificial Sequence: Synthetic oligonucleotide
  Sense strand starting at position 2321 of SEQ ID NO: 2159
ggugucaggacugggauau

SEQ ID NO: 167617 - RNA, 19 nt, Artificial Sequence
  Description of Artificial Sequence: Synthetic oligonucleotide
  Antisense strand to SEQ ID NO: 167616
auaucccaguccugacacc

SEQ ID NO: 167618 - RNA, 19 nt, Artificial Sequence
  Description of Artificial Sequence: Synthetic oligonucleotide
  Sense strand starting at position 2457 of SEQ ID NO: 2159
aguaacaauugagugcuua

SEQ ID NO: 167619 - RNA, 19 nt, Artificial Sequence
  Description of Artificial Sequence: Synthetic oligonucleotide
  Antisense strand to SEQ ID NO: 167618
uaagcacucaauuguuacu

SEQ ID NO: 167620 - RNA, 19 nt, Artificial Sequence
  Description of Artificial Sequence: Synthetic oligonucleotide
  Sense strand starting at position 2521 of SEQ ID NO: 2159
uuuaaucauuuagaggaga

SEQ ID NO: 167621 - RNA, 19 nt, Artificial Sequence
  Description of Artificial Sequence: Synthetic oligonucleotide
  Antisense strand to SEQ ID NO: 167620
ucuccucuaaaugauuaaa

SEQ ID NO: 167622 - RNA, 19 nt, Artificial Sequence
  Description of Artificial Sequence: Synthetic oligonucleotide
  Sense strand starting at position 2543 of SEQ ID NO: 2159
gugagagauuaagcaaagu

SEQ ID NO: 167623 - RNA, 19 nt, Artificial Sequence
  Description of Artificial Sequence: Synthetic oligonucleotide
  Antisense strand to SEQ ID NO: 167622
acuuugcuuaaucucucac

SEQ ID NO: 167624 - RNA, 19 nt, Artificial Sequence
  Description of Artificial Sequence: Synthetic oligonucleotide
  Sense strand starting at position 2660 of SEQ ID NO: 2159
gucagaugcuuggugagaa

SEQ ID NO: 167625 - RNA, 19 nt, Artificial Sequence
  Description of Artificial Sequence: Synthetic oligonucleotide
  Antisense strand to SEQ ID NO: 167624
uucucaccaagcaucugac

SEQ ID NO: 167626 - RNA, 19 nt, Artificial Sequence
  Description of Artificial Sequence: Synthetic oligonucleotide
  Sense strand starting at position 2992 of SEQ ID NO: 2159
uacuguaugcuggaauguu

SEQ ID NO: 167627 - RNA, 19 nt, Artificial Sequence
  Description of Artificial Sequence: Synthetic oligonucleotide
  Antisense strand to SEQ ID NO: 167626
aacauuccagcauacagua

SEQ ID NO: 167628 - RNA, 19 nt, Artificial Sequence
  Description of Artificial Sequence: Synthetic oligonucleotide
  Sense strand starting at position 3002 of SEQ ID NO: 2159
uggaauguuaggcaugcaa

SEQ ID NO: 167629 - RNA, 19 nt, Artificial Sequence
  Description of Artificial Sequence: Synthetic oligonucleotide
  Antisense strand to SEQ ID NO: 167628
uugcaugccuaacauucca

SEQ ID NO: 167630 - RNA, 19 nt, Artificial Sequence
  Description of Artificial Sequence: Synthetic oligonucleotide
  Sense strand starting at position 3006 of SEQ ID NO: 2159
auguuaggcaugcaaguaa

SEQ ID NO: 167631 - RNA, 19 nt, Artificial Sequence
  Description of Artificial Sequence: Synthetic oligonucleotide
  Antisense strand to SEQ ID NO: 167630
uuacuugcaugccuaacau

SEQ ID NO: 167632 - RNA, 19 nt, Artificial Sequence
  Description of Artificial Sequence: Synthetic oligonucleotide
  Sense strand starting at position 3091 of SEQ ID NO: 2159
uguauaaagagcugugaca

SEQ ID NO: 167633 - RNA, 19 nt, Artificial Sequence
  Description of Artificial Sequence: Synthetic oligonucleotide
  Antisense strand to SEQ ID NO: 167632
ugucacagcucuuuauaca

SEQ ID NO: 167634 - RNA, 19 nt, Artificial Sequence
  Description of Artificial Sequence: Synthetic oligonucleotide
  Sense strand starting at position 3352 of SEQ ID NO: 2159
guugaaugccuauacaucu

SEQ ID NO: 167635 - RNA, 19 nt, Artificial Sequence
  Description of Artificial Sequence: Synthetic oligonucleotide
  Antisense strand to SEQ ID NO: 167634
agauguauaggcauucaac

SEQ ID NO: 167636 - RNA, 19 nt, Artificial Sequence
  Description of Artificial Sequence: Synthetic oligonucleotide
  Sense strand starting at position 3409 of SEQ ID NO: 2159
acaaguguuugagucucau

SEQ ID NO: 167637 - RNA, 19 nt, Artificial Sequence
  Description of Artificial Sequence: Synthetic oligonucleotide
  Antisense strand to SEQ ID NO: 167636
augagacucaaacacuugu

SEQ ID NO: 167638 - RNA, 19 nt, Artificial Sequence
  Description of Artificial Sequence: Synthetic oligonucleotide
  Sense strand starting at position 3419 of SEQ ID NO: 2159
gagucucauugugugacaa

SEQ ID NO: 167639 - RNA, 19 nt, Artificial Sequence
  Description of Artificial Sequence: Synthetic oligonucleotide
  Antisense strand to SEQ ID NO: 167638
uugucacacaaugagacuc

SEQ ID NO: 167640 - RNA, 19 nt, Artificial Sequence
  Description of Artificial Sequence: Synthetic oligonucleotide
  Sense strand starting at position 3420 of SEQ ID NO: 2159
agucucauugugugacaag

SEQ ID NO: 167641 - RNA, 19 nt, Artificial Sequence
  Description of Artificial Sequence: Synthetic oligonucleotide
  Antisense strand to SEQ ID NO: 167640
cuugucacacaaugagacu

SEQ ID NO: 167642 - RNA, 19 nt, Artificial Sequence
  Description of Artificial Sequence: Synthetic oligonucleotide
  Sense strand starting at position 3446 of SEQ ID NO: 2159
cuaugugcugaguacauaa

SEQ ID NO: 167643 - RNA, 19 nt, Artificial Sequence
  Description of Artificial Sequence: Synthetic oligonucleotide
  Antisense strand to SEQ ID NO: 167642
uuauguacucagcacauag

SEQ ID NO: 167644 - RNA, 19 nt, Artificial Sequence
  Description of Artificial Sequence: Synthetic oligonucleotide
  Sense strand starting at position 3480 of SEQ ID NO: 2159
gaugaucucuguccuuaga

SEQ ID NO: 167645 - RNA, 19 nt, Artificial Sequence
  Description of Artificial Sequence: Synthetic oligonucleotide
  Antisense strand to SEQ ID NO: 167644
ucuaaggacagagaucauc

SEQ ID NO: 167646 - RNA, 19 nt, Artificial Sequence
  Description of Artificial Sequence: Synthetic oligonucleotide
  Sense strand starting at position 3482 of SEQ ID NO: 2159
ugaucucuguccuuagaaa

SEQ ID NO: 167647 - RNA, 19 nt, Artificial Sequence
  Description of Artificial Sequence: Synthetic oligonucleotide
  Antisense strand to SEQ ID NO: 167646
uuucuaaggacagagauca

SEQ ID NO: 167648 - RNA, 19 nt, Artificial Sequence
  Description of Artificial Sequence: Synthetic oligonucleotide
  Sense strand starting at position 3663 of SEQ ID NO: 2159
gagcuuugguaaccgggaa

SEQ ID NO: 167649 - RNA, 19 nt, Artificial Sequence
  Description of Artificial Sequence: Synthetic oligonucleotide
  Antisense strand to SEQ ID NO: 167648
uucccgguuaccaaagcuc

SEQ ID NO: 167650 - RNA, 19 nt, Artificial Sequence
  Description of Artificial Sequence: Synthetic oligonucleotide
  Sense strand starting at position 3664 of SEQ ID NO: 2159
agcuuugguaaccgggaaa

SEQ ID NO: 167651 - RNA, 19 nt, Artificial Sequence
  Description of Artificial Sequence: Synthetic oligonucleotide
  Antisense strand to SEQ ID NO: 167650
uuucccgguuaccaaagcu

SEQ ID NO: 167652 - RNA, 19 nt, Artificial Sequence
  Description of Artificial Sequence: Synthetic oligonucleotide
  Sense strand starting at position 3714 of SEQ ID NO: 2159
uguuauagucuggaccuuu

SEQ ID NO: 167653 - RNA, 19 nt, Artificial Sequence
  Description of Artificial Sequence: Synthetic oligonucleotide
  Antisense strand to SEQ ID NO: 167652
aaagguccagacuauaaca

SEQ ID NO: 167654 - RNA, 19 nt, Artificial Sequence
  Description of Artificial Sequence: Synthetic oligonucleotide
  Sense strand starting at position 3788 of SEQ ID NO: 2159
uuggaagaacggugaaauu

SEQ ID NO: 167655 - RNA, 19 nt, Artificial Sequence
  Description of Artificial Sequence: Synthetic oligonucleotide
  Antisense strand to SEQ ID NO: 167654
aauuucaccguucuuccaa

SEQ ID NO: 167656 - RNA, 19 nt, Artificial Sequence
  Description of Artificial Sequence: Synthetic oligonucleotide
  Sense strand starting at position 3800 of SEQ ID NO: 2159
ugaaauuauggcgauuguu

SEQ ID NO: 167657 - RNA, 19 nt, Artificial Sequence
  Description of Artificial Sequence: Synthetic oligonucleotide
  Antisense strand to SEQ ID NO: 167656
aacaaucgccauaauuuca

SEQ ID NO: 167658 - RNA, 19 nt, Artificial Sequence
  Description of Artificial Sequence: Synthetic oligonucleotide
  Sense strand starting at position 3803 of SEQ ID NO: 2159
aauuauggcgauuguuaaa

SEQ ID NO: 167659 - RNA, 19 nt, Artificial Sequence
  Description of Artificial Sequence: Synthetic oligonucleotide
  Antisense strand to SEQ ID NO: 167658
uuuaacaaucgccauaauu

SEQ ID NO: 167660 - RNA, 19 nt, Artificial Sequence
  Description of Artificial Sequence: Synthetic oligonucleotide
  Sense strand starting at position 3810 of SEQ ID NO: 2159
gcgauuguuaaaugauaca

SEQ ID NO: 167661 - RNA, 19 nt, Artificial Sequence
  Description of Artificial Sequence: Synthetic oligonucleotide
  Antisense strand to SEQ ID NO: 167660
uguaucauuuaacaaucgc

SEQ ID NO: 167662 - RNA, 19 nt, Artificial Sequence
  Description of Artificial Sequence: Synthetic oligonucleotide
  Sense strand starting at position 819 of SEQ ID NO: 2160
ggguuaggauugguacuau

SEQ ID NO: 167663 - RNA, 19 nt, Artificial Sequence
  Description of Artificial Sequence: Synthetic oligonucleotide
  Antisense strand to SEQ ID NO: 167662
auaguaccaauccuaaccc

SEQ ID NO: 167664 - RNA, 19 nt, Artificial Sequence
  Description of Artificial Sequence: Synthetic oligonucleotide
  Sense strand starting at position 861 of SEQ ID NO: 2160
uugauaggcuagucugaga

SEQ ID NO: 167665 - RNA, 19 nt, Artificial Sequence
  Description of Artificial Sequence: Synthetic oligonucleotide
  Antisense strand to SEQ ID NO: 167664
ucucagacuagccuaucaa

SEQ ID NO: 167666 - RNA, 19 nt, Artificial Sequence
  Description of Artificial Sequence: Synthetic oligonucleotide
  Sense strand starting at position 1092 of SEQ ID NO: 2160
gucaaauaauugccuugca

SEQ ID NO: 167667 - RNA, 19 nt, Artificial Sequence
  Description of Artificial Sequence: Synthetic oligonucleotide
  Antisense strand to SEQ ID NO: 167666
ugcaaggcaauuauuugac

SEQ ID NO: 167668 - RNA, 19 nt, Artificial Sequence
  Description of Artificial Sequence: Synthetic oligonucleotide
  Sense strand starting at position 1102 of SEQ ID NO: 2160
ugccuugcauuugauauuu

SEQ ID NO: 167669 - RNA, 19 nt, Artificial Sequence
  Description of Artificial Sequence: Synthetic oligonucleotide
  Antisense strand to SEQ ID NO: 167668
aaauaucaaaugcaaggca

SEQ ID NO: 167670 - RNA, 19 nt, Artificial Sequence
  Description of Artificial Sequence: Synthetic oligonucleotide
  Sense strand starting at position 1206 of SEQ ID NO: 2160
auugaaggagccuauguau

SEQ ID NO: 167671 - RNA, 19 nt, Artificial Sequence
  Description of Artificial Sequence: Synthetic oligonucleotide
  Antisense strand to SEQ ID NO: 167670
auacauaggcuccuucaau

SEQ ID NO: 167672 - RNA, 19 nt, Artificial Sequence
  Description of Artificial Sequence: Synthetic oligonucleotide
  Sense strand starting at position 1209 of SEQ ID NO: 2160
gaaggagccuauguaucua

SEQ ID NO: 167673 - RNA, 19 nt, Artificial Sequence
  Description of Artificial Sequence: Synthetic oligonucleotide
  Antisense strand to SEQ ID NO: 167672
uagauacauaggcuccuuc

SEQ ID NO: 167674 - RNA, 19 nt, Artificial Sequence
  Description of Artificial Sequence: Synthetic oligonucleotide
  Sense strand starting at position 1217 of SEQ ID NO: 2160
cuauguaucuaguccaacu

SEQ ID NO: 167675 - RNA, 19 nt, Artificial Sequence
  Description of Artificial Sequence: Synthetic oligonucleotide
  Antisense strand to SEQ ID NO: 167674
aguuggacuagauacauag

SEQ ID NO: 167676 - RNA, 19 nt, Artificial Sequence
  Description of Artificial Sequence: Synthetic oligonucleotide
  Sense strand starting at position 1334 of SEQ ID NO: 2160
caacuaagguggccuauua

SEQ ID NO: 167677 - RNA, 19 nt, Artificial Sequence
  Description of Artificial Sequence: Synthetic oligonucleotide
  Antisense strand to SEQ ID NO: 167676
uaauaggccaccuuaguug

SEQ ID NO: 167678 - RNA, 19 nt, Artificial Sequence
  Description of Artificial Sequence: Synthetic oligonucleotide
  Sense strand starting at position 1383 of SEQ ID NO: 2160
aucaaagucuaccuuugua

SEQ ID NO: 167679 - RNA, 19 nt, Artificial Sequence
  Description of Artificial Sequence: Synthetic oligonucleotide
  Antisense strand to SEQ ID NO: 167678
uacaaagguagacuuugau

SEQ ID NO: 167680 - RNA, 19 nt, Artificial Sequence
  Description of Artificial Sequence: Synthetic oligonucleotide
  Sense strand starting at position 1395 of SEQ ID NO: 2160
cuuuguagacuuuguagua

SEQ ID NO: 167681 - RNA, 19 nt, Artificial Sequence
  Description of Artificial Sequence: Synthetic oligonucleotide
  Antisense strand to SEQ ID NO: 167680
uacuacaaagucuacaaag

SEQ ID NO: 167682 - RNA, 19 nt, Artificial Sequence
  Description of Artificial Sequence: Synthetic oligonucleotide
  Sense strand starting at position 1439 of SEQ ID NO: 2160
uugcuuauacagugcuaaa

SEQ ID NO: 167683 - RNA, 19 nt, Artificial Sequence
  Description of Artificial Sequence: Synthetic oligonucleotide
  Antisense strand to SEQ ID NO: 167682
uuuagcacuguauaagcaa

SEQ ID NO: 167684 - RNA, 19 nt, Artificial Sequence
  Description of Artificial Sequence: Synthetic oligonucleotide
  Sense strand starting at position 1620 of SEQ ID NO: 2160
auugaacuguuggcucaua

SEQ ID NO: 167685 - RNA, 19 nt, Artificial Sequence
  Description of Artificial Sequence: Synthetic oligonucleotide
  Antisense strand to SEQ ID NO: 167684
uaugagccaacaguucaau

SEQ ID NO: 167686 - RNA, 19 nt, Artificial Sequence
  Description of Artificial Sequence: Synthetic oligonucleotide
  Sense strand starting at position 1633 of SEQ ID NO: 2160
cucauagugcgcgcuaaua

SEQ ID NO: 167687 - RNA, 19 nt, Artificial Sequence
  Description of Artificial Sequence: Synthetic oligonucleotide
  Antisense strand to SEQ ID NO: 167686
uauuagcgcgcacuaugag

SEQ ID NO: 167688 - RNA, 19 nt, Artificial Sequence
  Description of Artificial Sequence: Synthetic oligonucleotide
  Sense strand starting at position 1664 of SEQ ID NO: 2160
gaucucugaugauucugua

SEQ ID NO: 167689 - RNA, 19 nt, Artificial Sequence
  Description of Artificial Sequence: Synthetic oligonucleotide
  Antisense strand to SEQ ID NO: 167688
uacagaaucaucagagauc

SEQ ID NO: 167690 - RNA, 19 nt, Artificial Sequence
  Description of Artificial Sequence: Synthetic oligonucleotide
  Sense strand starting at position 2139 of SEQ ID NO: 2160
cccuguaaucccgaaggaa

SEQ ID NO: 167691 - RNA, 19 nt, Artificial Sequence
  Description of Artificial Sequence: Synthetic oligonucleotide
  Antisense strand to SEQ ID NO: 167690
uuccuucgggauuacaggg

SEQ ID NO: 167692 - RNA, 19 nt, Artificial Sequence
  Description of Artificial Sequence: Synthetic oligonucleotide
  Sense strand starting at position 2142 of SEQ ID NO: 2160
uguaaucccgaaggaauug

SEQ ID NO: 167693 - RNA, 19 nt, Artificial Sequence
  Description of Artificial Sequence: Synthetic oligonucleotide
  Antisense strand to SEQ ID NO: 167692
caauuccuucgggauuaca

SEQ ID NO: 167694 - RNA, 19 nt, Artificial Sequence
  Description of Artificial Sequence: Synthetic oligonucleotide
  Sense strand starting at position 2263 of SEQ ID NO: 2160
ugcgaagcuauggaucaua

SEQ ID NO: 167695 - RNA, 19 nt, Artificial Sequence
  Description of Artificial Sequence: Synthetic oligonucleotide
  Antisense strand to SEQ ID NO: 167694
uaugauccauagcuucgca

SEQ ID NO: 167696 - RNA, 19 nt, Artificial Sequence
  Description of Artificial Sequence: Synthetic oligonucleotide
  Sense strand starting at position 2292 of SEQ ID NO: 2160
ccagcaguccuuuaucaga

SEQ ID NO: 167697 - RNA, 19 nt, Artificial Sequence
  Description of Artificial Sequence: Synthetic oligonucleotide
  Antisense strand to SEQ ID NO: 167696
ucugauaaaggacugcugg

SEQ ID NO: 167698 - RNA, 19 nt, Artificial Sequence
  Description of Artificial Sequence: Synthetic oligonucleotide
  Sense strand starting at position 2294 of SEQ ID NO: 2160
agcaguccuuuaucagaca

SEQ ID NO: 167699 - RNA, 19 nt, Artificial Sequence
  Description of Artificial Sequence: Synthetic oligonucleotide
  Antisense strand to SEQ ID NO: 167698
ugucugauaaaggacugcu

SEQ ID NO: 167700 - RNA, 19 nt, Artificial Sequence
  Description of Artificial Sequence: Synthetic oligonucleotide
  Sense strand starting at position 2355 of SEQ ID NO: 2160
uucuaagcacuguguuaau

SEQ ID NO: 167701 - RNA, 19 nt, Artificial Sequence
  Description of Artificial Sequence: Synthetic oligonucleotide
  Antisense strand to SEQ ID NO: 167700
auuaacacagugcuuagaa

SEQ ID NO: 167702 - RNA, 19 nt, Artificial Sequence
  Description of Artificial Sequence: Synthetic oligonucleotide
  Sense strand starting at position 2407 of SEQ ID NO: 2160
aagagauggugucccgaga

SEQ ID NO: 167703 - RNA, 19 nt, Artificial Sequence
  Description of Artificial Sequence: Synthetic oligonucleotide
  Antisense strand to SEQ ID NO: 167702
ucucgggacaccaucucuu

SEQ ID NO: 167704 - RNA, 19 nt, Artificial Sequence
  Description of Artificial Sequence: Synthetic oligonucleotide
  Sense strand starting at position 2993 of SEQ ID NO: 2160
auauaaaugucccuacagu

SEQ ID NO: 167705 - RNA, 19 nt, Artificial Sequence
  Description of Artificial Sequence: Synthetic oligonucleotide
  Antisense strand to SEQ ID NO: 167704
acuguagggacauuuauau

SEQ ID NO: 167706 - RNA, 19 nt, Artificial Sequence
  Description of Artificial Sequence: Synthetic oligonucleotide
  Sense strand starting at position 3001 of SEQ ID NO: 2160
gucccuacaguguaacaga

SEQ ID NO: 167707 - RNA, 19 nt, Artificial Sequence
  Description of Artificial Sequence: Synthetic oligonucleotide
  Antisense strand to SEQ ID NO: 167706
ucuguuacacuguagggac

SEQ ID NO: 167708 - RNA, 19 nt, Artificial Sequence
  Description of Artificial Sequence: Synthetic oligonucleotide
  Sense strand starting at position 3009 of SEQ ID NO: 2160
aguguaacagaugaugcua

SEQ ID NO: 167709 - RNA, 19 nt, Artificial Sequence
  Description of Artificial Sequence: Synthetic oligonucleotide
  Antisense strand to SEQ ID NO: 167708
uagcaucaucuguuacacu

SEQ ID NO: 167710 - RNA, 19 nt, Artificial Sequence
  Description of Artificial Sequence: Synthetic oligonucleotide
  Sense strand starting at position 3061 of SEQ ID NO: 2160
gaauguccugcugaacauu

SEQ ID NO: 167711 - RNA, 19 nt, Artificial Sequence
  Description of Artificial Sequence: Synthetic oligonucleotide
  Antisense strand to SEQ ID NO: 167710
aauguucagcaggacauuc

SEQ ID NO: 167712 - RNA, 19 nt, Artificial Sequence
  Description of Artificial Sequence: Synthetic oligonucleotide
  Sense strand starting at position 3071 of SEQ ID NO: 2160
cugaacauucggugaguga

SEQ ID NO: 167713 - RNA, 19 nt, Artificial Sequence
  Description of Artificial Sequence: Synthetic oligonucleotide
  Antisense strand to SEQ ID NO: 167712
ucacucaccgaauguucag

SEQ ID NO: 167714 - RNA, 19 nt, Artificial Sequence
  Description of Artificial Sequence: Synthetic oligonucleotide
  Sense strand starting at position 3072 of SEQ ID NO: 2160
ugaacauucggugagugaa

SEQ ID NO: 167715 - RNA, 19 nt, Artificial Sequence
  Description of Artificial Sequence: Synthetic oligonucleotide
  Antisense strand to SEQ ID NO: 167714
uucacucaccgaauguuca

SEQ ID NO: 167716 - RNA, 19 nt, Artificial Sequence
  Description of Artificial Sequence: Synthetic oligonucleotide
  Sense strand starting at position 3479 of SEQ ID NO: 2160
aguuucuaggaauguuauu

SEQ ID NO: 167717 - RNA, 19 nt, Artificial Sequence
  Description of Artificial Sequence: Synthetic oligonucleotide
  Antisense strand to SEQ ID NO: 167716
aauaacauuccuagaaacu

SEQ ID NO: 167718 - RNA, 19 nt, Artificial Sequence
  Description of Artificial Sequence: Synthetic oligonucleotide
  Sense strand starting at position 3542 of SEQ ID NO: 2160
cauuaagagcuguguacca

SEQ ID NO: 167719 - RNA, 19 nt, Artificial Sequence
  Description of Artificial Sequence: Synthetic oligonucleotide
  Antisense strand to SEQ ID NO: 167718
ugguacacagcucuuaaug

SEQ ID NO: 167720 - RNA, 19 nt, Artificial Sequence
  Description of Artificial Sequence: Synthetic oligonucleotide
  Sense strand starting at position 3544 of SEQ ID NO: 2160
uuaagagcuguguaccauu

SEQ ID NO: 167721 - RNA, 19 nt, Artificial Sequence
  Description of Artificial Sequence: Synthetic oligonucleotide
  Antisense strand to SEQ ID NO: 167720
aaugguacacagcucuuaa

SEQ ID NO: 167722 - RNA, 19 nt, Artificial Sequence
  Description of Artificial Sequence: Synthetic oligonucleotide
  Sense strand starting at position 3639 of SEQ ID NO: 2160
ugaggaaugugaguuaaau

SEQ ID NO: 167723 - RNA, 19 nt, Artificial Sequence
  Description of Artificial Sequence: Synthetic oligonucleotide
  Antisense strand to SEQ ID NO: 167722
auuuaacucacauuccuca

SEQ ID NO: 167724 - RNA, 19 nt, Artificial Sequence
  Description of Artificial Sequence: Synthetic oligonucleotide
  Sense strand starting at position 3744 of SEQ ID NO: 2160
uugcuauugccacaaguau

SEQ ID NO: 167725 - RNA, 19 nt, Artificial Sequence
  Description of Artificial Sequence: Synthetic oligonucleotide
  Antisense strand to SEQ ID NO: 167724
auacuuguggcaauagcaa

SEQ ID NO: 167726 - RNA, 19 nt, Artificial Sequence
  Description of Artificial Sequence: Synthetic oligonucleotide
  Sense strand starting at position 3753 of SEQ ID NO: 2160
ccacaaguauuaguuauaa

SEQ ID NO: 167727 - RNA, 19 nt, Artificial Sequence
  Description of Artificial Sequence: Synthetic oligonucleotide
  Antisense strand to SEQ ID NO: 167726
uuauaacuaauacuugugg

SEQ ID NO: 167728 - RNA, 19 nt, Artificial Sequence
  Description of Artificial Sequence: Synthetic oligonucleotide
  Sense strand starting at position 3810 of SEQ ID NO: 2160
acccuauagcuugauaaug

SEQ ID NO: 167729 - RNA, 19 nt, Artificial Sequence
  Description of Artificial Sequence: Synthetic oligonucleotide
  Antisense strand to SEQ ID NO: 167728
cauuaucaagcuauagggu

SEQ ID NO: 167730 - RNA, 19 nt, Artificial Sequence
  Description of Artificial Sequence: Synthetic oligonucleotide
  Sense strand starting at position 3818 of SEQ ID NO: 2160
gcuugauaauguuuagcca

SEQ ID NO: 167731 - RNA, 19 nt, Artificial Sequence
  Description of Artificial Sequence: Synthetic oligonucleotide
  Antisense strand to SEQ ID NO: 167730
uggcuaaacauuaucaagc

SEQ ID NO: 167732 - RNA, 19 nt, Artificial Sequence
  Description of Artificial Sequence: Synthetic oligonucleotide
  Sense strand starting at position 3819 of SEQ ID NO: 2160
cuugauaauguuuagccaa

SEQ ID NO: 167733 - RNA, 19 nt, Artificial Sequence
  Description of Artificial Sequence: Synthetic oligonucleotide
  Antisense strand to SEQ ID NO: 167732
uuggcuaaacauuaucaag

SEQ ID NO: 167734 - RNA, 19 nt, Artificial Sequence
  Description of Artificial Sequence: Synthetic oligonucleotide
  Sense strand starting at position 3821 of SEQ ID NO: 2160
ugauaauguuuagccaauu

SEQ ID NO: 167735 - RNA, 19 nt, Artificial Sequence
  Description of Artificial Sequence: Synthetic oligonucleotide
  Antisense strand to SEQ ID NO: 167734
aauuggcuaaacauuauca

SEQ ID NO: 167736 - RNA, 19 nt, Artificial Sequence
  Description of Artificial Sequence: Synthetic oligonucleotide
  Sense strand starting at position 3942 of SEQ ID NO: 2160
accugcugcuaaucuuaga

SEQ ID NO: 167737 - RNA, 19 nt, Artificial Sequence
  Description of Artificial Sequence: Synthetic oligonucleotide
  Antisense strand to SEQ ID NO: 167736
ucuaagauuagcagcaggu

SEQ ID NO: 167738 - RNA, 19 nt, Artificial Sequence
  Description of Artificial Sequence: Synthetic oligonucleotide
  Sense strand starting at position 3950 of SEQ ID NO: 2160
cuaaucuuagaguguauau

SEQ ID NO: 167739 - RNA, 19 nt, Artificial Sequence
  Description of Artificial Sequence: Synthetic oligonucleotide
  Antisense strand to SEQ ID NO: 167738
auauacacucuaagauuag

SEQ ID NO: 167740 - RNA, 19 nt, Artificial Sequence
  Description of Artificial Sequence: Synthetic oligonucleotide
  Sense strand starting at position 3961 of SEQ ID NO: 2160
guguauauucuaggcaacu

SEQ ID NO: 167741 - RNA, 19 nt, Artificial Sequence
  Description of Artificial Sequence: Synthetic oligonucleotide
  Antisense strand to SEQ ID NO: 167740
aguugccuagaauauacac

SEQ ID NO: 167742 - RNA, 19 nt, Artificial Sequence
  Description of Artificial Sequence: Synthetic oligonucleotide
  Sense strand starting at position 10 of SEQ ID NO: 2161
ucgggaggcugaguagaau

SEQ ID NO: 167743 - RNA, 19 nt, Artificial Sequence
  Description of Artificial Sequence: Synthetic oligonucleotide
  Antisense strand to SEQ ID NO: 167742
auucuacucagccucccga

SEQ ID NO: 167744 - RNA, 19 nt, Artificial Sequence
  Description of Artificial Sequence: Synthetic oligonucleotide
  Sense strand starting at position 19 of SEQ ID NO: 2161
ugaguagaaucacuugaac

SEQ ID NO: 167745 - RNA, 19 nt, Artificial Sequence
  Description of Artificial Sequence: Synthetic oligonucleotide
  Antisense strand to SEQ ID NO: 167744
guucaagugauucuacuca

SEQ ID NO: 167746 - RNA, 19 nt, Artificial Sequence
  Description of Artificial Sequence: Synthetic oligonucleotide
  Sense strand starting at position 281 of SEQ ID NO: 2161
caguaaguauuacuggaaa

SEQ ID NO: 167747 - RNA, 19 nt, Artificial Sequence
  Description of Artificial Sequence: Synthetic oligonucleotide
  Antisense strand to SEQ ID NO: 167746
uuuccaguaauacuuacug

SEQ ID NO: 167748 - RNA, 19 nt, Artificial Sequence
  Description of Artificial Sequence: Synthetic oligonucleotide
  Sense strand starting at position 304 of SEQ ID NO: 2161
guguaucuagcauaauaca

SEQ ID NO: 167749 - RNA, 19 nt, Artificial Sequence
  Description of Artificial Sequence: Synthetic oligonucleotide
  Antisense strand to SEQ ID NO: 167748
uguauuaugcuagauacac

SEQ ID NO: 167750 - RNA, 19 nt, Artificial Sequence
  Description of Artificial Sequence: Synthetic oligonucleotide
  Sense strand starting at position 332 of SEQ ID NO: 2161
uuauuaauccaagggcaaa

SEQ ID NO: 167751 - RNA, 19 nt, Artificial Sequence
  Description of Artificial Sequence: Synthetic oligonucleotide
  Antisense strand to SEQ ID NO: 167750
uuugcccuuggauuaauaa

SEQ ID NO: 167752 - RNA, 19 nt, Artificial Sequence
  Description of Artificial Sequence: Synthetic oligonucleotide
  Sense strand starting at position 419 of SEQ ID NO: 2161
auuaaaccagucugguuau

SEQ ID NO: 167753 - RNA, 19 nt, Artificial Sequence
  Description of Artificial Sequence: Synthetic oligonucleotide
  Antisense strand to SEQ ID NO: 167752
auaaccagacugguuuaau

SEQ ID NO: 167754 - RNA, 19 nt, Artificial Sequence
  Description of Artificial Sequence: Synthetic oligonucleotide
  Sense strand starting at position 650 of SEQ ID NO: 2161
aucaguuacuuucuguaca

SEQ ID NO: 167755 - RNA, 19 nt, Artificial Sequence
  Description of Artificial Sequence: Synthetic oligonucleotide
  Antisense strand to SEQ ID NO: 167754
uguacagaaaguaacugau

SEQ ID NO: 167756 - RNA, 19 nt, Artificial Sequence
  Description of Artificial Sequence: Synthetic oligonucleotide
  Sense strand starting at position 990 of SEQ ID NO: 2161
cuuacuaugcacuagaagu

SEQ ID NO: 167757 - RNA, 19 nt, Artificial Sequence
  Description of Artificial Sequence: Synthetic oligonucleotide
  Antisense strand to SEQ ID NO: 167756
acuucuagugcauaguaag

SEQ ID NO: 167758 - RNA, 19 nt, Artificial Sequence
  Description of Artificial Sequence: Synthetic oligonucleotide
  Sense strand starting at position 1039 of SEQ ID NO: 2161
uccugagguggguacuauu

SEQ ID NO: 167759 - RNA, 19 nt, Artificial Sequence
  Description of Artificial Sequence: Synthetic oligonucleotide
  Antisense strand to SEQ ID NO: 167758
aauaguacccaccucagga

SEQ ID NO: 167760 - RNA, 19 nt, Artificial Sequence
  Description of Artificial Sequence: Synthetic oligonucleotide
  Sense strand starting at position 1063 of SEQ ID NO: 2161
cuuccaugugaagguugaa

SEQ ID NO: 167761 - RNA, 19 nt, Artificial Sequence
  Description of Artificial Sequence: Synthetic oligonucleotide
  Antisense strand to SEQ ID NO: 167760
uucaaccuucacauggaag

SEQ ID NO: 167762 - RNA, 19 nt, Artificial Sequence
  Description of Artificial Sequence: Synthetic oligonucleotide
  Sense strand starting at position 1092 of SEQ ID NO: 2161
ggcuuagugaaaugaugga

SEQ ID NO: 167763 - RNA, 19 nt, Artificial Sequence
  Description of Artificial Sequence: Synthetic oligonucleotide
  Antisense strand to SEQ ID NO: 167762
uccaucauuucacuaagcc

SEQ ID NO: 167764 - RNA, 19 nt, Artificial Sequence
  Description of Artificial Sequence: Synthetic oligonucleotide
  Sense strand starting at position 1133 of SEQ ID NO: 2161
uggugaggacgauagucua

SEQ ID NO: 167765 - RNA, 19 nt, Artificial Sequence
  Description of Artificial Sequence: Synthetic oligonucleotide
  Antisense strand to SEQ ID NO: 167764
uagacuaucguccucacca

SEQ ID NO: 167766 - RNA, 19 nt, Artificial Sequence
  Description of Artificial Sequence: Synthetic oligonucleotide
  Sense strand starting at position 1140 of SEQ ID NO: 2161
gacgauagucuaggaaaua

SEQ ID NO: 167767 - RNA, 19 nt, Artificial Sequence
  Description of Artificial Sequence: Synthetic oligonucleotide
  Antisense strand to SEQ ID NO: 167766
uauuuccuagacuaucguc

SEQ ID NO: 167768 - RNA, 19 nt, Artificial Sequence
  Description of Artificial Sequence: Synthetic oligonucleotide
  Sense strand starting at position 1309 of SEQ ID NO: 2161
uaugaaaucgaguauuagu

SEQ ID NO: 167769 - RNA, 19 nt, Artificial Sequence
  Description of Artificial Sequence: Synthetic oligonucleotide
  Antisense strand to SEQ ID NO: 167768
acuaauacucgauuucaua

SEQ ID NO: 167770 - RNA, 19 nt, Artificial Sequence
  Description of Artificial Sequence: Synthetic oligonucleotide
  Sense strand starting at position 1403 of SEQ ID NO: 2161
ucaaacagugccuagauua

SEQ ID NO: 167771 - RNA, 19 nt, Artificial Sequence
  Description of Artificial Sequence: Synthetic oligonucleotide
  Antisense strand to SEQ ID NO: 167770
uaaucuaggcacuguuuga

SEQ ID NO: 167772 - RNA, 19 nt, Artificial Sequence
  Description of Artificial Sequence: Synthetic oligonucleotide
  Sense strand starting at position 1467 of SEQ ID NO: 2161
ucugcauuauacccagagu

SEQ ID NO: 167773 - RNA, 19 nt, Artificial Sequence
  Description of Artificial Sequence: Synthetic oligonucleotide
  Antisense strand to SEQ ID NO: 167772
acucuggguauaaugcaga

SEQ ID NO: 167774 - RNA, 19 nt, Artificial Sequence
  Description of Artificial Sequence: Synthetic oligonucleotide
  Sense strand starting at position 1470 of SEQ ID NO: 2161
gcauuauacccagaguaaa

SEQ ID NO: 167775 - RNA, 19 nt, Artificial Sequence
  Description of Artificial Sequence: Synthetic oligonucleotide
  Antisense strand to SEQ ID NO: 167774
uuuacucuggguauaaugc

SEQ ID NO: 167776 - RNA, 19 nt, Artificial Sequence
  Description of Artificial Sequence: Synthetic oligonucleotide
  Sense strand starting at position 1507 of SEQ ID NO: 2161
uguggcuaggaguaugaau

SEQ ID NO: 167777 - RNA, 19 nt, Artificial Sequence
  Description of Artificial Sequence: Synthetic oligonucleotide
  Antisense strand to SEQ ID NO: 167776
auucauacuccuagccaca

SEQ ID NO: 167778 - RNA, 19 nt, Artificial Sequence
  Description of Artificial Sequence: Synthetic oligonucleotide
  Sense strand starting at position 1509 of SEQ ID NO: 2161
uggcuaggaguaugaauua

SEQ ID NO: 167779 - RNA, 19 nt, Artificial Sequence
  Description of Artificial Sequence: Synthetic oligonucleotide
  Antisense strand to SEQ ID NO: 167778
uaauucauacuccuagcca

SEQ ID NO: 167780 - RNA, 19 nt, Artificial Sequence
  Description of Artificial Sequence: Synthetic oligonucleotide
  Sense strand starting at position 1774 of SEQ ID NO: 2161
gcgauaucugcggcacuua

SEQ ID NO: 167781 - RNA, 19 nt, Artificial Sequence
  Description of Artificial Sequence: Synthetic oligonucleotide
  Antisense strand to SEQ ID NO: 167780
uaagugccgcagauaucgc

SEQ ID NO: 167782 - RNA, 19 nt, Artificial Sequence
  Description of Artificial Sequence: Synthetic oligonucleotide
  Sense strand starting at position 1803 of SEQ ID NO: 2161
uuuagagcuccucaguaaa

SEQ ID NO: 167783 - RNA, 19 nt, Artificial Sequence
  Description of Artificial Sequence: Synthetic oligonucleotide
  Antisense strand to SEQ ID NO: 167782
uuuacugaggagcucuaaa

SEQ ID NO: 167784 - RNA, 19 nt, Artificial Sequence
  Description of Artificial Sequence: Synthetic oligonucleotide
  Sense strand starting at position 1806 of SEQ ID NO: 2161
agagcuccucaguaaagcu

SEQ ID NO: 167785 - RNA, 19 nt, Artificial Sequence
  Description of Artificial Sequence: Synthetic oligonucleotide
  Antisense strand to SEQ ID NO: 167784
agcuuuacugaggagcucu

SEQ ID NO: 167786 - RNA, 19 nt, Artificial Sequence
  Description of Artificial Sequence: Synthetic oligonucleotide
  Sense strand starting at position 2480 of SEQ ID NO: 2161
augguuaaaccgugugaaa

SEQ ID NO: 167787 - RNA, 19 nt, Artificial Sequence
  Description of Artificial Sequence: Synthetic oligonucleotide
  Antisense strand to SEQ ID NO: 167786
uuucacacgguuuaaccau

SEQ ID NO: 167788 - RNA, 19 nt, Artificial Sequence
  Description of Artificial Sequence: Synthetic oligonucleotide
  Sense strand starting at position 2487 of SEQ ID NO: 2161
aaccgugugaaaugagaga

SEQ ID NO: 167789 - RNA, 19 nt, Artificial Sequence
  Description of Artificial Sequence: Synthetic oligonucleotide
  Antisense strand to SEQ ID NO: 167788
ucucucauuucacacgguu

SEQ ID NO: 167790 - RNA, 19 nt, Artificial Sequence
  Description of Artificial Sequence: Synthetic oligonucleotide
  Sense strand starting at position 2562 of SEQ ID NO: 2161
cgcagugugcuucuccaau

SEQ ID NO: 167791 - RNA, 19 nt, Artificial Sequence
  Description of Artificial Sequence: Synthetic oligonucleotide
  Antisense strand to SEQ ID NO: 167790
auuggagaagcacacugcg

SEQ ID NO: 167792 - RNA, 19 nt, Artificial Sequence
  Description of Artificial Sequence: Synthetic oligonucleotide
  Sense strand starting at position 2586 of SEQ ID NO: 2161
gagggcugaucagugaaag

SEQ ID NO: 167793 - RNA, 19 nt, Artificial Sequence
  Description of Artificial Sequence: Synthetic oligonucleotide
  Antisense strand to SEQ ID NO: 167792
cuuucacugaucagcccuc

SEQ ID NO: 167794 - RNA, 19 nt, Artificial Sequence
  Description of Artificial Sequence: Synthetic oligonucleotide
  Sense strand starting at position 2587 of SEQ ID NO: 2161
agggcugaucagugaaaga

SEQ ID NO: 167795 - RNA, 19 nt, Artificial Sequence
  Description of Artificial Sequence: Synthetic oligonucleotide
  Antisense strand to SEQ ID NO: 167794
ucuuucacugaucagcccu

SEQ ID NO: 167796 - RNA, 19 nt, Artificial Sequence
  Description of Artificial Sequence: Synthetic oligonucleotide
  Sense strand starting at position 2782 of SEQ ID NO: 2161
uugaguagaaucggaguau

SEQ ID NO: 167797 - RNA, 19 nt, Artificial Sequence
  Description of Artificial Sequence: Synthetic oligonucleotide
  Antisense strand to SEQ ID NO: 167796
auacuccgauucuacucaa

SEQ ID NO: 167798 - RNA, 19 nt, Artificial Sequence
  Description of Artificial Sequence: Synthetic oligonucleotide
  Sense strand starting at position 2786 of SEQ ID NO: 2161
guagaaucggaguaucgga

SEQ ID NO: 167799 - RNA, 19 nt, Artificial Sequence
  Description of Artificial Sequence: Synthetic oligonucleotide
  Antisense strand to SEQ ID NO: 167798
uccgauacuccgauucuac

SEQ ID NO: 167800 - RNA, 19 nt, Artificial Sequence
  Description of Artificial Sequence: Synthetic oligonucleotide
  Sense strand starting at position 2795 of SEQ ID NO: 2161
gaguaucggagaggaaauu

SEQ ID NO: 167801 - RNA, 19 nt, Artificial Sequence
  Description of Artificial Sequence: Synthetic oligonucleotide
  Antisense strand to SEQ ID NO: 167800
aauuuccucuccgauacuc

SEQ ID NO: 167802 - RNA, 19 nt, Artificial Sequence
  Description of Artificial Sequence: Synthetic oligonucleotide
  Sense strand starting at position 2810 of SEQ ID NO: 2161
aauuaaagggucugguaag

SEQ ID NO: 167803 - RNA, 19 nt, Artificial Sequence
  Description of Artificial Sequence: Synthetic oligonucleotide
  Antisense strand to SEQ ID NO: 167802
cuuaccagacccuuuaauu

SEQ ID NO: 167804 - RNA, 19 nt, Artificial Sequence
  Description of Artificial Sequence: Synthetic oligonucleotide
  Sense strand starting at position 2895 of SEQ ID NO: 2161
aaaguuugagcucaggagu

SEQ ID NO: 167805 - RNA, 19 nt, Artificial Sequence
  Description of Artificial Sequence: Synthetic oligonucleotide
  Antisense strand to SEQ ID NO: 167804
acuccugagcucaaacuuu

SEQ ID NO: 167806 - RNA, 19 nt, Artificial Sequence
  Description of Artificial Sequence: Synthetic oligonucleotide
  Sense strand starting at position 3247 of SEQ ID NO: 2161
ucauuaguucuugaguccu

SEQ ID NO: 167807 - RNA, 19 nt, Artificial Sequence
  Description of Artificial Sequence: Synthetic oligonucleotide
  Antisense strand to SEQ ID NO: 167806
aggacucaagaacuaauga

SEQ ID NO: 167808 - RNA, 19 nt, Artificial Sequence
  Description of Artificial Sequence: Synthetic oligonucleotide
  Sense strand starting at position 3305 of SEQ ID NO: 2161
auaaauuaugcguagucca

SEQ ID NO: 167809 - RNA, 19 nt, Artificial Sequence
  Description of Artificial Sequence: Synthetic oligonucleotide
  Antisense strand to SEQ ID NO: 167808
uggacuacgcauaauuuau

SEQ ID NO: 167810 - RNA, 19 nt, Artificial Sequence
  Description of Artificial Sequence: Synthetic oligonucleotide
  Sense strand starting at position 3355 of SEQ ID NO: 2161
auuacuuucuugucuagag

SEQ ID NO: 167811 - RNA, 19 nt, Artificial Sequence
  Description of Artificial Sequence: Synthetic oligonucleotide
  Antisense strand to SEQ ID NO: 167810
cucuagacaagaaaguaau

SEQ ID NO: 167812 - RNA, 19 nt, Artificial Sequence
  Description of Artificial Sequence: Synthetic oligonucleotide
  Sense strand starting at position 3359 of SEQ ID NO: 2161
cuuucuugucuagaggcuu

SEQ ID NO: 167813 - RNA, 19 nt, Artificial Sequence
  Description of Artificial Sequence: Synthetic oligonucleotide
  Antisense strand to SEQ ID NO: 167812
aagccucuagacaagaaag

SEQ ID NO: 167814 - RNA, 19 nt, Artificial Sequence
  Description of Artificial Sequence: Synthetic oligonucleotide
  Sense strand starting at position 3398 of SEQ ID NO: 2161
auuggcuugagguguaaau

SEQ ID NO: 167815 - RNA, 19 nt, Artificial Sequence
  Description of Artificial Sequence: Synthetic oligonucleotide
  Antisense strand to SEQ ID NO: 167814
auuuacaccucaagccaau

SEQ ID NO: 167816 - RNA, 19 nt, Artificial Sequence
  Description of Artificial Sequence: Synthetic oligonucleotide
  Sense strand starting at position 3400 of SEQ ID NO: 2161
uggcuugagguguaaauuc

SEQ ID NO: 167817 - RNA, 19 nt, Artificial Sequence
  Description of Artificial Sequence: Synthetic oligonucleotide
  Antisense strand to SEQ ID NO: 167816
gaauuuacaccucaagcca

SEQ ID NO: 167818 - RNA, 19 nt, Artificial Sequence
  Description of Artificial Sequence: Synthetic oligonucleotide
  Sense strand starting at position 3532 of SEQ ID NO: 2161
ggaaacgugcccuaccuau

SEQ ID NO: 167819 - RNA, 19 nt, Artificial Sequence
  Description of Artificial Sequence: Synthetic oligonucleotide
  Antisense strand to SEQ ID NO: 167818
auagguagggcacguuucc

SEQ ID NO: 167820 - RNA, 19 nt, Artificial Sequence
  Description of Artificial Sequence: Synthetic oligonucleotide
  Sense strand starting at position 3711 of SEQ ID NO: 2161
gaagaucgcugagcucaaa

SEQ ID NO: 167821 - RNA, 19 nt, Artificial Sequence
  Description of Artificial Sequence: Synthetic oligonucleotide
  Antisense strand to SEQ ID NO: 167820
uuugagcucagcgaucuuc

SEQ ID NO: 167822 - RNA, 19 nt, Artificial Sequence
  Description of Artificial Sequence: Synthetic oligonucleotide
  Sense strand starting at position 120 of SEQ ID NO: 2162
accaguuacugaguaguua

SEQ ID NO: 167823 - RNA, 19 nt, Artificial Sequence
  Description of Artificial Sequence: Synthetic oligonucleotide
  Antisense strand to SEQ ID NO: 167822
uaacuacucaguaacuggu

SEQ ID NO: 167824 - RNA, 19 nt, Artificial Sequence
  Description of Artificial Sequence: Synthetic oligonucleotide
  Sense strand starting at position 121 of SEQ ID NO: 2162
ccaguuacugaguaguuaa

SEQ ID NO: 167825 - RNA, 19 nt, Artificial Sequence
  Description of Artificial Sequence: Synthetic oligonucleotide
  Antisense strand to SEQ ID NO: 167824
uuaacuacucaguaacugg

SEQ ID NO: 167826 - RNA, 19 nt, Artificial Sequence
  Description of Artificial Sequence: Synthetic oligonucleotide
  Sense strand starting at position 691 of SEQ ID NO: 2162
acauuaugcuguuccaaag

SEQ ID NO: 167827 - RNA, 19 nt, Artificial Sequence
  Description of Artificial Sequence: Synthetic oligonucleotide
  Antisense strand to SEQ ID NO: 167826
cuuuggaacagcauaaugu

SEQ ID NO: 167828 - RNA, 19 nt, Artificial Sequence
  Description of Artificial Sequence: Synthetic oligonucleotide
  Sense strand starting at position 700 of SEQ ID NO: 2162
uguuccaaaguuuaaagau

SEQ ID NO: 167829 - RNA, 19 nt, Artificial Sequence
  Description of Artificial Sequence: Synthetic oligonucleotide
  Antisense strand to SEQ ID NO: 167828
aucuuuaaacuuuggaaca

SEQ ID NO: 167830 - RNA, 19 nt, Artificial Sequence
  Description of Artificial Sequence: Synthetic oligonucleotide
  Sense strand starting at position 848 of SEQ ID NO: 2162
acacuugaaucgccugaua

SEQ ID NO: 167831 - RNA, 19 nt, Artificial Sequence
  Description of Artificial Sequence: Synthetic oligonucleotide
  Antisense strand to SEQ ID NO: 167830
uaucaggcgauucaagugu

SEQ ID NO: 167832 - RNA, 19 nt, Artificial Sequence
  Description of Artificial Sequence: Synthetic oligonucleotide
  Sense strand starting at position 850 of SEQ ID NO: 2162
acuugaaucgccugauaua

SEQ ID NO: 167833 - RNA, 19 nt, Artificial Sequence
  Description of Artificial Sequence: Synthetic oligonucleotide
  Antisense strand to SEQ ID NO: 167832
uauaucaggcgauucaagu

SEQ ID NO: 167834 - RNA, 19 nt, Artificial Sequence
  Description of Artificial Sequence: Synthetic oligonucleotide
  Sense strand starting at position 851 of SEQ ID NO: 2162
cuugaaucgccugauauaa

SEQ ID NO: 167835 - RNA, 19 nt, Artificial Sequence
  Description of Artificial Sequence: Synthetic oligonucleotide
  Antisense strand to SEQ ID NO: 167834
uuauaucaggcgauucaag

SEQ ID NO: 167836 - RNA, 19 nt, Artificial Sequence
  Description of Artificial Sequence: Synthetic oligonucleotide
  Sense strand starting at position 929 of SEQ ID NO: 2162
ucaccauuccgagauucca

SEQ ID NO: 167837 - RNA, 19 nt, Artificial Sequence
  Description of Artificial Sequence: Synthetic oligonucleotide
  Antisense strand to SEQ ID NO: 167836
uggaaucucggaaugguga

SEQ ID NO: 167838 - RNA, 19 nt, Artificial Sequence
  Description of Artificial Sequence: Synthetic oligonucleotide
  Sense strand starting at position 958 of SEQ ID NO: 2162
ucaguuuagguacaguaau

SEQ ID NO: 167839 - RNA, 19 nt, Artificial Sequence
  Description of Artificial Sequence: Synthetic oligonucleotide
  Antisense strand to SEQ ID NO: 167838
auuacuguaccuaaacuga

SEQ ID NO: 167840 - RNA, 19 nt, Artificial Sequence
  Description of Artificial Sequence: Synthetic oligonucleotide
  Sense strand starting at position 1034 of SEQ ID NO: 2162
cugcgagauccgcauuaca

SEQ ID NO: 167841 - RNA, 19 nt, Artificial Sequence
  Description of Artificial Sequence: Synthetic oligonucleotide
  Antisense strand to SEQ ID NO: 167840
uguaaugcggaucucgcag

SEQ ID NO: 167842 - RNA, 19 nt, Artificial Sequence
  Description of Artificial Sequence: Synthetic oligonucleotide
  Sense strand starting at position 1154 of SEQ ID NO: 2162
ggaccaacgccuuaucgaa

SEQ ID NO: 167843 - RNA, 19 nt, Artificial Sequence
  Description of Artificial Sequence: Synthetic oligonucleotide
  Antisense strand to SEQ ID NO: 167842
uucgauaaggcguuggucc

SEQ ID NO: 167844 - RNA, 19 nt, Artificial Sequence
  Description of Artificial Sequence: Synthetic oligonucleotide
  Sense strand starting at position 1156 of SEQ ID NO: 2162
accaacgccuuaucgaaua

SEQ ID NO: 167845 - RNA, 19 nt, Artificial Sequence
  Description of Artificial Sequence: Synthetic oligonucleotide
  Antisense strand to SEQ ID NO: 167844
uauucgauaaggcguuggu

SEQ ID NO: 167846 - RNA, 19 nt, Artificial Sequence
  Description of Artificial Sequence: Synthetic oligonucleotide
  Sense strand starting at position 1249 of SEQ ID NO: 2162
ccuugcugucaugaggcaa

SEQ ID NO: 167847 - RNA, 19 nt, Artificial Sequence
  Description of Artificial Sequence: Synthetic oligonucleotide
  Antisense strand to SEQ ID NO: 167846
uugccucaugacagcaagg

SEQ ID NO: 167848 - RNA, 19 nt, Artificial Sequence
  Description of Artificial Sequence: Synthetic oligonucleotide
  Sense strand starting at position 1399 of SEQ ID NO: 2162
cccgacuucgccgcaaaga

SEQ ID NO: 167849 - RNA, 19 nt, Artificial Sequence
  Description of Artificial Sequence: Synthetic oligonucleotide
  Antisense strand to SEQ ID NO: 167848
ucuuugcggcgaagucggg

SEQ ID NO: 167850 - RNA, 19 nt, Artificial Sequence
  Description of Artificial Sequence: Synthetic oligonucleotide
  Sense strand starting at position 2758 of SEQ ID NO: 2162
uagaaagucaggcaucguu

SEQ ID NO: 167851 - RNA, 19 nt, Artificial Sequence
  Description of Artificial Sequence: Synthetic oligonucleotide
  Antisense strand to SEQ ID NO: 167850
aacgaugccugacuuucua

SEQ ID NO: 167852 - RNA, 19 nt, Artificial Sequence
  Description of Artificial Sequence: Synthetic oligonucleotide
  Sense strand starting at position 2761 of SEQ ID NO: 2162
aaagucaggcaucguugaa

SEQ ID NO: 167853 - RNA, 19 nt, Artificial Sequence
  Description of Artificial Sequence: Synthetic oligonucleotide
  Antisense strand to SEQ ID NO: 167852
uucaacgaugccugacuuu

SEQ ID NO: 167854 - RNA, 19 nt, Artificial Sequence
  Description of Artificial Sequence: Synthetic oligonucleotide
  Sense strand starting at position 2829 of SEQ ID NO: 2162
ucuuguucucugcaguaga

SEQ ID NO: 167855 - RNA, 19 nt, Artificial Sequence
  Description of Artificial Sequence: Synthetic oligonucleotide
  Antisense strand to SEQ ID NO: 167854
ucuacugcagagaacaaga

SEQ ID NO: 167856 - RNA, 19 nt, Artificial Sequence
  Description of Artificial Sequence: Synthetic oligonucleotide
  Sense strand starting at position 2954 of SEQ ID NO: 2162
guguuugguauguuugcua

SEQ ID NO: 167857 - RNA, 19 nt, Artificial Sequence
  Description of Artificial Sequence: Synthetic oligonucleotide
  Antisense strand to SEQ ID NO: 167856
uagcaaacauaccaaacac

SEQ ID NO: 167858 - RNA, 19 nt, Artificial Sequence
  Description of Artificial Sequence: Synthetic oligonucleotide
  Sense strand starting at position 3027 of SEQ ID NO: 2162
guaucucuuguagagucuu

SEQ ID NO: 167859 - RNA, 19 nt, Artificial Sequence
  Description of Artificial Sequence: Synthetic oligonucleotide
  Antisense strand to SEQ ID NO: 167858
aagacucuacaagagauac

SEQ ID NO: 167860 - RNA, 19 nt, Artificial Sequence
  Description of Artificial Sequence: Synthetic oligonucleotide
  Sense strand starting at position 3052 of SEQ ID NO: 2162
aguguaugugcguuguaaa

SEQ ID NO: 167861 - RNA, 19 nt, Artificial Sequence
  Description of Artificial Sequence: Synthetic oligonucleotide
  Antisense strand to SEQ ID NO: 167860
uuuacaacgcacauacacu

SEQ ID NO: 167862 - RNA, 19 nt, Artificial Sequence
  Description of Artificial Sequence: Synthetic oligonucleotide
  Sense strand starting at position 3063 of SEQ ID NO: 2162
guuguaaauuuauacacga

SEQ ID NO: 167863 - RNA, 19 nt, Artificial Sequence
  Description of Artificial Sequence: Synthetic oligonucleotide
  Antisense strand to SEQ ID NO: 167862
ucguguauaaauuuacaac

SEQ ID NO: 167864 - RNA, 19 nt, Artificial Sequence
  Description of Artificial Sequence: Synthetic oligonucleotide
  Sense strand starting at position 3071 of SEQ ID NO: 2162
uuuauacacgacugaauaa

SEQ ID NO: 167865 - RNA, 19 nt, Artificial Sequence
  Description of Artificial Sequence: Synthetic oligonucleotide
  Antisense strand to SEQ ID NO: 167864
uuauucagucguguauaaa

SEQ ID NO: 167866 - RNA, 19 nt, Artificial Sequence
  Description of Artificial Sequence: Synthetic oligonucleotide
  Sense strand starting at position 3092 of SEQ ID NO: 2162
guguuaguggaagguuacu

SEQ ID NO: 167867 - RNA, 19 nt, Artificial Sequence
  Description of Artificial Sequence: Synthetic oligonucleotide
  Antisense strand to SEQ ID NO: 167866
aguaaccuuccacuaacac

SEQ ID NO: 167868 - RNA, 19 nt, Artificial Sequence
  Description of Artificial Sequence: Synthetic oligonucleotide
  Sense strand starting at position 3108 of SEQ ID NO: 2162
acuguugcagcugaaauaa

SEQ ID NO: 167869 - RNA, 19 nt, Artificial Sequence
  Description of Artificial Sequence: Synthetic oligonucleotide
  Antisense strand to SEQ ID NO: 167868
uuauuucagcugcaacagu

SEQ ID NO: 167870 - RNA, 19 nt, Artificial Sequence
  Description of Artificial Sequence: Synthetic oligonucleotide
  Sense strand starting at position 3164 of SEQ ID NO: 2162
auauuacuuucuccggaua

SEQ ID NO: 167871 - RNA, 19 nt, Artificial Sequence
  Description of Artificial Sequence: Synthetic oligonucleotide
  Antisense strand to SEQ ID NO: 167870
uauccggagaaaguaauau

SEQ ID NO: 167872 - RNA, 19 nt, Artificial Sequence
  Description of Artificial Sequence: Synthetic oligonucleotide
  Sense strand starting at position 3167 of SEQ ID NO: 2162
uuacuuucuccggauauug

SEQ ID NO: 167873 - RNA, 19 nt, Artificial Sequence
  Description of Artificial Sequence: Synthetic oligonucleotide
  Antisense strand to SEQ ID NO: 167872
caauauccggagaaaguaa

SEQ ID NO: 167874 - RNA, 19 nt, Artificial Sequence
  Description of Artificial Sequence: Synthetic oligonucleotide
  Sense strand starting at position 3176 of SEQ ID NO: 2162
ccggauauugcuuauguau

SEQ ID NO: 167875 - RNA, 19 nt, Artificial Sequence
  Description of Artificial Sequence: Synthetic oligonucleotide
  Antisense strand to SEQ ID NO: 167874
auacauaagcaauauccgg

SEQ ID NO: 167876 - RNA, 19 nt, Artificial Sequence
  Description of Artificial Sequence: Synthetic oligonucleotide
  Sense strand starting at position 3266 of SEQ ID NO: 2162
cuuguugaauuccugaaca

SEQ ID NO: 167877 - RNA, 19 nt, Artificial Sequence
  Description of Artificial Sequence: Synthetic oligonucleotide
  Antisense strand to SEQ ID NO: 167876
uguucaggaauucaacaag

SEQ ID NO: 167878 - RNA, 19 nt, Artificial Sequence
  Description of Artificial Sequence: Synthetic oligonucleotide
  Sense strand starting at position 3268 of SEQ ID NO: 2162
uguugaauuccugaacacu

SEQ ID NO: 167879 - RNA, 19 nt, Artificial Sequence
  Description of Artificial Sequence: Synthetic oligonucleotide
  Antisense strand to SEQ ID NO: 167878
aguguucaggaauucaaca

SEQ ID NO: 167880 - RNA, 19 nt, Artificial Sequence
  Description of Artificial Sequence: Synthetic oligonucleotide
  Sense strand starting at position 3296 of SEQ ID NO: 2162
ggaagugauguuugaucau

SEQ ID NO: 167881 - RNA, 19 nt, Artificial Sequence
  Description of Artificial Sequence: Synthetic oligonucleotide
  Antisense strand to SEQ ID NO: 167880
augaucaaacaucacuucc

SEQ ID NO: 167882 - RNA, 19 nt, Artificial Sequence
  Description of Artificial Sequence: Synthetic oligonucleotide
  Sense strand starting at position 3305 of SEQ ID NO: 2162
guuugaucauagcuggaau

SEQ ID NO: 167883 - RNA, 19 nt, Artificial Sequence
  Description of Artificial Sequence: Synthetic oligonucleotide
  Antisense strand to SEQ ID NO: 167882
auuccagcuaugaucaaac

SEQ ID NO: 167884 - RNA, 19 nt, Artificial Sequence
  Description of Artificial Sequence: Synthetic oligonucleotide
  Sense strand starting at position 3403 of SEQ ID NO: 2162
aagcaucuuguauguagau

SEQ ID NO: 167885 - RNA, 19 nt, Artificial Sequence
  Description of Artificial Sequence: Synthetic oligonucleotide
  Antisense strand to SEQ ID NO: 167884
aucuacauacaagaugcuu

SEQ ID NO: 167886 - RNA, 19 nt, Artificial Sequence
  Description of Artificial Sequence: Synthetic oligonucleotide
  Sense strand starting at position 3404 of SEQ ID NO: 2162
agcaucuuguauguagauu

SEQ ID NO: 167887 - RNA, 19 nt, Artificial Sequence
  Description of Artificial Sequence: Synthetic oligonucleotide
  Antisense strand to SEQ ID NO: 167886
aaucuacauacaagaugcu

SEQ ID NO: 167888 - RNA, 19 nt, Artificial Sequence
  Description of Artificial Sequence: Synthetic oligonucleotide
  Sense strand starting at position 3426 of SEQ ID NO: 2162
cccgacaaaucuguugauu

SEQ ID NO: 167889 - RNA, 19 nt, Artificial Sequence
  Description of Artificial Sequence: Synthetic oligonucleotide
  Antisense strand to SEQ ID NO: 167888
aaucaacagauuugucggg

SEQ ID NO: 167890 - RNA, 19 nt, Artificial Sequence
  Description of Artificial Sequence: Synthetic oligonucleotide
  Sense strand starting at position 3523 of SEQ ID NO: 2162
ucagucugacauuguuaua

SEQ ID NO: 167891 - RNA, 19 nt, Artificial Sequence
  Description of Artificial Sequence: Synthetic oligonucleotide
  Antisense strand to SEQ ID NO: 167890
uauaacaaugucagacuga

SEQ ID NO: 167892 - RNA, 19 nt, Artificial Sequence
  Description of Artificial Sequence: Synthetic oligonucleotide
  Sense strand starting at position 3570 of SEQ ID NO: 2162
uuagauaaagccuagccau

SEQ ID NO: 167893 - RNA, 19 nt, Artificial Sequence
  Description of Artificial Sequence: Synthetic oligonucleotide
  Antisense strand to SEQ ID NO: 167892
auggcuaggcuuuaucuaa

SEQ ID NO: 167894 - RNA, 19 nt, Artificial Sequence
  Description of Artificial Sequence: Synthetic oligonucleotide
  Sense strand starting at position 3741 of SEQ ID NO: 2162
acagucugucaagauaauu

SEQ ID NO: 167895 - RNA, 19 nt, Artificial Sequence
  Description of Artificial Sequence: Synthetic oligonucleotide
  Antisense strand to SEQ ID NO: 167894
aauuaucuugacagacugu

SEQ ID NO: 167896 - RNA, 19 nt, Artificial Sequence
  Description of Artificial Sequence: Synthetic oligonucleotide
  Sense strand starting at position 3824 of SEQ ID NO: 2162
gggaacuuuguuggaaguu

SEQ ID NO: 167897 - RNA, 19 nt, Artificial Sequence
  Description of Artificial Sequence: Synthetic oligonucleotide
  Antisense strand to SEQ ID NO: 167896
aacuuccaacaaaguuccc

SEQ ID NO: 167898 - RNA, 19 nt, Artificial Sequence
  Description of Artificial Sequence: Synthetic oligonucleotide
  Sense strand starting at position 3834 of SEQ ID NO: 2162
uuggaaguuaaauguaaug

SEQ ID NO: 167899 - RNA, 19 nt, Artificial Sequence
  Description of Artificial Sequence: Synthetic oligonucleotide
  Antisense strand to SEQ ID NO: 167898
cauuacauuuaacuuccaa

SEQ ID NO: 167900 - RNA, 19 nt, Artificial Sequence
  Description of Artificial Sequence: Synthetic oligonucleotide
  Sense strand starting at position 3836 of SEQ ID NO: 2162
ggaaguuaaauguaauguc

SEQ ID NO: 167901 - RNA, 19 nt, Artificial Sequence
  Description of Artificial Sequence: Synthetic oligonucleotide
  Antisense strand to SEQ ID NO: 167900
gacauuacauuuaacuucc

SEQ ID NO: 167902 - RNA, 19 nt, Artificial Sequence
  Description of Artificial Sequence: Synthetic oligonucleotide
  Sense strand starting at position 116 of SEQ ID NO: 2164
ggcuguuuccagggaccaa

SEQ ID NO: 167903 - RNA, 19 nt, Artificial Sequence
  Description of Artificial Sequence: Synthetic oligonucleotide
  Antisense strand to SEQ ID NO: 167902
uuggucccuggaaacagcc

SEQ ID NO: 167904 - RNA, 19 nt, Artificial Sequence
  Description of Artificial Sequence: Synthetic oligonucleotide
  Sense strand starting at position 179 of SEQ ID NO: 2164
gcaggagaaugauuaaccu

SEQ ID NO: 167905 - RNA, 19 nt, Artificial Sequence
  Description of Artificial Sequence: Synthetic oligonucleotide
  Antisense strand to SEQ ID NO: 167904
agguuaaucauucuccugc

SEQ ID NO: 167906 - RNA, 19 nt, Artificial Sequence
  Description of Artificial Sequence: Synthetic oligonucleotide
  Sense strand starting at position 932 of SEQ ID NO: 2164
ggaggacuucaggguucuu

SEQ ID NO: 167907 - RNA, 19 nt, Artificial Sequence
  Description of Artificial Sequence: Synthetic oligonucleotide
  Antisense strand to SEQ ID NO: 167906
aagaacccugaaguccucc

SEQ ID NO: 167908 - RNA, 19 nt, Artificial Sequence
  Description of Artificial Sequence: Synthetic oligonucleotide
  Sense strand starting at position 954 of SEQ ID NO: 2164
uaggguguuuaauugggaa

SEQ ID NO: 167909 - RNA, 19 nt, Artificial Sequence
  Description of Artificial Sequence: Synthetic oligonucleotide
  Antisense strand to SEQ ID NO: 167908
uucccaauuaaacacccua

SEQ ID NO: 167910 - RNA, 19 nt, Artificial Sequence
  Description of Artificial Sequence: Synthetic oligonucleotide
  Sense strand starting at position 956 of SEQ ID NO: 2164
ggguguuuaauugggaaga

SEQ ID NO: 167911 - RNA, 19 nt, Artificial Sequence
  Description of Artificial Sequence: Synthetic oligonucleotide
  Antisense strand to SEQ ID NO: 167910
ucuucccaauuaaacaccc

SEQ ID NO: 167912 - RNA, 19 nt, Artificial Sequence
  Description of Artificial Sequence: Synthetic oligonucleotide
  Sense strand starting at position 1011 of SEQ ID NO: 2164
aggagaacuucccaacuca

SEQ ID NO: 167913 - RNA, 19 nt, Artificial Sequence
  Description of Artificial Sequence: Synthetic oligonucleotide
  Antisense strand to SEQ ID NO: 167912
ugaguugggaaguucuccu

SEQ ID NO: 167914 - RNA, 19 nt, Artificial Sequence
  Description of Artificial Sequence: Synthetic oligonucleotide
  Sense strand starting at position 1039 of SEQ ID NO: 2164
cagggaguguucucaaaga

SEQ ID NO: 167915 - RNA, 19 nt, Artificial Sequence
  Description of Artificial Sequence: Synthetic oligonucleotide
  Antisense strand to SEQ ID NO: 167914
ucuuugagaacacucccug

SEQ ID NO: 167916 - RNA, 19 nt, Artificial Sequence
  Description of Artificial Sequence: Synthetic oligonucleotide
  Sense strand starting at position 1258 of SEQ ID NO: 2164
auggcuucuguguaccaaa

SEQ ID NO: 167917 - RNA, 19 nt, Artificial Sequence
  Description of Artificial Sequence: Synthetic oligonucleotide
  Antisense strand to SEQ ID NO: 167916
uuugguacacagaagccau

SEQ ID NO: 167918 - RNA, 19 nt, Artificial Sequence
  Description of Artificial Sequence: Synthetic oligonucleotide
  Sense strand starting at position 1397 of SEQ ID NO: 2164
ccaggugcaagagauuauu

SEQ ID NO: 167919 - RNA, 19 nt, Artificial Sequence
  Description of Artificial Sequence: Synthetic oligonucleotide
  Antisense strand to SEQ ID NO: 167918
aauaaucucuugcaccugg

SEQ ID NO: 167920 - RNA, 19 nt, Artificial Sequence
  Description of Artificial Sequence: Synthetic oligonucleotide
  Sense strand starting at position 1400 of SEQ ID NO: 2164
ggugcaagagauuauucca

SEQ ID NO: 167921 - RNA, 19 nt, Artificial Sequence
  Description of Artificial Sequence: Synthetic oligonucleotide
  Antisense strand to SEQ ID NO: 167920
uggaauaaucucuugcacc

SEQ ID NO: 167922 - RNA, 19 nt, Artificial Sequence
  Description of Artificial Sequence: Synthetic oligonucleotide
  Sense strand starting at position 1499 of SEQ ID NO: 2164
gaaguaguuguucaggaga

SEQ ID NO: 167923 - RNA, 19 nt, Artificial Sequence
  Description of Artificial Sequence: Synthetic oligonucleotide
  Antisense strand to SEQ ID NO: 167922
ucuccugaacaacuacuuc

SEQ ID NO: 167924 - RNA, 19 nt, Artificial Sequence
  Description of Artificial Sequence: Synthetic oligonucleotide
  Sense strand starting at position 1539 of SEQ ID NO: 2164
aguguucugagcuagagaa

SEQ ID NO: 167925 - RNA, 19 nt, Artificial Sequence
  Description of Artificial Sequence: Synthetic oligonucleotide
  Antisense strand to SEQ ID NO: 167924
uucucuagcucagaacacu

SEQ ID NO: 167926 - RNA, 19 nt, Artificial Sequence
  Description of Artificial Sequence: Synthetic oligonucleotide
  Sense strand starting at position 1659 of SEQ ID NO: 2164
gggaguugcgguuggacaa

SEQ ID NO: 167927 - RNA, 19 nt, Artificial Sequence
  Description of Artificial Sequence: Synthetic oligonucleotide
  Antisense strand to SEQ ID NO: 167926
uuguccaaccgcaacuccc

SEQ ID NO: 167928 - RNA, 19 nt, Artificial Sequence
  Description of Artificial Sequence: Synthetic oligonucleotide
  Sense strand starting at position 1660 of SEQ ID NO: 2164
ggaguugcgguuggacaaa

SEQ ID NO: 167929 - RNA, 19 nt, Artificial Sequence
  Description of Artificial Sequence: Synthetic oligonucleotide
  Antisense strand to SEQ ID NO: 167928
uuuguccaaccgcaacucc

SEQ ID NO: 167930 - RNA, 19 nt, Artificial Sequence
  Description of Artificial Sequence: Synthetic oligonucleotide
  Sense strand starting at position 1683 of SEQ ID NO: 2164
auuuguugguucuggaaug

SEQ ID NO: 167931 - RNA, 19 nt, Artificial Sequence
  Description of Artificial Sequence: Synthetic oligonucleotide
  Antisense strand to SEQ ID NO: 167930
cauuccagaaccaacaaau

SEQ ID NO: 167932 - RNA, 19 nt, Artificial Sequence
  Description of Artificial Sequence: Synthetic oligonucleotide
  Sense strand starting at position 1820 of SEQ ID NO: 2164
cuuugaagucaaugagaac

SEQ ID NO: 167933 - RNA, 19 nt, Artificial Sequence
  Description of Artificial Sequence: Synthetic oligonucleotide
  Antisense strand to SEQ ID NO: 167932
guucucauugacuucaaag

SEQ ID NO: 167934 - RNA, 19 nt, Artificial Sequence
  Description of Artificial Sequence: Synthetic oligonucleotide
  Sense strand starting at position 1823 of SEQ ID NO: 2164
ugaagucaaugagaacacu

SEQ ID NO: 167935 - RNA, 19 nt, Artificial Sequence
  Description of Artificial Sequence: Synthetic oligonucleotide
  Antisense strand to SEQ ID NO: 167934
aguguucucauugacuuca

SEQ ID NO: 167936 - RNA, 19 nt, Artificial Sequence
  Description of Artificial Sequence: Synthetic oligonucleotide
  Sense strand starting at position 1862 of SEQ ID NO: 2164
gcaggucuucuacaucgaa

SEQ ID NO: 167937 - RNA, 19 nt, Artificial Sequence
  Description of Artificial Sequence: Synthetic oligonucleotide
  Antisense strand to SEQ ID NO: 167936
uucgauguagaagaccugc

SEQ ID NO: 167938 - RNA, 19 nt, Artificial Sequence
  Description of Artificial Sequence: Synthetic oligonucleotide
  Sense strand starting at position 2073 of SEQ ID NO: 2164
gccguuacaacagaugagu

SEQ ID NO: 167939 - RNA, 19 nt, Artificial Sequence
  Description of Artificial Sequence: Synthetic oligonucleotide
  Antisense strand to SEQ ID NO: 167938
acucaucuguuguaacggc

SEQ ID NO: 167940 - RNA, 19 nt, Artificial Sequence
  Description of Artificial Sequence: Synthetic oligonucleotide
  Sense strand starting at position 2075 of SEQ ID NO: 2164
cguuacaacagaugaguca

SEQ ID NO: 167941 - RNA, 19 nt, Artificial Sequence
  Description of Artificial Sequence: Synthetic oligonucleotide
  Antisense strand to SEQ ID NO: 167940
ugacucaucuguuguaacg

SEQ ID NO: 167942 - RNA, 19 nt, Artificial Sequence
  Description of Artificial Sequence: Synthetic oligonucleotide
  Sense strand starting at position 3208 of SEQ ID NO: 2164
guaggaaacuuucugccua

SEQ ID NO: 167943 - RNA, 19 nt, Artificial Sequence
  Description of Artificial Sequence: Synthetic oligonucleotide
  Antisense strand to SEQ ID NO: 167942
uaggcagaaaguuuccuac

SEQ ID NO: 167944 - RNA, 19 nt, Artificial Sequence
  Description of Artificial Sequence: Synthetic oligonucleotide
  Sense strand starting at position 3210 of SEQ ID NO: 2164
aggaaacuuucugccuaga

SEQ ID NO: 167945 - RNA, 19 nt, Artificial Sequence
  Description of Artificial Sequence: Synthetic oligonucleotide
  Antisense strand to SEQ ID NO: 167944
ucuaggcagaaaguuuccu

SEQ ID NO: 167946 - RNA, 19 nt, Artificial Sequence
  Description of Artificial Sequence: Synthetic oligonucleotide
  Sense strand starting at position 3215 of SEQ ID NO: 2164
acuuucugccuagaaaguu

SEQ ID NO: 167947 - RNA, 19 nt, Artificial Sequence
  Description of Artificial Sequence: Synthetic oligonucleotide
  Antisense strand to SEQ ID NO: 167946
aacuuucuaggcagaaagu

SEQ ID NO: 167948 - RNA, 19 nt, Artificial Sequence
  Description of Artificial Sequence: Synthetic oligonucleotide
  Sense strand starting at position 3223 of SEQ ID NO: 2164
ccuagaaaguuagcuaaac

SEQ ID NO: 167949 - RNA, 19 nt, Artificial Sequence
  Description of Artificial Sequence: Synthetic oligonucleotide
  Antisense strand to SEQ ID NO: 167948
guuuagcuaacuuucuagg

SEQ ID NO: 167950 - RNA, 19 nt, Artificial Sequence
  Description of Artificial Sequence: Synthetic oligonucleotide
  Sense strand starting at position 3224 of SEQ ID NO: 2164
cuagaaaguuagcuaaaca

SEQ ID NO: 167951 - RNA, 19 nt, Artificial Sequence
  Description of Artificial Sequence: Synthetic oligonucleotide
  Antisense strand to SEQ ID NO: 167950
uguuuagcuaacuuucuag

SEQ ID NO: 167952 - RNA, 19 nt, Artificial Sequence
  Description of Artificial Sequence: Synthetic oligonucleotide
  Sense strand starting at position 3247 of SEQ ID NO: 2164
gggcguguuuauguaggaa

SEQ ID NO: 167953 - RNA, 19 nt, Artificial Sequence
  Description of Artificial Sequence: Synthetic oligonucleotide
  Antisense strand to SEQ ID NO: 167952
uuccuacauaaacacgccc

SEQ ID NO: 167954 - RNA, 19 nt, Artificial Sequence
  Description of Artificial Sequence: Synthetic oligonucleotide
  Sense strand starting at position 3250 of SEQ ID NO: 2164
cguguuuauguaggaagaa

SEQ ID NO: 167955 - RNA, 19 nt, Artificial Sequence
  Description of Artificial Sequence: Synthetic oligonucleotide
  Antisense strand to SEQ ID NO: 167954
uucuuccuacauaaacacg

SEQ ID NO: 167956 - RNA, 19 nt, Artificial Sequence
  Description of Artificial Sequence: Synthetic oligonucleotide
  Sense strand starting at position 3330 of SEQ ID NO: 2164
aacugacuagugugugaca

SEQ ID NO: 167957 - RNA, 19 nt, Artificial Sequence
  Description of Artificial Sequence: Synthetic oligonucleotide
  Antisense strand to SEQ ID NO: 167956
ugucacacacuagucaguu

SEQ ID NO: 167958 - RNA, 19 nt, Artificial Sequence
  Description of Artificial Sequence: Synthetic oligonucleotide
  Sense strand starting at position 3517 of SEQ ID NO: 2164
uuucuaugaccugguaucu

SEQ ID NO: 167959 - RNA, 19 nt, Artificial Sequence
  Description of Artificial Sequence: Synthetic oligonucleotide
  Antisense strand to SEQ ID NO: 167958
agauaccaggucauagaaa

SEQ ID NO: 167960 - RNA, 19 nt, Artificial Sequence
  Description of Artificial Sequence: Synthetic oligonucleotide
  Sense strand starting at position 3688 of SEQ ID NO: 2164
gguggaguucugcacacau

SEQ ID NO: 167961 - RNA, 19 nt, Artificial Sequence
  Description of Artificial Sequence: Synthetic oligonucleotide
  Antisense strand to SEQ ID NO: 167960
augugugcagaacuccacc

SEQ ID NO: 167962 - RNA, 19 nt, Artificial Sequence
  Description of Artificial Sequence: Synthetic oligonucleotide
  Sense strand starting at position 3690 of SEQ ID NO: 2164
uggaguucugcacacauga

SEQ ID NO: 167963 - RNA, 19 nt, Artificial Sequence
  Description of Artificial Sequence: Synthetic oligonucleotide
  Antisense strand to SEQ ID NO: 167962
ucaugugugcagaacucca

SEQ ID NO: 167964 - RNA, 19 nt, Artificial Sequence
  Description of Artificial Sequence: Synthetic oligonucleotide
  Sense strand starting at position 3719 of SEQ ID NO: 2164
ccuugaaccugagauucca

SEQ ID NO: 167965 - RNA, 19 nt, Artificial Sequence
  Description of Artificial Sequence: Synthetic oligonucleotide
  Antisense strand to SEQ ID NO: 167964
uggaaucucagguucaagg

SEQ ID NO: 167966 - RNA, 19 nt, Artificial Sequence
  Description of Artificial Sequence: Synthetic oligonucleotide
  Sense strand starting at position 3729 of SEQ ID NO: 2164
gagauuccaggaugucaau

SEQ ID NO: 167967 - RNA, 19 nt, Artificial Sequence
  Description of Artificial Sequence: Synthetic oligonucleotide
  Antisense strand to SEQ ID NO: 167966
auugacauccuggaaucuc

SEQ ID NO: 167968 - RNA, 19 nt, Artificial Sequence
  Description of Artificial Sequence: Synthetic oligonucleotide
  Sense strand starting at position 3935 of SEQ ID NO: 2164
gugacuguugugcauucua

SEQ ID NO: 167969 - RNA, 19 nt, Artificial Sequence
  Description of Artificial Sequence: Synthetic oligonucleotide
  Antisense strand to SEQ ID NO: 167968
uagaaugcacaacagucac

SEQ ID NO: 167970 - RNA, 19 nt, Artificial Sequence
  Description of Artificial Sequence: Synthetic oligonucleotide
  Sense strand starting at position 3942 of SEQ ID NO: 2164
uugugcauucuaugcuuga

SEQ ID NO: 167971 - RNA, 19 nt, Artificial Sequence
  Description of Artificial Sequence: Synthetic oligonucleotide
  Antisense strand to SEQ ID NO: 167970
ucaagcauagaaugcacaa

SEQ ID NO: 167972 - RNA, 19 nt, Artificial Sequence
  Description of Artificial Sequence: Synthetic oligonucleotide
  Sense strand starting at position 3945 of SEQ ID NO: 2164
ugcauucuaugcuugaguu

SEQ ID NO: 167973 - RNA, 19 nt, Artificial Sequence
  Description of Artificial Sequence: Synthetic oligonucleotide
  Antisense strand to SEQ ID NO: 167972
aacucaagcauagaaugca

SEQ ID NO: 167974 - RNA, 19 nt, Artificial Sequence
  Description of Artificial Sequence: Synthetic oligonucleotide
  Sense strand starting at position 3955 of SEQ ID NO: 2164
gcuugaguucccuggucua

SEQ ID NO: 167975 - RNA, 19 nt, Artificial Sequence
  Description of Artificial Sequence: Synthetic oligonucleotide
  Antisense strand to SEQ ID NO: 167974
uagaccagggaacucaagc

SEQ ID NO: 167976 - RNA, 19 nt, Artificial Sequence
  Description of Artificial Sequence: Synthetic oligonucleotide
  Sense strand starting at position 3958 of SEQ ID NO: 2164
ugaguucccuggucuauag

SEQ ID NO: 167977 - RNA, 19 nt, Artificial Sequence
  Description of Artificial Sequence: Synthetic oligonucleotide
  Antisense strand to SEQ ID NO: 167976
cuauagaccagggaacuca

SEQ ID NO: 167978 - RNA, 19 nt, Artificial Sequence
  Description of Artificial Sequence: Synthetic oligonucleotide
  Sense strand starting at position 3960 of SEQ ID NO: 2164
aguucccuggucuauagaa

SEQ ID NO: 167979 - RNA, 19 nt, Artificial Sequence
  Description of Artificial Sequence: Synthetic oligonucleotide
  Antisense strand to SEQ ID NO: 167978
uucuauagaccagggaacu

SEQ ID NO: 167980 - RNA, 19 nt, Artificial Sequence
  Description of Artificial Sequence: Synthetic oligonucleotide
  Sense strand starting at position 3962 of SEQ ID NO: 2164
uucccuggucuauagaaca

SEQ ID NO: 167981 - RNA, 19 nt, Artificial Sequence
  Description of Artificial Sequence: Synthetic oligonucleotide
  Antisense strand to SEQ ID NO: 167980
uguucuauagaccagggaa

SEQ ID NO: 167982 - RNA, 19 nt, Artificial Sequence
  Description of Artificial Sequence: Synthetic oligonucleotide
  Sense strand starting at position 3 of SEQ ID NO: 2165
ggaggagcuugauuagcaa

SEQ ID NO: 167983 - RNA, 19 nt, Artificial Sequence
  Description of Artificial Sequence: Synthetic oligonucleotide
  Antisense strand to SEQ ID NO: 167982
uugcuaaucaagcuccucc

SEQ ID NO: 167984 - RNA, 19 nt, Artificial Sequence
  Description of Artificial Sequence: Synthetic oligonucleotide
  Sense strand starting at position 6 of SEQ ID NO: 2165
ggagcuugauuagcaagaa

SEQ ID NO: 167985 - RNA, 19 nt, Artificial Sequence
  Description of Artificial Sequence: Synthetic oligonucleotide
  Antisense strand to SEQ ID NO: 167984
uucuugcuaaucaagcucc

SEQ ID NO: 167986 - RNA, 19 nt, Artificial Sequence
  Description of Artificial Sequence: Synthetic oligonucleotide
  Sense strand starting at position 7 of SEQ ID NO: 2165
gagcuugauuagcaagaac

SEQ ID NO: 167987 - RNA, 19 nt, Artificial Sequence
  Description of Artificial Sequence: Synthetic oligonucleotide
  Antisense strand to SEQ ID NO: 167986
guucuugcuaaucaagcuc

SEQ ID NO: 167988 - RNA, 19 nt, Artificial Sequence
  Description of Artificial Sequence: Synthetic oligonucleotide
  Sense strand starting at position 569 of SEQ ID NO: 2165
cugcacauuuccggcagau

SEQ ID NO: 167989 - RNA, 19 nt, Artificial Sequence
  Description of Artificial Sequence: Synthetic oligonucleotide
  Antisense strand to SEQ ID NO: 167988
aucugccggaaaugugcag

SEQ ID NO: 167990 - RNA, 19 nt, Artificial Sequence
  Description of Artificial Sequence: Synthetic oligonucleotide
  Sense strand starting at position 662 of SEQ ID NO: 2165
gggccagauaaaugucagu

SEQ ID NO: 167991 - RNA, 19 nt, Artificial Sequence
  Description of Artificial Sequence: Synthetic oligonucleotide
  Antisense strand to SEQ ID NO: 167990
acugacauuuaucuggccc

SEQ ID NO: 167992 - RNA, 19 nt, Artificial Sequence
  Description of Artificial Sequence: Synthetic oligonucleotide
  Sense strand starting at position 950 of SEQ ID NO: 2165
ggcuguuuccagggaccaa

SEQ ID NO: 167993 - RNA, 19 nt, Artificial Sequence
  Description of Artificial Sequence: Synthetic oligonucleotide
  Antisense strand to SEQ ID NO: 167992
uuggucccuggaaacagcc

SEQ ID NO: 167994 - RNA, 19 nt, Artificial Sequence
  Description of Artificial Sequence: Synthetic oligonucleotide
  Sense strand starting at position 1013 of SEQ ID NO: 2165
gcaggagaaugauuaaccu

SEQ ID NO: 167995 - RNA, 19 nt, Artificial Sequence
  Description of Artificial Sequence: Synthetic oligonucleotide
  Antisense strand to SEQ ID NO: 167994
agguuaaucauucuccugc

SEQ ID NO: 167996 - RNA, 19 nt, Artificial Sequence
  Description of Artificial Sequence: Synthetic oligonucleotide
  Sense strand starting at position 1766 of SEQ ID NO: 2165
ggaggacuucaggguucuu

SEQ ID NO: 167997 - RNA, 19 nt, Artificial Sequence
  Description of Artificial Sequence: Synthetic oligonucleotide
  Antisense strand to SEQ ID NO: 167996
aagaacccugaaguccucc

SEQ ID NO: 167998 - RNA, 19 nt, Artificial Sequence
  Description of Artificial Sequence: Synthetic oligonucleotide
  Sense strand starting at position 1788 of SEQ ID NO: 2165
uaggguguuuaauugggaa

SEQ ID NO: 167999 - RNA, 19 nt, Artificial Sequence
  Description of Artificial Sequence: Synthetic oligonucleotide
  Antisense strand to SEQ ID NO: 167998
uucccaauuaaacacccua

SEQ ID NO: 168000 - RNA, 19 nt, Artificial Sequence
  Description of Artificial Sequence: Synthetic oligonucleotide
  Sense strand starting at position 1790 of SEQ ID NO: 2165
ggguguuuaauugggaaga

SEQ ID NO: 168001 - RNA, 19 nt, Artificial Sequence
  Description of Artificial Sequence: Synthetic oligonucleotide
  Antisense strand to SEQ ID NO: 168000
ucuucccaauuaaacaccc

SEQ ID NO: 168002 - RNA, 19 nt, Artificial Sequence
  Description of Artificial Sequence: Synthetic oligonucleotide
  Sense strand starting at position 1791 of SEQ ID NO: 2165
gguguuuaauugggaagac

SEQ ID NO: 168003 - RNA, 19 nt, Artificial Sequence
  Description of Artificial Sequence: Synthetic oligonucleotide
  Antisense strand to SEQ ID NO: 168002
gucuucccaauuaaacacc

SEQ ID NO: 168004 - RNA, 19 nt, Artificial Sequence
  Description of Artificial Sequence: Synthetic oligonucleotide
  Sense strand starting at position 1792 of SEQ ID NO: 2165
guguuuaauugggaagaca

SEQ ID NO: 168005 - RNA, 19 nt, Artificial Sequence
  Description of Artificial Sequence: Synthetic oligonucleotide
  Antisense strand to SEQ ID NO: 168004
ugucuucccaauuaaacac

SEQ ID NO: 168006 - RNA, 19 nt, Artificial Sequence
  Description of Artificial Sequence: Synthetic oligonucleotide
  Sense strand starting at position 1845 of SEQ ID NO: 2165
aggagaacuucccaacuca

SEQ ID NO: 168007 - RNA, 19 nt, Artificial Sequence
  Description of Artificial Sequence: Synthetic oligonucleotide
  Antisense strand to SEQ ID NO: 168006
ugaguugggaaguucuccu

SEQ ID NO: 168008 - RNA, 19 nt, Artificial Sequence
  Description of Artificial Sequence: Synthetic oligonucleotide
  Sense strand starting at position 1873 of SEQ ID NO: 2165
cagggaguguucucaaaga

SEQ ID NO: 168009 - RNA, 19 nt, Artificial Sequence
  Description of Artificial Sequence: Synthetic oligonucleotide
  Antisense strand to SEQ ID NO: 168008
ucuuugagaacacucccug

SEQ ID NO: 168010 - RNA, 19 nt, Artificial Sequence
  Description of Artificial Sequence: Synthetic oligonucleotide
  Sense strand starting at position 2092 of SEQ ID NO: 2165
auggcuucuguguaccaaa

SEQ ID NO: 168011 - RNA, 19 nt, Artificial Sequence
  Description of Artificial Sequence: Synthetic oligonucleotide
  Antisense strand to SEQ ID NO: 168010
uuugguacacagaagccau

SEQ ID NO: 168012 - RNA, 19 nt, Artificial Sequence
  Description of Artificial Sequence: Synthetic oligonucleotide
  Sense strand starting at position 2200 of SEQ ID NO: 2165
gugggaucgucucagcagu

SEQ ID NO: 168013 - RNA, 19 nt, Artificial Sequence
  Description of Artificial Sequence: Synthetic oligonucleotide
  Antisense strand to SEQ ID NO: 168012
acugcugagacgaucccac

SEQ ID NO: 168014 - RNA, 19 nt, Artificial Sequence
  Description of Artificial Sequence: Synthetic oligonucleotide
  Sense strand starting at position 2211 of SEQ ID NO: 2165
ucagcagugcucgggugua

SEQ ID NO: 168015 - RNA, 19 nt, Artificial Sequence
  Description of Artificial Sequence: Synthetic oligonucleotide
  Antisense strand to SEQ ID NO: 168014
uacacccgagcacugcuga

SEQ ID NO: 168016 - RNA, 19 nt, Artificial Sequence
  Description of Artificial Sequence: Synthetic oligonucleotide
  Sense strand starting at position 2231 of SEQ ID NO: 2165
ccaggugcaagagauuauu

SEQ ID NO: 168017 - RNA, 19 nt, Artificial Sequence
  Description of Artificial Sequence: Synthetic oligonucleotide
  Antisense strand to SEQ ID NO: 168016
aauaaucucuugcaccugg

SEQ ID NO: 168018 - RNA, 19 nt, Artificial Sequence
  Description of Artificial Sequence: Synthetic oligonucleotide
  Sense strand starting at position 2234 of SEQ ID NO: 2165
ggugcaagagauuauucca

SEQ ID NO: 168019 - RNA, 19 nt, Artificial Sequence
  Description of Artificial Sequence: Synthetic oligonucleotide
  Antisense strand to SEQ ID NO: 168018
uggaauaaucucuugcacc

SEQ ID NO: 168020 - RNA, 19 nt, Artificial Sequence
  Description of Artificial Sequence: Synthetic oligonucleotide
  Sense strand starting at position 2333 of SEQ ID NO: 2165
gaaguaguuguucaggaga

SEQ ID NO: 168021 - RNA, 19 nt, Artificial Sequence
  Description of Artificial Sequence: Synthetic oligonucleotide
  Antisense strand to SEQ ID NO: 168020
ucuccugaacaacuacuuc

SEQ ID NO: 168022 - RNA, 19 nt, Artificial Sequence
  Description of Artificial Sequence: Synthetic oligonucleotide
  Sense strand starting at position 2335 of SEQ ID NO: 2165
aguaguuguucaggagaag

SEQ ID NO: 168023 - RNA, 19 nt, Artificial Sequence
  Description of Artificial Sequence: Synthetic oligonucleotide
  Antisense strand to SEQ ID NO: 168022
cuucuccugaacaacuacu

SEQ ID NO: 168024 - RNA, 19 nt, Artificial Sequence
  Description of Artificial Sequence: Synthetic oligonucleotide
  Sense strand starting at position 2368 of SEQ ID NO: 2165
gggaaaguguucugagcua

SEQ ID NO: 168025 - RNA, 19 nt, Artificial Sequence
  Description of Artificial Sequence: Synthetic oligonucleotide
  Antisense strand to SEQ ID NO: 168024
uagcucagaacacuuuccc

SEQ ID NO: 168026 - RNA, 19 nt, Artificial Sequence
  Description of Artificial Sequence: Synthetic oligonucleotide
  Sense strand starting at position 2373 of SEQ ID NO: 2165
aguguucugagcuagagaa

SEQ ID NO: 168027 - RNA, 19 nt, Artificial Sequence
  Description of Artificial Sequence: Synthetic oligonucleotide
  Antisense strand to SEQ ID NO: 168026
uucucuagcucagaacacu

SEQ ID NO: 168028 - RNA, 19 nt, Artificial Sequence
  Description of Artificial Sequence: Synthetic oligonucleotide
  Sense strand starting at position 2493 of SEQ ID NO: 2165
gggaguugcgguuggacaa

SEQ ID NO: 168029 - RNA, 19 nt, Artificial Sequence
  Description of Artificial Sequence: Synthetic oligonucleotide
  Antisense strand to SEQ ID NO: 168028
uuguccaaccgcaacuccc

SEQ ID NO: 168030 - RNA, 19 nt, Artificial Sequence
  Description of Artificial Sequence: Synthetic oligonucleotide
  Sense strand starting at position 2494 of SEQ ID NO: 2165
ggaguugcgguuggacaaa

SEQ ID NO: 168031 - RNA, 19 nt, Artificial Sequence
  Description of Artificial Sequence: Synthetic oligonucleotide
  Antisense strand to SEQ ID NO: 168030
uuuguccaaccgcaacucc

SEQ ID NO: 168032 - RNA, 19 nt, Artificial Sequence
  Description of Artificial Sequence: Synthetic oligonucleotide
  Sense strand starting at position 2517 of SEQ ID NO: 2165
auuuguugguucuggaaug

SEQ ID NO: 168033 - RNA, 19 nt, Artificial Sequence
  Description of Artificial Sequence: Synthetic oligonucleotide
  Antisense strand to SEQ ID NO: 168032
cauuccagaaccaacaaau

SEQ ID NO: 168034 - RNA, 19 nt, Artificial Sequence
  Description of Artificial Sequence: Synthetic oligonucleotide
  Sense strand starting at position 2654 of SEQ ID NO: 2165
cuuugaagucaaugagaac

SEQ ID NO: 168035 - RNA, 19 nt, Artificial Sequence
  Description of Artificial Sequence: Synthetic oligonucleotide
  Antisense strand to SEQ ID NO: 168034
guucucauugacuucaaag

SEQ ID NO: 168036 - RNA, 19 nt, Artificial Sequence
  Description of Artificial Sequence: Synthetic oligonucleotide
  Sense strand starting at position 2657 of SEQ ID NO: 2165
ugaagucaaugagaacacu

SEQ ID NO: 168037 - RNA, 19 nt, Artificial Sequence
  Description of Artificial Sequence: Synthetic oligonucleotide
  Antisense strand to SEQ ID NO: 168036
aguguucucauugacuuca

SEQ ID NO: 168038 - RNA, 19 nt, Artificial Sequence
  Description of Artificial Sequence: Synthetic oligonucleotide
  Sense strand starting at position 2696 of SEQ ID NO: 2165
gcaggucuucuacaucgaa

SEQ ID NO: 168039 - RNA, 19 nt, Artificial Sequence
  Description of Artificial Sequence: Synthetic oligonucleotide
  Antisense strand to SEQ ID NO: 168038
uucgauguagaagaccugc

SEQ ID NO: 168040 - RNA, 19 nt, Artificial Sequence
  Description of Artificial Sequence: Synthetic oligonucleotide
  Sense strand starting at position 2907 of SEQ ID NO: 2165
gccguuacaacagaugagu

SEQ ID NO: 168041 - RNA, 19 nt, Artificial Sequence
  Description of Artificial Sequence: Synthetic oligonucleotide
  Antisense strand to SEQ ID NO: 168040
acucaucuguuguaacggc

SEQ ID NO: 168042 - RNA, 19 nt, Artificial Sequence
  Description of Artificial Sequence: Synthetic oligonucleotide
  Sense strand starting at position 2909 of SEQ ID NO: 2165
cguuacaacagaugaguca

SEQ ID NO: 168043 - RNA, 19 nt, Artificial Sequence
  Description of Artificial Sequence: Synthetic oligonucleotide
  Antisense strand to SEQ ID NO: 168042
ugacucaucuguuguaacg

SEQ ID NO: 168044 - RNA, 19 nt, Artificial Sequence
  Description of Artificial Sequence: Synthetic oligonucleotide
  Sense strand starting at position 20 of SEQ ID NO: 2163
aggagaacuucccaacuca

SEQ ID NO: 168045 - RNA, 19 nt, Artificial Sequence
  Description of Artificial Sequence: Synthetic oligonucleotide
  Antisense strand to SEQ ID NO: 168044
ugaguugggaaguucuccu

SEQ ID NO: 168046 - RNA, 19 nt, Artificial Sequence
  Description of Artificial Sequence: Synthetic oligonucleotide
  Sense strand starting at position 48 of SEQ ID NO: 2163
cagggaguguucucaaaga

SEQ ID NO: 168047 - RNA, 19 nt, Artificial Sequence
  Description of Artificial Sequence: Synthetic oligonucleotide
  Antisense strand to SEQ ID NO: 168046
ucuuugagaacacucccug

SEQ ID NO: 168048 - RNA, 19 nt, Artificial Sequence
  Description of Artificial Sequence: Synthetic oligonucleotide
  Sense strand starting at position 267 of SEQ ID NO: 2163
auggcuucuguguaccaaa

SEQ ID NO: 168049 - RNA, 19 nt, Artificial Sequence
  Description of Artificial Sequence: Synthetic oligonucleotide
  Antisense strand to SEQ ID NO: 168048
uuugguacacagaagccau

SEQ ID NO: 168050 - RNA, 19 nt, Artificial Sequence
  Description of Artificial Sequence: Synthetic oligonucleotide
  Sense strand starting at position 406 of SEQ ID NO: 2163
ccaggugcaagagauuauu

SEQ ID NO: 168051 - RNA, 19 nt, Artificial Sequence
  Description of Artificial Sequence: Synthetic oligonucleotide
  Antisense strand to SEQ ID NO: 168050
aauaaucucuugcaccugg

SEQ ID NO: 168052 - RNA, 19 nt, Artificial Sequence
  Description of Artificial Sequence: Synthetic oligonucleotide
  Sense strand starting at position 409 of SEQ ID NO: 2163
ggugcaagagauuauucca

SEQ ID NO: 168053 - RNA, 19 nt, Artificial Sequence
  Description of Artificial Sequence: Synthetic oligonucleotide
  Antisense strand to SEQ ID NO: 168052
uggaauaaucucuugcacc

SEQ ID NO: 168054 - RNA, 19 nt, Artificial Sequence
  Description of Artificial Sequence: Synthetic oligonucleotide
  Sense strand starting at position 508 of SEQ ID NO: 2163
gaaguaguuguucaggaga

SEQ ID NO: 168055 - RNA, 19 nt, Artificial Sequence
  Description of Artificial Sequence: Synthetic oligonucleotide
  Antisense strand to SEQ ID NO: 168054
ucuccugaacaacuacuuc

SEQ ID NO: 168056 - RNA, 19 nt, Artificial Sequence
  Description of Artificial Sequence: Synthetic oligonucleotide
  Sense strand starting at position 548 of SEQ ID NO: 2163
aguguucugagcuagagaa

SEQ ID NO: 168057 - RNA, 19 nt, Artificial Sequence
  Description of Artificial Sequence: Synthetic oligonucleotide
  Antisense strand to SEQ ID NO: 168056
uucucuagcucagaacacu

SEQ ID NO: 168058 - RNA, 19 nt, Artificial Sequence
  Description of Artificial Sequence: Synthetic oligonucleotide
  Sense strand starting at position 668 of SEQ ID NO: 2163
gggaguugcgguuggacaa

SEQ ID NO: 168059 - RNA, 19 nt, Artificial Sequence
  Description of Artificial Sequence: Synthetic oligonucleotide
  Antisense strand to SEQ ID NO: 168058
uuguccaaccgcaacuccc

SEQ ID NO: 168060 - RNA, 19 nt, Artificial Sequence
  Description of Artificial Sequence: Synthetic oligonucleotide
  Sense strand starting at position 669 of SEQ ID NO: 2163
ggaguugcgguuggacaaa

SEQ ID NO: 168061 - RNA, 19 nt, Artificial Sequence
  Description of Artificial Sequence: Synthetic oligonucleotide
  Antisense strand to SEQ ID NO: 168060
uuuguccaaccgcaacucc

SEQ ID NO: 168062 - RNA, 19 nt, Artificial Sequence
  Description of Artificial Sequence: Synthetic oligonucleotide
  Sense strand starting at position 829 of SEQ ID NO: 2163
cuuugaagucaaugagaac

SEQ ID NO: 168063 - RNA, 19 nt, Artificial Sequence
  Description of Artificial Sequence: Synthetic oligonucleotide
  Antisense strand to SEQ ID NO: 168062
guucucauugacuucaaag

SEQ ID NO: 168064 - RNA, 19 nt, Artificial Sequence
  Description of Artificial Sequence: Synthetic oligonucleotide
  Sense strand starting at position 832 of SEQ ID NO: 2163
ugaagucaaugagaacacu

SEQ ID NO: 168065 - RNA, 19 nt, Artificial Sequence
  Description of Artificial Sequence: Synthetic oligonucleotide
  Antisense strand to SEQ ID NO: 168064
aguguucucauugacuuca

SEQ ID NO: 168066 - RNA, 19 nt, Artificial Sequence
  Description of Artificial Sequence: Synthetic oligonucleotide
  Sense strand starting at position 871 of SEQ ID NO: 2163
gcaggucuucuacaucgaa

SEQ ID NO: 168067 - RNA, 19 nt, Artificial Sequence
  Description of Artificial Sequence: Synthetic oligonucleotide
  Antisense strand to SEQ ID NO: 168066
uucgauguagaagaccugc

SEQ ID NO: 168068 - RNA, 19 nt, Artificial Sequence
  Description of Artificial Sequence: Synthetic oligonucleotide
  Sense strand starting at position 1082 of SEQ ID NO: 2163
gccguuacaacagaugagu

SEQ ID NO: 168069 - RNA, 19 nt, Artificial Sequence
  Description of Artificial Sequence: Synthetic oligonucleotide
  Antisense strand to SEQ ID NO: 168068
acucaucuguuguaacggc

SEQ ID NO: 168070 - RNA, 19 nt, Artificial Sequence
  Description of Artificial Sequence: Synthetic oligonucleotide
  Sense strand starting at position 1084 of SEQ ID NO: 2163
cguuacaacagaugaguca

SEQ ID NO: 168071 - RNA, 19 nt, Artificial Sequence
  Description of Artificial Sequence: Synthetic oligonucleotide
  Antisense strand to SEQ ID NO: 168070
ugacucaucuguuguaacg

SEQ ID NO: 168072 - RNA, 19 nt, Artificial Sequence
  Description of Artificial Sequence: Synthetic oligonucleotide
  Sense strand starting at position 2217 of SEQ ID NO: 2163
guaggaaacuuucugccua

SEQ ID NO: 168073 - RNA, 19 nt, Artificial Sequence
  Description of Artificial Sequence: Synthetic oligonucleotide
  Antisense strand to SEQ ID NO: 168072
uaggcagaaaguuuccuac

SEQ ID NO: 168074 - RNA, 19 nt, Artificial Sequence
  Description of Artificial Sequence: Synthetic oligonucleotide
  Sense strand starting at position 2219 of SEQ ID NO: 2163
aggaaacuuucugccuaga

SEQ ID NO: 168075 - RNA, 19 nt, Artificial Sequence
  Description of Artificial Sequence: Synthetic oligonucleotide
  Antisense strand to SEQ ID NO: 168074
ucuaggcagaaaguuuccu

SEQ ID NO: 168076 - RNA, 19 nt, Artificial Sequence
  Description of Artificial Sequence: Synthetic oligonucleotide
  Sense strand starting at position 2224 of SEQ ID NO: 2163
acuuucugccuagaaaguu

SEQ ID NO: 168077 - RNA, 19 nt, Artificial Sequence
  Description of Artificial Sequence: Synthetic oligonucleotide
  Antisense strand to SEQ ID NO: 168076
aacuuucuaggcagaaagu

SEQ ID NO: 168078 - RNA, 19 nt, Artificial Sequence
  Description of Artificial Sequence: Synthetic oligonucleotide
  Sense strand starting at position 2232 of SEQ ID NO: 2163
ccuagaaaguuagcuaaac

SEQ ID NO: 168079 - RNA, 19 nt, Artificial Sequence
  Description of Artificial Sequence: Synthetic oligonucleotide
  Antisense strand to SEQ ID NO: 168078
guuuagcuaacuuucuagg

SEQ ID NO: 168080 - RNA, 19 nt, Artificial Sequence
  Description of Artificial Sequence: Synthetic oligonucleotide
  Sense strand starting at position 2233 of SEQ ID NO: 2163
cuagaaaguuagcuaaaca

SEQ ID NO: 168081 - RNA, 19 nt, Artificial Sequence
  Description of Artificial Sequence: Synthetic oligonucleotide
  Antisense strand to SEQ ID NO: 168080
uguuuagcuaacuuucuag

SEQ ID NO: 168082 - RNA, 19 nt, Artificial Sequence
  Description of Artificial Sequence: Synthetic oligonucleotide
  Sense strand starting at position 2256 of SEQ ID NO: 2163
gggcguguuuauguaggaa

SEQ ID NO: 168083 - RNA, 19 nt, Artificial Sequence
  Description of Artificial Sequence: Synthetic oligonucleotide
  Antisense strand to SEQ ID NO: 168082
uuccuacauaaacacgccc

SEQ ID NO: 168084 - RNA, 19 nt, Artificial Sequence
  Description of Artificial Sequence: Synthetic oligonucleotide
  Sense strand starting at position 2259 of SEQ ID NO: 2163
cguguuuauguaggaagaa

SEQ ID NO: 168085 - RNA, 19 nt, Artificial Sequence
  Description of Artificial Sequence: Synthetic oligonucleotide
  Antisense strand to SEQ ID NO: 168084
uucuuccuacauaaacacg

SEQ ID NO: 168086 - RNA, 19 nt, Artificial Sequence
  Description of Artificial Sequence: Synthetic oligonucleotide
  Sense strand starting at position 2339 of SEQ ID NO: 2163
aacugacuagugugugaca

SEQ ID NO: 168087 - RNA, 19 nt, Artificial Sequence
  Description of Artificial Sequence: Synthetic oligonucleotide
  Antisense strand to SEQ ID NO: 168086
ugucacacacuagucaguu

SEQ ID NO: 168088 - RNA, 19 nt, Artificial Sequence
  Description of Artificial Sequence: Synthetic oligonucleotide
  Sense strand starting at position 2526 of SEQ ID NO: 2163
uuucuaugaccugguaucu

SEQ ID NO: 168089 - RNA, 19 nt, Artificial Sequence
  Description of Artificial Sequence: Synthetic oligonucleotide
  Antisense strand to SEQ ID NO: 168088
agauaccaggucauagaaa

SEQ ID NO: 168090 - RNA, 19 nt, Artificial Sequence
  Description of Artificial Sequence: Synthetic oligonucleotide
  Sense strand starting at position 2697 of SEQ ID NO: 2163
gguggaguucugcacacau

SEQ ID NO: 168091 - RNA, 19 nt, Artificial Sequence
  Description of Artificial Sequence: Synthetic oligonucleotide
  Antisense strand to SEQ ID NO: 168090
augugugcagaacuccacc

SEQ ID NO: 168092 - RNA, 19 nt, Artificial Sequence
  Description of Artificial Sequence: Synthetic oligonucleotide
  Sense strand starting at position 2699 of SEQ ID NO: 2163
uggaguucugcacacauga

SEQ ID NO: 168093 - RNA, 19 nt, Artificial Sequence
  Description of Artificial Sequence: Synthetic oligonucleotide
  Antisense strand to SEQ ID NO: 168092
ucaugugugcagaacucca

SEQ ID NO: 168094 - RNA, 19 nt, Artificial Sequence
  Description of Artificial Sequence: Synthetic oligonucleotide
  Sense strand starting at position 2728 of SEQ ID NO: 2163
ccuugaaccugagauucca

SEQ ID NO: 168095 - RNA, 19 nt, Artificial Sequence
  Description of Artificial Sequence: Synthetic oligonucleotide
  Antisense strand to SEQ ID NO: 168094
uggaaucucagguucaagg

SEQ ID NO: 168096 - RNA, 19 nt, Artificial Sequence
  Description of Artificial Sequence: Synthetic oligonucleotide
  Sense strand starting at position 2738 of SEQ ID NO: 2163
gagauuccaggaugucaau

SEQ ID NO: 168097 - RNA, 19 nt, Artificial Sequence
  Description of Artificial Sequence: Synthetic oligonucleotide
  Antisense strand to SEQ ID NO: 168096
auugacauccuggaaucuc

SEQ ID NO: 168098 - RNA, 19 nt, Artificial Sequence
  Description of Artificial Sequence: Synthetic oligonucleotide
  Sense strand starting at position 2944 of SEQ ID NO: 2163
gugacuguugugcauucua

SEQ ID NO: 168099 - RNA, 19 nt, Artificial Sequence
  Description of Artificial Sequence: Synthetic oligonucleotide
  Antisense strand to SEQ ID NO: 168098
uagaaugcacaacagucac

SEQ ID NO: 168100 - RNA, 19 nt, Artificial Sequence
  Description of Artificial Sequence: Synthetic oligonucleotide
  Sense strand starting at position 2954 of SEQ ID NO: 2163
ugcauucuaugcuugaguu

SEQ ID NO: 168101 - RNA, 19 nt, Artificial Sequence
  Description of Artificial Sequence: Synthetic oligonucleotide
  Antisense strand to SEQ ID NO: 168100
aacucaagcauagaaugca

SEQ ID NO: 168102 - RNA, 19 nt, Artificial Sequence
  Description of Artificial Sequence: Synthetic oligonucleotide
  Sense strand starting at position 2964 of SEQ ID NO: 2163
gcuugaguucccuggucua

SEQ ID NO: 168103 - RNA, 19 nt, Artificial Sequence
  Description of Artificial Sequence: Synthetic oligonucleotide
  Antisense strand to SEQ ID NO: 168102
uagaccagggaacucaagc

SEQ ID NO: 168104 - RNA, 19 nt, Artificial Sequence
  Description of Artificial Sequence: Synthetic oligonucleotide
  Sense strand starting at position 2967 of SEQ ID NO: 2163
ugaguucccuggucuauag

SEQ ID NO: 168105 - RNA, 19 nt, Artificial Sequence
  Description of Artificial Sequence: Synthetic oligonucleotide
  Antisense strand to SEQ ID NO: 168104
cuauagaccagggaacuca

SEQ ID NO: 168106 - RNA, 19 nt, Artificial Sequence
  Description of Artificial Sequence: Synthetic oligonucleotide
  Sense strand starting at position 2969 of SEQ ID NO: 2163
aguucccuggucuauagaa

SEQ ID NO: 168107 - RNA, 19 nt, Artificial Sequence
  Description of Artificial Sequence: Synthetic oligonucleotide
  Antisense strand to SEQ ID NO: 168106
uucuauagaccagggaacu

SEQ ID NO: 168108 - RNA, 19 nt, Artificial Sequence
  Description of Artificial Sequence: Synthetic oligonucleotide
  Sense strand starting at position 2971 of SEQ ID NO: 2163
uucccuggucuauagaaca

SEQ ID NO: 168109 - RNA, 19 nt, Artificial Sequence
  Description of Artificial Sequence: Synthetic oligonucleotide
  Antisense strand to SEQ ID NO: 168108
uguucuauagaccagggaa

SEQ ID NO: 168110 - RNA, 19 nt, Artificial Sequence
  Description of Artificial Sequence: Synthetic oligonucleotide
  Sense strand starting at position 3066 of SEQ ID NO: 2163
gcacauagugaauacuauu

SEQ ID NO: 168111 - RNA, 19 nt, Artificial Sequence
  Description of Artificial Sequence: Synthetic oligonucleotide
  Antisense strand to SEQ ID NO: 168110
aauaguauucacuaugugc

SEQ ID NO: 168112 - RNA, 19 nt, Artificial Sequence
  Description of Artificial Sequence: Synthetic oligonucleotide
  Sense strand starting at position 3091 of SEQ ID NO: 2163
accaucuaucugugagggu

SEQ ID NO: 168113 - RNA, 19 nt, Artificial Sequence
  Description of Artificial Sequence: Synthetic oligonucleotide
  Antisense strand to SEQ ID NO: 168112
acccucacagauagauggu

SEQ ID NO: 168114 - RNA, 19 nt, Artificial Sequence
  Description of Artificial Sequence: Synthetic oligonucleotide
  Sense strand starting at position 3236 of SEQ ID NO: 2163
cuuaucauacgguaacuau

SEQ ID NO: 168115 - RNA, 19 nt, Artificial Sequence
  Description of Artificial Sequence: Synthetic oligonucleotide
  Antisense strand to SEQ ID NO: 168114
auaguuaccguaugauaag

SEQ ID NO: 168116 - RNA, 19 nt, Artificial Sequence
  Description of Artificial Sequence: Synthetic oligonucleotide
  Sense strand starting at position 3263 of SEQ ID NO: 2163
ccgccucacugacuagaaa

SEQ ID NO: 168117 - RNA, 19 nt, Artificial Sequence
  Description of Artificial Sequence: Synthetic oligonucleotide
  Antisense strand to SEQ ID NO: 168116
uuucuagucagugaggcgg

SEQ ID NO: 168118 - RNA, 19 nt, Artificial Sequence
  Description of Artificial Sequence: Synthetic oligonucleotide
  Sense strand starting at position 3306 of SEQ ID NO: 2163
cuuccagagcuuuguauuu

SEQ ID NO: 168119 - RNA, 19 nt, Artificial Sequence
  Description of Artificial Sequence: Synthetic oligonucleotide
  Antisense strand to SEQ ID NO: 168118
aaauacaaagcucuggaag

SEQ ID NO: 168120 - RNA, 19 nt, Artificial Sequence
  Description of Artificial Sequence: Synthetic oligonucleotide
  Sense strand starting at position 3713 of SEQ ID NO: 2163
ggcagugcccucguuugaa

SEQ ID NO: 168121 - RNA, 19 nt, Artificial Sequence
  Description of Artificial Sequence: Synthetic oligonucleotide
  Antisense strand to SEQ ID NO: 168120
uucaaacgagggcacugcc

SEQ ID NO: 168122 - RNA, 19 nt, Artificial Sequence
  Description of Artificial Sequence: Synthetic oligonucleotide
  Sense strand starting at position 3785 of SEQ ID NO: 2163
gccucacaucagggauguu

SEQ ID NO: 168123 - RNA, 19 nt, Artificial Sequence
  Description of Artificial Sequence: Synthetic oligonucleotide
  Antisense strand to SEQ ID NO: 168122
aacaucccugaugugaggc

SEQ ID NO: 168124 - RNA, 19 nt, Artificial Sequence
  Description of Artificial Sequence: Synthetic oligonucleotide
  Sense strand starting at position 80 of SEQ ID NO: 2168
gggaaaggcgaauagucuu

SEQ ID NO: 168125 - RNA, 19 nt, Artificial Sequence
  Description of Artificial Sequence: Synthetic oligonucleotide
  Antisense strand to SEQ ID NO: 168124
aagacuauucgccuuuccc

SEQ ID NO: 168126 - RNA, 19 nt, Artificial Sequence
  Description of Artificial Sequence: Synthetic oligonucleotide
  Sense strand starting at position 86 of SEQ ID NO: 2168
ggcgaauagucuucagacu

SEQ ID NO: 168127 - RNA, 19 nt, Artificial Sequence
  Description of Artificial Sequence: Synthetic oligonucleotide
  Antisense strand to SEQ ID NO: 168126
agucugaagacuauucgcc

SEQ ID NO: 168128 - RNA, 19 nt, Artificial Sequence
  Description of Artificial Sequence: Synthetic oligonucleotide
  Sense strand starting at position 208 of SEQ ID NO: 2168
ggcuguacuuuccuacaga

SEQ ID NO: 168129 - RNA, 19 nt, Artificial Sequence
  Description of Artificial Sequence: Synthetic oligonucleotide
  Antisense strand to SEQ ID NO: 168128
ucuguaggaaaguacagcc

SEQ ID NO: 168130 - RNA, 19 nt, Artificial Sequence
  Description of Artificial Sequence: Synthetic oligonucleotide
  Sense strand starting at position 253 of SEQ ID NO: 2168
agagauaucugaucuguuc

SEQ ID NO: 168131 - RNA, 19 nt, Artificial Sequence
  Description of Artificial Sequence: Synthetic oligonucleotide
  Antisense strand to SEQ ID NO: 168130
gaacagaucagauaucucu

SEQ ID NO: 168132 - RNA, 19 nt, Artificial Sequence
  Description of Artificial Sequence: Synthetic oligonucleotide
  Sense strand starting at position 458 of SEQ ID NO: 2168
aagggagaauucuaaugau

SEQ ID NO: 168133 - RNA, 19 nt, Artificial Sequence
  Description of Artificial Sequence: Synthetic oligonucleotide
  Antisense strand to SEQ ID NO: 168132
aucauuagaauucucccuu

SEQ ID NO: 168134 - RNA, 19 nt, Artificial Sequence
  Description of Artificial Sequence: Synthetic oligonucleotide
  Sense strand starting at position 611 of SEQ ID NO: 2168
ucaggcuuaugaucacaca

SEQ ID NO: 168135 - RNA, 19 nt, Artificial Sequence
  Description of Artificial Sequence: Synthetic oligonucleotide
  Antisense strand to SEQ ID NO: 168134
ugugugaucauaagccuga

SEQ ID NO: 168136 - RNA, 19 nt, Artificial Sequence
  Description of Artificial Sequence: Synthetic oligonucleotide
  Sense strand starting at position 628 of SEQ ID NO: 2168
caucgaagucuuggauuaa

SEQ ID NO: 168137 - RNA, 19 nt, Artificial Sequence
  Description of Artificial Sequence: Synthetic oligonucleotide
  Antisense strand to SEQ ID NO: 168136
uuaauccaagacuucgaug

SEQ ID NO: 168138 - RNA, 19 nt, Artificial Sequence
  Description of Artificial Sequence: Synthetic oligonucleotide
  Sense strand starting at position 672 of SEQ ID NO: 2168
gcggcuuugguggacauau

SEQ ID NO: 168139 - RNA, 19 nt, Artificial Sequence
  Description of Artificial Sequence: Synthetic oligonucleotide
  Antisense strand to SEQ ID NO: 168138
auauguccaccaaagccgc

SEQ ID NO: 168140 - RNA, 19 nt, Artificial Sequence
  Description of Artificial Sequence: Synthetic oligonucleotide
  Sense strand starting at position 674 of SEQ ID NO: 2168
ggcuuugguggacauauag

SEQ ID NO: 168141 - RNA, 19 nt, Artificial Sequence
  Description of Artificial Sequence: Synthetic oligonucleotide
  Antisense strand to SEQ ID NO: 168140
cuauauguccaccaaagcc

SEQ ID NO: 168142 - RNA, 19 nt, Artificial Sequence
  Description of Artificial Sequence: Synthetic oligonucleotide
  Sense strand starting at position 681 of SEQ ID NO: 2168
guggacauauaggaauaau

SEQ ID NO: 168143 - RNA, 19 nt, Artificial Sequence
  Description of Artificial Sequence: Synthetic oligonucleotide
  Antisense strand to SEQ ID NO: 168142
auuauuccuauauguccac

SEQ ID NO: 168144 - RNA, 19 nt, Artificial Sequence
  Description of Artificial Sequence: Synthetic oligonucleotide
  Sense strand starting at position 695 of SEQ ID NO: 2168
auaauucuucccuggauug

SEQ ID NO: 168145 - RNA, 19 nt, Artificial Sequence
  Description of Artificial Sequence: Synthetic oligonucleotide
  Antisense strand to SEQ ID NO: 168144
caauccagggaagaauuau

SEQ ID NO: 168146 - RNA, 19 nt, Artificial Sequence
  Description of Artificial Sequence: Synthetic oligonucleotide
  Sense strand starting at position 948 of SEQ ID NO: 2168
ugcuuuguucucccgccaa

SEQ ID NO: 168147 - RNA, 19 nt, Artificial Sequence
  Description of Artificial Sequence: Synthetic oligonucleotide
  Antisense strand to SEQ ID NO: 168146
uuggcgggagaacaaagca

SEQ ID NO: 168148 - RNA, 19 nt, Artificial Sequence
  Description of Artificial Sequence: Synthetic oligonucleotide
  Sense strand starting at position 991 of SEQ ID NO: 2168
gcgcucugggaugauuauu

SEQ ID NO: 168149 - RNA, 19 nt, Artificial Sequence
  Description of Artificial Sequence: Synthetic oligonucleotide
  Antisense strand to SEQ ID NO: 168148
aauaaucaucccagagcgc

SEQ ID NO: 168150 - RNA, 19 nt, Artificial Sequence
  Description of Artificial Sequence: Synthetic oligonucleotide
  Sense strand starting at position 1028 of SEQ ID NO: 2168
aaugaugacgauugugaug

SEQ ID NO: 168151 - RNA, 19 nt, Artificial Sequence
  Description of Artificial Sequence: Synthetic oligonucleotide
  Antisense strand to SEQ ID NO: 168150
caucacaaucgucaucauu

SEQ ID NO: 168152 - RNA, 19 nt, Artificial Sequence
  Description of Artificial Sequence: Synthetic oligonucleotide
  Sense strand starting at position 1034 of SEQ ID NO: 2168
gacgauugugauggugaug

SEQ ID NO: 168153 - RNA, 19 nt, Artificial Sequence
  Description of Artificial Sequence: Synthetic oligonucleotide
  Antisense strand to SEQ ID NO: 168152
caucaccaucacaaucguc

SEQ ID NO: 168154 - RNA, 19 nt, Artificial Sequence
  Description of Artificial Sequence: Synthetic oligonucleotide
  Sense strand starting at position 1045 of SEQ ID NO: 2168
uggugauggcauuagcaau

SEQ ID NO: 168155 - RNA, 19 nt, Artificial Sequence
  Description of Artificial Sequence: Synthetic oligonucleotide
  Antisense strand to SEQ ID NO: 168154
auugcuaaugccaucacca

SEQ ID NO: 168156 - RNA, 19 nt, Artificial Sequence
  Description of Artificial Sequence: Synthetic oligonucleotide
  Sense strand starting at position 1154 of SEQ ID NO: 2168
ggaugcgacggguaucaga

SEQ ID NO: 168157 - RNA, 19 nt, Artificial Sequence
  Description of Artificial Sequence: Synthetic oligonucleotide
  Antisense strand to SEQ ID NO: 168156
ucugauacccgucgcaucc

SEQ ID NO: 168158 - RNA, 19 nt, Artificial Sequence
  Description of Artificial Sequence: Synthetic oligonucleotide
  Sense strand starting at position 1223 of SEQ ID NO: 2168
ggaggugaucccgaauguc

SEQ ID NO: 168159 - RNA, 19 nt, Artificial Sequence
  Description of Artificial Sequence: Synthetic oligonucleotide
  Antisense strand to SEQ ID NO: 168158
gacauucgggaucaccucc

SEQ ID NO: 168160 - RNA, 19 nt, Artificial Sequence
  Description of Artificial Sequence: Synthetic oligonucleotide
  Sense strand starting at position 1542 of SEQ ID NO: 2168
ccgaauacaucauaauuug

SEQ ID NO: 168161 - RNA, 19 nt, Artificial Sequence
  Description of Artificial Sequence: Synthetic oligonucleotide
  Antisense strand to SEQ ID NO: 168160
caaauuaugauguauucgg

SEQ ID NO: 168162 - RNA, 19 nt, Artificial Sequence
  Description of Artificial Sequence: Synthetic oligonucleotide
  Sense strand starting at position 1943 of SEQ ID NO: 2168
gaaucagaucccugcugag

SEQ ID NO: 168163 - RNA, 19 nt, Artificial Sequence
  Description of Artificial Sequence: Synthetic oligonucleotide
  Antisense strand to SEQ ID NO: 168162
cucagcagggaucugauuc

SEQ ID NO: 168164 - RNA, 19 nt, Artificial Sequence
  Description of Artificial Sequence: Synthetic oligonucleotide
  Sense strand starting at position 2113 of SEQ ID NO: 2168
cacaguucucaugaacgca

SEQ ID NO: 168165 - RNA, 19 nt, Artificial Sequence
  Description of Artificial Sequence: Synthetic oligonucleotide
  Antisense strand to SEQ ID NO: 168164
ugcguucaugagaacugug

SEQ ID NO: 168166 - RNA, 19 nt, Artificial Sequence
  Description of Artificial Sequence: Synthetic oligonucleotide
  Sense strand starting at position 2193 of SEQ ID NO: 2168
cgcgcauuucuguauauug

SEQ ID NO: 168167 - RNA, 19 nt, Artificial Sequence
  Description of Artificial Sequence: Synthetic oligonucleotide
  Antisense strand to SEQ ID NO: 168166
caauauacagaaaugcgcg

SEQ ID NO: 168168 - RNA, 19 nt, Artificial Sequence
  Description of Artificial Sequence: Synthetic oligonucleotide
  Sense strand starting at position 2202 of SEQ ID NO: 2168
cuguauauugcguaaggaa

SEQ ID NO: 168169 - RNA, 19 nt, Artificial Sequence
  Description of Artificial Sequence: Synthetic oligonucleotide
  Antisense strand to SEQ ID NO: 168168
uuccuuacgcaauauacag

SEQ ID NO: 168170 - RNA, 19 nt, Artificial Sequence
  Description of Artificial Sequence: Synthetic oligonucleotide
  Sense strand starting at position 2379 of SEQ ID NO: 2168
ggaggaaauugaugaagaa

SEQ ID NO: 168171 - RNA, 19 nt, Artificial Sequence
  Description of Artificial Sequence: Synthetic oligonucleotide
  Antisense strand to SEQ ID NO: 168170
uucuucaucaauuuccucc

SEQ ID NO: 168172 - RNA, 19 nt, Artificial Sequence
  Description of Artificial Sequence: Synthetic oligonucleotide
  Sense strand starting at position 2694 of SEQ ID NO: 2168
cggccauuaugggccaaau

SEQ ID NO: 168173 - RNA, 19 nt, Artificial Sequence
  Description of Artificial Sequence: Synthetic oligonucleotide
  Antisense strand to SEQ ID NO: 168172
auuuggcccauaauggccg

SEQ ID NO: 168174 - RNA, 19 nt, Artificial Sequence
  Description of Artificial Sequence: Synthetic oligonucleotide
  Sense strand starting at position 2696 of SEQ ID NO: 2168
gccauuaugggccaaauga

SEQ ID NO: 168175 - RNA, 19 nt, Artificial Sequence
  Description of Artificial Sequence: Synthetic oligonucleotide
  Antisense strand to SEQ ID NO: 168174
ucauuuggcccauaauggc

SEQ ID NO: 168176 - RNA, 19 nt, Artificial Sequence
  Description of Artificial Sequence: Synthetic oligonucleotide
  Sense strand starting at position 3250 of SEQ ID NO: 2168
guuuaaucuagcgacugua

SEQ ID NO: 168177 - RNA, 19 nt, Artificial Sequence
  Description of Artificial Sequence: Synthetic oligonucleotide
  Antisense strand to SEQ ID NO: 168176
uacagucgcuagauuaaac

SEQ ID NO: 168178 - RNA, 19 nt, Artificial Sequence
  Description of Artificial Sequence: Synthetic oligonucleotide
  Sense strand starting at position 3253 of SEQ ID NO: 2168
uaaucuagcgacuguaaca

SEQ ID NO: 168179 - RNA, 19 nt, Artificial Sequence
  Description of Artificial Sequence: Synthetic oligonucleotide
  Antisense strand to SEQ ID NO: 168178
uguuacagucgcuagauua

SEQ ID NO: 168180 - RNA, 19 nt, Artificial Sequence
  Description of Artificial Sequence: Synthetic oligonucleotide
  Sense strand starting at position 3407 of SEQ ID NO: 2168
gguggagucugccuuggaa

SEQ ID NO: 168181 - RNA, 19 nt, Artificial Sequence
  Description of Artificial Sequence: Synthetic oligonucleotide
  Antisense strand to SEQ ID NO: 168180
uuccaaggcagacuccacc

SEQ ID NO: 168182 - RNA, 19 nt, Artificial Sequence
  Description of Artificial Sequence: Synthetic oligonucleotide
  Sense strand starting at position 3410 of SEQ ID NO: 2168
ggagucugccuuggaagga

SEQ ID NO: 168183 - RNA, 19 nt, Artificial Sequence
  Description of Artificial Sequence: Synthetic oligonucleotide
  Antisense strand to SEQ ID NO: 168182
uccuuccaaggcagacucc

SEQ ID NO: 168184 - RNA, 19 nt, Artificial Sequence
  Description of Artificial Sequence: Synthetic oligonucleotide
  Sense strand starting at position 3504 of SEQ ID NO: 2168
gggcucaacucauugcaga

SEQ ID NO: 168185 - RNA, 19 nt, Artificial Sequence
  Description of Artificial Sequence: Synthetic oligonucleotide
  Antisense strand to SEQ ID NO: 168184
ucugcaaugaguugagccc

SEQ ID NO: 168186 - RNA, 19 nt, Artificial Sequence
  Description of Artificial Sequence: Synthetic oligonucleotide
  Sense strand starting at position 3646 of SEQ ID NO: 2168
uuuagucacugaucucuga

SEQ ID NO: 168187 - RNA, 19 nt, Artificial Sequence
  Description of Artificial Sequence: Synthetic oligonucleotide
  Antisense strand to SEQ ID NO: 168186
ucagagaucagugacuaaa

SEQ ID NO: 168188 - RNA, 19 nt, Artificial Sequence
  Description of Artificial Sequence: Synthetic oligonucleotide
  Sense strand starting at position 3650 of SEQ ID NO: 2168
gucacugaucucugaaccu

SEQ ID NO: 168189 - RNA, 19 nt, Artificial Sequence
  Description of Artificial Sequence: Synthetic oligonucleotide
  Antisense strand to SEQ ID NO: 168188
agguucagagaucagugac

SEQ ID NO: 168190 - RNA, 19 nt, Artificial Sequence
  Description of Artificial Sequence: Synthetic oligonucleotide
  Sense strand starting at position 3692 of SEQ ID NO: 2168
ggagauaaugucgacguca

SEQ ID NO: 168191 - RNA, 19 nt, Artificial Sequence
  Description of Artificial Sequence: Synthetic oligonucleotide
  Antisense strand to SEQ ID NO: 168190
ugacgucgacauuaucucc

SEQ ID NO: 168192 - RNA, 19 nt, Artificial Sequence
  Description of Artificial Sequence: Synthetic oligonucleotide
  Sense strand starting at position 3694 of SEQ ID NO: 2168
agauaaugucgacgucaca

SEQ ID NO: 168193 - RNA, 19 nt, Artificial Sequence
  Description of Artificial Sequence: Synthetic oligonucleotide
  Antisense strand to SEQ ID NO: 168192
ugugacgucgacauuaucu

SEQ ID NO: 168194 - RNA, 19 nt, Artificial Sequence
  Description of Artificial Sequence: Synthetic oligonucleotide
  Sense strand starting at position 3705 of SEQ ID NO: 2168
acgucacaaaguuaugaga

SEQ ID NO: 168195 - RNA, 19 nt, Artificial Sequence
  Description of Artificial Sequence: Synthetic oligonucleotide
  Antisense strand to SEQ ID NO: 168194
ucucauaacuuugugacgu

SEQ ID NO: 168196 - RNA, 19 nt, Artificial Sequence
  Description of Artificial Sequence: Synthetic oligonucleotide
  Sense strand starting at position 3747 of SEQ ID NO: 2168
ggugguggugaggauaaua

SEQ ID NO: 168197 - RNA, 19 nt, Artificial Sequence
  Description of Artificial Sequence: Synthetic oligonucleotide
  Antisense strand to SEQ ID NO: 168196
uauuauccucaccaccacc

SEQ ID NO: 168198 - RNA, 19 nt, Artificial Sequence
  Description of Artificial Sequence: Synthetic oligonucleotide
  Sense strand starting at position 3821 of SEQ ID NO: 2168
gggaguucugguuaucauc

SEQ ID NO: 168199 - RNA, 19 nt, Artificial Sequence
  Description of Artificial Sequence: Synthetic oligonucleotide
  Antisense strand to SEQ ID NO: 168198
gaugauaaccagaacuccc

SEQ ID NO: 168200 - RNA, 19 nt, Artificial Sequence
  Description of Artificial Sequence: Synthetic oligonucleotide
  Sense strand starting at position 3823 of SEQ ID NO: 2168
gaguucugguuaucaucau

SEQ ID NO: 168201 - RNA, 19 nt, Artificial Sequence
  Description of Artificial Sequence: Synthetic oligonucleotide
  Antisense strand to SEQ ID NO: 168200
augaugauaaccagaacuc

SEQ ID NO: 168202 - RNA, 19 nt, Artificial Sequence
  Description of Artificial Sequence: Synthetic oligonucleotide
  Sense strand starting at position 3965 of SEQ ID NO: 2168
gcugauuuguccuucuagu

SEQ ID NO: 168203 - RNA, 19 nt, Artificial Sequence
  Description of Artificial Sequence: Synthetic oligonucleotide
  Antisense strand to SEQ ID NO: 168202
acuagaaggacaaaucagc

SEQ ID NO: 168204 - RNA, 19 nt, Artificial Sequence
  Description of Artificial Sequence: Synthetic oligonucleotide
  Sense strand starting at position 8 of SEQ ID NO: 2167
caucgaagucuuggauuaa

SEQ ID NO: 168205 - RNA, 19 nt, Artificial Sequence
  Description of Artificial Sequence: Synthetic oligonucleotide
  Antisense strand to SEQ ID NO: 168204
uuaauccaagacuucgaug

SEQ ID NO: 168206 - RNA, 19 nt, Artificial Sequence
  Description of Artificial Sequence: Synthetic oligonucleotide
  Sense strand starting at position 52 of SEQ ID NO: 2167
gcggcuuugguggacauau

SEQ ID NO: 168207 - RNA, 19 nt, Artificial Sequence
  Description of Artificial Sequence: Synthetic oligonucleotide
  Antisense strand to SEQ ID NO: 168206
auauguccaccaaagccgc

SEQ ID NO: 168208 - RNA, 19 nt, Artificial Sequence
  Description of Artificial Sequence: Synthetic oligonucleotide
  Sense strand starting at position 54 of SEQ ID NO: 2167
ggcuuugguggacauauag

SEQ ID NO: 168209 - RNA, 19 nt, Artificial Sequence
  Description of Artificial Sequence: Synthetic oligonucleotide
  Antisense strand to SEQ ID NO: 168208
cuauauguccaccaaagcc

SEQ ID NO: 168210 - RNA, 19 nt, Artificial Sequence
  Description of Artificial Sequence: Synthetic oligonucleotide
  Sense strand starting at position 61 of SEQ ID NO: 2167
guggacauauaggaauaau

SEQ ID NO: 168211 - RNA, 19 nt, Artificial Sequence
  Description of Artificial Sequence: Synthetic oligonucleotide
  Antisense strand to SEQ ID NO: 168210
auuauuccuauauguccac

SEQ ID NO: 168212 - RNA, 19 nt, Artificial Sequence
  Description of Artificial Sequence: Synthetic oligonucleotide
  Sense strand starting at position 75 of SEQ ID NO: 2167
auaauucuucccuggauug

SEQ ID NO: 168213 - RNA, 19 nt, Artificial Sequence
  Description of Artificial Sequence: Synthetic oligonucleotide
  Antisense strand to SEQ ID NO: 168212
caauccagggaagaauuau

SEQ ID NO: 168214 - RNA, 19 nt, Artificial Sequence
  Description of Artificial Sequence: Synthetic oligonucleotide
  Sense strand starting at position 328 of SEQ ID NO: 2167
ugcuuuguucucccgccaa

SEQ ID NO: 168215 - RNA, 19 nt, Artificial Sequence
  Description of Artificial Sequence: Synthetic oligonucleotide
  Antisense strand to SEQ ID NO: 168214
uuggcgggagaacaaagca

SEQ ID NO: 168216 - RNA, 19 nt, Artificial Sequence
  Description of Artificial Sequence: Synthetic oligonucleotide
  Sense strand starting at position 371 of SEQ ID NO: 2167
gcgcucugggaugauuauu

SEQ ID NO: 168217 - RNA, 19 nt, Artificial Sequence
  Description of Artificial Sequence: Synthetic oligonucleotide
  Antisense strand to SEQ ID NO: 168216
aauaaucaucccagagcgc

SEQ ID NO: 168218 - RNA, 19 nt, Artificial Sequence
  Description of Artificial Sequence: Synthetic oligonucleotide
  Sense strand starting at position 408 of SEQ ID NO: 2167
aaugaugacgauugugaug

SEQ ID NO: 168219 - RNA, 19 nt, Artificial Sequence
  Description of Artificial Sequence: Synthetic oligonucleotide
  Antisense strand to SEQ ID NO: 168218
caucacaaucgucaucauu

SEQ ID NO: 168220 - RNA, 19 nt, Artificial Sequence
  Description of Artificial Sequence: Synthetic oligonucleotide
  Sense strand starting at position 414 of SEQ ID NO: 2167
gacgauugugauggugaug

SEQ ID NO: 168221 - RNA, 19 nt, Artificial Sequence
  Description of Artificial Sequence: Synthetic oligonucleotide
  Antisense strand to SEQ ID NO: 168220
caucaccaucacaaucguc

SEQ ID NO: 168222 - RNA, 19 nt, Artificial Sequence
  Description of Artificial Sequence: Synthetic oligonucleotide
  Sense strand starting at position 425 of SEQ ID NO: 2167
uggugauggcauuagcaau

SEQ ID NO: 168223 - RNA, 19 nt, Artificial Sequence
  Description of Artificial Sequence: Synthetic oligonucleotide
  Antisense strand to SEQ ID NO: 168222
auugcuaaugccaucacca

SEQ ID NO: 168224 - RNA, 19 nt, Artificial Sequence
  Description of Artificial Sequence: Synthetic oligonucleotide
  Sense strand starting at position 534 of SEQ ID NO: 2167
ggaugcgacggguaucaga

SEQ ID NO: 168225 - RNA, 19 nt, Artificial Sequence
  Description of Artificial Sequence: Synthetic oligonucleotide
  Antisense strand to SEQ ID NO: 168224
ucugauacccgucgcaucc

SEQ ID NO: 168226 - RNA, 19 nt, Artificial Sequence
  Description of Artificial Sequence: Synthetic oligonucleotide
  Sense strand starting at position 603 of SEQ ID NO: 2167
ggaggugaucccgaauguc

SEQ ID NO: 168227 - RNA, 19 nt, Artificial Sequence
  Description of Artificial Sequence: Synthetic oligonucleotide
  Antisense strand to SEQ ID NO: 168226
gacauucgggaucaccucc

SEQ ID NO: 168228 - RNA, 19 nt, Artificial Sequence
  Description of Artificial Sequence: Synthetic oligonucleotide
  Sense strand starting at position 922 of SEQ ID NO: 2167
ccgaauacaucauaauuug

SEQ ID NO: 168229 - RNA, 19 nt, Artificial Sequence
  Description of Artificial Sequence: Synthetic oligonucleotide
  Antisense strand to SEQ ID NO: 168228
caaauuaugauguauucgg

SEQ ID NO: 168230 - RNA, 19 nt, Artificial Sequence
  Description of Artificial Sequence: Synthetic oligonucleotide
  Sense strand starting at position 1323 of SEQ ID NO: 2167
gaaucagaucccugcugag

SEQ ID NO: 168231 - RNA, 19 nt, Artificial Sequence
  Description of Artificial Sequence: Synthetic oligonucleotide
  Antisense strand to SEQ ID NO: 168230
cucagcagggaucugauuc

SEQ ID NO: 168232 - RNA, 19 nt, Artificial Sequence
  Description of Artificial Sequence: Synthetic oligonucleotide
  Sense strand starting at position 1489 of SEQ ID NO: 2167
cgcccacaguucucaugaa

SEQ ID NO: 168233 - RNA, 19 nt, Artificial Sequence
  Description of Artificial Sequence: Synthetic oligonucleotide
  Antisense strand to SEQ ID NO: 168232
uucaugagaacugugggcg

SEQ ID NO: 168234 - RNA, 19 nt, Artificial Sequence
  Description of Artificial Sequence: Synthetic oligonucleotide
  Sense strand starting at position 1493 of SEQ ID NO: 2167
cacaguucucaugaacgca

SEQ ID NO: 168235 - RNA, 19 nt, Artificial Sequence
  Description of Artificial Sequence: Synthetic oligonucleotide
  Antisense strand to SEQ ID NO: 168234
ugcguucaugagaacugug

SEQ ID NO: 168236 - RNA, 19 nt, Artificial Sequence
  Description of Artificial Sequence: Synthetic oligonucleotide
  Sense strand starting at position 1573 of SEQ ID NO: 2167
cgcgcauuucuguauauug

SEQ ID NO: 168237 - RNA, 19 nt, Artificial Sequence
  Description of Artificial Sequence: Synthetic oligonucleotide
  Antisense strand to SEQ ID NO: 168236
caauauacagaaaugcgcg

SEQ ID NO: 168238 - RNA, 19 nt, Artificial Sequence
  Description of Artificial Sequence: Synthetic oligonucleotide
  Sense strand starting at position 1582 of SEQ ID NO: 2167
cuguauauugcguaaggaa

SEQ ID NO: 168239 - RNA, 19 nt, Artificial Sequence
  Description of Artificial Sequence: Synthetic oligonucleotide
  Antisense strand to SEQ ID NO: 168238
uuccuuacgcaauauacag

SEQ ID NO: 168240 - RNA, 19 nt, Artificial Sequence
  Description of Artificial Sequence: Synthetic oligonucleotide
  Sense strand starting at position 1759 of SEQ ID NO: 2167
ggaggaaauugaugaagaa

SEQ ID NO: 168241 - RNA, 19 nt, Artificial Sequence
  Description of Artificial Sequence: Synthetic oligonucleotide
  Antisense strand to SEQ ID NO: 168240
uucuucaucaauuuccucc

SEQ ID NO: 168242 - RNA, 19 nt, Artificial Sequence
  Description of Artificial Sequence: Synthetic oligonucleotide
  Sense strand starting at position 2074 of SEQ ID NO: 2167
cggccauuaugggccaaau

SEQ ID NO: 168243 - RNA, 19 nt, Artificial Sequence
  Description of Artificial Sequence: Synthetic oligonucleotide
  Antisense strand to SEQ ID NO: 168242
auuuggcccauaauggccg

SEQ ID NO: 168244 - RNA, 19 nt, Artificial Sequence
  Description of Artificial Sequence: Synthetic oligonucleotide
  Sense strand starting at position 2076 of SEQ ID NO: 2167
gccauuaugggccaaauga

SEQ ID NO: 168245 - RNA, 19 nt, Artificial Sequence
  Description of Artificial Sequence: Synthetic oligonucleotide
  Antisense strand to SEQ ID NO: 168244
ucauuuggcccauaauggc

SEQ ID NO: 168246 - RNA, 19 nt, Artificial Sequence
  Description of Artificial Sequence: Synthetic oligonucleotide
  Sense strand starting at position 2630 of SEQ ID NO: 2167
guuuaaucuagcgacugua

SEQ ID NO: 168247 - RNA, 19 nt, Artificial Sequence
  Description of Artificial Sequence: Synthetic oligonucleotide
  Antisense strand to SEQ ID NO: 168246
uacagucgcuagauuaaac

SEQ ID NO: 168248 - RNA, 19 nt, Artificial Sequence
  Description of Artificial Sequence: Synthetic oligonucleotide
  Sense strand starting at position 2633 of SEQ ID NO: 2167
uaaucuagcgacuguaaca

SEQ ID NO: 168249 - RNA, 19 nt, Artificial Sequence
  Description of Artificial Sequence: Synthetic oligonucleotide
  Antisense strand to SEQ ID NO: 168248
uguuacagucgcuagauua

SEQ ID NO: 168250 - RNA, 19 nt, Artificial Sequence
  Description of Artificial Sequence: Synthetic oligonucleotide
  Sense strand starting at position 2787 of SEQ ID NO: 2167
gguggagucugccuuggaa

SEQ ID NO: 168251 - RNA, 19 nt, Artificial Sequence
  Description of Artificial Sequence: Synthetic oligonucleotide
  Antisense strand to SEQ ID NO: 168250
uuccaaggcagacuccacc

SEQ ID NO: 168252 - RNA, 19 nt, Artificial Sequence
  Description of Artificial Sequence: Synthetic oligonucleotide
  Sense strand starting at position 2790 of SEQ ID NO: 2167
ggagucugccuuggaagga

SEQ ID NO: 168253 - RNA, 19 nt, Artificial Sequence
  Description of Artificial Sequence: Synthetic oligonucleotide
  Antisense strand to SEQ ID NO: 168252
uccuuccaaggcagacucc

SEQ ID NO: 168254 - RNA, 19 nt, Artificial Sequence
  Description of Artificial Sequence: Synthetic oligonucleotide
  Sense strand starting at position 2884 of SEQ ID NO: 2167
gggcucaacucauugcaga

SEQ ID NO: 168255 - RNA, 19 nt, Artificial Sequence
  Description of Artificial Sequence: Synthetic oligonucleotide
  Antisense strand to SEQ ID NO: 168254
ucugcaaugaguugagccc

SEQ ID NO: 168256 - RNA, 19 nt, Artificial Sequence
  Description of Artificial Sequence: Synthetic oligonucleotide
  Sense strand starting at position 3026 of SEQ ID NO: 2167
uuuagucacugaucucuga

SEQ ID NO: 168257 - RNA, 19 nt, Artificial Sequence
  Description of Artificial Sequence: Synthetic oligonucleotide
  Antisense strand to SEQ ID NO: 168256
ucagagaucagugacuaaa

SEQ ID NO: 168258 - RNA, 19 nt, Artificial Sequence
  Description of Artificial Sequence: Synthetic oligonucleotide
  Sense strand starting at position 3030 of SEQ ID NO: 2167
gucacugaucucugaaccu

SEQ ID NO: 168259 - RNA, 19 nt, Artificial Sequence
  Description of Artificial Sequence: Synthetic oligonucleotide
  Antisense strand to SEQ ID NO: 168258
agguucagagaucagugac

SEQ ID NO: 168260 - RNA, 19 nt, Artificial Sequence
  Description of Artificial Sequence: Synthetic oligonucleotide
  Sense strand starting at position 3072 of SEQ ID NO: 2167
ggagauaaugucgacguca

SEQ ID NO: 168261 - RNA, 19 nt, Artificial Sequence
  Description of Artificial Sequence: Synthetic oligonucleotide
  Antisense strand to SEQ ID NO: 168260
ugacgucgacauuaucucc

SEQ ID NO: 168262 - RNA, 19 nt, Artificial Sequence
  Description of Artificial Sequence: Synthetic oligonucleotide
  Sense strand starting at position 3074 of SEQ ID NO: 2167
agauaaugucgacgucaca

SEQ ID NO: 168263 - RNA, 19 nt, Artificial Sequence
  Description of Artificial Sequence: Synthetic oligonucleotide
  Antisense strand to SEQ ID NO: 168262
ugugacgucgacauuaucu

SEQ ID NO: 168264 - RNA, 19 nt, Artificial Sequence
  Description of Artificial Sequence: Synthetic oligonucleotide
  Sense strand starting at position 3085 of SEQ ID NO: 2167
acgucacaaaguuaugaga

SEQ ID NO: 168265 - RNA, 19 nt, Artificial Sequence
  Description of Artificial Sequence: Synthetic oligonucleotide
  Antisense strand to SEQ ID NO: 168264
ucucauaacuuugugacgu

SEQ ID NO: 168266 - RNA, 19 nt, Artificial Sequence
  Description of Artificial Sequence: Synthetic oligonucleotide
  Sense strand starting at position 3127 of SEQ ID NO: 2167
ggugguggugaggauaaua

SEQ ID NO: 168267 - RNA, 19 nt, Artificial Sequence
  Description of Artificial Sequence: Synthetic oligonucleotide
  Antisense strand to SEQ ID NO: 168266
uauuauccucaccaccacc

SEQ ID NO: 168268 - RNA, 19 nt, Artificial Sequence
  Description of Artificial Sequence: Synthetic oligonucleotide
  Sense strand starting at position 3201 of SEQ ID NO: 2167
gggaguucugguuaucauc

SEQ ID NO: 168269 - RNA, 19 nt, Artificial Sequence
  Description of Artificial Sequence: Synthetic oligonucleotide
  Antisense strand to SEQ ID NO: 168268
gaugauaaccagaacuccc

SEQ ID NO: 168270 - RNA, 19 nt, Artificial Sequence
  Description of Artificial Sequence: Synthetic oligonucleotide
  Sense strand starting at position 3203 of SEQ ID NO: 2167
gaguucugguuaucaucau

SEQ ID NO: 168271 - RNA, 19 nt, Artificial Sequence
  Description of Artificial Sequence: Synthetic oligonucleotide
  Antisense strand to SEQ ID NO: 168270
augaugauaaccagaacuc

SEQ ID NO: 168272 - RNA, 19 nt, Artificial Sequence
  Description of Artificial Sequence: Synthetic oligonucleotide
  Sense strand starting at position 3345 of SEQ ID NO: 2167
gcugauuuguccuucuagu

SEQ ID NO: 168273 - RNA, 19 nt, Artificial Sequence
  Description of Artificial Sequence: Synthetic oligonucleotide
  Antisense strand to SEQ ID NO: 168272
acuagaaggacaaaucagc

SEQ ID NO: 168274 - RNA, 19 nt, Artificial Sequence
  Description of Artificial Sequence: Synthetic oligonucleotide
  Sense strand starting at position 3554 of SEQ ID NO: 2167
uccugugcucucugaagga

SEQ ID NO: 168275 - RNA, 19 nt, Artificial Sequence
  Description of Artificial Sequence: Synthetic oligonucleotide
  Antisense strand to SEQ ID NO: 168274
uccuucagagagcacagga

SEQ ID NO: 168276 - RNA, 19 nt, Artificial Sequence
  Description of Artificial Sequence: Synthetic oligonucleotide
  Sense strand starting at position 3694 of SEQ ID NO: 2167
auauaauucugagucugaa

SEQ ID NO: 168277 - RNA, 19 nt, Artificial Sequence
  Description of Artificial Sequence: Synthetic oligonucleotide
  Antisense strand to SEQ ID NO: 168276
uucagacucagaauuauau

SEQ ID NO: 168278 - RNA, 19 nt, Artificial Sequence
  Description of Artificial Sequence: Synthetic oligonucleotide
  Sense strand starting at position 3790 of SEQ ID NO: 2167
uagccauucccauauggga

SEQ ID NO: 168279 - RNA, 19 nt, Artificial Sequence
  Description of Artificial Sequence: Synthetic oligonucleotide
  Antisense strand to SEQ ID NO: 168278
ucccauaugggaauggcua

SEQ ID NO: 168280 - RNA, 19 nt, Artificial Sequence
  Description of Artificial Sequence: Synthetic oligonucleotide
  Sense strand starting at position 3792 of SEQ ID NO: 2167
gccauucccauaugggaga

SEQ ID NO: 168281 - RNA, 19 nt, Artificial Sequence
  Description of Artificial Sequence: Synthetic oligonucleotide
  Antisense strand to SEQ ID NO: 168280
ucucccauaugggaauggc

SEQ ID NO: 168282 - RNA, 19 nt, Artificial Sequence
  Description of Artificial Sequence: Synthetic oligonucleotide
  Sense strand starting at position 3897 of SEQ ID NO: 2167
ggagaagcaucaguaucca

SEQ ID NO: 168283 - RNA, 19 nt, Artificial Sequence
  Description of Artificial Sequence: Synthetic oligonucleotide
  Antisense strand to SEQ ID NO: 168282
uggauacugaugcuucucc

SEQ ID NO: 168284 - RNA, 19 nt, Artificial Sequence
  Description of Artificial Sequence: Synthetic oligonucleotide
  Sense strand starting at position 34 of SEQ ID NO: 2166
ggcuguacuuuccuacaga

SEQ ID NO: 168285 - RNA, 19 nt, Artificial Sequence
  Description of Artificial Sequence: Synthetic oligonucleotide
  Antisense strand to SEQ ID NO: 168284
ucuguaggaaaguacagcc

SEQ ID NO: 168286 - RNA, 19 nt, Artificial Sequence
  Description of Artificial Sequence: Synthetic oligonucleotide
  Sense strand starting at position 79 of SEQ ID NO: 2166
agagauaucugaucuguuc

SEQ ID NO: 168287 - RNA, 19 nt, Artificial Sequence
  Description of Artificial Sequence: Synthetic oligonucleotide
  Antisense strand to SEQ ID NO: 168286
gaacagaucagauaucucu

SEQ ID NO: 168288 - RNA, 19 nt, Artificial Sequence
  Description of Artificial Sequence: Synthetic oligonucleotide
  Sense strand starting at position 284 of SEQ ID NO: 2166
aagggagaauucuaaugau

SEQ ID NO: 168289 - RNA, 19 nt, Artificial Sequence
  Description of Artificial Sequence: Synthetic oligonucleotide
  Antisense strand to SEQ ID NO: 168288
aucauuagaauucucccuu

SEQ ID NO: 168290 - RNA, 19 nt, Artificial Sequence
  Description of Artificial Sequence: Synthetic oligonucleotide
  Sense strand starting at position 437 of SEQ ID NO: 2166
ucaggcuuaugaucacaca

SEQ ID NO: 168291 - RNA, 19 nt, Artificial Sequence
  Description of Artificial Sequence: Synthetic oligonucleotide
  Antisense strand to SEQ ID NO: 168290
ugugugaucauaagccuga

SEQ ID NO: 168292 - RNA, 19 nt, Artificial Sequence
  Description of Artificial Sequence: Synthetic oligonucleotide
  Sense strand starting at position 454 of SEQ ID NO: 2166
caucgaagucuuggauuaa

SEQ ID NO: 168293 - RNA, 19 nt, Artificial Sequence
  Description of Artificial Sequence: Synthetic oligonucleotide
  Antisense strand to SEQ ID NO: 168292
uuaauccaagacuucgaug

SEQ ID NO: 168294 - RNA, 19 nt, Artificial Sequence
  Description of Artificial Sequence: Synthetic oligonucleotide
  Sense strand starting at position 498 of SEQ ID NO: 2166
gcggcuuugguggacauau

SEQ ID NO: 168295 - RNA, 19 nt, Artificial Sequence
  Description of Artificial Sequence: Synthetic oligonucleotide
  Antisense strand to SEQ ID NO: 168294
auauguccaccaaagccgc

SEQ ID NO: 168296 - RNA, 19 nt, Artificial Sequence
  Description of Artificial Sequence: Synthetic oligonucleotide
  Sense strand starting at position 500 of SEQ ID NO: 2166
ggcuuugguggacauauag

SEQ ID NO: 168297 - RNA, 19 nt, Artificial Sequence
  Description of Artificial Sequence: Synthetic oligonucleotide
  Antisense strand to SEQ ID NO: 168296
cuauauguccaccaaagcc

SEQ ID NO: 168298 - RNA, 19 nt, Artificial Sequence
  Description of Artificial Sequence: Synthetic oligonucleotide
  Sense strand starting at position 507 of SEQ ID NO: 2166
guggacauauaggaauaau

SEQ ID NO: 168299 - RNA, 19 nt, Artificial Sequence
  Description of Artificial Sequence: Synthetic oligonucleotide
  Antisense strand to SEQ ID NO: 168298
auuauuccuauauguccac

SEQ ID NO: 168300 - RNA, 19 nt, Artificial Sequence
  Description of Artificial Sequence: Synthetic oligonucleotide
  Sense strand starting at position 521 of SEQ ID NO: 2166
auaauucuucccuggauug

SEQ ID NO: 168301 - RNA, 19 nt, Artificial Sequence
  Description of Artificial Sequence: Synthetic oligonucleotide
  Antisense strand to SEQ ID NO: 168300
caauccagggaagaauuau

SEQ ID NO: 168302 - RNA, 19 nt, Artificial Sequence
  Description of Artificial Sequence: Synthetic oligonucleotide
  Sense strand starting at position 774 of SEQ ID NO: 2166
ugcuuuguucucccgccaa

SEQ ID NO: 168303 - RNA, 19 nt, Artificial Sequence
  Description of Artificial Sequence: Synthetic oligonucleotide
  Antisense strand to SEQ ID NO: 168302
uuggcgggagaacaaagca

SEQ ID NO: 168304 - RNA, 19 nt, Artificial Sequence
  Description of Artificial Sequence: Synthetic oligonucleotide
  Sense strand starting at position 817 of SEQ ID NO: 2166
gcgcucugggaugauuauu

SEQ ID NO: 168305 - RNA, 19 nt, Artificial Sequence
  Description of Artificial Sequence: Synthetic oligonucleotide
  Antisense strand to SEQ ID NO: 168304
aauaaucaucccagagcgc

SEQ ID NO: 168306 - RNA, 19 nt, Artificial Sequence
  Description of Artificial Sequence: Synthetic oligonucleotide
  Sense strand starting at position 854 of SEQ ID NO: 2166
aaugaugacgauugugaug

SEQ ID NO: 168307 - RNA, 19 nt, Artificial Sequence
  Description of Artificial Sequence: Synthetic oligonucleotide
  Antisense strand to SEQ ID NO: 168306
caucacaaucgucaucauu

SEQ ID NO: 168308 - RNA, 19 nt, Artificial Sequence
  Description of Artificial Sequence: Synthetic oligonucleotide
  Sense strand starting at position 860 of SEQ ID NO: 2166
gacgauugugauggugaug

SEQ ID NO: 168309 - RNA, 19 nt, Artificial Sequence
  Description of Artificial Sequence: Synthetic oligonucleotide
  Antisense strand to SEQ ID NO: 168308
caucaccaucacaaucguc

SEQ ID NO: 168310 - RNA, 19 nt, Artificial Sequence
  Description of Artificial Sequence: Synthetic oligonucleotide
  Sense strand starting at position 871 of SEQ ID NO: 2166
uggugauggcauuagcaau

SEQ ID NO: 168311 - RNA, 19 nt, Artificial Sequence
  Description of Artificial Sequence: Synthetic oligonucleotide
  Antisense strand to SEQ ID NO: 168310
auugcuaaugccaucacca

SEQ ID NO: 168312 - RNA, 19 nt, Artificial Sequence
  Description of Artificial Sequence: Synthetic oligonucleotide
  Sense strand starting at position 980 of SEQ ID NO: 2166
ggaugcgacggguaucaga

SEQ ID NO: 168313 - RNA, 19 nt, Artificial Sequence
  Description of Artificial Sequence: Synthetic oligonucleotide
  Antisense strand to SEQ ID NO: 168312
ucugauacccgucgcaucc

SEQ ID NO: 168314 - RNA, 19 nt, Artificial Sequence
  Description of Artificial Sequence: Synthetic oligonucleotide
  Sense strand starting at position 1049 of SEQ ID NO: 2166
ggaggugaucccgaauguc

SEQ ID NO: 168315 - RNA, 19 nt, Artificial Sequence
  Description of Artificial Sequence: Synthetic oligonucleotide
  Antisense strand to SEQ ID NO: 168314
gacauucgggaucaccucc

SEQ ID NO: 168316 - RNA, 19 nt, Artificial Sequence
  Description of Artificial Sequence: Synthetic oligonucleotide
  Sense strand starting at position 1368 of SEQ ID NO: 2166
ccgaauacaucauaauuug

SEQ ID NO: 168317 - RNA, 19 nt, Artificial Sequence
  Description of Artificial Sequence: Synthetic oligonucleotide
  Antisense strand to SEQ ID NO: 168316
caaauuaugauguauucgg

SEQ ID NO: 168318 - RNA, 19 nt, Artificial Sequence
  Description of Artificial Sequence: Synthetic oligonucleotide
  Sense strand starting at position 1769 of SEQ ID NO: 2166
gaaucagaucccugcugag

SEQ ID NO: 168319 - RNA, 19 nt, Artificial Sequence
  Description of Artificial Sequence: Synthetic oligonucleotide
  Antisense strand to SEQ ID NO: 168318
cucagcagggaucugauuc

SEQ ID NO: 168320 - RNA, 19 nt, Artificial Sequence
  Description of Artificial Sequence: Synthetic oligonucleotide
  Sense strand starting at position 1935 of SEQ ID NO: 2166
cgcccacaguucucaugaa

SEQ ID NO: 168321 - RNA, 19 nt, Artificial Sequence
  Description of Artificial Sequence: Synthetic oligonucleotide
  Antisense strand to SEQ ID NO: 168320
uucaugagaacugugggcg

SEQ ID NO: 168322 - RNA, 19 nt, Artificial Sequence
  Description of Artificial Sequence: Synthetic oligonucleotide
  Sense strand starting at position 1939 of SEQ ID NO: 2166
cacaguucucaugaacgca

SEQ ID NO: 168323 - RNA, 19 nt, Artificial Sequence
  Description of Artificial Sequence: Synthetic oligonucleotide
  Antisense strand to SEQ ID NO: 168322
ugcguucaugagaacugug

SEQ ID NO: 168324 - RNA, 19 nt, Artificial Sequence
  Description of Artificial Sequence: Synthetic oligonucleotide
  Sense strand starting at position 2018 of SEQ ID NO: 2166
ucgcgcauuucuguauauu

SEQ ID NO: 168325 - RNA, 19 nt, Artificial Sequence
  Description of Artificial Sequence: Synthetic oligonucleotide
  Antisense strand to SEQ ID NO: 168324
aauauacagaaaugcgcga

SEQ ID NO: 168326 - RNA, 19 nt, Artificial Sequence
  Description of Artificial Sequence: Synthetic oligonucleotide
  Sense strand starting at position 2019 of SEQ ID NO: 2166
cgcgcauuucuguauauug

SEQ ID NO: 168327 - RNA, 19 nt, Artificial Sequence
  Description of Artificial Sequence: Synthetic oligonucleotide
  Antisense strand to SEQ ID NO: 168326
caauauacagaaaugcgcg

SEQ ID NO: 168328 - RNA, 19 nt, Artificial Sequence
  Description of Artificial Sequence: Synthetic oligonucleotide
  Sense strand starting at position 2028 of SEQ ID NO: 2166
cuguauauugcguaaggaa

SEQ ID NO: 168329 - RNA, 19 nt, Artificial Sequence
  Description of Artificial Sequence: Synthetic oligonucleotide
  Antisense strand to SEQ ID NO: 168328
uuccuuacgcaauauacag

SEQ ID NO: 168330 - RNA, 19 nt, Artificial Sequence
  Description of Artificial Sequence: Synthetic oligonucleotide
  Sense strand starting at position 2205 of SEQ ID NO: 2166
ggaggaaauugaugaagaa

SEQ ID NO: 168331 - RNA, 19 nt, Artificial Sequence
  Description of Artificial Sequence: Synthetic oligonucleotide
  Antisense strand to SEQ ID NO: 168330
uucuucaucaauuuccucc

SEQ ID NO: 168332 - RNA, 19 nt, Artificial Sequence
  Description of Artificial Sequence: Synthetic oligonucleotide
  Sense strand starting at position 2520 of SEQ ID NO: 2166
cggccauuaugggccaaau

SEQ ID NO: 168333 - RNA, 19 nt, Artificial Sequence
  Description of Artificial Sequence: Synthetic oligonucleotide
  Antisense strand to SEQ ID NO: 168332
auuuggcccauaauggccg

SEQ ID NO: 168334 - RNA, 19 nt, Artificial Sequence
  Description of Artificial Sequence: Synthetic oligonucleotide
  Sense strand starting at position 2522 of SEQ ID NO: 2166
gccauuaugggccaaauga

SEQ ID NO: 168335 - RNA, 19 nt, Artificial Sequence
  Description of Artificial Sequence: Synthetic oligonucleotide
  Antisense strand to SEQ ID NO: 168334
ucauuuggcccauaauggc

SEQ ID NO: 168336 - RNA, 19 nt, Artificial Sequence
  Description of Artificial Sequence: Synthetic oligonucleotide
  Sense strand starting at position 3076 of SEQ ID NO: 2166
guuuaaucuagcgacugua

SEQ ID NO: 168337 - RNA, 19 nt, Artificial Sequence
  Description of Artificial Sequence: Synthetic oligonucleotide
  Antisense strand to SEQ ID NO: 168336
uacagucgcuagauuaaac

SEQ ID NO: 168338 - RNA, 19 nt, Artificial Sequence
  Description of Artificial Sequence: Synthetic oligonucleotide
  Sense strand starting at position 3079 of SEQ ID NO: 2166
uaaucuagcgacuguaaca

SEQ ID NO: 168339 - RNA, 19 nt, Artificial Sequence
  Description of Artificial Sequence: Synthetic oligonucleotide
  Antisense strand to SEQ ID NO: 168338
uguuacagucgcuagauua

SEQ ID NO: 168340 - RNA, 19 nt, Artificial Sequence
  Description of Artificial Sequence: Synthetic oligonucleotide
  Sense strand starting at position 3233 of SEQ ID NO: 2166
gguggagucugccuuggaa

SEQ ID NO: 168341 - RNA, 19 nt, Artificial Sequence
  Description of Artificial Sequence: Synthetic oligonucleotide
  Antisense strand to SEQ ID NO: 168340
uuccaaggcagacuccacc

SEQ ID NO: 168342 - RNA, 19 nt, Artificial Sequence
  Description of Artificial Sequence: Synthetic oligonucleotide
  Sense strand starting at position 3236 of SEQ ID NO: 2166
ggagucugccuuggaagga

SEQ ID NO: 168343 - RNA, 19 nt, Artificial Sequence
  Description of Artificial Sequence: Synthetic oligonucleotide
  Antisense strand to SEQ ID NO: 168342
uccuuccaaggcagacucc

SEQ ID NO: 168344 - RNA, 19 nt, Artificial Sequence
  Description of Artificial Sequence: Synthetic oligonucleotide
  Sense strand starting at position 3330 of SEQ ID NO: 2166
gggcucaacucauugcaga

SEQ ID NO: 168345 - RNA, 19 nt, Artificial Sequence
  Description of Artificial Sequence: Synthetic oligonucleotide
  Antisense strand to SEQ ID NO: 168344
ucugcaaugaguugagccc

SEQ ID NO: 168346 - RNA, 19 nt, Artificial Sequence
  Description of Artificial Sequence: Synthetic oligonucleotide
  Sense strand starting at position 3472 of SEQ ID NO: 2166
uuuagucacugaucucuga

SEQ ID NO: 168347 - RNA, 19 nt, Artificial Sequence
  Description of Artificial Sequence: Synthetic oligonucleotide
  Antisense strand to SEQ ID NO: 168346
ucagagaucagugacuaaa

SEQ ID NO: 168348 - RNA, 19 nt, Artificial Sequence
  Description of Artificial Sequence: Synthetic oligonucleotide
  Sense strand starting at position 3476 of SEQ ID NO: 2166
gucacugaucucugaaccu

SEQ ID NO: 168349 - RNA, 19 nt, Artificial Sequence
  Description of Artificial Sequence: Synthetic oligonucleotide
  Antisense strand to SEQ ID NO: 168348
agguucagagaucagugac

SEQ ID NO: 168350 - RNA, 19 nt, Artificial Sequence
  Description of Artificial Sequence: Synthetic oligonucleotide
  Sense strand starting at position 3518 of SEQ ID NO: 2166
ggagauaaugucgacguca

SEQ ID NO: 168351 - RNA, 19 nt, Artificial Sequence
  Description of Artificial Sequence: Synthetic oligonucleotide
  Antisense strand to SEQ ID NO: 168350
ugacgucgacauuaucucc

SEQ ID NO: 168352 - RNA, 19 nt, Artificial Sequence
  Description of Artificial Sequence: Synthetic oligonucleotide
  Sense strand starting at position 3520 of SEQ ID NO: 2166
agauaaugucgacgucaca

SEQ ID NO: 168353 - RNA, 19 nt, Artificial Sequence
  Description of Artificial Sequence: Synthetic oligonucleotide
  Antisense strand to SEQ ID NO: 168352
ugugacgucgacauuaucu

SEQ ID NO: 168354 - RNA, 19 nt, Artificial Sequence
  Description of Artificial Sequence: Synthetic oligonucleotide
  Sense strand starting at position 3531 of SEQ ID NO: 2166
acgucacaaaguuaugaga

SEQ ID NO: 168355 - RNA, 19 nt, Artificial Sequence
  Description of Artificial Sequence: Synthetic oligonucleotide
  Antisense strand to SEQ ID NO: 168354
ucucauaacuuugugacgu

SEQ ID NO: 168356 - RNA, 19 nt, Artificial Sequence
  Description of Artificial Sequence: Synthetic oligonucleotide
  Sense strand starting at position 3573 of SEQ ID NO: 2166
ggugguggugaggauaaua

SEQ ID NO: 168357 - RNA, 19 nt, Artificial Sequence
  Description of Artificial Sequence: Synthetic oligonucleotide
  Antisense strand to SEQ ID NO: 168356
uauuauccucaccaccacc

SEQ ID NO: 168358 - RNA, 19 nt, Artificial Sequence
  Description of Artificial Sequence: Synthetic oligonucleotide
  Sense strand starting at position 3647 of SEQ ID NO: 2166
gggaguucugguuaucauc

SEQ ID NO: 168359 - RNA, 19 nt, Artificial Sequence
  Description of Artificial Sequence: Synthetic oligonucleotide
  Antisense strand to SEQ ID NO: 168358
gaugauaaccagaacuccc

SEQ ID NO: 168360 - RNA, 19 nt, Artificial Sequence
  Description of Artificial Sequence: Synthetic oligonucleotide
  Sense strand starting at position 3649 of SEQ ID NO: 2166
gaguucugguuaucaucau

SEQ ID NO: 168361 - RNA, 19 nt, Artificial Sequence
  Description of Artificial Sequence: Synthetic oligonucleotide
  Antisense strand to SEQ ID NO: 168360
augaugauaaccagaacuc

SEQ ID NO: 168362 - RNA, 19 nt, Artificial Sequence
  Description of Artificial Sequence: Synthetic oligonucleotide
  Sense strand starting at position 3791 of SEQ ID NO: 2166
gcugauuuguccuucuagu

SEQ ID NO: 168363 - RNA, 19 nt, Artificial Sequence
  Description of Artificial Sequence: Synthetic oligonucleotide
  Antisense strand to SEQ ID NO: 168362
acuagaaggacaaaucagc

SEQ ID NO: 168364 - RNA, 19 nt, Artificial Sequence
  Description of Artificial Sequence: Synthetic oligonucleotide
  Sense strand starting at position 185 of SEQ ID NO: 2169
cagggaugaucacaccuau

SEQ ID NO: 168365 - RNA, 19 nt, Artificial Sequence
  Description of Artificial Sequence: Synthetic oligonucleotide
  Antisense strand to SEQ ID NO: 168364
auaggugugaucaucccug

SEQ ID NO: 168366 - RNA, 19 nt, Artificial Sequence
  Description of Artificial Sequence: Synthetic oligonucleotide
  Sense strand starting at position 294 of SEQ ID NO: 2169
uguaauaaauggucagcua

SEQ ID NO: 168367 - RNA, 19 nt, Artificial Sequence
  Description of Artificial Sequence: Synthetic oligonucleotide
  Antisense strand to SEQ ID NO: 168366
uagcugaccauuuauuaca

SEQ ID NO: 168368 - RNA, 19 nt, Artificial Sequence
  Description of Artificial Sequence: Synthetic oligonucleotide
  Sense strand starting at position 324 of SEQ ID NO: 2169
guagaaauauucuauugag

SEQ ID NO: 168369 - RNA, 19 nt, Artificial Sequence
  Description of Artificial Sequence: Synthetic oligonucleotide
  Antisense strand to SEQ ID NO: 168368
cucaauagaauauuucuac

SEQ ID NO: 168370 - RNA, 19 nt, Artificial Sequence
  Description of Artificial Sequence: Synthetic oligonucleotide
  Sense strand starting at position 353 of SEQ ID NO: 2169
gucaaucuacuuuguacuu

SEQ ID NO: 168371 - RNA, 19 nt, Artificial Sequence
  Description of Artificial Sequence: Synthetic oligonucleotide
  Antisense strand to SEQ ID NO: 168370
aaguacaaaguagauugac

SEQ ID NO: 168372 - RNA, 19 nt, Artificial Sequence
  Description of Artificial Sequence: Synthetic oligonucleotide
  Sense strand starting at position 456 of SEQ ID NO: 2169
auuacucuugcacauagua

SEQ ID NO: 168373 - RNA, 19 nt, Artificial Sequence
  Description of Artificial Sequence: Synthetic oligonucleotide
  Antisense strand to SEQ ID NO: 168372
uacuaugugcaagaguaau

SEQ ID NO: 168374 - RNA, 19 nt, Artificial Sequence
  Description of Artificial Sequence: Synthetic oligonucleotide
  Sense strand starting at position 582 of SEQ ID NO: 2169
aguaaauccuguuccuaau

SEQ ID NO: 168375 - RNA, 19 nt, Artificial Sequence
  Description of Artificial Sequence: Synthetic oligonucleotide
  Antisense strand to SEQ ID NO: 168374
auuaggaacaggauuuacu

SEQ ID NO: 168376 - RNA, 19 nt, Artificial Sequence
  Description of Artificial Sequence: Synthetic oligonucleotide
  Sense strand starting at position 633 of SEQ ID NO: 2169
cucuaugacgcuuaauucu

SEQ ID NO: 168377 - RNA, 19 nt, Artificial Sequence
  Description of Artificial Sequence: Synthetic oligonucleotide
  Antisense strand to SEQ ID NO: 168376
agaauuaagcgucauagag

SEQ ID NO: 168378 - RNA, 19 nt, Artificial Sequence
  Description of Artificial Sequence: Synthetic oligonucleotide
  Sense strand starting at position 736 of SEQ ID NO: 2169
cguuucuauuggguugaau

SEQ ID NO: 168379 - RNA, 19 nt, Artificial Sequence
  Description of Artificial Sequence: Synthetic oligonucleotide
  Antisense strand to SEQ ID NO: 168378
auucaacccaauagaaacg

SEQ ID NO: 168380 - RNA, 19 nt, Artificial Sequence
  Description of Artificial Sequence: Synthetic oligonucleotide
  Sense strand starting at position 738 of SEQ ID NO: 2169
uuucuauuggguugaaucu

SEQ ID NO: 168381 - RNA, 19 nt, Artificial Sequence
  Description of Artificial Sequence: Synthetic oligonucleotide
  Antisense strand to SEQ ID NO: 168380
agauucaacccaauagaaa

SEQ ID NO: 168382 - RNA, 19 nt, Artificial Sequence
  Description of Artificial Sequence: Synthetic oligonucleotide
  Sense strand starting at position 739 of SEQ ID NO: 2169
uucuauuggguugaaucua

SEQ ID NO: 168383 - RNA, 19 nt, Artificial Sequence
  Description of Artificial Sequence: Synthetic oligonucleotide
  Antisense strand to SEQ ID NO: 168382
uagauucaacccaauagaa

SEQ ID NO: 168384 - RNA, 19 nt, Artificial Sequence
  Description of Artificial Sequence: Synthetic oligonucleotide
  Sense strand starting at position 868 of SEQ ID NO: 2169
accgcagugauuugugacu

SEQ ID NO: 168385 - RNA, 19 nt, Artificial Sequence
  Description of Artificial Sequence: Synthetic oligonucleotide
  Antisense strand to SEQ ID NO: 168384
agucacaaaucacugcggu

SEQ ID NO: 168386 - RNA, 19 nt, Artificial Sequence
  Description of Artificial Sequence: Synthetic oligonucleotide
  Sense strand starting at position 2228 of SEQ ID NO: 2169
aaacgaggccuucguuaaa

SEQ ID NO: 168387 - RNA, 19 nt, Artificial Sequence
  Description of Artificial Sequence: Synthetic oligonucleotide
  Antisense strand to SEQ ID NO: 168386
uuuaacgaaggccucguuu

SEQ ID NO: 168388 - RNA, 19 nt, Artificial Sequence
  Description of Artificial Sequence: Synthetic oligonucleotide
  Sense strand starting at position 2356 of SEQ ID NO: 2169
acagcagaaucacuuuaga

SEQ ID NO: 168389 - RNA, 19 nt, Artificial Sequence
  Description of Artificial Sequence: Synthetic oligonucleotide
  Antisense strand to SEQ ID NO: 168388
ucuaaagugauucugcugu

SEQ ID NO: 168390 - RNA, 19 nt, Artificial Sequence
  Description of Artificial Sequence: Synthetic oligonucleotide
  Sense strand starting at position 2430 of SEQ ID NO: 2169
gucugaaauugguucugga

SEQ ID NO: 168391 - RNA, 19 nt, Artificial Sequence
  Description of Artificial Sequence: Synthetic oligonucleotide
  Antisense strand to SEQ ID NO: 168390
uccagaaccaauuucagac

SEQ ID NO: 168392 - RNA, 19 nt, Artificial Sequence
  Description of Artificial Sequence: Synthetic oligonucleotide
  Sense strand starting at position 2443 of SEQ ID NO: 2169
ucuggacaucugcauuaaa

SEQ ID NO: 168393 - RNA, 19 nt, Artificial Sequence
  Description of Artificial Sequence: Synthetic oligonucleotide
  Antisense strand to SEQ ID NO: 168392
uuuaaugcagauguccaga

SEQ ID NO: 168394 - RNA, 19 nt, Artificial Sequence
  Description of Artificial Sequence: Synthetic oligonucleotide
  Sense strand starting at position 2480 of SEQ ID NO: 2169
aagaaugauuuagacguaa

SEQ ID NO: 168395 - RNA, 19 nt, Artificial Sequence
  Description of Artificial Sequence: Synthetic oligonucleotide
  Antisense strand to SEQ ID NO: 168394
uuacgucuaaaucauucuu

SEQ ID NO: 168396 - RNA, 19 nt, Artificial Sequence
  Description of Artificial Sequence: Synthetic oligonucleotide
  Sense strand starting at position 2529 of SEQ ID NO: 2169
gguguccagguccaagaau

SEQ ID NO: 168397 - RNA, 19 nt, Artificial Sequence
  Description of Artificial Sequence: Synthetic oligonucleotide
  Antisense strand to SEQ ID NO: 168396
auucuuggaccuggacacc

SEQ ID NO: 168398 - RNA, 19 nt, Artificial Sequence
  Description of Artificial Sequence: Synthetic oligonucleotide
  Sense strand starting at position 2681 of SEQ ID NO: 2169
ggguuuaaauaccuauaga

SEQ ID NO: 168399 - RNA, 19 nt, Artificial Sequence
  Description of Artificial Sequence: Synthetic oligonucleotide
  Antisense strand to SEQ ID NO: 168398
ucuauagguauuuaaaccc

SEQ ID NO: 168400 - RNA, 19 nt, Artificial Sequence
  Description of Artificial Sequence: Synthetic oligonucleotide
  Sense strand starting at position 2763 of SEQ ID NO: 2169
guuauuuacuugguguacu

SEQ ID NO: 168401 - RNA, 19 nt, Artificial Sequence
  Description of Artificial Sequence: Synthetic oligonucleotide
  Antisense strand to SEQ ID NO: 168400
aguacaccaaguaaauaac

SEQ ID NO: 168402 - RNA, 19 nt, Artificial Sequence
  Description of Artificial Sequence: Synthetic oligonucleotide
  Sense strand starting at position 2816 of SEQ ID NO: 2169
gcugaaguguuucuaucug

SEQ ID NO: 168403 - RNA, 19 nt, Artificial Sequence
  Description of Artificial Sequence: Synthetic oligonucleotide
  Antisense strand to SEQ ID NO: 168402
cagauagaaacacuucagc

SEQ ID NO: 168404 - RNA, 19 nt, Artificial Sequence
  Description of Artificial Sequence: Synthetic oligonucleotide
  Sense strand starting at position 2824 of SEQ ID NO: 2169
guuucuaucugauuugguu

SEQ ID NO: 168405 - RNA, 19 nt, Artificial Sequence
  Description of Artificial Sequence: Synthetic oligonucleotide
  Antisense strand to SEQ ID NO: 168404
aaccaaaucagauagaaac

SEQ ID NO: 168406 - RNA, 19 nt, Artificial Sequence
  Description of Artificial Sequence: Synthetic oligonucleotide
  Sense strand starting at position 3049 of SEQ ID NO: 2169
uucuguauuucugacagca

SEQ ID NO: 168407 - RNA, 19 nt, Artificial Sequence
  Description of Artificial Sequence: Synthetic oligonucleotide
  Antisense strand to SEQ ID NO: 168406
ugcugucagaaauacagaa

SEQ ID NO: 168408 - RNA, 19 nt, Artificial Sequence
  Description of Artificial Sequence: Synthetic oligonucleotide
  Sense strand starting at position 3051 of SEQ ID NO: 2169
cuguauuucugacagcauc

SEQ ID NO: 168409 - RNA, 19 nt, Artificial Sequence
  Description of Artificial Sequence: Synthetic oligonucleotide
  Antisense strand to SEQ ID NO: 168408
gaugcugucagaaauacag

SEQ ID NO: 168410 - RNA, 19 nt, Artificial Sequence
  Description of Artificial Sequence: Synthetic oligonucleotide
  Sense strand starting at position 3105 of SEQ ID NO: 2169
gcaugcaugguguggauuu

SEQ ID NO: 168411 - RNA, 19 nt, Artificial Sequence
  Description of Artificial Sequence: Synthetic oligonucleotide
  Antisense strand to SEQ ID NO: 168410
aaauccacaccaugcaugc

SEQ ID NO: 168412 - RNA, 19 nt, Artificial Sequence
  Description of Artificial Sequence: Synthetic oligonucleotide
  Sense strand starting at position 3121 of SEQ ID NO: 2169
uuugguuccuggcucaauu

SEQ ID NO: 168413 - RNA, 19 nt, Artificial Sequence
  Description of Artificial Sequence: Synthetic oligonucleotide
  Antisense strand to SEQ ID NO: 168412
aauugagccaggaaccaaa

SEQ ID NO: 168414 - RNA, 19 nt, Artificial Sequence
  Description of Artificial Sequence: Synthetic oligonucleotide
  Sense strand starting at position 3309 of SEQ ID NO: 2169
guuaucugacuuuaagguu

SEQ ID NO: 168415 - RNA, 19 nt, Artificial Sequence
  Description of Artificial Sequence: Synthetic oligonucleotide
  Antisense strand to SEQ ID NO: 168414
aaccuuaaagucagauaac

SEQ ID NO: 168416 - RNA, 19 nt, Artificial Sequence
  Description of Artificial Sequence: Synthetic oligonucleotide
  Sense strand starting at position 3317 of SEQ ID NO: 2169
acuuuaagguuaucugaca

SEQ ID NO: 168417 - RNA, 19 nt, Artificial Sequence
  Description of Artificial Sequence: Synthetic oligonucleotide
  Antisense strand to SEQ ID NO: 168416
ugucagauaaccuuaaagu

SEQ ID NO: 168418 - RNA, 19 nt, Artificial Sequence
  Description of Artificial Sequence: Synthetic oligonucleotide
  Sense strand starting at position 3318 of SEQ ID NO: 2169
cuuuaagguuaucugacau

SEQ ID NO: 168419 - RNA, 19 nt, Artificial Sequence
  Description of Artificial Sequence: Synthetic oligonucleotide
  Antisense strand to SEQ ID NO: 168418
augucagauaaccuuaaag

SEQ ID NO: 168420 - RNA, 19 nt, Artificial Sequence
  Description of Artificial Sequence: Synthetic oligonucleotide
  Sense strand starting at position 3468 of SEQ ID NO: 2169
acuauuguuucugucaaca

SEQ ID NO: 168421 - RNA, 19 nt, Artificial Sequence
  Description of Artificial Sequence: Synthetic oligonucleotide
  Antisense strand to SEQ ID NO: 168420
uguugacagaaacaauagu

SEQ ID NO: 168422 - RNA, 19 nt, Artificial Sequence
  Description of Artificial Sequence: Synthetic oligonucleotide
  Sense strand starting at position 3473 of SEQ ID NO: 2169
uguuucugucaacauauau

SEQ ID NO: 168423 - RNA, 19 nt, Artificial Sequence
  Description of Artificial Sequence: Synthetic oligonucleotide
  Antisense strand to SEQ ID NO: 168422
auauauguugacagaaaca

SEQ ID NO: 168424 - RNA, 19 nt, Artificial Sequence
  Description of Artificial Sequence: Synthetic oligonucleotide
  Sense strand starting at position 3508 of SEQ ID NO: 2169
gguaaaugucuugagcacu

SEQ ID NO: 168425 - RNA, 19 nt, Artificial Sequence
  Description of Artificial Sequence: Synthetic oligonucleotide
  Antisense strand to SEQ ID NO: 168424
agugcucaagacauuuacc

SEQ ID NO: 168426 - RNA, 19 nt, Artificial Sequence
  Description of Artificial Sequence: Synthetic oligonucleotide
  Sense strand starting at position 3628 of SEQ ID NO: 2169
uacugaugagaauggcuaa

SEQ ID NO: 168427 - RNA, 19 nt, Artificial Sequence
  Description of Artificial Sequence: Synthetic oligonucleotide
  Antisense strand to SEQ ID NO: 168426
uuagccauucucaucagua

SEQ ID NO: 168428 - RNA, 19 nt, Artificial Sequence
  Description of Artificial Sequence: Synthetic oligonucleotide
  Sense strand starting at position 3631 of SEQ ID NO: 2169
ugaugagaauggcuaacau

SEQ ID NO: 168429 - RNA, 19 nt, Artificial Sequence
  Description of Artificial Sequence: Synthetic oligonucleotide
  Antisense strand to SEQ ID NO: 168428
auguuagccauucucauca

SEQ ID NO: 168430 - RNA, 19 nt, Artificial Sequence
  Description of Artificial Sequence: Synthetic oligonucleotide
  Sense strand starting at position 3732 of SEQ ID NO: 2169
acgguacagucacuuuaga

SEQ ID NO: 168431 - RNA, 19 nt, Artificial Sequence
  Description of Artificial Sequence: Synthetic oligonucleotide
  Antisense strand to SEQ ID NO: 168430
ucuaaagugacuguaccgu

SEQ ID NO: 168432 - RNA, 19 nt, Artificial Sequence
  Description of Artificial Sequence: Synthetic oligonucleotide
  Sense strand starting at position 3747 of SEQ ID NO: 2169
uagaaacuguuucucguaa

SEQ ID NO: 168433 - RNA, 19 nt, Artificial Sequence
  Description of Artificial Sequence: Synthetic oligonucleotide
  Antisense strand to SEQ ID NO: 168432
uuacgagaaacaguuucua

SEQ ID NO: 168434 - RNA, 19 nt, Artificial Sequence
  Description of Artificial Sequence: Synthetic oligonucleotide
  Sense strand starting at position 3748 of SEQ ID NO: 2169
agaaacuguuucucguaaa

SEQ ID NO: 168435 - RNA, 19 nt, Artificial Sequence
  Description of Artificial Sequence: Synthetic oligonucleotide
  Antisense strand to SEQ ID NO: 168434
uuuacgagaaacaguuucu

SEQ ID NO: 168436 - RNA, 19 nt, Artificial Sequence
  Description of Artificial Sequence: Synthetic oligonucleotide
  Sense strand starting at position 3870 of SEQ ID NO: 2169
uugacaacauuauucguua

SEQ ID NO: 168437 - RNA, 19 nt, Artificial Sequence
  Description of Artificial Sequence: Synthetic oligonucleotide
  Antisense strand to SEQ ID NO: 168436
uaacgaauaauguugucaa

SEQ ID NO: 168438 - RNA, 19 nt, Artificial Sequence
  Description of Artificial Sequence: Synthetic oligonucleotide
  Sense strand starting at position 3871 of SEQ ID NO: 2169
ugacaacauuauucguuau

SEQ ID NO: 168439 - RNA, 19 nt, Artificial Sequence
  Description of Artificial Sequence: Synthetic oligonucleotide
  Antisense strand to SEQ ID NO: 168438
auaacgaauaauguuguca

SEQ ID NO: 168440 - RNA, 19 nt, Artificial Sequence
  Description of Artificial Sequence: Synthetic oligonucleotide
  Sense strand starting at position 3873 of SEQ ID NO: 2169
acaacauuauucguuauag

SEQ ID NO: 168441 - RNA, 19 nt, Artificial Sequence
  Description of Artificial Sequence: Synthetic oligonucleotide
  Antisense strand to SEQ ID NO: 168440
cuauaacgaauaauguugu

SEQ ID NO: 168442 - RNA, 19 nt, Artificial Sequence
  Description of Artificial Sequence: Synthetic oligonucleotide
  Sense strand starting at position 3913 of SEQ ID NO: 2169
guagguguuagguaacaac

SEQ ID NO: 168443 - RNA, 19 nt, Artificial Sequence
  Description of Artificial Sequence: Synthetic oligonucleotide
  Antisense strand to SEQ ID NO: 168442
guuguuaccuaacaccuac

SEQ ID NO: 168444 - RNA, 19 nt, Artificial Sequence
  Description of Artificial Sequence: Synthetic oligonucleotide
  Sense strand starting at position 3958 of SEQ ID NO: 2170
gucaguaugugauuucagu

SEQ ID NO: 168445 - RNA, 19 nt, Artificial Sequence
  Description of Artificial Sequence: Synthetic oligonucleotide
  Antisense strand to SEQ ID NO: 168444
acugaaaucacauacugac

SEQ ID NO: 168446 - RNA, 19 nt, Artificial Sequence
  Description of Artificial Sequence: Synthetic oligonucleotide
  Sense strand starting at position 3951 of SEQ ID NO: 2170
ugcugaagucaguauguga

SEQ ID NO: 168447 - RNA, 19 nt, Artificial Sequence
  Description of Artificial Sequence: Synthetic oligonucleotide
  Antisense strand to SEQ ID NO: 168446
ucacauacugacuucagca

SEQ ID NO: 168448 - RNA, 19 nt, Artificial Sequence
  Description of Artificial Sequence: Synthetic oligonucleotide
  Sense strand starting at position 3062 of SEQ ID NO: 2170
ggauuauaggcgugcaaag

SEQ ID NO: 168449 - RNA, 19 nt, Artificial Sequence
  Description of Artificial Sequence: Synthetic oligonucleotide
  Antisense strand to SEQ ID NO: 168448
cuuugcacgccuauaaucc

SEQ ID NO: 168450 - RNA, 19 nt, Artificial Sequence
  Description of Artificial Sequence: Synthetic oligonucleotide
  Sense strand starting at position 3051 of SEQ ID NO: 2170
agggauagcugggauuaua

SEQ ID NO: 168451 - RNA, 19 nt, Artificial Sequence
  Description of Artificial Sequence: Synthetic oligonucleotide
  Antisense strand to SEQ ID NO: 168450
uauaaucccagcuaucccu

SEQ ID NO: 168452 - RNA, 19 nt, Artificial Sequence
  Description of Artificial Sequence: Synthetic oligonucleotide
  Sense strand starting at position 3050 of SEQ ID NO: 2170
aagggauagcugggauuau

SEQ ID NO: 168453 - RNA, 19 nt, Artificial Sequence
  Description of Artificial Sequence: Synthetic oligonucleotide
  Antisense strand to SEQ ID NO: 168452
auaaucccagcuaucccuu

SEQ ID NO: 168454 - RNA, 19 nt, Artificial Sequence
  Description of Artificial Sequence: Synthetic oligonucleotide
  Sense strand starting at position 2844 of SEQ ID NO: 2170
uuugaaucucgaggcacaa

SEQ ID NO: 168455 - RNA, 19 nt, Artificial Sequence
  Description of Artificial Sequence: Synthetic oligonucleotide
  Antisense strand to SEQ ID NO: 168454
uugugccucgagauucaaa

SEQ ID NO: 168456 - RNA, 19 nt, Artificial Sequence
  Description of Artificial Sequence: Synthetic oligonucleotide
  Sense strand starting at position 2841 of SEQ ID NO: 2170
ggauuugaaucucgaggca

SEQ ID NO: 168457 - RNA, 19 nt, Artificial Sequence
  Description of Artificial Sequence: Synthetic oligonucleotide
  Antisense strand to SEQ ID NO: 168456
ugccucgagauucaaaucc

SEQ ID NO: 168458 - RNA, 19 nt, Artificial Sequence
  Description of Artificial Sequence: Synthetic oligonucleotide
  Sense strand starting at position 2622 of SEQ ID NO: 2170
cuuaaagugacgcaaggau

SEQ ID NO: 168459 - RNA, 19 nt, Artificial Sequence
  Description of Artificial Sequence: Synthetic oligonucleotide
  Antisense strand to SEQ ID NO: 168458
auccuugcgucacuuuaag

SEQ ID NO: 168460 - RNA, 19 nt, Artificial Sequence
  Description of Artificial Sequence: Synthetic oligonucleotide
  Sense strand starting at position 2612 of SEQ ID NO: 2170
aagugucuugcuuaaagug

SEQ ID NO: 168461 - RNA, 19 nt, Artificial Sequence
  Description of Artificial Sequence: Synthetic oligonucleotide
  Antisense strand to SEQ ID NO: 168460
cacuuuaagcaagacacuu

SEQ ID NO: 168462 - RNA, 19 nt, Artificial Sequence
  Description of Artificial Sequence: Synthetic oligonucleotide
  Sense strand starting at position 2610 of SEQ ID NO: 2170
ucaagugucuugcuuaaag

SEQ ID NO: 168463 - RNA, 19 nt, Artificial Sequence
  Description of Artificial Sequence: Synthetic oligonucleotide
  Antisense strand to SEQ ID NO: 168462
cuuuaagcaagacacuuga

SEQ ID NO: 168464 - RNA, 19 nt, Artificial Sequence
  Description of Artificial Sequence: Synthetic oligonucleotide
  Sense strand starting at position 2606 of SEQ ID NO: 2170
gagaucaagugucuugcuu

SEQ ID NO: 168465 - RNA, 19 nt, Artificial Sequence
  Description of Artificial Sequence: Synthetic oligonucleotide
  Antisense strand to SEQ ID NO: 168464
aagcaagacacuugaucuc

SEQ ID NO: 168466 - RNA, 19 nt, Artificial Sequence
  Description of Artificial Sequence: Synthetic oligonucleotide
  Sense strand starting at position 2574 of SEQ ID NO: 2170
ucauucugcgggugaggaa

SEQ ID NO: 168467 - RNA, 19 nt, Artificial Sequence
  Description of Artificial Sequence: Synthetic oligonucleotide
  Antisense strand to SEQ ID NO: 168466
uuccucacccgcagaauga

SEQ ID NO: 168468 - RNA, 19 nt, Artificial Sequence
  Description of Artificial Sequence: Synthetic oligonucleotide
  Sense strand starting at position 2570 of SEQ ID NO: 2170
auauucauucugcggguga

SEQ ID NO: 168469 - RNA, 19 nt, Artificial Sequence
  Description of Artificial Sequence: Synthetic oligonucleotide
  Antisense strand to SEQ ID NO: 168468
ucacccgcagaaugaauau

SEQ ID NO: 168470 - RNA, 19 nt, Artificial Sequence
  Description of Artificial Sequence: Synthetic oligonucleotide
  Sense strand starting at position 2557 of SEQ ID NO: 2170
gcaggagcuauugauauuc

SEQ ID NO: 168471 - RNA, 19 nt, Artificial Sequence
  Description of Artificial Sequence: Synthetic oligonucleotide
  Antisense strand to SEQ ID NO: 168470
gaauaucaauagcuccugc

SEQ ID NO: 168472 - RNA, 19 nt, Artificial Sequence
  Description of Artificial Sequence: Synthetic oligonucleotide
  Sense strand starting at position 2216 of SEQ ID NO: 2170
gaugguuucggccgaccaa

SEQ ID NO: 168473 - RNA, 19 nt, Artificial Sequence
  Description of Artificial Sequence: Synthetic oligonucleotide
  Antisense strand to SEQ ID NO: 168472
uuggucggccgaaaccauc

SEQ ID NO: 168474 - RNA, 19 nt, Artificial Sequence
  Description of Artificial Sequence: Synthetic oligonucleotide
  Sense strand starting at position 2108 of SEQ ID NO: 2170
cagagaagcucugaaagcu

SEQ ID NO: 168475 - RNA, 19 nt, Artificial Sequence
  Description of Artificial Sequence: Synthetic oligonucleotide
  Antisense strand to SEQ ID NO: 168474
agcuuucagagcuucucug

SEQ ID NO: 168476 - RNA, 19 nt, Artificial Sequence
  Description of Artificial Sequence: Synthetic oligonucleotide
  Sense strand starting at position 1858 of SEQ ID NO: 2170
gugagaaggcuccgcgacu

SEQ ID NO: 168477 - RNA, 19 nt, Artificial Sequence
  Description of Artificial Sequence: Synthetic oligonucleotide
  Antisense strand to SEQ ID NO: 168476
agucgcggagccuucucac

SEQ ID NO: 168478 - RNA, 19 nt, Artificial Sequence
  Description of Artificial Sequence: Synthetic oligonucleotide
  Sense strand starting at position 1847 of SEQ ID NO: 2170
cggcguccucagugagaag

SEQ ID NO: 168479 - RNA, 19 nt, Artificial Sequence
  Description of Artificial Sequence: Synthetic oligonucleotide
  Antisense strand to SEQ ID NO: 168478
cuucucacugaggacgccg

SEQ ID NO: 168480 - RNA, 19 nt, Artificial Sequence
  Description of Artificial Sequence: Synthetic oligonucleotide
  Sense strand starting at position 1374 of SEQ ID NO: 2170
cagugaaccagguguaaag

SEQ ID NO: 168481 - RNA, 19 nt, Artificial Sequence
  Description of Artificial Sequence: Synthetic oligonucleotide
  Antisense strand to SEQ ID NO: 168480
cuuuacaccugguucacug

SEQ ID NO: 168482 - RNA, 19 nt, Artificial Sequence
  Description of Artificial Sequence: Synthetic oligonucleotide
  Sense strand starting at position 1372 of SEQ ID NO: 2170
ggcagugaaccagguguaa

SEQ ID NO: 168483 - RNA, 19 nt, Artificial Sequence
  Description of Artificial Sequence: Synthetic oligonucleotide
  Antisense strand to SEQ ID NO: 168482
uuacaccugguucacugcc

SEQ ID NO: 168484 - RNA, 19 nt, Artificial Sequence
  Description of Artificial Sequence: Synthetic oligonucleotide
  Sense strand starting at position 1257 of SEQ ID NO: 2170
uuaaguaauccugaaggca

SEQ ID NO: 168485 - RNA, 19 nt, Artificial Sequence
  Description of Artificial Sequence: Synthetic oligonucleotide
  Antisense strand to SEQ ID NO: 168484
ugccuucaggauuacuuaa

SEQ ID NO: 168486 - RNA, 19 nt, Artificial Sequence
  Description of Artificial Sequence: Synthetic oligonucleotide
  Sense strand starting at position 1253 of SEQ ID NO: 2170
gucguuaaguaauccugaa

SEQ ID NO: 168487 - RNA, 19 nt, Artificial Sequence
  Description of Artificial Sequence: Synthetic oligonucleotide
  Antisense strand to SEQ ID NO: 168486
uucaggauuacuuaacgac

SEQ ID NO: 168488 - RNA, 19 nt, Artificial Sequence
  Description of Artificial Sequence: Synthetic oligonucleotide
  Sense strand starting at position 1246 of SEQ ID NO: 2170
cggguuagucguuaaguaa

SEQ ID NO: 168489 - RNA, 19 nt, Artificial Sequence
  Description of Artificial Sequence: Synthetic oligonucleotide
  Antisense strand to SEQ ID NO: 168488
uuacuuaacgacuaacccg

SEQ ID NO: 168490 - RNA, 19 nt, Artificial Sequence
  Description of Artificial Sequence: Synthetic oligonucleotide
  Sense strand starting at position 1245 of SEQ ID NO: 2170
ucggguuagucguuaagua

SEQ ID NO: 168491 - RNA, 19 nt, Artificial Sequence
  Description of Artificial Sequence: Synthetic oligonucleotide
  Antisense strand to SEQ ID NO: 168490
uacuuaacgacuaacccga

SEQ ID NO: 168492 - RNA, 19 nt, Artificial Sequence
  Description of Artificial Sequence: Synthetic oligonucleotide
  Sense strand starting at position 1180 of SEQ ID NO: 2170
cguggcuugcugguuacaa

SEQ ID NO: 168493 - RNA, 19 nt, Artificial Sequence
  Description of Artificial Sequence: Synthetic oligonucleotide
  Antisense strand to SEQ ID NO: 168492
uuguaaccagcaagccacg

SEQ ID NO: 168494 - RNA, 19 nt, Artificial Sequence
  Description of Artificial Sequence: Synthetic oligonucleotide
  Sense strand starting at position 1142 of SEQ ID NO: 2170
ugaugcgucagguacugaa

SEQ ID NO: 168495 - RNA, 19 nt, Artificial Sequence
  Description of Artificial Sequence: Synthetic oligonucleotide
  Antisense strand to SEQ ID NO: 168494
uucaguaccugacgcauca

SEQ ID NO: 168496 - RNA, 19 nt, Artificial Sequence
  Description of Artificial Sequence: Synthetic oligonucleotide
  Sense strand starting at position 1136 of SEQ ID NO: 2170
ggcuuaugaugcgucaggu

SEQ ID NO: 168497 - RNA, 19 nt, Artificial Sequence
  Description of Artificial Sequence: Synthetic oligonucleotide
  Antisense strand to SEQ ID NO: 168496
accugacgcaucauaagcc

SEQ ID NO: 168498 - RNA, 19 nt, Artificial Sequence
  Description of Artificial Sequence: Synthetic oligonucleotide
  Sense strand starting at position 1091 of SEQ ID NO: 2170
augugaugccucgccaguu

SEQ ID NO: 168499 - RNA, 19 nt, Artificial Sequence
  Description of Artificial Sequence: Synthetic oligonucleotide
  Antisense strand to SEQ ID NO: 168498
aacuggcgaggcaucacau

SEQ ID NO: 168500 - RNA, 19 nt, Artificial Sequence
  Description of Artificial Sequence: Synthetic oligonucleotide
  Sense strand starting at position 1031 of SEQ ID NO: 2170
ugcauugguuaucccugaa

SEQ ID NO: 168501 - RNA, 19 nt, Artificial Sequence
  Description of Artificial Sequence: Synthetic oligonucleotide
  Antisense strand to SEQ ID NO: 168500
uucagggauaaccaaugca

SEQ ID NO: 168502 - RNA, 19 nt, Artificial Sequence
  Description of Artificial Sequence: Synthetic oligonucleotide
  Sense strand starting at position 1030 of SEQ ID NO: 2170
augcauugguuaucccuga

SEQ ID NO: 168503 - RNA, 19 nt, Artificial Sequence
  Description of Artificial Sequence: Synthetic oligonucleotide
  Antisense strand to SEQ ID NO: 168502
ucagggauaaccaaugcau

SEQ ID NO: 168504 - RNA, 19 nt, Artificial Sequence
  Description of Artificial Sequence: Synthetic oligonucleotide
  Sense strand starting at position 1025 of SEQ ID NO: 2170
cguauaugcauugguuauc

SEQ ID NO: 168505 - RNA, 19 nt, Artificial Sequence
  Description of Artificial Sequence: Synthetic oligonucleotide
  Antisense strand to SEQ ID NO: 168504
gauaaccaaugcauauacg

SEQ ID NO: 168506 - RNA, 19 nt, Artificial Sequence
  Description of Artificial Sequence: Synthetic oligonucleotide
  Sense strand starting at position 1024 of SEQ ID NO: 2170
ucguauaugcauugguuau

SEQ ID NO: 168507 - RNA, 19 nt, Artificial Sequence
  Description of Artificial Sequence: Synthetic oligonucleotide
  Antisense strand to SEQ ID NO: 168506
auaaccaaugcauauacga

SEQ ID NO: 168508 - RNA, 19 nt, Artificial Sequence
  Description of Artificial Sequence: Synthetic oligonucleotide
  Sense strand starting at position 1017 of SEQ ID NO: 2170
ucuggauucguauaugcau

SEQ ID NO: 168509 - RNA, 19 nt, Artificial Sequence
  Description of Artificial Sequence: Synthetic oligonucleotide
  Antisense strand to SEQ ID NO: 168508
augcauauacgaauccaga

SEQ ID NO: 168510 - RNA, 19 nt, Artificial Sequence
  Description of Artificial Sequence: Synthetic oligonucleotide
  Sense strand starting at position 1013 of SEQ ID NO: 2170
cuugucuggauucguauau

SEQ ID NO: 168511 - RNA, 19 nt, Artificial Sequence
  Description of Artificial Sequence: Synthetic oligonucleotide
  Antisense strand to SEQ ID NO: 168510
auauacgaauccagacaag

SEQ ID NO: 168512 - RNA, 19 nt, Artificial Sequence
  Description of Artificial Sequence: Synthetic oligonucleotide
  Sense strand starting at position 585 of SEQ ID NO: 2170
ggcuaagauccauggauga

SEQ ID NO: 168513 - RNA, 19 nt, Artificial Sequence
  Description of Artificial Sequence: Synthetic oligonucleotide
  Antisense strand to SEQ ID NO: 168512
ucauccauggaucuuagcc

SEQ ID NO: 168514 - RNA, 19 nt, Artificial Sequence
  Description of Artificial Sequence: Synthetic oligonucleotide
  Sense strand starting at position 522 of SEQ ID NO: 2170
cuugucuaacacugaaguu

SEQ ID NO: 168515 - RNA, 19 nt, Artificial Sequence
  Description of Artificial Sequence: Synthetic oligonucleotide
  Antisense strand to SEQ ID NO: 168514
aacuucaguguuagacaag

SEQ ID NO: 168516 - RNA, 19 nt, Artificial Sequence
  Description of Artificial Sequence: Synthetic oligonucleotide
  Sense strand starting at position 498 of SEQ ID NO: 2170
aauuuagacucguggucuu

SEQ ID NO: 168517 - RNA, 19 nt, Artificial Sequence
  Description of Artificial Sequence: Synthetic oligonucleotide
  Antisense strand to SEQ ID NO: 168516
aagaccacgagucuaaauu

SEQ ID NO: 168518 - RNA, 19 nt, Artificial Sequence
  Description of Artificial Sequence: Synthetic oligonucleotide
  Sense strand starting at position 292 of SEQ ID NO: 2170
cugaaugaaugauguaaca

SEQ ID NO: 168519 - RNA, 19 nt, Artificial Sequence
  Description of Artificial Sequence: Synthetic oligonucleotide
  Antisense strand to SEQ ID NO: 168518
uguuacaucauucauucag

SEQ ID NO: 168520 - RNA, 19 nt, Artificial Sequence
  Description of Artificial Sequence: Synthetic oligonucleotide
  Sense strand starting at position 206 of SEQ ID NO: 2170
cgaaauuguaauuggaacu

SEQ ID NO: 168521 - RNA, 19 nt, Artificial Sequence
  Description of Artificial Sequence: Synthetic oligonucleotide
  Antisense strand to SEQ ID NO: 168520
aguuccaauuacaauuucg

SEQ ID NO: 168522 - RNA, 19 nt, Artificial Sequence
  Description of Artificial Sequence: Synthetic oligonucleotide
  Sense strand starting at position 205 of SEQ ID NO: 2170
ucgaaauuguaauuggaac

SEQ ID NO: 168523 - RNA, 19 nt, Artificial Sequence
  Description of Artificial Sequence: Synthetic oligonucleotide
  Antisense strand to SEQ ID NO: 168522
guuccaauuacaauuucga

SEQ ID NO: 168524 - RNA, 19 nt, Artificial Sequence
  Description of Artificial Sequence: Synthetic oligonucleotide
  Sense strand starting at position 3879 of SEQ ID NO: 2171
agaggugccugacuagaau

SEQ ID NO: 168525 - RNA, 19 nt, Artificial Sequence
  Description of Artificial Sequence: Synthetic oligonucleotide
  Antisense strand to SEQ ID NO: 168524
auucuagucaggcaccucu

SEQ ID NO: 168526 - RNA, 19 nt, Artificial Sequence
  Description of Artificial Sequence: Synthetic oligonucleotide
  Sense strand starting at position 3838 of SEQ ID NO: 2171
agaagaguuugcucccagu

SEQ ID NO: 168527 - RNA, 19 nt, Artificial Sequence
  Description of Artificial Sequence: Synthetic oligonucleotide
  Antisense strand to SEQ ID NO: 168526
acugggagcaaacucuucu

SEQ ID NO: 168528 - RNA, 19 nt, Artificial Sequence
  Description of Artificial Sequence: Synthetic oligonucleotide
  Sense strand starting at position 3827 of SEQ ID NO: 2171
augcuuucucuagaagagu

SEQ ID NO: 168529 - RNA, 19 nt, Artificial Sequence
  Description of Artificial Sequence: Synthetic oligonucleotide
  Antisense strand to SEQ ID NO: 168528
acucuucuagagaaagcau

SEQ ID NO: 168530 - RNA, 19 nt, Artificial Sequence
  Description of Artificial Sequence: Synthetic oligonucleotide
  Sense strand starting at position 3825 of SEQ ID NO: 2171
ccaugcuuucucuagaaga

SEQ ID NO: 168531 - RNA, 19 nt, Artificial Sequence
  Description of Artificial Sequence: Synthetic oligonucleotide
  Antisense strand to SEQ ID NO: 168530
ucuucuagagaaagcaugg

SEQ ID NO: 168532 - RNA, 19 nt, Artificial Sequence
  Description of Artificial Sequence: Synthetic oligonucleotide
  Sense strand starting at position 3753 of SEQ ID NO: 2171
ugaggaauuuaaggucaaa

SEQ ID NO: 168533 - RNA, 19 nt, Artificial Sequence
  Description of Artificial Sequence: Synthetic oligonucleotide
  Antisense strand to SEQ ID NO: 168532
uuugaccuuaaauuccuca

SEQ ID NO: 168534 - RNA, 19 nt, Artificial Sequence
  Description of Artificial Sequence: Synthetic oligonucleotide
  Sense strand starting at position 3398 of SEQ ID NO: 2171
gugcuuaauagggacuuua

SEQ ID NO: 168535 - RNA, 19 nt, Artificial Sequence
  Description of Artificial Sequence: Synthetic oligonucleotide
  Antisense strand to SEQ ID NO: 168534
uaaagucccuauuaagcac

SEQ ID NO: 168536 - RNA, 19 nt, Artificial Sequence
  Description of Artificial Sequence: Synthetic oligonucleotide
  Sense strand starting at position 2888 of SEQ ID NO: 2171
acuuuaaagcuggagcaaa

SEQ ID NO: 168537 - RNA, 19 nt, Artificial Sequence
  Description of Artificial Sequence: Synthetic oligonucleotide
  Antisense strand to SEQ ID NO: 168536
uuugcuccagcuuuaaagu

SEQ ID NO: 168538 - RNA, 19 nt, Artificial Sequence
  Description of Artificial Sequence: Synthetic oligonucleotide
  Sense strand starting at position 2680 of SEQ ID NO: 2171
auguaaaucgucuagugug

SEQ ID NO: 168539 - RNA, 19 nt, Artificial Sequence
  Description of Artificial Sequence: Synthetic oligonucleotide
  Antisense strand to SEQ ID NO: 168538
cacacuagacgauuuacau

SEQ ID NO: 168540 - RNA, 19 nt, Artificial Sequence
  Description of Artificial Sequence: Synthetic oligonucleotide
  Sense strand starting at position 2658 of SEQ ID NO: 2171
cccaauuguugaguuaaau

SEQ ID NO: 168541 - RNA, 19 nt, Artificial Sequence
  Description of Artificial Sequence: Synthetic oligonucleotide
  Antisense strand to SEQ ID NO: 168540
auuuaacucaacaauuggg

SEQ ID NO: 168542 - RNA, 19 nt, Artificial Sequence
  Description of Artificial Sequence: Synthetic oligonucleotide
  Sense strand starting at position 2656 of SEQ ID NO: 2171
cucccaauuguugaguuaa

SEQ ID NO: 168543 - RNA, 19 nt, Artificial Sequence
  Description of Artificial Sequence: Synthetic oligonucleotide
  Antisense strand to SEQ ID NO: 168542
uuaacucaacaauugggag

SEQ ID NO: 168544 - RNA, 19 nt, Artificial Sequence
  Description of Artificial Sequence: Synthetic oligonucleotide
  Sense strand starting at position 2644 of SEQ ID NO: 2171
agaauaguguugcucccaa

SEQ ID NO: 168545 - RNA, 19 nt, Artificial Sequence
  Description of Artificial Sequence: Synthetic oligonucleotide
  Antisense strand to SEQ ID NO: 168544
uugggagcaacacuauucu

SEQ ID NO: 168546 - RNA, 19 nt, Artificial Sequence
  Description of Artificial Sequence: Synthetic oligonucleotide
  Sense strand starting at position 2376 of SEQ ID NO: 2171
uggaucugccauuaacuau

SEQ ID NO: 168547 - RNA, 19 nt, Artificial Sequence
  Description of Artificial Sequence: Synthetic oligonucleotide
  Antisense strand to SEQ ID NO: 168546
auaguuaauggcagaucca

SEQ ID NO: 168548 - RNA, 19 nt, Artificial Sequence
  Description of Artificial Sequence: Synthetic oligonucleotide
  Sense strand starting at position 2262 of SEQ ID NO: 2171
aggaaaugguaguaauuuc

SEQ ID NO: 168549 - RNA, 19 nt, Artificial Sequence
  Description of Artificial Sequence: Synthetic oligonucleotide
  Antisense strand to SEQ ID NO: 168548
gaaauuacuaccauuuccu

SEQ ID NO: 168550 - RNA, 19 nt, Artificial Sequence
  Description of Artificial Sequence: Synthetic oligonucleotide
  Sense strand starting at position 2006 of SEQ ID NO: 2171
gugucuauugguuacuaca

SEQ ID NO: 168551 - RNA, 19 nt, Artificial Sequence
  Description of Artificial Sequence: Synthetic oligonucleotide
  Antisense strand to SEQ ID NO: 168550
uguaguaaccaauagacac

SEQ ID NO: 168552 - RNA, 19 nt, Artificial Sequence
  Description of Artificial Sequence: Synthetic oligonucleotide
  Sense strand starting at position 1682 of SEQ ID NO: 2171
ccgcuaacucgagaauuag

SEQ ID NO: 168553 - RNA, 19 nt, Artificial Sequence
  Description of Artificial Sequence: Synthetic oligonucleotide
  Antisense strand to SEQ ID NO: 168552
cuaauucucgaguuagcgg

SEQ ID NO: 168554 - RNA, 19 nt, Artificial Sequence
  Description of Artificial Sequence: Synthetic oligonucleotide
  Sense strand starting at position 1680 of SEQ ID NO: 2171
gaccgcuaacucgagaauu

SEQ ID NO: 168555 - RNA, 19 nt, Artificial Sequence
  Description of Artificial Sequence: Synthetic oligonucleotide
  Antisense strand to SEQ ID NO: 168554
aauucucgaguuagcgguc

SEQ ID NO: 168556 - RNA, 19 nt, Artificial Sequence
  Description of Artificial Sequence: Synthetic oligonucleotide
  Sense strand starting at position 1575 of SEQ ID NO: 2171
gcacuuugggaugguuaag

SEQ ID NO: 168557 - RNA, 19 nt, Artificial Sequence
  Description of Artificial Sequence: Synthetic oligonucleotide
  Antisense strand to SEQ ID NO: 168556
cuuaaccaucccaaagugc

SEQ ID NO: 168558 - RNA, 19 nt, Artificial Sequence
  Description of Artificial Sequence: Synthetic oligonucleotide
  Sense strand starting at position 1574 of SEQ ID NO: 2171
ggcacuuugggaugguuaa

SEQ ID NO: 168559 - RNA, 19 nt, Artificial Sequence
  Description of Artificial Sequence: Synthetic oligonucleotide
  Antisense strand to SEQ ID NO: 168558
uuaaccaucccaaagugcc

SEQ ID NO: 168560 - RNA, 19 nt, Artificial Sequence
  Description of Artificial Sequence: Synthetic oligonucleotide
  Sense strand starting at position 1519 of SEQ ID NO: 2171
gauauauuagcagguaaca

SEQ ID NO: 168561 - RNA, 19 nt, Artificial Sequence
  Description of Artificial Sequence: Synthetic oligonucleotide
  Antisense strand to SEQ ID NO: 168560
uguuaccugcuaauauauc

SEQ ID NO: 168562 - RNA, 19 nt, Artificial Sequence
  Description of Artificial Sequence: Synthetic oligonucleotide
  Sense strand starting at position 1516 of SEQ ID NO: 2171
aaagauauauuagcaggua

SEQ ID NO: 168563 - RNA, 19 nt, Artificial Sequence
  Description of Artificial Sequence: Synthetic oligonucleotide
  Antisense strand to SEQ ID NO: 168562
uaccugcuaauauaucuuu

SEQ ID NO: 168564 - RNA, 19 nt, Artificial Sequence
  Description of Artificial Sequence: Synthetic oligonucleotide
  Sense strand starting at position 1274 of SEQ ID NO: 2171
aaggauaauccugguaguu

SEQ ID NO: 168565 - RNA, 19 nt, Artificial Sequence
  Description of Artificial Sequence: Synthetic oligonucleotide
  Antisense strand to SEQ ID NO: 168564
aacuaccaggauuauccuu

SEQ ID NO: 168566 - RNA, 19 nt, Artificial Sequence
  Description of Artificial Sequence: Synthetic oligonucleotide
  Sense strand starting at position 1186 of SEQ ID NO: 2171
aggaaaggcuaucuuaaug

SEQ ID NO: 168567 - RNA, 19 nt, Artificial Sequence
  Description of Artificial Sequence: Synthetic oligonucleotide
  Antisense strand to SEQ ID NO: 168566
cauuaagauagccuuuccu

SEQ ID NO: 168568 - RNA, 19 nt, Artificial Sequence
  Description of Artificial Sequence: Synthetic oligonucleotide
  Sense strand starting at position 891 of SEQ ID NO: 2171
gagaaaguugcucaucucu

SEQ ID NO: 168569 - RNA, 19 nt, Artificial Sequence
  Description of Artificial Sequence: Synthetic oligonucleotide
  Antisense strand to SEQ ID NO: 168568
agagaugagcaacuuucuc

SEQ ID NO: 168570 - RNA, 19 nt, Artificial Sequence
  Description of Artificial Sequence: Synthetic oligonucleotide
  Sense strand starting at position 890 of SEQ ID NO: 2171
ggagaaaguugcucaucuc

SEQ ID NO: 168571 - RNA, 19 nt, Artificial Sequence
  Description of Artificial Sequence: Synthetic oligonucleotide
  Antisense strand to SEQ ID NO: 168570
gagaugagcaacuuucucc

SEQ ID NO: 168572 - RNA, 19 nt, Artificial Sequence
  Description of Artificial Sequence: Synthetic oligonucleotide
  Sense strand starting at position 889 of SEQ ID NO: 2171
gggagaaaguugcucaucu

SEQ ID NO: 168573 - RNA, 19 nt, Artificial Sequence
  Description of Artificial Sequence: Synthetic oligonucleotide
  Antisense strand to SEQ ID NO: 168572
agaugagcaacuuucuccc

SEQ ID NO: 168574 - RNA, 19 nt, Artificial Sequence
  Description of Artificial Sequence: Synthetic oligonucleotide
  Sense strand starting at position 633 of SEQ ID NO: 2171
agcagaguugggugaauac

SEQ ID NO: 168575 - RNA, 19 nt, Artificial Sequence
  Description of Artificial Sequence: Synthetic oligonucleotide
  Antisense strand to SEQ ID NO: 168574
guauucacccaacucugcu

SEQ ID NO: 168576 - RNA, 19 nt, Artificial Sequence
  Description of Artificial Sequence: Synthetic oligonucleotide
  Sense strand starting at position 610 of SEQ ID NO: 2171
aggaauaugcucuaauguu

SEQ ID NO: 168577 - RNA, 19 nt, Artificial Sequence
  Description of Artificial Sequence: Synthetic oligonucleotide
  Antisense strand to SEQ ID NO: 168576
aacauuagagcauauuccu

SEQ ID NO: 168578 - RNA, 19 nt, Artificial Sequence
  Description of Artificial Sequence: Synthetic oligonucleotide
  Sense strand starting at position 608 of SEQ ID NO: 2171
gaaggaauaugcucuaaug

SEQ ID NO: 168579 - RNA, 19 nt, Artificial Sequence
  Description of Artificial Sequence: Synthetic oligonucleotide
  Antisense strand to SEQ ID NO: 168578
cauuagagcauauuccuuc

SEQ ID NO: 168580 - RNA, 19 nt, Artificial Sequence
  Description of Artificial Sequence: Synthetic oligonucleotide
  Sense strand starting at position 566 of SEQ ID NO: 2171
gaugaagagguuggcuaau

SEQ ID NO: 168581 - RNA, 19 nt, Artificial Sequence
  Description of Artificial Sequence: Synthetic oligonucleotide
  Antisense strand to SEQ ID NO: 168580
auuagccaaccucuucauc

SEQ ID NO: 168582 - RNA, 19 nt, Artificial Sequence
  Description of Artificial Sequence: Synthetic oligonucleotide
  Sense strand starting at position 565 of SEQ ID NO: 2171
agaugaagagguuggcuaa

SEQ ID NO: 168583 - RNA, 19 nt, Artificial Sequence
  Description of Artificial Sequence: Synthetic oligonucleotide
  Antisense strand to SEQ ID NO: 168582
uuagccaaccucuucaucu

SEQ ID NO: 168584 - RNA, 19 nt, Artificial Sequence
  Description of Artificial Sequence: Synthetic oligonucleotide
  Sense strand starting at position 501 of SEQ ID NO: 2171
uugaucucacagugguaga

SEQ ID NO: 168585 - RNA, 19 nt, Artificial Sequence
  Description of Artificial Sequence: Synthetic oligonucleotide
  Antisense strand to SEQ ID NO: 168584
ucuaccacugugagaucaa

SEQ ID NO: 168586 - RNA, 19 nt, Artificial Sequence
  Description of Artificial Sequence: Synthetic oligonucleotide
  Sense strand starting at position 246 of SEQ ID NO: 2171
gucacuguauuccugauaa

SEQ ID NO: 168587 - RNA, 19 nt, Artificial Sequence
  Description of Artificial Sequence: Synthetic oligonucleotide
  Antisense strand to SEQ ID NO: 168586
uuaucaggaauacagugac

SEQ ID NO: 168588 - RNA, 19 nt, Artificial Sequence
  Description of Artificial Sequence: Synthetic oligonucleotide
  Sense strand starting at position 236 of SEQ ID NO: 2171
ugguuuaguagucacugua

SEQ ID NO: 168589 - RNA, 19 nt, Artificial Sequence
  Description of Artificial Sequence: Synthetic oligonucleotide
  Antisense strand to SEQ ID NO: 168588
uacagugacuacuaaacca

SEQ ID NO: 168590 - RNA, 19 nt, Artificial Sequence
  Description of Artificial Sequence: Synthetic oligonucleotide
  Sense strand starting at position 225 of SEQ ID NO: 2171
ucaauaucucuugguuuag

SEQ ID NO: 168591 - RNA, 19 nt, Artificial Sequence
  Description of Artificial Sequence: Synthetic oligonucleotide
  Antisense strand to SEQ ID NO: 168590
cuaaaccaagagauauuga

SEQ ID NO: 168592 - RNA, 19 nt, Artificial Sequence
  Description of Artificial Sequence: Synthetic oligonucleotide
  Sense strand starting at position 207 of SEQ ID NO: 2171
auguuagaauuuccugcuu

SEQ ID NO: 168593 - RNA, 19 nt, Artificial Sequence
  Description of Artificial Sequence: Synthetic oligonucleotide
  Antisense strand to SEQ ID NO: 168592
aagcaggaaauucuaacau

SEQ ID NO: 168594 - RNA, 19 nt, Artificial Sequence
  Description of Artificial Sequence: Synthetic oligonucleotide
  Sense strand starting at position 88 of SEQ ID NO: 2171
auagaucgaagcuaaguua

SEQ ID NO: 168595 - RNA, 19 nt, Artificial Sequence
  Description of Artificial Sequence: Synthetic oligonucleotide
  Antisense strand to SEQ ID NO: 168594
uaacuuagcuucgaucuau

SEQ ID NO: 168596 - RNA, 19 nt, Artificial Sequence
  Description of Artificial Sequence: Synthetic oligonucleotide
  Sense strand starting at position 79 of SEQ ID NO: 2171
guuugcuuaauagaucgaa

SEQ ID NO: 168597 - RNA, 19 nt, Artificial Sequence
  Description of Artificial Sequence: Synthetic oligonucleotide
  Antisense strand to SEQ ID NO: 168596
uucgaucuauuaagcaaac

SEQ ID NO: 168598 - RNA, 19 nt, Artificial Sequence
  Description of Artificial Sequence: Synthetic oligonucleotide
  Sense strand starting at position 73 of SEQ ID NO: 2171
acaaauguuugcuuaauag

SEQ ID NO: 168599 - RNA, 19 nt, Artificial Sequence
  Description of Artificial Sequence: Synthetic oligonucleotide
  Antisense strand to SEQ ID NO: 168598
cuauuaagcaaacauuugu

SEQ ID NO: 168600 - RNA, 19 nt, Artificial Sequence
  Description of Artificial Sequence: Synthetic oligonucleotide
  Sense strand starting at position 70 of SEQ ID NO: 2171
agcacaaauguuugcuuaa

SEQ ID NO: 168601 - RNA, 19 nt, Artificial Sequence
  Description of Artificial Sequence: Synthetic oligonucleotide
  Antisense strand to SEQ ID NO: 168600
uuaagcaaacauuugugcu

SEQ ID NO: 168602 - RNA, 19 nt, Artificial Sequence
  Description of Artificial Sequence: Synthetic oligonucleotide
  Sense strand starting at position 20 of SEQ ID NO: 2171
acauauuuauccuuucguu

SEQ ID NO: 168603 - RNA, 19 nt, Artificial Sequence
  Description of Artificial Sequence: Synthetic oligonucleotide
  Antisense strand to SEQ ID NO: 168602
aacgaaaggauaaauaugu

SEQ ID NO: 168604 - RNA, 19 nt, Artificial Sequence
  Description of Artificial Sequence: Synthetic oligonucleotide
  Sense strand starting at position 3970 of SEQ ID NO: 2172
ccuggagauucccugucua

SEQ ID NO: 168605 - RNA, 19 nt, Artificial Sequence
  Description of Artificial Sequence: Synthetic oligonucleotide
  Antisense strand to SEQ ID NO: 168604
uagacagggaaucuccagg

SEQ ID NO: 168606 - RNA, 19 nt, Artificial Sequence
  Description of Artificial Sequence: Synthetic oligonucleotide
  Sense strand starting at position 3962 of SEQ ID NO: 2172
augccauuccuggagauuc

SEQ ID NO: 168607 - RNA, 19 nt, Artificial Sequence
  Description of Artificial Sequence: Synthetic oligonucleotide
  Antisense strand to SEQ ID NO: 168606
gaaucuccaggaauggcau

SEQ ID NO: 168608 - RNA, 19 nt, Artificial Sequence
  Description of Artificial Sequence: Synthetic oligonucleotide
  Sense strand starting at position 3961 of SEQ ID NO: 2172
gaugccauuccuggagauu

SEQ ID NO: 168609 - RNA, 19 nt, Artificial Sequence
  Description of Artificial Sequence: Synthetic oligonucleotide
  Antisense strand to SEQ ID NO: 168608
aaucuccaggaauggcauc

SEQ ID NO: 168610 - RNA, 19 nt, Artificial Sequence
  Description of Artificial Sequence: Synthetic oligonucleotide
  Sense strand starting at position 3941 of SEQ ID NO: 2172
gcagccugauucuuaacgu

SEQ ID NO: 168611 - RNA, 19 nt, Artificial Sequence
  Description of Artificial Sequence: Synthetic oligonucleotide
  Antisense strand to SEQ ID NO: 168610
acguuaagaaucaggcugc

SEQ ID NO: 168612 - RNA, 19 nt, Artificial Sequence
  Description of Artificial Sequence: Synthetic oligonucleotide
  Sense strand starting at position 3896 of SEQ ID NO: 2172
uuggguaacuuacacagua

SEQ ID NO: 168613 - RNA, 19 nt, Artificial Sequence
  Description of Artificial Sequence: Synthetic oligonucleotide
  Antisense strand to SEQ ID NO: 168612
uacuguguaaguuacccaa

SEQ ID NO: 168614 - RNA, 19 nt, Artificial Sequence
  Description of Artificial Sequence: Synthetic oligonucleotide
  Sense strand starting at position 3888 of SEQ ID NO: 2172
gacugagguuggguaacuu

SEQ ID NO: 168615 - RNA, 19 nt, Artificial Sequence
  Description of Artificial Sequence: Synthetic oligonucleotide
  Antisense strand to SEQ ID NO: 168614
aaguuacccaaccucaguc

SEQ ID NO: 168616 - RNA, 19 nt, Artificial Sequence
  Description of Artificial Sequence: Synthetic oligonucleotide
  Sense strand starting at position 3871 of SEQ ID NO: 2172
guguuuacagacgaggaga

SEQ ID NO: 168617 - RNA, 19 nt, Artificial Sequence
  Description of Artificial Sequence: Synthetic oligonucleotide
  Antisense strand to SEQ ID NO: 168616
ucuccucgucuguaaacac

SEQ ID NO: 168618 - RNA, 19 nt, Artificial Sequence
  Description of Artificial Sequence: Synthetic oligonucleotide
  Sense strand starting at position 3864 of SEQ ID NO: 2172
ucucuaaguguuuacagac

SEQ ID NO: 168619 - RNA, 19 nt, Artificial Sequence
  Description of Artificial Sequence: Synthetic oligonucleotide
  Antisense strand to SEQ ID NO: 168618
gucuguaaacacuuagaga

SEQ ID NO: 168620 - RNA, 19 nt, Artificial Sequence
  Description of Artificial Sequence: Synthetic oligonucleotide
  Sense strand starting at position 3837 of SEQ ID NO: 2172
agcucucuuacggaguagu

SEQ ID NO: 168621 - RNA, 19 nt, Artificial Sequence
  Description of Artificial Sequence: Synthetic oligonucleotide
  Antisense strand to SEQ ID NO: 168620
acuacuccguaagagagcu

SEQ ID NO: 168622 - RNA, 19 nt, Artificial Sequence
  Description of Artificial Sequence: Synthetic oligonucleotide
  Sense strand starting at position 3756 of SEQ ID NO: 2172
guugcaauuacugagagcu

SEQ ID NO: 168623 - RNA, 19 nt, Artificial Sequence
  Description of Artificial Sequence: Synthetic oligonucleotide
  Antisense strand to SEQ ID NO: 168622
agcucucaguaauugcaac

SEQ ID NO: 168624 - RNA, 19 nt, Artificial Sequence
  Description of Artificial Sequence: Synthetic oligonucleotide
  Sense strand starting at position 3077 of SEQ ID NO: 2172
cucgaauccgccucgaguu

SEQ ID NO: 168625 - RNA, 19 nt, Artificial Sequence
  Description of Artificial Sequence: Synthetic oligonucleotide
  Antisense strand to SEQ ID NO: 168624
aacucgaggcggauucgag

SEQ ID NO: 168626 - RNA, 19 nt, Artificial Sequence
  Description of Artificial Sequence: Synthetic oligonucleotide
  Sense strand starting at position 2732 of SEQ ID NO: 2172
cgggaucucgcgagauucu

SEQ ID NO: 168627 - RNA, 19 nt, Artificial Sequence
  Description of Artificial Sequence: Synthetic oligonucleotide
  Antisense strand to SEQ ID NO: 168626
agaaucucgcgagaucccg

SEQ ID NO: 168628 - RNA, 19 nt, Artificial Sequence
  Description of Artificial Sequence: Synthetic oligonucleotide
  Sense strand starting at position 2731 of SEQ ID NO: 2172
acgggaucucgcgagauuc

SEQ ID NO: 168629 - RNA, 19 nt, Artificial Sequence
  Description of Artificial Sequence: Synthetic oligonucleotide
  Antisense strand to SEQ ID NO: 168628
gaaucucgcgagaucccgu

SEQ ID NO: 168630 - RNA, 19 nt, Artificial Sequence
  Description of Artificial Sequence: Synthetic oligonucleotide
  Sense strand starting at position 2576 of SEQ ID NO: 2172
uagggaauuugcguaacgu

SEQ ID NO: 168631 - RNA, 19 nt, Artificial Sequence
  Description of Artificial Sequence: Synthetic oligonucleotide
  Antisense strand to SEQ ID NO: 168630
acguuacgcaaauucccua

SEQ ID NO: 168632 - RNA, 19 nt, Artificial Sequence
  Description of Artificial Sequence: Synthetic oligonucleotide
  Sense strand starting at position 2425 of SEQ ID NO: 2172
aaccgaagguaugcaaaua

SEQ ID NO: 168633 - RNA, 19 nt, Artificial Sequence
  Description of Artificial Sequence: Synthetic oligonucleotide
  Antisense strand to SEQ ID NO: 168632
uauuugcauaccuucgguu

SEQ ID NO: 168634 - RNA, 19 nt, Artificial Sequence
  Description of Artificial Sequence: Synthetic oligonucleotide
  Sense strand starting at position 2396 of SEQ ID NO: 2172
gguugcucacuucgaaaca

SEQ ID NO: 168635 - RNA, 19 nt, Artificial Sequence
  Description of Artificial Sequence: Synthetic oligonucleotide
  Antisense strand to SEQ ID NO: 168634
uguuucgaagugagcaacc

SEQ ID NO: 168636 - RNA, 19 nt, Artificial Sequence
  Description of Artificial Sequence: Synthetic oligonucleotide
  Sense strand starting at position 2393 of SEQ ID NO: 2172
caggguugcucacuucgaa

SEQ ID NO: 168637 - RNA, 19 nt, Artificial Sequence
  Description of Artificial Sequence: Synthetic oligonucleotide
  Antisense strand to SEQ ID NO: 168636
uucgaagugagcaacccug

SEQ ID NO: 168638 - RNA, 19 nt, Artificial Sequence
  Description of Artificial Sequence: Synthetic oligonucleotide
  Sense strand starting at position 2359 of SEQ ID NO: 2172
ugagcaaauugucauauac

SEQ ID NO: 168639 - RNA, 19 nt, Artificial Sequence
  Description of Artificial Sequence: Synthetic oligonucleotide
  Antisense strand to SEQ ID NO: 168638
guauaugacaauuugcuca

SEQ ID NO: 168640 - RNA, 19 nt, Artificial Sequence
  Description of Artificial Sequence: Synthetic oligonucleotide
  Sense strand starting at position 2358 of SEQ ID NO: 2172
cugagcaaauugucauaua

SEQ ID NO: 168641 - RNA, 19 nt, Artificial Sequence
  Description of Artificial Sequence: Synthetic oligonucleotide
  Antisense strand to SEQ ID NO: 168640
uauaugacaauuugcucag

SEQ ID NO: 168642 - RNA, 19 nt, Artificial Sequence
  Description of Artificial Sequence: Synthetic oligonucleotide
  Sense strand starting at position 2350 of SEQ ID NO: 2172
uuaagauucugagcaaauu

SEQ ID NO: 168643 - RNA, 19 nt, Artificial Sequence
  Description of Artificial Sequence: Synthetic oligonucleotide
  Antisense strand to SEQ ID NO: 168642
aauuugcucagaaucuuaa

SEQ ID NO: 168644 - RNA, 19 nt, Artificial Sequence
  Description of Artificial Sequence: Synthetic oligonucleotide
  Sense strand starting at position 2347 of SEQ ID NO: 2172
acauuaagauucugagcaa

SEQ ID NO: 168645 - RNA, 19 nt, Artificial Sequence
  Description of Artificial Sequence: Synthetic oligonucleotide
  Antisense strand to SEQ ID NO: 168644
uugcucagaaucuuaaugu

SEQ ID NO: 168646 - RNA, 19 nt, Artificial Sequence
  Description of Artificial Sequence: Synthetic oligonucleotide
  Sense strand starting at position 2277 of SEQ ID NO: 2172
ugggccucaguuuacuaaa

SEQ ID NO: 168647 - RNA, 19 nt, Artificial Sequence
  Description of Artificial Sequence: Synthetic oligonucleotide
  Antisense strand to SEQ ID NO: 168646
uuuaguaaacugaggccca

SEQ ID NO: 168648 - RNA, 19 nt, Artificial Sequence
  Description of Artificial Sequence: Synthetic oligonucleotide
  Sense strand starting at position 2234 of SEQ ID NO: 2172
acacaauuucuccgggugu

SEQ ID NO: 168649 - RNA, 19 nt, Artificial Sequence
  Description of Artificial Sequence: Synthetic oligonucleotide
  Antisense strand to SEQ ID NO: 168648
acacccggagaaauugugu

SEQ ID NO: 168650 - RNA, 19 nt, Artificial Sequence
  Description of Artificial Sequence: Synthetic oligonucleotide
  Sense strand starting at position 2046 of SEQ ID NO: 2172
gacuguuugccuugacauu

SEQ ID NO: 168651 - RNA, 19 nt, Artificial Sequence
  Description of Artificial Sequence: Synthetic oligonucleotide
  Antisense strand to SEQ ID NO: 168650
aaugucaaggcaaacaguc

SEQ ID NO: 168652 - RNA, 19 nt, Artificial Sequence
  Description of Artificial Sequence: Synthetic oligonucleotide
  Sense strand starting at position 2044 of SEQ ID NO: 2172
aggacuguuugccuugaca

SEQ ID NO: 168653 - RNA, 19 nt, Artificial Sequence
  Description of Artificial Sequence: Synthetic oligonucleotide
  Antisense strand to SEQ ID NO: 168652
ugucaaggcaaacaguccu

SEQ ID NO: 168654 - RNA, 19 nt, Artificial Sequence
  Description of Artificial Sequence: Synthetic oligonucleotide
  Sense strand starting at position 1574 of SEQ ID NO: 2172
uggcaaguggauugaugaa

SEQ ID NO: 168655 - RNA, 19 nt, Artificial Sequence
  Description of Artificial Sequence: Synthetic oligonucleotide
  Antisense strand to SEQ ID NO: 168654
uucaucaauccacuugcca

SEQ ID NO: 168656 - RNA, 19 nt, Artificial Sequence
  Description of Artificial Sequence: Synthetic oligonucleotide
  Sense strand starting at position 1537 of SEQ ID NO: 2172
ggccgaagugucuaggaag

SEQ ID NO: 168657 - RNA, 19 nt, Artificial Sequence
  Description of Artificial Sequence: Synthetic oligonucleotide
  Antisense strand to SEQ ID NO: 168656
cuuccuagacacuucggcc

SEQ ID NO: 168658 - RNA, 19 nt, Artificial Sequence
  Description of Artificial Sequence: Synthetic oligonucleotide
  Sense strand starting at position 1033 of SEQ ID NO: 2172
uccuacuugucaucuggga

SEQ ID NO: 168659 - RNA, 19 nt, Artificial Sequence
  Description of Artificial Sequence: Synthetic oligonucleotide
  Antisense strand to SEQ ID NO: 168658
ucccagaugacaaguagga

SEQ ID NO: 168660 - RNA, 19 nt, Artificial Sequence
  Description of Artificial Sequence: Synthetic oligonucleotide
  Sense strand starting at position 1027 of SEQ ID NO: 2172
ggagaauccuacuugucau

SEQ ID NO: 168661 - RNA, 19 nt, Artificial Sequence
  Description of Artificial Sequence: Synthetic oligonucleotide
  Antisense strand to SEQ ID NO: 168660
augacaaguaggauucucc

SEQ ID NO: 168662 - RNA, 19 nt, Artificial Sequence
  Description of Artificial Sequence: Synthetic oligonucleotide
  Sense strand starting at position 1024 of SEQ ID NO: 2172
cauggagaauccuacuugu

SEQ ID NO: 168663 - RNA, 19 nt, Artificial Sequence
  Description of Artificial Sequence: Synthetic oligonucleotide
  Antisense strand to SEQ ID NO: 168662
acaaguaggauucuccaug

SEQ ID NO: 168664 - RNA, 19 nt, Artificial Sequence
  Description of Artificial Sequence: Synthetic oligonucleotide
  Sense strand starting at position 982 of SEQ ID NO: 2172
caucuaaugggaugugucu

SEQ ID NO: 168665 - RNA, 19 nt, Artificial Sequence
  Description of Artificial Sequence: Synthetic oligonucleotide
  Antisense strand to SEQ ID NO: 168664
agacacaucccauuagaug

SEQ ID NO: 168666 - RNA, 19 nt, Artificial Sequence
  Description of Artificial Sequence: Synthetic oligonucleotide
  Sense strand starting at position 912 of SEQ ID NO: 2172
guuucccucuaccuagauu

SEQ ID NO: 168667 - RNA, 19 nt, Artificial Sequence
  Description of Artificial Sequence: Synthetic oligonucleotide
  Antisense strand to SEQ ID NO: 168666
aaucuagguagagggaaac

SEQ ID NO: 168668 - RNA, 19 nt, Artificial Sequence
  Description of Artificial Sequence: Synthetic oligonucleotide
  Sense strand starting at position 153 of SEQ ID NO: 2172
gugcuucauggguaggaca

SEQ ID NO: 168669 - RNA, 19 nt, Artificial Sequence
  Description of Artificial Sequence: Synthetic oligonucleotide
  Antisense strand to SEQ ID NO: 168668
uguccuacccaugaagcac

SEQ ID NO: 168670 - RNA, 19 nt, Artificial Sequence
  Description of Artificial Sequence: Synthetic oligonucleotide
  Sense strand starting at position 151 of SEQ ID NO: 2172
gugugcuucauggguagga

SEQ ID NO: 168671 - RNA, 19 nt, Artificial Sequence
  Description of Artificial Sequence: Synthetic oligonucleotide
  Antisense strand to SEQ ID NO: 168670
uccuacccaugaagcacac

SEQ ID NO: 168672 - RNA, 19 nt, Artificial Sequence
  Description of Artificial Sequence: Synthetic oligonucleotide
  Sense strand starting at position 95 of SEQ ID NO: 2172
cgaguaggucgucauacac

SEQ ID NO: 168673 - RNA, 19 nt, Artificial Sequence
  Description of Artificial Sequence: Synthetic oligonucleotide
  Antisense strand to SEQ ID NO: 168672
guguaugacgaccuacucg

SEQ ID NO: 168674 - RNA, 19 nt, Artificial Sequence
  Description of Artificial Sequence: Synthetic oligonucleotide
  Sense strand starting at position 94 of SEQ ID NO: 2172
ucgaguaggucgucauaca

SEQ ID NO: 168675 - RNA, 19 nt, Artificial Sequence
  Description of Artificial Sequence: Synthetic oligonucleotide
  Antisense strand to SEQ ID NO: 168674
uguaugacgaccuacucga

SEQ ID NO: 168676 - RNA, 19 nt, Artificial Sequence
  Description of Artificial Sequence: Synthetic oligonucleotide
  Sense strand starting at position 92 of SEQ ID NO: 2172
cuucgaguaggucgucaua

SEQ ID NO: 168677 - RNA, 19 nt, Artificial Sequence
  Description of Artificial Sequence: Synthetic oligonucleotide
  Antisense strand to SEQ ID NO: 168676
uaugacgaccuacucgaag

SEQ ID NO: 168678 - RNA, 19 nt, Artificial Sequence
  Description of Artificial Sequence: Synthetic oligonucleotide
  Sense strand starting at position 83 of SEQ ID NO: 2172
gcuguagcccuucgaguag

SEQ ID NO: 168679 - RNA, 19 nt, Artificial Sequence
  Description of Artificial Sequence: Synthetic oligonucleotide
  Antisense strand to SEQ ID NO: 168678
cuacucgaagggcuacagc

SEQ ID NO: 168680 - RNA, 19 nt, Artificial Sequence
  Description of Artificial Sequence: Synthetic oligonucleotide
  Sense strand starting at position 82 of SEQ ID NO: 2172
agcuguagcccuucgagua

SEQ ID NO: 168681 - RNA, 19 nt, Artificial Sequence
  Description of Artificial Sequence: Synthetic oligonucleotide
  Antisense strand to SEQ ID NO: 168680
uacucgaagggcuacagcu

SEQ ID NO: 168682 - RNA, 19 nt, Artificial Sequence
  Description of Artificial Sequence: Synthetic oligonucleotide
  Sense strand starting at position 63 of SEQ ID NO: 2172
ucucuuuauccagguuucu

SEQ ID NO: 168683 - RNA, 19 nt, Artificial Sequence
  Description of Artificial Sequence: Synthetic oligonucleotide
  Antisense strand to SEQ ID NO: 168682
agaaaccuggauaaagaga

SEQ ID NO: 168684 - RNA, 19 nt, Artificial Sequence
  Description of Artificial Sequence: Synthetic oligonucleotide
  Sense strand starting at position 94 of SEQ ID NO: 2173
uccagaagacucgggcauu

SEQ ID NO: 168685 - RNA, 19 nt, Artificial Sequence
  Description of Artificial Sequence: Synthetic oligonucleotide
  Antisense strand to SEQ ID NO: 168684
aaugcccgagucuucugga

SEQ ID NO: 168686 - RNA, 19 nt, Artificial Sequence
  Description of Artificial Sequence: Synthetic oligonucleotide
  Sense strand starting at position 120 of SEQ ID NO: 2173
ugucauugucaccauacca

SEQ ID NO: 168687 - RNA, 19 nt, Artificial Sequence
  Description of Artificial Sequence: Synthetic oligonucleotide
  Antisense strand to SEQ ID NO: 168686
ugguauggugacaaugaca

SEQ ID NO: 168688 - RNA, 19 nt, Artificial Sequence
  Description of Artificial Sequence: Synthetic oligonucleotide
  Sense strand starting at position 174 of SEQ ID NO: 2173
cugauacuguuauccaugu

SEQ ID NO: 168689 - RNA, 19 nt, Artificial Sequence
  Description of Artificial Sequence: Synthetic oligonucleotide
  Antisense strand to SEQ ID NO: 168688
acauggauaacaguaucag

SEQ ID NO: 168690 - RNA, 19 nt, Artificial Sequence
  Description of Artificial Sequence: Synthetic oligonucleotide
  Sense strand starting at position 967 of SEQ ID NO: 2173
uugucaucaucaccaguau

SEQ ID NO: 168691 - RNA, 19 nt, Artificial Sequence
  Description of Artificial Sequence: Synthetic oligonucleotide
  Antisense strand to SEQ ID NO: 168690
auacuggugaugaugacaa

SEQ ID NO: 168692 - RNA, 19 nt, Artificial Sequence
  Description of Artificial Sequence: Synthetic oligonucleotide
  Sense strand starting at position 968 of SEQ ID NO: 2173
ugucaucaucaccaguauu

SEQ ID NO: 168693 - RNA, 19 nt, Artificial Sequence
  Description of Artificial Sequence: Synthetic oligonucleotide
  Antisense strand to SEQ ID NO: 168692
aauacuggugaugaugaca

SEQ ID NO: 168694 - RNA, 19 nt, Artificial Sequence
  Description of Artificial Sequence: Synthetic oligonucleotide
  Sense strand starting at position 976 of SEQ ID NO: 2173
ucaccaguauuacuguuau

SEQ ID NO: 168695 - RNA, 19 nt, Artificial Sequence
  Description of Artificial Sequence: Synthetic oligonucleotide
  Antisense strand to SEQ ID NO: 168694
auaacaguaauacugguga

SEQ ID NO: 168696 - RNA, 19 nt, Artificial Sequence
  Description of Artificial Sequence: Synthetic oligonucleotide
  Sense strand starting at position 982 of SEQ ID NO: 2173
guauuacuguuaucaacau

SEQ ID NO: 168697 - RNA, 19 nt, Artificial Sequence
  Description of Artificial Sequence: Synthetic oligonucleotide
  Antisense strand to SEQ ID NO: 168696
auguugauaacaguaauac

SEQ ID NO: 168698 - RNA, 19 nt, Artificial Sequence
  Description of Artificial Sequence: Synthetic oligonucleotide
  Sense strand starting at position 1084 of SEQ ID NO: 2173
gcaucaugccuggugccau

SEQ ID NO: 168699 - RNA, 19 nt, Artificial Sequence
  Description of Artificial Sequence: Synthetic oligonucleotide
  Antisense strand to SEQ ID NO: 168698
auggcaccaggcaugaugc

SEQ ID NO: 168700 - RNA, 19 nt, Artificial Sequence
  Description of Artificial Sequence: Synthetic oligonucleotide
  Sense strand starting at position 1453 of SEQ ID NO: 2173
cagaaugggcuuugacaug

SEQ ID NO: 168701 - RNA, 19 nt, Artificial Sequence
  Description of Artificial Sequence: Synthetic oligonucleotide
  Antisense strand to SEQ ID NO: 168700
caugucaaagcccauucug

SEQ ID NO: 168702 - RNA, 19 nt, Artificial Sequence
  Description of Artificial Sequence: Synthetic oligonucleotide
  Sense strand starting at position 1512 of SEQ ID NO: 2173
cagucuugauggccucuaa

SEQ ID NO: 168703 - RNA, 19 nt, Artificial Sequence
  Description of Artificial Sequence: Synthetic oligonucleotide
  Antisense strand to SEQ ID NO: 168702
uuagaggccaucaagacug

SEQ ID NO: 168704 - RNA, 19 nt, Artificial Sequence
  Description of Artificial Sequence: Synthetic oligonucleotide
  Sense strand starting at position 1533 of SEQ ID NO: 2173
gcccucuaggcucaaacau

SEQ ID NO: 168705 - RNA, 19 nt, Artificial Sequence
  Description of Artificial Sequence: Synthetic oligonucleotide
  Antisense strand to SEQ ID NO: 168704
auguuugagccuagagggc

SEQ ID NO: 168706 - RNA, 19 nt, Artificial Sequence
  Description of Artificial Sequence: Synthetic oligonucleotide
  Sense strand starting at position 1608 of SEQ ID NO: 2173
gagcacagucgccaaagau

SEQ ID NO: 168707 - RNA, 19 nt, Artificial Sequence
  Description of Artificial Sequence: Synthetic oligonucleotide
  Antisense strand to SEQ ID NO: 168706
aucuuuggcgacugugcuc

SEQ ID NO: 168708 - RNA, 19 nt, Artificial Sequence
  Description of Artificial Sequence: Synthetic oligonucleotide
  Sense strand starting at position 2002 of SEQ ID NO: 2173
cugggaagugauggucuca

SEQ ID NO: 168709 - RNA, 19 nt, Artificial Sequence
  Description of Artificial Sequence: Synthetic oligonucleotide
  Antisense strand to SEQ ID NO: 168708
ugagaccaucacuucccag

SEQ ID NO: 168710 - RNA, 19 nt, Artificial Sequence
  Description of Artificial Sequence: Synthetic oligonucleotide
  Sense strand starting at position 2030 of SEQ ID NO: 2173
ccugccucacuggagaauu

SEQ ID NO: 168711 - RNA, 19 nt, Artificial Sequence
  Description of Artificial Sequence: Synthetic oligonucleotide
  Antisense strand to SEQ ID NO: 168710
aauucuccagugaggcagg

SEQ ID NO: 168712 - RNA, 19 nt, Artificial Sequence
  Description of Artificial Sequence: Synthetic oligonucleotide
  Sense strand starting at position 2174 of SEQ ID NO: 2173
ugaugauucuuucuuagag

SEQ ID NO: 168713 - RNA, 19 nt, Artificial Sequence
  Description of Artificial Sequence: Synthetic oligonucleotide
  Antisense strand to SEQ ID NO: 168712
cucuaagaaagaaucauca

SEQ ID NO: 168714 - RNA, 19 nt, Artificial Sequence
  Description of Artificial Sequence: Synthetic oligonucleotide
  Sense strand starting at position 2175 of SEQ ID NO: 2173
gaugauucuuucuuagagc

SEQ ID NO: 168715 - RNA, 19 nt, Artificial Sequence
  Description of Artificial Sequence: Synthetic oligonucleotide
  Antisense strand to SEQ ID NO: 168714
gcucuaagaaagaaucauc

SEQ ID NO: 168716 - RNA, 19 nt, Artificial Sequence
  Description of Artificial Sequence: Synthetic oligonucleotide
  Sense strand starting at position 2275 of SEQ ID NO: 2173
ccacuuguccaaggacaag

SEQ ID NO: 168717 - RNA, 19 nt, Artificial Sequence
  Description of Artificial Sequence: Synthetic oligonucleotide
  Antisense strand to SEQ ID NO: 168716
cuuguccuuggacaagugg

SEQ ID NO: 168718 - RNA, 19 nt, Artificial Sequence
  Description of Artificial Sequence: Synthetic oligonucleotide
  Sense strand starting at position 2287 of SEQ ID NO: 2173
ggacaagucucaucuuccu

SEQ ID NO: 168719 - RNA, 19 nt, Artificial Sequence
  Description of Artificial Sequence: Synthetic oligonucleotide
  Antisense strand to SEQ ID NO: 168718
aggaagaugagacuugucc

SEQ ID NO: 168720 - RNA, 19 nt, Artificial Sequence
  Description of Artificial Sequence: Synthetic oligonucleotide
  Sense strand starting at position 2292 of SEQ ID NO: 2173
agucucaucuuccugacau

SEQ ID NO: 168721 - RNA, 19 nt, Artificial Sequence
  Description of Artificial Sequence: Synthetic oligonucleotide
  Antisense strand to SEQ ID NO: 168720
augucaggaagaugagacu

SEQ ID NO: 168722 - RNA, 19 nt, Artificial Sequence
  Description of Artificial Sequence: Synthetic oligonucleotide
  Sense strand starting at position 2352 of SEQ ID NO: 2173
aacagaguacuguggccaa

SEQ ID NO: 168723 - RNA, 19 nt, Artificial Sequence
  Description of Artificial Sequence: Synthetic oligonucleotide
  Antisense strand to SEQ ID NO: 168722
uuggccacaguacucuguu

SEQ ID NO: 168724 - RNA, 19 nt, Artificial Sequence
  Description of Artificial Sequence: Synthetic oligonucleotide
  Sense strand starting at position 2406 of SEQ ID NO: 2173
caggcauguagugauguau

SEQ ID NO: 168725 - RNA, 19 nt, Artificial Sequence
  Description of Artificial Sequence: Synthetic oligonucleotide
  Antisense strand to SEQ ID NO: 168724
auacaucacuacaugccug

SEQ ID NO: 168726 - RNA, 19 nt, Artificial Sequence
  Description of Artificial Sequence: Synthetic oligonucleotide
  Sense strand starting at position 2410 of SEQ ID NO: 2173
cauguagugauguauaggu

SEQ ID NO: 168727 - RNA, 19 nt, Artificial Sequence
  Description of Artificial Sequence: Synthetic oligonucleotide
  Antisense strand to SEQ ID NO: 168726
accuauacaucacuacaug

SEQ ID NO: 168728 - RNA, 19 nt, Artificial Sequence
  Description of Artificial Sequence: Synthetic oligonucleotide
  Sense strand starting at position 2418 of SEQ ID NO: 2173
gauguauagguguggagaa

SEQ ID NO: 168729 - RNA, 19 nt, Artificial Sequence
  Description of Artificial Sequence: Synthetic oligonucleotide
  Antisense strand to SEQ ID NO: 168728
uucuccacaccuauacauc

SEQ ID NO: 168730 - RNA, 19 nt, Artificial Sequence
  Description of Artificial Sequence: Synthetic oligonucleotide
  Sense strand starting at position 2437 of SEQ ID NO: 2173
agugguagccauugucaau

SEQ ID NO: 168731 - RNA, 19 nt, Artificial Sequence
  Description of Artificial Sequence: Synthetic oligonucleotide
  Antisense strand to SEQ ID NO: 168730
auugacaauggcuaccacu

SEQ ID NO: 168732 - RNA, 19 nt, Artificial Sequence
  Description of Artificial Sequence: Synthetic oligonucleotide
  Sense strand starting at position 2443 of SEQ ID NO: 2173
agccauugucaauaagaac

SEQ ID NO: 168733 - RNA, 19 nt, Artificial Sequence
  Description of Artificial Sequence: Synthetic oligonucleotide
  Antisense strand to SEQ ID NO: 168732
guucuuauugacaauggcu

SEQ ID NO: 168734 - RNA, 19 nt, Artificial Sequence
  Description of Artificial Sequence: Synthetic oligonucleotide
  Sense strand starting at position 2493 of SEQ ID NO: 2173
cucauauaaugguugcagu

SEQ ID NO: 168735 - RNA, 19 nt, Artificial Sequence
  Description of Artificial Sequence: Synthetic oligonucleotide
  Antisense strand to SEQ ID NO: 168734
acugcaaccauuauaugag

SEQ ID NO: 168736 - RNA, 19 nt, Artificial Sequence
  Description of Artificial Sequence: Synthetic oligonucleotide
  Sense strand starting at position 2494 of SEQ ID NO: 2173
ucauauaaugguugcagua

SEQ ID NO: 168737 - RNA, 19 nt, Artificial Sequence
  Description of Artificial Sequence: Synthetic oligonucleotide
  Antisense strand to SEQ ID NO: 168736
uacugcaaccauuauauga

SEQ ID NO: 168738 - RNA, 19 nt, Artificial Sequence
  Description of Artificial Sequence: Synthetic oligonucleotide
  Sense strand starting at position 2506 of SEQ ID NO: 2173
ugcaguaaccgggacuauu

SEQ ID NO: 168739 - RNA, 19 nt, Artificial Sequence
  Description of Artificial Sequence: Synthetic oligonucleotide
  Antisense strand to SEQ ID NO: 168738
aauagucccgguuacugca

SEQ ID NO: 168740 - RNA, 19 nt, Artificial Sequence
  Description of Artificial Sequence: Synthetic oligonucleotide
  Sense strand starting at position 2584 of SEQ ID NO: 2173
aggcuuccugacuagcaga

SEQ ID NO: 168741 - RNA, 19 nt, Artificial Sequence
  Description of Artificial Sequence: Synthetic oligonucleotide
  Antisense strand to SEQ ID NO: 168740
ucugcuagucaggaagccu

SEQ ID NO: 168742 - RNA, 19 nt, Artificial Sequence
  Description of Artificial Sequence: Synthetic oligonucleotide
  Sense strand starting at position 2915 of SEQ ID NO: 2173
gggagguggcuccagugaa

SEQ ID NO: 168743 - RNA, 19 nt, Artificial Sequence
  Description of Artificial Sequence: Synthetic oligonucleotide
  Antisense strand to SEQ ID NO: 168742
uucacuggagccaccuccc

SEQ ID NO: 168744 - RNA, 19 nt, Artificial Sequence
  Description of Artificial Sequence: Synthetic oligonucleotide
  Sense strand starting at position 3044 of SEQ ID NO: 2173
cuggaaugggucugucaca

SEQ ID NO: 168745 - RNA, 19 nt, Artificial Sequence
  Description of Artificial Sequence: Synthetic oligonucleotide
  Antisense strand to SEQ ID NO: 168744
ugugacagacccauuccag

SEQ ID NO: 168746 - RNA, 19 nt, Artificial Sequence
  Description of Artificial Sequence: Synthetic oligonucleotide
  Sense strand starting at position 3087 of SEQ ID NO: 2173
caugguucugaugggcaga

SEQ ID NO: 168747 - RNA, 19 nt, Artificial Sequence
  Description of Artificial Sequence: Synthetic oligonucleotide
  Antisense strand to SEQ ID NO: 168746
ucugcccaucagaaccaug

SEQ ID NO: 168748 - RNA, 19 nt, Artificial Sequence
  Description of Artificial Sequence: Synthetic oligonucleotide
  Sense strand starting at position 3330 of SEQ ID NO: 2173
aggcacaagaaucgagaau

SEQ ID NO: 168749 - RNA, 19 nt, Artificial Sequence
  Description of Artificial Sequence: Synthetic oligonucleotide
  Antisense strand to SEQ ID NO: 168748
auucucgauucuugugccu

SEQ ID NO: 168750 - RNA, 19 nt, Artificial Sequence
  Description of Artificial Sequence: Synthetic oligonucleotide
  Sense strand starting at position 3658 of SEQ ID NO: 2173
gcguguguccacucuacuu

SEQ ID NO: 168751 - RNA, 19 nt, Artificial Sequence
  Description of Artificial Sequence: Synthetic oligonucleotide
  Antisense strand to SEQ ID NO: 168750
aaguagaguggacacacgc

SEQ ID NO: 168752 - RNA, 19 nt, Artificial Sequence
  Description of Artificial Sequence: Synthetic oligonucleotide
  Sense strand starting at position 3660 of SEQ ID NO: 2173
guguguccacucuacuuga

SEQ ID NO: 168753 - RNA, 19 nt, Artificial Sequence
  Description of Artificial Sequence: Synthetic oligonucleotide
  Antisense strand to SEQ ID NO: 168752
ucaaguagaguggacacac

SEQ ID NO: 168754 - RNA, 19 nt, Artificial Sequence
  Description of Artificial Sequence: Synthetic oligonucleotide
  Sense strand starting at position 3726 of SEQ ID NO: 2173
cuguuugcuggaugagcau

SEQ ID NO: 168755 - RNA, 19 nt, Artificial Sequence
  Description of Artificial Sequence: Synthetic oligonucleotide
  Antisense strand to SEQ ID NO: 168754
augcucauccagcaaacag

SEQ ID NO: 168756 - RNA, 19 nt, Artificial Sequence
  Description of Artificial Sequence: Synthetic oligonucleotide
  Sense strand starting at position 3815 of SEQ ID NO: 2173
auggacuuggugugggaau

SEQ ID NO: 168757 - RNA, 19 nt, Artificial Sequence
  Description of Artificial Sequence: Synthetic oligonucleotide
  Antisense strand to SEQ ID NO: 168756
auucccacaccaaguccau

SEQ ID NO: 168758 - RNA, 19 nt, Artificial Sequence
  Description of Artificial Sequence: Synthetic oligonucleotide
  Sense strand starting at position 3817 of SEQ ID NO: 2173
ggacuuggugugggaauua

SEQ ID NO: 168759 - RNA, 19 nt, Artificial Sequence
  Description of Artificial Sequence: Synthetic oligonucleotide
  Antisense strand to SEQ ID NO: 168758
uaauucccacaccaagucc

SEQ ID NO: 168760 - RNA, 19 nt, Artificial Sequence
  Description of Artificial Sequence: Synthetic oligonucleotide
  Sense strand starting at position 3822 of SEQ ID NO: 2173
uggugugggaauuaaguua

SEQ ID NO: 168761 - RNA, 19 nt, Artificial Sequence
  Description of Artificial Sequence: Synthetic oligonucleotide
  Antisense strand to SEQ ID NO: 168760
uaacuuaauucccacacca

SEQ ID NO: 168762 - RNA, 19 nt, Artificial Sequence
  Description of Artificial Sequence: Synthetic oligonucleotide
  Sense strand starting at position 3867 of SEQ ID NO: 2173
cuuggagaaaggugaguuu

SEQ ID NO: 168763 - RNA, 19 nt, Artificial Sequence
  Description of Artificial Sequence: Synthetic oligonucleotide
  Antisense strand to SEQ ID NO: 168762
aaacucaccuuucuccaag

SEQ ID NO: 168764 - RNA, 19 nt, Artificial Sequence
  Description of Artificial Sequence: Synthetic oligonucleotide
  Sense strand starting at position 3926 of SEQ ID NO: 2174
gcaguucucccggcccaua

SEQ ID NO: 168765 - RNA, 19 nt, Artificial Sequence
  Description of Artificial Sequence: Synthetic oligonucleotide
  Antisense strand to SEQ ID NO: 168764
uaugggccgggagaacugc

SEQ ID NO: 168766 - RNA, 19 nt, Artificial Sequence
  Description of Artificial Sequence: Synthetic oligonucleotide
  Sense strand starting at position 3516 of SEQ ID NO: 2174
gcacgugcaugacacaaau

SEQ ID NO: 168767 - RNA, 19 nt, Artificial Sequence
  Description of Artificial Sequence: Synthetic oligonucleotide
  Antisense strand to SEQ ID NO: 168766
auuugugucaugcacgugc

SEQ ID NO: 168768 - RNA, 19 nt, Artificial Sequence
  Description of Artificial Sequence: Synthetic oligonucleotide
  Sense strand starting at position 3325 of SEQ ID NO: 2174
gcgcaugguacacacaaau

SEQ ID NO: 168769 - RNA, 19 nt, Artificial Sequence
  Description of Artificial Sequence: Synthetic oligonucleotide
  Antisense strand to SEQ ID NO: 168768
auuuguguguaccaugcgc

SEQ ID NO: 168770 - RNA, 19 nt, Artificial Sequence
  Description of Artificial Sequence: Synthetic oligonucleotide
  Sense strand starting at position 2766 of SEQ ID NO: 2174
gguagaguuuguuugccag

SEQ ID NO: 168771 - RNA, 19 nt, Artificial Sequence
  Description of Artificial Sequence: Synthetic oligonucleotide
  Antisense strand to SEQ ID NO: 168770
cuggcaaacaaacucuacc

SEQ ID NO: 168772 - RNA, 19 nt, Artificial Sequence
  Description of Artificial Sequence: Synthetic oligonucleotide
  Sense strand starting at position 2622 of SEQ ID NO: 2174
agcagaguuccuugagggu

SEQ ID NO: 168773 - RNA, 19 nt, Artificial Sequence
  Description of Artificial Sequence: Synthetic oligonucleotide
  Antisense strand to SEQ ID NO: 168772
acccucaaggaacucugcu

SEQ ID NO: 168774 - RNA, 19 nt, Artificial Sequence
  Description of Artificial Sequence: Synthetic oligonucleotide
  Sense strand starting at position 2168 of SEQ ID NO: 2174
aaaguuugugcgcgucaga

SEQ ID NO: 168775 - RNA, 19 nt, Artificial Sequence
  Description of Artificial Sequence: Synthetic oligonucleotide
  Antisense strand to SEQ ID NO: 168774
ucugacgcgcacaaacuuu

SEQ ID NO: 168776 - RNA, 19 nt, Artificial Sequence
  Description of Artificial Sequence: Synthetic oligonucleotide
  Sense strand starting at position 2155 of SEQ ID NO: 2174
cuuccugggccugaaaguu

SEQ ID NO: 168777 - RNA, 19 nt, Artificial Sequence
  Description of Artificial Sequence: Synthetic oligonucleotide
  Antisense strand to SEQ ID NO: 168776
aacuuucaggcccaggaag

SEQ ID NO: 168778 - RNA, 19 nt, Artificial Sequence
  Description of Artificial Sequence: Synthetic oligonucleotide
  Sense strand starting at position 1336 of SEQ ID NO: 2174
agaggcaucuccugacaca

SEQ ID NO: 168779 - RNA, 19 nt, Artificial Sequence
  Description of Artificial Sequence: Synthetic oligonucleotide
  Antisense strand to SEQ ID NO: 168778
ugugucaggagaugccucu

SEQ ID NO: 168780 - RNA, 19 nt, Artificial Sequence
  Description of Artificial Sequence: Synthetic oligonucleotide
  Sense strand starting at position 3916 of SEQ ID NO: 2175
gauauaucucaggacguuu

SEQ ID NO: 168781 - RNA, 19 nt, Artificial Sequence
  Description of Artificial Sequence: Synthetic oligonucleotide
  Antisense strand to SEQ ID NO: 168780
aaacguccugagauauauc

SEQ ID NO: 168782 - RNA, 19 nt, Artificial Sequence
  Description of Artificial Sequence: Synthetic oligonucleotide
  Sense strand starting at position 3903 of SEQ ID NO: 2175
aggcaagaauagggauaua

SEQ ID NO: 168783 - RNA, 19 nt, Artificial Sequence
  Description of Artificial Sequence: Synthetic oligonucleotide
  Antisense strand to SEQ ID NO: 168782
uauaucccuauucuugccu

SEQ ID NO: 168784 - RNA, 19 nt, Artificial Sequence
  Description of Artificial Sequence: Synthetic oligonucleotide
  Sense strand starting at position 3840 of SEQ ID NO: 2175
gguugugacucuguaugua

SEQ ID NO: 168785 - RNA, 19 nt, Artificial Sequence
  Description of Artificial Sequence: Synthetic oligonucleotide
  Antisense strand to SEQ ID NO: 168784
uacauacagagucacaacc

SEQ ID NO: 168786 - RNA, 19 nt, Artificial Sequence
  Description of Artificial Sequence: Synthetic oligonucleotide
  Sense strand starting at position 3403 of SEQ ID NO: 2175
gcaaauguaugaucuuagu

SEQ ID NO: 168787 - RNA, 19 nt, Artificial Sequence
  Description of Artificial Sequence: Synthetic oligonucleotide
  Antisense strand to SEQ ID NO: 168786
acuaagaucauacauuugc

SEQ ID NO: 168788 - RNA, 19 nt, Artificial Sequence
  Description of Artificial Sequence: Synthetic oligonucleotide
  Sense strand starting at position 3400 of SEQ ID NO: 2175
gaggcaaauguaugaucuu

SEQ ID NO: 168789 - RNA, 19 nt, Artificial Sequence
  Description of Artificial Sequence: Synthetic oligonucleotide
  Antisense strand to SEQ ID NO: 168788
aagaucauacauuugccuc

SEQ ID NO: 168790 - RNA, 19 nt, Artificial Sequence
  Description of Artificial Sequence: Synthetic oligonucleotide
  Sense strand starting at position 3392 of SEQ ID NO: 2175
gugguauagaggcaaaugu

SEQ ID NO: 168791 - RNA, 19 nt, Artificial Sequence
  Description of Artificial Sequence: Synthetic oligonucleotide
  Antisense strand to SEQ ID NO: 168790
acauuugccucuauaccac

SEQ ID NO: 168792 - RNA, 19 nt, Artificial Sequence
  Description of Artificial Sequence: Synthetic oligonucleotide
  Sense strand starting at position 3384 of SEQ ID NO: 2175
ugggaaaugugguauagag

SEQ ID NO: 168793 - RNA, 19 nt, Artificial Sequence
  Description of Artificial Sequence: Synthetic oligonucleotide
  Antisense strand to SEQ ID NO: 168792
cucuauaccacauuuccca

SEQ ID NO: 168794 - RNA, 19 nt, Artificial Sequence
  Description of Artificial Sequence: Synthetic oligonucleotide
  Sense strand starting at position 3379 of SEQ ID NO: 2175
aggcuugggaaauguggua

SEQ ID NO: 168795 - RNA, 19 nt, Artificial Sequence
  Description of Artificial Sequence: Synthetic oligonucleotide
  Antisense strand to SEQ ID NO: 168794
uaccacauuucccaagccu

SEQ ID NO: 168796 - RNA, 19 nt, Artificial Sequence
  Description of Artificial Sequence: Synthetic oligonucleotide
  Sense strand starting at position 3283 of SEQ ID NO: 2175
uagauuggugccuguuaua

SEQ ID NO: 168797 - RNA, 19 nt, Artificial Sequence
  Description of Artificial Sequence: Synthetic oligonucleotide
  Antisense strand to SEQ ID NO: 168796
uauaacaggcaccaaucua

SEQ ID NO: 168798 - RNA, 19 nt, Artificial Sequence
  Description of Artificial Sequence: Synthetic oligonucleotide
  Sense strand starting at position 3282 of SEQ ID NO: 2175
guagauuggugccuguuau

SEQ ID NO: 168799 - RNA, 19 nt, Artificial Sequence
  Description of Artificial Sequence: Synthetic oligonucleotide
  Antisense strand to SEQ ID NO: 168798
auaacaggcaccaaucuac

SEQ ID NO: 168800 - RNA, 19 nt, Artificial Sequence
  Description of Artificial Sequence: Synthetic oligonucleotide
  Sense strand starting at position 3270 of SEQ ID NO: 2175
ccgcuaauauaaguagauu

SEQ ID NO: 168801 - RNA, 19 nt, Artificial Sequence
  Description of Artificial Sequence: Synthetic oligonucleotide
  Antisense strand to SEQ ID NO: 168800
aaucuacuuauauuagcgg

SEQ ID NO: 168802 - RNA, 19 nt, Artificial Sequence
  Description of Artificial Sequence: Synthetic oligonucleotide
  Sense strand starting at position 3235 of SEQ ID NO: 2175
acaaaugugcgguauuaug

SEQ ID NO: 168803 - RNA, 19 nt, Artificial Sequence
  Description of Artificial Sequence: Synthetic oligonucleotide
  Antisense strand to SEQ ID NO: 168802
cauaauaccgcacauuugu

SEQ ID NO: 168804 - RNA, 19 nt, Artificial Sequence
  Description of Artificial Sequence: Synthetic oligonucleotide
  Sense strand starting at position 3232 of SEQ ID NO: 2175
cucacaaaugugcgguauu

SEQ ID NO: 168805 - RNA, 19 nt, Artificial Sequence
  Description of Artificial Sequence: Synthetic oligonucleotide
  Antisense strand to SEQ ID NO: 168804
aauaccgcacauuugugag

SEQ ID NO: 168806 - RNA, 19 nt, Artificial Sequence
  Description of Artificial Sequence: Synthetic oligonucleotide
  Sense strand starting at position 2792 of SEQ ID NO: 2175
gaggaauucuccuggaaag

SEQ ID NO: 168807 - RNA, 19 nt, Artificial Sequence
  Description of Artificial Sequence: Synthetic oligonucleotide
  Antisense strand to SEQ ID NO: 168806
cuuuccaggagaauuccuc

SEQ ID NO: 168808 - RNA, 19 nt, Artificial Sequence
  Description of Artificial Sequence: Synthetic oligonucleotide
  Sense strand starting at position 2758 of SEQ ID NO: 2175
ggcucaccuguuggacaau

SEQ ID NO: 168809 - RNA, 19 nt, Artificial Sequence
  Description of Artificial Sequence: Synthetic oligonucleotide
  Antisense strand to SEQ ID NO: 168808
auuguccaacaggugagcc

SEQ ID NO: 168810 - RNA, 19 nt, Artificial Sequence
  Description of Artificial Sequence: Synthetic oligonucleotide
  Sense strand starting at position 2724 of SEQ ID NO: 2175
cauuuaagcgcucaguaac

SEQ ID NO: 168811 - RNA, 19 nt, Artificial Sequence
  Description of Artificial Sequence: Synthetic oligonucleotide
  Antisense strand to SEQ ID NO: 168810
guuacugagcgcuuaaaug

SEQ ID NO: 168812 - RNA, 19 nt, Artificial Sequence
  Description of Artificial Sequence: Synthetic oligonucleotide
  Sense strand starting at position 2712 of SEQ ID NO: 2175
ucgaacuaguuacauuuaa

SEQ ID NO: 168813 - RNA, 19 nt, Artificial Sequence
  Description of Artificial Sequence: Synthetic oligonucleotide
  Antisense strand to SEQ ID NO: 168812
uuaaauguaacuaguucga

SEQ ID NO: 168814 - RNA, 19 nt, Artificial Sequence
  Description of Artificial Sequence: Synthetic oligonucleotide
  Sense strand starting at position 2701 of SEQ ID NO: 2175
acggcacaucuucgaacua

SEQ ID NO: 168815 - RNA, 19 nt, Artificial Sequence
  Description of Artificial Sequence: Synthetic oligonucleotide
  Antisense strand to SEQ ID NO: 168814
uaguucgaagaugugccgu

SEQ ID NO: 168816 - RNA, 19 nt, Artificial Sequence
  Description of Artificial Sequence: Synthetic oligonucleotide
  Sense strand starting at position 2553 of SEQ ID NO: 2175
guaagaaauaggugaaguu

SEQ ID NO: 168817 - RNA, 19 nt, Artificial Sequence
  Description of Artificial Sequence: Synthetic oligonucleotide
  Antisense strand to SEQ ID NO: 168816
aacuucaccuauuucuuac

SEQ ID NO: 168818 - RNA, 19 nt, Artificial Sequence
  Description of Artificial Sequence: Synthetic oligonucleotide
  Sense strand starting at position 2473 of SEQ ID NO: 2175
gggucuuauuaauuacuua

SEQ ID NO: 168819 - RNA, 19 nt, Artificial Sequence
  Description of Artificial Sequence: Synthetic oligonucleotide
  Antisense strand to SEQ ID NO: 168818
uaaguaauuaauaagaccc

SEQ ID NO: 168820 - RNA, 19 nt, Artificial Sequence
  Description of Artificial Sequence: Synthetic oligonucleotide
  Sense strand starting at position 2462 of SEQ ID NO: 2175
uaaugucagcugggucuua

SEQ ID NO: 168821 - RNA, 19 nt, Artificial Sequence
  Description of Artificial Sequence: Synthetic oligonucleotide
  Antisense strand to SEQ ID NO: 168820
uaagacccagcugacauua

SEQ ID NO: 168822 - RNA, 19 nt, Artificial Sequence
  Description of Artificial Sequence: Synthetic oligonucleotide
  Sense strand starting at position 2418 of SEQ ID NO: 2175
guagaaccaguucgagaaa

SEQ ID NO: 168823 - RNA, 19 nt, Artificial Sequence
  Description of Artificial Sequence: Synthetic oligonucleotide
  Antisense strand to SEQ ID NO: 168822
uuucucgaacugguucuac

SEQ ID NO: 168824 - RNA, 19 nt, Artificial Sequence
  Description of Artificial Sequence: Synthetic oligonucleotide
  Sense strand starting at position 2382 of SEQ ID NO: 2175
caggccuuggcagaauuaa

SEQ ID NO: 168825 - RNA, 19 nt, Artificial Sequence
  Description of Artificial Sequence: Synthetic oligonucleotide
  Antisense strand to SEQ ID NO: 168824
uuaauucugccaaggccug

SEQ ID NO: 168826 - RNA, 19 nt, Artificial Sequence
  Description of Artificial Sequence: Synthetic oligonucleotide
  Sense strand starting at position 2347 of SEQ ID NO: 2175
cacccaggaucuuaggauu

SEQ ID NO: 168827 - RNA, 19 nt, Artificial Sequence
  Description of Artificial Sequence: Synthetic oligonucleotide
  Antisense strand to SEQ ID NO: 168826
aauccuaagauccugggug

SEQ ID NO: 168828 - RNA, 19 nt, Artificial Sequence
  Description of Artificial Sequence: Synthetic oligonucleotide
  Sense strand starting at position 2315 of SEQ ID NO: 2175
gccaguucuuuacucauca

SEQ ID NO: 168829 - RNA, 19 nt, Artificial Sequence
  Description of Artificial Sequence: Synthetic oligonucleotide
  Antisense strand to SEQ ID NO: 168828
ugaugaguaaagaacuggc

SEQ ID NO: 168830 - RNA, 19 nt, Artificial Sequence
  Description of Artificial Sequence: Synthetic oligonucleotide
  Sense strand starting at position 2312 of SEQ ID NO: 2175
uuagccaguucuuuacuca

SEQ ID NO: 168831 - RNA, 19 nt, Artificial Sequence
  Description of Artificial Sequence: Synthetic oligonucleotide
  Antisense strand to SEQ ID NO: 168830
ugaguaaagaacuggcuaa

SEQ ID NO: 168832 - RNA, 19 nt, Artificial Sequence
  Description of Artificial Sequence: Synthetic oligonucleotide
  Sense strand starting at position 2001 of SEQ ID NO: 2175
ugguuacaccagugugaac

SEQ ID NO: 168833 - RNA, 19 nt, Artificial Sequence
  Description of Artificial Sequence: Synthetic oligonucleotide
  Antisense strand to SEQ ID NO: 168832
guucacacugguguaacca

SEQ ID NO: 168834 - RNA, 19 nt, Artificial Sequence
  Description of Artificial Sequence: Synthetic oligonucleotide
  Sense strand starting at position 1988 of SEQ ID NO: 2175
gccggaugcaugcugguua

SEQ ID NO: 168835 - RNA, 19 nt, Artificial Sequence
  Description of Artificial Sequence: Synthetic oligonucleotide
  Antisense strand to SEQ ID NO: 168834
uaaccagcaugcauccggc

SEQ ID NO: 168836 - RNA, 19 nt, Artificial Sequence
  Description of Artificial Sequence: Synthetic oligonucleotide
  Sense strand starting at position 1710 of SEQ ID NO: 2175
gucauauggccauaaacaa

SEQ ID NO: 168837 - RNA, 19 nt, Artificial Sequence
  Description of Artificial Sequence: Synthetic oligonucleotide
  Antisense strand to SEQ ID NO: 168836
uuguuuauggccauaugac

SEQ ID NO: 168838 - RNA, 19 nt, Artificial Sequence
  Description of Artificial Sequence: Synthetic oligonucleotide
  Sense strand starting at position 1708 of SEQ ID NO: 2175
aggucauauggccauaaac

SEQ ID NO: 168839 - RNA, 19 nt, Artificial Sequence
  Description of Artificial Sequence: Synthetic oligonucleotide
  Antisense strand to SEQ ID NO: 168838
guuuauggccauaugaccu

SEQ ID NO: 168840 - RNA, 19 nt, Artificial Sequence
  Description of Artificial Sequence: Synthetic oligonucleotide
  Sense strand starting at position 1707 of SEQ ID NO: 2175
aaggucauauggccauaaa

SEQ ID NO: 168841 - RNA, 19 nt, Artificial Sequence
  Description of Artificial Sequence: Synthetic oligonucleotide
  Antisense strand to SEQ ID NO: 168840
uuuauggccauaugaccuu

SEQ ID NO: 168842 - RNA, 19 nt, Artificial Sequence
  Description of Artificial Sequence: Synthetic oligonucleotide
  Sense strand starting at position 1631 of SEQ ID NO: 2175
auagcuuaccgcuacugaa

SEQ ID NO: 168843 - RNA, 19 nt, Artificial Sequence
  Description of Artificial Sequence: Synthetic oligonucleotide
  Antisense strand to SEQ ID NO: 168842
uucaguagcgguaagcuau

SEQ ID NO: 168844 - RNA, 19 nt, Artificial Sequence
  Description of Artificial Sequence: Synthetic oligonucleotide
  Sense strand starting at position 1391 of SEQ ID NO: 2175
ucacgaucuccuggacaca

SEQ ID NO: 168845 - RNA, 19 nt, Artificial Sequence
  Description of Artificial Sequence: Synthetic oligonucleotide
  Antisense strand to SEQ ID NO: 168844
uguguccaggagaucguga

SEQ ID NO: 168846 - RNA, 19 nt, Artificial Sequence
  Description of Artificial Sequence: Synthetic oligonucleotide
  Sense strand starting at position 1121 of SEQ ID NO: 2175
cacacucggccauguauuu

SEQ ID NO: 168847 - RNA, 19 nt, Artificial Sequence
  Description of Artificial Sequence: Synthetic oligonucleotide
  Antisense strand to SEQ ID NO: 168846
aaauacauggccgagugug

SEQ ID NO: 168848 - RNA, 19 nt, Artificial Sequence
  Description of Artificial Sequence: Synthetic oligonucleotide
  Sense strand starting at position 949 of SEQ ID NO: 2175
ucuaguuucccacguaaug

SEQ ID NO: 168849 - RNA, 19 nt, Artificial Sequence
  Description of Artificial Sequence: Synthetic oligonucleotide
  Antisense strand to SEQ ID NO: 168848
cauuacgugggaaacuaga

SEQ ID NO: 168850 - RNA, 19 nt, Artificial Sequence
  Description of Artificial Sequence: Synthetic oligonucleotide
  Sense strand starting at position 946 of SEQ ID NO: 2175
gucucuaguuucccacgua

SEQ ID NO: 168851 - RNA, 19 nt, Artificial Sequence
  Description of Artificial Sequence: Synthetic oligonucleotide
  Antisense strand to SEQ ID NO: 168850
uacgugggaaacuagagac

SEQ ID NO: 168852 - RNA, 19 nt, Artificial Sequence
  Description of Artificial Sequence: Synthetic oligonucleotide
  Sense strand starting at position 785 of SEQ ID NO: 2175
gccaaauucuagcuugucu

SEQ ID NO: 168853 - RNA, 19 nt, Artificial Sequence
  Description of Artificial Sequence: Synthetic oligonucleotide
  Antisense strand to SEQ ID NO: 168852
agacaagcuagaauuuggc

SEQ ID NO: 168854 - RNA, 19 nt, Artificial Sequence
  Description of Artificial Sequence: Synthetic oligonucleotide
  Sense strand starting at position 237 of SEQ ID NO: 2175
ccuccuaacuagucuugua

SEQ ID NO: 168855 - RNA, 19 nt, Artificial Sequence
  Description of Artificial Sequence: Synthetic oligonucleotide
  Antisense strand to SEQ ID NO: 168854
uacaagacuaguuaggagg

SEQ ID NO: 168856 - RNA, 19 nt, Artificial Sequence
  Description of Artificial Sequence: Synthetic oligonucleotide
  Sense strand starting at position 181 of SEQ ID NO: 2175
accugcuaucaucauagua

SEQ ID NO: 168857 - RNA, 19 nt, Artificial Sequence
  Description of Artificial Sequence: Synthetic oligonucleotide
  Antisense strand to SEQ ID NO: 168856
uacuaugaugauagcaggu

SEQ ID NO: 168858 - RNA, 19 nt, Artificial Sequence
  Description of Artificial Sequence: Synthetic oligonucleotide
  Sense strand starting at position 5 of SEQ ID NO: 2175
uuggucuucccuuaucuca

SEQ ID NO: 168859 - RNA, 19 nt, Artificial Sequence
  Description of Artificial Sequence: Synthetic oligonucleotide
  Antisense strand to SEQ ID NO: 168858
ugagauaagggaagaccaa

SEQ ID NO: 168860 - RNA, 19 nt, Artificial Sequence
  Description of Artificial Sequence: Synthetic oligonucleotide
  Sense strand starting at position 3915 of SEQ ID NO: 2176
ugcugugugccuguaauca

SEQ ID NO: 168861 - RNA, 19 nt, Artificial Sequence
  Description of Artificial Sequence: Synthetic oligonucleotide
  Antisense strand to SEQ ID NO: 168860
ugauuacaggcacacagca

SEQ ID NO: 168862 - RNA, 19 nt, Artificial Sequence
  Description of Artificial Sequence: Synthetic oligonucleotide
  Sense strand starting at position 3650 of SEQ ID NO: 2176
ggacguugaguugggagaa

SEQ ID NO: 168863 - RNA, 19 nt, Artificial Sequence
  Description of Artificial Sequence: Synthetic oligonucleotide
  Antisense strand to SEQ ID NO: 168862
uucucccaacucaacgucc

SEQ ID NO: 168864 - RNA, 19 nt, Artificial Sequence
  Description of Artificial Sequence: Synthetic oligonucleotide
  Sense strand starting at position 3415 of SEQ ID NO: 2176
cuuugaagcccaugaauag

SEQ ID NO: 168865 - RNA, 19 nt, Artificial Sequence
  Description of Artificial Sequence: Synthetic oligonucleotide
  Antisense strand to SEQ ID NO: 168864
cuauucaugggcuucaaag

SEQ ID NO: 168866 - RNA, 19 nt, Artificial Sequence
  Description of Artificial Sequence: Synthetic oligonucleotide
  Sense strand starting at position 3413 of SEQ ID NO: 2176
uccuuugaagcccaugaau

SEQ ID NO: 168867 - RNA, 19 nt, Artificial Sequence
  Description of Artificial Sequence: Synthetic oligonucleotide
  Antisense strand to SEQ ID NO: 168866
auucaugggcuucaaagga

SEQ ID NO: 168868 - RNA, 19 nt, Artificial Sequence
  Description of Artificial Sequence: Synthetic oligonucleotide
  Sense strand starting at position 3406 of SEQ ID NO: 2176
ugauuaauccuuugaagcc

SEQ ID NO: 168869 - RNA, 19 nt, Artificial Sequence
  Description of Artificial Sequence: Synthetic oligonucleotide
  Antisense strand to SEQ ID NO: 168868
ggcuucaaaggauuaauca

SEQ ID NO: 168870 - RNA, 19 nt, Artificial Sequence
  Description of Artificial Sequence: Synthetic oligonucleotide
  Sense strand starting at position 3296 of SEQ ID NO: 2176
uagauauuacagugauugu

SEQ ID NO: 168871 - RNA, 19 nt, Artificial Sequence
  Description of Artificial Sequence: Synthetic oligonucleotide
  Antisense strand to SEQ ID NO: 168870
acaaucacuguaauaucua

SEQ ID NO: 168872 - RNA, 19 nt, Artificial Sequence
  Description of Artificial Sequence: Synthetic oligonucleotide
  Sense strand starting at position 3193 of SEQ ID NO: 2176
gugaccuucuaauugucau

SEQ ID NO: 168873 - RNA, 19 nt, Artificial Sequence
  Description of Artificial Sequence: Synthetic oligonucleotide
  Antisense strand to SEQ ID NO: 168872
augacaauuagaaggucac

SEQ ID NO: 168874 - RNA, 19 nt, Artificial Sequence
  Description of Artificial Sequence: Synthetic oligonucleotide
  Sense strand starting at position 3089 of SEQ ID NO: 2176
agagcaguuuggguagagu

SEQ ID NO: 168875 - RNA, 19 nt, Artificial Sequence
  Description of Artificial Sequence: Synthetic oligonucleotide
  Antisense strand to SEQ ID NO: 168874
acucuacccaaacugcucu

SEQ ID NO: 168876 - RNA, 19 nt, Artificial Sequence
  Description of Artificial Sequence: Synthetic oligonucleotide
  Sense strand starting at position 2973 of SEQ ID NO: 2176
gccagccucgcgucaauua

SEQ ID NO: 168877 - RNA, 19 nt, Artificial Sequence
  Description of Artificial Sequence: Synthetic oligonucleotide
  Antisense strand to SEQ ID NO: 168876
uaauugacgcgaggcuggc

SEQ ID NO: 168878 - RNA, 19 nt, Artificial Sequence
  Description of Artificial Sequence: Synthetic oligonucleotide
  Sense strand starting at position 2937 of SEQ ID NO: 2176
ggauuugaguaacaacucu

SEQ ID NO: 168879 - RNA, 19 nt, Artificial Sequence
  Description of Artificial Sequence: Synthetic oligonucleotide
  Antisense strand to SEQ ID NO: 168878
agaguuguuacucaaaucc

SEQ ID NO: 168880 - RNA, 19 nt, Artificial Sequence
  Description of Artificial Sequence: Synthetic oligonucleotide
  Sense strand starting at position 2635 of SEQ ID NO: 2176
cccauuauuccacagguca

SEQ ID NO: 168881 - RNA, 19 nt, Artificial Sequence
  Description of Artificial Sequence: Synthetic oligonucleotide
  Antisense strand to SEQ ID NO: 168880
ugaccuguggaauaauggg

SEQ ID NO: 168882 - RNA, 19 nt, Artificial Sequence
  Description of Artificial Sequence: Synthetic oligonucleotide
  Sense strand starting at position 2590 of SEQ ID NO: 2176
gguccugaauucuucuaag

SEQ ID NO: 168883 - RNA, 19 nt, Artificial Sequence
  Description of Artificial Sequence: Synthetic oligonucleotide
  Antisense strand to SEQ ID NO: 168882
cuuagaagaauucaggacc

SEQ ID NO: 168884 - RNA, 19 nt, Artificial Sequence
  Description of Artificial Sequence: Synthetic oligonucleotide
  Sense strand starting at position 2417 of SEQ ID NO: 2176
guuuacuccuaucuugauu

SEQ ID NO: 168885 - RNA, 19 nt, Artificial Sequence
  Description of Artificial Sequence: Synthetic oligonucleotide
  Antisense strand to SEQ ID NO: 168884
aaucaagauaggaguaaac

SEQ ID NO: 168886 - RNA, 19 nt, Artificial Sequence
  Description of Artificial Sequence: Synthetic oligonucleotide
  Sense strand starting at position 2342 of SEQ ID NO: 2176
gcaacuauccuagacaugu

SEQ ID NO: 168887 - RNA, 19 nt, Artificial Sequence
  Description of Artificial Sequence: Synthetic oligonucleotide
  Antisense strand to SEQ ID NO: 168886
acaugucuaggauaguugc

SEQ ID NO: 168888 - RNA, 19 nt, Artificial Sequence
  Description of Artificial Sequence: Synthetic oligonucleotide
  Sense strand starting at position 2282 of SEQ ID NO: 2176
cuaguuaaagcauaaggca

SEQ ID NO: 168889 - RNA, 19 nt, Artificial Sequence
  Description of Artificial Sequence: Synthetic oligonucleotide
  Antisense strand to SEQ ID NO: 168888
ugccuuaugcuuuaacuag

SEQ ID NO: 168890 - RNA, 19 nt, Artificial Sequence
  Description of Artificial Sequence: Synthetic oligonucleotide
  Sense strand starting at position 2125 of SEQ ID NO: 2176
uguuccaguuuacuagaua

SEQ ID NO: 168891 - RNA, 19 nt, Artificial Sequence
  Description of Artificial Sequence: Synthetic oligonucleotide
  Antisense strand to SEQ ID NO: 168890
uaucuaguaaacuggaaca

SEQ ID NO: 168892 - RNA, 19 nt, Artificial Sequence
  Description of Artificial Sequence: Synthetic oligonucleotide
  Sense strand starting at position 2122 of SEQ ID NO: 2176
gcguguuccaguuuacuag

SEQ ID NO: 168893 - RNA, 19 nt, Artificial Sequence
  Description of Artificial Sequence: Synthetic oligonucleotide
  Antisense strand to SEQ ID NO: 168892
cuaguaaacuggaacacgc

SEQ ID NO: 168894 - RNA, 19 nt, Artificial Sequence
  Description of Artificial Sequence: Synthetic oligonucleotide
  Sense strand starting at position 2072 of SEQ ID NO: 2176
gcgauuuccgagugcugaa

SEQ ID NO: 168895 - RNA, 19 nt, Artificial Sequence
  Description of Artificial Sequence: Synthetic oligonucleotide
  Antisense strand to SEQ ID NO: 168894
uucagcacucggaaaucgc

SEQ ID NO: 168896 - RNA, 19 nt, Artificial Sequence
  Description of Artificial Sequence: Synthetic oligonucleotide
  Sense strand starting at position 2008 of SEQ ID NO: 2176
gacaguauuggaggccaga

SEQ ID NO: 168897 - RNA, 19 nt, Artificial Sequence
  Description of Artificial Sequence: Synthetic oligonucleotide
  Antisense strand to SEQ ID NO: 168896
ucuggccuccaauacuguc

SEQ ID NO: 168898 - RNA, 19 nt, Artificial Sequence
  Description of Artificial Sequence: Synthetic oligonucleotide
  Sense strand starting at position 1998 of SEQ ID NO: 2176
gaaugucagcgacaguauu

SEQ ID NO: 168899 - RNA, 19 nt, Artificial Sequence
  Description of Artificial Sequence: Synthetic oligonucleotide
  Antisense strand to SEQ ID NO: 168898
aauacugucgcugacauuc

SEQ ID NO: 168900 - RNA, 19 nt, Artificial Sequence
  Description of Artificial Sequence: Synthetic oligonucleotide
  Sense strand starting at position 1996 of SEQ ID NO: 2176
gagaaugucagcgacagua

SEQ ID NO: 168901 - RNA, 19 nt, Artificial Sequence
  Description of Artificial Sequence: Synthetic oligonucleotide
  Antisense strand to SEQ ID NO: 168900
uacugucgcugacauucuc

SEQ ID NO: 168902 - RNA, 19 nt, Artificial Sequence
  Description of Artificial Sequence: Synthetic oligonucleotide
  Sense strand starting at position 1754 of SEQ ID NO: 2176
cugggaagauuccaggaaa

SEQ ID NO: 168903 - RNA, 19 nt, Artificial Sequence
  Description of Artificial Sequence: Synthetic oligonucleotide
  Antisense strand to SEQ ID NO: 168902
uuuccuggaaucuucccag

SEQ ID NO: 168904 - RNA, 19 nt, Artificial Sequence
  Description of Artificial Sequence: Synthetic oligonucleotide
  Sense strand starting at position 1745 of SEQ ID NO: 2176
ucuggcaaucugggaagau

SEQ ID NO: 168905 - RNA, 19 nt, Artificial Sequence
  Description of Artificial Sequence: Synthetic oligonucleotide
  Antisense strand to SEQ ID NO: 168904
aucuucccagauugccaga

SEQ ID NO: 168906 - RNA, 19 nt, Artificial Sequence
  Description of Artificial Sequence: Synthetic oligonucleotide
  Sense strand starting at position 1605 of SEQ ID NO: 2176
augccaauucucugagaga

SEQ ID NO: 168907 - RNA, 19 nt, Artificial Sequence
  Description of Artificial Sequence: Synthetic oligonucleotide
  Antisense strand to SEQ ID NO: 168906
ucucucagagaauuggcau

SEQ ID NO: 168908 - RNA, 19 nt, Artificial Sequence
  Description of Artificial Sequence: Synthetic oligonucleotide
  Sense strand starting at position 1603 of SEQ ID NO: 2176
acaugccaauucucugaga

SEQ ID NO: 168909 - RNA, 19 nt, Artificial Sequence
  Description of Artificial Sequence: Synthetic oligonucleotide
  Antisense strand to SEQ ID NO: 168908
ucucagagaauuggcaugu

SEQ ID NO: 168910 - RNA, 19 nt, Artificial Sequence
  Description of Artificial Sequence: Synthetic oligonucleotide
  Sense strand starting at position 1507 of SEQ ID NO: 2176
aauguuaacugauucggaa

SEQ ID NO: 168911 - RNA, 19 nt, Artificial Sequence
  Description of Artificial Sequence: Synthetic oligonucleotide
  Antisense strand to SEQ ID NO: 168910
uuccgaaucaguuaacauu

SEQ ID NO: 168912 - RNA, 19 nt, Artificial Sequence
  Description of Artificial Sequence: Synthetic oligonucleotide
  Sense strand starting at position 1497 of SEQ ID NO: 2176
ugucaucaccaauguuaac

SEQ ID NO: 168913 - RNA, 19 nt, Artificial Sequence
  Description of Artificial Sequence: Synthetic oligonucleotide
  Antisense strand to SEQ ID NO: 168912
guuaacauuggugaugaca

SEQ ID NO: 168914 - RNA, 19 nt, Artificial Sequence
  Description of Artificial Sequence: Synthetic oligonucleotide
  Sense strand starting at position 1494 of SEQ ID NO: 2176
cucugucaucaccaauguu

SEQ ID NO: 168915 - RNA, 19 nt, Artificial Sequence
  Description of Artificial Sequence: Synthetic oligonucleotide
  Antisense strand to SEQ ID NO: 168914
aacauuggugaugacagag

SEQ ID NO: 168916 - RNA, 19 nt, Artificial Sequence
  Description of Artificial Sequence: Synthetic oligonucleotide
  Sense strand starting at position 1486 of SEQ ID NO: 2176
cguuauuucucugucauca

SEQ ID NO: 168917 - RNA, 19 nt, Artificial Sequence
  Description of Artificial Sequence: Synthetic oligonucleotide
  Antisense strand to SEQ ID NO: 168916
ugaugacagagaaauaacg

SEQ ID NO: 168918 - RNA, 19 nt, Artificial Sequence
  Description of Artificial Sequence: Synthetic oligonucleotide
  Sense strand starting at position 1485 of SEQ ID NO: 2176
acguuauuucucugucauc

SEQ ID NO: 168919 - RNA, 19 nt, Artificial Sequence
  Description of Artificial Sequence: Synthetic oligonucleotide
  Antisense strand to SEQ ID NO: 168918
gaugacagagaaauaacgu

SEQ ID NO: 168920 - RNA, 19 nt, Artificial Sequence
  Description of Artificial Sequence: Synthetic oligonucleotide
  Sense strand starting at position 1062 of SEQ ID NO: 2176
ugaggauaaggcugucaca

SEQ ID NO: 168921 - RNA, 19 nt, Artificial Sequence
  Description of Artificial Sequence: Synthetic oligonucleotide
  Antisense strand to SEQ ID NO: 168920
ugugacagccuuauccuca

SEQ ID NO: 168922 - RNA, 19 nt, Artificial Sequence
  Description of Artificial Sequence: Synthetic oligonucleotide
  Sense strand starting at position 1008 of SEQ ID NO: 2176
ucucuaacaguuuggcaau

SEQ ID NO: 168923 - RNA, 19 nt, Artificial Sequence
  Description of Artificial Sequence: Synthetic oligonucleotide
  Antisense strand to SEQ ID NO: 168922
auugccaaacuguuagaga

SEQ ID NO: 168924 - RNA, 19 nt, Artificial Sequence
  Description of Artificial Sequence: Synthetic oligonucleotide
  Sense strand starting at position 849 of SEQ ID NO: 2176
ugcuguuuacaacaguaua

SEQ ID NO: 168925 - RNA, 19 nt, Artificial Sequence
  Description of Artificial Sequence: Synthetic oligonucleotide
  Antisense strand to SEQ ID NO: 168924
uauacuguuguaaacagca

SEQ ID NO: 168926 - RNA, 19 nt, Artificial Sequence
  Description of Artificial Sequence: Synthetic oligonucleotide
  Sense strand starting at position 844 of SEQ ID NO: 2176
agauaugcuguuuacaaca

SEQ ID NO: 168927 - RNA, 19 nt, Artificial Sequence
  Description of Artificial Sequence: Synthetic oligonucleotide
  Antisense strand to SEQ ID NO: 168926
uguuguaaacagcauaucu

SEQ ID NO: 168928 - RNA, 19 nt, Artificial Sequence
  Description of Artificial Sequence: Synthetic oligonucleotide
  Sense strand starting at position 843 of SEQ ID NO: 2176
gagauaugcuguuuacaac

SEQ ID NO: 168929 - RNA, 19 nt, Artificial Sequence
  Description of Artificial Sequence: Synthetic oligonucleotide
  Antisense strand to SEQ ID NO: 168928
guuguaaacagcauaucuc

SEQ ID NO: 168930 - RNA, 19 nt, Artificial Sequence
  Description of Artificial Sequence: Synthetic oligonucleotide
  Sense strand starting at position 692 of SEQ ID NO: 2176
gggagauaugcuugaaccu

SEQ ID NO: 168931 - RNA, 19 nt, Artificial Sequence
  Description of Artificial Sequence: Synthetic oligonucleotide
  Antisense strand to SEQ ID NO: 168930
agguucaagcauaucuccc

SEQ ID NO: 168932 - RNA, 19 nt, Artificial Sequence
  Description of Artificial Sequence: Synthetic oligonucleotide
  Sense strand starting at position 446 of SEQ ID NO: 2176
agugacaaugaauguaaau

SEQ ID NO: 168933 - RNA, 19 nt, Artificial Sequence
  Description of Artificial Sequence: Synthetic oligonucleotide
  Antisense strand to SEQ ID NO: 168932
auuuacauucauugucacu

SEQ ID NO: 168934 - RNA, 19 nt, Artificial Sequence
  Description of Artificial Sequence: Synthetic oligonucleotide
  Sense strand starting at position 403 of SEQ ID NO: 2176
cagggaugauaccaaagau

SEQ ID NO: 168935 - RNA, 19 nt, Artificial Sequence
  Description of Artificial Sequence: Synthetic oligonucleotide
  Antisense strand to SEQ ID NO: 168934
aucuuugguaucaucccug

SEQ ID NO: 168936 - RNA, 19 nt, Artificial Sequence
  Description of Artificial Sequence: Synthetic oligonucleotide
  Sense strand starting at position 160 of SEQ ID NO: 2176
auguguaguccuuggagga

SEQ ID NO: 168937 - RNA, 19 nt, Artificial Sequence
  Description of Artificial Sequence: Synthetic oligonucleotide
  Antisense strand to SEQ ID NO: 168936
uccuccaaggacuacacau

SEQ ID NO: 168938 - RNA, 19 nt, Artificial Sequence
  Description of Artificial Sequence: Synthetic oligonucleotide
  Sense strand starting at position 153 of SEQ ID NO: 2176
aggugaaauguguaguccu

SEQ ID NO: 168939 - RNA, 19 nt, Artificial Sequence
  Description of Artificial Sequence: Synthetic oligonucleotide
  Antisense strand to SEQ ID NO: 168938
aggacuacacauuucaccu

SEQ ID NO: 168940 - RNA, 19 nt, Artificial Sequence
  Description of Artificial Sequence: Synthetic oligonucleotide
  Sense strand starting at position 540 of SEQ ID NO: 2177
gacuguguccacugaacuu

SEQ ID NO: 168941 - RNA, 19 nt, Artificial Sequence
  Description of Artificial Sequence: Synthetic oligonucleotide
  Antisense strand to SEQ ID NO: 168940
aaguucaguggacacaguc

SEQ ID NO: 168942 - RNA, 19 nt, Artificial Sequence
  Description of Artificial Sequence: Synthetic oligonucleotide
  Sense strand starting at position 683 of SEQ ID NO: 2177
auccaaacuucugggaaac

SEQ ID NO: 168943 - RNA, 19 nt, Artificial Sequence
  Description of Artificial Sequence: Synthetic oligonucleotide
  Antisense strand to SEQ ID NO: 168942
guuucccagaaguuuggau

SEQ ID NO: 168944 - RNA, 19 nt, Artificial Sequence
  Description of Artificial Sequence: Synthetic oligonucleotide
  Sense strand starting at position 684 of SEQ ID NO: 2177
uccaaacuucugggaaacu

SEQ ID NO: 168945 - RNA, 19 nt, Artificial Sequence
  Description of Artificial Sequence: Synthetic oligonucleotide
  Antisense strand to SEQ ID NO: 168944
aguuucccagaaguuugga

SEQ ID NO: 168946 - RNA, 19 nt, Artificial Sequence
  Description of Artificial Sequence: Synthetic oligonucleotide
  Sense strand starting at position 1016 of SEQ ID NO: 2177
gucugaucugcgccuuuac

SEQ ID NO: 168947 - RNA, 19 nt, Artificial Sequence
  Description of Artificial Sequence: Synthetic oligonucleotide
  Antisense strand to SEQ ID NO: 168946
guaaaggcgcagaucagac

SEQ ID NO: 168948 - RNA, 19 nt, Artificial Sequence
  Description of Artificial Sequence: Synthetic oligonucleotide
  Sense strand starting at position 1070 of SEQ ID NO: 2177
uccagaucugcuggucuca

SEQ ID NO: 168949 - RNA, 19 nt, Artificial Sequence
  Description of Artificial Sequence: Synthetic oligonucleotide
  Antisense strand to SEQ ID NO: 168948
ugagaccagcagaucugga

SEQ ID NO: 168950 - RNA, 19 nt, Artificial Sequence
  Description of Artificial Sequence: Synthetic oligonucleotide
  Sense strand starting at position 1072 of SEQ ID NO: 2177
cagaucugcuggucucaua

SEQ ID NO: 168951 - RNA, 19 nt, Artificial Sequence
  Description of Artificial Sequence: Synthetic oligonucleotide
  Antisense strand to SEQ ID NO: 168950
uaugagaccagcagaucug

SEQ ID NO: 168952 - RNA, 19 nt, Artificial Sequence
  Description of Artificial Sequence: Synthetic oligonucleotide
  Sense strand starting at position 1100 of SEQ ID NO: 2177
aguccagagucacuuuagu

SEQ ID NO: 168953 - RNA, 19 nt, Artificial Sequence
  Description of Artificial Sequence: Synthetic oligonucleotide
  Antisense strand to SEQ ID NO: 168952
acuaaagugacucuggacu

SEQ ID NO: 168954 - RNA, 19 nt, Artificial Sequence
  Description of Artificial Sequence: Synthetic oligonucleotide
  Sense strand starting at position 1106 of SEQ ID NO: 2177
gagucacuuuaguugcaga

SEQ ID NO: 168955 - RNA, 19 nt, Artificial Sequence
  Description of Artificial Sequence: Synthetic oligonucleotide
  Antisense strand to SEQ ID NO: 168954
ucugcaacuaaagugacuc

SEQ ID NO: 168956 - RNA, 19 nt, Artificial Sequence
  Description of Artificial Sequence: Synthetic oligonucleotide
  Sense strand starting at position 1116 of SEQ ID NO: 2177
aguugcagaucuggaauuu

SEQ ID NO: 168957 - RNA, 19 nt, Artificial Sequence
  Description of Artificial Sequence: Synthetic oligonucleotide
  Antisense strand to SEQ ID NO: 168956
aaauuccagaucugcaacu

SEQ ID NO: 168958 - RNA, 19 nt, Artificial Sequence
  Description of Artificial Sequence: Synthetic oligonucleotide
  Sense strand starting at position 1210 of SEQ ID NO: 2177
gcuuuagaauauucugguu

SEQ ID NO: 168959 - RNA, 19 nt, Artificial Sequence
  Description of Artificial Sequence: Synthetic oligonucleotide
  Antisense strand to SEQ ID NO: 168958
aaccagaauauucuaaagc

SEQ ID NO: 168960 - RNA, 19 nt, Artificial Sequence
  Description of Artificial Sequence: Synthetic oligonucleotide
  Sense strand starting at position 1280 of SEQ ID NO: 2177
agcaaaucuggguaaggca

SEQ ID NO: 168961 - RNA, 19 nt, Artificial Sequence
  Description of Artificial Sequence: Synthetic oligonucleotide
  Antisense strand to SEQ ID NO: 168960
ugccuuacccagauuugcu

SEQ ID NO: 168962 - RNA, 19 nt, Artificial Sequence
  Description of Artificial Sequence: Synthetic oligonucleotide
  Sense strand starting at position 1742 of SEQ ID NO: 2177
auggauuucuaaggaauua

SEQ ID NO: 168963 - RNA, 19 nt, Artificial Sequence
  Description of Artificial Sequence: Synthetic oligonucleotide
  Antisense strand to SEQ ID NO: 168962
uaauuccuuagaaauccau

SEQ ID NO: 168964 - RNA, 19 nt, Artificial Sequence
  Description of Artificial Sequence: Synthetic oligonucleotide
  Sense strand starting at position 2074 of SEQ ID NO: 2177
gucuccaaaccugaaaguu

SEQ ID NO: 168965 - RNA, 19 nt, Artificial Sequence
  Description of Artificial Sequence: Synthetic oligonucleotide
  Antisense strand to SEQ ID NO: 168964
aacuuucagguuuggagac

SEQ ID NO: 168966 - RNA, 19 nt, Artificial Sequence
  Description of Artificial Sequence: Synthetic oligonucleotide
  Sense strand starting at position 2114 of SEQ ID NO: 2177
uguuaagauuucuuguugu

SEQ ID NO: 168967 - RNA, 19 nt, Artificial Sequence
  Description of Artificial Sequence: Synthetic oligonucleotide
  Antisense strand to SEQ ID NO: 168966
acaacaagaaaucuuaaca

SEQ ID NO: 168968 - RNA, 19 nt, Artificial Sequence
  Description of Artificial Sequence: Synthetic oligonucleotide
  Sense strand starting at position 2199 of SEQ ID NO: 2177
cucugaaacgccgaauucu

SEQ ID NO: 168969 - RNA, 19 nt, Artificial Sequence
  Description of Artificial Sequence: Synthetic oligonucleotide
  Antisense strand to SEQ ID NO: 168968
agaauucggcguuucagag

SEQ ID NO: 168970 - RNA, 19 nt, Artificial Sequence
  Description of Artificial Sequence: Synthetic oligonucleotide
  Sense strand starting at position 2240 of SEQ ID NO: 2177
agggaaaucuagucuuuau

SEQ ID NO: 168971 - RNA, 19 nt, Artificial Sequence
  Description of Artificial Sequence: Synthetic oligonucleotide
  Antisense strand to SEQ ID NO: 168970
auaaagacuagauuucccu

SEQ ID NO: 168972 - RNA, 19 nt, Artificial Sequence
  Description of Artificial Sequence: Synthetic oligonucleotide
  Sense strand starting at position 2398 of SEQ ID NO: 2177
gcuagcaucccaggcgaau

SEQ ID NO: 168973 - RNA, 19 nt, Artificial Sequence
  Description of Artificial Sequence: Synthetic oligonucleotide
  Antisense strand to SEQ ID NO: 168972
auucgccugggaugcuagc

SEQ ID NO: 168974 - RNA, 19 nt, Artificial Sequence
  Description of Artificial Sequence: Synthetic oligonucleotide
  Sense strand starting at position 2440 of SEQ ID NO: 2177
accggaugagugugauuca

SEQ ID NO: 168975 - RNA, 19 nt, Artificial Sequence
  Description of Artificial Sequence: Synthetic oligonucleotide
  Antisense strand to SEQ ID NO: 168974
ugaaucacacucauccggu

SEQ ID NO: 168976 - RNA, 19 nt, Artificial Sequence
  Description of Artificial Sequence: Synthetic oligonucleotide
  Sense strand starting at position 2647 of SEQ ID NO: 2177
aggagucgucgcugaaagu

SEQ ID NO: 168977 - RNA, 19 nt, Artificial Sequence
  Description of Artificial Sequence: Synthetic oligonucleotide
  Antisense strand to SEQ ID NO: 168976
acuuucagcgacgacuccu

SEQ ID NO: 168978 - RNA, 19 nt, Artificial Sequence
  Description of Artificial Sequence: Synthetic oligonucleotide
  Sense strand starting at position 2648 of SEQ ID NO: 2177
ggagucgucgcugaaaguc

SEQ ID NO: 168979 - RNA, 19 nt, Artificial Sequence
  Description of Artificial Sequence: Synthetic oligonucleotide
  Antisense strand to SEQ ID NO: 168978
gacuuucagcgacgacucc

SEQ ID NO: 168980 - RNA, 19 nt, Artificial Sequence
  Description of Artificial Sequence: Synthetic oligonucleotide
  Sense strand starting at position 2658 of SEQ ID NO: 2177
cugaaagucagcgcgcauu

SEQ ID NO: 168981 - RNA, 19 nt, Artificial Sequence
  Description of Artificial Sequence: Synthetic oligonucleotide
  Antisense strand to SEQ ID NO: 168980
aaugcgcgcugacuuucag

SEQ ID NO: 168982 - RNA, 19 nt, Artificial Sequence
  Description of Artificial Sequence: Synthetic oligonucleotide
  Sense strand starting at position 3016 of SEQ ID NO: 2177
gaggacuuagccugggcaa

SEQ ID NO: 168983 - RNA, 19 nt, Artificial Sequence
  Description of Artificial Sequence: Synthetic oligonucleotide
  Antisense strand to SEQ ID NO: 168982
uugcccaggcuaaguccuc

SEQ ID NO: 168984 - RNA, 19 nt, Artificial Sequence
  Description of Artificial Sequence: Synthetic oligonucleotide
  Sense strand starting at position 3205 of SEQ ID NO: 2177
gugagaaccugucuucuca

SEQ ID NO: 168985 - RNA, 19 nt, Artificial Sequence
  Description of Artificial Sequence: Synthetic oligonucleotide
  Antisense strand to SEQ ID NO: 168984
ugagaagacagguucucac

SEQ ID NO: 168986 - RNA, 19 nt, Artificial Sequence
  Description of Artificial Sequence: Synthetic oligonucleotide
  Sense strand starting at position 3265 of SEQ ID NO: 2177
uuugguuaucuaggaacau

SEQ ID NO: 168987 - RNA, 19 nt, Artificial Sequence
  Description of Artificial Sequence: Synthetic oligonucleotide
  Antisense strand to SEQ ID NO: 168986
auguuccuagauaaccaaa

SEQ ID NO: 168988 - RNA, 19 nt, Artificial Sequence
  Description of Artificial Sequence: Synthetic oligonucleotide
  Sense strand starting at position 3266 of SEQ ID NO: 2177
uugguuaucuaggaacaua

SEQ ID NO: 168989 - RNA, 19 nt, Artificial Sequence
  Description of Artificial Sequence: Synthetic oligonucleotide
  Antisense strand to SEQ ID NO: 168988
uauguuccuagauaaccaa

SEQ ID NO: 168990 - RNA, 19 nt, Artificial Sequence
  Description of Artificial Sequence: Synthetic oligonucleotide
  Sense strand starting at position 3304 of SEQ ID NO: 2177
gauuguuccugugugucca

SEQ ID NO: 168991 - RNA, 19 nt, Artificial Sequence
  Description of Artificial Sequence: Synthetic oligonucleotide
  Antisense strand to SEQ ID NO: 168990
uggacacacaggaacaauc

SEQ ID NO: 168992 - RNA, 19 nt, Artificial Sequence
  Description of Artificial Sequence: Synthetic oligonucleotide
  Sense strand starting at position 3305 of SEQ ID NO: 2177
auuguuccuguguguccaa

SEQ ID NO: 168993 - RNA, 19 nt, Artificial Sequence
  Description of Artificial Sequence: Synthetic oligonucleotide
  Antisense strand to SEQ ID NO: 168992
uuggacacacaggaacaau

SEQ ID NO: 168994 - RNA, 19 nt, Artificial Sequence
  Description of Artificial Sequence: Synthetic oligonucleotide
  Sense strand starting at position 3308 of SEQ ID NO: 2177
guuccuguguguccaaaga

SEQ ID NO: 168995 - RNA, 19 nt, Artificial Sequence
  Description of Artificial Sequence: Synthetic oligonucleotide
  Antisense strand to SEQ ID NO: 168994
ucuuuggacacacaggaac

SEQ ID NO: 168996 - RNA, 19 nt, Artificial Sequence
  Description of Artificial Sequence: Synthetic oligonucleotide
  Sense strand starting at position 3331 of SEQ ID NO: 2177
gcaucugagaggcauacau

SEQ ID NO: 168997 - RNA, 19 nt, Artificial Sequence
  Description of Artificial Sequence: Synthetic oligonucleotide
  Antisense strand to SEQ ID NO: 168996
auguaugccucucagaugc

SEQ ID NO: 168998 - RNA, 19 nt, Artificial Sequence
  Description of Artificial Sequence: Synthetic oligonucleotide
  Sense strand starting at position 3418 of SEQ ID NO: 2177
aggagucagccagaagagu

SEQ ID NO: 168999 - RNA, 19 nt, Artificial Sequence
  Description of Artificial Sequence: Synthetic oligonucleotide
  Antisense strand to SEQ ID NO: 168998
acucuucuggcugacuccu

SEQ ID NO: 169000 - RNA, 19 nt, Artificial Sequence
  Description of Artificial Sequence: Synthetic oligonucleotide
  Sense strand starting at position 3582 of SEQ ID NO: 2177
gguuuccucuaaguaaaug

SEQ ID NO: 169001 - RNA, 19 nt, Artificial Sequence
  Description of Artificial Sequence: Synthetic oligonucleotide
  Antisense strand to SEQ ID NO: 169000
cauuuacuuagaggaaacc

SEQ ID NO: 169002 - RNA, 19 nt, Artificial Sequence
  Description of Artificial Sequence: Synthetic oligonucleotide
  Sense strand starting at position 3621 of SEQ ID NO: 2177
cgugacucuauaggaguua

SEQ ID NO: 169003 - RNA, 19 nt, Artificial Sequence
  Description of Artificial Sequence: Synthetic oligonucleotide
  Antisense strand to SEQ ID NO: 169002
uaacuccuauagagucacg

SEQ ID NO: 169004 - RNA, 19 nt, Artificial Sequence
  Description of Artificial Sequence: Synthetic oligonucleotide
  Sense strand starting at position 3711 of SEQ ID NO: 2177
gaguaagcaggauggcuua

SEQ ID NO: 169005 - RNA, 19 nt, Artificial Sequence
  Description of Artificial Sequence: Synthetic oligonucleotide
  Antisense strand to SEQ ID NO: 169004
uaagccauccugcuuacuc

SEQ ID NO: 169006 - RNA, 19 nt, Artificial Sequence
  Description of Artificial Sequence: Synthetic oligonucleotide
  Sense strand starting at position 3714 of SEQ ID NO: 2177
uaagcaggauggcuuaaua

SEQ ID NO: 169007 - RNA, 19 nt, Artificial Sequence
  Description of Artificial Sequence: Synthetic oligonucleotide
  Antisense strand to SEQ ID NO: 169006
uauuaagccauccugcuua

SEQ ID NO: 169008 - RNA, 19 nt, Artificial Sequence
  Description of Artificial Sequence: Synthetic oligonucleotide
  Sense strand starting at position 3723 of SEQ ID NO: 2177
uggcuuaauaugugugcuu

SEQ ID NO: 169009 - RNA, 19 nt, Artificial Sequence
  Description of Artificial Sequence: Synthetic oligonucleotide
  Antisense strand to SEQ ID NO: 169008
aagcacacauauuaagcca

SEQ ID NO: 169010 - RNA, 19 nt, Artificial Sequence
  Description of Artificial Sequence: Synthetic oligonucleotide
  Sense strand starting at position 3724 of SEQ ID NO: 2177
ggcuuaauaugugugcuua

SEQ ID NO: 169011 - RNA, 19 nt, Artificial Sequence
  Description of Artificial Sequence: Synthetic oligonucleotide
  Antisense strand to SEQ ID NO: 169010
uaagcacacauauuaagcc

SEQ ID NO: 169012 - RNA, 19 nt, Artificial Sequence
  Description of Artificial Sequence: Synthetic oligonucleotide
  Sense strand starting at position 3725 of SEQ ID NO: 2177
gcuuaauaugugugcuuag

SEQ ID NO: 169013 - RNA, 19 nt, Artificial Sequence
  Description of Artificial Sequence: Synthetic oligonucleotide
  Antisense strand to SEQ ID NO: 169012
cuaagcacacauauuaagc

SEQ ID NO: 169014 - RNA, 19 nt, Artificial Sequence
  Description of Artificial Sequence: Synthetic oligonucleotide
  Sense strand starting at position 3791 of SEQ ID NO: 2177
agaaucugcaagugugaua

SEQ ID NO: 169015 - RNA, 19 nt, Artificial Sequence
  Description of Artificial Sequence: Synthetic oligonucleotide
  Antisense strand to SEQ ID NO: 169014
uaucacacuugcagauucu

SEQ ID NO: 169016 - RNA, 19 nt, Artificial Sequence
  Description of Artificial Sequence: Synthetic oligonucleotide
  Sense strand starting at position 3919 of SEQ ID NO: 2177
gaggcuaauucccuaggca

SEQ ID NO: 169017 - RNA, 19 nt, Artificial Sequence
  Description of Artificial Sequence: Synthetic oligonucleotide
  Antisense strand to SEQ ID NO: 169016
ugccuagggaauuagccuc

SEQ ID NO: 169018 - RNA, 19 nt, Artificial Sequence
  Description of Artificial Sequence: Synthetic oligonucleotide
  Sense strand starting at position 3922 of SEQ ID NO: 2177
gcuaauucccuaggcacua

SEQ ID NO: 169019 - RNA, 19 nt, Artificial Sequence
  Description of Artificial Sequence: Synthetic oligonucleotide
  Antisense strand to SEQ ID NO: 169018
uagugccuagggaauuagc

SEQ ID NO: 169020 - RNA, 19 nt, Artificial Sequence
  Description of Artificial Sequence: Synthetic oligonucleotide
  Sense strand starting at position 3739 of SEQ ID NO: 2178
gaugaagaauuugaauguu

SEQ ID NO: 169021 - RNA, 19 nt, Artificial Sequence
  Description of Artificial Sequence: Synthetic oligonucleotide
  Antisense strand to SEQ ID NO: 169020
aacauucaaauucuucauc

SEQ ID NO: 169022 - RNA, 19 nt, Artificial Sequence
  Description of Artificial Sequence: Synthetic oligonucleotide
  Sense strand starting at position 3724 of SEQ ID NO: 2178
ggccuuagaagucaugaug

SEQ ID NO: 169023 - RNA, 19 nt, Artificial Sequence
  Description of Artificial Sequence: Synthetic oligonucleotide
  Antisense strand to SEQ ID NO: 169022
caucaugacuucuaaggcc

SEQ ID NO: 169024 - RNA, 19 nt, Artificial Sequence
  Description of Artificial Sequence: Synthetic oligonucleotide
  Sense strand starting at position 3686 of SEQ ID NO: 2178
ugagauguucuuugagaga

SEQ ID NO: 169025 - RNA, 19 nt, Artificial Sequence
  Description of Artificial Sequence: Synthetic oligonucleotide
  Antisense strand to SEQ ID NO: 169024
ucucucaaagaacaucuca

SEQ ID NO: 169026 - RNA, 19 nt, Artificial Sequence
  Description of Artificial Sequence: Synthetic oligonucleotide
  Sense strand starting at position 3685 of SEQ ID NO: 2178
augagauguucuuugagag

SEQ ID NO: 169027 - RNA, 19 nt, Artificial Sequence
  Description of Artificial Sequence: Synthetic oligonucleotide
  Antisense strand to SEQ ID NO: 169026
cucucaaagaacaucucau

SEQ ID NO: 169028 - RNA, 19 nt, Artificial Sequence
  Description of Artificial Sequence: Synthetic oligonucleotide
  Sense strand starting at position 3679 of SEQ ID NO: 2178
agcagaaugagauguucuu

SEQ ID NO: 169029 - RNA, 19 nt, Artificial Sequence
  Description of Artificial Sequence: Synthetic oligonucleotide
  Antisense strand to SEQ ID NO: 169028
aagaacaucucauucugcu

SEQ ID NO: 169030 - RNA, 19 nt, Artificial Sequence
  Description of Artificial Sequence: Synthetic oligonucleotide
  Sense strand starting at position 3658 of SEQ ID NO: 2178
ccagaauguggugguaaag

SEQ ID NO: 169031 - RNA, 19 nt, Artificial Sequence
  Description of Artificial Sequence: Synthetic oligonucleotide
  Antisense strand to SEQ ID NO: 169030
cuuuaccaccacauucugg

SEQ ID NO: 169032 - RNA, 19 nt, Artificial Sequence
  Description of Artificial Sequence: Synthetic oligonucleotide
  Sense strand starting at position 3646 of SEQ ID NO: 2178
aggccagugugaccagaau

SEQ ID NO: 169033 - RNA, 19 nt, Artificial Sequence
  Description of Artificial Sequence: Synthetic oligonucleotide
  Antisense strand to SEQ ID NO: 169032
auucuggucacacuggccu

SEQ ID NO: 169034 - RNA, 19 nt, Artificial Sequence
  Description of Artificial Sequence: Synthetic oligonucleotide
  Sense strand starting at position 3619 of SEQ ID NO: 2178
gcuugagccagguagaaau

SEQ ID NO: 169035 - RNA, 19 nt, Artificial Sequence
  Description of Artificial Sequence: Synthetic oligonucleotide
  Antisense strand to SEQ ID NO: 169034
auuucuaccuggcucaagc

SEQ ID NO: 169036 - RNA, 19 nt, Artificial Sequence
  Description of Artificial Sequence: Synthetic oligonucleotide
  Sense strand starting at position 3505 of SEQ ID NO: 2178
agaacagcuucuuugagga

SEQ ID NO: 169037 - RNA, 19 nt, Artificial Sequence
  Description of Artificial Sequence: Synthetic oligonucleotide
  Antisense strand to SEQ ID NO: 169036
uccucaaagaagcuguucu

SEQ ID NO: 169038 - RNA, 19 nt, Artificial Sequence
  Description of Artificial Sequence: Synthetic oligonucleotide
  Sense strand starting at position 3488 of SEQ ID NO: 2178
guuagauggaguuguauag

SEQ ID NO: 169039 - RNA, 19 nt, Artificial Sequence
  Description of Artificial Sequence: Synthetic oligonucleotide
  Antisense strand to SEQ ID NO: 169038
cuauacaacuccaucuaac

SEQ ID NO: 169040 - RNA, 19 nt, Artificial Sequence
  Description of Artificial Sequence: Synthetic oligonucleotide
  Sense strand starting at position 3482 of SEQ ID NO: 2178
acuccaguuagauggaguu

SEQ ID NO: 169041 - RNA, 19 nt, Artificial Sequence
  Description of Artificial Sequence: Synthetic oligonucleotide
  Antisense strand to SEQ ID NO: 169040
aacuccaucuaacuggagu

SEQ ID NO: 169042 - RNA, 19 nt, Artificial Sequence
  Description of Artificial Sequence: Synthetic oligonucleotide
  Sense strand starting at position 3418 of SEQ ID NO: 2178
gucuaugaaggcuacuuaa

SEQ ID NO: 169043 - RNA, 19 nt, Artificial Sequence
  Description of Artificial Sequence: Synthetic oligonucleotide
  Antisense strand to SEQ ID NO: 169042
uuaaguagccuucauagac

SEQ ID NO: 169044 - RNA, 19 nt, Artificial Sequence
  Description of Artificial Sequence: Synthetic oligonucleotide
  Sense strand starting at position 3411 of SEQ ID NO: 2178
gugauaagucuaugaaggc

SEQ ID NO: 169045 - RNA, 19 nt, Artificial Sequence
  Description of Artificial Sequence: Synthetic oligonucleotide
  Antisense strand to SEQ ID NO: 169044
gccuucauagacuuaucac

SEQ ID NO: 169046 - RNA, 19 nt, Artificial Sequence
  Description of Artificial Sequence: Synthetic oligonucleotide
  Sense strand starting at position 3283 of SEQ ID NO: 2178
gcuacauaccuaugaagca

SEQ ID NO: 169047 - RNA, 19 nt, Artificial Sequence
  Description of Artificial Sequence: Synthetic oligonucleotide
  Antisense strand to SEQ ID NO: 169046
ugcuucauagguauguagc

SEQ ID NO: 169048 - RNA, 19 nt, Artificial Sequence
  Description of Artificial Sequence: Synthetic oligonucleotide
  Sense strand starting at position 3067 of SEQ ID NO: 2178
guacuaauggcgagugagu

SEQ ID NO: 169049 - RNA, 19 nt, Artificial Sequence
  Description of Artificial Sequence: Synthetic oligonucleotide
  Antisense strand to SEQ ID NO: 169048
acucacucgccauuaguac

SEQ ID NO: 169050 - RNA, 19 nt, Artificial Sequence
  Description of Artificial Sequence: Synthetic oligonucleotide
  Sense strand starting at position 3009 of SEQ ID NO: 2178
cccacauucccugggaaga

SEQ ID NO: 169051 - RNA, 19 nt, Artificial Sequence
  Description of Artificial Sequence: Synthetic oligonucleotide
  Antisense strand to SEQ ID NO: 169050
ucuucccagggaauguggg

SEQ ID NO: 169052 - RNA, 19 nt, Artificial Sequence
  Description of Artificial Sequence: Synthetic oligonucleotide
  Sense strand starting at position 2989 of SEQ ID NO: 2178
uuuggcauuccaggaugaa

SEQ ID NO: 169053 - RNA, 19 nt, Artificial Sequence
  Description of Artificial Sequence: Synthetic oligonucleotide
  Antisense strand to SEQ ID NO: 169052
uucauccuggaaugccaaa

SEQ ID NO: 169054 - RNA, 19 nt, Artificial Sequence
  Description of Artificial Sequence: Synthetic oligonucleotide
  Sense strand starting at position 2858 of SEQ ID NO: 2178
auauuaaucucgcuaagga

SEQ ID NO: 169055 - RNA, 19 nt, Artificial Sequence
  Description of Artificial Sequence: Synthetic oligonucleotide
  Antisense strand to SEQ ID NO: 169054
uccuuagcgagauuaauau

SEQ ID NO: 169056 - RNA, 19 nt, Artificial Sequence
  Description of Artificial Sequence: Synthetic oligonucleotide
  Sense strand starting at position 2819 of SEQ ID NO: 2178
uagccuuugccagaggaag

SEQ ID NO: 169057 - RNA, 19 nt, Artificial Sequence
  Description of Artificial Sequence: Synthetic oligonucleotide
  Antisense strand to SEQ ID NO: 169056
cuuccucuggcaaaggcua

SEQ ID NO: 169058 - RNA, 19 nt, Artificial Sequence
  Description of Artificial Sequence: Synthetic oligonucleotide
  Sense strand starting at position 2533 of SEQ ID NO: 2178
gcauguauggaagguccaa

SEQ ID NO: 169059 - RNA, 19 nt, Artificial Sequence
  Description of Artificial Sequence: Synthetic oligonucleotide
  Antisense strand to SEQ ID NO: 169058
uuggaccuuccauacaugc

SEQ ID NO: 169060 - RNA, 19 nt, Artificial Sequence
  Description of Artificial Sequence: Synthetic oligonucleotide
  Sense strand starting at position 2412 of SEQ ID NO: 2178
ugcauaaaucaugacaugu

SEQ ID NO: 169061 - RNA, 19 nt, Artificial Sequence
  Description of Artificial Sequence: Synthetic oligonucleotide
  Antisense strand to SEQ ID NO: 169060
acaugucaugauuuaugca

SEQ ID NO: 169062 - RNA, 19 nt, Artificial Sequence
  Description of Artificial Sequence: Synthetic oligonucleotide
  Sense strand starting at position 2335 of SEQ ID NO: 2178
cgguguauugaggaccauu

SEQ ID NO: 169063 - RNA, 19 nt, Artificial Sequence
  Description of Artificial Sequence: Synthetic oligonucleotide
  Antisense strand to SEQ ID NO: 169062
aaugguccucaauacaccg

SEQ ID NO: 169064 - RNA, 19 nt, Artificial Sequence
  Description of Artificial Sequence: Synthetic oligonucleotide
  Sense strand starting at position 2328 of SEQ ID NO: 2178
gucuaaucgguguauugag

SEQ ID NO: 169065 - RNA, 19 nt, Artificial Sequence
  Description of Artificial Sequence: Synthetic oligonucleotide
  Antisense strand to SEQ ID NO: 169064
cucaauacaccgauuagac

SEQ ID NO: 169066 - RNA, 19 nt, Artificial Sequence
  Description of Artificial Sequence: Synthetic oligonucleotide
  Sense strand starting at position 2309 of SEQ ID NO: 2178
ucuuguuguaccugaagag

SEQ ID NO: 169067 - RNA, 19 nt, Artificial Sequence
  Description of Artificial Sequence: Synthetic oligonucleotide
  Antisense strand to SEQ ID NO: 169066
cucuucagguacaacaaga

SEQ ID NO: 169068 - RNA, 19 nt, Artificial Sequence
  Description of Artificial Sequence: Synthetic oligonucleotide
  Sense strand starting at position 2065 of SEQ ID NO: 2178
agaagauacccuggcucuu

SEQ ID NO: 169069 - RNA, 19 nt, Artificial Sequence
  Description of Artificial Sequence: Synthetic oligonucleotide
  Antisense strand to SEQ ID NO: 169068
aagagccaggguaucuucu

SEQ ID NO: 169070 - RNA, 19 nt, Artificial Sequence
  Description of Artificial Sequence: Synthetic oligonucleotide
  Sense strand starting at position 1557 of SEQ ID NO: 2178
auccucugaugaucucaga

SEQ ID NO: 169071 - RNA, 19 nt, Artificial Sequence
  Description of Artificial Sequence: Synthetic oligonucleotide
  Antisense strand to SEQ ID NO: 169070
ucugagaucaucagaggau

SEQ ID NO: 169072 - RNA, 19 nt, Artificial Sequence
  Description of Artificial Sequence: Synthetic oligonucleotide
  Sense strand starting at position 1404 of SEQ ID NO: 2178
ucaggucugcgauagggua

SEQ ID NO: 169073 - RNA, 19 nt, Artificial Sequence
  Description of Artificial Sequence: Synthetic oligonucleotide
  Antisense strand to SEQ ID NO: 169072
uacccuaucgcagaccuga

SEQ ID NO: 169074 - RNA, 19 nt, Artificial Sequence
  Description of Artificial Sequence: Synthetic oligonucleotide
  Sense strand starting at position 1380 of SEQ ID NO: 2178
accuuaucuggacggaguu

SEQ ID NO: 169075 - RNA, 19 nt, Artificial Sequence
  Description of Artificial Sequence: Synthetic oligonucleotide
  Antisense strand to SEQ ID NO: 169074
aacuccguccagauaaggu

SEQ ID NO: 169076 - RNA, 19 nt, Artificial Sequence
  Description of Artificial Sequence: Synthetic oligonucleotide
  Sense strand starting at position 1324 of SEQ ID NO: 2178
gcaaguuugcuauacuuag

SEQ ID NO: 169077 - RNA, 19 nt, Artificial Sequence
  Description of Artificial Sequence: Synthetic oligonucleotide
  Antisense strand to SEQ ID NO: 169076
cuaaguauagcaaacuugc

SEQ ID NO: 169078 - RNA, 19 nt, Artificial Sequence
  Description of Artificial Sequence: Synthetic oligonucleotide
  Sense strand starting at position 1260 of SEQ ID NO: 2178
gugauaggcaaugaguuua

SEQ ID NO: 169079 - RNA, 19 nt, Artificial Sequence
  Description of Artificial Sequence: Synthetic oligonucleotide
  Antisense strand to SEQ ID NO: 169078
uaaacucauugccuaucac

SEQ ID NO: 169080 - RNA, 19 nt, Artificial Sequence
  Description of Artificial Sequence: Synthetic oligonucleotide
  Sense strand starting at position 1259 of SEQ ID NO: 2178
agugauaggcaaugaguuu

SEQ ID NO: 169081 - RNA, 19 nt, Artificial Sequence
  Description of Artificial Sequence: Synthetic oligonucleotide
  Antisense strand to SEQ ID NO: 169080
aaacucauugccuaucacu

SEQ ID NO: 169082 - RNA, 19 nt, Artificial Sequence
  Description of Artificial Sequence: Synthetic oligonucleotide
  Sense strand starting at position 1040 of SEQ ID NO: 2178
uuagcagacuagguuuaau

SEQ ID NO: 169083 - RNA, 19 nt, Artificial Sequence
  Description of Artificial Sequence: Synthetic oligonucleotide
  Antisense strand to SEQ ID NO: 169082
auuaaaccuagucugcuaa

SEQ ID NO: 169084 - RNA, 19 nt, Artificial Sequence
  Description of Artificial Sequence: Synthetic oligonucleotide
  Sense strand starting at position 1039 of SEQ ID NO: 2178
cuuagcagacuagguuuaa

SEQ ID NO: 169085 - RNA, 19 nt, Artificial Sequence
  Description of Artificial Sequence: Synthetic oligonucleotide
  Antisense strand to SEQ ID NO: 169084
uuaaaccuagucugcuaag

SEQ ID NO: 169086 - RNA, 19 nt, Artificial Sequence
  Description of Artificial Sequence: Synthetic oligonucleotide
  Sense strand starting at position 896 of SEQ ID NO: 2178
ugugaccauguguaugaaa

SEQ ID NO: 169087 - RNA, 19 nt, Artificial Sequence
  Description of Artificial Sequence: Synthetic oligonucleotide
  Antisense strand to SEQ ID NO: 169086
uuucauacacauggucaca

SEQ ID NO: 169088 - RNA, 19 nt, Artificial Sequence
  Description of Artificial Sequence: Synthetic oligonucleotide
  Sense strand starting at position 829 of SEQ ID NO: 2178
gggugucauaauuagaguu

SEQ ID NO: 169089 - RNA, 19 nt, Artificial Sequence
  Description of Artificial Sequence: Synthetic oligonucleotide
  Antisense strand to SEQ ID NO: 169088
aacucuaauuaugacaccc

SEQ ID NO: 169090 - RNA, 19 nt, Artificial Sequence
  Description of Artificial Sequence: Synthetic oligonucleotide
  Sense strand starting at position 371 of SEQ ID NO: 2178
ugguguaauucugugaaau

SEQ ID NO: 169091 - RNA, 19 nt, Artificial Sequence
  Description of Artificial Sequence: Synthetic oligonucleotide
  Antisense strand to SEQ ID NO: 169090
auuucacagaauuacacca

SEQ ID NO: 169092 - RNA, 19 nt, Artificial Sequence
  Description of Artificial Sequence: Synthetic oligonucleotide
  Sense strand starting at position 231 of SEQ ID NO: 2178
uagguauuacuguaauuag

SEQ ID NO: 169093 - RNA, 19 nt, Artificial Sequence
  Description of Artificial Sequence: Synthetic oligonucleotide
  Antisense strand to SEQ ID NO: 169092
cuaauuacaguaauaccua

SEQ ID NO: 169094 - RNA, 19 nt, Artificial Sequence
  Description of Artificial Sequence: Synthetic oligonucleotide
  Sense strand starting at position 221 of SEQ ID NO: 2178
agcauaaggcuagguauua

SEQ ID NO: 169095 - RNA, 19 nt, Artificial Sequence
  Description of Artificial Sequence: Synthetic oligonucleotide
  Antisense strand to SEQ ID NO: 169094
uaauaccuagccuuaugcu

SEQ ID NO: 169096 - RNA, 19 nt, Artificial Sequence
  Description of Artificial Sequence: Synthetic oligonucleotide
  Sense strand starting at position 151 of SEQ ID NO: 2178
accauauauugacuuggua

SEQ ID NO: 169097 - RNA, 19 nt, Artificial Sequence
  Description of Artificial Sequence: Synthetic oligonucleotide
  Antisense strand to SEQ ID NO: 169096
uaccaagucaauauauggu

SEQ ID NO: 169098 - RNA, 19 nt, Artificial Sequence
  Description of Artificial Sequence: Synthetic oligonucleotide
  Sense strand starting at position 92 of SEQ ID NO: 2178
auuggaauuuaucaugguu

SEQ ID NO: 169099 - RNA, 19 nt, Artificial Sequence
  Description of Artificial Sequence: Synthetic oligonucleotide
  Antisense strand to SEQ ID NO: 169098
aaccaugauaaauuccaau

SEQ ID NO: 169100 - RNA, 19 nt, Artificial Sequence
  Description of Artificial Sequence: Synthetic oligonucleotide
  Sense strand starting at position 330 of SEQ ID NO: 2179
caagacuuguggcucaguu

SEQ ID NO: 169101 - RNA, 19 nt, Artificial Sequence
  Description of Artificial Sequence: Synthetic oligonucleotide
  Antisense strand to SEQ ID NO: 169100
aacugagccacaagucuug

SEQ ID NO: 169102 - RNA, 19 nt, Artificial Sequence
  Description of Artificial Sequence: Synthetic oligonucleotide
  Sense strand starting at position 342 of SEQ ID NO: 2179
cucaguuguacugaggauu

SEQ ID NO: 169103 - RNA, 19 nt, Artificial Sequence
  Description of Artificial Sequence: Synthetic oligonucleotide
  Antisense strand to SEQ ID NO: 169102
aauccucaguacaacugag

SEQ ID NO: 169104 - RNA, 19 nt, Artificial Sequence
  Description of Artificial Sequence: Synthetic oligonucleotide
  Sense strand starting at position 396 of SEQ ID NO: 2179
gggagugucaggugagaag

SEQ ID NO: 169105 - RNA, 19 nt, Artificial Sequence
  Description of Artificial Sequence: Synthetic oligonucleotide
  Antisense strand to SEQ ID NO: 169104
cuucucaccugacacuccc

SEQ ID NO: 169106 - RNA, 19 nt, Artificial Sequence
  Description of Artificial Sequence: Synthetic oligonucleotide
  Sense strand starting at position 407 of SEQ ID NO: 2179
gugagaagcucccagcacu

SEQ ID NO: 169107 - RNA, 19 nt, Artificial Sequence
  Description of Artificial Sequence: Synthetic oligonucleotide
  Antisense strand to SEQ ID NO: 169106
agugcugggagcuucucac

SEQ ID NO: 169108 - RNA, 19 nt, Artificial Sequence
  Description of Artificial Sequence: Synthetic oligonucleotide
  Sense strand starting at position 430 of SEQ ID NO: 2179
agguuugugcuguaucuuu

SEQ ID NO: 169109 - RNA, 19 nt, Artificial Sequence
  Description of Artificial Sequence: Synthetic oligonucleotide
  Antisense strand to SEQ ID NO: 169108
aaagauacagcacaaaccu

SEQ ID NO: 169110 - RNA, 19 nt, Artificial Sequence
  Description of Artificial Sequence: Synthetic oligonucleotide
  Sense strand starting at position 440 of SEQ ID NO: 2179
uguaucuuucuguguugga

SEQ ID NO: 169111 - RNA, 19 nt, Artificial Sequence
  Description of Artificial Sequence: Synthetic oligonucleotide
  Antisense strand to SEQ ID NO: 169110
uccaacacagaaagauaca

SEQ ID NO: 169112 - RNA, 19 nt, Artificial Sequence
  Description of Artificial Sequence: Synthetic oligonucleotide
  Sense strand starting at position 441 of SEQ ID NO: 2179
guaucuuucuguguuggac

SEQ ID NO: 169113 - RNA, 19 nt, Artificial Sequence
  Description of Artificial Sequence: Synthetic oligonucleotide
  Antisense strand to SEQ ID NO: 169112
guccaacacagaaagauac

SEQ ID NO: 169114 - RNA, 19 nt, Artificial Sequence
  Description of Artificial Sequence: Synthetic oligonucleotide
  Sense strand starting at position 477 of SEQ ID NO: 2179
ggucuuguucgccaguucu

SEQ ID NO: 169115 - RNA, 19 nt, Artificial Sequence
  Description of Artificial Sequence: Synthetic oligonucleotide
  Antisense strand to SEQ ID NO: 169114
agaacuggcgaacaagacc

SEQ ID NO: 169116 - RNA, 19 nt, Artificial Sequence
  Description of Artificial Sequence: Synthetic oligonucleotide
  Sense strand starting at position 479 of SEQ ID NO: 2179
ucuuguucgccaguucuua

SEQ ID NO: 169117 - RNA, 19 nt, Artificial Sequence
  Description of Artificial Sequence: Synthetic oligonucleotide
  Antisense strand to SEQ ID NO: 169116
uaagaacuggcgaacaaga

SEQ ID NO: 169118 - RNA, 19 nt, Artificial Sequence
  Description of Artificial Sequence: Synthetic oligonucleotide
  Sense strand starting at position 483 of SEQ ID NO: 2179
guucgccaguucuuagcaa

SEQ ID NO: 169119 - RNA, 19 nt, Artificial Sequence
  Description of Artificial Sequence: Synthetic oligonucleotide
  Antisense strand to SEQ ID NO: 169118
uugcuaagaacuggcgaac

SEQ ID NO: 169120 - RNA, 19 nt, Artificial Sequence
  Description of Artificial Sequence: Synthetic oligonucleotide
  Sense strand starting at position 506 of SEQ ID NO: 2179
aggucugaguccuacuaag

SEQ ID NO: 169121 - RNA, 19 nt, Artificial Sequence
  Description of Artificial Sequence: Synthetic oligonucleotide
  Antisense strand to SEQ ID NO: 169120
cuuaguaggacucagaccu

SEQ ID NO: 169122 - RNA, 19 nt, Artificial Sequence
  Description of Artificial Sequence: Synthetic oligonucleotide
  Sense strand starting at position 605 of SEQ ID NO: 2179
ggcagauaaucucaucucu

SEQ ID NO: 169123 - RNA, 19 nt, Artificial Sequence
  Description of Artificial Sequence: Synthetic oligonucleotide
  Antisense strand to SEQ ID NO: 169122
agagaugagauuaucugcc

SEQ ID NO: 169124 - RNA, 19 nt, Artificial Sequence
  Description of Artificial Sequence: Synthetic oligonucleotide
  Sense strand starting at position 795 of SEQ ID NO: 2179
gcuccuaaguguccuggaa

SEQ ID NO: 169125 - RNA, 19 nt, Artificial Sequence
  Description of Artificial Sequence: Synthetic oligonucleotide
  Antisense strand to SEQ ID NO: 169124
uuccaggacacuuaggagc

SEQ ID NO: 169126 - RNA, 19 nt, Artificial Sequence
  Description of Artificial Sequence: Synthetic oligonucleotide
  Sense strand starting at position 797 of SEQ ID NO: 2179
uccuaaguguccuggaaau

SEQ ID NO: 169127 - RNA, 19 nt, Artificial Sequence
  Description of Artificial Sequence: Synthetic oligonucleotide
  Antisense strand to SEQ ID NO: 169126
auuuccaggacacuuagga

SEQ ID NO: 169128 - RNA, 19 nt, Artificial Sequence
  Description of Artificial Sequence: Synthetic oligonucleotide
  Sense strand starting at position 2451 of SEQ ID NO: 2179
guguguagaucacuaaauc

SEQ ID NO: 169129 - RNA, 19 nt, Artificial Sequence
  Description of Artificial Sequence: Synthetic oligonucleotide
  Antisense strand to SEQ ID NO: 169128
gauuuagugaucuacacac

SEQ ID NO: 169130 - RNA, 19 nt, Artificial Sequence
  Description of Artificial Sequence: Synthetic oligonucleotide
  Sense strand starting at position 2537 of SEQ ID NO: 2179
uccuguuugccucugucua

SEQ ID NO: 169131 - RNA, 19 nt, Artificial Sequence
  Description of Artificial Sequence: Synthetic oligonucleotide
  Antisense strand to SEQ ID NO: 169130
uagacagaggcaaacagga

SEQ ID NO: 169132 - RNA, 19 nt, Artificial Sequence
  Description of Artificial Sequence: Synthetic oligonucleotide
  Sense strand starting at position 2584 of SEQ ID NO: 2179
uuaguaaggcuuugcauuu

SEQ ID NO: 169133 - RNA, 19 nt, Artificial Sequence
  Description of Artificial Sequence: Synthetic oligonucleotide
  Antisense strand to SEQ ID NO: 169132
aaaugcaaagccuuacuaa

SEQ ID NO: 169134 - RNA, 19 nt, Artificial Sequence
  Description of Artificial Sequence: Synthetic oligonucleotide
  Sense strand starting at position 2642 of SEQ ID NO: 2179
gaacuacacucucgaguag

SEQ ID NO: 169135 - RNA, 19 nt, Artificial Sequence
  Description of Artificial Sequence: Synthetic oligonucleotide
  Antisense strand to SEQ ID NO: 169134
cuacucgagaguguaguuc

SEQ ID NO: 169136 - RNA, 19 nt, Artificial Sequence
  Description of Artificial Sequence: Synthetic oligonucleotide
  Sense strand starting at position 2818 of SEQ ID NO: 2179
gcgugagccauccaucaug

SEQ ID NO: 169137 - RNA, 19 nt, Artificial Sequence
  Description of Artificial Sequence: Synthetic oligonucleotide
  Antisense strand to SEQ ID NO: 169136
caugauggauggcucacgc

SEQ ID NO: 169138 - RNA, 19 nt, Artificial Sequence
  Description of Artificial Sequence: Synthetic oligonucleotide
  Sense strand starting at position 3160 of SEQ ID NO: 2179
ucaccauguuauccggaau

SEQ ID NO: 169139 - RNA, 19 nt, Artificial Sequence
  Description of Artificial Sequence: Synthetic oligonucleotide
  Antisense strand to SEQ ID NO: 169138
auuccggauaacaugguga

SEQ ID NO: 169140 - RNA, 19 nt, Artificial Sequence
  Description of Artificial Sequence: Synthetic oligonucleotide
  Sense strand starting at position 3163 of SEQ ID NO: 2179
ccauguuauccggaauagu

SEQ ID NO: 169141 - RNA, 19 nt, Artificial Sequence
  Description of Artificial Sequence: Synthetic oligonucleotide
  Antisense strand to SEQ ID NO: 169140
acuauuccggauaacaugg

SEQ ID NO: 169142 - RNA, 19 nt, Artificial Sequence
  Description of Artificial Sequence: Synthetic oligonucleotide
  Sense strand starting at position 3296 of SEQ ID NO: 2179
aauauugauccaggugcaa

SEQ ID NO: 169143 - RNA, 19 nt, Artificial Sequence
  Description of Artificial Sequence: Synthetic oligonucleotide
  Antisense strand to SEQ ID NO: 169142
uugcaccuggaucaauauu

SEQ ID NO: 169144 - RNA, 19 nt, Artificial Sequence
  Description of Artificial Sequence: Synthetic oligonucleotide
  Sense strand starting at position 3352 of SEQ ID NO: 2179
ggguuuggaagucaucuua

SEQ ID NO: 169145 - RNA, 19 nt, Artificial Sequence
  Description of Artificial Sequence: Synthetic oligonucleotide
  Antisense strand to SEQ ID NO: 169144
uaagaugacuuccaaaccc

SEQ ID NO: 169146 - RNA, 19 nt, Artificial Sequence
  Description of Artificial Sequence: Synthetic oligonucleotide
  Sense strand starting at position 3423 of SEQ ID NO: 2179
ugccuuccuguggaaugau

SEQ ID NO: 169147 - RNA, 19 nt, Artificial Sequence
  Description of Artificial Sequence: Synthetic oligonucleotide
  Antisense strand to SEQ ID NO: 169146
aucauuccacaggaaggca

SEQ ID NO: 169148 - RNA, 19 nt, Artificial Sequence
  Description of Artificial Sequence: Synthetic oligonucleotide
  Sense strand starting at position 3432 of SEQ ID NO: 2179
guggaaugaucuccaauga

SEQ ID NO: 169149 - RNA, 19 nt, Artificial Sequence
  Description of Artificial Sequence: Synthetic oligonucleotide
  Antisense strand to SEQ ID NO: 169148
ucauuggagaucauuccac

SEQ ID NO: 169150 - RNA, 19 nt, Artificial Sequence
  Description of Artificial Sequence: Synthetic oligonucleotide
  Sense strand starting at position 3469 of SEQ ID NO: 2179
agacccaguucucuugcua

SEQ ID NO: 169151 - RNA, 19 nt, Artificial Sequence
  Description of Artificial Sequence: Synthetic oligonucleotide
  Antisense strand to SEQ ID NO: 169150
uagcaagagaacugggucu

SEQ ID NO: 169152 - RNA, 19 nt, Artificial Sequence
  Description of Artificial Sequence: Synthetic oligonucleotide
  Sense strand starting at position 3511 of SEQ ID NO: 2179
aaaugaucuuccugugaug

SEQ ID NO: 169153 - RNA, 19 nt, Artificial Sequence
  Description of Artificial Sequence: Synthetic oligonucleotide
  Antisense strand to SEQ ID NO: 169152
caucacaggaagaucauuu

SEQ ID NO: 169154 - RNA, 19 nt, Artificial Sequence
  Description of Artificial Sequence: Synthetic oligonucleotide
  Sense strand starting at position 3670 of SEQ ID NO: 2179
guggacaccuaucuucuaa

SEQ ID NO: 169155 - RNA, 19 nt, Artificial Sequence
  Description of Artificial Sequence: Synthetic oligonucleotide
  Antisense strand to SEQ ID NO: 169154
uuagaagauagguguccac

SEQ ID NO: 169156 - RNA, 19 nt, Artificial Sequence
  Description of Artificial Sequence: Synthetic oligonucleotide
  Sense strand starting at position 3681 of SEQ ID NO: 2179
ucuucuaauugcuauguga

SEQ ID NO: 169157 - RNA, 19 nt, Artificial Sequence
  Description of Artificial Sequence: Synthetic oligonucleotide
  Antisense strand to SEQ ID NO: 169156
ucacauagcaauuagaaga

SEQ ID NO: 169158 - RNA, 19 nt, Artificial Sequence
  Description of Artificial Sequence: Synthetic oligonucleotide
  Sense strand starting at position 3747 of SEQ ID NO: 2179
auacguauugaguguccaa

SEQ ID NO: 169159 - RNA, 19 nt, Artificial Sequence
  Description of Artificial Sequence: Synthetic oligonucleotide
  Antisense strand to SEQ ID NO: 169158
uuggacacucaauacguau

SEQ ID NO: 169160 - RNA, 19 nt, Artificial Sequence
  Description of Artificial Sequence: Synthetic oligonucleotide
  Sense strand starting at position 3750 of SEQ ID NO: 2179
cguauugaguguccaagca

SEQ ID NO: 169161 - RNA, 19 nt, Artificial Sequence
  Description of Artificial Sequence: Synthetic oligonucleotide
  Antisense strand to SEQ ID NO: 169160
ugcuuggacacucaauacg

SEQ ID NO: 169162 - RNA, 19 nt, Artificial Sequence
  Description of Artificial Sequence: Synthetic oligonucleotide
  Sense strand starting at position 3758 of SEQ ID NO: 2179
guguccaagcaaugaacaa

SEQ ID NO: 169163 - RNA, 19 nt, Artificial Sequence
  Description of Artificial Sequence: Synthetic oligonucleotide
  Antisense strand to SEQ ID NO: 169162
uuguucauugcuuggacac

SEQ ID NO: 169164 - RNA, 19 nt, Artificial Sequence
  Description of Artificial Sequence: Synthetic oligonucleotide
  Sense strand starting at position 3797 of SEQ ID NO: 2179
gcuugagacucagucuaug

SEQ ID NO: 169165 - RNA, 19 nt, Artificial Sequence
  Description of Artificial Sequence: Synthetic oligonucleotide
  Antisense strand to SEQ ID NO: 169164
cauagacugagucucaagc

SEQ ID NO: 169166 - RNA, 19 nt, Artificial Sequence
  Description of Artificial Sequence: Synthetic oligonucleotide
  Sense strand starting at position 3928 of SEQ ID NO: 2179
ugcacuauuuaggguguca

SEQ ID NO: 169167 - RNA, 19 nt, Artificial Sequence
  Description of Artificial Sequence: Synthetic oligonucleotide
  Antisense strand to SEQ ID NO: 169166
ugacacccuaaauagugca

SEQ ID NO: 169168 - RNA, 19 nt, Artificial Sequence
  Description of Artificial Sequence: Synthetic oligonucleotide
  Sense strand starting at position 3940 of SEQ ID NO: 2179
ggugucaacuucucugaag

SEQ ID NO: 169169 - RNA, 19 nt, Artificial Sequence
  Description of Artificial Sequence: Synthetic oligonucleotide
  Antisense strand to SEQ ID NO: 169168
cuucagagaaguugacacc

SEQ ID NO: 169170 - RNA, 19 nt, Artificial Sequence
  Description of Artificial Sequence: Synthetic oligonucleotide
  Sense strand starting at position 3941 of SEQ ID NO: 2179
gugucaacuucucugaaga

SEQ ID NO: 169171 - RNA, 19 nt, Artificial Sequence
  Description of Artificial Sequence: Synthetic oligonucleotide
  Antisense strand to SEQ ID NO: 169170
ucuucagagaaguugacac

SEQ ID NO: 169172 - RNA, 19 nt, Artificial Sequence
  Description of Artificial Sequence: Synthetic oligonucleotide
  Sense strand starting at position 3942 of SEQ ID NO: 2179
ugucaacuucucugaagaa

SEQ ID NO: 169173 - RNA, 19 nt, Artificial Sequence
  Description of Artificial Sequence: Synthetic oligonucleotide
  Antisense strand to SEQ ID NO: 169172
uucuucagagaaguugaca

SEQ ID NO: 169174 - RNA, 19 nt, Artificial Sequence
  Description of Artificial Sequence: Synthetic oligonucleotide
  Sense strand starting at position 3943 of SEQ ID NO: 2179
gucaacuucucugaagaaa

SEQ ID NO: 169175 - RNA, 19 nt, Artificial Sequence
  Description of Artificial Sequence: Synthetic oligonucleotide
  Antisense strand to SEQ ID NO: 169174
uuucuucagagaaguugac

SEQ ID NO: 169176 - RNA, 19 nt, Artificial Sequence
  Description of Artificial Sequence: Synthetic oligonucleotide
  Sense strand starting at position 3966 of SEQ ID NO: 2179
guuuaaacuuugggcugaa

SEQ ID NO: 169177 - RNA, 19 nt, Artificial Sequence
  Description of Artificial Sequence: Synthetic oligonucleotide
  Antisense strand to SEQ ID NO: 169176
uucagcccaaaguuuaaac

SEQ ID NO: 169178 - RNA, 19 nt, Artificial Sequence
  Description of Artificial Sequence: Synthetic oligonucleotide
  Sense strand starting at position 3969 of SEQ ID NO: 2179
uaaacuuugggcugaagua

SEQ ID NO: 169179 - RNA, 19 nt, Artificial Sequence
  Description of Artificial Sequence: Synthetic oligonucleotide
  Antisense strand to SEQ ID NO: 169178
uacuucagcccaaaguuua

SEQ ID NO: 169180 - RNA, 19 nt, Artificial Sequence
  Description of Artificial Sequence: Synthetic oligonucleotide
  Sense strand starting at position 3954 of SEQ ID NO: 2180
gguugagacuuacuuucua

SEQ ID NO: 169181 - RNA, 19 nt, Artificial Sequence
  Description of Artificial Sequence: Synthetic oligonucleotide
  Antisense strand to SEQ ID NO: 169180
uagaaaguaagucucaacc

SEQ ID NO: 169182 - RNA, 19 nt, Artificial Sequence
  Description of Artificial Sequence: Synthetic oligonucleotide
  Sense strand starting at position 3945 of SEQ ID NO: 2180
cuggaauuggguugagacu

SEQ ID NO: 169183 - RNA, 19 nt, Artificial Sequence
  Description of Artificial Sequence: Synthetic oligonucleotide
  Antisense strand to SEQ ID NO: 169182
agucucaacccaauuccag

SEQ ID NO: 169184 - RNA, 19 nt, Artificial Sequence
  Description of Artificial Sequence: Synthetic oligonucleotide
  Sense strand starting at position 3917 of SEQ ID NO: 2180
ugaagaagcucauuaauau

SEQ ID NO: 169185 - RNA, 19 nt, Artificial Sequence
  Description of Artificial Sequence: Synthetic oligonucleotide
  Antisense strand to SEQ ID NO: 169184
auauuaaugagcuucuuca

SEQ ID NO: 169186 - RNA, 19 nt, Artificial Sequence
  Description of Artificial Sequence: Synthetic oligonucleotide
  Sense strand starting at position 3791 of SEQ ID NO: 2180
agauuuauguaacaaucga

SEQ ID NO: 169187 - RNA, 19 nt, Artificial Sequence
  Description of Artificial Sequence: Synthetic oligonucleotide
  Antisense strand to SEQ ID NO: 169186
ucgauuguuacauaaaucu

SEQ ID NO: 169188 - RNA, 19 nt, Artificial Sequence
  Description of Artificial Sequence: Synthetic oligonucleotide
  Sense strand starting at position 3786 of SEQ ID NO: 2180
uccagagauuuauguaaca

SEQ ID NO: 169189 - RNA, 19 nt, Artificial Sequence
  Description of Artificial Sequence: Synthetic oligonucleotide
  Antisense strand to SEQ ID NO: 169188
uguuacauaaaucucugga

SEQ ID NO: 169190 - RNA, 19 nt, Artificial Sequence
  Description of Artificial Sequence: Synthetic oligonucleotide
  Sense strand starting at position 3766 of SEQ ID NO: 2180
aagggacuguacuaaauuu

SEQ ID NO: 169191 - RNA, 19 nt, Artificial Sequence
  Description of Artificial Sequence: Synthetic oligonucleotide
  Antisense strand to SEQ ID NO: 169190
aaauuuaguacagucccuu

SEQ ID NO: 169192 - RNA, 19 nt, Artificial Sequence
  Description of Artificial Sequence: Synthetic oligonucleotide
  Sense strand starting at position 3720 of SEQ ID NO: 2180
uuuaaacugcauggagauu

SEQ ID NO: 169193 - RNA, 19 nt, Artificial Sequence
  Description of Artificial Sequence: Synthetic oligonucleotide
  Antisense strand to SEQ ID NO: 169192
aaucuccaugcaguuuaaa

SEQ ID NO: 169194 - RNA, 19 nt, Artificial Sequence
  Description of Artificial Sequence: Synthetic oligonucleotide
  Sense strand starting at position 3638 of SEQ ID NO: 2180
uuccauauuggcgaguauu

SEQ ID NO: 169195 - RNA, 19 nt, Artificial Sequence
  Description of Artificial Sequence: Synthetic oligonucleotide
  Antisense strand to SEQ ID NO: 169194
aauacucgccaauauggaa

SEQ ID NO: 169196 - RNA, 19 nt, Artificial Sequence
  Description of Artificial Sequence: Synthetic oligonucleotide
  Sense strand starting at position 3627 of SEQ ID NO: 2180
agcuuaggauguuccauau

SEQ ID NO: 169197 - RNA, 19 nt, Artificial Sequence
  Description of Artificial Sequence: Synthetic oligonucleotide
  Antisense strand to SEQ ID NO: 169196
auauggaacauccuaagcu

SEQ ID NO: 169198 - RNA, 19 nt, Artificial Sequence
  Description of Artificial Sequence: Synthetic oligonucleotide
  Sense strand starting at position 3576 of SEQ ID NO: 2180
ggaccuccuugcucucuaa

SEQ ID NO: 169199 - RNA, 19 nt, Artificial Sequence
  Description of Artificial Sequence: Synthetic oligonucleotide
  Antisense strand to SEQ ID NO: 169198
uuagagagcaaggaggucc

SEQ ID NO: 169200 - RNA, 19 nt, Artificial Sequence
  Description of Artificial Sequence: Synthetic oligonucleotide
  Sense strand starting at position 3515 of SEQ ID NO: 2180
ggugguuuccucuucguuu

SEQ ID NO: 169201 - RNA, 19 nt, Artificial Sequence
  Description of Artificial Sequence: Synthetic oligonucleotide
  Antisense strand to SEQ ID NO: 169200
aaacgaagaggaaaccacc

SEQ ID NO: 169202 - RNA, 19 nt, Artificial Sequence
  Description of Artificial Sequence: Synthetic oligonucleotide
  Sense strand starting at position 3451 of SEQ ID NO: 2180
cauguaugauuugaguaua

SEQ ID NO: 169203 - RNA, 19 nt, Artificial Sequence
  Description of Artificial Sequence: Synthetic oligonucleotide
  Antisense strand to SEQ ID NO: 169202
uauacucaaaucauacaug

SEQ ID NO: 169204 - RNA, 19 nt, Artificial Sequence
  Description of Artificial Sequence: Synthetic oligonucleotide
  Sense strand starting at position 3441 of SEQ ID NO: 2180
acaccuuucccauguauga

SEQ ID NO: 169205 - RNA, 19 nt, Artificial Sequence
  Description of Artificial Sequence: Synthetic oligonucleotide
  Antisense strand to SEQ ID NO: 169204
ucauacaugggaaaggugu

SEQ ID NO: 169206 - RNA, 19 nt, Artificial Sequence
  Description of Artificial Sequence: Synthetic oligonucleotide
  Sense strand starting at position 3416 of SEQ ID NO: 2180
ucuaaauugcuugaugauu

SEQ ID NO: 169207 - RNA, 19 nt, Artificial Sequence
  Description of Artificial Sequence: Synthetic oligonucleotide
  Antisense strand to SEQ ID NO: 169206
aaucaucaagcaauuuaga

SEQ ID NO: 169208 - RNA, 19 nt, Artificial Sequence
  Description of Artificial Sequence: Synthetic oligonucleotide
  Sense strand starting at position 3415 of SEQ ID NO: 2180
uucuaaauugcuugaugau

SEQ ID NO: 169209 - RNA, 19 nt, Artificial Sequence
  Description of Artificial Sequence: Synthetic oligonucleotide
  Antisense strand to SEQ ID NO: 169208
aucaucaagcaauuuagaa

SEQ ID NO: 169210 - RNA, 19 nt, Artificial Sequence
  Description of Artificial Sequence: Synthetic oligonucleotide
  Sense strand starting at position 3414 of SEQ ID NO: 2180
auucuaaauugcuugauga

SEQ ID NO: 169211 - RNA, 19 nt, Artificial Sequence
  Description of Artificial Sequence: Synthetic oligonucleotide
  Antisense strand to SEQ ID NO: 169210
ucaucaagcaauuuagaau

SEQ ID NO: 169212 - RNA, 19 nt, Artificial Sequence
  Description of Artificial Sequence: Synthetic oligonucleotide
  Sense strand starting at position 3390 of SEQ ID NO: 2180
gccuaagaacucuguuuac

SEQ ID NO: 169213 - RNA, 19 nt, Artificial Sequence
  Description of Artificial Sequence: Synthetic oligonucleotide
  Antisense strand to SEQ ID NO: 169212
guaaacagaguucuuaggc

SEQ ID NO: 169214 - RNA, 19 nt, Artificial Sequence
  Description of Artificial Sequence: Synthetic oligonucleotide
  Sense strand starting at position 3153 of SEQ ID NO: 2180
gaguuacuguguccaagac

SEQ ID NO: 169215 - RNA, 19 nt, Artificial Sequence
  Description of Artificial Sequence: Synthetic oligonucleotide
  Antisense strand to SEQ ID NO: 169214
gucuuggacacaguaacuc

SEQ ID NO: 169216 - RNA, 19 nt, Artificial Sequence
  Description of Artificial Sequence: Synthetic oligonucleotide
  Sense strand starting at position 3118 of SEQ ID NO: 2180
uagcgagacgcucaggaau

SEQ ID NO: 169217 - RNA, 19 nt, Artificial Sequence
  Description of Artificial Sequence: Synthetic oligonucleotide
  Antisense strand to SEQ ID NO: 169216
auuccugagcgucucgcua

SEQ ID NO: 169218 - RNA, 19 nt, Artificial Sequence
  Description of Artificial Sequence: Synthetic oligonucleotide
  Sense strand starting at position 3069 of SEQ ID NO: 2180
agacgauuccacuguggua

SEQ ID NO: 169219 - RNA, 19 nt, Artificial Sequence
  Description of Artificial Sequence: Synthetic oligonucleotide
  Antisense strand to SEQ ID NO: 169218
uaccacaguggaaucgucu

SEQ ID NO: 169220 - RNA, 19 nt, Artificial Sequence
  Description of Artificial Sequence: Synthetic oligonucleotide
  Sense strand starting at position 2983 of SEQ ID NO: 2180
cgaguccacaaaugauuga

SEQ ID NO: 169221 - RNA, 19 nt, Artificial Sequence
  Description of Artificial Sequence: Synthetic oligonucleotide
  Antisense strand to SEQ ID NO: 169220
ucaaucauuuguggacucg

SEQ ID NO: 169222 - RNA, 19 nt, Artificial Sequence
  Description of Artificial Sequence: Synthetic oligonucleotide
  Sense strand starting at position 2232 of SEQ ID NO: 2180
uucguagucccagagguga

SEQ ID NO: 169223 - RNA, 19 nt, Artificial Sequence
  Description of Artificial Sequence: Synthetic oligonucleotide
  Antisense strand to SEQ ID NO: 169222
ucaccucugggacuacgaa

SEQ ID NO: 169224 - RNA, 19 nt, Artificial Sequence
  Description of Artificial Sequence: Synthetic oligonucleotide
  Sense strand starting at position 2018 of SEQ ID NO: 2180
cagaaugcacugcgaagaa

SEQ ID NO: 169225 - RNA, 19 nt, Artificial Sequence
  Description of Artificial Sequence: Synthetic oligonucleotide
  Antisense strand to SEQ ID NO: 169224
uucuucgcagugcauucug

SEQ ID NO: 169226 - RNA, 19 nt, Artificial Sequence
  Description of Artificial Sequence: Synthetic oligonucleotide
  Sense strand starting at position 1538 of SEQ ID NO: 2180
auaagauugggcugugaaa

SEQ ID NO: 169227 - RNA, 19 nt, Artificial Sequence
  Description of Artificial Sequence: Synthetic oligonucleotide
  Antisense strand to SEQ ID NO: 169226
uuucacagcccaaucuuau

SEQ ID NO: 169228 - RNA, 19 nt, Artificial Sequence
  Description of Artificial Sequence: Synthetic oligonucleotide
  Sense strand starting at position 1536 of SEQ ID NO: 2180
aaauaagauugggcuguga

SEQ ID NO: 169229 - RNA, 19 nt, Artificial Sequence
  Description of Artificial Sequence: Synthetic oligonucleotide
  Antisense strand to SEQ ID NO: 169228
ucacagcccaaucuuauuu

SEQ ID NO: 169230 - RNA, 19 nt, Artificial Sequence
  Description of Artificial Sequence: Synthetic oligonucleotide
  Sense strand starting at position 1411 of SEQ ID NO: 2180
agucuacguccugaguuag

SEQ ID NO: 169231 - RNA, 19 nt, Artificial Sequence
  Description of Artificial Sequence: Synthetic oligonucleotide
  Antisense strand to SEQ ID NO: 169230
cuaacucaggacguagacu

SEQ ID NO: 169232 - RNA, 19 nt, Artificial Sequence
  Description of Artificial Sequence: Synthetic oligonucleotide
  Sense strand starting at position 1398 of SEQ ID NO: 2180
guaaucaaucaucagucua

SEQ ID NO: 169233 - RNA, 19 nt, Artificial Sequence
  Description of Artificial Sequence: Synthetic oligonucleotide
  Antisense strand to SEQ ID NO: 169232
uagacugaugauugauuac

SEQ ID NO: 169234 - RNA, 19 nt, Artificial Sequence
  Description of Artificial Sequence: Synthetic oligonucleotide
  Sense strand starting at position 1336 of SEQ ID NO: 2180
guggaauugacaggaagua

SEQ ID NO: 169235 - RNA, 19 nt, Artificial Sequence
  Description of Artificial Sequence: Synthetic oligonucleotide
  Antisense strand to SEQ ID NO: 169234
uacuuccugucaauuccac

SEQ ID NO: 169236 - RNA, 19 nt, Artificial Sequence
  Description of Artificial Sequence: Synthetic oligonucleotide
  Sense strand starting at position 1294 of SEQ ID NO: 2180
aauugaguucucuggaaga

SEQ ID NO: 169237 - RNA, 19 nt, Artificial Sequence
  Description of Artificial Sequence: Synthetic oligonucleotide
  Antisense strand to SEQ ID NO: 169236
ucuuccagagaacucaauu

SEQ ID NO: 169238 - RNA, 19 nt, Artificial Sequence
  Description of Artificial Sequence: Synthetic oligonucleotide
  Sense strand starting at position 1292 of SEQ ID NO: 2180
acaauugaguucucuggaa

SEQ ID NO: 169239 - RNA, 19 nt, Artificial Sequence
  Description of Artificial Sequence: Synthetic oligonucleotide
  Antisense strand to SEQ ID NO: 169238
uuccagagaacucaauugu

SEQ ID NO: 169240 - RNA, 19 nt, Artificial Sequence
  Description of Artificial Sequence: Synthetic oligonucleotide
  Sense strand starting at position 923 of SEQ ID NO: 2180
acagcuaugggcgaaacaa

SEQ ID NO: 169241 - RNA, 19 nt, Artificial Sequence
  Description of Artificial Sequence: Synthetic oligonucleotide
  Antisense strand to SEQ ID NO: 169240
uuguuucgcccauagcugu

SEQ ID NO: 169242 - RNA, 19 nt, Artificial Sequence
  Description of Artificial Sequence: Synthetic oligonucleotide
  Sense strand starting at position 868 of SEQ ID NO: 2180
gaguaauuacaagggugua

SEQ ID NO: 169243 - RNA, 19 nt, Artificial Sequence
  Description of Artificial Sequence: Synthetic oligonucleotide
  Antisense strand to SEQ ID NO: 169242
uacacccuuguaauuacuc

SEQ ID NO: 169244 - RNA, 19 nt, Artificial Sequence
  Description of Artificial Sequence: Synthetic oligonucleotide
  Sense strand starting at position 856 of SEQ ID NO: 2180
ugguguaaaccggaguaau

SEQ ID NO: 169245 - RNA, 19 nt, Artificial Sequence
  Description of Artificial Sequence: Synthetic oligonucleotide
  Antisense strand to SEQ ID NO: 169244
auuacuccgguuuacacca

SEQ ID NO: 169246 - RNA, 19 nt, Artificial Sequence
  Description of Artificial Sequence: Synthetic oligonucleotide
  Sense strand starting at position 698 of SEQ ID NO: 2180
gugugacagaugugagaga

SEQ ID NO: 169247 - RNA, 19 nt, Artificial Sequence
  Description of Artificial Sequence: Synthetic oligonucleotide
  Antisense strand to SEQ ID NO: 169246
ucucucacaucugucacac

SEQ ID NO: 169248 - RNA, 19 nt, Artificial Sequence
  Description of Artificial Sequence: Synthetic oligonucleotide
  Sense strand starting at position 696 of SEQ ID NO: 2180
cagugugacagaugugaga

SEQ ID NO: 169249 - RNA, 19 nt, Artificial Sequence
  Description of Artificial Sequence: Synthetic oligonucleotide
  Antisense strand to SEQ ID NO: 169248
ucucacaucugucacacug

SEQ ID NO: 169250 - RNA, 19 nt, Artificial Sequence
  Description of Artificial Sequence: Synthetic oligonucleotide
  Sense strand starting at position 694 of SEQ ID NO: 2180
ggcagugugacagauguga

SEQ ID NO: 169251 - RNA, 19 nt, Artificial Sequence
  Description of Artificial Sequence: Synthetic oligonucleotide
  Antisense strand to SEQ ID NO: 169250
ucacaucugucacacugcc

SEQ ID NO: 169252 - RNA, 19 nt, Artificial Sequence
  Description of Artificial Sequence: Synthetic oligonucleotide
  Sense strand starting at position 305 of SEQ ID NO: 2180
guagcaagagcucauuaaa

SEQ ID NO: 169253 - RNA, 19 nt, Artificial Sequence
  Description of Artificial Sequence: Synthetic oligonucleotide
  Antisense strand to SEQ ID NO: 169252
uuuaaugagcucuugcuac

SEQ ID NO: 169254 - RNA, 19 nt, Artificial Sequence
  Description of Artificial Sequence: Synthetic oligonucleotide
  Sense strand starting at position 234 of SEQ ID NO: 2180
gguaacuauguugauugau

SEQ ID NO: 169255 - RNA, 19 nt, Artificial Sequence
  Description of Artificial Sequence: Synthetic oligonucleotide
  Antisense strand to SEQ ID NO: 169254
aucaaucaacauaguuacc

SEQ ID NO: 169256 - RNA, 19 nt, Artificial Sequence
  Description of Artificial Sequence: Synthetic oligonucleotide
  Sense strand starting at position 231 of SEQ ID NO: 2180
uuggguaacuauguugauu

SEQ ID NO: 169257 - RNA, 19 nt, Artificial Sequence
  Description of Artificial Sequence: Synthetic oligonucleotide
  Antisense strand to SEQ ID NO: 169256
aaucaacauaguuacccaa

SEQ ID NO: 169258 - RNA, 19 nt, Artificial Sequence
  Description of Artificial Sequence: Synthetic oligonucleotide
  Sense strand starting at position 36 of SEQ ID NO: 2180
augucauccuggccaaaua

SEQ ID NO: 169259 - RNA, 19 nt, Artificial Sequence
  Description of Artificial Sequence: Synthetic oligonucleotide
  Antisense strand to SEQ ID NO: 169258
uauuuggccaggaugacau

SEQ ID NO: 169260 - RNA, 19 nt, Artificial Sequence
  Description of Artificial Sequence: Synthetic oligonucleotide
  Sense strand starting at position 3583 of SEQ ID NO: 2181
ugcagauguuauccagaga

SEQ ID NO: 169261 - RNA, 19 nt, Artificial Sequence
  Description of Artificial Sequence: Synthetic oligonucleotide
  Antisense strand to SEQ ID NO: 169260
ucucuggauaacaucugca

SEQ ID NO: 169262 - RNA, 19 nt, Artificial Sequence
  Description of Artificial Sequence: Synthetic oligonucleotide
  Sense strand starting at position 3573 of SEQ ID NO: 2181
ugaaacauucugcagaugu

SEQ ID NO: 169263 - RNA, 19 nt, Artificial Sequence
  Description of Artificial Sequence: Synthetic oligonucleotide
  Antisense strand to SEQ ID NO: 169262
acaucugcagaauguuuca

SEQ ID NO: 169264 - RNA, 19 nt, Artificial Sequence
  Description of Artificial Sequence: Synthetic oligonucleotide
  Sense strand starting at position 3572 of SEQ ID NO: 2181
augaaacauucugcagaug

SEQ ID NO: 169265 - RNA, 19 nt, Artificial Sequence
  Description of Artificial Sequence: Synthetic oligonucleotide
  Antisense strand to SEQ ID NO: 169264
caucugcagaauguuucau

SEQ ID NO: 169266 - RNA, 19 nt, Artificial Sequence
  Description of Artificial Sequence: Synthetic oligonucleotide
  Sense strand starting at position 3555 of SEQ ID NO: 2181
gcacauacucgggacacau

SEQ ID NO: 169267 - RNA, 19 nt, Artificial Sequence
  Description of Artificial Sequence: Synthetic oligonucleotide
  Antisense strand to SEQ ID NO: 169266
augugucccgaguaugugc

SEQ ID NO: 169268 - RNA, 19 nt, Artificial Sequence
  Description of Artificial Sequence: Synthetic oligonucleotide
  Sense strand starting at position 3541 of SEQ ID NO: 2181
gaguaauuggccuggcaca

SEQ ID NO: 169269 - RNA, 19 nt, Artificial Sequence
  Description of Artificial Sequence: Synthetic oligonucleotide
  Antisense strand to SEQ ID NO: 169268
ugugccaggccaauuacuc

SEQ ID NO: 169270 - RNA, 19 nt, Artificial Sequence
  Description of Artificial Sequence: Synthetic oligonucleotide
  Sense strand starting at position 3531 of SEQ ID NO: 2181
cagaauugcugaguaauug

SEQ ID NO: 169271 - RNA, 19 nt, Artificial Sequence
  Description of Artificial Sequence: Synthetic oligonucleotide
  Antisense strand to SEQ ID NO: 169270
caauuacucagcaauucug

SEQ ID NO: 169272 - RNA, 19 nt, Artificial Sequence
  Description of Artificial Sequence: Synthetic oligonucleotide
  Sense strand starting at position 3527 of SEQ ID NO: 2181
gaagcagaauugcugagua

SEQ ID NO: 169273 - RNA, 19 nt, Artificial Sequence
  Description of Artificial Sequence: Synthetic oligonucleotide
  Antisense strand to SEQ ID NO: 169272
uacucagcaauucugcuuc

SEQ ID NO: 169274 - RNA, 19 nt, Artificial Sequence
  Description of Artificial Sequence: Synthetic oligonucleotide
  Sense strand starting at position 3388 of SEQ ID NO: 2181
uugaacugggugugagaaa

SEQ ID NO: 169275 - RNA, 19 nt, Artificial Sequence
  Description of Artificial Sequence: Synthetic oligonucleotide
  Antisense strand to SEQ ID NO: 169274
uuucucacacccaguucaa

SEQ ID NO: 169276 - RNA, 19 nt, Artificial Sequence
  Description of Artificial Sequence: Synthetic oligonucleotide
  Sense strand starting at position 3386 of SEQ ID NO: 2181
cauugaacugggugugaga

SEQ ID NO: 169277 - RNA, 19 nt, Artificial Sequence
  Description of Artificial Sequence: Synthetic oligonucleotide
  Antisense strand to SEQ ID NO: 169276
ucucacacccaguucaaug

SEQ ID NO: 169278 - RNA, 19 nt, Artificial Sequence
  Description of Artificial Sequence: Synthetic oligonucleotide
  Sense strand starting at position 3360 of SEQ ID NO: 2181
ucaacugagggauguugua

SEQ ID NO: 169279 - RNA, 19 nt, Artificial Sequence
  Description of Artificial Sequence: Synthetic oligonucleotide
  Antisense strand to SEQ ID NO: 169278
uacaacaucccucaguuga

SEQ ID NO: 169280 - RNA, 19 nt, Artificial Sequence
  Description of Artificial Sequence: Synthetic oligonucleotide
  Sense strand starting at position 3357 of SEQ ID NO: 2181
ggcucaacugagggauguu

SEQ ID NO: 169281 - RNA, 19 nt, Artificial Sequence
  Description of Artificial Sequence: Synthetic oligonucleotide
  Antisense strand to SEQ ID NO: 169280
aacaucccucaguugagcc

SEQ ID NO: 169282 - RNA, 19 nt, Artificial Sequence
  Description of Artificial Sequence: Synthetic oligonucleotide
  Sense strand starting at position 3293 of SEQ ID NO: 2181
ccuuauaaucagcauugga

SEQ ID NO: 169283 - RNA, 19 nt, Artificial Sequence
  Description of Artificial Sequence: Synthetic oligonucleotide
  Antisense strand to SEQ ID NO: 169282
uccaaugcugauuauaagg

SEQ ID NO: 169284 - RNA, 19 nt, Artificial Sequence
  Description of Artificial Sequence: Synthetic oligonucleotide
  Sense strand starting at position 3223 of SEQ ID NO: 2181
gcuguuuauuuaucaagua

SEQ ID NO: 169285 - RNA, 19 nt, Artificial Sequence
  Description of Artificial Sequence: Synthetic oligonucleotide
  Antisense strand to SEQ ID NO: 169284
uacuugauaaauaaacagc

SEQ ID NO: 169286 - RNA, 19 nt, Artificial Sequence
  Description of Artificial Sequence: Synthetic oligonucleotide
  Sense strand starting at position 3219 of SEQ ID NO: 2181
cugggcuguuuauuuauca

SEQ ID NO: 169287 - RNA, 19 nt, Artificial Sequence
  Description of Artificial Sequence: Synthetic oligonucleotide
  Antisense strand to SEQ ID NO: 169286
ugauaaauaaacagcccag

SEQ ID NO: 169288 - RNA, 19 nt, Artificial Sequence
  Description of Artificial Sequence: Synthetic oligonucleotide
  Sense strand starting at position 3186 of SEQ ID NO: 2181
uguaaauggucaguuuauu

SEQ ID NO: 169289 - RNA, 19 nt, Artificial Sequence
  Description of Artificial Sequence: Synthetic oligonucleotide
  Antisense strand to SEQ ID NO: 169288
aauaaacugaccauuuaca

SEQ ID NO: 169290 - RNA, 19 nt, Artificial Sequence
  Description of Artificial Sequence: Synthetic oligonucleotide
  Sense strand starting at position 3184 of SEQ ID NO: 2181
gguguaaauggucaguuua

SEQ ID NO: 169291 - RNA, 19 nt, Artificial Sequence
  Description of Artificial Sequence: Synthetic oligonucleotide
  Antisense strand to SEQ ID NO: 169290
uaaacugaccauuuacacc

SEQ ID NO: 169292 - RNA, 19 nt, Artificial Sequence
  Description of Artificial Sequence: Synthetic oligonucleotide
  Sense strand starting at position 3023 of SEQ ID NO: 2181
agauucuagcucuggaaga

SEQ ID NO: 169293 - RNA, 19 nt, Artificial Sequence
  Description of Artificial Sequence: Synthetic oligonucleotide
  Antisense strand to SEQ ID NO: 169292
ucuuccagagcuagaaucu

SEQ ID NO: 169294 - RNA, 19 nt, Artificial Sequence
  Description of Artificial Sequence: Synthetic oligonucleotide
  Sense strand starting at position 3020 of SEQ ID NO: 2181
uccagauucuagcucugga

SEQ ID NO: 169295 - RNA, 19 nt, Artificial Sequence
  Description of Artificial Sequence: Synthetic oligonucleotide
  Antisense strand to SEQ ID NO: 169294
uccagagcuagaaucugga

SEQ ID NO: 169296 - RNA, 19 nt, Artificial Sequence
  Description of Artificial Sequence: Synthetic oligonucleotide
  Sense strand starting at position 3008 of SEQ ID NO: 2181
cccagagauucuuccagau

SEQ ID NO: 169297 - RNA, 19 nt, Artificial Sequence
  Description of Artificial Sequence: Synthetic oligonucleotide
  Antisense strand to SEQ ID NO: 169296
aucuggaagaaucucuggg

SEQ ID NO: 169298 - RNA, 19 nt, Artificial Sequence
  Description of Artificial Sequence: Synthetic oligonucleotide
  Sense strand starting at position 2879 of SEQ ID NO: 2181
guugcaaacucacuuaaag

SEQ ID NO: 169299 - RNA, 19 nt, Artificial Sequence
  Description of Artificial Sequence: Synthetic oligonucleotide
  Antisense strand to SEQ ID NO: 169298
cuuuaagugaguuugcaac

SEQ ID NO: 169300 - RNA, 19 nt, Artificial Sequence
  Description of Artificial Sequence: Synthetic oligonucleotide
  Sense strand starting at position 2868 of SEQ ID NO: 2181
gcaacuaaauaguugcaaa

SEQ ID NO: 169301 - RNA, 19 nt, Artificial Sequence
  Description of Artificial Sequence: Synthetic oligonucleotide
  Antisense strand to SEQ ID NO: 169300
uuugcaacuauuuaguugc

SEQ ID NO: 169302 - RNA, 19 nt, Artificial Sequence
  Description of Artificial Sequence: Synthetic oligonucleotide
  Sense strand starting at position 2744 of SEQ ID NO: 2181
ucugaugacuugccaauga

SEQ ID NO: 169303 - RNA, 19 nt, Artificial Sequence
  Description of Artificial Sequence: Synthetic oligonucleotide
  Antisense strand to SEQ ID NO: 169302
ucauuggcaagucaucaga

SEQ ID NO: 169304 - RNA, 19 nt, Artificial Sequence
  Description of Artificial Sequence: Synthetic oligonucleotide
  Sense strand starting at position 2734 of SEQ ID NO: 2181
agauguuuccucugaugac

SEQ ID NO: 169305 - RNA, 19 nt, Artificial Sequence
  Description of Artificial Sequence: Synthetic oligonucleotide
  Antisense strand to SEQ ID NO: 169304
gucaucagaggaaacaucu

SEQ ID NO: 169306 - RNA, 19 nt, Artificial Sequence
  Description of Artificial Sequence: Synthetic oligonucleotide
  Sense strand starting at position 2732 of SEQ ID NO: 2181
auagauguuuccucugaug

SEQ ID NO: 169307 - RNA, 19 nt, Artificial Sequence
  Description of Artificial Sequence: Synthetic oligonucleotide
  Antisense strand to SEQ ID NO: 169306
caucagaggaaacaucuau

SEQ ID NO: 169308 - RNA, 19 nt, Artificial Sequence
  Description of Artificial Sequence: Synthetic oligonucleotide
  Sense strand starting at position 2731 of SEQ ID NO: 2181
gauagauguuuccucugau

SEQ ID NO: 169309 - RNA, 19 nt, Artificial Sequence
  Description of Artificial Sequence: Synthetic oligonucleotide
  Antisense strand to SEQ ID NO: 169308
aucagaggaaacaucuauc

SEQ ID NO: 169310 - RNA, 19 nt, Artificial Sequence
  Description of Artificial Sequence: Synthetic oligonucleotide
  Sense strand starting at position 2705 of SEQ ID NO: 2181
auacuuauugcaugaaugu

SEQ ID NO: 169311 - RNA, 19 nt, Artificial Sequence
  Description of Artificial Sequence: Synthetic oligonucleotide
  Antisense strand to SEQ ID NO: 169310
acauucaugcaauaaguau

SEQ ID NO: 169312 - RNA, 19 nt, Artificial Sequence
  Description of Artificial Sequence: Synthetic oligonucleotide
  Sense strand starting at position 2641 of SEQ ID NO: 2181
gcaauaauagcccaugugu

SEQ ID NO: 169313 - RNA, 19 nt, Artificial Sequence
  Description of Artificial Sequence: Synthetic oligonucleotide
  Antisense strand to SEQ ID NO: 169312
acacaugggcuauuauugc

SEQ ID NO: 169314 - RNA, 19 nt, Artificial Sequence
  Description of Artificial Sequence: Synthetic oligonucleotide
  Sense strand starting at position 2533 of SEQ ID NO: 2181
cuaagaugucuaggaccau

SEQ ID NO: 169315 - RNA, 19 nt, Artificial Sequence
  Description of Artificial Sequence: Synthetic oligonucleotide
  Antisense strand to SEQ ID NO: 169314
augguccuagacaucuuag

SEQ ID NO: 169316 - RNA, 19 nt, Artificial Sequence
  Description of Artificial Sequence: Synthetic oligonucleotide
  Sense strand starting at position 2422 of SEQ ID NO: 2181
aaacgaguuguaugaucuu

SEQ ID NO: 169317 - RNA, 19 nt, Artificial Sequence
  Description of Artificial Sequence: Synthetic oligonucleotide
  Antisense strand to SEQ ID NO: 169316
aagaucauacaacucguuu

SEQ ID NO: 169318 - RNA, 19 nt, Artificial Sequence
  Description of Artificial Sequence: Synthetic oligonucleotide
  Sense strand starting at position 2418 of SEQ ID NO: 2181
gaugaaacgaguuguauga

SEQ ID NO: 169319 - RNA, 19 nt, Artificial Sequence
  Description of Artificial Sequence: Synthetic oligonucleotide
  Antisense strand to SEQ ID NO: 169318
ucauacaacucguuucauc

SEQ ID NO: 169320 - RNA, 19 nt, Artificial Sequence
  Description of Artificial Sequence: Synthetic oligonucleotide
  Sense strand starting at position 2369 of SEQ ID NO: 2181
acacgaugcgucaguaguu

SEQ ID NO: 169321 - RNA, 19 nt, Artificial Sequence
  Description of Artificial Sequence: Synthetic oligonucleotide
  Antisense strand to SEQ ID NO: 169320
aacuacugacgcaucgugu

SEQ ID NO: 169322 - RNA, 19 nt, Artificial Sequence
  Description of Artificial Sequence: Synthetic oligonucleotide
  Sense strand starting at position 2227 of SEQ ID NO: 2181
agacccuggccuuauaaau

SEQ ID NO: 169323 - RNA, 19 nt, Artificial Sequence
  Description of Artificial Sequence: Synthetic oligonucleotide
  Antisense strand to SEQ ID NO: 169322
auuuauaaggccagggucu

SEQ ID NO: 169324 - RNA, 19 nt, Artificial Sequence
  Description of Artificial Sequence: Synthetic oligonucleotide
  Sense strand starting at position 985 of SEQ ID NO: 2181
caagaacgcguuuaacuua

SEQ ID NO: 169325 - RNA, 19 nt, Artificial Sequence
  Description of Artificial Sequence: Synthetic oligonucleotide
  Antisense strand to SEQ ID NO: 169324
uaaguuaaacgcguucuug

SEQ ID NO: 169326 - RNA, 19 nt, Artificial Sequence
  Description of Artificial Sequence: Synthetic oligonucleotide
  Sense strand starting at position 481 of SEQ ID NO: 2181
agguuaguccuaggaagca

SEQ ID NO: 169327 - RNA, 19 nt, Artificial Sequence
  Description of Artificial Sequence: Synthetic oligonucleotide
  Antisense strand to SEQ ID NO: 169326
ugcuuccuaggacuaaccu

SEQ ID NO: 169328 - RNA, 19 nt, Artificial Sequence
  Description of Artificial Sequence: Synthetic oligonucleotide
  Sense strand starting at position 342 of SEQ ID NO: 2181
ggccuuuggaauugcagaa

SEQ ID NO: 169329 - RNA, 19 nt, Artificial Sequence
  Description of Artificial Sequence: Synthetic oligonucleotide
  Antisense strand to SEQ ID NO: 169328
uucugcaauuccaaaggcc

SEQ ID NO: 169330 - RNA, 19 nt, Artificial Sequence
  Description of Artificial Sequence: Synthetic oligonucleotide
  Sense strand starting at position 281 of SEQ ID NO: 2181
cuucgagcuagguaugaac

SEQ ID NO: 169331 - RNA, 19 nt, Artificial Sequence
  Description of Artificial Sequence: Synthetic oligonucleotide
  Antisense strand to SEQ ID NO: 169330
guucauaccuagcucgaag

SEQ ID NO: 169332 - RNA, 19 nt, Artificial Sequence
  Description of Artificial Sequence: Synthetic oligonucleotide
  Sense strand starting at position 271 of SEQ ID NO: 2181
ggaagugaaucuucgagcu

SEQ ID NO: 169333 - RNA, 19 nt, Artificial Sequence
  Description of Artificial Sequence: Synthetic oligonucleotide
  Antisense strand to SEQ ID NO: 169332
agcucgaagauucacuucc

SEQ ID NO: 169334 - RNA, 19 nt, Artificial Sequence
  Description of Artificial Sequence: Synthetic oligonucleotide
  Sense strand starting at position 260 of SEQ ID NO: 2181
uggcuuccugaggaaguga

SEQ ID NO: 169335 - RNA, 19 nt, Artificial Sequence
  Description of Artificial Sequence: Synthetic oligonucleotide
  Antisense strand to SEQ ID NO: 169334
ucacuuccucaggaagcca

SEQ ID NO: 169336 - RNA, 19 nt, Artificial Sequence
  Description of Artificial Sequence: Synthetic oligonucleotide
  Sense strand starting at position 164 of SEQ ID NO: 2181
guaaguaugccugaccacu

SEQ ID NO: 169337 - RNA, 19 nt, Artificial Sequence
  Description of Artificial Sequence: Synthetic oligonucleotide
  Antisense strand to SEQ ID NO: 169336
aguggucaggcauacuuac

SEQ ID NO: 169338 - RNA, 19 nt, Artificial Sequence
  Description of Artificial Sequence: Synthetic oligonucleotide
  Sense strand starting at position 39 of SEQ ID NO: 2181
auggcacugcuuuaaggua

SEQ ID NO: 169339 - RNA, 19 nt, Artificial Sequence
  Description of Artificial Sequence: Synthetic oligonucleotide
  Antisense strand to SEQ ID NO: 169338
uaccuuaaagcagugccau

SEQ ID NO: 169340 - RNA, 19 nt, Artificial Sequence
  Description of Artificial Sequence: Synthetic oligonucleotide
  Sense strand starting at position 73 of SEQ ID NO: 2182
guagccauuucugucugaa

SEQ ID NO: 169341 - RNA, 19 nt, Artificial Sequence
  Description of Artificial Sequence: Synthetic oligonucleotide
  Antisense strand to SEQ ID NO: 169340
uucagacagaaauggcuac

SEQ ID NO: 169342 - RNA, 19 nt, Artificial Sequence
  Description of Artificial Sequence: Synthetic oligonucleotide
  Sense strand starting at position 76 of SEQ ID NO: 2182
gccauuucugucugaagca

SEQ ID NO: 169343 - RNA, 19 nt, Artificial Sequence
  Description of Artificial Sequence: Synthetic oligonucleotide
  Antisense strand to SEQ ID NO: 169342
ugcuucagacagaaauggc

SEQ ID NO: 169344 - RNA, 19 nt, Artificial Sequence
  Description of Artificial Sequence: Synthetic oligonucleotide
  Sense strand starting at position 113 of SEQ ID NO: 2182
guuucuauuccauauuaga

SEQ ID NO: 169345 - RNA, 19 nt, Artificial Sequence
  Description of Artificial Sequence: Synthetic oligonucleotide
  Antisense strand to SEQ ID NO: 169344
ucuaauauggaauagaaac

SEQ ID NO: 169346 - RNA, 19 nt, Artificial Sequence
  Description of Artificial Sequence: Synthetic oligonucleotide
  Sense strand starting at position 221 of SEQ ID NO: 2182
ccaagucuagugugauuug

SEQ ID NO: 169347 - RNA, 19 nt, Artificial Sequence
  Description of Artificial Sequence: Synthetic oligonucleotide
  Antisense strand to SEQ ID NO: 169346
caaaucacacuagacuugg

SEQ ID NO: 169348 - RNA, 19 nt, Artificial Sequence
  Description of Artificial Sequence: Synthetic oligonucleotide
  Sense strand starting at position 251 of SEQ ID NO: 2182
gguaaugucccaugaagag

SEQ ID NO: 169349 - RNA, 19 nt, Artificial Sequence
  Description of Artificial Sequence: Synthetic oligonucleotide
  Antisense strand to SEQ ID NO: 169348
cucuucaugggacauuacc

SEQ ID NO: 169350 - RNA, 19 nt, Artificial Sequence
  Description of Artificial Sequence: Synthetic oligonucleotide
  Sense strand starting at position 286 of SEQ ID NO: 2182
ugccaucaaguacaugaaa

SEQ ID NO: 169351 - RNA, 19 nt, Artificial Sequence
  Description of Artificial Sequence: Synthetic oligonucleotide
  Antisense strand to SEQ ID NO: 169350
uuucauguacuugauggca

SEQ ID NO: 169352 - RNA, 19 nt, Artificial Sequence
  Description of Artificial Sequence: Synthetic oligonucleotide
  Sense strand starting at position 449 of SEQ ID NO: 2182
gccucaagucaauagaucu

SEQ ID NO: 169353 - RNA, 19 nt, Artificial Sequence
  Description of Artificial Sequence: Synthetic oligonucleotide
  Antisense strand to SEQ ID NO: 169352
agaucuauugacuugaggc

SEQ ID NO: 169354 - RNA, 19 nt, Artificial Sequence
  Description of Artificial Sequence: Synthetic oligonucleotide
  Sense strand starting at position 729 of SEQ ID NO: 2182
ucaggcagaucccuaaaua

SEQ ID NO: 169355 - RNA, 19 nt, Artificial Sequence
  Description of Artificial Sequence: Synthetic oligonucleotide
  Antisense strand to SEQ ID NO: 169354
uauuuagggaucugccuga

SEQ ID NO: 169356 - RNA, 19 nt, Artificial Sequence
  Description of Artificial Sequence: Synthetic oligonucleotide
  Sense strand starting at position 896 of SEQ ID NO: 2182
cccaauguggauuaucuau

SEQ ID NO: 169357 - RNA, 19 nt, Artificial Sequence
  Description of Artificial Sequence: Synthetic oligonucleotide
  Antisense strand to SEQ ID NO: 169356
auagauaauccacauuggg

SEQ ID NO: 169358 - RNA, 19 nt, Artificial Sequence
  Description of Artificial Sequence: Synthetic oligonucleotide
  Sense strand starting at position 1016 of SEQ ID NO: 2182
uccuuuaaaguugagcgaa

SEQ ID NO: 169359 - RNA, 19 nt, Artificial Sequence
  Description of Artificial Sequence: Synthetic oligonucleotide
  Antisense strand to SEQ ID NO: 169358
uucgcucaacuuuaaagga

SEQ ID NO: 169360 - RNA, 19 nt, Artificial Sequence
  Description of Artificial Sequence: Synthetic oligonucleotide
  Sense strand starting at position 1067 of SEQ ID NO: 2182
acuugagaguaucuuaaag

SEQ ID NO: 169361 - RNA, 19 nt, Artificial Sequence
  Description of Artificial Sequence: Synthetic oligonucleotide
  Antisense strand to SEQ ID NO: 169360
cuuuaagauacucucaagu

SEQ ID NO: 169362 - RNA, 19 nt, Artificial Sequence
  Description of Artificial Sequence: Synthetic oligonucleotide
  Sense strand starting at position 1075 of SEQ ID NO: 2182
guaucuuaaaguggauaga

SEQ ID NO: 169363 - RNA, 19 nt, Artificial Sequence
  Description of Artificial Sequence: Synthetic oligonucleotide
  Antisense strand to SEQ ID NO: 169362
ucuauccacuuuaagauac

SEQ ID NO: 169364 - RNA, 19 nt, Artificial Sequence
  Description of Artificial Sequence: Synthetic oligonucleotide
  Sense strand starting at position 1324 of SEQ ID NO: 2182
auaguaagauauucggaua

SEQ ID NO: 169365 - RNA, 19 nt, Artificial Sequence
  Description of Artificial Sequence: Synthetic oligonucleotide
  Antisense strand to SEQ ID NO: 169364
uauccgaauaucuuacuau

SEQ ID NO: 169366 - RNA, 19 nt, Artificial Sequence
  Description of Artificial Sequence: Synthetic oligonucleotide
  Sense strand starting at position 1426 of SEQ ID NO: 2182
ccaaaugcaucauuggaau

SEQ ID NO: 169367 - RNA, 19 nt, Artificial Sequence
  Description of Artificial Sequence: Synthetic oligonucleotide
  Antisense strand to SEQ ID NO: 169366
auuccaaugaugcauuugg

SEQ ID NO: 169368 - RNA, 19 nt, Artificial Sequence
  Description of Artificial Sequence: Synthetic oligonucleotide
  Sense strand starting at position 1460 of SEQ ID NO: 2182
aacauuagccagcaguaga

SEQ ID NO: 169369 - RNA, 19 nt, Artificial Sequence
  Description of Artificial Sequence: Synthetic oligonucleotide
  Antisense strand to SEQ ID NO: 169368
ucuacugcuggcuaauguu

SEQ ID NO: 169370 - RNA, 19 nt, Artificial Sequence
  Description of Artificial Sequence: Synthetic oligonucleotide
  Sense strand starting at position 1468 of SEQ ID NO: 2182
ccagcaguagaucaauguu

SEQ ID NO: 169371 - RNA, 19 nt, Artificial Sequence
  Description of Artificial Sequence: Synthetic oligonucleotide
  Antisense strand to SEQ ID NO: 169370
aacauugaucuacugcugg

SEQ ID NO: 169372 - RNA, 19 nt, Artificial Sequence
  Description of Artificial Sequence: Synthetic oligonucleotide
  Sense strand starting at position 1590 of SEQ ID NO: 2182
guaugaagauggcccauau

SEQ ID NO: 169373 - RNA, 19 nt, Artificial Sequence
  Description of Artificial Sequence: Synthetic oligonucleotide
  Antisense strand to SEQ ID NO: 169372
auaugggccaucuucauac

SEQ ID NO: 169374 - RNA, 19 nt, Artificial Sequence
  Description of Artificial Sequence: Synthetic oligonucleotide
  Sense strand starting at position 1695 of SEQ ID NO: 2182
acaugaucauccuugaugu

SEQ ID NO: 169375 - RNA, 19 nt, Artificial Sequence
  Description of Artificial Sequence: Synthetic oligonucleotide
  Antisense strand to SEQ ID NO: 169374
acaucaaggaugaucaugu

SEQ ID NO: 169376 - RNA, 19 nt, Artificial Sequence
  Description of Artificial Sequence: Synthetic oligonucleotide
  Sense strand starting at position 1763 of SEQ ID NO: 2182
aagugauggcuccaaccau

SEQ ID NO: 169377 - RNA, 19 nt, Artificial Sequence
  Description of Artificial Sequence: Synthetic oligonucleotide
  Antisense strand to SEQ ID NO: 169376
augguuggagccaucacuu

SEQ ID NO: 169378 - RNA, 19 nt, Artificial Sequence
  Description of Artificial Sequence: Synthetic oligonucleotide
  Sense strand starting at position 1790 of SEQ ID NO: 2182
gggauagaguuagugauag

SEQ ID NO: 169379 - RNA, 19 nt, Artificial Sequence
  Description of Artificial Sequence: Synthetic oligonucleotide
  Antisense strand to SEQ ID NO: 169378
cuaucacuaacucuauccc

SEQ ID NO: 169380 - RNA, 19 nt, Artificial Sequence
  Description of Artificial Sequence: Synthetic oligonucleotide
  Sense strand starting at position 1792 of SEQ ID NO: 2182
gauagaguuagugauaguu

SEQ ID NO: 169381 - RNA, 19 nt, Artificial Sequence
  Description of Artificial Sequence: Synthetic oligonucleotide
  Antisense strand to SEQ ID NO: 169380
aacuaucacuaacucuauc

SEQ ID NO: 169382 - RNA, 19 nt, Artificial Sequence
  Description of Artificial Sequence: Synthetic oligonucleotide
  Sense strand starting at position 1950 of SEQ ID NO: 2182
ggaagaagucgacagugcu

SEQ ID NO: 169383 - RNA, 19 nt, Artificial Sequence
  Description of Artificial Sequence: Synthetic oligonucleotide
  Antisense strand to SEQ ID NO: 169382
agcacugucgacuucuucc

SEQ ID NO: 169384 - RNA, 19 nt, Artificial Sequence
  Description of Artificial Sequence: Synthetic oligonucleotide
  Sense strand starting at position 2072 of SEQ ID NO: 2182
gugggauggccugauucau

SEQ ID NO: 169385 - RNA, 19 nt, Artificial Sequence
  Description of Artificial Sequence: Synthetic oligonucleotide
  Antisense strand to SEQ ID NO: 169384
augaaucaggccaucccac

SEQ ID NO: 169386 - RNA, 19 nt, Artificial Sequence
  Description of Artificial Sequence: Synthetic oligonucleotide
  Sense strand starting at position 2140 of SEQ ID NO: 2182
cucacuauuugcucacgua

SEQ ID NO: 169387 - RNA, 19 nt, Artificial Sequence
  Description of Artificial Sequence: Synthetic oligonucleotide
  Antisense strand to SEQ ID NO: 169386
uacgugagcaaauagugag

SEQ ID NO: 169388 - RNA, 19 nt, Artificial Sequence
  Description of Artificial Sequence: Synthetic oligonucleotide
  Sense strand starting at position 2158 of SEQ ID NO: 2182
agcuauuuggcacgagguu

SEQ ID NO: 169389 - RNA, 19 nt, Artificial Sequence
  Description of Artificial Sequence: Synthetic oligonucleotide
  Antisense strand to SEQ ID NO: 169388
aaccucgugccaaauagcu

SEQ ID NO: 169390 - RNA, 19 nt, Artificial Sequence
  Description of Artificial Sequence: Synthetic oligonucleotide
  Sense strand starting at position 2376 of SEQ ID NO: 2182
uacaaucucuaguuuggga

SEQ ID NO: 169391 - RNA, 19 nt, Artificial Sequence
  Description of Artificial Sequence: Synthetic oligonucleotide
  Antisense strand to SEQ ID NO: 169390
ucccaaacuagagauugua

SEQ ID NO: 169392 - RNA, 19 nt, Artificial Sequence
  Description of Artificial Sequence: Synthetic oligonucleotide
  Sense strand starting at position 2378 of SEQ ID NO: 2182
caaucucuaguuugggauu

SEQ ID NO: 169393 - RNA, 19 nt, Artificial Sequence
  Description of Artificial Sequence: Synthetic oligonucleotide
  Antisense strand to SEQ ID NO: 169392
aaucccaaacuagagauug

SEQ ID NO: 169394 - RNA, 19 nt, Artificial Sequence
  Description of Artificial Sequence: Synthetic oligonucleotide
  Sense strand starting at position 2525 of SEQ ID NO: 2182
uaaagaauugguuaguuuc

SEQ ID NO: 169395 - RNA, 19 nt, Artificial Sequence
  Description of Artificial Sequence: Synthetic oligonucleotide
  Antisense strand to SEQ ID NO: 169394
gaaacuaaccaauucuuua

SEQ ID NO: 169396 - RNA, 19 nt, Artificial Sequence
  Description of Artificial Sequence: Synthetic oligonucleotide
  Sense strand starting at position 2577 of SEQ ID NO: 2182
auuugucucccgggucuua

SEQ ID NO: 169397 - RNA, 19 nt, Artificial Sequence
  Description of Artificial Sequence: Synthetic oligonucleotide
  Antisense strand to SEQ ID NO: 169396
uaagacccgggagacaaau

SEQ ID NO: 169398 - RNA, 19 nt, Artificial Sequence
  Description of Artificial Sequence: Synthetic oligonucleotide
  Sense strand starting at position 2878 of SEQ ID NO: 2182
cuggaaguacauugaggua

SEQ ID NO: 169399 - RNA, 19 nt, Artificial Sequence
  Description of Artificial Sequence: Synthetic oligonucleotide
  Antisense strand to SEQ ID NO: 169398
uaccucaauguacuuccag

SEQ ID NO: 169400 - RNA, 19 nt, Artificial Sequence
  Description of Artificial Sequence: Synthetic oligonucleotide
  Sense strand starting at position 2891 of SEQ ID NO: 2182
gagguaauuggucauucua

SEQ ID NO: 169401 - RNA, 19 nt, Artificial Sequence
  Description of Artificial Sequence: Synthetic oligonucleotide
  Antisense strand to SEQ ID NO: 169400
uagaaugaccaauuaccuc

SEQ ID NO: 169402 - RNA, 19 nt, Artificial Sequence
  Description of Artificial Sequence: Synthetic oligonucleotide
  Sense strand starting at position 2934 of SEQ ID NO: 2182
cucaaucugguugaucauu

SEQ ID NO: 169403 - RNA, 19 nt, Artificial Sequence
  Description of Artificial Sequence: Synthetic oligonucleotide
  Antisense strand to SEQ ID NO: 169402
aaugaucaaccagauugag

SEQ ID NO: 169404 - RNA, 19 nt, Artificial Sequence
  Description of Artificial Sequence: Synthetic oligonucleotide
  Sense strand starting at position 2943 of SEQ ID NO: 2182
guugaucauuugcaaauuu

SEQ ID NO: 169405 - RNA, 19 nt, Artificial Sequence
  Description of Artificial Sequence: Synthetic oligonucleotide
  Antisense strand to SEQ ID NO: 169404
aaauuugcaaaugaucaac

SEQ ID NO: 169406 - RNA, 19 nt, Artificial Sequence
  Description of Artificial Sequence: Synthetic oligonucleotide
  Sense strand starting at position 3201 of SEQ ID NO: 2182
gauggcuauuucuuuaugu

SEQ ID NO: 169407 - RNA, 19 nt, Artificial Sequence
  Description of Artificial Sequence: Synthetic oligonucleotide
  Antisense strand to SEQ ID NO: 169406
acauaaagaaauagccauc

SEQ ID NO: 169408 - RNA, 19 nt, Artificial Sequence
  Description of Artificial Sequence: Synthetic oligonucleotide
  Sense strand starting at position 3206 of SEQ ID NO: 2182
cuauuucuuuaugugcaga

SEQ ID NO: 169409 - RNA, 19 nt, Artificial Sequence
  Description of Artificial Sequence: Synthetic oligonucleotide
  Antisense strand to SEQ ID NO: 169408
ucugcacauaaagaaauag

SEQ ID NO: 169410 - RNA, 19 nt, Artificial Sequence
  Description of Artificial Sequence: Synthetic oligonucleotide
  Sense strand starting at position 3208 of SEQ ID NO: 2182
auuucuuuaugugcagauu

SEQ ID NO: 169411 - RNA, 19 nt, Artificial Sequence
  Description of Artificial Sequence: Synthetic oligonucleotide
  Antisense strand to SEQ ID NO: 169410
aaucugcacauaaagaaau

SEQ ID NO: 169412 - RNA, 19 nt, Artificial Sequence
  Description of Artificial Sequence: Synthetic oligonucleotide
  Sense strand starting at position 3219 of SEQ ID NO: 2182
ugcagauuggucuaaauga

SEQ ID NO: 169413 - RNA, 19 nt, Artificial Sequence
  Description of Artificial Sequence: Synthetic oligonucleotide
  Antisense strand to SEQ ID NO: 169412
ucauuuagaccaaucugca

SEQ ID NO: 169414 - RNA, 19 nt, Artificial Sequence
  Description of Artificial Sequence: Synthetic oligonucleotide
  Sense strand starting at position 3235 of SEQ ID NO: 2182
ugauaauggaguugaacuc

SEQ ID NO: 169415 - RNA, 19 nt, Artificial Sequence
  Description of Artificial Sequence: Synthetic oligonucleotide
  Antisense strand to SEQ ID NO: 169414
gaguucaacuccauuauca

SEQ ID NO: 169416 - RNA, 19 nt, Artificial Sequence
  Description of Artificial Sequence: Synthetic oligonucleotide
  Sense strand starting at position 3569 of SEQ ID NO: 2182
gcaaucaugugaucaugga

SEQ ID NO: 169417 - RNA, 19 nt, Artificial Sequence
  Description of Artificial Sequence: Synthetic oligonucleotide
  Antisense strand to SEQ ID NO: 169416
uccaugaucacaugauugc

SEQ ID NO: 169418 - RNA, 19 nt, Artificial Sequence
  Description of Artificial Sequence: Synthetic oligonucleotide
  Sense strand starting at position 3692 of SEQ ID NO: 2182
gugugaucuauugggaaac

SEQ ID NO: 169419 - RNA, 19 nt, Artificial Sequence
  Description of Artificial Sequence: Synthetic oligonucleotide
  Antisense strand to SEQ ID NO: 169418
guuucccaauagaucacac

SEQ ID NO: 169420 - RNA, 19 nt, Artificial Sequence
  Description of Artificial Sequence: Synthetic oligonucleotide
  Sense strand starting at position 101 of SEQ ID NO: 2183
augcuucuccuggaaaguu

SEQ ID NO: 169421 - RNA, 19 nt, Artificial Sequence
  Description of Artificial Sequence: Synthetic oligonucleotide
  Antisense strand to SEQ ID NO: 169420
aacuuuccaggagaagcau

SEQ ID NO: 169422 - RNA, 19 nt, Artificial Sequence
  Description of Artificial Sequence: Synthetic oligonucleotide
  Sense strand starting at position 141 of SEQ ID NO: 2183
uggguccacucuguuauuu

SEQ ID NO: 169423 - RNA, 19 nt, Artificial Sequence
  Description of Artificial Sequence: Synthetic oligonucleotide
  Antisense strand to SEQ ID NO: 169422
aaauaacagaguggaccca

SEQ ID NO: 169424 - RNA, 19 nt, Artificial Sequence
  Description of Artificial Sequence: Synthetic oligonucleotide
  Sense strand starting at position 378 of SEQ ID NO: 2183
caaguugaagauugcaaga

SEQ ID NO: 169425 - RNA, 19 nt, Artificial Sequence
  Description of Artificial Sequence: Synthetic oligonucleotide
  Antisense strand to SEQ ID NO: 169424
ucuugcaaucuucaacuug

SEQ ID NO: 169426 - RNA, 19 nt, Artificial Sequence
  Description of Artificial Sequence: Synthetic oligonucleotide
  Sense strand starting at position 572 of SEQ ID NO: 2183
ucaguaacugguuaacuuu

SEQ ID NO: 169427 - RNA, 19 nt, Artificial Sequence
  Description of Artificial Sequence: Synthetic oligonucleotide
  Antisense strand to SEQ ID NO: 169426
aaaguuaaccaguuacuga

SEQ ID NO: 169428 - RNA, 19 nt, Artificial Sequence
  Description of Artificial Sequence: Synthetic oligonucleotide
  Sense strand starting at position 579 of SEQ ID NO: 2183
cugguuaacuuucccagaa

SEQ ID NO: 169429 - RNA, 19 nt, Artificial Sequence
  Description of Artificial Sequence: Synthetic oligonucleotide
  Antisense strand to SEQ ID NO: 169428
uucugggaaaguuaaccag

SEQ ID NO: 169430 - RNA, 19 nt, Artificial Sequence
  Description of Artificial Sequence: Synthetic oligonucleotide
  Sense strand starting at position 580 of SEQ ID NO: 2183
ugguuaacuuucccagaac

SEQ ID NO: 169431 - RNA, 19 nt, Artificial Sequence
  Description of Artificial Sequence: Synthetic oligonucleotide
  Antisense strand to SEQ ID NO: 169430
guucugggaaaguuaacca

SEQ ID NO: 169432 - RNA, 19 nt, Artificial Sequence
  Description of Artificial Sequence: Synthetic oligonucleotide
  Sense strand starting at position 637 of SEQ ID NO: 2183
gagagcuaugccugagaaa

SEQ ID NO: 169433 - RNA, 19 nt, Artificial Sequence
  Description of Artificial Sequence: Synthetic oligonucleotide
  Antisense strand to SEQ ID NO: 169432
uuucucaggcauagcucuc

SEQ ID NO: 169434 - RNA, 19 nt, Artificial Sequence
  Description of Artificial Sequence: Synthetic oligonucleotide
  Sense strand starting at position 687 of SEQ ID NO: 2183
gaugcauaaugguuuauga

SEQ ID NO: 169435 - RNA, 19 nt, Artificial Sequence
  Description of Artificial Sequence: Synthetic oligonucleotide
  Antisense strand to SEQ ID NO: 169434
ucauaaaccauuaugcauc

SEQ ID NO: 169436 - RNA, 19 nt, Artificial Sequence
  Description of Artificial Sequence: Synthetic oligonucleotide
  Sense strand starting at position 689 of SEQ ID NO: 2183
ugcauaaugguuuaugacu

SEQ ID NO: 169437 - RNA, 19 nt, Artificial Sequence
  Description of Artificial Sequence: Synthetic oligonucleotide
  Antisense strand to SEQ ID NO: 169436
agucauaaaccauuaugca

SEQ ID NO: 169438 - RNA, 19 nt, Artificial Sequence
  Description of Artificial Sequence: Synthetic oligonucleotide
  Sense strand starting at position 767 of SEQ ID NO: 2183
uaaguaauugcacagagua

SEQ ID NO: 169439 - RNA, 19 nt, Artificial Sequence
  Description of Artificial Sequence: Synthetic oligonucleotide
  Antisense strand to SEQ ID NO: 169438
uacucugugcaauuacuua

SEQ ID NO: 169440 - RNA, 19 nt, Artificial Sequence
  Description of Artificial Sequence: Synthetic oligonucleotide
  Sense strand starting at position 769 of SEQ ID NO: 2183
aguaauugcacagaguaug

SEQ ID NO: 169441 - RNA, 19 nt, Artificial Sequence
  Description of Artificial Sequence: Synthetic oligonucleotide
  Antisense strand to SEQ ID NO: 169440
cauacucugugcaauuacu

SEQ ID NO: 169442 - RNA, 19 nt, Artificial Sequence
  Description of Artificial Sequence: Synthetic oligonucleotide
  Sense strand starting at position 918 of SEQ ID NO: 2183
uacacagcucugugagaag

SEQ ID NO: 169443 - RNA, 19 nt, Artificial Sequence
  Description of Artificial Sequence: Synthetic oligonucleotide
  Antisense strand to SEQ ID NO: 169442
cuucucacagagcugugua

SEQ ID NO: 169444 - RNA, 19 nt, Artificial Sequence
  Description of Artificial Sequence: Synthetic oligonucleotide
  Sense strand starting at position 929 of SEQ ID NO: 2183
gugagaagcucaccugaaa

SEQ ID NO: 169445 - RNA, 19 nt, Artificial Sequence
  Description of Artificial Sequence: Synthetic oligonucleotide
  Antisense strand to SEQ ID NO: 169444
uuucaggugagcuucucac

SEQ ID NO: 169446 - RNA, 19 nt, Artificial Sequence
  Description of Artificial Sequence: Synthetic oligonucleotide
  Sense strand starting at position 1139 of SEQ ID NO: 2183
guccuucagggaggagaua

SEQ ID NO: 169447 - RNA, 19 nt, Artificial Sequence
  Description of Artificial Sequence: Synthetic oligonucleotide
  Antisense strand to SEQ ID NO: 169446
uaucuccucccugaaggac

SEQ ID NO: 169448 - RNA, 19 nt, Artificial Sequence
  Description of Artificial Sequence: Synthetic oligonucleotide
  Sense strand starting at position 1253 of SEQ ID NO: 2183
aguauuguaccagacauug

SEQ ID NO: 169449 - RNA, 19 nt, Artificial Sequence
  Description of Artificial Sequence: Synthetic oligonucleotide
  Antisense strand to SEQ ID NO: 169448
caaugucugguacaauacu

SEQ ID NO: 169450 - RNA, 19 nt, Artificial Sequence
  Description of Artificial Sequence: Synthetic oligonucleotide
  Sense strand starting at position 1288 of SEQ ID NO: 2183
agcauagguaaguauuaga

SEQ ID NO: 169451 - RNA, 19 nt, Artificial Sequence
  Description of Artificial Sequence: Synthetic oligonucleotide
  Antisense strand to SEQ ID NO: 169450
ucuaauacuuaccuaugcu

SEQ ID NO: 169452 - RNA, 19 nt, Artificial Sequence
  Description of Artificial Sequence: Synthetic oligonucleotide
  Sense strand starting at position 1519 of SEQ ID NO: 2183
ggguauaaccuuuaaaguu

SEQ ID NO: 169453 - RNA, 19 nt, Artificial Sequence
  Description of Artificial Sequence: Synthetic oligonucleotide
  Antisense strand to SEQ ID NO: 169452
aacuuuaaagguuauaccc

SEQ ID NO: 169454 - RNA, 19 nt, Artificial Sequence
  Description of Artificial Sequence: Synthetic oligonucleotide
  Sense strand starting at position 1713 of SEQ ID NO: 2183
ugccuuguugaauaauauu

SEQ ID NO: 169455 - RNA, 19 nt, Artificial Sequence
  Description of Artificial Sequence: Synthetic oligonucleotide
  Antisense strand to SEQ ID NO: 169454
aauauuauucaacaaggca

SEQ ID NO: 169456 - RNA, 19 nt, Artificial Sequence
  Description of Artificial Sequence: Synthetic oligonucleotide
  Sense strand starting at position 1820 of SEQ ID NO: 2183
uggcgcucccaguuuauua

SEQ ID NO: 169457 - RNA, 19 nt, Artificial Sequence
  Description of Artificial Sequence: Synthetic oligonucleotide
  Antisense strand to SEQ ID NO: 169456
uaauaaacugggagcgcca

SEQ ID NO: 169458 - RNA, 19 nt, Artificial Sequence
  Description of Artificial Sequence: Synthetic oligonucleotide
  Sense strand starting at position 1821 of SEQ ID NO: 2183
ggcgcucccaguuuauuau

SEQ ID NO: 169459 - RNA, 19 nt, Artificial Sequence
  Description of Artificial Sequence: Synthetic oligonucleotide
  Antisense strand to SEQ ID NO: 169458
auaauaaacugggagcgcc

SEQ ID NO: 169460 - RNA, 19 nt, Artificial Sequence
  Description of Artificial Sequence: Synthetic oligonucleotide
  Sense strand starting at position 2113 of SEQ ID NO: 2183
cucuguugucaguugucuu

SEQ ID NO: 169461 - RNA, 19 nt, Artificial Sequence
  Description of Artificial Sequence: Synthetic oligonucleotide
  Antisense strand to SEQ ID NO: 169460
aagacaacugacaacagag

SEQ ID NO: 169462 - RNA, 19 nt, Artificial Sequence
  Description of Artificial Sequence: Synthetic oligonucleotide
  Sense strand starting at position 2399 of SEQ ID NO: 2183
cugagagaugggugucaau

SEQ ID NO: 169463 - RNA, 19 nt, Artificial Sequence
  Description of Artificial Sequence: Synthetic oligonucleotide
  Antisense strand to SEQ ID NO: 169462
auugacacccaucucucag

SEQ ID NO: 169464 - RNA, 19 nt, Artificial Sequence
  Description of Artificial Sequence: Synthetic oligonucleotide
  Sense strand starting at position 2591 of SEQ ID NO: 2183
cgugauugauauuugcuuu

SEQ ID NO: 169465 - RNA, 19 nt, Artificial Sequence
  Description of Artificial Sequence: Synthetic oligonucleotide
  Antisense strand to SEQ ID NO: 169464
aaagcaaauaucaaucacg

SEQ ID NO: 169466 - RNA, 19 nt, Artificial Sequence
  Description of Artificial Sequence: Synthetic oligonucleotide
  Sense strand starting at position 2691 of SEQ ID NO: 2183
uguugaaaucaucaagcug

SEQ ID NO: 169467 - RNA, 19 nt, Artificial Sequence
  Description of Artificial Sequence: Synthetic oligonucleotide
  Antisense strand to SEQ ID NO: 169466
cagcuugaugauuucaaca

SEQ ID NO: 169468 - RNA, 19 nt, Artificial Sequence
  Description of Artificial Sequence: Synthetic oligonucleotide
  Sense strand starting at position 2862 of SEQ ID NO: 2183
cuccuugucaaaggaugga

SEQ ID NO: 169469 - RNA, 19 nt, Artificial Sequence
  Description of Artificial Sequence: Synthetic oligonucleotide
  Antisense strand to SEQ ID NO: 169468
uccauccuuugacaaggag

SEQ ID NO: 169470 - RNA, 19 nt, Artificial Sequence
  Description of Artificial Sequence: Synthetic oligonucleotide
  Sense strand starting at position 3018 of SEQ ID NO: 2183
ccugauuaucgaggaacau

SEQ ID NO: 169471 - RNA, 19 nt, Artificial Sequence
  Description of Artificial Sequence: Synthetic oligonucleotide
  Antisense strand to SEQ ID NO: 169470
auguuccucgauaaucagg

SEQ ID NO: 169472 - RNA, 19 nt, Artificial Sequence
  Description of Artificial Sequence: Synthetic oligonucleotide
  Sense strand starting at position 3135 of SEQ ID NO: 2183
uuggaauuggcaugugaag

SEQ ID NO: 169473 - RNA, 19 nt, Artificial Sequence
  Description of Artificial Sequence: Synthetic oligonucleotide
  Antisense strand to SEQ ID NO: 169472
cuucacaugccaauuccaa

SEQ ID NO: 169474 - RNA, 19 nt, Artificial Sequence
  Description of Artificial Sequence: Synthetic oligonucleotide
  Sense strand starting at position 3159 of SEQ ID NO: 2183
cuuaguucugauuaguuaa

SEQ ID NO: 169475 - RNA, 19 nt, Artificial Sequence
  Description of Artificial Sequence: Synthetic oligonucleotide
  Antisense strand to SEQ ID NO: 169474
uuaacuaaucagaacuaag

SEQ ID NO: 169476 - RNA, 19 nt, Artificial Sequence
  Description of Artificial Sequence: Synthetic oligonucleotide
  Sense strand starting at position 3225 of SEQ ID NO: 2183
guguuuagaguugaguaag

SEQ ID NO: 169477 - RNA, 19 nt, Artificial Sequence
  Description of Artificial Sequence: Synthetic oligonucleotide
  Antisense strand to SEQ ID NO: 169476
cuuacucaacucuaaacac

SEQ ID NO: 169478 - RNA, 19 nt, Artificial Sequence
  Description of Artificial Sequence: Synthetic oligonucleotide
  Sense strand starting at position 3228 of SEQ ID NO: 2183
uuuagaguugaguaaguua

SEQ ID NO: 169479 - RNA, 19 nt, Artificial Sequence
  Description of Artificial Sequence: Synthetic oligonucleotide
  Antisense strand to SEQ ID NO: 169478
uaacuuacucaacucuaaa

SEQ ID NO: 169480 - RNA, 19 nt, Artificial Sequence
  Description of Artificial Sequence: Synthetic oligonucleotide
  Sense strand starting at position 3231 of SEQ ID NO: 2183
agaguugaguaaguuauau

SEQ ID NO: 169481 - RNA, 19 nt, Artificial Sequence
  Description of Artificial Sequence: Synthetic oligonucleotide
  Antisense strand to SEQ ID NO: 169480
auauaacuuacucaacucu

SEQ ID NO: 169482 - RNA, 19 nt, Artificial Sequence
  Description of Artificial Sequence: Synthetic oligonucleotide
  Sense strand starting at position 3233 of SEQ ID NO: 2183
aguugaguaaguuauaucu

SEQ ID NO: 169483 - RNA, 19 nt, Artificial Sequence
  Description of Artificial Sequence: Synthetic oligonucleotide
  Antisense strand to SEQ ID NO: 169482
agauauaacuuacucaacu

SEQ ID NO: 169484 - RNA, 19 nt, Artificial Sequence
  Description of Artificial Sequence: Synthetic oligonucleotide
  Sense strand starting at position 3291 of SEQ ID NO: 2183
ggguauauucaaggcugga

SEQ ID NO: 169485 - RNA, 19 nt, Artificial Sequence
  Description of Artificial Sequence: Synthetic oligonucleotide
  Antisense strand to SEQ ID NO: 169484
uccagccuugaauauaccc

SEQ ID NO: 169486 - RNA, 19 nt, Artificial Sequence
  Description of Artificial Sequence: Synthetic oligonucleotide
  Sense strand starting at position 3411 of SEQ ID NO: 2183
augacaugucaggagcuuu

SEQ ID NO: 169487 - RNA, 19 nt, Artificial Sequence
  Description of Artificial Sequence: Synthetic oligonucleotide
  Antisense strand to SEQ ID NO: 169486
aaagcuccugacaugucau

SEQ ID NO: 169488 - RNA, 19 nt, Artificial Sequence
  Description of Artificial Sequence: Synthetic oligonucleotide
  Sense strand starting at position 3426 of SEQ ID NO: 2183
cuuuacaugggcuaucuua

SEQ ID NO: 169489 - RNA, 19 nt, Artificial Sequence
  Description of Artificial Sequence: Synthetic oligonucleotide
  Antisense strand to SEQ ID NO: 169488
uaagauagcccauguaaag

SEQ ID NO: 169490 - RNA, 19 nt, Artificial Sequence
  Description of Artificial Sequence: Synthetic oligonucleotide
  Sense strand starting at position 3521 of SEQ ID NO: 2183
acagauauguaccuuuacu

SEQ ID NO: 169491 - RNA, 19 nt, Artificial Sequence
  Description of Artificial Sequence: Synthetic oligonucleotide
  Antisense strand to SEQ ID NO: 169490
aguaaagguacauaucugu

SEQ ID NO: 169492 - RNA, 19 nt, Artificial Sequence
  Description of Artificial Sequence: Synthetic oligonucleotide
  Sense strand starting at position 3893 of SEQ ID NO: 2183
aagaaaguaugucucugaa

SEQ ID NO: 169493 - RNA, 19 nt, Artificial Sequence
  Description of Artificial Sequence: Synthetic oligonucleotide
  Antisense strand to SEQ ID NO: 169492
uucagagacauacuuucuu

SEQ ID NO: 169494 - RNA, 19 nt, Artificial Sequence
  Description of Artificial Sequence: Synthetic oligonucleotide
  Sense strand starting at position 3932 of SEQ ID NO: 2183
uugaguuucuuauuugugu

SEQ ID NO: 169495 - RNA, 19 nt, Artificial Sequence
  Description of Artificial Sequence: Synthetic oligonucleotide
  Antisense strand to SEQ ID NO: 169494
acacaaauaagaaacucaa

SEQ ID NO: 169496 - RNA, 19 nt, Artificial Sequence
  Description of Artificial Sequence: Synthetic oligonucleotide
  Sense strand starting at position 3933 of SEQ ID NO: 2183
ugaguuucuuauuugugua

SEQ ID NO: 169497 - RNA, 19 nt, Artificial Sequence
  Description of Artificial Sequence: Synthetic oligonucleotide
  Antisense strand to SEQ ID NO: 169496
uacacaaauaagaaacuca

SEQ ID NO: 169498 - RNA, 19 nt, Artificial Sequence
  Description of Artificial Sequence: Synthetic oligonucleotide
  Sense strand starting at position 3958 of SEQ ID NO: 2183
gguaauacagcuggaauca

SEQ ID NO: 169499 - RNA, 19 nt, Artificial Sequence
  Description of Artificial Sequence: Synthetic oligonucleotide
  Antisense strand to SEQ ID NO: 169498
ugauuccagcuguauuacc

SEQ ID NO: 169500 - RNA, 19 nt, Artificial Sequence
  Description of Artificial Sequence: Synthetic oligonucleotide
  Sense strand starting at position 3910 of SEQ ID NO: 2184
auguacuuaguacaagauu

SEQ ID NO: 169501 - RNA, 19 nt, Artificial Sequence
  Description of Artificial Sequence: Synthetic oligonucleotide
  Antisense strand to SEQ ID NO: 169500
aaucuuguacuaaguacau

SEQ ID NO: 169502 - RNA, 19 nt, Artificial Sequence
  Description of Artificial Sequence: Synthetic oligonucleotide
  Sense strand starting at position 3788 of SEQ ID NO: 2184
uugaaauagacguguagga

SEQ ID NO: 169503 - RNA, 19 nt, Artificial Sequence
  Description of Artificial Sequence: Synthetic oligonucleotide
  Antisense strand to SEQ ID NO: 169502
uccuacacgucuauuucaa

SEQ ID NO: 169504 - RNA, 19 nt, Artificial Sequence
  Description of Artificial Sequence: Synthetic oligonucleotide
  Sense strand starting at position 3681 of SEQ ID NO: 2184
guaagucuucgcuuccguu

SEQ ID NO: 169505 - RNA, 19 nt, Artificial Sequence
  Description of Artificial Sequence: Synthetic oligonucleotide
  Antisense strand to SEQ ID NO: 169504
aacggaagcgaagacuuac

SEQ ID NO: 169506 - RNA, 19 nt, Artificial Sequence
  Description of Artificial Sequence: Synthetic oligonucleotide
  Sense strand starting at position 3662 of SEQ ID NO: 2184
caauucugugaaggagcaa

SEQ ID NO: 169507 - RNA, 19 nt, Artificial Sequence
  Description of Artificial Sequence: Synthetic oligonucleotide
  Antisense strand to SEQ ID NO: 169506
uugcuccuucacagaauug

SEQ ID NO: 169508 - RNA, 19 nt, Artificial Sequence
  Description of Artificial Sequence: Synthetic oligonucleotide
  Sense strand starting at position 3580 of SEQ ID NO: 2184
auguuaagauggucucaug

SEQ ID NO: 169509 - RNA, 19 nt, Artificial Sequence
  Description of Artificial Sequence: Synthetic oligonucleotide
  Antisense strand to SEQ ID NO: 169508
caugagaccaucuuaacau

SEQ ID NO: 169510 - RNA, 19 nt, Artificial Sequence
  Description of Artificial Sequence: Synthetic oligonucleotide
  Sense strand starting at position 3578 of SEQ ID NO: 2184
uaauguuaagauggucuca

SEQ ID NO: 169511 - RNA, 19 nt, Artificial Sequence
  Description of Artificial Sequence: Synthetic oligonucleotide
  Antisense strand to SEQ ID NO: 169510
ugagaccaucuuaacauua

SEQ ID NO: 169512 - RNA, 19 nt, Artificial Sequence
  Description of Artificial Sequence: Synthetic oligonucleotide
  Sense strand starting at position 3404 of SEQ ID NO: 2184
auuaaacuuuguucuggaa

SEQ ID NO: 169513 - RNA, 19 nt, Artificial Sequence
  Description of Artificial Sequence: Synthetic oligonucleotide
  Antisense strand to SEQ ID NO: 169512
uuccagaacaaaguuuaau

SEQ ID NO: 169514 - RNA, 19 nt, Artificial Sequence
  Description of Artificial Sequence: Synthetic oligonucleotide
  Sense strand starting at position 3217 of SEQ ID NO: 2184
acccuugaccuuugacaga

SEQ ID NO: 169515 - RNA, 19 nt, Artificial Sequence
  Description of Artificial Sequence: Synthetic oligonucleotide
  Antisense strand to SEQ ID NO: 169514
ucugucaaaggucaagggu

SEQ ID NO: 169516 - RNA, 19 nt, Artificial Sequence
  Description of Artificial Sequence: Synthetic oligonucleotide
  Sense strand starting at position 3151 of SEQ ID NO: 2184
agaaucguugaguaacaug

SEQ ID NO: 169517 - RNA, 19 nt, Artificial Sequence
  Description of Artificial Sequence: Synthetic oligonucleotide
  Antisense strand to SEQ ID NO: 169516
cauguuacucaacgauucu

SEQ ID NO: 169518 - RNA, 19 nt, Artificial Sequence
  Description of Artificial Sequence: Synthetic oligonucleotide
  Sense strand starting at position 3150 of SEQ ID NO: 2184
uagaaucguugaguaacau

SEQ ID NO: 169519 - RNA, 19 nt, Artificial Sequence
  Description of Artificial Sequence: Synthetic oligonucleotide
  Antisense strand to SEQ ID NO: 169518
auguuacucaacgauucua

SEQ ID NO: 169520 - RNA, 19 nt, Artificial Sequence
  Description of Artificial Sequence: Synthetic oligonucleotide
  Sense strand starting at position 3148 of SEQ ID NO: 2184
uguagaaucguugaguaac

SEQ ID NO: 169521 - RNA, 19 nt, Artificial Sequence
  Description of Artificial Sequence: Synthetic oligonucleotide
  Antisense strand to SEQ ID NO: 169520
guuacucaacgauucuaca

SEQ ID NO: 169522 - RNA, 19 nt, Artificial Sequence
  Description of Artificial Sequence: Synthetic oligonucleotide
  Sense strand starting at position 3052 of SEQ ID NO: 2184
ggaacugcuaggugaugaa

SEQ ID NO: 169523 - RNA, 19 nt, Artificial Sequence
  Description of Artificial Sequence: Synthetic oligonucleotide
  Antisense strand to SEQ ID NO: 169522
uucaucaccuagcaguucc

SEQ ID NO: 169524 - RNA, 19 nt, Artificial Sequence
  Description of Artificial Sequence: Synthetic oligonucleotide
  Sense strand starting at position 3016 of SEQ ID NO: 2184
aggauuguugauugaauau

SEQ ID NO: 169525 - RNA, 19 nt, Artificial Sequence
  Description of Artificial Sequence: Synthetic oligonucleotide
  Antisense strand to SEQ ID NO: 169524
auauucaaucaacaauccu

SEQ ID NO: 169526 - RNA, 19 nt, Artificial Sequence
  Description of Artificial Sequence: Synthetic oligonucleotide
  Sense strand starting at position 2939 of SEQ ID NO: 2184
uaggauaguguuggaagaa

SEQ ID NO: 169527 - RNA, 19 nt, Artificial Sequence
  Description of Artificial Sequence: Synthetic oligonucleotide
  Antisense strand to SEQ ID NO: 169526
uucuuccaacacuauccua

SEQ ID NO: 169528 - RNA, 19 nt, Artificial Sequence
  Description of Artificial Sequence: Synthetic oligonucleotide
  Sense strand starting at position 2903 of SEQ ID NO: 2184
acaguaauacauugggauu

SEQ ID NO: 169529 - RNA, 19 nt, Artificial Sequence
  Description of Artificial Sequence: Synthetic oligonucleotide
  Antisense strand to SEQ ID NO: 169528
aaucccaauguauuacugu

SEQ ID NO: 169530 - RNA, 19 nt, Artificial Sequence
  Description of Artificial Sequence: Synthetic oligonucleotide
  Sense strand starting at position 2895 of SEQ ID NO: 2184
auuagcugacaguaauaca

SEQ ID NO: 169531 - RNA, 19 nt, Artificial Sequence
  Description of Artificial Sequence: Synthetic oligonucleotide
  Antisense strand to SEQ ID NO: 169530
uguauuacugucagcuaau

SEQ ID NO: 169532 - RNA, 19 nt, Artificial Sequence
  Description of Artificial Sequence: Synthetic oligonucleotide
  Sense strand starting at position 2890 of SEQ ID NO: 2184
uuagcauuagcugacagua

SEQ ID NO: 169533 - RNA, 19 nt, Artificial Sequence
  Description of Artificial Sequence: Synthetic oligonucleotide
  Antisense strand to SEQ ID NO: 169532
uacugucagcuaaugcuaa

SEQ ID NO: 169534 - RNA, 19 nt, Artificial Sequence
  Description of Artificial Sequence: Synthetic oligonucleotide
  Sense strand starting at position 2885 of SEQ ID NO: 2184
uggaauuagcauuagcuga

SEQ ID NO: 169535 - RNA, 19 nt, Artificial Sequence
  Description of Artificial Sequence: Synthetic oligonucleotide
  Antisense strand to SEQ ID NO: 169534
ucagcuaaugcuaauucca

SEQ ID NO: 169536 - RNA, 19 nt, Artificial Sequence
  Description of Artificial Sequence: Synthetic oligonucleotide
  Sense strand starting at position 2809 of SEQ ID NO: 2184
ugggcaaucauuggaagca

SEQ ID NO: 169537 - RNA, 19 nt, Artificial Sequence
  Description of Artificial Sequence: Synthetic oligonucleotide
  Antisense strand to SEQ ID NO: 169536
ugcuuccaaugauugccca

SEQ ID NO: 169538 - RNA, 19 nt, Artificial Sequence
  Description of Artificial Sequence: Synthetic oligonucleotide
  Sense strand starting at position 2801 of SEQ ID NO: 2184
uccuguagugggcaaucau

SEQ ID NO: 169539 - RNA, 19 nt, Artificial Sequence
  Description of Artificial Sequence: Synthetic oligonucleotide
  Antisense strand to SEQ ID NO: 169538
augauugcccacuacagga

SEQ ID NO: 169540 - RNA, 19 nt, Artificial Sequence
  Description of Artificial Sequence: Synthetic oligonucleotide
  Sense strand starting at position 2639 of SEQ ID NO: 2184
ccuguuaaugucuaagaag

SEQ ID NO: 169541 - RNA, 19 nt, Artificial Sequence
  Description of Artificial Sequence: Synthetic oligonucleotide
  Antisense strand to SEQ ID NO: 169540
cuucuuagacauuaacagg

SEQ ID NO: 169542 - RNA, 19 nt, Artificial Sequence
  Description of Artificial Sequence: Synthetic oligonucleotide
  Sense strand starting at position 2604 of SEQ ID NO: 2184
gguuccuucgcuuuccuua

SEQ ID NO: 169543 - RNA, 19 nt, Artificial Sequence
  Description of Artificial Sequence: Synthetic oligonucleotide
  Antisense strand to SEQ ID NO: 169542
uaaggaaagcgaaggaacc

SEQ ID NO: 169544 - RNA, 19 nt, Artificial Sequence
  Description of Artificial Sequence: Synthetic oligonucleotide
  Sense strand starting at position 2559 of SEQ ID NO: 2184
ccugaaacucauggucuua

SEQ ID NO: 169545 - RNA, 19 nt, Artificial Sequence
  Description of Artificial Sequence: Synthetic oligonucleotide
  Antisense strand to SEQ ID NO: 169544
uaagaccaugaguuucagg

SEQ ID NO: 169546 - RNA, 19 nt, Artificial Sequence
  Description of Artificial Sequence: Synthetic oligonucleotide
  Sense strand starting at position 2455 of SEQ ID NO: 2184
uugggauuuagucguccca

SEQ ID NO: 169547 - RNA, 19 nt, Artificial Sequence
  Description of Artificial Sequence: Synthetic oligonucleotide
  Antisense strand to SEQ ID NO: 169546
ugggacgacuaaaucccaa

SEQ ID NO: 169548 - RNA, 19 nt, Artificial Sequence
  Description of Artificial Sequence: Synthetic oligonucleotide
  Sense strand starting at position 2404 of SEQ ID NO: 2184
ggagguaaaugagcacuua

SEQ ID NO: 169549 - RNA, 19 nt, Artificial Sequence
  Description of Artificial Sequence: Synthetic oligonucleotide
  Antisense strand to SEQ ID NO: 169548
uaagugcucauuuaccucc

SEQ ID NO: 169550 - RNA, 19 nt, Artificial Sequence
  Description of Artificial Sequence: Synthetic oligonucleotide
  Sense strand starting at position 2395 of SEQ ID NO: 2184
guggaauguggagguaaau

SEQ ID NO: 169551 - RNA, 19 nt, Artificial Sequence
  Description of Artificial Sequence: Synthetic oligonucleotide
  Antisense strand to SEQ ID NO: 169550
auuuaccuccacauuccac

SEQ ID NO: 169552 - RNA, 19 nt, Artificial Sequence
  Description of Artificial Sequence: Synthetic oligonucleotide
  Sense strand starting at position 2288 of SEQ ID NO: 2184
gguuuccuagcacaggaaa

SEQ ID NO: 169553 - RNA, 19 nt, Artificial Sequence
  Description of Artificial Sequence: Synthetic oligonucleotide
  Antisense strand to SEQ ID NO: 169552
uuuccugugcuaggaaacc

SEQ ID NO: 169554 - RNA, 19 nt, Artificial Sequence
  Description of Artificial Sequence: Synthetic oligonucleotide
  Sense strand starting at position 2193 of SEQ ID NO: 2184
ggaagacauuugggacuaa

SEQ ID NO: 169555 - RNA, 19 nt, Artificial Sequence
  Description of Artificial Sequence: Synthetic oligonucleotide
  Antisense strand to SEQ ID NO: 169554
uuagucccaaaugucuucc

SEQ ID NO: 169556 - RNA, 19 nt, Artificial Sequence
  Description of Artificial Sequence: Synthetic oligonucleotide
  Sense strand starting at position 1788 of SEQ ID NO: 2184
agggccauuucucaacaaa

SEQ ID NO: 169557 - RNA, 19 nt, Artificial Sequence
  Description of Artificial Sequence: Synthetic oligonucleotide
  Antisense strand to SEQ ID NO: 169556
uuuguugagaaauggcccu

SEQ ID NO: 169558 - RNA, 19 nt, Artificial Sequence
  Description of Artificial Sequence: Synthetic oligonucleotide
  Sense strand starting at position 1713 of SEQ ID NO: 2184
ucccaaauuugggaucauu

SEQ ID NO: 169559 - RNA, 19 nt, Artificial Sequence
  Description of Artificial Sequence: Synthetic oligonucleotide
  Antisense strand to SEQ ID NO: 169558
aaugaucccaaauuuggga

SEQ ID NO: 169560 - RNA, 19 nt, Artificial Sequence
  Description of Artificial Sequence: Synthetic oligonucleotide
  Sense strand starting at position 1492 of SEQ ID NO: 2184
cggccucagcuguuuccaa

SEQ ID NO: 169561 - RNA, 19 nt, Artificial Sequence
  Description of Artificial Sequence: Synthetic oligonucleotide
  Antisense strand to SEQ ID NO: 169560
uuggaaacagcugaggccg

SEQ ID NO: 169562 - RNA, 19 nt, Artificial Sequence
  Description of Artificial Sequence: Synthetic oligonucleotide
  Sense strand starting at position 1413 of SEQ ID NO: 2184
uguuuaugaguguggaaag

SEQ ID NO: 169563 - RNA, 19 nt, Artificial Sequence
  Description of Artificial Sequence: Synthetic oligonucleotide
  Antisense strand to SEQ ID NO: 169562
cuuuccacacucauaaaca

SEQ ID NO: 169564 - RNA, 19 nt, Artificial Sequence
  Description of Artificial Sequence: Synthetic oligonucleotide
  Sense strand starting at position 1373 of SEQ ID NO: 2184
uguauaagugugucugugu

SEQ ID NO: 169565 - RNA, 19 nt, Artificial Sequence
  Description of Artificial Sequence: Synthetic oligonucleotide
  Antisense strand to SEQ ID NO: 169564
acacagacacacuuauaca

SEQ ID NO: 169566 - RNA, 19 nt, Artificial Sequence
  Description of Artificial Sequence: Synthetic oligonucleotide
  Sense strand starting at position 1133 of SEQ ID NO: 2184
aggaaauacugugcuagac

SEQ ID NO: 169567 - RNA, 19 nt, Artificial Sequence
  Description of Artificial Sequence: Synthetic oligonucleotide
  Antisense strand to SEQ ID NO: 169566
gucuagcacaguauuuccu

SEQ ID NO: 169568 - RNA, 19 nt, Artificial Sequence
  Description of Artificial Sequence: Synthetic oligonucleotide
  Sense strand starting at position 1132 of SEQ ID NO: 2184
aaggaaauacugugcuaga

SEQ ID NO: 169569 - RNA, 19 nt, Artificial Sequence
  Description of Artificial Sequence: Synthetic oligonucleotide
  Antisense strand to SEQ ID NO: 169568
ucuagcacaguauuuccuu

SEQ ID NO: 169570 - RNA, 19 nt, Artificial Sequence
  Description of Artificial Sequence: Synthetic oligonucleotide
  Sense strand starting at position 676 of SEQ ID NO: 2184
gagacaagaucuuucugug

SEQ ID NO: 169571 - RNA, 19 nt, Artificial Sequence
  Description of Artificial Sequence: Synthetic oligonucleotide
  Antisense strand to SEQ ID NO: 169570
cacagaaagaucuugucuc

SEQ ID NO: 169572 - RNA, 19 nt, Artificial Sequence
  Description of Artificial Sequence: Synthetic oligonucleotide
  Sense strand starting at position 190 of SEQ ID NO: 2184
auuugcugucacuguuaua

SEQ ID NO: 169573 - RNA, 19 nt, Artificial Sequence
  Description of Artificial Sequence: Synthetic oligonucleotide
  Antisense strand to SEQ ID NO: 169572
uauaacagugacagcaaau

SEQ ID NO: 169574 - RNA, 19 nt, Artificial Sequence
  Description of Artificial Sequence: Synthetic oligonucleotide
  Sense strand starting at position 99 of SEQ ID NO: 2184
gcauguauagcagaaagau

SEQ ID NO: 169575 - RNA, 19 nt, Artificial Sequence
  Description of Artificial Sequence: Synthetic oligonucleotide
  Antisense strand to SEQ ID NO: 169574
aucuuucugcuauacaugc

SEQ ID NO: 169576 - RNA, 19 nt, Artificial Sequence
  Description of Artificial Sequence: Synthetic oligonucleotide
  Sense strand starting at position 74 of SEQ ID NO: 2184
gacggaggucauugacaaa

SEQ ID NO: 169577 - RNA, 19 nt, Artificial Sequence
  Description of Artificial Sequence: Synthetic oligonucleotide
  Antisense strand to SEQ ID NO: 169576
uuugucaaugaccuccguc

SEQ ID NO: 169578 - RNA, 19 nt, Artificial Sequence
  Description of Artificial Sequence: Synthetic oligonucleotide
  Sense strand starting at position 68 of SEQ ID NO: 2184
gaugaagacggaggucauu

SEQ ID NO: 169579 - RNA, 19 nt, Artificial Sequence
  Description of Artificial Sequence: Synthetic oligonucleotide
  Antisense strand to SEQ ID NO: 169578
aaugaccuccgucuucauc

SEQ ID NO: 169580 - RNA, 19 nt, Artificial Sequence
  Description of Artificial Sequence: Synthetic oligonucleotide
  Sense strand starting at position 82 of SEQ ID NO: 2185
uggcacuguccagguaaga

SEQ ID NO: 169581 - RNA, 19 nt, Artificial Sequence
  Description of Artificial Sequence: Synthetic oligonucleotide
  Antisense strand to SEQ ID NO: 169580
ucuuaccuggacagugcca

SEQ ID NO: 169582 - RNA, 19 nt, Artificial Sequence
  Description of Artificial Sequence: Synthetic oligonucleotide
  Sense strand starting at position 759 of SEQ ID NO: 2185
gcgagguguugguguagga

SEQ ID NO: 169583 - RNA, 19 nt, Artificial Sequence
  Description of Artificial Sequence: Synthetic oligonucleotide
  Antisense strand to SEQ ID NO: 169582
uccuacaccaacaccucgc

SEQ ID NO: 169584 - RNA, 19 nt, Artificial Sequence
  Description of Artificial Sequence: Synthetic oligonucleotide
  Sense strand starting at position 761 of SEQ ID NO: 2185
gagguguugguguaggaga

SEQ ID NO: 169585 - RNA, 19 nt, Artificial Sequence
  Description of Artificial Sequence: Synthetic oligonucleotide
  Antisense strand to SEQ ID NO: 169584
ucuccuacaccaacaccuc

SEQ ID NO: 169586 - RNA, 19 nt, Artificial Sequence
  Description of Artificial Sequence: Synthetic oligonucleotide
  Sense strand starting at position 1447 of SEQ ID NO: 2185
cagccucuugcucagugau

SEQ ID NO: 169587 - RNA, 19 nt, Artificial Sequence
  Description of Artificial Sequence: Synthetic oligonucleotide
  Antisense strand to SEQ ID NO: 169586
aucacugagcaagaggcug

SEQ ID NO: 169588 - RNA, 19 nt, Artificial Sequence
  Description of Artificial Sequence: Synthetic oligonucleotide
  Sense strand starting at position 1449 of SEQ ID NO: 2185
gccucuugcucagugaugu

SEQ ID NO: 169589 - RNA, 19 nt, Artificial Sequence
  Description of Artificial Sequence: Synthetic oligonucleotide
  Antisense strand to SEQ ID NO: 169588
acaucacugagcaagaggc

SEQ ID NO: 169590 - RNA, 19 nt, Artificial Sequence
  Description of Artificial Sequence: Synthetic oligonucleotide
  Sense strand starting at position 1450 of SEQ ID NO: 2185
ccucuugcucagugauguc

SEQ ID NO: 169591 - RNA, 19 nt, Artificial Sequence
  Description of Artificial Sequence: Synthetic oligonucleotide
  Antisense strand to SEQ ID NO: 169590
gacaucacugagcaagagg

SEQ ID NO: 169592 - RNA, 19 nt, Artificial Sequence
  Description of Artificial Sequence: Synthetic oligonucleotide
  Sense strand starting at position 1549 of SEQ ID NO: 2185
aggugcugagaagguuaaa

SEQ ID NO: 169593 - RNA, 19 nt, Artificial Sequence
  Description of Artificial Sequence: Synthetic oligonucleotide
  Antisense strand to SEQ ID NO: 169592
uuuaaccuucucagcaccu

SEQ ID NO: 169594 - RNA, 19 nt, Artificial Sequence
  Description of Artificial Sequence: Synthetic oligonucleotide
  Sense strand starting at position 1559 of SEQ ID NO: 2185
aagguuaaaggcuguuaga

SEQ ID NO: 169595 - RNA, 19 nt, Artificial Sequence
  Description of Artificial Sequence: Synthetic oligonucleotide
  Antisense strand to SEQ ID NO: 169594
ucuaacagccuuuaaccuu

SEQ ID NO: 169596 - RNA, 19 nt, Artificial Sequence
  Description of Artificial Sequence: Synthetic oligonucleotide
  Sense strand starting at position 1621 of SEQ ID NO: 2185
gcuaguccuugccgacuga

SEQ ID NO: 169597 - RNA, 19 nt, Artificial Sequence
  Description of Artificial Sequence: Synthetic oligonucleotide
  Antisense strand to SEQ ID NO: 169596
ucagucggcaaggacuagc

SEQ ID NO: 169598 - RNA, 19 nt, Artificial Sequence
  Description of Artificial Sequence: Synthetic oligonucleotide
  Sense strand starting at position 1671 of SEQ ID NO: 2185
agguacgcucggagucuua

SEQ ID NO: 169599 - RNA, 19 nt, Artificial Sequence
  Description of Artificial Sequence: Synthetic oligonucleotide
  Antisense strand to SEQ ID NO: 169598
uaagacuccgagcguaccu

SEQ ID NO: 169600 - RNA, 19 nt, Artificial Sequence
  Description of Artificial Sequence: Synthetic oligonucleotide
  Sense strand starting at position 1683 of SEQ ID NO: 2185
agucuuagagacugccauu

SEQ ID NO: 169601 - RNA, 19 nt, Artificial Sequence
  Description of Artificial Sequence: Synthetic oligonucleotide
  Antisense strand to SEQ ID NO: 169600
aauggcagucucuaagacu

SEQ ID NO: 169602 - RNA, 19 nt, Artificial Sequence
  Description of Artificial Sequence: Synthetic oligonucleotide
  Sense strand starting at position 1713 of SEQ ID NO: 2185
cccgacuucucuggaagga

SEQ ID NO: 169603 - RNA, 19 nt, Artificial Sequence
  Description of Artificial Sequence: Synthetic oligonucleotide
  Antisense strand to SEQ ID NO: 169602
uccuuccagagaagucggg

SEQ ID NO: 169604 - RNA, 19 nt, Artificial Sequence
  Description of Artificial Sequence: Synthetic oligonucleotide
  Sense strand starting at position 1842 of SEQ ID NO: 2185
ggguguugaauccagucau

SEQ ID NO: 169605 - RNA, 19 nt, Artificial Sequence
  Description of Artificial Sequence: Synthetic oligonucleotide
  Antisense strand to SEQ ID NO: 169604
augacuggauucaacaccc

SEQ ID NO: 169606 - RNA, 19 nt, Artificial Sequence
  Description of Artificial Sequence: Synthetic oligonucleotide
  Sense strand starting at position 1984 of SEQ ID NO: 2185
ccuccagaaucaguucuga

SEQ ID NO: 169607 - RNA, 19 nt, Artificial Sequence
  Description of Artificial Sequence: Synthetic oligonucleotide
  Antisense strand to SEQ ID NO: 169606
ucagaacugauucuggagg

SEQ ID NO: 169608 - RNA, 19 nt, Artificial Sequence
  Description of Artificial Sequence: Synthetic oligonucleotide
  Sense strand starting at position 1988 of SEQ ID NO: 2185
cagaaucaguucugagaug

SEQ ID NO: 169609 - RNA, 19 nt, Artificial Sequence
  Description of Artificial Sequence: Synthetic oligonucleotide
  Antisense strand to SEQ ID NO: 169608
caucucagaacugauucug

SEQ ID NO: 169610 - RNA, 19 nt, Artificial Sequence
  Description of Artificial Sequence: Synthetic oligonucleotide
  Sense strand starting at position 2123 of SEQ ID NO: 2185
gggaaagaccuguguugug

SEQ ID NO: 169611 - RNA, 19 nt, Artificial Sequence
  Description of Artificial Sequence: Synthetic oligonucleotide
  Antisense strand to SEQ ID NO: 169610
cacaacacaggucuuuccc

SEQ ID NO: 169612 - RNA, 19 nt, Artificial Sequence
  Description of Artificial Sequence: Synthetic oligonucleotide
  Sense strand starting at position 2128 of SEQ ID NO: 2185
agaccuguguuguggaguu

SEQ ID NO: 169613 - RNA, 19 nt, Artificial Sequence
  Description of Artificial Sequence: Synthetic oligonucleotide
  Antisense strand to SEQ ID NO: 169612
aacuccacaacacaggucu

SEQ ID NO: 169614 - RNA, 19 nt, Artificial Sequence
  Description of Artificial Sequence: Synthetic oligonucleotide
  Sense strand starting at position 2206 of SEQ ID NO: 2185
cuggcuuaaccugagagca

SEQ ID NO: 169615 - RNA, 19 nt, Artificial Sequence
  Description of Artificial Sequence: Synthetic oligonucleotide
  Antisense strand to SEQ ID NO: 169614
ugcucucagguuaagccag

SEQ ID NO: 169616 - RNA, 19 nt, Artificial Sequence
  Description of Artificial Sequence: Synthetic oligonucleotide
  Sense strand starting at position 2208 of SEQ ID NO: 2185
ggcuuaaccugagagcauu

SEQ ID NO: 169617 - RNA, 19 nt, Artificial Sequence
  Description of Artificial Sequence: Synthetic oligonucleotide
  Antisense strand to SEQ ID NO: 169616
aaugcucucagguuaagcc

SEQ ID NO: 169618 - RNA, 19 nt, Artificial Sequence
  Description of Artificial Sequence: Synthetic oligonucleotide
  Sense strand starting at position 2221 of SEQ ID NO: 2185
agcauuguugcugugagca

SEQ ID NO: 169619 - RNA, 19 nt, Artificial Sequence
  Description of Artificial Sequence: Synthetic oligonucleotide
  Antisense strand to SEQ ID NO: 169618
ugcucacagcaacaaugcu

SEQ ID NO: 169620 - RNA, 19 nt, Artificial Sequence
  Description of Artificial Sequence: Synthetic oligonucleotide
  Sense strand starting at position 2295 of SEQ ID NO: 2185
gcagcuuagaggcaaacuu

SEQ ID NO: 169621 - RNA, 19 nt, Artificial Sequence
  Description of Artificial Sequence: Synthetic oligonucleotide
  Antisense strand to SEQ ID NO: 169620
aaguuugccucuaagcugc

SEQ ID NO: 169622 - RNA, 19 nt, Artificial Sequence
  Description of Artificial Sequence: Synthetic oligonucleotide
  Sense strand starting at position 2359 of SEQ ID NO: 2185
ucagaaaggcuuuguccua

SEQ ID NO: 169623 - RNA, 19 nt, Artificial Sequence
  Description of Artificial Sequence: Synthetic oligonucleotide
  Antisense strand to SEQ ID NO: 169622
uaggacaaagccuuucuga

SEQ ID NO: 169624 - RNA, 19 nt, Artificial Sequence
  Description of Artificial Sequence: Synthetic oligonucleotide
  Sense strand starting at position 2416 of SEQ ID NO: 2185
guggaauggccagaugacu

SEQ ID NO: 169625 - RNA, 19 nt, Artificial Sequence
  Description of Artificial Sequence: Synthetic oligonucleotide
  Antisense strand to SEQ ID NO: 169624
agucaucuggccauuccac

SEQ ID NO: 169626 - RNA, 19 nt, Artificial Sequence
  Description of Artificial Sequence: Synthetic oligonucleotide
  Sense strand starting at position 2432 of SEQ ID NO: 2185
acuggccauucgugaacaa

SEQ ID NO: 169627 - RNA, 19 nt, Artificial Sequence
  Description of Artificial Sequence: Synthetic oligonucleotide
  Antisense strand to SEQ ID NO: 169626
uuguucacgaauggccagu

SEQ ID NO: 169628 - RNA, 19 nt, Artificial Sequence
  Description of Artificial Sequence: Synthetic oligonucleotide
  Sense strand starting at position 2436 of SEQ ID NO: 2185
gccauucgugaacaaguca

SEQ ID NO: 169629 - RNA, 19 nt, Artificial Sequence
  Description of Artificial Sequence: Synthetic oligonucleotide
  Antisense strand to SEQ ID NO: 169628
ugacuuguucacgaauggc

SEQ ID NO: 169630 - RNA, 19 nt, Artificial Sequence
  Description of Artificial Sequence: Synthetic oligonucleotide
  Sense strand starting at position 2451 of SEQ ID NO: 2185
gucacagaggccuagguua

SEQ ID NO: 169631 - RNA, 19 nt, Artificial Sequence
  Description of Artificial Sequence: Synthetic oligonucleotide
  Antisense strand to SEQ ID NO: 169630
uaaccuaggccucugugac

SEQ ID NO: 169632 - RNA, 19 nt, Artificial Sequence
  Description of Artificial Sequence: Synthetic oligonucleotide
  Sense strand starting at position 2616 of SEQ ID NO: 2185
uuggaugacuuccucaguu

SEQ ID NO: 169633 - RNA, 19 nt, Artificial Sequence
  Description of Artificial Sequence: Synthetic oligonucleotide
  Antisense strand to SEQ ID NO: 169632
aacugaggaagucauccaa

SEQ ID NO: 169634 - RNA, 19 nt, Artificial Sequence
  Description of Artificial Sequence: Synthetic oligonucleotide
  Sense strand starting at position 2854 of SEQ ID NO: 2185
gcugacaacucaugugacu

SEQ ID NO: 169635 - RNA, 19 nt, Artificial Sequence
  Description of Artificial Sequence: Synthetic oligonucleotide
  Antisense strand to SEQ ID NO: 169634
agucacaugaguugucagc

SEQ ID NO: 169636 - RNA, 19 nt, Artificial Sequence
  Description of Artificial Sequence: Synthetic oligonucleotide
  Sense strand starting at position 3040 of SEQ ID NO: 2185
gaguuugaacucugaaccu

SEQ ID NO: 169637 - RNA, 19 nt, Artificial Sequence
  Description of Artificial Sequence: Synthetic oligonucleotide
  Antisense strand to SEQ ID NO: 169636
agguucagaguucaaacuc

SEQ ID NO: 169638 - RNA, 19 nt, Artificial Sequence
  Description of Artificial Sequence: Synthetic oligonucleotide
  Sense strand starting at position 3109 of SEQ ID NO: 2185
ccucuaagggcugaaguuu

SEQ ID NO: 169639 - RNA, 19 nt, Artificial Sequence
  Description of Artificial Sequence: Synthetic oligonucleotide
  Antisense strand to SEQ ID NO: 169638
aaacuucagcccuuagagg

SEQ ID NO: 169640 - RNA, 19 nt, Artificial Sequence
  Description of Artificial Sequence: Synthetic oligonucleotide
  Sense strand starting at position 3721 of SEQ ID NO: 2185
ggccauccucccuggugaa

SEQ ID NO: 169641 - RNA, 19 nt, Artificial Sequence
  Description of Artificial Sequence: Synthetic oligonucleotide
  Antisense strand to SEQ ID NO: 169640
uucaccagggaggauggcc

SEQ ID NO: 169642 - RNA, 19 nt, Artificial Sequence
  Description of Artificial Sequence: Synthetic oligonucleotide
  Sense strand starting at position 3752 of SEQ ID NO: 2185
ggaggucaaauguggaaca

SEQ ID NO: 169643 - RNA, 19 nt, Artificial Sequence
  Description of Artificial Sequence: Synthetic oligonucleotide
  Antisense strand to SEQ ID NO: 169642
uguuccacauuugaccucc

SEQ ID NO: 169644 - RNA, 19 nt, Artificial Sequence
  Description of Artificial Sequence: Synthetic oligonucleotide
  Sense strand starting at position 3753 of SEQ ID NO: 2185
gaggucaaauguggaacau

SEQ ID NO: 169645 - RNA, 19 nt, Artificial Sequence
  Description of Artificial Sequence: Synthetic oligonucleotide
  Antisense strand to SEQ ID NO: 169644
auguuccacauuugaccuc

SEQ ID NO: 169646 - RNA, 19 nt, Artificial Sequence
  Description of Artificial Sequence: Synthetic oligonucleotide
  Sense strand starting at position 3918 of SEQ ID NO: 2185
cuuagagauggugggucau

SEQ ID NO: 169647 - RNA, 19 nt, Artificial Sequence
  Description of Artificial Sequence: Synthetic oligonucleotide
  Antisense strand to SEQ ID NO: 169646
augacccaccaucucuaag

SEQ ID NO: 169648 - RNA, 19 nt, Artificial Sequence
  Description of Artificial Sequence: Synthetic oligonucleotide
  Sense strand starting at position 3920 of SEQ ID NO: 2185
uagagauggugggucauga

SEQ ID NO: 169649 - RNA, 19 nt, Artificial Sequence
  Description of Artificial Sequence: Synthetic oligonucleotide
  Antisense strand to SEQ ID NO: 169648
ucaugacccaccaucucua

SEQ ID NO: 169650 - RNA, 19 nt, Artificial Sequence
  Description of Artificial Sequence: Synthetic oligonucleotide
  Sense strand starting at position 3957 of SEQ ID NO: 2185
ucacucagcuugguauuga

SEQ ID NO: 169651 - RNA, 19 nt, Artificial Sequence
  Description of Artificial Sequence: Synthetic oligonucleotide
  Antisense strand to SEQ ID NO: 169650
ucaauaccaagcugaguga

SEQ ID NO: 169652 - RNA, 19 nt, Artificial Sequence
  Description of Artificial Sequence: Synthetic oligonucleotide
  Sense strand starting at position 3975 of SEQ ID NO: 2185
aggccucacugcuagaaga

SEQ ID NO: 169653 - RNA, 19 nt, Artificial Sequence
  Description of Artificial Sequence: Synthetic oligonucleotide
  Antisense strand to SEQ ID NO: 169652
ucuucuagcagugaggccu

SEQ ID NO: 169654 - RNA, 19 nt, Artificial Sequence
  Description of Artificial Sequence: Synthetic oligonucleotide
  Sense strand starting at position 3977 of SEQ ID NO: 2185
gccucacugcuagaagaag

SEQ ID NO: 169655 - RNA, 19 nt, Artificial Sequence
  Description of Artificial Sequence: Synthetic oligonucleotide
  Antisense strand to SEQ ID NO: 169654
cuucuucuagcagugaggc

SEQ ID NO: 169656 - RNA, 19 nt, Artificial Sequence
  Description of Artificial Sequence: Synthetic oligonucleotide
  Sense strand starting at position 3976 of SEQ ID NO: 2186
caugguggguagucaagaa

SEQ ID NO: 169657 - RNA, 19 nt, Artificial Sequence
  Description of Artificial Sequence: Synthetic oligonucleotide
  Antisense strand to SEQ ID NO: 169656
uucuugacuacccaccaug

SEQ ID NO: 169658 - RNA, 19 nt, Artificial Sequence
  Description of Artificial Sequence: Synthetic oligonucleotide
  Sense strand starting at position 3955 of SEQ ID NO: 2186
guaucuugcaaaugcggua

SEQ ID NO: 169659 - RNA, 19 nt, Artificial Sequence
  Description of Artificial Sequence: Synthetic oligonucleotide
  Antisense strand to SEQ ID NO: 169658
uaccgcauuugcaagauac

SEQ ID NO: 169660 - RNA, 19 nt, Artificial Sequence
  Description of Artificial Sequence: Synthetic oligonucleotide
  Sense strand starting at position 3947 of SEQ ID NO: 2186
ggcucacuguaucuugcaa

SEQ ID NO: 169661 - RNA, 19 nt, Artificial Sequence
  Description of Artificial Sequence: Synthetic oligonucleotide
  Antisense strand to SEQ ID NO: 169660
uugcaagauacagugagcc

SEQ ID NO: 169662 - RNA, 19 nt, Artificial Sequence
  Description of Artificial Sequence: Synthetic oligonucleotide
  Sense strand starting at position 3851 of SEQ ID NO: 2186
uggagagcuguguaaagau

SEQ ID NO: 169663 - RNA, 19 nt, Artificial Sequence
  Description of Artificial Sequence: Synthetic oligonucleotide
  Antisense strand to SEQ ID NO: 169662
aucuuuacacagcucucca

SEQ ID NO: 169664 - RNA, 19 nt, Artificial Sequence
  Description of Artificial Sequence: Synthetic oligonucleotide
  Sense strand starting at position 3849 of SEQ ID NO: 2186
aguggagagcuguguaaag

SEQ ID NO: 169665 - RNA, 19 nt, Artificial Sequence
  Description of Artificial Sequence: Synthetic oligonucleotide
  Antisense strand to SEQ ID NO: 169664
cuuuacacagcucuccacu

SEQ ID NO: 169666 - RNA, 19 nt, Artificial Sequence
  Description of Artificial Sequence: Synthetic oligonucleotide
  Sense strand starting at position 3595 of SEQ ID NO: 2186
ucuucucuccgaugugaaa

SEQ ID NO: 169667 - RNA, 19 nt, Artificial Sequence
  Description of Artificial Sequence: Synthetic oligonucleotide
  Antisense strand to SEQ ID NO: 169666
uuucacaucggagagaaga

SEQ ID NO: 169668 - RNA, 19 nt, Artificial Sequence
  Description of Artificial Sequence: Synthetic oligonucleotide
  Sense strand starting at position 3563 of SEQ ID NO: 2186
ugagaugaguugguccgau

SEQ ID NO: 169669 - RNA, 19 nt, Artificial Sequence
  Description of Artificial Sequence: Synthetic oligonucleotide
  Antisense strand to SEQ ID NO: 169668
aucggaccaacucaucuca

SEQ ID NO: 169670 - RNA, 19 nt, Artificial Sequence
  Description of Artificial Sequence: Synthetic oligonucleotide
  Sense strand starting at position 3562 of SEQ ID NO: 2186
cugagaugaguugguccga

SEQ ID NO: 169671 - RNA, 19 nt, Artificial Sequence
  Description of Artificial Sequence: Synthetic oligonucleotide
  Antisense strand to SEQ ID NO: 169670
ucggaccaacucaucucag

SEQ ID NO: 169672 - RNA, 19 nt, Artificial Sequence
  Description of Artificial Sequence: Synthetic oligonucleotide
  Sense strand starting at position 3552 of SEQ ID NO: 2186
uccauucuugcugagauga

SEQ ID NO: 169673 - RNA, 19 nt, Artificial Sequence
  Description of Artificial Sequence: Synthetic oligonucleotide
  Antisense strand to SEQ ID NO: 169672
ucaucucagcaagaaugga

SEQ ID NO: 169674 - RNA, 19 nt, Artificial Sequence
  Description of Artificial Sequence: Synthetic oligonucleotide
  Sense strand starting at position 3494 of SEQ ID NO: 2186
ggugcuguccaauguggaa

SEQ ID NO: 169675 - RNA, 19 nt, Artificial Sequence
  Description of Artificial Sequence: Synthetic oligonucleotide
  Antisense strand to SEQ ID NO: 169674
uuccacauuggacagcacc

SEQ ID NO: 169676 - RNA, 19 nt, Artificial Sequence
  Description of Artificial Sequence: Synthetic oligonucleotide
  Sense strand starting at position 3457 of SEQ ID NO: 2186
ggguguuuccugcgacgga

SEQ ID NO: 169677 - RNA, 19 nt, Artificial Sequence
  Description of Artificial Sequence: Synthetic oligonucleotide
  Antisense strand to SEQ ID NO: 169676
uccgucgcaggaaacaccc

SEQ ID NO: 169678 - RNA, 19 nt, Artificial Sequence
  Description of Artificial Sequence: Synthetic oligonucleotide
  Sense strand starting at position 3420 of SEQ ID NO: 2186
aggaaaugcucucaaggaa

SEQ ID NO: 169679 - RNA, 19 nt, Artificial Sequence
  Description of Artificial Sequence: Synthetic oligonucleotide
  Antisense strand to SEQ ID NO: 169678
uuccuugagagcauuuccu

SEQ ID NO: 169680 - RNA, 19 nt, Artificial Sequence
  Description of Artificial Sequence: Synthetic oligonucleotide
  Sense strand starting at position 3269 of SEQ ID NO: 2186
gcgguuccaccgaguaaag

SEQ ID NO: 169681 - RNA, 19 nt, Artificial Sequence
  Description of Artificial Sequence: Synthetic oligonucleotide
  Antisense strand to SEQ ID NO: 169680
cuuuacucgguggaaccgc

SEQ ID NO: 169682 - RNA, 19 nt, Artificial Sequence
  Description of Artificial Sequence: Synthetic oligonucleotide
  Sense strand starting at position 3268 of SEQ ID NO: 2186
ugcgguuccaccgaguaaa

SEQ ID NO: 169683 - RNA, 19 nt, Artificial Sequence
  Description of Artificial Sequence: Synthetic oligonucleotide
  Antisense strand to SEQ ID NO: 169682
uuuacucgguggaaccgca

SEQ ID NO: 169684 - RNA, 19 nt, Artificial Sequence
  Description of Artificial Sequence: Synthetic oligonucleotide
  Sense strand starting at position 3219 of SEQ ID NO: 2186
ugguuuaaccaacagucuu

SEQ ID NO: 169685 - RNA, 19 nt, Artificial Sequence
  Description of Artificial Sequence: Synthetic oligonucleotide
  Antisense strand to SEQ ID NO: 169684
aagacuguugguuaaacca

SEQ ID NO: 169686 - RNA, 19 nt, Artificial Sequence
  Description of Artificial Sequence: Synthetic oligonucleotide
  Sense strand starting at position 3179 of SEQ ID NO: 2186
cucucaaguguguagauau

SEQ ID NO: 169687 - RNA, 19 nt, Artificial Sequence
  Description of Artificial Sequence: Synthetic oligonucleotide
  Antisense strand to SEQ ID NO: 169686
auaucuacacacuugagag

SEQ ID NO: 169688 - RNA, 19 nt, Artificial Sequence
  Description of Artificial Sequence: Synthetic oligonucleotide
  Sense strand starting at position 3178 of SEQ ID NO: 2186
ccucucaaguguguagaua

SEQ ID NO: 169689 - RNA, 19 nt, Artificial Sequence
  Description of Artificial Sequence: Synthetic oligonucleotide
  Antisense strand to SEQ ID NO: 169688
uaucuacacacuugagagg

SEQ ID NO: 169690 - RNA, 19 nt, Artificial Sequence
  Description of Artificial Sequence: Synthetic oligonucleotide
  Sense strand starting at position 3177 of SEQ ID NO: 2186
accucucaaguguguagau

SEQ ID NO: 169691 - RNA, 19 nt, Artificial Sequence
  Description of Artificial Sequence: Synthetic oligonucleotide
  Antisense strand to SEQ ID NO: 169690
aucuacacacuugagaggu

SEQ ID NO: 169692 - RNA, 19 nt, Artificial Sequence
  Description of Artificial Sequence: Synthetic oligonucleotide
  Sense strand starting at position 3153 of SEQ ID NO: 2186
gcuucuugagcauaaggaa

SEQ ID NO: 169693 - RNA, 19 nt, Artificial Sequence
  Description of Artificial Sequence: Synthetic oligonucleotide
  Antisense strand to SEQ ID NO: 169692
uuccuuaugcucaagaagc

SEQ ID NO: 169694 - RNA, 19 nt, Artificial Sequence
  Description of Artificial Sequence: Synthetic oligonucleotide
  Sense strand starting at position 3131 of SEQ ID NO: 2186
uaggcuuguguaugacuuu

SEQ ID NO: 169695 - RNA, 19 nt, Artificial Sequence
  Description of Artificial Sequence: Synthetic oligonucleotide
  Antisense strand to SEQ ID NO: 169694
aaagucauacacaagccua

SEQ ID NO: 169696 - RNA, 19 nt, Artificial Sequence
  Description of Artificial Sequence: Synthetic oligonucleotide
  Sense strand starting at position 3125 of SEQ ID NO: 2186
caaagcuaggcuuguguau

SEQ ID NO: 169697 - RNA, 19 nt, Artificial Sequence
  Description of Artificial Sequence: Synthetic oligonucleotide
  Antisense strand to SEQ ID NO: 169696
auacacaagccuagcuuug

SEQ ID NO: 169698 - RNA, 19 nt, Artificial Sequence
  Description of Artificial Sequence: Synthetic oligonucleotide
  Sense strand starting at position 3055 of SEQ ID NO: 2186
auuccuguuugguuacauu

SEQ ID NO: 169699 - RNA, 19 nt, Artificial Sequence
  Description of Artificial Sequence: Synthetic oligonucleotide
  Antisense strand to SEQ ID NO: 169698
aauguaaccaaacaggaau

SEQ ID NO: 169700 - RNA, 19 nt, Artificial Sequence
  Description of Artificial Sequence: Synthetic oligonucleotide
  Sense strand starting at position 3051 of SEQ ID NO: 2186
agauauuccuguuugguua

SEQ ID NO: 169701 - RNA, 19 nt, Artificial Sequence
  Description of Artificial Sequence: Synthetic oligonucleotide
  Antisense strand to SEQ ID NO: 169700
uaaccaaacaggaauaucu

SEQ ID NO: 169702 - RNA, 19 nt, Artificial Sequence
  Description of Artificial Sequence: Synthetic oligonucleotide
  Sense strand starting at position 3042 of SEQ ID NO: 2186
cguugaaugagauauuccu

SEQ ID NO: 169703 - RNA, 19 nt, Artificial Sequence
  Description of Artificial Sequence: Synthetic oligonucleotide
  Antisense strand to SEQ ID NO: 169702
aggaauaucucauucaacg

SEQ ID NO: 169704 - RNA, 19 nt, Artificial Sequence
  Description of Artificial Sequence: Synthetic oligonucleotide
  Sense strand starting at position 3037 of SEQ ID NO: 2186
agagucguugaaugagaua

SEQ ID NO: 169705 - RNA, 19 nt, Artificial Sequence
  Description of Artificial Sequence: Synthetic oligonucleotide
  Antisense strand to SEQ ID NO: 169704
uaucucauucaacgacucu

SEQ ID NO: 169706 - RNA, 19 nt, Artificial Sequence
  Description of Artificial Sequence: Synthetic oligonucleotide
  Sense strand starting at position 3032 of SEQ ID NO: 2186
uuagaagagucguugaaug

SEQ ID NO: 169707 - RNA, 19 nt, Artificial Sequence
  Description of Artificial Sequence: Synthetic oligonucleotide
  Antisense strand to SEQ ID NO: 169706
cauucaacgacucuucuaa

SEQ ID NO: 169708 - RNA, 19 nt, Artificial Sequence
  Description of Artificial Sequence: Synthetic oligonucleotide
  Sense strand starting at position 3021 of SEQ ID NO: 2186
uuguuagcaguuuagaaga

SEQ ID NO: 169709 - RNA, 19 nt, Artificial Sequence
  Description of Artificial Sequence: Synthetic oligonucleotide
  Antisense strand to SEQ ID NO: 169708
ucuucuaaacugcuaacaa

SEQ ID NO: 169710 - RNA, 19 nt, Artificial Sequence
  Description of Artificial Sequence: Synthetic oligonucleotide
  Sense strand starting at position 2879 of SEQ ID NO: 2186
aggauagguuuccuaaggu

SEQ ID NO: 169711 - RNA, 19 nt, Artificial Sequence
  Description of Artificial Sequence: Synthetic oligonucleotide
  Antisense strand to SEQ ID NO: 169710
accuuaggaaaccuauccu

SEQ ID NO: 169712 - RNA, 19 nt, Artificial Sequence
  Description of Artificial Sequence: Synthetic oligonucleotide
  Sense strand starting at position 2847 of SEQ ID NO: 2186
gcccuaggcuucuuuagac

SEQ ID NO: 169713 - RNA, 19 nt, Artificial Sequence
  Description of Artificial Sequence: Synthetic oligonucleotide
  Antisense strand to SEQ ID NO: 169712
gucuaaagaagccuagggc

SEQ ID NO: 169714 - RNA, 19 nt, Artificial Sequence
  Description of Artificial Sequence: Synthetic oligonucleotide
  Sense strand starting at position 2756 of SEQ ID NO: 2186
agggcaagauuauuaagca

SEQ ID NO: 169715 - RNA, 19 nt, Artificial Sequence
  Description of Artificial Sequence: Synthetic oligonucleotide
  Antisense strand to SEQ ID NO: 169714
ugcuuaauaaucuugcccu

SEQ ID NO: 169716 - RNA, 19 nt, Artificial Sequence
  Description of Artificial Sequence: Synthetic oligonucleotide
  Sense strand starting at position 525 of SEQ ID NO: 2186
gcacauuuaguuugcuaaa

SEQ ID NO: 169717 - RNA, 19 nt, Artificial Sequence
  Description of Artificial Sequence: Synthetic oligonucleotide
  Antisense strand to SEQ ID NO: 169716
uuuagcaaacuaaaugugc

SEQ ID NO: 169718 - RNA, 19 nt, Artificial Sequence
  Description of Artificial Sequence: Synthetic oligonucleotide
  Sense strand starting at position 478 of SEQ ID NO: 2186
uucuguuuccauuguauau

SEQ ID NO: 169719 - RNA, 19 nt, Artificial Sequence
  Description of Artificial Sequence: Synthetic oligonucleotide
  Antisense strand to SEQ ID NO: 169718
auauacaauggaaacagaa

SEQ ID NO: 169720 - RNA, 19 nt, Artificial Sequence
  Description of Artificial Sequence: Synthetic oligonucleotide
  Sense strand starting at position 461 of SEQ ID NO: 2186
guccacagucgccaucauu

SEQ ID NO: 169721 - RNA, 19 nt, Artificial Sequence
  Description of Artificial Sequence: Synthetic oligonucleotide
  Antisense strand to SEQ ID NO: 169720
aaugauggcgacuguggac

SEQ ID NO: 169722 - RNA, 19 nt, Artificial Sequence
  Description of Artificial Sequence: Synthetic oligonucleotide
  Sense strand starting at position 391 of SEQ ID NO: 2186
ucaguaugagcacgcauuu

SEQ ID NO: 169723 - RNA, 19 nt, Artificial Sequence
  Description of Artificial Sequence: Synthetic oligonucleotide
  Antisense strand to SEQ ID NO: 169722
aaaugcgugcucauacuga

SEQ ID NO: 169724 - RNA, 19 nt, Artificial Sequence
  Description of Artificial Sequence: Synthetic oligonucleotide
  Sense strand starting at position 248 of SEQ ID NO: 2186
gauuguugcgaugguugua

SEQ ID NO: 169725 - RNA, 19 nt, Artificial Sequence
  Description of Artificial Sequence: Synthetic oligonucleotide
  Antisense strand to SEQ ID NO: 169724
uacaaccaucgcaacaauc

SEQ ID NO: 169726 - RNA, 19 nt, Artificial Sequence
  Description of Artificial Sequence: Synthetic oligonucleotide
  Sense strand starting at position 196 of SEQ ID NO: 2186
ugcuaauugacgggagauu

SEQ ID NO: 169727 - RNA, 19 nt, Artificial Sequence
  Description of Artificial Sequence: Synthetic oligonucleotide
  Antisense strand to SEQ ID NO: 169726
aaucucccgucaauuagca

SEQ ID NO: 169728 - RNA, 19 nt, Artificial Sequence
  Description of Artificial Sequence: Synthetic oligonucleotide
  Sense strand starting at position 195 of SEQ ID NO: 2186
cugcuaauugacgggagau

SEQ ID NO: 169729 - RNA, 19 nt, Artificial Sequence
  Description of Artificial Sequence: Synthetic oligonucleotide
  Antisense strand to SEQ ID NO: 169728
aucucccgucaauuagcag

SEQ ID NO: 169730 - RNA, 19 nt, Artificial Sequence
  Description of Artificial Sequence: Synthetic oligonucleotide
  Sense strand starting at position 30 of SEQ ID NO: 2186
gcuauacgaccuggaugaa

SEQ ID NO: 169731 - RNA, 19 nt, Artificial Sequence
  Description of Artificial Sequence: Synthetic oligonucleotide
  Antisense strand to SEQ ID NO: 169730
uucauccaggucguauagc

SEQ ID NO: 169732 - RNA, 19 nt, Artificial Sequence
  Description of Artificial Sequence: Synthetic oligonucleotide
  Sense strand starting at position 29 of SEQ ID NO: 2186
ugcuauacgaccuggauga

SEQ ID NO: 169733 - RNA, 19 nt, Artificial Sequence
  Description of Artificial Sequence: Synthetic oligonucleotide
  Antisense strand to SEQ ID NO: 169732
ucauccaggucguauagca

SEQ ID NO: 169734 - RNA, 19 nt, Artificial Sequence
  Description of Artificial Sequence: Synthetic oligonucleotide
  Sense strand starting at position 15 of SEQ ID NO: 2186
guaguaguaauacaugcua

SEQ ID NO: 169735 - RNA, 19 nt, Artificial Sequence
  Description of Artificial Sequence: Synthetic oligonucleotide
  Antisense strand to SEQ ID NO: 169734
uagcauguauuacuacuac

SEQ ID NO: 169736 - RNA, 19 nt, Artificial Sequence
  Description of Artificial Sequence: Synthetic oligonucleotide
  Sense strand starting at position 3887 of SEQ ID NO: 2188
gcuggaagaacucaacugu

SEQ ID NO: 169737 - RNA, 19 nt, Artificial Sequence
  Description of Artificial Sequence: Synthetic oligonucleotide
  Antisense strand to SEQ ID NO: 169736
acaguugaguucuuccagc

SEQ ID NO: 169738 - RNA, 19 nt, Artificial Sequence
  Description of Artificial Sequence: Synthetic oligonucleotide
  Sense strand starting at position 3850 of SEQ ID NO: 2188
ggugaugacuaauccucuu

SEQ ID NO: 169739 - RNA, 19 nt, Artificial Sequence
  Description of Artificial Sequence: Synthetic oligonucleotide
  Antisense strand to SEQ ID NO: 169738
aagaggauuagucaucacc

SEQ ID NO: 169740 - RNA, 19 nt, Artificial Sequence
  Description of Artificial Sequence: Synthetic oligonucleotide
  Sense strand starting at position 3756 of SEQ ID NO: 2188
augauaugaugcuucuaag

SEQ ID NO: 169741 - RNA, 19 nt, Artificial Sequence
  Description of Artificial Sequence: Synthetic oligonucleotide
  Antisense strand to SEQ ID NO: 169740
cuuagaagcaucauaucau

SEQ ID NO: 169742 - RNA, 19 nt, Artificial Sequence
  Description of Artificial Sequence: Synthetic oligonucleotide
  Sense strand starting at position 3743 of SEQ ID NO: 2188
gaacauaucugggaugaua

SEQ ID NO: 169743 - RNA, 19 nt, Artificial Sequence
  Description of Artificial Sequence: Synthetic oligonucleotide
  Antisense strand to SEQ ID NO: 169742
uaucaucccagauauguuc

SEQ ID NO: 169744 - RNA, 19 nt, Artificial Sequence
  Description of Artificial Sequence: Synthetic oligonucleotide
  Sense strand starting at position 3741 of SEQ ID NO: 2188
aagaacauaucugggauga

SEQ ID NO: 169745 - RNA, 19 nt, Artificial Sequence
  Description of Artificial Sequence: Synthetic oligonucleotide
  Antisense strand to SEQ ID NO: 169744
ucaucccagauauguucuu

SEQ ID NO: 169746 - RNA, 19 nt, Artificial Sequence
  Description of Artificial Sequence: Synthetic oligonucleotide
  Sense strand starting at position 3641 of SEQ ID NO: 2188
gaaaguuacucagcaacug

SEQ ID NO: 169747 - RNA, 19 nt, Artificial Sequence
  Description of Artificial Sequence: Synthetic oligonucleotide
  Antisense strand to SEQ ID NO: 169746
caguugcugaguaacuuuc

SEQ ID NO: 169748 - RNA, 19 nt, Artificial Sequence
  Description of Artificial Sequence: Synthetic oligonucleotide
  Sense strand starting at position 3508 of SEQ ID NO: 2188
guguuuauuugguuuacaa

SEQ ID NO: 169749 - RNA, 19 nt, Artificial Sequence
  Description of Artificial Sequence: Synthetic oligonucleotide
  Antisense strand to SEQ ID NO: 169748
uuguaaaccaaauaaacac

SEQ ID NO: 169750 - RNA, 19 nt, Artificial Sequence
  Description of Artificial Sequence: Synthetic oligonucleotide
  Sense strand starting at position 3507 of SEQ ID NO: 2188
uguguuuauuugguuuaca

SEQ ID NO: 169751 - RNA, 19 nt, Artificial Sequence
  Description of Artificial Sequence: Synthetic oligonucleotide
  Antisense strand to SEQ ID NO: 169750
uguaaaccaaauaaacaca

SEQ ID NO: 169752 - RNA, 19 nt, Artificial Sequence
  Description of Artificial Sequence: Synthetic oligonucleotide
  Sense strand starting at position 3475 of SEQ ID NO: 2188
ugucucuuaugguuggaaa

SEQ ID NO: 169753 - RNA, 19 nt, Artificial Sequence
  Description of Artificial Sequence: Synthetic oligonucleotide
  Antisense strand to SEQ ID NO: 169752
uuuccaaccauaagagaca

SEQ ID NO: 169754 - RNA, 19 nt, Artificial Sequence
  Description of Artificial Sequence: Synthetic oligonucleotide
  Sense strand starting at position 3395 of SEQ ID NO: 2188
gcagaaguccgugugaguu

SEQ ID NO: 169755 - RNA, 19 nt, Artificial Sequence
  Description of Artificial Sequence: Synthetic oligonucleotide
  Antisense strand to SEQ ID NO: 169754
aacucacacggacuucugc

SEQ ID NO: 169756 - RNA, 19 nt, Artificial Sequence
  Description of Artificial Sequence: Synthetic oligonucleotide
  Sense strand starting at position 3008 of SEQ ID NO: 2188
cuuggucuugguuagcaaa

SEQ ID NO: 169757 - RNA, 19 nt, Artificial Sequence
  Description of Artificial Sequence: Synthetic oligonucleotide
  Antisense strand to SEQ ID NO: 169756
uuugcuaaccaagaccaag

SEQ ID NO: 169758 - RNA, 19 nt, Artificial Sequence
  Description of Artificial Sequence: Synthetic oligonucleotide
  Sense strand starting at position 2853 of SEQ ID NO: 2188
ggaaucagacgagguacua

SEQ ID NO: 169759 - RNA, 19 nt, Artificial Sequence
  Description of Artificial Sequence: Synthetic oligonucleotide
  Antisense strand to SEQ ID NO: 169758
uaguaccucgucugauucc

SEQ ID NO: 169760 - RNA, 19 nt, Artificial Sequence
  Description of Artificial Sequence: Synthetic oligonucleotide
  Sense strand starting at position 2850 of SEQ ID NO: 2188
augggaaucagacgaggua

SEQ ID NO: 169761 - RNA, 19 nt, Artificial Sequence
  Description of Artificial Sequence: Synthetic oligonucleotide
  Antisense strand to SEQ ID NO: 169760
uaccucgucugauucccau

SEQ ID NO: 169762 - RNA, 19 nt, Artificial Sequence
  Description of Artificial Sequence: Synthetic oligonucleotide
  Sense strand starting at position 2784 of SEQ ID NO: 2188
ggcugacuauguuugacua

SEQ ID NO: 169763 - RNA, 19 nt, Artificial Sequence
  Description of Artificial Sequence: Synthetic oligonucleotide
  Antisense strand to SEQ ID NO: 169762
uagucaaacauagucagcc

SEQ ID NO: 169764 - RNA, 19 nt, Artificial Sequence
  Description of Artificial Sequence: Synthetic oligonucleotide
  Sense strand starting at position 2623 of SEQ ID NO: 2188
gcgcaugugacuucguguu

SEQ ID NO: 169765 - RNA, 19 nt, Artificial Sequence
  Description of Artificial Sequence: Synthetic oligonucleotide
  Antisense strand to SEQ ID NO: 169764
aacacgaagucacaugcgc

SEQ ID NO: 169766 - RNA, 19 nt, Artificial Sequence
  Description of Artificial Sequence: Synthetic oligonucleotide
  Sense strand starting at position 2461 of SEQ ID NO: 2188
uguacagucuaauuaaaga

SEQ ID NO: 169767 - RNA, 19 nt, Artificial Sequence
  Description of Artificial Sequence: Synthetic oligonucleotide
  Antisense strand to SEQ ID NO: 169766
ucuuuaauuagacuguaca

SEQ ID NO: 169768 - RNA, 19 nt, Artificial Sequence
  Description of Artificial Sequence: Synthetic oligonucleotide
  Sense strand starting at position 2362 of SEQ ID NO: 2188
gagccagauuuauaaaguc

SEQ ID NO: 169769 - RNA, 19 nt, Artificial Sequence
  Description of Artificial Sequence: Synthetic oligonucleotide
  Antisense strand to SEQ ID NO: 169768
gacuuuauaaaucuggcuc

SEQ ID NO: 169770 - RNA, 19 nt, Artificial Sequence
  Description of Artificial Sequence: Synthetic oligonucleotide
  Sense strand starting at position 2346 of SEQ ID NO: 2188
guugguuugguagaaugag

SEQ ID NO: 169771 - RNA, 19 nt, Artificial Sequence
  Description of Artificial Sequence: Synthetic oligonucleotide
  Antisense strand to SEQ ID NO: 169770
cucauucuaccaaaccaac

SEQ ID NO: 169772 - RNA, 19 nt, Artificial Sequence
  Description of Artificial Sequence: Synthetic oligonucleotide
  Sense strand starting at position 2343 of SEQ ID NO: 2188
auaguugguuugguagaau

SEQ ID NO: 169773 - RNA, 19 nt, Artificial Sequence
  Description of Artificial Sequence: Synthetic oligonucleotide
  Antisense strand to SEQ ID NO: 169772
auucuaccaaaccaacuau

SEQ ID NO: 169774 - RNA, 19 nt, Artificial Sequence
  Description of Artificial Sequence: Synthetic oligonucleotide
  Sense strand starting at position 2339 of SEQ ID NO: 2188
auguauaguugguuuggua

SEQ ID NO: 169775 - RNA, 19 nt, Artificial Sequence
  Description of Artificial Sequence: Synthetic oligonucleotide
  Antisense strand to SEQ ID NO: 169774
uaccaaaccaacuauacau

SEQ ID NO: 169776 - RNA, 19 nt, Artificial Sequence
  Description of Artificial Sequence: Synthetic oligonucleotide
  Sense strand starting at position 2219 of SEQ ID NO: 2188
ggcugagaaucccugcaga

SEQ ID NO: 169777 - RNA, 19 nt, Artificial Sequence
  Description of Artificial Sequence: Synthetic oligonucleotide
  Antisense strand to SEQ ID NO: 169776
ucugcagggauucucagcc

SEQ ID NO: 169778 - RNA, 19 nt, Artificial Sequence
  Description of Artificial Sequence: Synthetic oligonucleotide
  Sense strand starting at position 2211 of SEQ ID NO: 2188
ugauucuuggcugagaauc

SEQ ID NO: 169779 - RNA, 19 nt, Artificial Sequence
  Description of Artificial Sequence: Synthetic oligonucleotide
  Antisense strand to SEQ ID NO: 169778
gauucucagccaagaauca

SEQ ID NO: 169780 - RNA, 19 nt, Artificial Sequence
  Description of Artificial Sequence: Synthetic oligonucleotide
  Sense strand starting at position 2210 of SEQ ID NO: 2188
cugauucuuggcugagaau

SEQ ID NO: 169781 - RNA, 19 nt, Artificial Sequence
  Description of Artificial Sequence: Synthetic oligonucleotide
  Antisense strand to SEQ ID NO: 169780
auucucagccaagaaucag

SEQ ID NO: 169782 - RNA, 19 nt, Artificial Sequence
  Description of Artificial Sequence: Synthetic oligonucleotide
  Sense strand starting at position 2209 of SEQ ID NO: 2188
ucugauucuuggcugagaa

SEQ ID NO: 169783 - RNA, 19 nt, Artificial Sequence
  Description of Artificial Sequence: Synthetic oligonucleotide
  Antisense strand to SEQ ID NO: 169782
uucucagccaagaaucaga

SEQ ID NO: 169784 - RNA, 19 nt, Artificial Sequence
  Description of Artificial Sequence: Synthetic oligonucleotide
  Sense strand starting at position 2208 of SEQ ID NO: 2188
uucugauucuuggcugaga

SEQ ID NO: 169785 - RNA, 19 nt, Artificial Sequence
  Description of Artificial Sequence: Synthetic oligonucleotide
  Antisense strand to SEQ ID NO: 169784
ucucagccaagaaucagaa

SEQ ID NO: 169786 - RNA, 19 nt, Artificial Sequence
  Description of Artificial Sequence: Synthetic oligonucleotide
  Sense strand starting at position 2174 of SEQ ID NO: 2188
cuggguuuauuugaggaaa

SEQ ID NO: 169787 - RNA, 19 nt, Artificial Sequence
  Description of Artificial Sequence: Synthetic oligonucleotide
  Antisense strand to SEQ ID NO: 169786
uuuccucaaauaaacccag

SEQ ID NO: 169788 - RNA, 19 nt, Artificial Sequence
  Description of Artificial Sequence: Synthetic oligonucleotide
  Sense strand starting at position 2165 of SEQ ID NO: 2188
ucaauaggucuggguuuau

SEQ ID NO: 169789 - RNA, 19 nt, Artificial Sequence
  Description of Artificial Sequence: Synthetic oligonucleotide
  Antisense strand to SEQ ID NO: 169788
auaaacccagaccuauuga

SEQ ID NO: 169790 - RNA, 19 nt, Artificial Sequence
  Description of Artificial Sequence: Synthetic oligonucleotide
  Sense strand starting at position 2142 of SEQ ID NO: 2188
gucugauaagcagagauuc

SEQ ID NO: 169791 - RNA, 19 nt, Artificial Sequence
  Description of Artificial Sequence: Synthetic oligonucleotide
  Antisense strand to SEQ ID NO: 169790
gaaucucugcuuaucagac

SEQ ID NO: 169792 - RNA, 19 nt, Artificial Sequence
  Description of Artificial Sequence: Synthetic oligonucleotide
  Sense strand starting at position 2133 of SEQ ID NO: 2188
gaugcacaggucugauaag

SEQ ID NO: 169793 - RNA, 19 nt, Artificial Sequence
  Description of Artificial Sequence: Synthetic oligonucleotide
  Antisense strand to SEQ ID NO: 169792
cuuaucagaccugugcauc

SEQ ID NO: 169794 - RNA, 19 nt, Artificial Sequence
  Description of Artificial Sequence: Synthetic oligonucleotide
  Sense strand starting at position 2112 of SEQ ID NO: 2188
ggcuauguaagaggcgaaa

SEQ ID NO: 169795 - RNA, 19 nt, Artificial Sequence
  Description of Artificial Sequence: Synthetic oligonucleotide
  Antisense strand to SEQ ID NO: 169794
uuucgccucuuacauagcc

SEQ ID NO: 169796 - RNA, 19 nt, Artificial Sequence
  Description of Artificial Sequence: Synthetic oligonucleotide
  Sense strand starting at position 1454 of SEQ ID NO: 2188
ucccucuuaccugaaggua

SEQ ID NO: 169797 - RNA, 19 nt, Artificial Sequence
  Description of Artificial Sequence: Synthetic oligonucleotide
  Antisense strand to SEQ ID NO: 169796
uaccuucagguaagaggga

SEQ ID NO: 169798 - RNA, 19 nt, Artificial Sequence
  Description of Artificial Sequence: Synthetic oligonucleotide
  Sense strand starting at position 688 of SEQ ID NO: 2188
gcauaauaacugcagaacu

SEQ ID NO: 169799 - RNA, 19 nt, Artificial Sequence
  Description of Artificial Sequence: Synthetic oligonucleotide
  Antisense strand to SEQ ID NO: 169798
aguucugcaguuauuaugc

SEQ ID NO: 169800 - RNA, 19 nt, Artificial Sequence
  Description of Artificial Sequence: Synthetic oligonucleotide
  Sense strand starting at position 677 of SEQ ID NO: 2188
cuggcugggaugcauaaua

SEQ ID NO: 169801 - RNA, 19 nt, Artificial Sequence
  Description of Artificial Sequence: Synthetic oligonucleotide
  Antisense strand to SEQ ID NO: 169800
uauuaugcaucccagccag

SEQ ID NO: 169802 - RNA, 19 nt, Artificial Sequence
  Description of Artificial Sequence: Synthetic oligonucleotide
  Sense strand starting at position 525 of SEQ ID NO: 2188
ggugcaagaaccugaaauc

SEQ ID NO: 169803 - RNA, 19 nt, Artificial Sequence
  Description of Artificial Sequence: Synthetic oligonucleotide
  Antisense strand to SEQ ID NO: 169802
gauuucagguucuugcacc

SEQ ID NO: 169804 - RNA, 19 nt, Artificial Sequence
  Description of Artificial Sequence: Synthetic oligonucleotide
  Sense strand starting at position 506 of SEQ ID NO: 2188
uuuguuucucucgacuuaa

SEQ ID NO: 169805 - RNA, 19 nt, Artificial Sequence
  Description of Artificial Sequence: Synthetic oligonucleotide
  Antisense strand to SEQ ID NO: 169804
uuaagucgagagaaacaaa

SEQ ID NO: 169806 - RNA, 19 nt, Artificial Sequence
  Description of Artificial Sequence: Synthetic oligonucleotide
  Sense strand starting at position 300 of SEQ ID NO: 2188
uuccucgauuucuugcauu

SEQ ID NO: 169807 - RNA, 19 nt, Artificial Sequence
  Description of Artificial Sequence: Synthetic oligonucleotide
  Antisense strand to SEQ ID NO: 169806
aaugcaagaaaucgaggaa

SEQ ID NO: 169808 - RNA, 19 nt, Artificial Sequence
  Description of Artificial Sequence: Synthetic oligonucleotide
  Sense strand starting at position 292 of SEQ ID NO: 2188
acucuugguuccucgauuu

SEQ ID NO: 169809 - RNA, 19 nt, Artificial Sequence
  Description of Artificial Sequence: Synthetic oligonucleotide
  Antisense strand to SEQ ID NO: 169808
aaaucgaggaaccaagagu

SEQ ID NO: 169810 - RNA, 19 nt, Artificial Sequence
  Description of Artificial Sequence: Synthetic oligonucleotide
  Sense strand starting at position 258 of SEQ ID NO: 2188
ggagcuguuuauccaggca

SEQ ID NO: 169811 - RNA, 19 nt, Artificial Sequence
  Description of Artificial Sequence: Synthetic oligonucleotide
  Antisense strand to SEQ ID NO: 169810
ugccuggauaaacagcucc

SEQ ID NO: 169812 - RNA, 19 nt, Artificial Sequence
  Description of Artificial Sequence: Synthetic oligonucleotide
  Sense strand starting at position 223 of SEQ ID NO: 2188
uaguaucuguguuuauaca

SEQ ID NO: 169813 - RNA, 19 nt, Artificial Sequence
  Description of Artificial Sequence: Synthetic oligonucleotide
  Antisense strand to SEQ ID NO: 169812
uguauaaacacagauacua

SEQ ID NO: 169814 - RNA, 19 nt, Artificial Sequence
  Description of Artificial Sequence: Synthetic oligonucleotide
  Sense strand starting at position 221 of SEQ ID NO: 2188
cuuaguaucuguguuuaua

SEQ ID NO: 169815 - RNA, 19 nt, Artificial Sequence
  Description of Artificial Sequence: Synthetic oligonucleotide
  Antisense strand to SEQ ID NO: 169814
uauaaacacagauacuaag

SEQ ID NO: 169816 - RNA, 19 nt, Artificial Sequence
  Description of Artificial Sequence: Synthetic oligonucleotide
  Sense strand starting at position 3975 of SEQ ID NO: 2190
gaacauaucugggaugaua

SEQ ID NO: 169817 - RNA, 19 nt, Artificial Sequence
  Description of Artificial Sequence: Synthetic oligonucleotide
  Antisense strand to SEQ ID NO: 169816
uaucaucccagauauguuc

SEQ ID NO: 169818 - RNA, 19 nt, Artificial Sequence
  Description of Artificial Sequence: Synthetic oligonucleotide
  Sense strand starting at position 3973 of SEQ ID NO: 2190
aagaacauaucugggauga

SEQ ID NO: 169819 - RNA, 19 nt, Artificial Sequence
  Description of Artificial Sequence: Synthetic oligonucleotide
  Antisense strand to SEQ ID NO: 169818
ucaucccagauauguucuu

SEQ ID NO: 169820 - RNA, 19 nt, Artificial Sequence
  Description of Artificial Sequence: Synthetic oligonucleotide
  Sense strand starting at position 3873 of SEQ ID NO: 2190
gaaaguuacucagcaacug

SEQ ID NO: 169821 - RNA, 19 nt, Artificial Sequence
  Description of Artificial Sequence: Synthetic oligonucleotide
  Antisense strand to SEQ ID NO: 169820
caguugcugaguaacuuuc

SEQ ID NO: 169822 - RNA, 19 nt, Artificial Sequence
  Description of Artificial Sequence: Synthetic oligonucleotide
  Sense strand starting at position 3740 of SEQ ID NO: 2190
guguuuauuugguuuacaa

SEQ ID NO: 169823 - RNA, 19 nt, Artificial Sequence
  Description of Artificial Sequence: Synthetic oligonucleotide
  Antisense strand to SEQ ID NO: 169822
uuguaaaccaaauaaacac

SEQ ID NO: 169824 - RNA, 19 nt, Artificial Sequence
  Description of Artificial Sequence: Synthetic oligonucleotide
  Sense strand starting at position 3739 of SEQ ID NO: 2190
uguguuuauuugguuuaca

SEQ ID NO: 169825 - RNA, 19 nt, Artificial Sequence
  Description of Artificial Sequence: Synthetic oligonucleotide
  Antisense strand to SEQ ID NO: 169824
uguaaaccaaauaaacaca

SEQ ID NO: 169826 - RNA, 19 nt, Artificial Sequence
  Description of Artificial Sequence: Synthetic oligonucleotide
  Sense strand starting at position 3707 of SEQ ID NO: 2190
ugucucuuaugguuggaaa

SEQ ID NO: 169827 - RNA, 19 nt, Artificial Sequence
  Description of Artificial Sequence: Synthetic oligonucleotide
  Antisense strand to SEQ ID NO: 169826
uuuccaaccauaagagaca

SEQ ID NO: 169828 - RNA, 19 nt, Artificial Sequence
  Description of Artificial Sequence: Synthetic oligonucleotide
  Sense strand starting at position 3627 of SEQ ID NO: 2190
gcagaaguccgugugaguu

SEQ ID NO: 169829 - RNA, 19 nt, Artificial Sequence
  Description of Artificial Sequence: Synthetic oligonucleotide
  Antisense strand to SEQ ID NO: 169828
aacucacacggacuucugc

SEQ ID NO: 169830 - RNA, 19 nt, Artificial Sequence
  Description of Artificial Sequence: Synthetic oligonucleotide
  Sense strand starting at position 3240 of SEQ ID NO: 2190
cuuggucuugguuagcaaa

SEQ ID NO: 169831 - RNA, 19 nt, Artificial Sequence
  Description of Artificial Sequence: Synthetic oligonucleotide
  Antisense strand to SEQ ID NO: 169830
uuugcuaaccaagaccaag

SEQ ID NO: 169832 - RNA, 19 nt, Artificial Sequence
  Description of Artificial Sequence: Synthetic oligonucleotide
  Sense strand starting at position 3085 of SEQ ID NO: 2190
ggaaucagacgagguacua

SEQ ID NO: 169833 - RNA, 19 nt, Artificial Sequence
  Description of Artificial Sequence: Synthetic oligonucleotide
  Antisense strand to SEQ ID NO: 169832
uaguaccucgucugauucc

SEQ ID NO: 169834 - RNA, 19 nt, Artificial Sequence
  Description of Artificial Sequence: Synthetic oligonucleotide
  Sense strand starting at position 3082 of SEQ ID NO: 2190
augggaaucagacgaggua

SEQ ID NO: 169835 - RNA, 19 nt, Artificial Sequence
  Description of Artificial Sequence: Synthetic oligonucleotide
  Antisense strand to SEQ ID NO: 169834
uaccucgucugauucccau

SEQ ID NO: 169836 - RNA, 19 nt, Artificial Sequence
  Description of Artificial Sequence: Synthetic oligonucleotide
  Sense strand starting at position 3016 of SEQ ID NO: 2190
ggcugacuauguuugacua

SEQ ID NO: 169837 - RNA, 19 nt, Artificial Sequence
  Description of Artificial Sequence: Synthetic oligonucleotide
  Antisense strand to SEQ ID NO: 169836
uagucaaacauagucagcc

SEQ ID NO: 169838 - RNA, 19 nt, Artificial Sequence
  Description of Artificial Sequence: Synthetic oligonucleotide
  Sense strand starting at position 2855 of SEQ ID NO: 2190
gcgcaugugacuucguguu

SEQ ID NO: 169839 - RNA, 19 nt, Artificial Sequence
  Description of Artificial Sequence: Synthetic oligonucleotide
  Antisense strand to SEQ ID NO: 169838
aacacgaagucacaugcgc

SEQ ID NO: 169840 - RNA, 19 nt, Artificial Sequence
  Description of Artificial Sequence: Synthetic oligonucleotide
  Sense strand starting at position 2693 of SEQ ID NO: 2190
uguacagucuaauuaaaga

SEQ ID NO: 169841 - RNA, 19 nt, Artificial Sequence
  Description of Artificial Sequence: Synthetic oligonucleotide
  Antisense strand to SEQ ID NO: 169840
ucuuuaauuagacuguaca

SEQ ID NO: 169842 - RNA, 19 nt, Artificial Sequence
  Description of Artificial Sequence: Synthetic oligonucleotide
  Sense strand starting at position 2628 of SEQ ID NO: 2190
acaguaguuuaagagauau

SEQ ID NO: 169843 - RNA, 19 nt, Artificial Sequence
  Description of Artificial Sequence: Synthetic oligonucleotide
  Antisense strand to SEQ ID NO: 169842
auaucucuuaaacuacugu

SEQ ID NO: 169844 - RNA, 19 nt, Artificial Sequence
  Description of Artificial Sequence: Synthetic oligonucleotide
  Sense strand starting at position 2594 of SEQ ID NO: 2190
gagccagauuuauaaaguc

SEQ ID NO: 169845 - RNA, 19 nt, Artificial Sequence
  Description of Artificial Sequence: Synthetic oligonucleotide
  Antisense strand to SEQ ID NO: 169844
gacuuuauaaaucuggcuc

SEQ ID NO: 169846 - RNA, 19 nt, Artificial Sequence
  Description of Artificial Sequence: Synthetic oligonucleotide
  Sense strand starting at position 2578 of SEQ ID NO: 2190
guugguuugguagaaugag

SEQ ID NO: 169847 - RNA, 19 nt, Artificial Sequence
  Description of Artificial Sequence: Synthetic oligonucleotide
  Antisense strand to SEQ ID NO: 169846
cucauucuaccaaaccaac

SEQ ID NO: 169848 - RNA, 19 nt, Artificial Sequence
  Description of Artificial Sequence: Synthetic oligonucleotide
  Sense strand starting at position 2575 of SEQ ID NO: 2190
auaguugguuugguagaau

SEQ ID NO: 169849 - RNA, 19 nt, Artificial Sequence
  Description of Artificial Sequence: Synthetic oligonucleotide
  Antisense strand to SEQ ID NO: 169848
auucuaccaaaccaacuau

SEQ ID NO: 169850 - RNA, 19 nt, Artificial Sequence
  Description of Artificial Sequence: Synthetic oligonucleotide
  Sense strand starting at position 2571 of SEQ ID NO: 2190
auguauaguugguuuggua

SEQ ID NO: 169851 - RNA, 19 nt, Artificial Sequence
  Description of Artificial Sequence: Synthetic oligonucleotide
  Antisense strand to SEQ ID NO: 169850
uaccaaaccaacuauacau

SEQ ID NO: 169852 - RNA, 19 nt, Artificial Sequence
  Description of Artificial Sequence: Synthetic oligonucleotide
  Sense strand starting at position 2451 of SEQ ID NO: 2190
ggcugagaaucccugcaga

SEQ ID NO: 169853 - RNA, 19 nt, Artificial Sequence
  Description of Artificial Sequence: Synthetic oligonucleotide
  Antisense strand to SEQ ID NO: 169852
ucugcagggauucucagcc

SEQ ID NO: 169854 - RNA, 19 nt, Artificial Sequence
  Description of Artificial Sequence: Synthetic oligonucleotide
  Sense strand starting at position 2443 of SEQ ID NO: 2190
ugauucuuggcugagaauc

SEQ ID NO: 169855 - RNA, 19 nt, Artificial Sequence
  Description of Artificial Sequence: Synthetic oligonucleotide
  Antisense strand to SEQ ID NO: 169854
gauucucagccaagaauca

SEQ ID NO: 169856 - RNA, 19 nt, Artificial Sequence
  Description of Artificial Sequence: Synthetic oligonucleotide
  Sense strand starting at position 2442 of SEQ ID NO: 2190
cugauucuuggcugagaau

SEQ ID NO: 169857 - RNA, 19 nt, Artificial Sequence
  Description of Artificial Sequence: Synthetic oligonucleotide
  Antisense strand to SEQ ID NO: 169856
auucucagccaagaaucag

SEQ ID NO: 169858 - RNA, 19 nt, Artificial Sequence
  Description of Artificial Sequence: Synthetic oligonucleotide
  Sense strand starting at position 2441 of SEQ ID NO: 2190
ucugauucuuggcugagaa

SEQ ID NO: 169859 - RNA, 19 nt, Artificial Sequence
  Description of Artificial Sequence: Synthetic oligonucleotide
  Antisense strand to SEQ ID NO: 169858
uucucagccaagaaucaga

SEQ ID NO: 169860 - RNA, 19 nt, Artificial Sequence
  Description of Artificial Sequence: Synthetic oligonucleotide
  Sense strand starting at position 2440 of SEQ ID NO: 2190
uucugauucuuggcugaga

SEQ ID NO: 169861 - RNA, 19 nt, Artificial Sequence
  Description of Artificial Sequence: Synthetic oligonucleotide
  Antisense strand to SEQ ID NO: 169860
ucucagccaagaaucagaa

SEQ ID NO: 169862 - RNA, 19 nt, Artificial Sequence
  Description of Artificial Sequence: Synthetic oligonucleotide
  Sense strand starting at position 2406 of SEQ ID NO: 2190
cuggguuuauuugaggaaa

SEQ ID NO: 169863 - RNA, 19 nt, Artificial Sequence
  Description of Artificial Sequence: Synthetic oligonucleotide
  Antisense strand to SEQ ID NO: 169862
uuuccucaaauaaacccag

SEQ ID NO: 169864 - RNA, 19 nt, Artificial Sequence
  Description of Artificial Sequence: Synthetic oligonucleotide
  Sense strand starting at position 2397 of SEQ ID NO: 2190
ucaauaggucuggguuuau

SEQ ID NO: 169865 - RNA, 19 nt, Artificial Sequence
  Description of Artificial Sequence: Synthetic oligonucleotide
  Antisense strand to SEQ ID NO: 169864
auaaacccagaccuauuga

SEQ ID NO: 169866 - RNA, 19 nt, Artificial Sequence
  Description of Artificial Sequence: Synthetic oligonucleotide
  Sense strand starting at position 2374 of SEQ ID NO: 2190
gucugauaagcagagauuc

SEQ ID NO: 169867 - RNA, 19 nt, Artificial Sequence
  Description of Artificial Sequence: Synthetic oligonucleotide
  Antisense strand to SEQ ID NO: 169866
gaaucucugcuuaucagac

SEQ ID NO: 169868 - RNA, 19 nt, Artificial Sequence
  Description of Artificial Sequence: Synthetic oligonucleotide
  Sense strand starting at position 2365 of SEQ ID NO: 2190
gaugcacaggucugauaag

SEQ ID NO: 169869 - RNA, 19 nt, Artificial Sequence
  Description of Artificial Sequence: Synthetic oligonucleotide
  Antisense strand to SEQ ID NO: 169868
cuuaucagaccugugcauc

SEQ ID NO: 169870 - RNA, 19 nt, Artificial Sequence
  Description of Artificial Sequence: Synthetic oligonucleotide
  Sense strand starting at position 2344 of SEQ ID NO: 2190
ggcuauguaagaggcgaaa

SEQ ID NO: 169871 - RNA, 19 nt, Artificial Sequence
  Description of Artificial Sequence: Synthetic oligonucleotide
  Antisense strand to SEQ ID NO: 169870
uuucgccucuuacauagcc

SEQ ID NO: 169872 - RNA, 19 nt, Artificial Sequence
  Description of Artificial Sequence: Synthetic oligonucleotide
  Sense strand starting at position 1686 of SEQ ID NO: 2190
ucccucuuaccugaaggua

SEQ ID NO: 169873 - RNA, 19 nt, Artificial Sequence
  Description of Artificial Sequence: Synthetic oligonucleotide
  Antisense strand to SEQ ID NO: 169872
uaccuucagguaagaggga

SEQ ID NO: 169874 - RNA, 19 nt, Artificial Sequence
  Description of Artificial Sequence: Synthetic oligonucleotide
  Sense strand starting at position 920 of SEQ ID NO: 2190
gcauaauaacugcagaacu

SEQ ID NO: 169875 - RNA, 19 nt, Artificial Sequence
  Description of Artificial Sequence: Synthetic oligonucleotide
  Antisense strand to SEQ ID NO: 169874
aguucugcaguuauuaugc

SEQ ID NO: 169876 - RNA, 19 nt, Artificial Sequence
  Description of Artificial Sequence: Synthetic oligonucleotide
  Sense strand starting at position 909 of SEQ ID NO: 2190
cuggcugggaugcauaaua

SEQ ID NO: 169877 - RNA, 19 nt, Artificial Sequence
  Description of Artificial Sequence: Synthetic oligonucleotide
  Antisense strand to SEQ ID NO: 169876
uauuaugcaucccagccag

SEQ ID NO: 169878 - RNA, 19 nt, Artificial Sequence
  Description of Artificial Sequence: Synthetic oligonucleotide
  Sense strand starting at position 795 of SEQ ID NO: 2190
uugugagugcacgauuguu

SEQ ID NO: 169879 - RNA, 19 nt, Artificial Sequence
  Description of Artificial Sequence: Synthetic oligonucleotide
  Antisense strand to SEQ ID NO: 169878
aacaaucgugcacucacaa

SEQ ID NO: 169880 - RNA, 19 nt, Artificial Sequence
  Description of Artificial Sequence: Synthetic oligonucleotide
  Sense strand starting at position 757 of SEQ ID NO: 2190
ggugcaagaaccugaaauc

SEQ ID NO: 169881 - RNA, 19 nt, Artificial Sequence
  Description of Artificial Sequence: Synthetic oligonucleotide
  Antisense strand to SEQ ID NO: 169880
gauuucagguucuugcacc

SEQ ID NO: 169882 - RNA, 19 nt, Artificial Sequence
  Description of Artificial Sequence: Synthetic oligonucleotide
  Sense strand starting at position 738 of SEQ ID NO: 2190
uuuguuucucucgacuuaa

SEQ ID NO: 169883 - RNA, 19 nt, Artificial Sequence
  Description of Artificial Sequence: Synthetic oligonucleotide
  Antisense strand to SEQ ID NO: 169882
uuaagucgagagaaacaaa

SEQ ID NO: 169884 - RNA, 19 nt, Artificial Sequence
  Description of Artificial Sequence: Synthetic oligonucleotide
  Sense strand starting at position 532 of SEQ ID NO: 2190
uuccucgauuucuugcauu

SEQ ID NO: 169885 - RNA, 19 nt, Artificial Sequence
  Description of Artificial Sequence: Synthetic oligonucleotide
  Antisense strand to SEQ ID NO: 169884
aaugcaagaaaucgaggaa

SEQ ID NO: 169886 - RNA, 19 nt, Artificial Sequence
  Description of Artificial Sequence: Synthetic oligonucleotide
  Sense strand starting at position 524 of SEQ ID NO: 2190
acucuugguuccucgauuu

SEQ ID NO: 169887 - RNA, 19 nt, Artificial Sequence
  Description of Artificial Sequence: Synthetic oligonucleotide
  Antisense strand to SEQ ID NO: 169886
aaaucgaggaaccaagagu

SEQ ID NO: 169888 - RNA, 19 nt, Artificial Sequence
  Description of Artificial Sequence: Synthetic oligonucleotide
  Sense strand starting at position 490 of SEQ ID NO: 2190
ggagcuguuuauccaggca

SEQ ID NO: 169889 - RNA, 19 nt, Artificial Sequence
  Description of Artificial Sequence: Synthetic oligonucleotide
  Antisense strand to SEQ ID NO: 169888
ugccuggauaaacagcucc

SEQ ID NO: 169890 - RNA, 19 nt, Artificial Sequence
  Description of Artificial Sequence: Synthetic oligonucleotide
  Sense strand starting at position 455 of SEQ ID NO: 2190
uaguaucuguguuuauaca

SEQ ID NO: 169891 - RNA, 19 nt, Artificial Sequence
  Description of Artificial Sequence: Synthetic oligonucleotide
  Antisense strand to SEQ ID NO: 169890
uguauaaacacagauacua

SEQ ID NO: 169892 - RNA, 19 nt, Artificial Sequence
  Description of Artificial Sequence: Synthetic oligonucleotide
  Sense strand starting at position 453 of SEQ ID NO: 2190
cuuaguaucuguguuuaua

SEQ ID NO: 169893 - RNA, 19 nt, Artificial Sequence
  Description of Artificial Sequence: Synthetic oligonucleotide
  Antisense strand to SEQ ID NO: 169892
uauaaacacagauacuaag

SEQ ID NO: 169894 - RNA, 19 nt, Artificial Sequence
  Description of Artificial Sequence: Synthetic oligonucleotide
  Sense strand starting at position 451 of SEQ ID NO: 2190
uccuuaguaucuguguuua

SEQ ID NO: 169895 - RNA, 19 nt, Artificial Sequence
  Description of Artificial Sequence: Synthetic oligonucleotide
  Antisense strand to SEQ ID NO: 169894
uaaacacagauacuaagga

SEQ ID NO: 169896 - RNA, 19 nt, Artificial Sequence
  Description of Artificial Sequence: Synthetic oligonucleotide
  Sense strand starting at position 3878 of SEQ ID NO: 2189
gcuggaagaacucaacugu

SEQ ID NO: 169897 - RNA, 19 nt, Artificial Sequence
  Description of Artificial Sequence: Synthetic oligonucleotide
  Antisense strand to SEQ ID NO: 169896
acaguugaguucuuccagc

SEQ ID NO: 169898 - RNA, 19 nt, Artificial Sequence
  Description of Artificial Sequence: Synthetic oligonucleotide
  Sense strand starting at position 3841 of SEQ ID NO: 2189
ggugaugacuaauccucuu

SEQ ID NO: 169899 - RNA, 19 nt, Artificial Sequence
  Description of Artificial Sequence: Synthetic oligonucleotide
  Antisense strand to SEQ ID NO: 169898
aagaggauuagucaucacc

SEQ ID NO: 169900 - RNA, 19 nt, Artificial Sequence
  Description of Artificial Sequence: Synthetic oligonucleotide
  Sense strand starting at position 3747 of SEQ ID NO: 2189
augauaugaugcuucuaag

SEQ ID NO: 169901 - RNA, 19 nt, Artificial Sequence
  Description of Artificial Sequence: Synthetic oligonucleotide
  Antisense strand to SEQ ID NO: 169900
cuuagaagcaucauaucau

SEQ ID NO: 169902 - RNA, 19 nt, Artificial Sequence
  Description of Artificial Sequence: Synthetic oligonucleotide
  Sense strand starting at position 3734 of SEQ ID NO: 2189
gaacauaucugggaugaua

SEQ ID NO: 169903 - RNA, 19 nt, Artificial Sequence
  Description of Artificial Sequence: Synthetic oligonucleotide
  Antisense strand to SEQ ID NO: 169902
uaucaucccagauauguuc

SEQ ID NO: 169904 - RNA, 19 nt, Artificial Sequence
  Description of Artificial Sequence: Synthetic oligonucleotide
  Sense strand starting at position 3732 of SEQ ID NO: 2189
aagaacauaucugggauga

SEQ ID NO: 169905 - RNA, 19 nt, Artificial Sequence
  Description of Artificial Sequence: Synthetic oligonucleotide
  Antisense strand to SEQ ID NO: 169904
ucaucccagauauguucuu

SEQ ID NO: 169906 - RNA, 19 nt, Artificial Sequence
  Description of Artificial Sequence: Synthetic oligonucleotide
  Sense strand starting at position 3632 of SEQ ID NO: 2189
gaaaguuacucagcaacug

SEQ ID NO: 169907 - RNA, 19 nt, Artificial Sequence
  Description of Artificial Sequence: Synthetic oligonucleotide
  Antisense strand to SEQ ID NO: 169906
caguugcugaguaacuuuc

SEQ ID NO: 169908 - RNA, 19 nt, Artificial Sequence
  Description of Artificial Sequence: Synthetic oligonucleotide
  Sense strand starting at position 3499 of SEQ ID NO: 2189
guguuuauuugguuuacaa

SEQ ID NO: 169909 - RNA, 19 nt, Artificial Sequence
  Description of Artificial Sequence: Synthetic oligonucleotide
  Antisense strand to SEQ ID NO: 169908
uuguaaaccaaauaaacac

SEQ ID NO: 169910 - RNA, 19 nt, Artificial Sequence
  Description of Artificial Sequence: Synthetic oligonucleotide
  Sense strand starting at position 3498 of SEQ ID NO: 2189
uguguuuauuugguuuaca

SEQ ID NO: 169911 - RNA, 19 nt, Artificial Sequence
  Description of Artificial Sequence: Synthetic oligonucleotide
  Antisense strand to SEQ ID NO: 169910
uguaaaccaaauaaacaca

SEQ ID NO: 169912 - RNA, 19 nt, Artificial Sequence
  Description of Artificial Sequence: Synthetic oligonucleotide
  Sense strand starting at position 3466 of SEQ ID NO: 2189
ugucucuuaugguuggaaa

SEQ ID NO: 169913 - RNA, 19 nt, Artificial Sequence
  Description of Artificial Sequence: Synthetic oligonucleotide
  Antisense strand to SEQ ID NO: 169912
uuuccaaccauaagagaca

SEQ ID NO: 169914 - RNA, 19 nt, Artificial Sequence
  Description of Artificial Sequence: Synthetic oligonucleotide
  Sense strand starting at position 3386 of SEQ ID NO: 2189
gcagaaguccgugugaguu

SEQ ID NO: 169915 - RNA, 19 nt, Artificial Sequence
  Description of Artificial Sequence: Synthetic oligonucleotide
  Antisense strand to SEQ ID NO: 169914
aacucacacggacuucugc

SEQ ID NO: 169916 - RNA, 19 nt, Artificial Sequence
  Description of Artificial Sequence: Synthetic oligonucleotide
  Sense strand starting at position 2999 of SEQ ID NO: 2189
cuuggucuugguuagcaaa

SEQ ID NO: 169917 - RNA, 19 nt, Artificial Sequence
  Description of Artificial Sequence: Synthetic oligonucleotide
  Antisense strand to SEQ ID NO: 169916
uuugcuaaccaagaccaag

SEQ ID NO: 169918 - RNA, 19 nt, Artificial Sequence
  Description of Artificial Sequence: Synthetic oligonucleotide
  Sense strand starting at position 2844 of SEQ ID NO: 2189
ggaaucagacgagguacua

SEQ ID NO: 169919 - RNA, 19 nt, Artificial Sequence
  Description of Artificial Sequence: Synthetic oligonucleotide
  Antisense strand to SEQ ID NO: 169918
uaguaccucgucugauucc

SEQ ID NO: 169920 - RNA, 19 nt, Artificial Sequence
  Description of Artificial Sequence: Synthetic oligonucleotide
  Sense strand starting at position 2841 of SEQ ID NO: 2189
augggaaucagacgaggua

SEQ ID NO: 169921 - RNA, 19 nt, Artificial Sequence
  Description of Artificial Sequence: Synthetic oligonucleotide
  Antisense strand to SEQ ID NO: 169920
uaccucgucugauucccau

SEQ ID NO: 169922 - RNA, 19 nt, Artificial Sequence
  Description of Artificial Sequence: Synthetic oligonucleotide
  Sense strand starting at position 2775 of SEQ ID NO: 2189
ggcugacuauguuugacua

SEQ ID NO: 169923 - RNA, 19 nt, Artificial Sequence
  Description of Artificial Sequence: Synthetic oligonucleotide
  Antisense strand to SEQ ID NO: 169922
uagucaaacauagucagcc

SEQ ID NO: 169924 - RNA, 19 nt, Artificial Sequence
  Description of Artificial Sequence: Synthetic oligonucleotide
  Sense strand starting at position 2614 of SEQ ID NO: 2189
gcgcaugugacuucguguu

SEQ ID NO: 169925 - RNA, 19 nt, Artificial Sequence
  Description of Artificial Sequence: Synthetic oligonucleotide
  Antisense strand to SEQ ID NO: 169924
aacacgaagucacaugcgc

SEQ ID NO: 169926 - RNA, 19 nt, Artificial Sequence
  Description of Artificial Sequence: Synthetic oligonucleotide
  Sense strand starting at position 2452 of SEQ ID NO: 2189
uguacagucuaauuaaaga

SEQ ID NO: 169927 - RNA, 19 nt, Artificial Sequence
  Description of Artificial Sequence: Synthetic oligonucleotide
  Antisense strand to SEQ ID NO: 169926
ucuuuaauuagacuguaca

SEQ ID NO: 169928 - RNA, 19 nt, Artificial Sequence
  Description of Artificial Sequence: Synthetic oligonucleotide
  Sense strand starting at position 2353 of SEQ ID NO: 2189
gagccagauuuauaaaguc

SEQ ID NO: 169929 - RNA, 19 nt, Artificial Sequence
  Description of Artificial Sequence: Synthetic oligonucleotide
  Antisense strand to SEQ ID NO: 169928
gacuuuauaaaucuggcuc

SEQ ID NO: 169930 - RNA, 19 nt, Artificial Sequence
  Description of Artificial Sequence: Synthetic oligonucleotide
  Sense strand starting at position 2337 of SEQ ID NO: 2189
guugguuugguagaaugag

SEQ ID NO: 169931 - RNA, 19 nt, Artificial Sequence
  Description of Artificial Sequence: Synthetic oligonucleotide
  Antisense strand to SEQ ID NO: 169930
cucauucuaccaaaccaac

SEQ ID NO: 169932 - RNA, 19 nt, Artificial Sequence
  Description of Artificial Sequence: Synthetic oligonucleotide
  Sense strand starting at position 2334 of SEQ ID NO: 2189
auaguugguuugguagaau

SEQ ID NO: 169933 - RNA, 19 nt, Artificial Sequence
  Description of Artificial Sequence: Synthetic oligonucleotide
  Antisense strand to SEQ ID NO: 169932
auucuaccaaaccaacuau

SEQ ID NO: 169934 - RNA, 19 nt, Artificial Sequence
  Description of Artificial Sequence: Synthetic oligonucleotide
  Sense strand starting at position 2330 of SEQ ID NO: 2189
auguauaguugguuuggua

SEQ ID NO: 169935 - RNA, 19 nt, Artificial Sequence
  Description of Artificial Sequence: Synthetic oligonucleotide
  Antisense strand to SEQ ID NO: 169934
uaccaaaccaacuauacau

SEQ ID NO: 169936 - RNA, 19 nt, Artificial Sequence
  Description of Artificial Sequence: Synthetic oligonucleotide
  Sense strand starting at position 2210 of SEQ ID NO: 2189
ggcugagaaucccugcaga

SEQ ID NO: 169937 - RNA, 19 nt, Artificial Sequence
  Description of Artificial Sequence: Synthetic oligonucleotide
  Antisense strand to SEQ ID NO: 169936
ucugcagggauucucagcc

SEQ ID NO: 169938 - RNA, 19 nt, Artificial Sequence
  Description of Artificial Sequence: Synthetic oligonucleotide
  Sense strand starting at position 2202 of SEQ ID NO: 2189
ugauucuuggcugagaauc

SEQ ID NO: 169939 - RNA, 19 nt, Artificial Sequence
  Description of Artificial Sequence: Synthetic oligonucleotide
  Antisense strand to SEQ ID NO: 169938
gauucucagccaagaauca

SEQ ID NO: 169940 - RNA, 19 nt, Artificial Sequence
  Description of Artificial Sequence: Synthetic oligonucleotide
  Sense strand starting at position 2201 of SEQ ID NO: 2189
cugauucuuggcugagaau

SEQ ID NO: 169941 - RNA, 19 nt, Artificial Sequence
  Description of Artificial Sequence: Synthetic oligonucleotide
  Antisense strand to SEQ ID NO: 169940
auucucagccaagaaucag

SEQ ID NO: 169942 - RNA, 19 nt, Artificial Sequence
  Description of Artificial Sequence: Synthetic oligonucleotide
  Sense strand starting at position 2200 of SEQ ID NO: 2189
ucugauucuuggcugagaa

SEQ ID NO: 169943 - RNA, 19 nt, Artificial Sequence
  Description of Artificial Sequence: Synthetic oligonucleotide
  Antisense strand to SEQ ID NO: 169942
uucucagccaagaaucaga

SEQ ID NO: 169944 - RNA, 19 nt, Artificial Sequence
  Description of Artificial Sequence: Synthetic oligonucleotide
  Sense strand starting at position 2199 of SEQ ID NO: 2189
uucugauucuuggcugaga

SEQ ID NO: 169945 - RNA, 19 nt, Artificial Sequence
  Description of Artificial Sequence: Synthetic oligonucleotide
  Antisense strand to SEQ ID NO: 169944
ucucagccaagaaucagaa

SEQ ID NO: 169946 - RNA, 19 nt, Artificial Sequence
  Description of Artificial Sequence: Synthetic oligonucleotide
  Sense strand starting at position 2165 of SEQ ID NO: 2189
cuggguuuauuugaggaaa

SEQ ID NO: 169947 - RNA, 19 nt, Artificial Sequence
  Description of Artificial Sequence: Synthetic oligonucleotide
  Antisense strand to SEQ ID NO: 169946
uuuccucaaauaaacccag

SEQ ID NO: 169948 - RNA, 19 nt, Artificial Sequence
  Description of Artificial Sequence: Synthetic oligonucleotide
  Sense strand starting at position 2156 of SEQ ID NO: 2189
ucaauaggucuggguuuau

SEQ ID NO: 169949 - RNA, 19 nt, Artificial Sequence
  Description of Artificial Sequence: Synthetic oligonucleotide
  Antisense strand to SEQ ID NO: 169948
auaaacccagaccuauuga

SEQ ID NO: 169950 - RNA, 19 nt, Artificial Sequence
  Description of Artificial Sequence: Synthetic oligonucleotide
  Sense strand starting at position 2133 of SEQ ID NO: 2189
gucugauaagcagagauuc

SEQ ID NO: 169951 - RNA, 19 nt, Artificial Sequence
  Description of Artificial Sequence: Synthetic oligonucleotide
  Antisense strand to SEQ ID NO: 169950
gaaucucugcuuaucagac

SEQ ID NO: 169952 - RNA, 19 nt, Artificial Sequence
  Description of Artificial Sequence: Synthetic oligonucleotide
  Sense strand starting at position 2124 of SEQ ID NO: 2189
gaugcacaggucugauaag

SEQ ID NO: 169953 - RNA, 19 nt, Artificial Sequence
  Description of Artificial Sequence: Synthetic oligonucleotide
  Antisense strand to SEQ ID NO: 169952
cuuaucagaccugugcauc

SEQ ID NO: 169954 - RNA, 19 nt, Artificial Sequence
  Description of Artificial Sequence: Synthetic oligonucleotide
  Sense strand starting at position 2103 of SEQ ID NO: 2189
ggcuauguaagaggcgaaa

SEQ ID NO: 169955 - RNA, 19 nt, Artificial Sequence
  Description of Artificial Sequence: Synthetic oligonucleotide
  Antisense strand to SEQ ID NO: 169954
uuucgccucuuacauagcc

SEQ ID NO: 169956 - RNA, 19 nt, Artificial Sequence
  Description of Artificial Sequence: Synthetic oligonucleotide
  Sense strand starting at position 1445 of SEQ ID NO: 2189
ucccucuuaccugaaggua

SEQ ID NO: 169957 - RNA, 19 nt, Artificial Sequence
  Description of Artificial Sequence: Synthetic oligonucleotide
  Antisense strand to SEQ ID NO: 169956
uaccuucagguaagaggga

SEQ ID NO: 169958 - RNA, 19 nt, Artificial Sequence
  Description of Artificial Sequence: Synthetic oligonucleotide
  Sense strand starting at position 679 of SEQ ID NO: 2189
gcauaauaacugcagaacu

SEQ ID NO: 169959 - RNA, 19 nt, Artificial Sequence
  Description of Artificial Sequence: Synthetic oligonucleotide
  Antisense strand to SEQ ID NO: 169958
aguucugcaguuauuaugc

SEQ ID NO: 169960 - RNA, 19 nt, Artificial Sequence
  Description of Artificial Sequence: Synthetic oligonucleotide
  Sense strand starting at position 668 of SEQ ID NO: 2189
cuggcugggaugcauaaua

SEQ ID NO: 169961 - RNA, 19 nt, Artificial Sequence
  Description of Artificial Sequence: Synthetic oligonucleotide
  Antisense strand to SEQ ID NO: 169960
uauuaugcaucccagccag

SEQ ID NO: 169962 - RNA, 19 nt, Artificial Sequence
  Description of Artificial Sequence: Synthetic oligonucleotide
  Sense strand starting at position 516 of SEQ ID NO: 2189
ggugcaagaaccugaaauc

SEQ ID NO: 169963 - RNA, 19 nt, Artificial Sequence
  Description of Artificial Sequence: Synthetic oligonucleotide
  Antisense strand to SEQ ID NO: 169962
gauuucagguucuugcacc

SEQ ID NO: 169964 - RNA, 19 nt, Artificial Sequence
  Description of Artificial Sequence: Synthetic oligonucleotide
  Sense strand starting at position 497 of SEQ ID NO: 2189
uuuguuucucucgacuuaa

SEQ ID NO: 169965 - RNA, 19 nt, Artificial Sequence
  Description of Artificial Sequence: Synthetic oligonucleotide
  Antisense strand to SEQ ID NO: 169964
uuaagucgagagaaacaaa

SEQ ID NO: 169966 - RNA, 19 nt, Artificial Sequence
  Description of Artificial Sequence: Synthetic oligonucleotide
  Sense strand starting at position 291 of SEQ ID NO: 2189
uuccucgauuucuugcauu

SEQ ID NO: 169967 - RNA, 19 nt, Artificial Sequence
  Description of Artificial Sequence: Synthetic oligonucleotide
  Antisense strand to SEQ ID NO: 169966
aaugcaagaaaucgaggaa

SEQ ID NO: 169968 - RNA, 19 nt, Artificial Sequence
  Description of Artificial Sequence: Synthetic oligonucleotide
  Sense strand starting at position 283 of SEQ ID NO: 2189
acucuugguuccucgauuu

SEQ ID NO: 169969 - RNA, 19 nt, Artificial Sequence
  Description of Artificial Sequence: Synthetic oligonucleotide
  Antisense strand to SEQ ID NO: 169968
aaaucgaggaaccaagagu

SEQ ID NO: 169970 - RNA, 19 nt, Artificial Sequence
  Description of Artificial Sequence: Synthetic oligonucleotide
  Sense strand starting at position 249 of SEQ ID NO: 2189
ggagcuguuuauccaggca

SEQ ID NO: 169971 - RNA, 19 nt, Artificial Sequence
  Description of Artificial Sequence: Synthetic oligonucleotide
  Antisense strand to SEQ ID NO: 169970
ugccuggauaaacagcucc

SEQ ID NO: 169972 - RNA, 19 nt, Artificial Sequence
  Description of Artificial Sequence: Synthetic oligonucleotide
  Sense strand starting at position 214 of SEQ ID NO: 2189
uaguaucuguguuuauaca

SEQ ID NO: 169973 - RNA, 19 nt, Artificial Sequence
  Description of Artificial Sequence: Synthetic oligonucleotide
  Antisense strand to SEQ ID NO: 169972
uguauaaacacagauacua

SEQ ID NO: 169974 - RNA, 19 nt, Artificial Sequence
  Description of Artificial Sequence: Synthetic oligonucleotide
  Sense strand starting at position 212 of SEQ ID NO: 2189
cuuaguaucuguguuuaua

SEQ ID NO: 169975 - RNA, 19 nt, Artificial Sequence
  Description of Artificial Sequence: Synthetic oligonucleotide
  Antisense strand to SEQ ID NO: 169974
uauaaacacagauacuaag

SEQ ID NO: 169976 - RNA, 19 nt, Artificial Sequence
  Description of Artificial Sequence: Synthetic oligonucleotide
  Sense strand starting at position 3643 of SEQ ID NO: 2187
caauaaugacacggucuau

SEQ ID NO: 169977 - RNA, 19 nt, Artificial Sequence
  Description of Artificial Sequence: Synthetic oligonucleotide
  Antisense strand to SEQ ID NO: 169976
auagaccgugucauuauug

SEQ ID NO: 169978 - RNA, 19 nt, Artificial Sequence
  Description of Artificial Sequence: Synthetic oligonucleotide
  Sense strand starting at position 3113 of SEQ ID NO: 2187
gguaaagggccuuguccaa

SEQ ID NO: 169979 - RNA, 19 nt, Artificial Sequence
  Description of Artificial Sequence: Synthetic oligonucleotide
  Antisense strand to SEQ ID NO: 169978
uuggacaaggcccuuuacc

SEQ ID NO: 169980 - RNA, 19 nt, Artificial Sequence
  Description of Artificial Sequence: Synthetic oligonucleotide
  Sense strand starting at position 3032 of SEQ ID NO: 2187
aaggguaaguauucuuaua

SEQ ID NO: 169981 - RNA, 19 nt, Artificial Sequence
  Description of Artificial Sequence: Synthetic oligonucleotide
  Antisense strand to SEQ ID NO: 169980
uauaagaauacuuacccuu

SEQ ID NO: 169982 - RNA, 19 nt, Artificial Sequence
  Description of Artificial Sequence: Synthetic oligonucleotide
  Sense strand starting at position 2848 of SEQ ID NO: 2187
acuaacaucgaaugcaaau

SEQ ID NO: 169983 - RNA, 19 nt, Artificial Sequence
  Description of Artificial Sequence: Synthetic oligonucleotide
  Antisense strand to SEQ ID NO: 169982
auuugcauucgauguuagu

SEQ ID NO: 169984 - RNA, 19 nt, Artificial Sequence
  Description of Artificial Sequence: Synthetic oligonucleotide
  Sense strand starting at position 2814 of SEQ ID NO: 2187
gcaggauuaaugcaauagu

SEQ ID NO: 169985 - RNA, 19 nt, Artificial Sequence
  Description of Artificial Sequence: Synthetic oligonucleotide
  Antisense strand to SEQ ID NO: 169984
acuauugcauuaauccugc

SEQ ID NO: 169986 - RNA, 19 nt, Artificial Sequence
  Description of Artificial Sequence: Synthetic oligonucleotide
  Sense strand starting at position 2791 of SEQ ID NO: 2187
uugcaagaugaaugcaaca

SEQ ID NO: 169987 - RNA, 19 nt, Artificial Sequence
  Description of Artificial Sequence: Synthetic oligonucleotide
  Antisense strand to SEQ ID NO: 169986
uguugcauucaucuugcaa

SEQ ID NO: 169988 - RNA, 19 nt, Artificial Sequence
  Description of Artificial Sequence: Synthetic oligonucleotide
  Sense strand starting at position 2777 of SEQ ID NO: 2187
gagagaccucauuguugca

SEQ ID NO: 169989 - RNA, 19 nt, Artificial Sequence
  Description of Artificial Sequence: Synthetic oligonucleotide
  Antisense strand to SEQ ID NO: 169988
ugcaacaaugaggucucuc

SEQ ID NO: 169990 - RNA, 19 nt, Artificial Sequence
  Description of Artificial Sequence: Synthetic oligonucleotide
  Sense strand starting at position 2574 of SEQ ID NO: 2187
gugguuaccaugggauuaa

SEQ ID NO: 169991 - RNA, 19 nt, Artificial Sequence
  Description of Artificial Sequence: Synthetic oligonucleotide
  Antisense strand to SEQ ID NO: 169990
uuaaucccaugguaaccac

SEQ ID NO: 169992 - RNA, 19 nt, Artificial Sequence
  Description of Artificial Sequence: Synthetic oligonucleotide
  Sense strand starting at position 2573 of SEQ ID NO: 2187
agugguuaccaugggauua

SEQ ID NO: 169993 - RNA, 19 nt, Artificial Sequence
  Description of Artificial Sequence: Synthetic oligonucleotide
  Antisense strand to SEQ ID NO: 169992
uaaucccaugguaaccacu

SEQ ID NO: 169994 - RNA, 19 nt, Artificial Sequence
  Description of Artificial Sequence: Synthetic oligonucleotide
  Sense strand starting at position 2566 of SEQ ID NO: 2187
aaagaucagugguuaccau

SEQ ID NO: 169995 - RNA, 19 nt, Artificial Sequence
  Description of Artificial Sequence: Synthetic oligonucleotide
  Antisense strand to SEQ ID NO: 169994
augguaaccacugaucuuu

SEQ ID NO: 169996 - RNA, 19 nt, Artificial Sequence
  Description of Artificial Sequence: Synthetic oligonucleotide
  Sense strand starting at position 2509 of SEQ ID NO: 2187
gcuguagaaguccaacuau

SEQ ID NO: 169997 - RNA, 19 nt, Artificial Sequence
  Description of Artificial Sequence: Synthetic oligonucleotide
  Antisense strand to SEQ ID NO: 169996
auaguuggacuucuacagc

SEQ ID NO: 169998 - RNA, 19 nt, Artificial Sequence
  Description of Artificial Sequence: Synthetic oligonucleotide
  Sense strand starting at position 2501 of SEQ ID NO: 2187
ggcuacaugcuguagaagu

SEQ ID NO: 169999 - RNA, 19 nt, Artificial Sequence
  Description of Artificial Sequence: Synthetic oligonucleotide
  Antisense strand to SEQ ID NO: 169998
acuucuacagcauguagcc

SEQ ID NO: 170000 - RNA, 19 nt, Artificial Sequence
  Description of Artificial Sequence: Synthetic oligonucleotide
  Sense strand starting at position 2377 of SEQ ID NO: 2187
gauaaacugugguaccaga

SEQ ID NO: 170001 - RNA, 19 nt, Artificial Sequence
  Description of Artificial Sequence: Synthetic oligonucleotide
  Antisense strand to SEQ ID NO: 170000
ucugguaccacaguuuauc

SEQ ID NO: 170002 - RNA, 19 nt, Artificial Sequence
  Description of Artificial Sequence: Synthetic oligonucleotide
  Sense strand starting at position 2333 of SEQ ID NO: 2187
gcaacuuuaugaggaaaca

SEQ ID NO: 170003 - RNA, 19 nt, Artificial Sequence
  Description of Artificial Sequence: Synthetic oligonucleotide
  Antisense strand to SEQ ID NO: 170002
uguuuccucauaaaguugc

SEQ ID NO: 170004 - RNA, 19 nt, Artificial Sequence
  Description of Artificial Sequence: Synthetic oligonucleotide
  Sense strand starting at position 2330 of SEQ ID NO: 2187
auagcaacuuuaugaggaa

SEQ ID NO: 170005 - RNA, 19 nt, Artificial Sequence
  Description of Artificial Sequence: Synthetic oligonucleotide
  Antisense strand to SEQ ID NO: 170004
uuccucauaaaguugcuau

SEQ ID NO: 170006 - RNA, 19 nt, Artificial Sequence
  Description of Artificial Sequence: Synthetic oligonucleotide
  Sense strand starting at position 2162 of SEQ ID NO: 2187
acucaucacuggugagaau

SEQ ID NO: 170007 - RNA, 19 nt, Artificial Sequence
  Description of Artificial Sequence: Synthetic oligonucleotide
  Antisense strand to SEQ ID NO: 170006
auucucaccagugaugagu

SEQ ID NO: 170008 - RNA, 19 nt, Artificial Sequence
  Description of Artificial Sequence: Synthetic oligonucleotide
  Sense strand starting at position 2084 of SEQ ID NO: 2187
acaguauuagaauggccaa

SEQ ID NO: 170009 - RNA, 19 nt, Artificial Sequence
  Description of Artificial Sequence: Synthetic oligonucleotide
  Antisense strand to SEQ ID NO: 170008
uuggccauucuaauacugu

SEQ ID NO: 170010 - RNA, 19 nt, Artificial Sequence
  Description of Artificial Sequence: Synthetic oligonucleotide
  Sense strand starting at position 1800 of SEQ ID NO: 2187
acuucucuguaagacaagu

SEQ ID NO: 170011 - RNA, 19 nt, Artificial Sequence
  Description of Artificial Sequence: Synthetic oligonucleotide
  Antisense strand to SEQ ID NO: 170010
acuugucuuacagagaagu

SEQ ID NO: 170012 - RNA, 19 nt, Artificial Sequence
  Description of Artificial Sequence: Synthetic oligonucleotide
  Sense strand starting at position 1771 of SEQ ID NO: 2187
uugauugccuggucuuaag

SEQ ID NO: 170013 - RNA, 19 nt, Artificial Sequence
  Description of Artificial Sequence: Synthetic oligonucleotide
  Antisense strand to SEQ ID NO: 170012
cuuaagaccaggcaaucaa

SEQ ID NO: 170014 - RNA, 19 nt, Artificial Sequence
  Description of Artificial Sequence: Synthetic oligonucleotide
  Sense strand starting at position 1769 of SEQ ID NO: 2187
aauugauugccuggucuua

SEQ ID NO: 170015 - RNA, 19 nt, Artificial Sequence
  Description of Artificial Sequence: Synthetic oligonucleotide
  Antisense strand to SEQ ID NO: 170014
uaagaccaggcaaucaauu

SEQ ID NO: 170016 - RNA, 19 nt, Artificial Sequence
  Description of Artificial Sequence: Synthetic oligonucleotide
  Sense strand starting at position 1719 of SEQ ID NO: 2187
ggcgaugaguuucuagaaa

SEQ ID NO: 170017 - RNA, 19 nt, Artificial Sequence
  Description of Artificial Sequence: Synthetic oligonucleotide
  Antisense strand to SEQ ID NO: 170016
uuucuagaaacucaucgcc

SEQ ID NO: 170018 - RNA, 19 nt, Artificial Sequence
  Description of Artificial Sequence: Synthetic oligonucleotide
  Sense strand starting at position 1712 of SEQ ID NO: 2187
uggauaaggcgaugaguuu

SEQ ID NO: 170019 - RNA, 19 nt, Artificial Sequence
  Description of Artificial Sequence: Synthetic oligonucleotide
  Antisense strand to SEQ ID NO: 170018
aaacucaucgccuuaucca

SEQ ID NO: 170020 - RNA, 19 nt, Artificial Sequence
  Description of Artificial Sequence: Synthetic oligonucleotide
  Sense strand starting at position 1700 of SEQ ID NO: 2187
acuagcugacuuuggauaa

SEQ ID NO: 170021 - RNA, 19 nt, Artificial Sequence
  Description of Artificial Sequence: Synthetic oligonucleotide
  Antisense strand to SEQ ID NO: 170020
uuauccaaagucagcuagu

SEQ ID NO: 170022 - RNA, 19 nt, Artificial Sequence
  Description of Artificial Sequence: Synthetic oligonucleotide
  Sense strand starting at position 1677 of SEQ ID NO: 2187
cuuugaagauaacauaaga

SEQ ID NO: 170023 - RNA, 19 nt, Artificial Sequence
  Description of Artificial Sequence: Synthetic oligonucleotide
  Antisense strand to SEQ ID NO: 170022
ucuuauguuaucuucaaag

SEQ ID NO: 170024 - RNA, 19 nt, Artificial Sequence
  Description of Artificial Sequence: Synthetic oligonucleotide
  Sense strand starting at position 1474 of SEQ ID NO: 2187
gugaacugaucuuugauaa

SEQ ID NO: 170025 - RNA, 19 nt, Artificial Sequence
  Description of Artificial Sequence: Synthetic oligonucleotide
  Antisense strand to SEQ ID NO: 170024
uuaucaaagaucaguucac

SEQ ID NO: 170026 - RNA, 19 nt, Artificial Sequence
  Description of Artificial Sequence: Synthetic oligonucleotide
  Sense strand starting at position 1397 of SEQ ID NO: 2187
uagugugguacuggugaaa

SEQ ID NO: 170027 - RNA, 19 nt, Artificial Sequence
  Description of Artificial Sequence: Synthetic oligonucleotide
  Antisense strand to SEQ ID NO: 170026
uuucaccaguaccacacua

SEQ ID NO: 170028 - RNA, 19 nt, Artificial Sequence
  Description of Artificial Sequence: Synthetic oligonucleotide
  Sense strand starting at position 1390 of SEQ ID NO: 2187
aaccaaauagugugguacu

SEQ ID NO: 170029 - RNA, 19 nt, Artificial Sequence
  Description of Artificial Sequence: Synthetic oligonucleotide
  Antisense strand to SEQ ID NO: 170028
aguaccacacuauuugguu

SEQ ID NO: 170030 - RNA, 19 nt, Artificial Sequence
  Description of Artificial Sequence: Synthetic oligonucleotide
  Sense strand starting at position 1278 of SEQ ID NO: 2187
uucugaaguuuauauagga

SEQ ID NO: 170031 - RNA, 19 nt, Artificial Sequence
  Description of Artificial Sequence: Synthetic oligonucleotide
  Antisense strand to SEQ ID NO: 170030
uccuauauaaacuucagaa

SEQ ID NO: 170032 - RNA, 19 nt, Artificial Sequence
  Description of Artificial Sequence: Synthetic oligonucleotide
  Sense strand starting at position 1143 of SEQ ID NO: 2187
ggauaauuauuccauguuc

SEQ ID NO: 170033 - RNA, 19 nt, Artificial Sequence
  Description of Artificial Sequence: Synthetic oligonucleotide
  Antisense strand to SEQ ID NO: 170032
gaacauggaauaauuaucc

SEQ ID NO: 170034 - RNA, 19 nt, Artificial Sequence
  Description of Artificial Sequence: Synthetic oligonucleotide
  Sense strand starting at position 1141 of SEQ ID NO: 2187
acggauaauuauuccaugu

SEQ ID NO: 170035 - RNA, 19 nt, Artificial Sequence
  Description of Artificial Sequence: Synthetic oligonucleotide
  Antisense strand to SEQ ID NO: 170034
acauggaauaauuauccgu

SEQ ID NO: 170036 - RNA, 19 nt, Artificial Sequence
  Description of Artificial Sequence: Synthetic oligonucleotide
  Sense strand starting at position 1085 of SEQ ID NO: 2187
agaucuguaugaggaauac

SEQ ID NO: 170037 - RNA, 19 nt, Artificial Sequence
  Description of Artificial Sequence: Synthetic oligonucleotide
  Antisense strand to SEQ ID NO: 170036
guauuccucauacagaucu

SEQ ID NO: 170038 - RNA, 19 nt, Artificial Sequence
  Description of Artificial Sequence: Synthetic oligonucleotide
  Sense strand starting at position 1083 of SEQ ID NO: 2187
caagaucuguaugaggaau

SEQ ID NO: 170039 - RNA, 19 nt, Artificial Sequence
  Description of Artificial Sequence: Synthetic oligonucleotide
  Antisense strand to SEQ ID NO: 170038
auuccucauacagaucuug

SEQ ID NO: 170040 - RNA, 19 nt, Artificial Sequence
  Description of Artificial Sequence: Synthetic oligonucleotide
  Sense strand starting at position 984 of SEQ ID NO: 2187
auauuccaguaauaaguga

SEQ ID NO: 170041 - RNA, 19 nt, Artificial Sequence
  Description of Artificial Sequence: Synthetic oligonucleotide
  Antisense strand to SEQ ID NO: 170040
ucacuuauuacuggaauau

SEQ ID NO: 170042 - RNA, 19 nt, Artificial Sequence
  Description of Artificial Sequence: Synthetic oligonucleotide
  Sense strand starting at position 598 of SEQ ID NO: 2187
auauuauaugcaggucaau

SEQ ID NO: 170043 - RNA, 19 nt, Artificial Sequence
  Description of Artificial Sequence: Synthetic oligonucleotide
  Antisense strand to SEQ ID NO: 170042
auugaccugcauauaauau

SEQ ID NO: 170044 - RNA, 19 nt, Artificial Sequence
  Description of Artificial Sequence: Synthetic oligonucleotide
  Sense strand starting at position 563 of SEQ ID NO: 2187
ucccgagguucuuacauuu

SEQ ID NO: 170045 - RNA, 19 nt, Artificial Sequence
  Description of Artificial Sequence: Synthetic oligonucleotide
  Antisense strand to SEQ ID NO: 170044
aaauguaagaaccucggga

SEQ ID NO: 170046 - RNA, 19 nt, Artificial Sequence
  Description of Artificial Sequence: Synthetic oligonucleotide
  Sense strand starting at position 354 of SEQ ID NO: 2187
aguguaaguaaacaaguuu

SEQ ID NO: 170047 - RNA, 19 nt, Artificial Sequence
  Description of Artificial Sequence: Synthetic oligonucleotide
  Antisense strand to SEQ ID NO: 170046
aaacuuguuuacuuacacu

SEQ ID NO: 170048 - RNA, 19 nt, Artificial Sequence
  Description of Artificial Sequence: Synthetic oligonucleotide
  Sense strand starting at position 336 of SEQ ID NO: 2187
uggagagcaucagaaauaa

SEQ ID NO: 170049 - RNA, 19 nt, Artificial Sequence
  Description of Artificial Sequence: Synthetic oligonucleotide
  Antisense strand to SEQ ID NO: 170048
uuauuucugaugcucucca

SEQ ID NO: 170050 - RNA, 19 nt, Artificial Sequence
  Description of Artificial Sequence: Synthetic oligonucleotide
  Sense strand starting at position 260 of SEQ ID NO: 2187
uuuaucuuacaggauaugu

SEQ ID NO: 170051 - RNA, 19 nt, Artificial Sequence
  Description of Artificial Sequence: Synthetic oligonucleotide
  Antisense strand to SEQ ID NO: 170050
acauauccuguaagauaaa

SEQ ID NO: 170052 - RNA, 19 nt, Artificial Sequence
  Description of Artificial Sequence: Synthetic oligonucleotide
  Sense strand starting at position 257 of SEQ ID NO: 2187
agauuuaucuuacaggaua

SEQ ID NO: 170053 - RNA, 19 nt, Artificial Sequence
  Description of Artificial Sequence: Synthetic oligonucleotide
  Antisense strand to SEQ ID NO: 170052
uauccuguaagauaaaucu

SEQ ID NO: 170054 - RNA, 19 nt, Artificial Sequence
  Description of Artificial Sequence: Synthetic oligonucleotide
  Sense strand starting at position 255 of SEQ ID NO: 2187
gcagauuuaucuuacagga

SEQ ID NO: 170055 - RNA, 19 nt, Artificial Sequence
  Description of Artificial Sequence: Synthetic oligonucleotide
  Antisense strand to SEQ ID NO: 170054
uccuguaagauaaaucugc

SEQ ID NO: 170056 - RNA, 19 nt, Artificial Sequence
  Description of Artificial Sequence: Synthetic oligonucleotide
  Sense strand starting at position 126 of SEQ ID NO: 2191
gcucauuagucauuucuac

SEQ ID NO: 170057 - RNA, 19 nt, Artificial Sequence
  Description of Artificial Sequence: Synthetic oligonucleotide
  Antisense strand to SEQ ID NO: 170056
guagaaaugacuaaugagc

SEQ ID NO: 170058 - RNA, 19 nt, Artificial Sequence
  Description of Artificial Sequence: Synthetic oligonucleotide
  Sense strand starting at position 149 of SEQ ID NO: 2191
uacagugugcaauagaaau

SEQ ID NO: 170059 - RNA, 19 nt, Artificial Sequence
  Description of Artificial Sequence: Synthetic oligonucleotide
  Antisense strand to SEQ ID NO: 170058
auuucuauugcacacugua

SEQ ID NO: 170060 - RNA, 19 nt, Artificial Sequence
  Description of Artificial Sequence: Synthetic oligonucleotide
  Sense strand starting at position 309 of SEQ ID NO: 2191
ccuacacuggguugaauua

SEQ ID NO: 170061 - RNA, 19 nt, Artificial Sequence
  Description of Artificial Sequence: Synthetic oligonucleotide
  Antisense strand to SEQ ID NO: 170060
uaauucaacccaguguagg

SEQ ID NO: 170062 - RNA, 19 nt, Artificial Sequence
  Description of Artificial Sequence: Synthetic oligonucleotide
  Sense strand starting at position 561 of SEQ ID NO: 2191
gauggaaugcagugaauga

SEQ ID NO: 170063 - RNA, 19 nt, Artificial Sequence
  Description of Artificial Sequence: Synthetic oligonucleotide
  Antisense strand to SEQ ID NO: 170062
ucauucacugcauuccauc

SEQ ID NO: 170064 - RNA, 19 nt, Artificial Sequence
  Description of Artificial Sequence: Synthetic oligonucleotide
  Sense strand starting at position 565 of SEQ ID NO: 2191
gaaugcagugaaugauaau

SEQ ID NO: 170065 - RNA, 19 nt, Artificial Sequence
  Description of Artificial Sequence: Synthetic oligonucleotide
  Antisense strand to SEQ ID NO: 170064
auuaucauucacugcauuc

SEQ ID NO: 170066 - RNA, 19 nt, Artificial Sequence
  Description of Artificial Sequence: Synthetic oligonucleotide
  Sense strand starting at position 748 of SEQ ID NO: 2191
augagacucuacuugaucu

SEQ ID NO: 170067 - RNA, 19 nt, Artificial Sequence
  Description of Artificial Sequence: Synthetic oligonucleotide
  Antisense strand to SEQ ID NO: 170066
agaucaaguagagucucau

SEQ ID NO: 170068 - RNA, 19 nt, Artificial Sequence
  Description of Artificial Sequence: Synthetic oligonucleotide
  Sense strand starting at position 760 of SEQ ID NO: 2191
uugaucugucacuaugguu

SEQ ID NO: 170069 - RNA, 19 nt, Artificial Sequence
  Description of Artificial Sequence: Synthetic oligonucleotide
  Antisense strand to SEQ ID NO: 170068
aaccauagugacagaucaa

SEQ ID NO: 170070 - RNA, 19 nt, Artificial Sequence
  Description of Artificial Sequence: Synthetic oligonucleotide
  Sense strand starting at position 853 of SEQ ID NO: 2191
gggauaacugcauaguacu

SEQ ID NO: 170071 - RNA, 19 nt, Artificial Sequence
  Description of Artificial Sequence: Synthetic oligonucleotide
  Antisense strand to SEQ ID NO: 170070
aguacuaugcaguuauccc

SEQ ID NO: 170072 - RNA, 19 nt, Artificial Sequence
  Description of Artificial Sequence: Synthetic oligonucleotide
  Sense strand starting at position 993 of SEQ ID NO: 2191
ugaggaaugugguuagaua

SEQ ID NO: 170073 - RNA, 19 nt, Artificial Sequence
  Description of Artificial Sequence: Synthetic oligonucleotide
  Antisense strand to SEQ ID NO: 170072
uaucuaaccacauuccuca

SEQ ID NO: 170074 - RNA, 19 nt, Artificial Sequence
  Description of Artificial Sequence: Synthetic oligonucleotide
  Sense strand starting at position 1021 of SEQ ID NO: 2191
agugaaagcuaacuuugaa

SEQ ID NO: 170075 - RNA, 19 nt, Artificial Sequence
  Description of Artificial Sequence: Synthetic oligonucleotide
  Antisense strand to SEQ ID NO: 170074
uucaaaguuagcuuucacu

SEQ ID NO: 170076 - RNA, 19 nt, Artificial Sequence
  Description of Artificial Sequence: Synthetic oligonucleotide
  Sense strand starting at position 1124 of SEQ ID NO: 2191
agucaaauaggaugugaug

SEQ ID NO: 170077 - RNA, 19 nt, Artificial Sequence
  Description of Artificial Sequence: Synthetic oligonucleotide
  Antisense strand to SEQ ID NO: 170076
caucacauccuauuugacu

SEQ ID NO: 170078 - RNA, 19 nt, Artificial Sequence
  Description of Artificial Sequence: Synthetic oligonucleotide
  Sense strand starting at position 1235 of SEQ ID NO: 2191
ggugacaugcuugaaucga

SEQ ID NO: 170079 - RNA, 19 nt, Artificial Sequence
  Description of Artificial Sequence: Synthetic oligonucleotide
  Antisense strand to SEQ ID NO: 170078
ucgauucaagcaugucacc

SEQ ID NO: 170080 - RNA, 19 nt, Artificial Sequence
  Description of Artificial Sequence: Synthetic oligonucleotide
  Sense strand starting at position 1387 of SEQ ID NO: 2191
ccacgaugauaccuggauu

SEQ ID NO: 170081 - RNA, 19 nt, Artificial Sequence
  Description of Artificial Sequence: Synthetic oligonucleotide
  Antisense strand to SEQ ID NO: 170080
aauccagguaucaucgugg

SEQ ID NO: 170082 - RNA, 19 nt, Artificial Sequence
  Description of Artificial Sequence: Synthetic oligonucleotide
  Sense strand starting at position 1444 of SEQ ID NO: 2191
uauuauucugacgacugua

SEQ ID NO: 170083 - RNA, 19 nt, Artificial Sequence
  Description of Artificial Sequence: Synthetic oligonucleotide
  Antisense strand to SEQ ID NO: 170082
uacagucgucagaauaaua

SEQ ID NO: 170084 - RNA, 19 nt, Artificial Sequence
  Description of Artificial Sequence: Synthetic oligonucleotide
  Sense strand starting at position 1447 of SEQ ID NO: 2191
uauucugacgacuguaaac

SEQ ID NO: 170085 - RNA, 19 nt, Artificial Sequence
  Description of Artificial Sequence: Synthetic oligonucleotide
  Antisense strand to SEQ ID NO: 170084
guuuacagucgucagaaua

SEQ ID NO: 170086 - RNA, 19 nt, Artificial Sequence
  Description of Artificial Sequence: Synthetic oligonucleotide
  Sense strand starting at position 1471 of SEQ ID NO: 2191
uccuauuagcgauaacuaa

SEQ ID NO: 170087 - RNA, 19 nt, Artificial Sequence
  Description of Artificial Sequence: Synthetic oligonucleotide
  Antisense strand to SEQ ID NO: 170086
uuaguuaucgcuaauagga

SEQ ID NO: 170088 - RNA, 19 nt, Artificial Sequence
  Description of Artificial Sequence: Synthetic oligonucleotide
  Sense strand starting at position 1513 of SEQ ID NO: 2191
ggcaaagugauauacggau

SEQ ID NO: 170089 - RNA, 19 nt, Artificial Sequence
  Description of Artificial Sequence: Synthetic oligonucleotide
  Antisense strand to SEQ ID NO: 170088
auccguauaucacuuugcc

SEQ ID NO: 170090 - RNA, 19 nt, Artificial Sequence
  Description of Artificial Sequence: Synthetic oligonucleotide
  Sense strand starting at position 1517 of SEQ ID NO: 2191
aagugauauacggauggca

SEQ ID NO: 170091 - RNA, 19 nt, Artificial Sequence
  Description of Artificial Sequence: Synthetic oligonucleotide
  Antisense strand to SEQ ID NO: 170090
ugccauccguauaucacuu

SEQ ID NO: 170092 - RNA, 19 nt, Artificial Sequence
  Description of Artificial Sequence: Synthetic oligonucleotide
  Sense strand starting at position 1634 of SEQ ID NO: 2191
uggagcaucuuccucagau

SEQ ID NO: 170093 - RNA, 19 nt, Artificial Sequence
  Description of Artificial Sequence: Synthetic oligonucleotide
  Antisense strand to SEQ ID NO: 170092
aucugaggaagaugcucca

SEQ ID NO: 170094 - RNA, 19 nt, Artificial Sequence
  Description of Artificial Sequence: Synthetic oligonucleotide
  Sense strand starting at position 1635 of SEQ ID NO: 2191
ggagcaucuuccucagaua

SEQ ID NO: 170095 - RNA, 19 nt, Artificial Sequence
  Description of Artificial Sequence: Synthetic oligonucleotide
  Antisense strand to SEQ ID NO: 170094
uaucugaggaagaugcucc

SEQ ID NO: 170096 - RNA, 19 nt, Artificial Sequence
  Description of Artificial Sequence: Synthetic oligonucleotide
  Sense strand starting at position 1646 of SEQ ID NO: 2191
cucagauacaguuacgagu

SEQ ID NO: 170097 - RNA, 19 nt, Artificial Sequence
  Description of Artificial Sequence: Synthetic oligonucleotide
  Antisense strand to SEQ ID NO: 170096
acucguaacuguaucugag

SEQ ID NO: 170098 - RNA, 19 nt, Artificial Sequence
  Description of Artificial Sequence: Synthetic oligonucleotide
  Sense strand starting at position 2050 of SEQ ID NO: 2191
ucgccuucucccgucacaa

SEQ ID NO: 170099 - RNA, 19 nt, Artificial Sequence
  Description of Artificial Sequence: Synthetic oligonucleotide
  Antisense strand to SEQ ID NO: 170098
uugugacgggagaaggcga

SEQ ID NO: 170100 - RNA, 19 nt, Artificial Sequence
  Description of Artificial Sequence: Synthetic oligonucleotide
  Sense strand starting at position 2122 of SEQ ID NO: 2191
caauuacccggauggaauc

SEQ ID NO: 170101 - RNA, 19 nt, Artificial Sequence
  Description of Artificial Sequence: Synthetic oligonucleotide
  Antisense strand to SEQ ID NO: 170100
gauuccauccggguaauug

SEQ ID NO: 170102 - RNA, 19 nt, Artificial Sequence
  Description of Artificial Sequence: Synthetic oligonucleotide
  Sense strand starting at position 2265 of SEQ ID NO: 2191
aggccaauuaccgaggagu

SEQ ID NO: 170103 - RNA, 19 nt, Artificial Sequence
  Description of Artificial Sequence: Synthetic oligonucleotide
  Antisense strand to SEQ ID NO: 170102
acuccucgguaauuggccu

SEQ ID NO: 170104 - RNA, 19 nt, Artificial Sequence
  Description of Artificial Sequence: Synthetic oligonucleotide
  Sense strand starting at position 2290 of SEQ ID NO: 2191
ucuucuaacccuuggagga

SEQ ID NO: 170105 - RNA, 19 nt, Artificial Sequence
  Description of Artificial Sequence: Synthetic oligonucleotide
  Antisense strand to SEQ ID NO: 170104
uccuccaaggguuagaaga

SEQ ID NO: 170106 - RNA, 19 nt, Artificial Sequence
  Description of Artificial Sequence: Synthetic oligonucleotide
  Sense strand starting at position 2291 of SEQ ID NO: 2191
cuucuaacccuuggaggaa

SEQ ID NO: 170107 - RNA, 19 nt, Artificial Sequence
  Description of Artificial Sequence: Synthetic oligonucleotide
  Antisense strand to SEQ ID NO: 170106
uuccuccaaggguuagaag

SEQ ID NO: 170108 - RNA, 19 nt, Artificial Sequence
  Description of Artificial Sequence: Synthetic oligonucleotide
  Sense strand starting at position 2381 of SEQ ID NO: 2191
ggugucuuuguacaaagac

SEQ ID NO: 170109 - RNA, 19 nt, Artificial Sequence
  Description of Artificial Sequence: Synthetic oligonucleotide
  Antisense strand to SEQ ID NO: 170108
gucuuuguacaaagacacc

SEQ ID NO: 170110 - RNA, 19 nt, Artificial Sequence
  Description of Artificial Sequence: Synthetic oligonucleotide
  Sense strand starting at position 2558 of SEQ ID NO: 2191
ugaaauaggcuuuguagau

SEQ ID NO: 170111 - RNA, 19 nt, Artificial Sequence
  Description of Artificial Sequence: Synthetic oligonucleotide
  Antisense strand to SEQ ID NO: 170110
aucuacaaagccuauuuca

SEQ ID NO: 170112 - RNA, 19 nt, Artificial Sequence
  Description of Artificial Sequence: Synthetic oligonucleotide
  Sense strand starting at position 2559 of SEQ ID NO: 2191
gaaauaggcuuuguagaug

SEQ ID NO: 170113 - RNA, 19 nt, Artificial Sequence
  Description of Artificial Sequence: Synthetic oligonucleotide
  Antisense strand to SEQ ID NO: 170112
caucuacaaagccuauuuc

SEQ ID NO: 170114 - RNA, 19 nt, Artificial Sequence
  Description of Artificial Sequence: Synthetic oligonucleotide
  Sense strand starting at position 2871 of SEQ ID NO: 2191
ggaaguuugcuuuggaaga

SEQ ID NO: 170115 - RNA, 19 nt, Artificial Sequence
  Description of Artificial Sequence: Synthetic oligonucleotide
  Antisense strand to SEQ ID NO: 170114
ucuuccaaagcaaacuucc

SEQ ID NO: 170116 - RNA, 19 nt, Artificial Sequence
  Description of Artificial Sequence: Synthetic oligonucleotide
  Sense strand starting at position 3103 of SEQ ID NO: 2191
gcaggugaugagcaauaaa

SEQ ID NO: 170117 - RNA, 19 nt, Artificial Sequence
  Description of Artificial Sequence: Synthetic oligonucleotide
  Antisense strand to SEQ ID NO: 170116
uuuauugcucaucaccugc

SEQ ID NO: 170118 - RNA, 19 nt, Artificial Sequence
  Description of Artificial Sequence: Synthetic oligonucleotide
  Sense strand starting at position 3127 of SEQ ID NO: 2191
gcugaaagaacgcaagguu

SEQ ID NO: 170119 - RNA, 19 nt, Artificial Sequence
  Description of Artificial Sequence: Synthetic oligonucleotide
  Antisense strand to SEQ ID NO: 170118
aaccuugcguucuuucagc

SEQ ID NO: 170120 - RNA, 19 nt, Artificial Sequence
  Description of Artificial Sequence: Synthetic oligonucleotide
  Sense strand starting at position 3261 of SEQ ID NO: 2191
gaaacaagguuauuauagu

SEQ ID NO: 170121 - RNA, 19 nt, Artificial Sequence
  Description of Artificial Sequence: Synthetic oligonucleotide
  Antisense strand to SEQ ID NO: 170120
acuauaauaaccuuguuuc

SEQ ID NO: 170122 - RNA, 19 nt, Artificial Sequence
  Description of Artificial Sequence: Synthetic oligonucleotide
  Sense strand starting at position 3455 of SEQ ID NO: 2191
uuugauacagucuggaaau

SEQ ID NO: 170123 - RNA, 19 nt, Artificial Sequence
  Description of Artificial Sequence: Synthetic oligonucleotide
  Antisense strand to SEQ ID NO: 170122
auuuccagacuguaucaaa

SEQ ID NO: 170124 - RNA, 19 nt, Artificial Sequence
  Description of Artificial Sequence: Synthetic oligonucleotide
  Sense strand starting at position 3518 of SEQ ID NO: 2191
cauaguaugccugagggau

SEQ ID NO: 170125 - RNA, 19 nt, Artificial Sequence
  Description of Artificial Sequence: Synthetic oligonucleotide
  Antisense strand to SEQ ID NO: 170124
aucccucaggcauacuaug

SEQ ID NO: 170126 - RNA, 19 nt, Artificial Sequence
  Description of Artificial Sequence: Synthetic oligonucleotide
  Sense strand starting at position 3522 of SEQ ID NO: 2191
guaugccugagggauauau

SEQ ID NO: 170127 - RNA, 19 nt, Artificial Sequence
  Description of Artificial Sequence: Synthetic oligonucleotide
  Antisense strand to SEQ ID NO: 170126
auauaucccucaggcauac

SEQ ID NO: 170128 - RNA, 19 nt, Artificial Sequence
  Description of Artificial Sequence: Synthetic oligonucleotide
  Sense strand starting at position 3566 of SEQ ID NO: 2191
acauuugauugauaugcaa

SEQ ID NO: 170129 - RNA, 19 nt, Artificial Sequence
  Description of Artificial Sequence: Synthetic oligonucleotide
  Antisense strand to SEQ ID NO: 170128
uugcauaucaaucaaaugu

SEQ ID NO: 170130 - RNA, 19 nt, Artificial Sequence
  Description of Artificial Sequence: Synthetic oligonucleotide
  Sense strand starting at position 3569 of SEQ ID NO: 2191
uuugauugauaugcaagga

SEQ ID NO: 170131 - RNA, 19 nt, Artificial Sequence
  Description of Artificial Sequence: Synthetic oligonucleotide
  Antisense strand to SEQ ID NO: 170130
uccuugcauaucaaucaaa

SEQ ID NO: 170132 - RNA, 19 nt, Artificial Sequence
  Description of Artificial Sequence: Synthetic oligonucleotide
  Sense strand starting at position 3573 of SEQ ID NO: 2191
auugauaugcaaggauacu

SEQ ID NO: 170133 - RNA, 19 nt, Artificial Sequence
  Description of Artificial Sequence: Synthetic oligonucleotide
  Antisense strand to SEQ ID NO: 170132
aguauccuugcauaucaau

SEQ ID NO: 170134 - RNA, 19 nt, Artificial Sequence
  Description of Artificial Sequence: Synthetic oligonucleotide
  Sense strand starting at position 3936 of SEQ ID NO: 2191
aguaaaguugagcaucuuu

SEQ ID NO: 170135 - RNA, 19 nt, Artificial Sequence
  Description of Artificial Sequence: Synthetic oligonucleotide
  Antisense strand to SEQ ID NO: 170134
aaagaugcucaacuuuacu

SEQ ID NO: 170136 - RNA, 19 nt, Artificial Sequence
  Description of Artificial Sequence: Synthetic oligonucleotide
  Sense strand starting at position 3 of SEQ ID NO: 2192
uaaauaugugacuguagga

SEQ ID NO: 170137 - RNA, 19 nt, Artificial Sequence
  Description of Artificial Sequence: Synthetic oligonucleotide
  Antisense strand to SEQ ID NO: 170136
uccuacagucacauauuua

SEQ ID NO: 170138 - RNA, 19 nt, Artificial Sequence
  Description of Artificial Sequence: Synthetic oligonucleotide
  Sense strand starting at position 94 of SEQ ID NO: 2192
aaggguggucauggugaaa

SEQ ID NO: 170139 - RNA, 19 nt, Artificial Sequence
  Description of Artificial Sequence: Synthetic oligonucleotide
  Antisense strand to SEQ ID NO: 170138
uuucaccaugaccacccuu

SEQ ID NO: 170140 - RNA, 19 nt, Artificial Sequence
  Description of Artificial Sequence: Synthetic oligonucleotide
  Sense strand starting at position 113 of SEQ ID NO: 2192
aggaaaguuugggcuagaa

SEQ ID NO: 170141 - RNA, 19 nt, Artificial Sequence
  Description of Artificial Sequence: Synthetic oligonucleotide
  Antisense strand to SEQ ID NO: 170140
uucuagcccaaacuuuccu

SEQ ID NO: 170142 - RNA, 19 nt, Artificial Sequence
  Description of Artificial Sequence: Synthetic oligonucleotide
  Sense strand starting at position 259 of SEQ ID NO: 2192
cucacuuuauauguaaagu

SEQ ID NO: 170143 - RNA, 19 nt, Artificial Sequence
  Description of Artificial Sequence: Synthetic oligonucleotide
  Antisense strand to SEQ ID NO: 170142
acuuuacauauaaagugag

SEQ ID NO: 170144 - RNA, 19 nt, Artificial Sequence
  Description of Artificial Sequence: Synthetic oligonucleotide
  Sense strand starting at position 319 of SEQ ID NO: 2192
aggcaaagcgagcauaauu

SEQ ID NO: 170145 - RNA, 19 nt, Artificial Sequence
  Description of Artificial Sequence: Synthetic oligonucleotide
  Antisense strand to SEQ ID NO: 170144
aauuaugcucgcuuugccu

SEQ ID NO: 170146 - RNA, 19 nt, Artificial Sequence
  Description of Artificial Sequence: Synthetic oligonucleotide
  Sense strand starting at position 427 of SEQ ID NO: 2192
uuaucaagaugagauuuga

SEQ ID NO: 170147 - RNA, 19 nt, Artificial Sequence
  Description of Artificial Sequence: Synthetic oligonucleotide
  Antisense strand to SEQ ID NO: 170146
ucaaaucucaucuugauaa

SEQ ID NO: 170148 - RNA, 19 nt, Artificial Sequence
  Description of Artificial Sequence: Synthetic oligonucleotide
  Sense strand starting at position 516 of SEQ ID NO: 2192
cgcuaaugacagcauaacu

SEQ ID NO: 170149 - RNA, 19 nt, Artificial Sequence
  Description of Artificial Sequence: Synthetic oligonucleotide
  Antisense strand to SEQ ID NO: 170148
aguuaugcugucauuagcg

SEQ ID NO: 170150 - RNA, 19 nt, Artificial Sequence
  Description of Artificial Sequence: Synthetic oligonucleotide
  Sense strand starting at position 1176 of SEQ ID NO: 2192
ucaagcugggucugaaaca

SEQ ID NO: 170151 - RNA, 19 nt, Artificial Sequence
  Description of Artificial Sequence: Synthetic oligonucleotide
  Antisense strand to SEQ ID NO: 170150
uguuucagacccagcuuga

SEQ ID NO: 170152 - RNA, 19 nt, Artificial Sequence
  Description of Artificial Sequence: Synthetic oligonucleotide
  Sense strand starting at position 1239 of SEQ ID NO: 2192
aggcauugaucaucacaug

SEQ ID NO: 170153 - RNA, 19 nt, Artificial Sequence
  Description of Artificial Sequence: Synthetic oligonucleotide
  Antisense strand to SEQ ID NO: 170152
caugugaugaucaaugccu

SEQ ID NO: 170154 - RNA, 19 nt, Artificial Sequence
  Description of Artificial Sequence: Synthetic oligonucleotide
  Sense strand starting at position 1281 of SEQ ID NO: 2192
acaugaugucacugauguc

SEQ ID NO: 170155 - RNA, 19 nt, Artificial Sequence
  Description of Artificial Sequence: Synthetic oligonucleotide
  Antisense strand to SEQ ID NO: 170154
gacaucagugacaucaugu

SEQ ID NO: 170156 - RNA, 19 nt, Artificial Sequence
  Description of Artificial Sequence: Synthetic oligonucleotide
  Sense strand starting at position 1326 of SEQ ID NO: 2192
cgggucuguauagaauaaa

SEQ ID NO: 170157 - RNA, 19 nt, Artificial Sequence
  Description of Artificial Sequence: Synthetic oligonucleotide
  Antisense strand to SEQ ID NO: 170156
uuuauucuauacagacccg

SEQ ID NO: 170158 - RNA, 19 nt, Artificial Sequence
  Description of Artificial Sequence: Synthetic oligonucleotide
  Sense strand starting at position 1380 of SEQ ID NO: 2192
ucagaaaggucuccaucag

SEQ ID NO: 170159 - RNA, 19 nt, Artificial Sequence
  Description of Artificial Sequence: Synthetic oligonucleotide
  Antisense strand to SEQ ID NO: 170158
cugauggagaccuuucuga

SEQ ID NO: 170160 - RNA, 19 nt, Artificial Sequence
  Description of Artificial Sequence: Synthetic oligonucleotide
  Sense strand starting at position 1617 of SEQ ID NO: 2192
ccacacagccauuaagagu

SEQ ID NO: 170161 - RNA, 19 nt, Artificial Sequence
  Description of Artificial Sequence: Synthetic oligonucleotide
  Antisense strand to SEQ ID NO: 170160
acucuuaauggcugugugg

SEQ ID NO: 170162 - RNA, 19 nt, Artificial Sequence
  Description of Artificial Sequence: Synthetic oligonucleotide
  Sense strand starting at position 1756 of SEQ ID NO: 2192
ggagccagucacuaucuuu

SEQ ID NO: 170163 - RNA, 19 nt, Artificial Sequence
  Description of Artificial Sequence: Synthetic oligonucleotide
  Antisense strand to SEQ ID NO: 170162
aaagauagugacuggcucc

SEQ ID NO: 170164 - RNA, 19 nt, Artificial Sequence
  Description of Artificial Sequence: Synthetic oligonucleotide
  Sense strand starting at position 1762 of SEQ ID NO: 2192
agucacuaucuuuaguaau

SEQ ID NO: 170165 - RNA, 19 nt, Artificial Sequence
  Description of Artificial Sequence: Synthetic oligonucleotide
  Antisense strand to SEQ ID NO: 170164
auuacuaaagauagugacu

SEQ ID NO: 170166 - RNA, 19 nt, Artificial Sequence
  Description of Artificial Sequence: Synthetic oligonucleotide
  Sense strand starting at position 1775 of SEQ ID NO: 2192
aguaauccuccauaggcua

SEQ ID NO: 170167 - RNA, 19 nt, Artificial Sequence
  Description of Artificial Sequence: Synthetic oligonucleotide
  Antisense strand to SEQ ID NO: 170166
uagccuauggaggauuacu

SEQ ID NO: 170168 - RNA, 19 nt, Artificial Sequence
  Description of Artificial Sequence: Synthetic oligonucleotide
  Sense strand starting at position 1816 of SEQ ID NO: 2192
uugcuuauuccugggagag

SEQ ID NO: 170169 - RNA, 19 nt, Artificial Sequence
  Description of Artificial Sequence: Synthetic oligonucleotide
  Antisense strand to SEQ ID NO: 170168
cucucccaggaauaagcaa

SEQ ID NO: 170170 - RNA, 19 nt, Artificial Sequence
  Description of Artificial Sequence: Synthetic oligonucleotide
  Sense strand starting at position 1848 of SEQ ID NO: 2192
ggagacaaccuuugaguau

SEQ ID NO: 170171 - RNA, 19 nt, Artificial Sequence
  Description of Artificial Sequence: Synthetic oligonucleotide
  Antisense strand to SEQ ID NO: 170170
auacucaaagguugucucc

SEQ ID NO: 170172 - RNA, 19 nt, Artificial Sequence
  Description of Artificial Sequence: Synthetic oligonucleotide
  Sense strand starting at position 1860 of SEQ ID NO: 2192
ugaguaucaugcccuugga

SEQ ID NO: 170173 - RNA, 19 nt, Artificial Sequence
  Description of Artificial Sequence: Synthetic oligonucleotide
  Antisense strand to SEQ ID NO: 170172
uccaagggcaugauacuca

SEQ ID NO: 170174 - RNA, 19 nt, Artificial Sequence
  Description of Artificial Sequence: Synthetic oligonucleotide
  Sense strand starting at position 1863 of SEQ ID NO: 2192
guaucaugcccuuggagac

SEQ ID NO: 170175 - RNA, 19 nt, Artificial Sequence
  Description of Artificial Sequence: Synthetic oligonucleotide
  Antisense strand to SEQ ID NO: 170174
gucuccaagggcaugauac

SEQ ID NO: 170176 - RNA, 19 nt, Artificial Sequence
  Description of Artificial Sequence: Synthetic oligonucleotide
  Sense strand starting at position 1878 of SEQ ID NO: 2192
agaccacuguggccugaua

SEQ ID NO: 170177 - RNA, 19 nt, Artificial Sequence
  Description of Artificial Sequence: Synthetic oligonucleotide
  Antisense strand to SEQ ID NO: 170176
uaucaggccacaguggucu

SEQ ID NO: 170178 - RNA, 19 nt, Artificial Sequence
  Description of Artificial Sequence: Synthetic oligonucleotide
  Sense strand starting at position 1880 of SEQ ID NO: 2192
accacuguggccugauaua

SEQ ID NO: 170179 - RNA, 19 nt, Artificial Sequence
  Description of Artificial Sequence: Synthetic oligonucleotide
  Antisense strand to SEQ ID NO: 170178
uauaucaggccacaguggu

SEQ ID NO: 170180 - RNA, 19 nt, Artificial Sequence
  Description of Artificial Sequence: Synthetic oligonucleotide
  Sense strand starting at position 1941 of SEQ ID NO: 2192
uggacuuucccauggaaua

SEQ ID NO: 170181 - RNA, 19 nt, Artificial Sequence
  Description of Artificial Sequence: Synthetic oligonucleotide
  Antisense strand to SEQ ID NO: 170180
uauuccaugggaaagucca

SEQ ID NO: 170182 - RNA, 19 nt, Artificial Sequence
  Description of Artificial Sequence: Synthetic oligonucleotide
  Sense strand starting at position 1942 of SEQ ID NO: 2192
ggacuuucccauggaauac

SEQ ID NO: 170183 - RNA, 19 nt, Artificial Sequence
  Description of Artificial Sequence: Synthetic oligonucleotide
  Antisense strand to SEQ ID NO: 170182
guauuccaugggaaagucc

SEQ ID NO: 170184 - RNA, 19 nt, Artificial Sequence
  Description of Artificial Sequence: Synthetic oligonucleotide
  Sense strand starting at position 2150 of SEQ ID NO: 2192
gggucucauuguuccauuu

SEQ ID NO: 170185 - RNA, 19 nt, Artificial Sequence
  Description of Artificial Sequence: Synthetic oligonucleotide
  Antisense strand to SEQ ID NO: 170184
aaauggaacaaugagaccc

SEQ ID NO: 170186 - RNA, 19 nt, Artificial Sequence
  Description of Artificial Sequence: Synthetic oligonucleotide
  Sense strand starting at position 2239 of SEQ ID NO: 2192
gugggaauuugugcucuca

SEQ ID NO: 170187 - RNA, 19 nt, Artificial Sequence
  Description of Artificial Sequence: Synthetic oligonucleotide
  Antisense strand to SEQ ID NO: 170186
ugagagcacaaauucccac

SEQ ID NO: 170188 - RNA, 19 nt, Artificial Sequence
  Description of Artificial Sequence: Synthetic oligonucleotide
  Sense strand starting at position 2282 of SEQ ID NO: 2192
ggaccuucugguuacacuu

SEQ ID NO: 170189 - RNA, 19 nt, Artificial Sequence
  Description of Artificial Sequence: Synthetic oligonucleotide
  Antisense strand to SEQ ID NO: 170188
aaguguaaccagaaggucc

SEQ ID NO: 170190 - RNA, 19 nt, Artificial Sequence
  Description of Artificial Sequence: Synthetic oligonucleotide
  Sense strand starting at position 2388 of SEQ ID NO: 2192
agagaagacccggguuacu

SEQ ID NO: 170191 - RNA, 19 nt, Artificial Sequence
  Description of Artificial Sequence: Synthetic oligonucleotide
  Antisense strand to SEQ ID NO: 170190
aguaacccgggucuucucu

SEQ ID NO: 170192 - RNA, 19 nt, Artificial Sequence
  Description of Artificial Sequence: Synthetic oligonucleotide
  Sense strand starting at position 2582 of SEQ ID NO: 2192
gguaaagagugccuguaau

SEQ ID NO: 170193 - RNA, 19 nt, Artificial Sequence
  Description of Artificial Sequence: Synthetic oligonucleotide
  Antisense strand to SEQ ID NO: 170192
auuacaggcacucuuuacc

SEQ ID NO: 170194 - RNA, 19 nt, Artificial Sequence
  Description of Artificial Sequence: Synthetic oligonucleotide
  Sense strand starting at position 2736 of SEQ ID NO: 2192
uacucauauguugggucau

SEQ ID NO: 170195 - RNA, 19 nt, Artificial Sequence
  Description of Artificial Sequence: Synthetic oligonucleotide
  Antisense strand to SEQ ID NO: 170194
augacccaacauaugagua

SEQ ID NO: 170196 - RNA, 19 nt, Artificial Sequence
  Description of Artificial Sequence: Synthetic oligonucleotide
  Sense strand starting at position 2738 of SEQ ID NO: 2192
cucauauguugggucauau

SEQ ID NO: 170197 - RNA, 19 nt, Artificial Sequence
  Description of Artificial Sequence: Synthetic oligonucleotide
  Antisense strand to SEQ ID NO: 170196
auaugacccaacauaugag

SEQ ID NO: 170198 - RNA, 19 nt, Artificial Sequence
  Description of Artificial Sequence: Synthetic oligonucleotide
  Sense strand starting at position 2792 of SEQ ID NO: 2192
uuuauaaacguuuggaugu

SEQ ID NO: 170199 - RNA, 19 nt, Artificial Sequence
  Description of Artificial Sequence: Synthetic oligonucleotide
  Antisense strand to SEQ ID NO: 170198
acauccaaacguuuauaaa

SEQ ID NO: 170200 - RNA, 19 nt, Artificial Sequence
  Description of Artificial Sequence: Synthetic oligonucleotide
  Sense strand starting at position 3041 of SEQ ID NO: 2192
ugaauuagguccucaacuu

SEQ ID NO: 170201 - RNA, 19 nt, Artificial Sequence
  Description of Artificial Sequence: Synthetic oligonucleotide
  Antisense strand to SEQ ID NO: 170200
aaguugaggaccuaauuca

SEQ ID NO: 170202 - RNA, 19 nt, Artificial Sequence
  Description of Artificial Sequence: Synthetic oligonucleotide
  Sense strand starting at position 3081 of SEQ ID NO: 2192
uuacuaugugucuaacaca

SEQ ID NO: 170203 - RNA, 19 nt, Artificial Sequence
  Description of Artificial Sequence: Synthetic oligonucleotide
  Antisense strand to SEQ ID NO: 170202
uguguuagacacauaguaa

SEQ ID NO: 170204 - RNA, 19 nt, Artificial Sequence
  Description of Artificial Sequence: Synthetic oligonucleotide
  Sense strand starting at position 3628 of SEQ ID NO: 2192
ccuccuuauccauggguga

SEQ ID NO: 170205 - RNA, 19 nt, Artificial Sequence
  Description of Artificial Sequence: Synthetic oligonucleotide
  Antisense strand to SEQ ID NO: 170204
ucacccauggauaaggagg

SEQ ID NO: 170206 - RNA, 19 nt, Artificial Sequence
  Description of Artificial Sequence: Synthetic oligonucleotide
  Sense strand starting at position 3629 of SEQ ID NO: 2192
cuccuuauccaugggugau

SEQ ID NO: 170207 - RNA, 19 nt, Artificial Sequence
  Description of Artificial Sequence: Synthetic oligonucleotide
  Antisense strand to SEQ ID NO: 170206
aucacccauggauaaggag

SEQ ID NO: 170208 - RNA, 19 nt, Artificial Sequence
  Description of Artificial Sequence: Synthetic oligonucleotide
  Sense strand starting at position 3632 of SEQ ID NO: 2192
cuuauccaugggugauacu

SEQ ID NO: 170209 - RNA, 19 nt, Artificial Sequence
  Description of Artificial Sequence: Synthetic oligonucleotide
  Antisense strand to SEQ ID NO: 170208
aguaucacccauggauaag

SEQ ID NO: 170210 - RNA, 19 nt, Artificial Sequence
  Description of Artificial Sequence: Synthetic oligonucleotide
  Sense strand starting at position 3641 of SEQ ID NO: 2192
gggugauacuuucuaagac

SEQ ID NO: 170211 - RNA, 19 nt, Artificial Sequence
  Description of Artificial Sequence: Synthetic oligonucleotide
  Antisense strand to SEQ ID NO: 170210
gucuuagaaaguaucaccc

SEQ ID NO: 170212 - RNA, 19 nt, Artificial Sequence
  Description of Artificial Sequence: Synthetic oligonucleotide
  Sense strand starting at position 3681 of SEQ ID NO: 2192
ugggauagguuaguacuga

SEQ ID NO: 170213 - RNA, 19 nt, Artificial Sequence
  Description of Artificial Sequence: Synthetic oligonucleotide
  Antisense strand to SEQ ID NO: 170212
ucaguacuaaccuauccca

SEQ ID NO: 170214 - RNA, 19 nt, Artificial Sequence
  Description of Artificial Sequence: Synthetic oligonucleotide
  Sense strand starting at position 3894 of SEQ ID NO: 2192
guuaacugugaguaacuga

SEQ ID NO: 170215 - RNA, 19 nt, Artificial Sequence
  Description of Artificial Sequence: Synthetic oligonucleotide
  Antisense strand to SEQ ID NO: 170214
ucaguuacucacaguuaac

SEQ ID NO: 170216 - RNA, 19 nt, Artificial Sequence
  Description of Artificial Sequence: Synthetic oligonucleotide
  Sense strand starting at position 3582 of SEQ ID NO: 2193
gguauugccuaguauuucu

SEQ ID NO: 170217 - RNA, 19 nt, Artificial Sequence
  Description of Artificial Sequence: Synthetic oligonucleotide
  Antisense strand to SEQ ID NO: 170216
agaaauacuaggcaauacc

SEQ ID NO: 170218 - RNA, 19 nt, Artificial Sequence
  Description of Artificial Sequence: Synthetic oligonucleotide
  Sense strand starting at position 3579 of SEQ ID NO: 2193
ucugguauugccuaguauu

SEQ ID NO: 170219 - RNA, 19 nt, Artificial Sequence
  Description of Artificial Sequence: Synthetic oligonucleotide
  Antisense strand to SEQ ID NO: 170218
aauacuaggcaauaccaga

SEQ ID NO: 170220 - RNA, 19 nt, Artificial Sequence
  Description of Artificial Sequence: Synthetic oligonucleotide
  Sense strand starting at position 3570 of SEQ ID NO: 2193
acuguauugucugguauug

SEQ ID NO: 170221 - RNA, 19 nt, Artificial Sequence
  Description of Artificial Sequence: Synthetic oligonucleotide
  Antisense strand to SEQ ID NO: 170220
caauaccagacaauacagu

SEQ ID NO: 170222 - RNA, 19 nt, Artificial Sequence
  Description of Artificial Sequence: Synthetic oligonucleotide
  Sense strand starting at position 3567 of SEQ ID NO: 2193
aguacuguauugucuggua

SEQ ID NO: 170223 - RNA, 19 nt, Artificial Sequence
  Description of Artificial Sequence: Synthetic oligonucleotide
  Antisense strand to SEQ ID NO: 170222
uaccagacaauacaguacu

SEQ ID NO: 170224 - RNA, 19 nt, Artificial Sequence
  Description of Artificial Sequence: Synthetic oligonucleotide
  Sense strand starting at position 3557 of SEQ ID NO: 2193
cuuauugucuaguacugua

SEQ ID NO: 170225 - RNA, 19 nt, Artificial Sequence
  Description of Artificial Sequence: Synthetic oligonucleotide
  Antisense strand to SEQ ID NO: 170224
uacaguacuagacaauaag

SEQ ID NO: 170226 - RNA, 19 nt, Artificial Sequence
  Description of Artificial Sequence: Synthetic oligonucleotide
  Sense strand starting at position 3554 of SEQ ID NO: 2193
ugucuuauugucuaguacu

SEQ ID NO: 170227 - RNA, 19 nt, Artificial Sequence
  Description of Artificial Sequence: Synthetic oligonucleotide
  Antisense strand to SEQ ID NO: 170226
aguacuagacaauaagaca

SEQ ID NO: 170228 - RNA, 19 nt, Artificial Sequence
  Description of Artificial Sequence: Synthetic oligonucleotide
  Sense strand starting at position 3552 of SEQ ID NO: 2193
uuugucuuauugucuagua

SEQ ID NO: 170229 - RNA, 19 nt, Artificial Sequence
  Description of Artificial Sequence: Synthetic oligonucleotide
  Antisense strand to SEQ ID NO: 170228
uacuagacaauaagacaaa

SEQ ID NO: 170230 - RNA, 19 nt, Artificial Sequence
  Description of Artificial Sequence: Synthetic oligonucleotide
  Sense strand starting at position 3549 of SEQ ID NO: 2193
auguuugucuuauugucua

SEQ ID NO: 170231 - RNA, 19 nt, Artificial Sequence
  Description of Artificial Sequence: Synthetic oligonucleotide
  Antisense strand to SEQ ID NO: 170230
uagacaauaagacaaacau

SEQ ID NO: 170232 - RNA, 19 nt, Artificial Sequence
  Description of Artificial Sequence: Synthetic oligonucleotide
  Sense strand starting at position 3251 of SEQ ID NO: 2193
ugauaaucauguuuggaga

SEQ ID NO: 170233 - RNA, 19 nt, Artificial Sequence
  Description of Artificial Sequence: Synthetic oligonucleotide
  Antisense strand to SEQ ID NO: 170232
ucuccaaacaugauuauca

SEQ ID NO: 170234 - RNA, 19 nt, Artificial Sequence
  Description of Artificial Sequence: Synthetic oligonucleotide
  Sense strand starting at position 3214 of SEQ ID NO: 2193
gcccaucuugaaggucaua

SEQ ID NO: 170235 - RNA, 19 nt, Artificial Sequence
  Description of Artificial Sequence: Synthetic oligonucleotide
  Antisense strand to SEQ ID NO: 170234
uaugaccuucaagaugggc

SEQ ID NO: 170236 - RNA, 19 nt, Artificial Sequence
  Description of Artificial Sequence: Synthetic oligonucleotide
  Sense strand starting at position 3164 of SEQ ID NO: 2193
guuaauguuguuuacaaca

SEQ ID NO: 170237 - RNA, 19 nt, Artificial Sequence
  Description of Artificial Sequence: Synthetic oligonucleotide
  Antisense strand to SEQ ID NO: 170236
uguuguaaacaacauuaac

SEQ ID NO: 170238 - RNA, 19 nt, Artificial Sequence
  Description of Artificial Sequence: Synthetic oligonucleotide
  Sense strand starting at position 3163 of SEQ ID NO: 2193
aguuaauguuguuuacaac

SEQ ID NO: 170239 - RNA, 19 nt, Artificial Sequence
  Description of Artificial Sequence: Synthetic oligonucleotide
  Antisense strand to SEQ ID NO: 170238
guuguaaacaacauuaacu

SEQ ID NO: 170240 - RNA, 19 nt, Artificial Sequence
  Description of Artificial Sequence: Synthetic oligonucleotide
  Sense strand starting at position 3160 of SEQ ID NO: 2193
gauaguuaauguuguuuac

SEQ ID NO: 170241 - RNA, 19 nt, Artificial Sequence
  Description of Artificial Sequence: Synthetic oligonucleotide
  Antisense strand to SEQ ID NO: 170240
guaaacaacauuaacuauc

SEQ ID NO: 170242 - RNA, 19 nt, Artificial Sequence
  Description of Artificial Sequence: Synthetic oligonucleotide
  Sense strand starting at position 2684 of SEQ ID NO: 2193
gcgacucaggccugagauc

SEQ ID NO: 170243 - RNA, 19 nt, Artificial Sequence
  Description of Artificial Sequence: Synthetic oligonucleotide
  Antisense strand to SEQ ID NO: 170242
gaucucaggccugagucgc

SEQ ID NO: 170244 - RNA, 19 nt, Artificial Sequence
  Description of Artificial Sequence: Synthetic oligonucleotide
  Sense strand starting at position 2635 of SEQ ID NO: 2193
aguaguugccagcaaacga

SEQ ID NO: 170245 - RNA, 19 nt, Artificial Sequence
  Description of Artificial Sequence: Synthetic oligonucleotide
  Antisense strand to SEQ ID NO: 170244
ucguuugcuggcaacuacu

SEQ ID NO: 170246 - RNA, 19 nt, Artificial Sequence
  Description of Artificial Sequence: Synthetic oligonucleotide
  Sense strand starting at position 2632 of SEQ ID NO: 2193
cauaguaguugccagcaaa

SEQ ID NO: 170247 - RNA, 19 nt, Artificial Sequence
  Description of Artificial Sequence: Synthetic oligonucleotide
  Antisense strand to SEQ ID NO: 170246
uuugcuggcaacuacuaug

SEQ ID NO: 170248 - RNA, 19 nt, Artificial Sequence
  Description of Artificial Sequence: Synthetic oligonucleotide
  Sense strand starting at position 2616 of SEQ ID NO: 2193
aggucagccucagaaacau

SEQ ID NO: 170249 - RNA, 19 nt, Artificial Sequence
  Description of Artificial Sequence: Synthetic oligonucleotide
  Antisense strand to SEQ ID NO: 170248
auguuucugaggcugaccu

SEQ ID NO: 170250 - RNA, 19 nt, Artificial Sequence
  Description of Artificial Sequence: Synthetic oligonucleotide
  Sense strand starting at position 2499 of SEQ ID NO: 2193
ugauaaagguaugcauaga

SEQ ID NO: 170251 - RNA, 19 nt, Artificial Sequence
  Description of Artificial Sequence: Synthetic oligonucleotide
  Antisense strand to SEQ ID NO: 170250
ucuaugcauaccuuuauca

SEQ ID NO: 170252 - RNA, 19 nt, Artificial Sequence
  Description of Artificial Sequence: Synthetic oligonucleotide
  Sense strand starting at position 2305 of SEQ ID NO: 2193
cgaguuagcugggaccaca

SEQ ID NO: 170253 - RNA, 19 nt, Artificial Sequence
  Description of Artificial Sequence: Synthetic oligonucleotide
  Antisense strand to SEQ ID NO: 170252
uguggucccagcuaacucg

SEQ ID NO: 170254 - RNA, 19 nt, Artificial Sequence
  Description of Artificial Sequence: Synthetic oligonucleotide
  Sense strand starting at position 2179 of SEQ ID NO: 2193
augaacauuuguugucuuu

SEQ ID NO: 170255 - RNA, 19 nt, Artificial Sequence
  Description of Artificial Sequence: Synthetic oligonucleotide
  Antisense strand to SEQ ID NO: 170254
aaagacaacaaauguucau

SEQ ID NO: 170256 - RNA, 19 nt, Artificial Sequence
  Description of Artificial Sequence: Synthetic oligonucleotide
  Sense strand starting at position 1855 of SEQ ID NO: 2193
gccuuugguuuagaucagu

SEQ ID NO: 170257 - RNA, 19 nt, Artificial Sequence
  Description of Artificial Sequence: Synthetic oligonucleotide
  Antisense strand to SEQ ID NO: 170256
acugaucuaaaccaaaggc

SEQ ID NO: 170258 - RNA, 19 nt, Artificial Sequence
  Description of Artificial Sequence: Synthetic oligonucleotide
  Sense strand starting at position 1853 of SEQ ID NO: 2193
ucgccuuugguuuagauca

SEQ ID NO: 170259 - RNA, 19 nt, Artificial Sequence
  Description of Artificial Sequence: Synthetic oligonucleotide
  Antisense strand to SEQ ID NO: 170258
ugaucuaaaccaaaggcga

SEQ ID NO: 170260 - RNA, 19 nt, Artificial Sequence
  Description of Artificial Sequence: Synthetic oligonucleotide
  Sense strand starting at position 1851 of SEQ ID NO: 2193
gaucgccuuugguuuagau

SEQ ID NO: 170261 - RNA, 19 nt, Artificial Sequence
  Description of Artificial Sequence: Synthetic oligonucleotide
  Antisense strand to SEQ ID NO: 170260
aucuaaaccaaaggcgauc

SEQ ID NO: 170262 - RNA, 19 nt, Artificial Sequence
  Description of Artificial Sequence: Synthetic oligonucleotide
  Sense strand starting at position 1848 of SEQ ID NO: 2193
gaugaucgccuuugguuua

SEQ ID NO: 170263 - RNA, 19 nt, Artificial Sequence
  Description of Artificial Sequence: Synthetic oligonucleotide
  Antisense strand to SEQ ID NO: 170262
uaaaccaaaggcgaucauc

SEQ ID NO: 170264 - RNA, 19 nt, Artificial Sequence
  Description of Artificial Sequence: Synthetic oligonucleotide
  Sense strand starting at position 1556 of SEQ ID NO: 2193
ccaaccaugccuuguugau

SEQ ID NO: 170265 - RNA, 19 nt, Artificial Sequence
  Description of Artificial Sequence: Synthetic oligonucleotide
  Antisense strand to SEQ ID NO: 170264
aucaacaaggcaugguugg

SEQ ID NO: 170266 - RNA, 19 nt, Artificial Sequence
  Description of Artificial Sequence: Synthetic oligonucleotide
  Sense strand starting at position 1352 of SEQ ID NO: 2193
cuuugugugagguauuaac

SEQ ID NO: 170267 - RNA, 19 nt, Artificial Sequence
  Description of Artificial Sequence: Synthetic oligonucleotide
  Antisense strand to SEQ ID NO: 170266
guuaauaccucacacaaag

SEQ ID NO: 170268 - RNA, 19 nt, Artificial Sequence
  Description of Artificial Sequence: Synthetic oligonucleotide
  Sense strand starting at position 1350 of SEQ ID NO: 2193
aacuuugugugagguauua

SEQ ID NO: 170269 - RNA, 19 nt, Artificial Sequence
  Description of Artificial Sequence: Synthetic oligonucleotide
  Antisense strand to SEQ ID NO: 170268
uaauaccucacacaaaguu

SEQ ID NO: 170270 - RNA, 19 nt, Artificial Sequence
  Description of Artificial Sequence: Synthetic oligonucleotide
  Sense strand starting at position 1348 of SEQ ID NO: 2193
ucaacuuugugugagguau

SEQ ID NO: 170271 - RNA, 19 nt, Artificial Sequence
  Description of Artificial Sequence: Synthetic oligonucleotide
  Antisense strand to SEQ ID NO: 170270
auaccucacacaaaguuga

SEQ ID NO: 170272 - RNA, 19 nt, Artificial Sequence
  Description of Artificial Sequence: Synthetic oligonucleotide
  Sense strand starting at position 1347 of SEQ ID NO: 2193
cucaacuuugugugaggua

SEQ ID NO: 170273 - RNA, 19 nt, Artificial Sequence
  Description of Artificial Sequence: Synthetic oligonucleotide
  Antisense strand to SEQ ID NO: 170272
uaccucacacaaaguugag

SEQ ID NO: 170274 - RNA, 19 nt, Artificial Sequence
  Description of Artificial Sequence: Synthetic oligonucleotide
  Sense strand starting at position 1343 of SEQ ID NO: 2193
uuuacucaacuuuguguga

SEQ ID NO: 170275 - RNA, 19 nt, Artificial Sequence
  Description of Artificial Sequence: Synthetic oligonucleotide
  Antisense strand to SEQ ID NO: 170274
ucacacaaaguugaguaaa

SEQ ID NO: 170276 - RNA, 19 nt, Artificial Sequence
  Description of Artificial Sequence: Synthetic oligonucleotide
  Sense strand starting at position 1328 of SEQ ID NO: 2193
ggagacagcccuugcuuua

SEQ ID NO: 170277 - RNA, 19 nt, Artificial Sequence
  Description of Artificial Sequence: Synthetic oligonucleotide
  Antisense strand to SEQ ID NO: 170276
uaaagcaagggcugucucc

SEQ ID NO: 170278 - RNA, 19 nt, Artificial Sequence
  Description of Artificial Sequence: Synthetic oligonucleotide
  Sense strand starting at position 1274 of SEQ ID NO: 2193
aggacuuguuccuguccau

SEQ ID NO: 170279 - RNA, 19 nt, Artificial Sequence
  Description of Artificial Sequence: Synthetic oligonucleotide
  Antisense strand to SEQ ID NO: 170278
auggacaggaacaaguccu

SEQ ID NO: 170280 - RNA, 19 nt, Artificial Sequence
  Description of Artificial Sequence: Synthetic oligonucleotide
  Sense strand starting at position 904 of SEQ ID NO: 2193
cccaaauggucugagagag

SEQ ID NO: 170281 - RNA, 19 nt, Artificial Sequence
  Description of Artificial Sequence: Synthetic oligonucleotide
  Antisense strand to SEQ ID NO: 170280
cucucucagaccauuuggg

SEQ ID NO: 170282 - RNA, 19 nt, Artificial Sequence
  Description of Artificial Sequence: Synthetic oligonucleotide
  Sense strand starting at position 903 of SEQ ID NO: 2193
ucccaaauggucugagaga

SEQ ID NO: 170283 - RNA, 19 nt, Artificial Sequence
  Description of Artificial Sequence: Synthetic oligonucleotide
  Antisense strand to SEQ ID NO: 170282
ucucucagaccauuuggga

SEQ ID NO: 170284 - RNA, 19 nt, Artificial Sequence
  Description of Artificial Sequence: Synthetic oligonucleotide
  Sense strand starting at position 901 of SEQ ID NO: 2193
caucccaaauggucugaga

SEQ ID NO: 170285 - RNA, 19 nt, Artificial Sequence
  Description of Artificial Sequence: Synthetic oligonucleotide
  Antisense strand to SEQ ID NO: 170284
ucucagaccauuugggaug

SEQ ID NO: 170286 - RNA, 19 nt, Artificial Sequence
  Description of Artificial Sequence: Synthetic oligonucleotide
  Sense strand starting at position 670 of SEQ ID NO: 2193
cagugacucggauggacau

SEQ ID NO: 170287 - RNA, 19 nt, Artificial Sequence
  Description of Artificial Sequence: Synthetic oligonucleotide
  Antisense strand to SEQ ID NO: 170286
auguccauccgagucacug

SEQ ID NO: 170288 - RNA, 19 nt, Artificial Sequence
  Description of Artificial Sequence: Synthetic oligonucleotide
  Sense strand starting at position 303 of SEQ ID NO: 2193
ccgaguuggauggaacacu

SEQ ID NO: 170289 - RNA, 19 nt, Artificial Sequence
  Description of Artificial Sequence: Synthetic oligonucleotide
  Antisense strand to SEQ ID NO: 170288
aguguuccauccaacucgg

SEQ ID NO: 170290 - RNA, 19 nt, Artificial Sequence
  Description of Artificial Sequence: Synthetic oligonucleotide
  Sense strand starting at position 301 of SEQ ID NO: 2193
ggccgaguuggauggaaca

SEQ ID NO: 170291 - RNA, 19 nt, Artificial Sequence
  Description of Artificial Sequence: Synthetic oligonucleotide
  Antisense strand to SEQ ID NO: 170290
uguuccauccaacucggcc

SEQ ID NO: 170292 - RNA, 19 nt, Artificial Sequence
  Description of Artificial Sequence: Synthetic oligonucleotide
  Sense strand starting at position 8 of SEQ ID NO: 2194
cucgaaagcacgugacauu

SEQ ID NO: 170293 - RNA, 19 nt, Artificial Sequence
  Description of Artificial Sequence: Synthetic oligonucleotide
  Antisense strand to SEQ ID NO: 170292
aaugucacgugcuuucgag

SEQ ID NO: 170294 - RNA, 19 nt, Artificial Sequence
  Description of Artificial Sequence: Synthetic oligonucleotide
  Sense strand starting at position 15 of SEQ ID NO: 2194
gcacgugacauugauaguc

SEQ ID NO: 170295 - RNA, 19 nt, Artificial Sequence
  Description of Artificial Sequence: Synthetic oligonucleotide
  Antisense strand to SEQ ID NO: 170294
gacuaucaaugucacgugc

SEQ ID NO: 170296 - RNA, 19 nt, Artificial Sequence
  Description of Artificial Sequence: Synthetic oligonucleotide
  Sense strand starting at position 265 of SEQ ID NO: 2194
gguccaagcuuucucccaa

SEQ ID NO: 170297 - RNA, 19 nt, Artificial Sequence
  Description of Artificial Sequence: Synthetic oligonucleotide
  Antisense strand to SEQ ID NO: 170296
uugggagaaagcuuggacc

SEQ ID NO: 170298 - RNA, 19 nt, Artificial Sequence
  Description of Artificial Sequence: Synthetic oligonucleotide
  Sense strand starting at position 303 of SEQ ID NO: 2194
agauacccacagugauauu

SEQ ID NO: 170299 - RNA, 19 nt, Artificial Sequence
  Description of Artificial Sequence: Synthetic oligonucleotide
  Antisense strand to SEQ ID NO: 170298
aauaucacuguggguaucu

SEQ ID NO: 170300 - RNA, 19 nt, Artificial Sequence
  Description of Artificial Sequence: Synthetic oligonucleotide
  Sense strand starting at position 731 of SEQ ID NO: 2194
gagcguugagggugguaua

SEQ ID NO: 170301 - RNA, 19 nt, Artificial Sequence
  Description of Artificial Sequence: Synthetic oligonucleotide
  Antisense strand to SEQ ID NO: 170300
uauaccacccucaacgcuc

SEQ ID NO: 170302 - RNA, 19 nt, Artificial Sequence
  Description of Artificial Sequence: Synthetic oligonucleotide
  Sense strand starting at position 732 of SEQ ID NO: 2194
agcguugagggugguauaa

SEQ ID NO: 170303 - RNA, 19 nt, Artificial Sequence
  Description of Artificial Sequence: Synthetic oligonucleotide
  Antisense strand to SEQ ID NO: 170302
uuauaccacccucaacgcu

SEQ ID NO: 170304 - RNA, 19 nt, Artificial Sequence
  Description of Artificial Sequence: Synthetic oligonucleotide
  Sense strand starting at position 850 of SEQ ID NO: 2194
cuuggaauuucgggccauu

SEQ ID NO: 170305 - RNA, 19 nt, Artificial Sequence
  Description of Artificial Sequence: Synthetic oligonucleotide
  Antisense strand to SEQ ID NO: 170304
aauggcccgaaauuccaag

SEQ ID NO: 170306 - RNA, 19 nt, Artificial Sequence
  Description of Artificial Sequence: Synthetic oligonucleotide
  Sense strand starting at position 1032 of SEQ ID NO: 2194
guccaaauuccucagcaag

SEQ ID NO: 170307 - RNA, 19 nt, Artificial Sequence
  Description of Artificial Sequence: Synthetic oligonucleotide
  Antisense strand to SEQ ID NO: 170306
cuugcugaggaauuuggac

SEQ ID NO: 170308 - RNA, 19 nt, Artificial Sequence
  Description of Artificial Sequence: Synthetic oligonucleotide
  Sense strand starting at position 1043 of SEQ ID NO: 2194
ucagcaaguucuucucaga

SEQ ID NO: 170309 - RNA, 19 nt, Artificial Sequence
  Description of Artificial Sequence: Synthetic oligonucleotide
  Antisense strand to SEQ ID NO: 170308
ucugagaagaacuugcuga

SEQ ID NO: 170310 - RNA, 19 nt, Artificial Sequence
  Description of Artificial Sequence: Synthetic oligonucleotide
  Sense strand starting at position 1103 of SEQ ID NO: 2194
uucgcuuguagcgaaaucu

SEQ ID NO: 170311 - RNA, 19 nt, Artificial Sequence
  Description of Artificial Sequence: Synthetic oligonucleotide
  Antisense strand to SEQ ID NO: 170310
agauuucgcuacaagcgaa

SEQ ID NO: 170312 - RNA, 19 nt, Artificial Sequence
  Description of Artificial Sequence: Synthetic oligonucleotide
  Sense strand starting at position 1277 of SEQ ID NO: 2194
aagaguguaucggagggaa

SEQ ID NO: 170313 - RNA, 19 nt, Artificial Sequence
  Description of Artificial Sequence: Synthetic oligonucleotide
  Antisense strand to SEQ ID NO: 170312
uucccuccgauacacucuu

SEQ ID NO: 170314 - RNA, 19 nt, Artificial Sequence
  Description of Artificial Sequence: Synthetic oligonucleotide
  Sense strand starting at position 1279 of SEQ ID NO: 2194
gaguguaucggagggaagu

SEQ ID NO: 170315 - RNA, 19 nt, Artificial Sequence
  Description of Artificial Sequence: Synthetic oligonucleotide
  Antisense strand to SEQ ID NO: 170314
acuucccuccgauacacuc

SEQ ID NO: 170316 - RNA, 19 nt, Artificial Sequence
  Description of Artificial Sequence: Synthetic oligonucleotide
  Sense strand starting at position 1364 of SEQ ID NO: 2194
gcuggaagucucugaaaca

SEQ ID NO: 170317 - RNA, 19 nt, Artificial Sequence
  Description of Artificial Sequence: Synthetic oligonucleotide
  Antisense strand to SEQ ID NO: 170316
uguuucagagacuuccagc

SEQ ID NO: 170318 - RNA, 19 nt, Artificial Sequence
  Description of Artificial Sequence: Synthetic oligonucleotide
  Sense strand starting at position 1365 of SEQ ID NO: 2194
cuggaagucucugaaacaa

SEQ ID NO: 170319 - RNA, 19 nt, Artificial Sequence
  Description of Artificial Sequence: Synthetic oligonucleotide
  Antisense strand to SEQ ID NO: 170318
uuguuucagagacuuccag

SEQ ID NO: 170320 - RNA, 19 nt, Artificial Sequence
  Description of Artificial Sequence: Synthetic oligonucleotide
  Sense strand starting at position 1408 of SEQ ID NO: 2194
cccuaaugcgagcgaggua

SEQ ID NO: 170321 - RNA, 19 nt, Artificial Sequence
  Description of Artificial Sequence: Synthetic oligonucleotide
  Antisense strand to SEQ ID NO: 170320
uaccucgcucgcauuaggg

SEQ ID NO: 170322 - RNA, 19 nt, Artificial Sequence
  Description of Artificial Sequence: Synthetic oligonucleotide
  Sense strand starting at position 2091 of SEQ ID NO: 2194
ccgucaacuccugauaaac

SEQ ID NO: 170323 - RNA, 19 nt, Artificial Sequence
  Description of Artificial Sequence: Synthetic oligonucleotide
  Antisense strand to SEQ ID NO: 170322
guuuaucaggaguugacgg

SEQ ID NO: 170324 - RNA, 19 nt, Artificial Sequence
  Description of Artificial Sequence: Synthetic oligonucleotide
  Sense strand starting at position 2093 of SEQ ID NO: 2194
gucaacuccugauaaacga

SEQ ID NO: 170325 - RNA, 19 nt, Artificial Sequence
  Description of Artificial Sequence: Synthetic oligonucleotide
  Antisense strand to SEQ ID NO: 170324
ucguuuaucaggaguugac

SEQ ID NO: 170326 - RNA, 19 nt, Artificial Sequence
  Description of Artificial Sequence: Synthetic oligonucleotide
  Sense strand starting at position 2115 of SEQ ID NO: 2194
aguggaauugcccaauuag

SEQ ID NO: 170327 - RNA, 19 nt, Artificial Sequence
  Description of Artificial Sequence: Synthetic oligonucleotide
  Antisense strand to SEQ ID NO: 170326
cuaauugggcaauuccacu

SEQ ID NO: 170328 - RNA, 19 nt, Artificial Sequence
  Description of Artificial Sequence: Synthetic oligonucleotide
  Sense strand starting at position 2125 of SEQ ID NO: 2194
cccaauuagcgcuaggaau

SEQ ID NO: 170329 - RNA, 19 nt, Artificial Sequence
  Description of Artificial Sequence: Synthetic oligonucleotide
  Antisense strand to SEQ ID NO: 170328
auuccuagcgcuaauuggg

SEQ ID NO: 170330 - RNA, 19 nt, Artificial Sequence
  Description of Artificial Sequence: Synthetic oligonucleotide
  Sense strand starting at position 2136 of SEQ ID NO: 2194
cuaggaaugccacguggua

SEQ ID NO: 170331 - RNA, 19 nt, Artificial Sequence
  Description of Artificial Sequence: Synthetic oligonucleotide
  Antisense strand to SEQ ID NO: 170330
uaccacguggcauuccuag

SEQ ID NO: 170332 - RNA, 19 nt, Artificial Sequence
  Description of Artificial Sequence: Synthetic oligonucleotide
  Sense strand starting at position 2435 of SEQ ID NO: 2194
cggcuuucggguuggucaa

SEQ ID NO: 170333 - RNA, 19 nt, Artificial Sequence
  Description of Artificial Sequence: Synthetic oligonucleotide
  Antisense strand to SEQ ID NO: 170332
uugaccaacccgaaagccg

SEQ ID NO: 170334 - RNA, 19 nt, Artificial Sequence
  Description of Artificial Sequence: Synthetic oligonucleotide
  Sense strand starting at position 2441 of SEQ ID NO: 2194
ucggguuggucaagguaua

SEQ ID NO: 170335 - RNA, 19 nt, Artificial Sequence
  Description of Artificial Sequence: Synthetic oligonucleotide
  Antisense strand to SEQ ID NO: 170334
uauaccuugaccaacccga

SEQ ID NO: 170336 - RNA, 19 nt, Artificial Sequence
  Description of Artificial Sequence: Synthetic oligonucleotide
  Sense strand starting at position 2451 of SEQ ID NO: 2194
caagguauagcugaguaag

SEQ ID NO: 170337 - RNA, 19 nt, Artificial Sequence
  Description of Artificial Sequence: Synthetic oligonucleotide
  Antisense strand to SEQ ID NO: 170336
cuuacucagcuauaccuug

SEQ ID NO: 170338 - RNA, 19 nt, Artificial Sequence
  Description of Artificial Sequence: Synthetic oligonucleotide
  Sense strand starting at position 2453 of SEQ ID NO: 2194
agguauagcugaguaagga

SEQ ID NO: 170339 - RNA, 19 nt, Artificial Sequence
  Description of Artificial Sequence: Synthetic oligonucleotide
  Antisense strand to SEQ ID NO: 170338
uccuuacucagcuauaccu

SEQ ID NO: 170340 - RNA, 19 nt, Artificial Sequence
  Description of Artificial Sequence: Synthetic oligonucleotide
  Sense strand starting at position 2454 of SEQ ID NO: 2194
gguauagcugaguaaggaa

SEQ ID NO: 170341 - RNA, 19 nt, Artificial Sequence
  Description of Artificial Sequence: Synthetic oligonucleotide
  Antisense strand to SEQ ID NO: 170340
uuccuuacucagcuauacc

SEQ ID NO: 170342 - RNA, 19 nt, Artificial Sequence
  Description of Artificial Sequence: Synthetic oligonucleotide
  Sense strand starting at position 2504 of SEQ ID NO: 2194
ucaguauagugaggaggaa

SEQ ID NO: 170343 - RNA, 19 nt, Artificial Sequence
  Description of Artificial Sequence: Synthetic oligonucleotide
  Antisense strand to SEQ ID NO: 170342
uuccuccucacuauacuga

SEQ ID NO: 170344 - RNA, 19 nt, Artificial Sequence
  Description of Artificial Sequence: Synthetic oligonucleotide
  Sense strand starting at position 2545 of SEQ ID NO: 2194
uugaaauaguaagagcaau

SEQ ID NO: 170345 - RNA, 19 nt, Artificial Sequence
  Description of Artificial Sequence: Synthetic oligonucleotide
  Antisense strand to SEQ ID NO: 170344
auugcucuuacuauuucaa

SEQ ID NO: 170346 - RNA, 19 nt, Artificial Sequence
  Description of Artificial Sequence: Synthetic oligonucleotide
  Sense strand starting at position 2557 of SEQ ID NO: 2194
gagcaaucaguagagcuaa

SEQ ID NO: 170347 - RNA, 19 nt, Artificial Sequence
  Description of Artificial Sequence: Synthetic oligonucleotide
  Antisense strand to SEQ ID NO: 170346
uuagcucuacugauugcuc

SEQ ID NO: 170348 - RNA, 19 nt, Artificial Sequence
  Description of Artificial Sequence: Synthetic oligonucleotide
  Sense strand starting at position 2606 of SEQ ID NO: 2194
cuaugagauucgguuaagu

SEQ ID NO: 170349 - RNA, 19 nt, Artificial Sequence
  Description of Artificial Sequence: Synthetic oligonucleotide
  Antisense strand to SEQ ID NO: 170348
acuuaaccgaaucucauag

SEQ ID NO: 170350 - RNA, 19 nt, Artificial Sequence
  Description of Artificial Sequence: Synthetic oligonucleotide
  Sense strand starting at position 2608 of SEQ ID NO: 2194
augagauucgguuaaguga

SEQ ID NO: 170351 - RNA, 19 nt, Artificial Sequence
  Description of Artificial Sequence: Synthetic oligonucleotide
  Antisense strand to SEQ ID NO: 170350
ucacuuaaccgaaucucau

SEQ ID NO: 170352 - RNA, 19 nt, Artificial Sequence
  Description of Artificial Sequence: Synthetic oligonucleotide
  Sense strand starting at position 2976 of SEQ ID NO: 2194
uacgaaagugccgggauua

SEQ ID NO: 170353 - RNA, 19 nt, Artificial Sequence
  Description of Artificial Sequence: Synthetic oligonucleotide
  Antisense strand to SEQ ID NO: 170352
uaaucccggcacuuucgua

SEQ ID NO: 170354 - RNA, 19 nt, Artificial Sequence
  Description of Artificial Sequence: Synthetic oligonucleotide
  Sense strand starting at position 3062 of SEQ ID NO: 2194
uuugcaugugccuggacau

SEQ ID NO: 170355 - RNA, 19 nt, Artificial Sequence
  Description of Artificial Sequence: Synthetic oligonucleotide
  Antisense strand to SEQ ID NO: 170354
auguccaggcacaugcaaa

SEQ ID NO: 170356 - RNA, 19 nt, Artificial Sequence
  Description of Artificial Sequence: Synthetic oligonucleotide
  Sense strand starting at position 3138 of SEQ ID NO: 2194
caguaugggccuuacugua

SEQ ID NO: 170357 - RNA, 19 nt, Artificial Sequence
  Description of Artificial Sequence: Synthetic oligonucleotide
  Antisense strand to SEQ ID NO: 170356
uacaguaaggcccauacug

SEQ ID NO: 170358 - RNA, 19 nt, Artificial Sequence
  Description of Artificial Sequence: Synthetic oligonucleotide
  Sense strand starting at position 3215 of SEQ ID NO: 2194
ggaagaguauaagugguau

SEQ ID NO: 170359 - RNA, 19 nt, Artificial Sequence
  Description of Artificial Sequence: Synthetic oligonucleotide
  Antisense strand to SEQ ID NO: 170358
auaccacuuauacucuucc

SEQ ID NO: 170360 - RNA, 19 nt, Artificial Sequence
  Description of Artificial Sequence: Synthetic oligonucleotide
  Sense strand starting at position 3221 of SEQ ID NO: 2194
guauaagugguaugcauuc

SEQ ID NO: 170361 - RNA, 19 nt, Artificial Sequence
  Description of Artificial Sequence: Synthetic oligonucleotide
  Antisense strand to SEQ ID NO: 170360
gaaugcauaccacuuauac

SEQ ID NO: 170362 - RNA, 19 nt, Artificial Sequence
  Description of Artificial Sequence: Synthetic oligonucleotide
  Sense strand starting at position 3235 of SEQ ID NO: 2194
cauuccugguggccauaaa

SEQ ID NO: 170363 - RNA, 19 nt, Artificial Sequence
  Description of Artificial Sequence: Synthetic oligonucleotide
  Antisense strand to SEQ ID NO: 170362
uuuauggccaccaggaaug

SEQ ID NO: 170364 - RNA, 19 nt, Artificial Sequence
  Description of Artificial Sequence: Synthetic oligonucleotide
  Sense strand starting at position 3794 of SEQ ID NO: 2194
gcuacagugagcuguggau

SEQ ID NO: 170365 - RNA, 19 nt, Artificial Sequence
  Description of Artificial Sequence: Synthetic oligonucleotide
  Antisense strand to SEQ ID NO: 170364
auccacagcucacuguagc

SEQ ID NO: 170366 - RNA, 19 nt, Artificial Sequence
  Description of Artificial Sequence: Synthetic oligonucleotide
  Sense strand starting at position 3874 of SEQ ID NO: 2194
gaaagaaagaaguguggua

SEQ ID NO: 170367 - RNA, 19 nt, Artificial Sequence
  Description of Artificial Sequence: Synthetic oligonucleotide
  Antisense strand to SEQ ID NO: 170366
uaccacacuucuuucuuuc

SEQ ID NO: 170368 - RNA, 19 nt, Artificial Sequence
  Description of Artificial Sequence: Synthetic oligonucleotide
  Sense strand starting at position 3881 of SEQ ID NO: 2194
agaagugugguaggagaua

SEQ ID NO: 170369 - RNA, 19 nt, Artificial Sequence
  Description of Artificial Sequence: Synthetic oligonucleotide
  Antisense strand to SEQ ID NO: 170368
uaucuccuaccacacuucu

SEQ ID NO: 170370 - RNA, 19 nt, Artificial Sequence
  Description of Artificial Sequence: Synthetic oligonucleotide
  Sense strand starting at position 3970 of SEQ ID NO: 2194
ugcugugagagcuauucuu

SEQ ID NO: 170371 - RNA, 19 nt, Artificial Sequence
  Description of Artificial Sequence: Synthetic oligonucleotide
  Antisense strand to SEQ ID NO: 170370
aagaauagcucucacagca

SEQ ID NO: 170372 - RNA, 19 nt, Artificial Sequence
  Description of Artificial Sequence: Synthetic oligonucleotide
  Sense strand starting at position 3979 of SEQ ID NO: 2195
ccaugcccagucugaauaa

SEQ ID NO: 170373 - RNA, 19 nt, Artificial Sequence
  Description of Artificial Sequence: Synthetic oligonucleotide
  Antisense strand to SEQ ID NO: 170372
uuauucagacugggcaugg

SEQ ID NO: 170374 - RNA, 19 nt, Artificial Sequence
  Description of Artificial Sequence: Synthetic oligonucleotide
  Sense strand starting at position 3750 of SEQ ID NO: 2195
gaucauggaucauugcagu

SEQ ID NO: 170375 - RNA, 19 nt, Artificial Sequence
  Description of Artificial Sequence: Synthetic oligonucleotide
  Antisense strand to SEQ ID NO: 170374
acugcaaugauccaugauc

SEQ ID NO: 170376 - RNA, 19 nt, Artificial Sequence
  Description of Artificial Sequence: Synthetic oligonucleotide
  Sense strand starting at position 3744 of SEQ ID NO: 2195
ugguaugaucauggaucau

SEQ ID NO: 170377 - RNA, 19 nt, Artificial Sequence
  Description of Artificial Sequence: Synthetic oligonucleotide
  Antisense strand to SEQ ID NO: 170376
augauccaugaucauacca

SEQ ID NO: 170378 - RNA, 19 nt, Artificial Sequence
  Description of Artificial Sequence: Synthetic oligonucleotide
  Sense strand starting at position 3672 of SEQ ID NO: 2195
ggcgaaccugaauacugau

SEQ ID NO: 170379 - RNA, 19 nt, Artificial Sequence
  Description of Artificial Sequence: Synthetic oligonucleotide
  Antisense strand to SEQ ID NO: 170378
aucaguauucagguucgcc

SEQ ID NO: 170380 - RNA, 19 nt, Artificial Sequence
  Description of Artificial Sequence: Synthetic oligonucleotide
  Sense strand starting at position 3517 of SEQ ID NO: 2195
acaaguacacaugguauua

SEQ ID NO: 170381 - RNA, 19 nt, Artificial Sequence
  Description of Artificial Sequence: Synthetic oligonucleotide
  Antisense strand to SEQ ID NO: 170380
uaauaccauguguacuugu

SEQ ID NO: 170382 - RNA, 19 nt, Artificial Sequence
  Description of Artificial Sequence: Synthetic oligonucleotide
  Sense strand starting at position 2992 of SEQ ID NO: 2195
gcauuuccuagguggugau

SEQ ID NO: 170383 - RNA, 19 nt, Artificial Sequence
  Description of Artificial Sequence: Synthetic oligonucleotide
  Antisense strand to SEQ ID NO: 170382
aucaccaccuaggaaaugc

SEQ ID NO: 170384 - RNA, 19 nt, Artificial Sequence
  Description of Artificial Sequence: Synthetic oligonucleotide
  Sense strand starting at position 2991 of SEQ ID NO: 2195
ugcauuuccuaggugguga

SEQ ID NO: 170385 - RNA, 19 nt, Artificial Sequence
  Description of Artificial Sequence: Synthetic oligonucleotide
  Antisense strand to SEQ ID NO: 170384
ucaccaccuaggaaaugca

SEQ ID NO: 170386 - RNA, 19 nt, Artificial Sequence
  Description of Artificial Sequence: Synthetic oligonucleotide
  Sense strand starting at position 2858 of SEQ ID NO: 2195
gcaaauugcaugugaauga

SEQ ID NO: 170387 - RNA, 19 nt, Artificial Sequence
  Description of Artificial Sequence: Synthetic oligonucleotide
  Antisense strand to SEQ ID NO: 170386
ucauucacaugcaauuugc

SEQ ID NO: 170388 - RNA, 19 nt, Artificial Sequence
  Description of Artificial Sequence: Synthetic oligonucleotide
  Sense strand starting at position 2711 of SEQ ID NO: 2195
gggaucuggguuggugaaa

SEQ ID NO: 170389 - RNA, 19 nt, Artificial Sequence
  Description of Artificial Sequence: Synthetic oligonucleotide
  Antisense strand to SEQ ID NO: 170388
uuucaccaacccagauccc

SEQ ID NO: 170390 - RNA, 19 nt, Artificial Sequence
  Description of Artificial Sequence: Synthetic oligonucleotide
  Sense strand starting at position 2550 of SEQ ID NO: 2195
uucuaucauccgggaagag

SEQ ID NO: 170391 - RNA, 19 nt, Artificial Sequence
  Description of Artificial Sequence: Synthetic oligonucleotide
  Antisense strand to SEQ ID NO: 170390
cucuucccggaugauagaa

SEQ ID NO: 170392 - RNA, 19 nt, Artificial Sequence
  Description of Artificial Sequence: Synthetic oligonucleotide
  Sense strand starting at position 2548 of SEQ ID NO: 2195
ucuucuaucauccgggaag

SEQ ID NO: 170393 - RNA, 19 nt, Artificial Sequence
  Description of Artificial Sequence: Synthetic oligonucleotide
  Antisense strand to SEQ ID NO: 170392
cuucccggaugauagaaga

SEQ ID NO: 170394 - RNA, 19 nt, Artificial Sequence
  Description of Artificial Sequence: Synthetic oligonucleotide
  Sense strand starting at position 2409 of SEQ ID NO: 2195
ucacuuaaccuggguuacu

SEQ ID NO: 170395 - RNA, 19 nt, Artificial Sequence
  Description of Artificial Sequence: Synthetic oligonucleotide
  Antisense strand to SEQ ID NO: 170394
aguaacccagguuaaguga

SEQ ID NO: 170396 - RNA, 19 nt, Artificial Sequence
  Description of Artificial Sequence: Synthetic oligonucleotide
  Sense strand starting at position 2364 of SEQ ID NO: 2195
ggaggaugccaugaagucu

SEQ ID NO: 170397 - RNA, 19 nt, Artificial Sequence
  Description of Artificial Sequence: Synthetic oligonucleotide
  Antisense strand to SEQ ID NO: 170396
agacuucauggcauccucc

SEQ ID NO: 170398 - RNA, 19 nt, Artificial Sequence
  Description of Artificial Sequence: Synthetic oligonucleotide
  Sense strand starting at position 2163 of SEQ ID NO: 2195
ggaggaucauggccugcua

SEQ ID NO: 170399 - RNA, 19 nt, Artificial Sequence
  Description of Artificial Sequence: Synthetic oligonucleotide
  Antisense strand to SEQ ID NO: 170398
uagcaggccaugauccucc

SEQ ID NO: 170400 - RNA, 19 nt, Artificial Sequence
  Description of Artificial Sequence: Synthetic oligonucleotide
  Sense strand starting at position 1713 of SEQ ID NO: 2195
ggcugcuuuaugcucagua

SEQ ID NO: 170401 - RNA, 19 nt, Artificial Sequence
  Description of Artificial Sequence: Synthetic oligonucleotide
  Antisense strand to SEQ ID NO: 170400
uacugagcauaaagcagcc

SEQ ID NO: 170402 - RNA, 19 nt, Artificial Sequence
  Description of Artificial Sequence: Synthetic oligonucleotide
  Sense strand starting at position 1585 of SEQ ID NO: 2195
augaguggucuuggaguag

SEQ ID NO: 170403 - RNA, 19 nt, Artificial Sequence
  Description of Artificial Sequence: Synthetic oligonucleotide
  Antisense strand to SEQ ID NO: 170402
cuacuccaagaccacucau

SEQ ID NO: 170404 - RNA, 19 nt, Artificial Sequence
  Description of Artificial Sequence: Synthetic oligonucleotide
  Sense strand starting at position 1581 of SEQ ID NO: 2195
aaccaugaguggucuugga

SEQ ID NO: 170405 - RNA, 19 nt, Artificial Sequence
  Description of Artificial Sequence: Synthetic oligonucleotide
  Antisense strand to SEQ ID NO: 170404
uccaagaccacucaugguu

SEQ ID NO: 170406 - RNA, 19 nt, Artificial Sequence
  Description of Artificial Sequence: Synthetic oligonucleotide
  Sense strand starting at position 1516 of SEQ ID NO: 2195
agguuauucugagccuuag

SEQ ID NO: 170407 - RNA, 19 nt, Artificial Sequence
  Description of Artificial Sequence: Synthetic oligonucleotide
  Antisense strand to SEQ ID NO: 170406
cuaaggcucagaauaaccu

SEQ ID NO: 170408 - RNA, 19 nt, Artificial Sequence
  Description of Artificial Sequence: Synthetic oligonucleotide
  Sense strand starting at position 1486 of SEQ ID NO: 2195
aaucgacgugaugauuaua

SEQ ID NO: 170409 - RNA, 19 nt, Artificial Sequence
  Description of Artificial Sequence: Synthetic oligonucleotide
  Antisense strand to SEQ ID NO: 170408
uauaaucaucacgucgauu

SEQ ID NO: 170410 - RNA, 19 nt, Artificial Sequence
  Description of Artificial Sequence: Synthetic oligonucleotide
  Sense strand starting at position 1241 of SEQ ID NO: 2195
cgugcuguccucuuccuau

SEQ ID NO: 170411 - RNA, 19 nt, Artificial Sequence
  Description of Artificial Sequence: Synthetic oligonucleotide
  Antisense strand to SEQ ID NO: 170410
auaggaagaggacagcacg

SEQ ID NO: 170412 - RNA, 19 nt, Artificial Sequence
  Description of Artificial Sequence: Synthetic oligonucleotide
  Sense strand starting at position 1079 of SEQ ID NO: 2195
gcuggcagacaucaggauu

SEQ ID NO: 170413 - RNA, 19 nt, Artificial Sequence
  Description of Artificial Sequence: Synthetic oligonucleotide
  Antisense strand to SEQ ID NO: 170412
aauccugaugucugccagc

SEQ ID NO: 170414 - RNA, 19 nt, Artificial Sequence
  Description of Artificial Sequence: Synthetic oligonucleotide
  Sense strand starting at position 1069 of SEQ ID NO: 2195
ugagauucaggcuggcaga

SEQ ID NO: 170415 - RNA, 19 nt, Artificial Sequence
  Description of Artificial Sequence: Synthetic oligonucleotide
  Antisense strand to SEQ ID NO: 170414
ucugccagccugaaucuca

SEQ ID NO: 170416 - RNA, 19 nt, Artificial Sequence
  Description of Artificial Sequence: Synthetic oligonucleotide
  Sense strand starting at position 896 of SEQ ID NO: 2195
ggacaaaucuuggccacua

SEQ ID NO: 170417 - RNA, 19 nt, Artificial Sequence
  Description of Artificial Sequence: Synthetic oligonucleotide
  Antisense strand to SEQ ID NO: 170416
uaguggccaagauuugucc

SEQ ID NO: 170418 - RNA, 19 nt, Artificial Sequence
  Description of Artificial Sequence: Synthetic oligonucleotide
  Sense strand starting at position 895 of SEQ ID NO: 2195
gggacaaaucuuggccacu

SEQ ID NO: 170419 - RNA, 19 nt, Artificial Sequence
  Description of Artificial Sequence: Synthetic oligonucleotide
  Antisense strand to SEQ ID NO: 170418
aguggccaagauuuguccc

SEQ ID NO: 170420 - RNA, 19 nt, Artificial Sequence
  Description of Artificial Sequence: Synthetic oligonucleotide
  Sense strand starting at position 826 of SEQ ID NO: 2195
uauguaucugauugguuac

SEQ ID NO: 170421 - RNA, 19 nt, Artificial Sequence
  Description of Artificial Sequence: Synthetic oligonucleotide
  Antisense strand to SEQ ID NO: 170420
guaaccaaucagauacaua

SEQ ID NO: 170422 - RNA, 19 nt, Artificial Sequence
  Description of Artificial Sequence: Synthetic oligonucleotide
  Sense strand starting at position 825 of SEQ ID NO: 2195
uuauguaucugauugguua

SEQ ID NO: 170423 - RNA, 19 nt, Artificial Sequence
  Description of Artificial Sequence: Synthetic oligonucleotide
  Antisense strand to SEQ ID NO: 170422
uaaccaaucagauacauaa

SEQ ID NO: 170424 - RNA, 19 nt, Artificial Sequence
  Description of Artificial Sequence: Synthetic oligonucleotide
  Sense strand starting at position 813 of SEQ ID NO: 2195
guccuuguucguuuaugua

SEQ ID NO: 170425 - RNA, 19 nt, Artificial Sequence
  Description of Artificial Sequence: Synthetic oligonucleotide
  Antisense strand to SEQ ID NO: 170424
uacauaaacgaacaaggac

SEQ ID NO: 170426 - RNA, 19 nt, Artificial Sequence
  Description of Artificial Sequence: Synthetic oligonucleotide
  Sense strand starting at position 375 of SEQ ID NO: 2195
augucuguggauugaaaca

SEQ ID NO: 170427 - RNA, 19 nt, Artificial Sequence
  Description of Artificial Sequence: Synthetic oligonucleotide
  Antisense strand to SEQ ID NO: 170426
uguuucaauccacagacau

SEQ ID NO: 170428 - RNA, 19 nt, Artificial Sequence
  Description of Artificial Sequence: Synthetic oligonucleotide
  Sense strand starting at position 370 of SEQ ID NO: 2195
aucaaaugucuguggauug

SEQ ID NO: 170429 - RNA, 19 nt, Artificial Sequence
  Description of Artificial Sequence: Synthetic oligonucleotide
  Antisense strand to SEQ ID NO: 170428
caauccacagacauuugau

SEQ ID NO: 170430 - RNA, 19 nt, Artificial Sequence
  Description of Artificial Sequence: Synthetic oligonucleotide
  Sense strand starting at position 369 of SEQ ID NO: 2195
aaucaaaugucuguggauu

SEQ ID NO: 170431 - RNA, 19 nt, Artificial Sequence
  Description of Artificial Sequence: Synthetic oligonucleotide
  Antisense strand to SEQ ID NO: 170430
aauccacagacauuugauu

SEQ ID NO: 170432 - RNA, 19 nt, Artificial Sequence
  Description of Artificial Sequence: Synthetic oligonucleotide
  Sense strand starting at position 368 of SEQ ID NO: 2195
uaaucaaaugucuguggau

SEQ ID NO: 170433 - RNA, 19 nt, Artificial Sequence
  Description of Artificial Sequence: Synthetic oligonucleotide
  Antisense strand to SEQ ID NO: 170432
auccacagacauuugauua

SEQ ID NO: 170434 - RNA, 19 nt, Artificial Sequence
  Description of Artificial Sequence: Synthetic oligonucleotide
  Sense strand starting at position 367 of SEQ ID NO: 2195
guaaucaaaugucugugga

SEQ ID NO: 170435 - RNA, 19 nt, Artificial Sequence
  Description of Artificial Sequence: Synthetic oligonucleotide
  Antisense strand to SEQ ID NO: 170434
uccacagacauuugauuac

SEQ ID NO: 170436 - RNA, 19 nt, Artificial Sequence
  Description of Artificial Sequence: Synthetic oligonucleotide
  Sense strand starting at position 267 of SEQ ID NO: 2195
cgugguuuggaauauagac

SEQ ID NO: 170437 - RNA, 19 nt, Artificial Sequence
  Description of Artificial Sequence: Synthetic oligonucleotide
  Antisense strand to SEQ ID NO: 170436
gucuauauuccaaaccacg

SEQ ID NO: 170438 - RNA, 19 nt, Artificial Sequence
  Description of Artificial Sequence: Synthetic oligonucleotide
  Sense strand starting at position 210 of SEQ ID NO: 2195
aggauauucuuguauuuag

SEQ ID NO: 170439 - RNA, 19 nt, Artificial Sequence
  Description of Artificial Sequence: Synthetic oligonucleotide
  Antisense strand to SEQ ID NO: 170438
cuaaauacaagaauauccu

SEQ ID NO: 170440 - RNA, 19 nt, Artificial Sequence
  Description of Artificial Sequence: Synthetic oligonucleotide
  Sense strand starting at position 205 of SEQ ID NO: 2195
guaagaggauauucuugua

SEQ ID NO: 170441 - RNA, 19 nt, Artificial Sequence
  Description of Artificial Sequence: Synthetic oligonucleotide
  Antisense strand to SEQ ID NO: 170440
uacaagaauauccucuuac

SEQ ID NO: 170442 - RNA, 19 nt, Artificial Sequence
  Description of Artificial Sequence: Synthetic oligonucleotide
  Sense strand starting at position 199 of SEQ ID NO: 2195
gccuauguaagaggauauu

SEQ ID NO: 170443 - RNA, 19 nt, Artificial Sequence
  Description of Artificial Sequence: Synthetic oligonucleotide
  Antisense strand to SEQ ID NO: 170442
aauauccucuuacauaggc

SEQ ID NO: 170444 - RNA, 19 nt, Artificial Sequence
  Description of Artificial Sequence: Synthetic oligonucleotide
  Sense strand starting at position 144 of SEQ ID NO: 2195
gcuauagaugaguauuguc

SEQ ID NO: 170445 - RNA, 19 nt, Artificial Sequence
  Description of Artificial Sequence: Synthetic oligonucleotide
  Antisense strand to SEQ ID NO: 170444
gacaauacucaucuauagc

SEQ ID NO: 170446 - RNA, 19 nt, Artificial Sequence
  Description of Artificial Sequence: Synthetic oligonucleotide
  Sense strand starting at position 143 of SEQ ID NO: 2195
ggcuauagaugaguauugu

SEQ ID NO: 170447 - RNA, 19 nt, Artificial Sequence
  Description of Artificial Sequence: Synthetic oligonucleotide
  Antisense strand to SEQ ID NO: 170446
acaauacucaucuauagcc

SEQ ID NO: 170448 - RNA, 19 nt, Artificial Sequence
  Description of Artificial Sequence: Synthetic oligonucleotide
  Sense strand starting at position 35 of SEQ ID NO: 2195
gguaauucgaggcaaugug

SEQ ID NO: 170449 - RNA, 19 nt, Artificial Sequence
  Description of Artificial Sequence: Synthetic oligonucleotide
  Antisense strand to SEQ ID NO: 170448
cacauugccucgaauuacc

SEQ ID NO: 170450 - RNA, 19 nt, Artificial Sequence
  Description of Artificial Sequence: Synthetic oligonucleotide
  Sense strand starting at position 4 of SEQ ID NO: 2195
uguucuguuccagauuaua

SEQ ID NO: 170451 - RNA, 19 nt, Artificial Sequence
  Description of Artificial Sequence: Synthetic oligonucleotide
  Antisense strand to SEQ ID NO: 170450
uauaaucuggaacagaaca

SEQ ID NO: 170452 - RNA, 19 nt, Artificial Sequence
  Description of Artificial Sequence: Synthetic oligonucleotide
  Sense strand starting at position 3967 of SEQ ID NO: 2196
auaccuucuuggucucauu

SEQ ID NO: 170453 - RNA, 19 nt, Artificial Sequence
  Description of Artificial Sequence: Synthetic oligonucleotide
  Antisense strand to SEQ ID NO: 170452
aaugagaccaagaagguau

SEQ ID NO: 170454 - RNA, 19 nt, Artificial Sequence
  Description of Artificial Sequence: Synthetic oligonucleotide
  Sense strand starting at position 3778 of SEQ ID NO: 2196
auuagucacccuugggaga

SEQ ID NO: 170455 - RNA, 19 nt, Artificial Sequence
  Description of Artificial Sequence: Synthetic oligonucleotide
  Antisense strand to SEQ ID NO: 170454
ucucccaagggugacuaau

SEQ ID NO: 170456 - RNA, 19 nt, Artificial Sequence
  Description of Artificial Sequence: Synthetic oligonucleotide
  Sense strand starting at position 3771 of SEQ ID NO: 2196
ggaauaaauuagucacccu

SEQ ID NO: 170457 - RNA, 19 nt, Artificial Sequence
  Description of Artificial Sequence: Synthetic oligonucleotide
  Antisense strand to SEQ ID NO: 170456
agggugacuaauuuauucc

SEQ ID NO: 170458 - RNA, 19 nt, Artificial Sequence
  Description of Artificial Sequence: Synthetic oligonucleotide
  Sense strand starting at position 3660 of SEQ ID NO: 2196
ggauuacuguucccuguag

SEQ ID NO: 170459 - RNA, 19 nt, Artificial Sequence
  Description of Artificial Sequence: Synthetic oligonucleotide
  Antisense strand to SEQ ID NO: 170458
cuacagggaacaguaaucc

SEQ ID NO: 170460 - RNA, 19 nt, Artificial Sequence
  Description of Artificial Sequence: Synthetic oligonucleotide
  Sense strand starting at position 3624 of SEQ ID NO: 2196
cuaucacuuuaguccaagu

SEQ ID NO: 170461 - RNA, 19 nt, Artificial Sequence
  Description of Artificial Sequence: Synthetic oligonucleotide
  Antisense strand to SEQ ID NO: 170460
acuuggacuaaagugauag

SEQ ID NO: 170462 - RNA, 19 nt, Artificial Sequence
  Description of Artificial Sequence: Synthetic oligonucleotide
  Sense strand starting at position 3561 of SEQ ID NO: 2196
ucagcaagaucuuuaggcu

SEQ ID NO: 170463 - RNA, 19 nt, Artificial Sequence
  Description of Artificial Sequence: Synthetic oligonucleotide
  Antisense strand to SEQ ID NO: 170462
agccuaaagaucuugcuga

SEQ ID NO: 170464 - RNA, 19 nt, Artificial Sequence
  Description of Artificial Sequence: Synthetic oligonucleotide
  Sense strand starting at position 3552 of SEQ ID NO: 2196
cugacuccaucagcaagau

SEQ ID NO: 170465 - RNA, 19 nt, Artificial Sequence
  Description of Artificial Sequence: Synthetic oligonucleotide
  Antisense strand to SEQ ID NO: 170464
aucuugcugauggagucag

SEQ ID NO: 170466 - RNA, 19 nt, Artificial Sequence
  Description of Artificial Sequence: Synthetic oligonucleotide
  Sense strand starting at position 3344 of SEQ ID NO: 2196
ccaaauaccugguugacau

SEQ ID NO: 170467 - RNA, 19 nt, Artificial Sequence
  Description of Artificial Sequence: Synthetic oligonucleotide
  Antisense strand to SEQ ID NO: 170466
augucaaccagguauuugg

SEQ ID NO: 170468 - RNA, 19 nt, Artificial Sequence
  Description of Artificial Sequence: Synthetic oligonucleotide
  Sense strand starting at position 3312 of SEQ ID NO: 2196
cuggaaugcuccucagaac

SEQ ID NO: 170469 - RNA, 19 nt, Artificial Sequence
  Description of Artificial Sequence: Synthetic oligonucleotide
  Antisense strand to SEQ ID NO: 170468
guucugaggagcauuccag

SEQ ID NO: 170470 - RNA, 19 nt, Artificial Sequence
  Description of Artificial Sequence: Synthetic oligonucleotide
  Sense strand starting at position 3239 of SEQ ID NO: 2196
ucaguuaucucacccagac

SEQ ID NO: 170471 - RNA, 19 nt, Artificial Sequence
  Description of Artificial Sequence: Synthetic oligonucleotide
  Antisense strand to SEQ ID NO: 170470
gucugggugagauaacuga

SEQ ID NO: 170472 - RNA, 19 nt, Artificial Sequence
  Description of Artificial Sequence: Synthetic oligonucleotide
  Sense strand starting at position 3210 of SEQ ID NO: 2196
uucuuagugcucuaucuac

SEQ ID NO: 170473 - RNA, 19 nt, Artificial Sequence
  Description of Artificial Sequence: Synthetic oligonucleotide
  Antisense strand to SEQ ID NO: 170472
guagauagagcacuaagaa

SEQ ID NO: 170474 - RNA, 19 nt, Artificial Sequence
  Description of Artificial Sequence: Synthetic oligonucleotide
  Sense strand starting at position 3082 of SEQ ID NO: 2196
acagaauucucuccagggu

SEQ ID NO: 170475 - RNA, 19 nt, Artificial Sequence
  Description of Artificial Sequence: Synthetic oligonucleotide
  Antisense strand to SEQ ID NO: 170474
acccuggagagaauucugu

SEQ ID NO: 170476 - RNA, 19 nt, Artificial Sequence
  Description of Artificial Sequence: Synthetic oligonucleotide
  Sense strand starting at position 3069 of SEQ ID NO: 2196
ggaacuauuuagcacagaa

SEQ ID NO: 170477 - RNA, 19 nt, Artificial Sequence
  Description of Artificial Sequence: Synthetic oligonucleotide
  Antisense strand to SEQ ID NO: 170476
uucugugcuaaauaguucc

SEQ ID NO: 170478 - RNA, 19 nt, Artificial Sequence
  Description of Artificial Sequence: Synthetic oligonucleotide
  Sense strand starting at position 3058 of SEQ ID NO: 2196
gugugacuuagggaacuau

SEQ ID NO: 170479 - RNA, 19 nt, Artificial Sequence
  Description of Artificial Sequence: Synthetic oligonucleotide
  Antisense strand to SEQ ID NO: 170478
auaguucccuaagucacac

SEQ ID NO: 170480 - RNA, 19 nt, Artificial Sequence
  Description of Artificial Sequence: Synthetic oligonucleotide
  Sense strand starting at position 3049 of SEQ ID NO: 2196
uccuccaaugugugacuua

SEQ ID NO: 170481 - RNA, 19 nt, Artificial Sequence
  Description of Artificial Sequence: Synthetic oligonucleotide
  Antisense strand to SEQ ID NO: 170480
uaagucacacauuggagga

SEQ ID NO: 170482 - RNA, 19 nt, Artificial Sequence
  Description of Artificial Sequence: Synthetic oligonucleotide
  Sense strand starting at position 3045 of SEQ ID NO: 2196
auaguccuccaauguguga

SEQ ID NO: 170483 - RNA, 19 nt, Artificial Sequence
  Description of Artificial Sequence: Synthetic oligonucleotide
  Antisense strand to SEQ ID NO: 170482
ucacacauuggaggacuau

SEQ ID NO: 170484 - RNA, 19 nt, Artificial Sequence
  Description of Artificial Sequence: Synthetic oligonucleotide
  Sense strand starting at position 2929 of SEQ ID NO: 2196
augggcagcucaguuagaa

SEQ ID NO: 170485 - RNA, 19 nt, Artificial Sequence
  Description of Artificial Sequence: Synthetic oligonucleotide
  Antisense strand to SEQ ID NO: 170484
uucuaacugagcugcccau

SEQ ID NO: 170486 - RNA, 19 nt, Artificial Sequence
  Description of Artificial Sequence: Synthetic oligonucleotide
  Sense strand starting at position 2764 of SEQ ID NO: 2196
cuuugagaguugucuaguu

SEQ ID NO: 170487 - RNA, 19 nt, Artificial Sequence
  Description of Artificial Sequence: Synthetic oligonucleotide
  Antisense strand to SEQ ID NO: 170486
aacuagacaacucucaaag

SEQ ID NO: 170488 - RNA, 19 nt, Artificial Sequence
  Description of Artificial Sequence: Synthetic oligonucleotide
  Sense strand starting at position 2735 of SEQ ID NO: 2196
agaaucauaucaucgccaa

SEQ ID NO: 170489 - RNA, 19 nt, Artificial Sequence
  Description of Artificial Sequence: Synthetic oligonucleotide
  Antisense strand to SEQ ID NO: 170488
uuggcgaugauaugauucu

SEQ ID NO: 170490 - RNA, 19 nt, Artificial Sequence
  Description of Artificial Sequence: Synthetic oligonucleotide
  Sense strand starting at position 2721 of SEQ ID NO: 2196
gugacagacugcccagaau

SEQ ID NO: 170491 - RNA, 19 nt, Artificial Sequence
  Description of Artificial Sequence: Synthetic oligonucleotide
  Antisense strand to SEQ ID NO: 170490
auucugggcagucugucac

SEQ ID NO: 170492 - RNA, 19 nt, Artificial Sequence
  Description of Artificial Sequence: Synthetic oligonucleotide
  Sense strand starting at position 2578 of SEQ ID NO: 2196
guccguacuccugaacaga

SEQ ID NO: 170493 - RNA, 19 nt, Artificial Sequence
  Description of Artificial Sequence: Synthetic oligonucleotide
  Antisense strand to SEQ ID NO: 170492
ucuguucaggaguacggac

SEQ ID NO: 170494 - RNA, 19 nt, Artificial Sequence
  Description of Artificial Sequence: Synthetic oligonucleotide
  Sense strand starting at position 2304 of SEQ ID NO: 2196
ugaggaauguaacaaggaa

SEQ ID NO: 170495 - RNA, 19 nt, Artificial Sequence
  Description of Artificial Sequence: Synthetic oligonucleotide
  Antisense strand to SEQ ID NO: 170494
uuccuuguuacauuccuca

SEQ ID NO: 170496 - RNA, 19 nt, Artificial Sequence
  Description of Artificial Sequence: Synthetic oligonucleotide
  Sense strand starting at position 2299 of SEQ ID NO: 2196
cccagugaggaauguaaca

SEQ ID NO: 170497 - RNA, 19 nt, Artificial Sequence
  Description of Artificial Sequence: Synthetic oligonucleotide
  Antisense strand to SEQ ID NO: 170496
uguuacauuccucacuggg

SEQ ID NO: 170498 - RNA, 19 nt, Artificial Sequence
  Description of Artificial Sequence: Synthetic oligonucleotide
  Sense strand starting at position 2268 of SEQ ID NO: 2196
ucuuuagggaacgguugau

SEQ ID NO: 170499 - RNA, 19 nt, Artificial Sequence
  Description of Artificial Sequence: Synthetic oligonucleotide
  Antisense strand to SEQ ID NO: 170498
aucaaccguucccuaaaga

SEQ ID NO: 170500 - RNA, 19 nt, Artificial Sequence
  Description of Artificial Sequence: Synthetic oligonucleotide
  Sense strand starting at position 2260 of SEQ ID NO: 2196
guugcuggucuuuagggaa

SEQ ID NO: 170501 - RNA, 19 nt, Artificial Sequence
  Description of Artificial Sequence: Synthetic oligonucleotide
  Antisense strand to SEQ ID NO: 170500
uucccuaaagaccagcaac

SEQ ID NO: 170502 - RNA, 19 nt, Artificial Sequence
  Description of Artificial Sequence: Synthetic oligonucleotide
  Sense strand starting at position 2176 of SEQ ID NO: 2196
uugaauugucuguaccuac

SEQ ID NO: 170503 - RNA, 19 nt, Artificial Sequence
  Description of Artificial Sequence: Synthetic oligonucleotide
  Antisense strand to SEQ ID NO: 170502
guagguacagacaauucaa

SEQ ID NO: 170504 - RNA, 19 nt, Artificial Sequence
  Description of Artificial Sequence: Synthetic oligonucleotide
  Sense strand starting at position 2175 of SEQ ID NO: 2196
auugaauugucuguaccua

SEQ ID NO: 170505 - RNA, 19 nt, Artificial Sequence
  Description of Artificial Sequence: Synthetic oligonucleotide
  Antisense strand to SEQ ID NO: 170504
uagguacagacaauucaau

SEQ ID NO: 170506 - RNA, 19 nt, Artificial Sequence
  Description of Artificial Sequence: Synthetic oligonucleotide
  Sense strand starting at position 2134 of SEQ ID NO: 2196
guggaaugucacuacuacu

SEQ ID NO: 170507 - RNA, 19 nt, Artificial Sequence
  Description of Artificial Sequence: Synthetic oligonucleotide
  Antisense strand to SEQ ID NO: 170506
aguaguagugacauuccac

SEQ ID NO: 170508 - RNA, 19 nt, Artificial Sequence
  Description of Artificial Sequence: Synthetic oligonucleotide
  Sense strand starting at position 2133 of SEQ ID NO: 2196
gguggaaugucacuacuac

SEQ ID NO: 170509 - RNA, 19 nt, Artificial Sequence
  Description of Artificial Sequence: Synthetic oligonucleotide
  Antisense strand to SEQ ID NO: 170508
guaguagugacauuccacc

SEQ ID NO: 170510 - RNA, 19 nt, Artificial Sequence
  Description of Artificial Sequence: Synthetic oligonucleotide
  Sense strand starting at position 2079 of SEQ ID NO: 2196
ugaagugguccuggguuaa

SEQ ID NO: 170511 - RNA, 19 nt, Artificial Sequence
  Description of Artificial Sequence: Synthetic oligonucleotide
  Antisense strand to SEQ ID NO: 170510
uuaacccaggaccacuuca

SEQ ID NO: 170512 - RNA, 19 nt, Artificial Sequence
  Description of Artificial Sequence: Synthetic oligonucleotide
  Sense strand starting at position 2043 of SEQ ID NO: 2196
gguucugagaauugggcau

SEQ ID NO: 170513 - RNA, 19 nt, Artificial Sequence
  Description of Artificial Sequence: Synthetic oligonucleotide
  Antisense strand to SEQ ID NO: 170512
augcccaauucucagaacc

SEQ ID NO: 170514 - RNA, 19 nt, Artificial Sequence
  Description of Artificial Sequence: Synthetic oligonucleotide
  Sense strand starting at position 2014 of SEQ ID NO: 2196
cccuuuguucucuaaagga

SEQ ID NO: 170515 - RNA, 19 nt, Artificial Sequence
  Description of Artificial Sequence: Synthetic oligonucleotide
  Antisense strand to SEQ ID NO: 170514
uccuuuagagaacaaaggg

SEQ ID NO: 170516 - RNA, 19 nt, Artificial Sequence
  Description of Artificial Sequence: Synthetic oligonucleotide
  Sense strand starting at position 2012 of SEQ ID NO: 2196
ggcccuuuguucucuaaag

SEQ ID NO: 170517 - RNA, 19 nt, Artificial Sequence
  Description of Artificial Sequence: Synthetic oligonucleotide
  Antisense strand to SEQ ID NO: 170516
cuuuagagaacaaagggcc

SEQ ID NO: 170518 - RNA, 19 nt, Artificial Sequence
  Description of Artificial Sequence: Synthetic oligonucleotide
  Sense strand starting at position 1724 of SEQ ID NO: 2196
agaguagacuaucuccuaa

SEQ ID NO: 170519 - RNA, 19 nt, Artificial Sequence
  Description of Artificial Sequence: Synthetic oligonucleotide
  Antisense strand to SEQ ID NO: 170518
uuaggagauagucuacucu

SEQ ID NO: 170520 - RNA, 19 nt, Artificial Sequence
  Description of Artificial Sequence: Synthetic oligonucleotide
  Sense strand starting at position 1680 of SEQ ID NO: 2196
ugaucagagcauggucuuu

SEQ ID NO: 170521 - RNA, 19 nt, Artificial Sequence
  Description of Artificial Sequence: Synthetic oligonucleotide
  Antisense strand to SEQ ID NO: 170520
aaagaccaugcucugauca

SEQ ID NO: 170522 - RNA, 19 nt, Artificial Sequence
  Description of Artificial Sequence: Synthetic oligonucleotide
  Sense strand starting at position 1669 of SEQ ID NO: 2196
ucuucucugguugaucaga

SEQ ID NO: 170523 - RNA, 19 nt, Artificial Sequence
  Description of Artificial Sequence: Synthetic oligonucleotide
  Antisense strand to SEQ ID NO: 170522
ucugaucaaccagagaaga

SEQ ID NO: 170524 - RNA, 19 nt, Artificial Sequence
  Description of Artificial Sequence: Synthetic oligonucleotide
  Sense strand starting at position 1664 of SEQ ID NO: 2196
uaguaucuucucugguuga

SEQ ID NO: 170525 - RNA, 19 nt, Artificial Sequence
  Description of Artificial Sequence: Synthetic oligonucleotide
  Antisense strand to SEQ ID NO: 170524
ucaaccagagaagauacua

SEQ ID NO: 170526 - RNA, 19 nt, Artificial Sequence
  Description of Artificial Sequence: Synthetic oligonucleotide
  Sense strand starting at position 1662 of SEQ ID NO: 2196
gauaguaucuucucugguu

SEQ ID NO: 170527 - RNA, 19 nt, Artificial Sequence
  Description of Artificial Sequence: Synthetic oligonucleotide
  Antisense strand to SEQ ID NO: 170526
aaccagagaagauacuauc

SEQ ID NO: 170528 - RNA, 19 nt, Artificial Sequence
  Description of Artificial Sequence: Synthetic oligonucleotide
  Sense strand starting at position 156 of SEQ ID NO: 2196
ccaacuugguuugcaaagu

SEQ ID NO: 170529 - RNA, 19 nt, Artificial Sequence
  Description of Artificial Sequence: Synthetic oligonucleotide
  Antisense strand to SEQ ID NO: 170528
acuuugcaaaccaaguugg

SEQ ID NO: 170530 - RNA, 19 nt, Artificial Sequence
  Description of Artificial Sequence: Synthetic oligonucleotide
  Sense strand starting at position 65 of SEQ ID NO: 2196
gagggauauugaguccauc

SEQ ID NO: 170531 - RNA, 19 nt, Artificial Sequence
  Description of Artificial Sequence: Synthetic oligonucleotide
  Antisense strand to SEQ ID NO: 170530
gauggacucaauaucccuc

SEQ ID NO: 170532 - RNA, 19 nt, Artificial Sequence
  Description of Artificial Sequence: Synthetic oligonucleotide
  Sense strand starting at position 3917 of SEQ ID NO: 2197
gaacuccucugggagaagu

SEQ ID NO: 170533 - RNA, 19 nt, Artificial Sequence
  Description of Artificial Sequence: Synthetic oligonucleotide
  Antisense strand to SEQ ID NO: 170532
acuucucccagaggaguuc

SEQ ID NO: 170534 - RNA, 19 nt, Artificial Sequence
  Description of Artificial Sequence: Synthetic oligonucleotide
  Sense strand starting at position 3891 of SEQ ID NO: 2197
gugucagugcgugaauaga

SEQ ID NO: 170535 - RNA, 19 nt, Artificial Sequence
  Description of Artificial Sequence: Synthetic oligonucleotide
  Antisense strand to SEQ ID NO: 170534
ucuauucacgcacugacac

SEQ ID NO: 170536 - RNA, 19 nt, Artificial Sequence
  Description of Artificial Sequence: Synthetic oligonucleotide
  Sense strand starting at position 3803 of SEQ ID NO: 2197
ucuauauaugagggagucu

SEQ ID NO: 170537 - RNA, 19 nt, Artificial Sequence
  Description of Artificial Sequence: Synthetic oligonucleotide
  Antisense strand to SEQ ID NO: 170536
agacucccucauauauaga

SEQ ID NO: 170538 - RNA, 19 nt, Artificial Sequence
  Description of Artificial Sequence: Synthetic oligonucleotide
  Sense strand starting at position 3799 of SEQ ID NO: 2197
uguaucuauauaugaggga

SEQ ID NO: 170539 - RNA, 19 nt, Artificial Sequence
  Description of Artificial Sequence: Synthetic oligonucleotide
  Antisense strand to SEQ ID NO: 170538
ucccucauauauagauaca

SEQ ID NO: 170540 - RNA, 19 nt, Artificial Sequence
  Description of Artificial Sequence: Synthetic oligonucleotide
  Sense strand starting at position 3784 of SEQ ID NO: 2197
aggauuguguuugugugua

SEQ ID NO: 170541 - RNA, 19 nt, Artificial Sequence
  Description of Artificial Sequence: Synthetic oligonucleotide
  Antisense strand to SEQ ID NO: 170540
uacacacaaacacaauccu

SEQ ID NO: 170542 - RNA, 19 nt, Artificial Sequence
  Description of Artificial Sequence: Synthetic oligonucleotide
  Sense strand starting at position 3777 of SEQ ID NO: 2197
agagaucaggauuguguuu

SEQ ID NO: 170543 - RNA, 19 nt, Artificial Sequence
  Description of Artificial Sequence: Synthetic oligonucleotide
  Antisense strand to SEQ ID NO: 170542
aaacacaauccugaucucu

SEQ ID NO: 170544 - RNA, 19 nt, Artificial Sequence
  Description of Artificial Sequence: Synthetic oligonucleotide
  Sense strand starting at position 3754 of SEQ ID NO: 2197
aacuuuccugcucgagaug

SEQ ID NO: 170545 - RNA, 19 nt, Artificial Sequence
  Description of Artificial Sequence: Synthetic oligonucleotide
  Antisense strand to SEQ ID NO: 170544
caucucgagcaggaaaguu

SEQ ID NO: 170546 - RNA, 19 nt, Artificial Sequence
  Description of Artificial Sequence: Synthetic oligonucleotide
  Sense strand starting at position 3740 of SEQ ID NO: 2197
uugggaagcuuugcaacuu

SEQ ID NO: 170547 - RNA, 19 nt, Artificial Sequence
  Description of Artificial Sequence: Synthetic oligonucleotide
  Antisense strand to SEQ ID NO: 170546
aaguugcaaagcuucccaa

SEQ ID NO: 170548 - RNA, 19 nt, Artificial Sequence
  Description of Artificial Sequence: Synthetic oligonucleotide
  Sense strand starting at position 3715 of SEQ ID NO: 2197
cgagguuccagaggaugaa

SEQ ID NO: 170549 - RNA, 19 nt, Artificial Sequence
  Description of Artificial Sequence: Synthetic oligonucleotide
  Antisense strand to SEQ ID NO: 170548
uucauccucuggaaccucg

SEQ ID NO: 170550 - RNA, 19 nt, Artificial Sequence
  Description of Artificial Sequence: Synthetic oligonucleotide
  Sense strand starting at position 3579 of SEQ ID NO: 2197
guggguaucccagaaggca

SEQ ID NO: 170551 - RNA, 19 nt, Artificial Sequence
  Description of Artificial Sequence: Synthetic oligonucleotide
  Antisense strand to SEQ ID NO: 170550
ugccuucugggauacccac

SEQ ID NO: 170552 - RNA, 19 nt, Artificial Sequence
  Description of Artificial Sequence: Synthetic oligonucleotide
  Sense strand starting at position 3568 of SEQ ID NO: 2197
uaugguuccaaguggguau

SEQ ID NO: 170553 - RNA, 19 nt, Artificial Sequence
  Description of Artificial Sequence: Synthetic oligonucleotide
  Antisense strand to SEQ ID NO: 170552
auacccacuuggaaccaua

SEQ ID NO: 170554 - RNA, 19 nt, Artificial Sequence
  Description of Artificial Sequence: Synthetic oligonucleotide
  Sense strand starting at position 3561 of SEQ ID NO: 2197
uggaauauaugguuccaag

SEQ ID NO: 170555 - RNA, 19 nt, Artificial Sequence
  Description of Artificial Sequence: Synthetic oligonucleotide
  Antisense strand to SEQ ID NO: 170554
cuuggaaccauauauucca

SEQ ID NO: 170556 - RNA, 19 nt, Artificial Sequence
  Description of Artificial Sequence: Synthetic oligonucleotide
  Sense strand starting at position 3490 of SEQ ID NO: 2197
aguaguaaaugagaagauu

SEQ ID NO: 170557 - RNA, 19 nt, Artificial Sequence
  Description of Artificial Sequence: Synthetic oligonucleotide
  Antisense strand to SEQ ID NO: 170556
aaucuucucauuuacuacu

SEQ ID NO: 170558 - RNA, 19 nt, Artificial Sequence
  Description of Artificial Sequence: Synthetic oligonucleotide
  Sense strand starting at position 3368 of SEQ ID NO: 2197
gugugauccuagcuacauc

SEQ ID NO: 170559 - RNA, 19 nt, Artificial Sequence
  Description of Artificial Sequence: Synthetic oligonucleotide
  Antisense strand to SEQ ID NO: 170558
gauguagcuaggaucacac

SEQ ID NO: 170560 - RNA, 19 nt, Artificial Sequence
  Description of Artificial Sequence: Synthetic oligonucleotide
  Sense strand starting at position 3359 of SEQ ID NO: 2197
ugccuaacugugugauccu

SEQ ID NO: 170561 - RNA, 19 nt, Artificial Sequence
  Description of Artificial Sequence: Synthetic oligonucleotide
  Antisense strand to SEQ ID NO: 170560
aggaucacacaguuaggca

SEQ ID NO: 170562 - RNA, 19 nt, Artificial Sequence
  Description of Artificial Sequence: Synthetic oligonucleotide
  Sense strand starting at position 3341 of SEQ ID NO: 2197
uggauuuaguccugacucu

SEQ ID NO: 170563 - RNA, 19 nt, Artificial Sequence
  Description of Artificial Sequence: Synthetic oligonucleotide
  Antisense strand to SEQ ID NO: 170562
agagucaggacuaaaucca

SEQ ID NO: 170564 - RNA, 19 nt, Artificial Sequence
  Description of Artificial Sequence: Synthetic oligonucleotide
  Sense strand starting at position 3217 of SEQ ID NO: 2197
gaggcauggagagguuaaa

SEQ ID NO: 170565 - RNA, 19 nt, Artificial Sequence
  Description of Artificial Sequence: Synthetic oligonucleotide
  Antisense strand to SEQ ID NO: 170564
uuuaaccucuccaugccuc

SEQ ID NO: 170566 - RNA, 19 nt, Artificial Sequence
  Description of Artificial Sequence: Synthetic oligonucleotide
  Sense strand starting at position 3163 of SEQ ID NO: 2197
acagcagcucuaugaaaga

SEQ ID NO: 170567 - RNA, 19 nt, Artificial Sequence
  Description of Artificial Sequence: Synthetic oligonucleotide
  Antisense strand to SEQ ID NO: 170566
ucuuucauagagcugcugu

SEQ ID NO: 170568 - RNA, 19 nt, Artificial Sequence
  Description of Artificial Sequence: Synthetic oligonucleotide
  Sense strand starting at position 3137 of SEQ ID NO: 2197
cacgaauauuggguucuuu

SEQ ID NO: 170569 - RNA, 19 nt, Artificial Sequence
  Description of Artificial Sequence: Synthetic oligonucleotide
  Antisense strand to SEQ ID NO: 170568
aaagaacccaauauucgug

SEQ ID NO: 170570 - RNA, 19 nt, Artificial Sequence
  Description of Artificial Sequence: Synthetic oligonucleotide
  Sense strand starting at position 3091 of SEQ ID NO: 2197
acagcagacuuauuacaga

SEQ ID NO: 170571 - RNA, 19 nt, Artificial Sequence
  Description of Artificial Sequence: Synthetic oligonucleotide
  Antisense strand to SEQ ID NO: 170570
ucuguaauaagucugcugu

SEQ ID NO: 170572 - RNA, 19 nt, Artificial Sequence
  Description of Artificial Sequence: Synthetic oligonucleotide
  Sense strand starting at position 2999 of SEQ ID NO: 2197
gaggaaugcuaaggagaac

SEQ ID NO: 170573 - RNA, 19 nt, Artificial Sequence
  Description of Artificial Sequence: Synthetic oligonucleotide
  Antisense strand to SEQ ID NO: 170572
guucuccuuagcauuccuc

SEQ ID NO: 170574 - RNA, 19 nt, Artificial Sequence
  Description of Artificial Sequence: Synthetic oligonucleotide
  Sense strand starting at position 2861 of SEQ ID NO: 2197
acauguuccuguguuacca

SEQ ID NO: 170575 - RNA, 19 nt, Artificial Sequence
  Description of Artificial Sequence: Synthetic oligonucleotide
  Antisense strand to SEQ ID NO: 170574
ugguaacacaggaacaugu

SEQ ID NO: 170576 - RNA, 19 nt, Artificial Sequence
  Description of Artificial Sequence: Synthetic oligonucleotide
  Sense strand starting at position 2805 of SEQ ID NO: 2197
guguguaacugacuagcau

SEQ ID NO: 170577 - RNA, 19 nt, Artificial Sequence
  Description of Artificial Sequence: Synthetic oligonucleotide
  Antisense strand to SEQ ID NO: 170576
augcuagucaguuacacac

SEQ ID NO: 170578 - RNA, 19 nt, Artificial Sequence
  Description of Artificial Sequence: Synthetic oligonucleotide
  Sense strand starting at position 2801 of SEQ ID NO: 2197
gacuguguguaacugacua

SEQ ID NO: 170579 - RNA, 19 nt, Artificial Sequence
  Description of Artificial Sequence: Synthetic oligonucleotide
  Antisense strand to SEQ ID NO: 170578
uagucaguuacacacaguc

SEQ ID NO: 170580 - RNA, 19 nt, Artificial Sequence
  Description of Artificial Sequence: Synthetic oligonucleotide
  Sense strand starting at position 2702 of SEQ ID NO: 2197
ggguaugagcuccaccuga

SEQ ID NO: 170581 - RNA, 19 nt, Artificial Sequence
  Description of Artificial Sequence: Synthetic oligonucleotide
  Antisense strand to SEQ ID NO: 170580
ucagguggagcucauaccc

SEQ ID NO: 170582 - RNA, 19 nt, Artificial Sequence
  Description of Artificial Sequence: Synthetic oligonucleotide
  Sense strand starting at position 2689 of SEQ ID NO: 2197
cugggauggguuuggguau

SEQ ID NO: 170583 - RNA, 19 nt, Artificial Sequence
  Description of Artificial Sequence: Synthetic oligonucleotide
  Antisense strand to SEQ ID NO: 170582
auacccaaacccaucccag

SEQ ID NO: 170584 - RNA, 19 nt, Artificial Sequence
  Description of Artificial Sequence: Synthetic oligonucleotide
  Sense strand starting at position 2601 of SEQ ID NO: 2197
caggcuuccugggcugaaa

SEQ ID NO: 170585 - RNA, 19 nt, Artificial Sequence
  Description of Artificial Sequence: Synthetic oligonucleotide
  Antisense strand to SEQ ID NO: 170584
uuucagcccaggaagccug

SEQ ID NO: 170586 - RNA, 19 nt, Artificial Sequence
  Description of Artificial Sequence: Synthetic oligonucleotide
  Sense strand starting at position 2544 of SEQ ID NO: 2197
acagucuuuccugaauggu

SEQ ID NO: 170587 - RNA, 19 nt, Artificial Sequence
  Description of Artificial Sequence: Synthetic oligonucleotide
  Antisense strand to SEQ ID NO: 170586
accauucaggaaagacugu

SEQ ID NO: 170588 - RNA, 19 nt, Artificial Sequence
  Description of Artificial Sequence: Synthetic oligonucleotide
  Sense strand starting at position 2511 of SEQ ID NO: 2197
gugucagugcguguguuua

SEQ ID NO: 170589 - RNA, 19 nt, Artificial Sequence
  Description of Artificial Sequence: Synthetic oligonucleotide
  Antisense strand to SEQ ID NO: 170588
uaaacacacgcacugacac

SEQ ID NO: 170590 - RNA, 19 nt, Artificial Sequence
  Description of Artificial Sequence: Synthetic oligonucleotide
  Sense strand starting at position 2463 of SEQ ID NO: 2197
agaaguuugugagcugaag

SEQ ID NO: 170591 - RNA, 19 nt, Artificial Sequence
  Description of Artificial Sequence: Synthetic oligonucleotide
  Antisense strand to SEQ ID NO: 170590
cuucagcucacaaacuucu

SEQ ID NO: 170592 - RNA, 19 nt, Artificial Sequence
  Description of Artificial Sequence: Synthetic oligonucleotide
  Sense strand starting at position 2317 of SEQ ID NO: 2197
cuacauuugccuggcucua

SEQ ID NO: 170593 - RNA, 19 nt, Artificial Sequence
  Description of Artificial Sequence: Synthetic oligonucleotide
  Antisense strand to SEQ ID NO: 170592
uagagccaggcaaauguag

SEQ ID NO: 170594 - RNA, 19 nt, Artificial Sequence
  Description of Artificial Sequence: Synthetic oligonucleotide
  Sense strand starting at position 2274 of SEQ ID NO: 2197
gcugcagugaaacagaaau

SEQ ID NO: 170595 - RNA, 19 nt, Artificial Sequence
  Description of Artificial Sequence: Synthetic oligonucleotide
  Antisense strand to SEQ ID NO: 170594
auuucuguuucacugcagc

SEQ ID NO: 170596 - RNA, 19 nt, Artificial Sequence
  Description of Artificial Sequence: Synthetic oligonucleotide
  Sense strand starting at position 1751 of SEQ ID NO: 2197
gcccgagacuacucaccau

SEQ ID NO: 170597 - RNA, 19 nt, Artificial Sequence
  Description of Artificial Sequence: Synthetic oligonucleotide
  Antisense strand to SEQ ID NO: 170596
auggugaguagucucgggc

SEQ ID NO: 170598 - RNA, 19 nt, Artificial Sequence
  Description of Artificial Sequence: Synthetic oligonucleotide
  Sense strand starting at position 1559 of SEQ ID NO: 2197
gcccgagguuuauuuccga

SEQ ID NO: 170599 - RNA, 19 nt, Artificial Sequence
  Description of Artificial Sequence: Synthetic oligonucleotide
  Antisense strand to SEQ ID NO: 170598
ucggaaauaaaccucgggc

SEQ ID NO: 170600 - RNA, 19 nt, Artificial Sequence
  Description of Artificial Sequence: Synthetic oligonucleotide
  Sense strand starting at position 833 of SEQ ID NO: 2197
ggagucaccagugagaugu

SEQ ID NO: 170601 - RNA, 19 nt, Artificial Sequence
  Description of Artificial Sequence: Synthetic oligonucleotide
  Antisense strand to SEQ ID NO: 170600
acaucucacuggugacucc

SEQ ID NO: 170602 - RNA, 19 nt, Artificial Sequence
  Description of Artificial Sequence: Synthetic oligonucleotide
  Sense strand starting at position 832 of SEQ ID NO: 2197
cggagucaccagugagaug

SEQ ID NO: 170603 - RNA, 19 nt, Artificial Sequence
  Description of Artificial Sequence: Synthetic oligonucleotide
  Antisense strand to SEQ ID NO: 170602
caucucacuggugacuccg

SEQ ID NO: 170604 - RNA, 19 nt, Artificial Sequence
  Description of Artificial Sequence: Synthetic oligonucleotide
  Sense strand starting at position 821 of SEQ ID NO: 2197
ggacacauccucggaguca

SEQ ID NO: 170605 - RNA, 19 nt, Artificial Sequence
  Description of Artificial Sequence: Synthetic oligonucleotide
  Antisense strand to SEQ ID NO: 170604
ugacuccgaggaugugucc

SEQ ID NO: 170606 - RNA, 19 nt, Artificial Sequence
  Description of Artificial Sequence: Synthetic oligonucleotide
  Sense strand starting at position 368 of SEQ ID NO: 2197
uaccuuucuugaucacgga

SEQ ID NO: 170607 - RNA, 19 nt, Artificial Sequence
  Description of Artificial Sequence: Synthetic oligonucleotide
  Antisense strand to SEQ ID NO: 170606
uccgugaucaagaaaggua

SEQ ID NO: 170608 - RNA, 19 nt, Artificial Sequence
  Description of Artificial Sequence: Synthetic oligonucleotide
  Sense strand starting at position 341 of SEQ ID NO: 2197
cgggcucugcccugacaga

SEQ ID NO: 170609 - RNA, 19 nt, Artificial Sequence
  Description of Artificial Sequence: Synthetic oligonucleotide
  Antisense strand to SEQ ID NO: 170608
ucugucagggcagagcccg

SEQ ID NO: 170610 - RNA, 19 nt, Artificial Sequence
  Description of Artificial Sequence: Synthetic oligonucleotide
  Sense strand starting at position 34 of SEQ ID NO: 2197
auucccaucucuuagggaa

SEQ ID NO: 170611 - RNA, 19 nt, Artificial Sequence
  Description of Artificial Sequence: Synthetic oligonucleotide
  Antisense strand to SEQ ID NO: 170610
uucccuaagagaugggaau

SEQ ID NO: 170612 - RNA, 19 nt, Artificial Sequence
  Description of Artificial Sequence: Synthetic oligonucleotide
  Sense strand starting at position 50 of SEQ ID NO: 2198
acaauaacauacguugaga

SEQ ID NO: 170613 - RNA, 19 nt, Artificial Sequence
  Description of Artificial Sequence: Synthetic oligonucleotide
  Antisense strand to SEQ ID NO: 170612
ucucaacguauguuauugu

SEQ ID NO: 170614 - RNA, 19 nt, Artificial Sequence
  Description of Artificial Sequence: Synthetic oligonucleotide
  Sense strand starting at position 347 of SEQ ID NO: 2198
auuugacuccagcgucaaa

SEQ ID NO: 170615 - RNA, 19 nt, Artificial Sequence
  Description of Artificial Sequence: Synthetic oligonucleotide
  Antisense strand to SEQ ID NO: 170614
uuugacgcuggagucaaau

SEQ ID NO: 170616 - RNA, 19 nt, Artificial Sequence
  Description of Artificial Sequence: Synthetic oligonucleotide
  Sense strand starting at position 381 of SEQ ID NO: 2198
cuuugaaaucauugucagc

SEQ ID NO: 170617 - RNA, 19 nt, Artificial Sequence
  Description of Artificial Sequence: Synthetic oligonucleotide
  Antisense strand to SEQ ID NO: 170616
gcugacaaugauuucaaag

SEQ ID NO: 170618 - RNA, 19 nt, Artificial Sequence
  Description of Artificial Sequence: Synthetic oligonucleotide
  Sense strand starting at position 383 of SEQ ID NO: 2198
uugaaaucauugucagcga

SEQ ID NO: 170619 - RNA, 19 nt, Artificial Sequence
  Description of Artificial Sequence: Synthetic oligonucleotide
  Antisense strand to SEQ ID NO: 170618
ucgcugacaaugauuucaa

SEQ ID NO: 170620 - RNA, 19 nt, Artificial Sequence
  Description of Artificial Sequence: Synthetic oligonucleotide
  Sense strand starting at position 777 of SEQ ID NO: 2198
auagauugccucuagccua

SEQ ID NO: 170621 - RNA, 19 nt, Artificial Sequence
  Description of Artificial Sequence: Synthetic oligonucleotide
  Antisense strand to SEQ ID NO: 170620
uaggcuagaggcaaucuau

SEQ ID NO: 170622 - RNA, 19 nt, Artificial Sequence
  Description of Artificial Sequence: Synthetic oligonucleotide
  Sense strand starting at position 808 of SEQ ID NO: 2198
ggacuacacggaugcuuua

SEQ ID NO: 170623 - RNA, 19 nt, Artificial Sequence
  Description of Artificial Sequence: Synthetic oligonucleotide
  Antisense strand to SEQ ID NO: 170622
uaaagcauccguguagucc

SEQ ID NO: 170624 - RNA, 19 nt, Artificial Sequence
  Description of Artificial Sequence: Synthetic oligonucleotide
  Sense strand starting at position 855 of SEQ ID NO: 2198
agaacugacucccugugau

SEQ ID NO: 170625 - RNA, 19 nt, Artificial Sequence
  Description of Artificial Sequence: Synthetic oligonucleotide
  Antisense strand to SEQ ID NO: 170624
aucacagggagucaguucu

SEQ ID NO: 170626 - RNA, 19 nt, Artificial Sequence
  Description of Artificial Sequence: Synthetic oligonucleotide
  Sense strand starting at position 858 of SEQ ID NO: 2198
acugacucccugugauaug

SEQ ID NO: 170627 - RNA, 19 nt, Artificial Sequence
  Description of Artificial Sequence: Synthetic oligonucleotide
  Antisense strand to SEQ ID NO: 170626
cauaucacagggagucagu

SEQ ID NO: 170628 - RNA, 19 nt, Artificial Sequence
  Description of Artificial Sequence: Synthetic oligonucleotide
  Sense strand starting at position 869 of SEQ ID NO: 2198
gugauaugaaauggugcuu

SEQ ID NO: 170629 - RNA, 19 nt, Artificial Sequence
  Description of Artificial Sequence: Synthetic oligonucleotide
  Antisense strand to SEQ ID NO: 170628
aagcaccauuucauaucac

SEQ ID NO: 170630 - RNA, 19 nt, Artificial Sequence
  Description of Artificial Sequence: Synthetic oligonucleotide
  Sense strand starting at position 937 of SEQ ID NO: 2198
ugcuauggucuauagggaa

SEQ ID NO: 170631 - RNA, 19 nt, Artificial Sequence
  Description of Artificial Sequence: Synthetic oligonucleotide
  Antisense strand to SEQ ID NO: 170630
uucccuauagaccauagca

SEQ ID NO: 170632 - RNA, 19 nt, Artificial Sequence
  Description of Artificial Sequence: Synthetic oligonucleotide
  Sense strand starting at position 1072 of SEQ ID NO: 2198
acagaaauacuuuguggug

SEQ ID NO: 170633 - RNA, 19 nt, Artificial Sequence
  Description of Artificial Sequence: Synthetic oligonucleotide
  Antisense strand to SEQ ID NO: 170632
caccacaaaguauuucugu

SEQ ID NO: 170634 - RNA, 19 nt, Artificial Sequence
  Description of Artificial Sequence: Synthetic oligonucleotide
  Sense strand starting at position 1073 of SEQ ID NO: 2198
cagaaauacuuuguggugu

SEQ ID NO: 170635 - RNA, 19 nt, Artificial Sequence
  Description of Artificial Sequence: Synthetic oligonucleotide
  Antisense strand to SEQ ID NO: 170634
acaccacaaaguauuucug

SEQ ID NO: 170636 - RNA, 19 nt, Artificial Sequence
  Description of Artificial Sequence: Synthetic oligonucleotide
  Sense strand starting at position 1087 of SEQ ID NO: 2198
ggugucauuaacgauacag

SEQ ID NO: 170637 - RNA, 19 nt, Artificial Sequence
  Description of Artificial Sequence: Synthetic oligonucleotide
  Antisense strand to SEQ ID NO: 170636
cuguaucguuaaugacacc

SEQ ID NO: 170638 - RNA, 19 nt, Artificial Sequence
  Description of Artificial Sequence: Synthetic oligonucleotide
  Sense strand starting at position 1089 of SEQ ID NO: 2198
ugucauuaacgauacagac

SEQ ID NO: 170639 - RNA, 19 nt, Artificial Sequence
  Description of Artificial Sequence: Synthetic oligonucleotide
  Antisense strand to SEQ ID NO: 170638
gucuguaucguuaaugaca

SEQ ID NO: 170640 - RNA, 19 nt, Artificial Sequence
  Description of Artificial Sequence: Synthetic oligonucleotide
  Sense strand starting at position 1123 of SEQ ID NO: 2198
ugggcaaucucuccaacua

SEQ ID NO: 170641 - RNA, 19 nt, Artificial Sequence
  Description of Artificial Sequence: Synthetic oligonucleotide
  Antisense strand to SEQ ID NO: 170640
uaguuggagagauugccca

SEQ ID NO: 170642 - RNA, 19 nt, Artificial Sequence
  Description of Artificial Sequence: Synthetic oligonucleotide
  Sense strand starting at position 1124 of SEQ ID NO: 2198
gggcaaucucuccaacuaa

SEQ ID NO: 170643 - RNA, 19 nt, Artificial Sequence
  Description of Artificial Sequence: Synthetic oligonucleotide
  Antisense strand to SEQ ID NO: 170642
uuaguuggagagauugccc

SEQ ID NO: 170644 - RNA, 19 nt, Artificial Sequence
  Description of Artificial Sequence: Synthetic oligonucleotide
  Sense strand starting at position 1501 of SEQ ID NO: 2198
gagggucaauacguuugaa

SEQ ID NO: 170645 - RNA, 19 nt, Artificial Sequence
  Description of Artificial Sequence: Synthetic oligonucleotide
  Antisense strand to SEQ ID NO: 170644
uucaaacguauugacccuc

SEQ ID NO: 170646 - RNA, 19 nt, Artificial Sequence
  Description of Artificial Sequence: Synthetic oligonucleotide
  Sense strand starting at position 1504 of SEQ ID NO: 2198
ggucaauacguuugaauaa

SEQ ID NO: 170647 - RNA, 19 nt, Artificial Sequence
  Description of Artificial Sequence: Synthetic oligonucleotide
  Antisense strand to SEQ ID NO: 170646
uuauucaaacguauugacc

SEQ ID NO: 170648 - RNA, 19 nt, Artificial Sequence
  Description of Artificial Sequence: Synthetic oligonucleotide
  Sense strand starting at position 1647 of SEQ ID NO: 2198
cgguuacguaacgcuuaaa

SEQ ID NO: 170649 - RNA, 19 nt, Artificial Sequence
  Description of Artificial Sequence: Synthetic oligonucleotide
  Antisense strand to SEQ ID NO: 170648
uuuaagcguuacguaaccg

SEQ ID NO: 170650 - RNA, 19 nt, Artificial Sequence
  Description of Artificial Sequence: Synthetic oligonucleotide
  Sense strand starting at position 1938 of SEQ ID NO: 2198
caggguaucccacguggaa

SEQ ID NO: 170651 - RNA, 19 nt, Artificial Sequence
  Description of Artificial Sequence: Synthetic oligonucleotide
  Antisense strand to SEQ ID NO: 170650
uuccacgugggauacccug

SEQ ID NO: 170652 - RNA, 19 nt, Artificial Sequence
  Description of Artificial Sequence: Synthetic oligonucleotide
  Sense strand starting at position 1940 of SEQ ID NO: 2198
ggguaucccacguggaaca

SEQ ID NO: 170653 - RNA, 19 nt, Artificial Sequence
  Description of Artificial Sequence: Synthetic oligonucleotide
  Antisense strand to SEQ ID NO: 170652
uguuccacgugggauaccc

SEQ ID NO: 170654 - RNA, 19 nt, Artificial Sequence
  Description of Artificial Sequence: Synthetic oligonucleotide
  Sense strand starting at position 2799 of SEQ ID NO: 2198
cuaccacuuugguugucaa

SEQ ID NO: 170655 - RNA, 19 nt, Artificial Sequence
  Description of Artificial Sequence: Synthetic oligonucleotide
  Antisense strand to SEQ ID NO: 170654
uugacaaccaaagugguag

SEQ ID NO: 170656 - RNA, 19 nt, Artificial Sequence
  Description of Artificial Sequence: Synthetic oligonucleotide
  Sense strand starting at position 2802 of SEQ ID NO: 2198
ccacuuugguugucaagaa

SEQ ID NO: 170657 - RNA, 19 nt, Artificial Sequence
  Description of Artificial Sequence: Synthetic oligonucleotide
  Antisense strand to SEQ ID NO: 170656
uucuugacaaccaaagugg

SEQ ID NO: 170658 - RNA, 19 nt, Artificial Sequence
  Description of Artificial Sequence: Synthetic oligonucleotide
  Sense strand starting at position 2969 of SEQ ID NO: 2198
uuaggaugcuuacuguauu

SEQ ID NO: 170659 - RNA, 19 nt, Artificial Sequence
  Description of Artificial Sequence: Synthetic oligonucleotide
  Antisense strand to SEQ ID NO: 170658
aauacaguaagcauccuaa

SEQ ID NO: 170660 - RNA, 19 nt, Artificial Sequence
  Description of Artificial Sequence: Synthetic oligonucleotide
  Sense strand starting at position 2982 of SEQ ID NO: 2198
uguauuccuuauguaaacu

SEQ ID NO: 170661 - RNA, 19 nt, Artificial Sequence
  Description of Artificial Sequence: Synthetic oligonucleotide
  Antisense strand to SEQ ID NO: 170660
aguuuacauaaggaauaca

SEQ ID NO: 170662 - RNA, 19 nt, Artificial Sequence
  Description of Artificial Sequence: Synthetic oligonucleotide
  Sense strand starting at position 2992 of SEQ ID NO: 2198
auguaaacuuagucaaaca

SEQ ID NO: 170663 - RNA, 19 nt, Artificial Sequence
  Description of Artificial Sequence: Synthetic oligonucleotide
  Antisense strand to SEQ ID NO: 170662
uguuugacuaaguuuacau

SEQ ID NO: 170664 - RNA, 19 nt, Artificial Sequence
  Description of Artificial Sequence: Synthetic oligonucleotide
  Sense strand starting at position 3063 of SEQ ID NO: 2198
ggaugcuguaauggaaauu

SEQ ID NO: 170665 - RNA, 19 nt, Artificial Sequence
  Description of Artificial Sequence: Synthetic oligonucleotide
  Antisense strand to SEQ ID NO: 170664
aauuuccauuacagcaucc

SEQ ID NO: 170666 - RNA, 19 nt, Artificial Sequence
  Description of Artificial Sequence: Synthetic oligonucleotide
  Sense strand starting at position 3100 of SEQ ID NO: 2198
uuaccuauugggcaauguu

SEQ ID NO: 170667 - RNA, 19 nt, Artificial Sequence
  Description of Artificial Sequence: Synthetic oligonucleotide
  Antisense strand to SEQ ID NO: 170666
aacauugcccaauagguaa

SEQ ID NO: 170668 - RNA, 19 nt, Artificial Sequence
  Description of Artificial Sequence: Synthetic oligonucleotide
  Sense strand starting at position 3103 of SEQ ID NO: 2198
ccuauugggcaauguuaga

SEQ ID NO: 170669 - RNA, 19 nt, Artificial Sequence
  Description of Artificial Sequence: Synthetic oligonucleotide
  Antisense strand to SEQ ID NO: 170668
ucuaacauugcccaauagg

SEQ ID NO: 170670 - RNA, 19 nt, Artificial Sequence
  Description of Artificial Sequence: Synthetic oligonucleotide
  Sense strand starting at position 3121 of SEQ ID NO: 2198
aagacacgguucuuugaga

SEQ ID NO: 170671 - RNA, 19 nt, Artificial Sequence
  Description of Artificial Sequence: Synthetic oligonucleotide
  Antisense strand to SEQ ID NO: 170670
ucucaaagaaccgugucuu

SEQ ID NO: 170672 - RNA, 19 nt, Artificial Sequence
  Description of Artificial Sequence: Synthetic oligonucleotide
  Sense strand starting at position 3227 of SEQ ID NO: 2198
gucuuagaauacguacaau

SEQ ID NO: 170673 - RNA, 19 nt, Artificial Sequence
  Description of Artificial Sequence: Synthetic oligonucleotide
  Antisense strand to SEQ ID NO: 170672
auuguacguauucuaagac

SEQ ID NO: 170674 - RNA, 19 nt, Artificial Sequence
  Description of Artificial Sequence: Synthetic oligonucleotide
  Sense strand starting at position 3258 of SEQ ID NO: 2198
cucuacugagaguguaauu

SEQ ID NO: 170675 - RNA, 19 nt, Artificial Sequence
  Description of Artificial Sequence: Synthetic oligonucleotide
  Antisense strand to SEQ ID NO: 170674
aauuacacucucaguagag

SEQ ID NO: 170676 - RNA, 19 nt, Artificial Sequence
  Description of Artificial Sequence: Synthetic oligonucleotide
  Sense strand starting at position 3263 of SEQ ID NO: 2198
cugagaguguaauugaguu

SEQ ID NO: 170677 - RNA, 19 nt, Artificial Sequence
  Description of Artificial Sequence: Synthetic oligonucleotide
  Antisense strand to SEQ ID NO: 170676
aacucaauuacacucucag

SEQ ID NO: 170678 - RNA, 19 nt, Artificial Sequence
  Description of Artificial Sequence: Synthetic oligonucleotide
  Sense strand starting at position 3307 of SEQ ID NO: 2198
guuccuaaggaauguauca

SEQ ID NO: 170679 - RNA, 19 nt, Artificial Sequence
  Description of Artificial Sequence: Synthetic oligonucleotide
  Antisense strand to SEQ ID NO: 170678
ugauacauuccuuaggaac

SEQ ID NO: 170680 - RNA, 19 nt, Artificial Sequence
  Description of Artificial Sequence: Synthetic oligonucleotide
  Sense strand starting at position 3328 of SEQ ID NO: 2198
cagcaaauagucugaagau

SEQ ID NO: 170681 - RNA, 19 nt, Artificial Sequence
  Description of Artificial Sequence: Synthetic oligonucleotide
  Antisense strand to SEQ ID NO: 170680
aucuucagacuauuugcug

SEQ ID NO: 170682 - RNA, 19 nt, Artificial Sequence
  Description of Artificial Sequence: Synthetic oligonucleotide
  Sense strand starting at position 3412 of SEQ ID NO: 2198
auaaauuuguuaggacauc

SEQ ID NO: 170683 - RNA, 19 nt, Artificial Sequence
  Description of Artificial Sequence: Synthetic oligonucleotide
  Antisense strand to SEQ ID NO: 170682
gauguccuaacaaauuuau

SEQ ID NO: 170684 - RNA, 19 nt, Artificial Sequence
  Description of Artificial Sequence: Synthetic oligonucleotide
  Sense strand starting at position 3468 of SEQ ID NO: 2198
ggacucacucauuggucuu

SEQ ID NO: 170685 - RNA, 19 nt, Artificial Sequence
  Description of Artificial Sequence: Synthetic oligonucleotide
  Antisense strand to SEQ ID NO: 170684
aagaccaaugagugagucc

SEQ ID NO: 170686 - RNA, 19 nt, Artificial Sequence
  Description of Artificial Sequence: Synthetic oligonucleotide
  Sense strand starting at position 3709 of SEQ ID NO: 2198
agaaaugugucguugaauu

SEQ ID NO: 170687 - RNA, 19 nt, Artificial Sequence
  Description of Artificial Sequence: Synthetic oligonucleotide
  Antisense strand to SEQ ID NO: 170686
aauucaacgacacauuucu

SEQ ID NO: 170688 - RNA, 19 nt, Artificial Sequence
  Description of Artificial Sequence: Synthetic oligonucleotide
  Sense strand starting at position 3717 of SEQ ID NO: 2198
gucguugaauuucugacuu

SEQ ID NO: 170689 - RNA, 19 nt, Artificial Sequence
  Description of Artificial Sequence: Synthetic oligonucleotide
  Antisense strand to SEQ ID NO: 170688
aagucagaaauucaacgac

SEQ ID NO: 170690 - RNA, 19 nt, Artificial Sequence
  Description of Artificial Sequence: Synthetic oligonucleotide
  Sense strand starting at position 3967 of SEQ ID NO: 2198
auguuuguggaccaaaguu

SEQ ID NO: 170691 - RNA, 19 nt, Artificial Sequence
  Description of Artificial Sequence: Synthetic oligonucleotide
  Antisense strand to SEQ ID NO: 170690
aacuuugguccacaaacau

SEQ ID NO: 170692 - RNA, 19 nt, Artificial Sequence
  Description of Artificial Sequence: Synthetic oligonucleotide
  Sense strand starting at position 3981 of SEQ ID NO: 2199
acaaccuucuugguacaga

SEQ ID NO: 170693 - RNA, 19 nt, Artificial Sequence
  Description of Artificial Sequence: Synthetic oligonucleotide
  Antisense strand to SEQ ID NO: 170692
ucuguaccaagaagguugu

SEQ ID NO: 170694 - RNA, 19 nt, Artificial Sequence
  Description of Artificial Sequence: Synthetic oligonucleotide
  Sense strand starting at position 3890 of SEQ ID NO: 2199
auggcugguuaccugaauu

SEQ ID NO: 170695 - RNA, 19 nt, Artificial Sequence
  Description of Artificial Sequence: Synthetic oligonucleotide
  Antisense strand to SEQ ID NO: 170694
aauucagguaaccagccau

SEQ ID NO: 170696 - RNA, 19 nt, Artificial Sequence
  Description of Artificial Sequence: Synthetic oligonucleotide
  Sense strand starting at position 3883 of SEQ ID NO: 2199
guggaauauggcugguuac

SEQ ID NO: 170697 - RNA, 19 nt, Artificial Sequence
  Description of Artificial Sequence: Synthetic oligonucleotide
  Antisense strand to SEQ ID NO: 170696
guaaccagccauauuccac

SEQ ID NO: 170698 - RNA, 19 nt, Artificial Sequence
  Description of Artificial Sequence: Synthetic oligonucleotide
  Sense strand starting at position 3882 of SEQ ID NO: 2199
uguggaauauggcugguua

SEQ ID NO: 170699 - RNA, 19 nt, Artificial Sequence
  Description of Artificial Sequence: Synthetic oligonucleotide
  Antisense strand to SEQ ID NO: 170698
uaaccagccauauuccaca

SEQ ID NO: 170700 - RNA, 19 nt, Artificial Sequence
  Description of Artificial Sequence: Synthetic oligonucleotide
  Sense strand starting at position 3857 of SEQ ID NO: 2199
cagagcuacugagagaaga

SEQ ID NO: 170701 - RNA, 19 nt, Artificial Sequence
  Description of Artificial Sequence: Synthetic oligonucleotide
  Antisense strand to SEQ ID NO: 170700
ucuucucucaguagcucug

SEQ ID NO: 170702 - RNA, 19 nt, Artificial Sequence
  Description of Artificial Sequence: Synthetic oligonucleotide
  Sense strand starting at position 3782 of SEQ ID NO: 2199
agcucuacagauuggacaa

SEQ ID NO: 170703 - RNA, 19 nt, Artificial Sequence
  Description of Artificial Sequence: Synthetic oligonucleotide
  Antisense strand to SEQ ID NO: 170702
uuguccaaucuguagagcu

SEQ ID NO: 170704 - RNA, 19 nt, Artificial Sequence
  Description of Artificial Sequence: Synthetic oligonucleotide
  Sense strand starting at position 3779 of SEQ ID NO: 2199
gcuagcucuacagauugga

SEQ ID NO: 170705 - RNA, 19 nt, Artificial Sequence
  Description of Artificial Sequence: Synthetic oligonucleotide
  Antisense strand to SEQ ID NO: 170704
uccaaucuguagagcuagc

SEQ ID NO: 170706 - RNA, 19 nt, Artificial Sequence
  Description of Artificial Sequence: Synthetic oligonucleotide
  Sense strand starting at position 3775 of SEQ ID NO: 2199
guaggcuagcucuacagau

SEQ ID NO: 170707 - RNA, 19 nt, Artificial Sequence
  Description of Artificial Sequence: Synthetic oligonucleotide
  Antisense strand to SEQ ID NO: 170706
aucuguagagcuagccuac

SEQ ID NO: 170708 - RNA, 19 nt, Artificial Sequence
  Description of Artificial Sequence: Synthetic oligonucleotide
  Sense strand starting at position 3632 of SEQ ID NO: 2199
guuccuuuccuugauacca

SEQ ID NO: 170709 - RNA, 19 nt, Artificial Sequence
  Description of Artificial Sequence: Synthetic oligonucleotide
  Antisense strand to SEQ ID NO: 170708
ugguaucaaggaaaggaac

SEQ ID NO: 170710 - RNA, 19 nt, Artificial Sequence
  Description of Artificial Sequence: Synthetic oligonucleotide
  Sense strand starting at position 3447 of SEQ ID NO: 2199
uguuaaaggcucugaaacu

SEQ ID NO: 170711 - RNA, 19 nt, Artificial Sequence
  Description of Artificial Sequence: Synthetic oligonucleotide
  Antisense strand to SEQ ID NO: 170710
aguuucagagccuuuaaca

SEQ ID NO: 170712 - RNA, 19 nt, Artificial Sequence
  Description of Artificial Sequence: Synthetic oligonucleotide
  Sense strand starting at position 3432 of SEQ ID NO: 2199
ucuggaacauuaucauguu

SEQ ID NO: 170713 - RNA, 19 nt, Artificial Sequence
  Description of Artificial Sequence: Synthetic oligonucleotide
  Antisense strand to SEQ ID NO: 170712
aacaugauaauguuccaga

SEQ ID NO: 170714 - RNA, 19 nt, Artificial Sequence
  Description of Artificial Sequence: Synthetic oligonucleotide
  Sense strand starting at position 3419 of SEQ ID NO: 2199
uuagauuccucauucugga

SEQ ID NO: 170715 - RNA, 19 nt, Artificial Sequence
  Description of Artificial Sequence: Synthetic oligonucleotide
  Antisense strand to SEQ ID NO: 170714
uccagaaugaggaaucuaa

SEQ ID NO: 170716 - RNA, 19 nt, Artificial Sequence
  Description of Artificial Sequence: Synthetic oligonucleotide
  Sense strand starting at position 3391 of SEQ ID NO: 2199
gggagauacuggguacucu

SEQ ID NO: 170717 - RNA, 19 nt, Artificial Sequence
  Description of Artificial Sequence: Synthetic oligonucleotide
  Antisense strand to SEQ ID NO: 170716
agaguacccaguaucuccc

SEQ ID NO: 170718 - RNA, 19 nt, Artificial Sequence
  Description of Artificial Sequence: Synthetic oligonucleotide
  Sense strand starting at position 3344 of SEQ ID NO: 2199
cccagaauauguucugaca

SEQ ID NO: 170719 - RNA, 19 nt, Artificial Sequence
  Description of Artificial Sequence: Synthetic oligonucleotide
  Antisense strand to SEQ ID NO: 170718
ugucagaacauauucuggg

SEQ ID NO: 170720 - RNA, 19 nt, Artificial Sequence
  Description of Artificial Sequence: Synthetic oligonucleotide
  Sense strand starting at position 3248 of SEQ ID NO: 2199
uacuuuguucgagaccaca

SEQ ID NO: 170721 - RNA, 19 nt, Artificial Sequence
  Description of Artificial Sequence: Synthetic oligonucleotide
  Antisense strand to SEQ ID NO: 170720
uguggucucgaacaaagua

SEQ ID NO: 170722 - RNA, 19 nt, Artificial Sequence
  Description of Artificial Sequence: Synthetic oligonucleotide
  Sense strand starting at position 3244 of SEQ ID NO: 2199
uaaguacuuuguucgagac

SEQ ID NO: 170723 - RNA, 19 nt, Artificial Sequence
  Description of Artificial Sequence: Synthetic oligonucleotide
  Antisense strand to SEQ ID NO: 170722
gucucgaacaaaguacuua

SEQ ID NO: 170724 - RNA, 19 nt, Artificial Sequence
  Description of Artificial Sequence: Synthetic oligonucleotide
  Sense strand starting at position 3243 of SEQ ID NO: 2199
uuaaguacuuuguucgaga

SEQ ID NO: 170725 - RNA, 19 nt, Artificial Sequence
  Description of Artificial Sequence: Synthetic oligonucleotide
  Antisense strand to SEQ ID NO: 170724
ucucgaacaaaguacuuaa

SEQ ID NO: 170726 - RNA, 19 nt, Artificial Sequence
  Description of Artificial Sequence: Synthetic oligonucleotide
  Sense strand starting at position 3193 of SEQ ID NO: 2199
gggucuuauuauccauauc

SEQ ID NO: 170727 - RNA, 19 nt, Artificial Sequence
  Description of Artificial Sequence: Synthetic oligonucleotide
  Antisense strand to SEQ ID NO: 170726
gauauggauaauaagaccc

SEQ ID NO: 170728 - RNA, 19 nt, Artificial Sequence
  Description of Artificial Sequence: Synthetic oligonucleotide
  Sense strand starting at position 3192 of SEQ ID NO: 2199
ugggucuuauuauccauau

SEQ ID NO: 170729 - RNA, 19 nt, Artificial Sequence
  Description of Artificial Sequence: Synthetic oligonucleotide
  Antisense strand to SEQ ID NO: 170728
auauggauaauaagaccca

SEQ ID NO: 170730 - RNA, 19 nt, Artificial Sequence
  Description of Artificial Sequence: Synthetic oligonucleotide
  Sense strand starting at position 3183 of SEQ ID NO: 2199
ccuauaaagugggucuuau

SEQ ID NO: 170731 - RNA, 19 nt, Artificial Sequence
  Description of Artificial Sequence: Synthetic oligonucleotide
  Antisense strand to SEQ ID NO: 170730
auaagacccacuuuauagg

SEQ ID NO: 170732 - RNA, 19 nt, Artificial Sequence
  Description of Artificial Sequence: Synthetic oligonucleotide
  Sense strand starting at position 3182 of SEQ ID NO: 2199
accuauaaagugggucuua

SEQ ID NO: 170733 - RNA, 19 nt, Artificial Sequence
  Description of Artificial Sequence: Synthetic oligonucleotide
  Antisense strand to SEQ ID NO: 170732
uaagacccacuuuauaggu

SEQ ID NO: 170734 - RNA, 19 nt, Artificial Sequence
  Description of Artificial Sequence: Synthetic oligonucleotide
  Sense strand starting at position 3153 of SEQ ID NO: 2199
uguguauggucauuuaauc

SEQ ID NO: 170735 - RNA, 19 nt, Artificial Sequence
  Description of Artificial Sequence: Synthetic oligonucleotide
  Antisense strand to SEQ ID NO: 170734
gauuaaaugaccauacaca

SEQ ID NO: 170736 - RNA, 19 nt, Artificial Sequence
  Description of Artificial Sequence: Synthetic oligonucleotide
  Sense strand starting at position 3150 of SEQ ID NO: 2199
uguuguguauggucauuua

SEQ ID NO: 170737 - RNA, 19 nt, Artificial Sequence
  Description of Artificial Sequence: Synthetic oligonucleotide
  Antisense strand to SEQ ID NO: 170736
uaaaugaccauacacaaca

SEQ ID NO: 170738 - RNA, 19 nt, Artificial Sequence
  Description of Artificial Sequence: Synthetic oligonucleotide
  Sense strand starting at position 3136 of SEQ ID NO: 2199
aguaauuugauguguguug

SEQ ID NO: 170739 - RNA, 19 nt, Artificial Sequence
  Description of Artificial Sequence: Synthetic oligonucleotide
  Antisense strand to SEQ ID NO: 170738
caacacacaucaaauuacu

SEQ ID NO: 170740 - RNA, 19 nt, Artificial Sequence
  Description of Artificial Sequence: Synthetic oligonucleotide
  Sense strand starting at position 3084 of SEQ ID NO: 2199
uuaguagagcacugaauaa

SEQ ID NO: 170741 - RNA, 19 nt, Artificial Sequence
  Description of Artificial Sequence: Synthetic oligonucleotide
  Antisense strand to SEQ ID NO: 170740
uuauucagugcucuacuaa

SEQ ID NO: 170742 - RNA, 19 nt, Artificial Sequence
  Description of Artificial Sequence: Synthetic oligonucleotide
  Sense strand starting at position 3081 of SEQ ID NO: 2199
uuauuaguagagcacugaa

SEQ ID NO: 170743 - RNA, 19 nt, Artificial Sequence
  Description of Artificial Sequence: Synthetic oligonucleotide
  Antisense strand to SEQ ID NO: 170742
uucagugcucuacuaauaa

SEQ ID NO: 170744 - RNA, 19 nt, Artificial Sequence
  Description of Artificial Sequence: Synthetic oligonucleotide
  Sense strand starting at position 3078 of SEQ ID NO: 2199
agguuauuaguagagcacu

SEQ ID NO: 170745 - RNA, 19 nt, Artificial Sequence
  Description of Artificial Sequence: Synthetic oligonucleotide
  Antisense strand to SEQ ID NO: 170744
agugcucuacuaauaaccu

SEQ ID NO: 170746 - RNA, 19 nt, Artificial Sequence
  Description of Artificial Sequence: Synthetic oligonucleotide
  Sense strand starting at position 2951 of SEQ ID NO: 2199
uguugaauguacucccaaa

SEQ ID NO: 170747 - RNA, 19 nt, Artificial Sequence
  Description of Artificial Sequence: Synthetic oligonucleotide
  Antisense strand to SEQ ID NO: 170746
uuugggaguacauucaaca

SEQ ID NO: 170748 - RNA, 19 nt, Artificial Sequence
  Description of Artificial Sequence: Synthetic oligonucleotide
  Sense strand starting at position 2940 of SEQ ID NO: 2199
acuggaaacucuguugaau

SEQ ID NO: 170749 - RNA, 19 nt, Artificial Sequence
  Description of Artificial Sequence: Synthetic oligonucleotide
  Antisense strand to SEQ ID NO: 170748
auucaacagaguuuccagu

SEQ ID NO: 170750 - RNA, 19 nt, Artificial Sequence
  Description of Artificial Sequence: Synthetic oligonucleotide
  Sense strand starting at position 2865 of SEQ ID NO: 2199
accuuuaguuacucaaagu

SEQ ID NO: 170751 - RNA, 19 nt, Artificial Sequence
  Description of Artificial Sequence: Synthetic oligonucleotide
  Antisense strand to SEQ ID NO: 170750
acuuugaguaacuaaaggu

SEQ ID NO: 170752 - RNA, 19 nt, Artificial Sequence
  Description of Artificial Sequence: Synthetic oligonucleotide
  Sense strand starting at position 2713 of SEQ ID NO: 2199
gcauuaauccaggaagcug

SEQ ID NO: 170753 - RNA, 19 nt, Artificial Sequence
  Description of Artificial Sequence: Synthetic oligonucleotide
  Antisense strand to SEQ ID NO: 170752
cagcuuccuggauuaaugc

SEQ ID NO: 170754 - RNA, 19 nt, Artificial Sequence
  Description of Artificial Sequence: Synthetic oligonucleotide
  Sense strand starting at position 2712 of SEQ ID NO: 2199
agcauuaauccaggaagcu

SEQ ID NO: 170755 - RNA, 19 nt, Artificial Sequence
  Description of Artificial Sequence: Synthetic oligonucleotide
  Antisense strand to SEQ ID NO: 170754
agcuuccuggauuaaugcu

SEQ ID NO: 170756 - RNA, 19 nt, Artificial Sequence
  Description of Artificial Sequence: Synthetic oligonucleotide
  Sense strand starting at position 2665 of SEQ ID NO: 2199
accuucuugcuaggcuaaa

SEQ ID NO: 170757 - RNA, 19 nt, Artificial Sequence
  Description of Artificial Sequence: Synthetic oligonucleotide
  Antisense strand to SEQ ID NO: 170756
uuuagccuagcaagaaggu

SEQ ID NO: 170758 - RNA, 19 nt, Artificial Sequence
  Description of Artificial Sequence: Synthetic oligonucleotide
  Sense strand starting at position 2602 of SEQ ID NO: 2199
uugaaugaauggucaccuu

SEQ ID NO: 170759 - RNA, 19 nt, Artificial Sequence
  Description of Artificial Sequence: Synthetic oligonucleotide
  Antisense strand to SEQ ID NO: 170758
aaggugaccauucauucaa

SEQ ID NO: 170760 - RNA, 19 nt, Artificial Sequence
  Description of Artificial Sequence: Synthetic oligonucleotide
  Sense strand starting at position 2307 of SEQ ID NO: 2199
ugaaucacuugcucuagaa

SEQ ID NO: 170761 - RNA, 19 nt, Artificial Sequence
  Description of Artificial Sequence: Synthetic oligonucleotide
  Antisense strand to SEQ ID NO: 170760
uucuagagcaagugauuca

SEQ ID NO: 170762 - RNA, 19 nt, Artificial Sequence
  Description of Artificial Sequence: Synthetic oligonucleotide
  Sense strand starting at position 2306 of SEQ ID NO: 2199
cugaaucacuugcucuaga

SEQ ID NO: 170763 - RNA, 19 nt, Artificial Sequence
  Description of Artificial Sequence: Synthetic oligonucleotide
  Antisense strand to SEQ ID NO: 170762
ucuagagcaagugauucag

SEQ ID NO: 170764 - RNA, 19 nt, Artificial Sequence
  Description of Artificial Sequence: Synthetic oligonucleotide
  Sense strand starting at position 2229 of SEQ ID NO: 2199
uuuggacaggucuguugaa

SEQ ID NO: 170765 - RNA, 19 nt, Artificial Sequence
  Description of Artificial Sequence: Synthetic oligonucleotide
  Antisense strand to SEQ ID NO: 170764
uucaacagaccuguccaaa

SEQ ID NO: 170766 - RNA, 19 nt, Artificial Sequence
  Description of Artificial Sequence: Synthetic oligonucleotide
  Sense strand starting at position 2087 of SEQ ID NO: 2199
gaaguccucucguuacuua

SEQ ID NO: 170767 - RNA, 19 nt, Artificial Sequence
  Description of Artificial Sequence: Synthetic oligonucleotide
  Antisense strand to SEQ ID NO: 170766
uaaguaacgagaggacuuc

SEQ ID NO: 170768 - RNA, 19 nt, Artificial Sequence
  Description of Artificial Sequence: Synthetic oligonucleotide
  Sense strand starting at position 276 of SEQ ID NO: 2199
auaaguacuuacuuucgga

SEQ ID NO: 170769 - RNA, 19 nt, Artificial Sequence
  Description of Artificial Sequence: Synthetic oligonucleotide
  Antisense strand to SEQ ID NO: 170768
uccgaaaguaaguacuuau

SEQ ID NO: 170770 - RNA, 19 nt, Artificial Sequence
  Description of Artificial Sequence: Synthetic oligonucleotide
  Sense strand starting at position 113 of SEQ ID NO: 2199
gccugauggccucaagcau

SEQ ID NO: 170771 - RNA, 19 nt, Artificial Sequence
  Description of Artificial Sequence: Synthetic oligonucleotide
  Antisense strand to SEQ ID NO: 170770
augcuugaggccaucaggc

SEQ ID NO: 170772 - RNA, 19 nt, Artificial Sequence
  Description of Artificial Sequence: Synthetic oligonucleotide
  Sense strand starting at position 332 of SEQ ID NO: 2200
aacagaaaguuauguauga

SEQ ID NO: 170773 - RNA, 19 nt, Artificial Sequence
  Description of Artificial Sequence: Synthetic oligonucleotide
  Antisense strand to SEQ ID NO: 170772
ucauacauaacuuucuguu

SEQ ID NO: 170774 - RNA, 19 nt, Artificial Sequence
  Description of Artificial Sequence: Synthetic oligonucleotide
  Sense strand starting at position 333 of SEQ ID NO: 2200
acagaaaguuauguaugau

SEQ ID NO: 170775 - RNA, 19 nt, Artificial Sequence
  Description of Artificial Sequence: Synthetic oligonucleotide
  Antisense strand to SEQ ID NO: 170774
aucauacauaacuuucugu

SEQ ID NO: 170776 - RNA, 19 nt, Artificial Sequence
  Description of Artificial Sequence: Synthetic oligonucleotide
  Sense strand starting at position 336 of SEQ ID NO: 2200
gaaaguuauguaugaucuu

SEQ ID NO: 170777 - RNA, 19 nt, Artificial Sequence
  Description of Artificial Sequence: Synthetic oligonucleotide
  Antisense strand to SEQ ID NO: 170776
aagaucauacauaacuuuc

SEQ ID NO: 170778 - RNA, 19 nt, Artificial Sequence
  Description of Artificial Sequence: Synthetic oligonucleotide
  Sense strand starting at position 339 of SEQ ID NO: 2200
aguuauguaugaucuugga

SEQ ID NO: 170779 - RNA, 19 nt, Artificial Sequence
  Description of Artificial Sequence: Synthetic oligonucleotide
  Antisense strand to SEQ ID NO: 170778
uccaagaucauacauaacu

SEQ ID NO: 170780 - RNA, 19 nt, Artificial Sequence
  Description of Artificial Sequence: Synthetic oligonucleotide
  Sense strand starting at position 343 of SEQ ID NO: 2200
auguaugaucuuggacaag

SEQ ID NO: 170781 - RNA, 19 nt, Artificial Sequence
  Description of Artificial Sequence: Synthetic oligonucleotide
  Antisense strand to SEQ ID NO: 170780
cuuguccaagaucauacau

SEQ ID NO: 170782 - RNA, 19 nt, Artificial Sequence
  Description of Artificial Sequence: Synthetic oligonucleotide
  Sense strand starting at position 372 of SEQ ID NO: 2200
ucuagugucuuaucuguaa

SEQ ID NO: 170783 - RNA, 19 nt, Artificial Sequence
  Description of Artificial Sequence: Synthetic oligonucleotide
  Antisense strand to SEQ ID NO: 170782
uuacagauaagacacuaga

SEQ ID NO: 170784 - RNA, 19 nt, Artificial Sequence
  Description of Artificial Sequence: Synthetic oligonucleotide
  Sense strand starting at position 419 of SEQ ID NO: 2200
uagagaugcugugaggauu

SEQ ID NO: 170785 - RNA, 19 nt, Artificial Sequence
  Description of Artificial Sequence: Synthetic oligonucleotide
  Antisense strand to SEQ ID NO: 170784
aauccucacagcaucucua

SEQ ID NO: 170786 - RNA, 19 nt, Artificial Sequence
  Description of Artificial Sequence: Synthetic oligonucleotide
  Sense strand starting at position 433 of SEQ ID NO: 2200
ggauuaagugcacacagua

SEQ ID NO: 170787 - RNA, 19 nt, Artificial Sequence
  Description of Artificial Sequence: Synthetic oligonucleotide
  Antisense strand to SEQ ID NO: 170786
uacugugugcacuuaaucc

SEQ ID NO: 170788 - RNA, 19 nt, Artificial Sequence
  Description of Artificial Sequence: Synthetic oligonucleotide
  Sense strand starting at position 509 of SEQ ID NO: 2200
ugaaguaacuguuugcacu

SEQ ID NO: 170789 - RNA, 19 nt, Artificial Sequence
  Description of Artificial Sequence: Synthetic oligonucleotide
  Antisense strand to SEQ ID NO: 170788
agugcaaacaguuacuuca

SEQ ID NO: 170790 - RNA, 19 nt, Artificial Sequence
  Description of Artificial Sequence: Synthetic oligonucleotide
  Sense strand starting at position 574 of SEQ ID NO: 2200
uguggagacuucucccaaa

SEQ ID NO: 170791 - RNA, 19 nt, Artificial Sequence
  Description of Artificial Sequence: Synthetic oligonucleotide
  Antisense strand to SEQ ID NO: 170790
uuugggagaagucuccaca

SEQ ID NO: 170792 - RNA, 19 nt, Artificial Sequence
  Description of Artificial Sequence: Synthetic oligonucleotide
  Sense strand starting at position 599 of SEQ ID NO: 2200
acuucuucggaaggacaua

SEQ ID NO: 170793 - RNA, 19 nt, Artificial Sequence
  Description of Artificial Sequence: Synthetic oligonucleotide
  Antisense strand to SEQ ID NO: 170792
uauguccuuccgaagaagu

SEQ ID NO: 170794 - RNA, 19 nt, Artificial Sequence
  Description of Artificial Sequence: Synthetic oligonucleotide
  Sense strand starting at position 733 of SEQ ID NO: 2200
ggugcuuacucggugccaa

SEQ ID NO: 170795 - RNA, 19 nt, Artificial Sequence
  Description of Artificial Sequence: Synthetic oligonucleotide
  Antisense strand to SEQ ID NO: 170794
uuggcaccgaguaagcacc

SEQ ID NO: 170796 - RNA, 19 nt, Artificial Sequence
  Description of Artificial Sequence: Synthetic oligonucleotide
  Sense strand starting at position 900 of SEQ ID NO: 2200
cuacuuugccaagguaauu

SEQ ID NO: 170797 - RNA, 19 nt, Artificial Sequence
  Description of Artificial Sequence: Synthetic oligonucleotide
  Antisense strand to SEQ ID NO: 170796
aauuaccuuggcaaaguag

SEQ ID NO: 170798 - RNA, 19 nt, Artificial Sequence
  Description of Artificial Sequence: Synthetic oligonucleotide
  Sense strand starting at position 965 of SEQ ID NO: 2200
gggcaaaugcccuaauaag

SEQ ID NO: 170799 - RNA, 19 nt, Artificial Sequence
  Description of Artificial Sequence: Synthetic oligonucleotide
  Antisense strand to SEQ ID NO: 170798
cuuauuagggcauuugccc

SEQ ID NO: 170800 - RNA, 19 nt, Artificial Sequence
  Description of Artificial Sequence: Synthetic oligonucleotide
  Sense strand starting at position 1016 of SEQ ID NO: 2200
guccaagauuuccaaguuu

SEQ ID NO: 170801 - RNA, 19 nt, Artificial Sequence
  Description of Artificial Sequence: Synthetic oligonucleotide
  Antisense strand to SEQ ID NO: 170800
aaacuuggaaaucuuggac

SEQ ID NO: 170802 - RNA, 19 nt, Artificial Sequence
  Description of Artificial Sequence: Synthetic oligonucleotide
  Sense strand starting at position 1606 of SEQ ID NO: 2200
gcgguguguccagcggaga

SEQ ID NO: 170803 - RNA, 19 nt, Artificial Sequence
  Description of Artificial Sequence: Synthetic oligonucleotide
  Antisense strand to SEQ ID NO: 170802
ucuccgcuggacacaccgc

SEQ ID NO: 170804 - RNA, 19 nt, Artificial Sequence
  Description of Artificial Sequence: Synthetic oligonucleotide
  Sense strand starting at position 2300 of SEQ ID NO: 2200
guuccuuggucuuuauaua

SEQ ID NO: 170805 - RNA, 19 nt, Artificial Sequence
  Description of Artificial Sequence: Synthetic oligonucleotide
  Antisense strand to SEQ ID NO: 170804
uauauaaagaccaaggaac

SEQ ID NO: 170806 - RNA, 19 nt, Artificial Sequence
  Description of Artificial Sequence: Synthetic oligonucleotide
  Sense strand starting at position 2431 of SEQ ID NO: 2200
gcuuguugucacgcucuga

SEQ ID NO: 170807 - RNA, 19 nt, Artificial Sequence
  Description of Artificial Sequence: Synthetic oligonucleotide
  Antisense strand to SEQ ID NO: 170806
ucagagcgugacaacaagc

SEQ ID NO: 170808 - RNA, 19 nt, Artificial Sequence
  Description of Artificial Sequence: Synthetic oligonucleotide
  Sense strand starting at position 2432 of SEQ ID NO: 2200
cuuguugucacgcucugau

SEQ ID NO: 170809 - RNA, 19 nt, Artificial Sequence
  Description of Artificial Sequence: Synthetic oligonucleotide
  Antisense strand to SEQ ID NO: 170808
aucagagcgugacaacaag

SEQ ID NO: 170810 - RNA, 19 nt, Artificial Sequence
  Description of Artificial Sequence: Synthetic oligonucleotide
  Sense strand starting at position 2587 of SEQ ID NO: 2200
gcgcgauaugaacgacagu

SEQ ID NO: 170811 - RNA, 19 nt, Artificial Sequence
  Description of Artificial Sequence: Synthetic oligonucleotide
  Antisense strand to SEQ ID NO: 170810
acugucguucauaucgcgc

SEQ ID NO: 170812 - RNA, 19 nt, Artificial Sequence
  Description of Artificial Sequence: Synthetic oligonucleotide
  Sense strand starting at position 2637 of SEQ ID NO: 2200
cugugcgacguccuaagua

SEQ ID NO: 170813 - RNA, 19 nt, Artificial Sequence
  Description of Artificial Sequence: Synthetic oligonucleotide
  Antisense strand to SEQ ID NO: 170812
uacuuaggacgucgcacag

SEQ ID NO: 170814 - RNA, 19 nt, Artificial Sequence
  Description of Artificial Sequence: Synthetic oligonucleotide
  Sense strand starting at position 2792 of SEQ ID NO: 2200
gugaaaugaccguggacug

SEQ ID NO: 170815 - RNA, 19 nt, Artificial Sequence
  Description of Artificial Sequence: Synthetic oligonucleotide
  Antisense strand to SEQ ID NO: 170814
caguccacggucauuucac

SEQ ID NO: 170816 - RNA, 19 nt, Artificial Sequence
  Description of Artificial Sequence: Synthetic oligonucleotide
  Sense strand starting at position 2793 of SEQ ID NO: 2200
ugaaaugaccguggacuga

SEQ ID NO: 170817 - RNA, 19 nt, Artificial Sequence
  Description of Artificial Sequence: Synthetic oligonucleotide
  Antisense strand to SEQ ID NO: 170816
ucaguccacggucauuuca

SEQ ID NO: 170818 - RNA, 19 nt, Artificial Sequence
  Description of Artificial Sequence: Synthetic oligonucleotide
  Sense strand starting at position 2915 of SEQ ID NO: 2200
cuagaaggcuucuuccagu

SEQ ID NO: 170819 - RNA, 19 nt, Artificial Sequence
  Description of Artificial Sequence: Synthetic oligonucleotide
  Antisense strand to SEQ ID NO: 170818
acuggaagaagccuucuag

SEQ ID NO: 170820 - RNA, 19 nt, Artificial Sequence
  Description of Artificial Sequence: Synthetic oligonucleotide
  Sense strand starting at position 3221 of SEQ ID NO: 2200
aagagauucgccugccuug

SEQ ID NO: 170821 - RNA, 19 nt, Artificial Sequence
  Description of Artificial Sequence: Synthetic oligonucleotide
  Antisense strand to SEQ ID NO: 170820
caaggcaggcgaaucucuu

SEQ ID NO: 170822 - RNA, 19 nt, Artificial Sequence
  Description of Artificial Sequence: Synthetic oligonucleotide
  Sense strand starting at position 3299 of SEQ ID NO: 2200
uuuaauauguuggagagua

SEQ ID NO: 170823 - RNA, 19 nt, Artificial Sequence
  Description of Artificial Sequence: Synthetic oligonucleotide
  Antisense strand to SEQ ID NO: 170822
uacucuccaacauauuaaa

SEQ ID NO: 170824 - RNA, 19 nt, Artificial Sequence
  Description of Artificial Sequence: Synthetic oligonucleotide
  Sense strand starting at position 3321 of SEQ ID NO: 2200
ugaggaggcuucuuaugac

SEQ ID NO: 170825 - RNA, 19 nt, Artificial Sequence
  Description of Artificial Sequence: Synthetic oligonucleotide
  Antisense strand to SEQ ID NO: 170824
gucauaagaagccuccuca

SEQ ID NO: 170826 - RNA, 19 nt, Artificial Sequence
  Description of Artificial Sequence: Synthetic oligonucleotide
  Sense strand starting at position 3338 of SEQ ID NO: 2200
acauguuauuuggaaaguu

SEQ ID NO: 170827 - RNA, 19 nt, Artificial Sequence
  Description of Artificial Sequence: Synthetic oligonucleotide
  Antisense strand to SEQ ID NO: 170826
aacuuuccaaauaacaugu

SEQ ID NO: 170828 - RNA, 19 nt, Artificial Sequence
  Description of Artificial Sequence: Synthetic oligonucleotide
  Sense strand starting at position 3350 of SEQ ID NO: 2200
gaaaguuauugagagaaca

SEQ ID NO: 170829 - RNA, 19 nt, Artificial Sequence
  Description of Artificial Sequence: Synthetic oligonucleotide
  Antisense strand to SEQ ID NO: 170828
uguucucucaauaacuuuc

SEQ ID NO: 170830 - RNA, 19 nt, Artificial Sequence
  Description of Artificial Sequence: Synthetic oligonucleotide
  Sense strand starting at position 3369 of SEQ ID NO: 2200
ggaaauauuucucguccuc

SEQ ID NO: 170831 - RNA, 19 nt, Artificial Sequence
  Description of Artificial Sequence: Synthetic oligonucleotide
  Antisense strand to SEQ ID NO: 170830
gaggacgagaaauauuucc

SEQ ID NO: 170832 - RNA, 19 nt, Artificial Sequence
  Description of Artificial Sequence: Synthetic oligonucleotide
  Sense strand starting at position 3450 of SEQ ID NO: 2200
ggucaaaugucaucaguca

SEQ ID NO: 170833 - RNA, 19 nt, Artificial Sequence
  Description of Artificial Sequence: Synthetic oligonucleotide
  Antisense strand to SEQ ID NO: 170832
ugacugaugacauuugacc

SEQ ID NO: 170834 - RNA, 19 nt, Artificial Sequence
  Description of Artificial Sequence: Synthetic oligonucleotide
  Sense strand starting at position 3451 of SEQ ID NO: 2200
gucaaaugucaucagucac

SEQ ID NO: 170835 - RNA, 19 nt, Artificial Sequence
  Description of Artificial Sequence: Synthetic oligonucleotide
  Antisense strand to SEQ ID NO: 170834
gugacugaugacauuugac

SEQ ID NO: 170836 - RNA, 19 nt, Artificial Sequence
  Description of Artificial Sequence: Synthetic oligonucleotide
  Sense strand starting at position 3457 of SEQ ID NO: 2200
ugucaucagucaccugaau

SEQ ID NO: 170837 - RNA, 19 nt, Artificial Sequence
  Description of Artificial Sequence: Synthetic oligonucleotide
  Antisense strand to SEQ ID NO: 170836
auucaggugacugaugaca

SEQ ID NO: 170838 - RNA, 19 nt, Artificial Sequence
  Description of Artificial Sequence: Synthetic oligonucleotide
  Sense strand starting at position 3550 of SEQ ID NO: 2200
ugagucaggcauugggaau

SEQ ID NO: 170839 - RNA, 19 nt, Artificial Sequence
  Description of Artificial Sequence: Synthetic oligonucleotide
  Antisense strand to SEQ ID NO: 170838
auucccaaugccugacuca

SEQ ID NO: 170840 - RNA, 19 nt, Artificial Sequence
  Description of Artificial Sequence: Synthetic oligonucleotide
  Sense strand starting at position 3551 of SEQ ID NO: 2200
gagucaggcauugggaaua

SEQ ID NO: 170841 - RNA, 19 nt, Artificial Sequence
  Description of Artificial Sequence: Synthetic oligonucleotide
  Antisense strand to SEQ ID NO: 170840
uauucccaaugccugacuc

SEQ ID NO: 170842 - RNA, 19 nt, Artificial Sequence
  Description of Artificial Sequence: Synthetic oligonucleotide
  Sense strand starting at position 3576 of SEQ ID NO: 2200
ggcauaauauucugaagga

SEQ ID NO: 170843 - RNA, 19 nt, Artificial Sequence
  Description of Artificial Sequence: Synthetic oligonucleotide
  Antisense strand to SEQ ID NO: 170842
uccuucagaauauuaugcc

SEQ ID NO: 170844 - RNA, 19 nt, Artificial Sequence
  Description of Artificial Sequence: Synthetic oligonucleotide
  Sense strand starting at position 3577 of SEQ ID NO: 2200
gcauaauauucugaaggaa

SEQ ID NO: 170845 - RNA, 19 nt, Artificial Sequence
  Description of Artificial Sequence: Synthetic oligonucleotide
  Antisense strand to SEQ ID NO: 170844
uuccuucagaauauuaugc

SEQ ID NO: 170846 - RNA, 19 nt, Artificial Sequence
  Description of Artificial Sequence: Synthetic oligonucleotide
  Sense strand starting at position 3639 of SEQ ID NO: 2200
aguuuaaggccuuaagauu

SEQ ID NO: 170847 - RNA, 19 nt, Artificial Sequence
  Description of Artificial Sequence: Synthetic oligonucleotide
  Antisense strand to SEQ ID NO: 170846
aaucuuaaggccuuaaacu

SEQ ID NO: 170848 - RNA, 19 nt, Artificial Sequence
  Description of Artificial Sequence: Synthetic oligonucleotide
  Sense strand starting at position 3676 of SEQ ID NO: 2200
aacaguauuugauaugguu

SEQ ID NO: 170849 - RNA, 19 nt, Artificial Sequence
  Description of Artificial Sequence: Synthetic oligonucleotide
  Antisense strand to SEQ ID NO: 170848
aaccauaucaaauacuguu

SEQ ID NO: 170850 - RNA, 19 nt, Artificial Sequence
  Description of Artificial Sequence: Synthetic oligonucleotide
  Sense strand starting at position 3745 of SEQ ID NO: 2200
ccauguguccuaggaggaa

SEQ ID NO: 170851 - RNA, 19 nt, Artificial Sequence
  Description of Artificial Sequence: Synthetic oligonucleotide
  Antisense strand to SEQ ID NO: 170850
uuccuccuaggacacaugg

SEQ ID NO: 170852 - RNA, 19 nt, Artificial Sequence
  Description of Artificial Sequence: Synthetic oligonucleotide
  Sense strand starting at position 231 of SEQ ID NO: 2201
uagagagcacagugguuaa

SEQ ID NO: 170853 - RNA, 19 nt, Artificial Sequence
  Description of Artificial Sequence: Synthetic oligonucleotide
  Antisense strand to SEQ ID NO: 170852
uuaaccacugugcucucua

SEQ ID NO: 170854 - RNA, 19 nt, Artificial Sequence
  Description of Artificial Sequence: Synthetic oligonucleotide
  Sense strand starting at position 249 of SEQ ID NO: 2201
aaagcauggguuugaaauu

SEQ ID NO: 170855 - RNA, 19 nt, Artificial Sequence
  Description of Artificial Sequence: Synthetic oligonucleotide
  Antisense strand to SEQ ID NO: 170854
aauuucaaacccaugcuuu

SEQ ID NO: 170856 - RNA, 19 nt, Artificial Sequence
  Description of Artificial Sequence: Synthetic oligonucleotide
  Sense strand starting at position 331 of SEQ ID NO: 2201
agauuuggguucuacuacu

SEQ ID NO: 170857 - RNA, 19 nt, Artificial Sequence
  Description of Artificial Sequence: Synthetic oligonucleotide
  Antisense strand to SEQ ID NO: 170856
aguaguagaacccaaaucu

SEQ ID NO: 170858 - RNA, 19 nt, Artificial Sequence
  Description of Artificial Sequence: Synthetic oligonucleotide
  Sense strand starting at position 338 of SEQ ID NO: 2201
gguucuacuacuugucagu

SEQ ID NO: 170859 - RNA, 19 nt, Artificial Sequence
  Description of Artificial Sequence: Synthetic oligonucleotide
  Antisense strand to SEQ ID NO: 170858
acugacaaguaguagaacc

SEQ ID NO: 170860 - RNA, 19 nt, Artificial Sequence
  Description of Artificial Sequence: Synthetic oligonucleotide
  Sense strand starting at position 381 of SEQ ID NO: 2201
gcuugagcacauuacuaaa

SEQ ID NO: 170861 - RNA, 19 nt, Artificial Sequence
  Description of Artificial Sequence: Synthetic oligonucleotide
  Antisense strand to SEQ ID NO: 170860
uuuaguaaugugcucaagc

SEQ ID NO: 170862 - RNA, 19 nt, Artificial Sequence
  Description of Artificial Sequence: Synthetic oligonucleotide
  Sense strand starting at position 1154 of SEQ ID NO: 2201
uggcaucaguuucuacaga

SEQ ID NO: 170863 - RNA, 19 nt, Artificial Sequence
  Description of Artificial Sequence: Synthetic oligonucleotide
  Antisense strand to SEQ ID NO: 170862
ucuguagaaacugaugcca

SEQ ID NO: 170864 - RNA, 19 nt, Artificial Sequence
  Description of Artificial Sequence: Synthetic oligonucleotide
  Sense strand starting at position 1187 of SEQ ID NO: 2201
guuggaaauguaggugauu

SEQ ID NO: 170865 - RNA, 19 nt, Artificial Sequence
  Description of Artificial Sequence: Synthetic oligonucleotide
  Antisense strand to SEQ ID NO: 170864
aaucaccuacauuuccaac

SEQ ID NO: 170866 - RNA, 19 nt, Artificial Sequence
  Description of Artificial Sequence: Synthetic oligonucleotide
  Sense strand starting at position 1188 of SEQ ID NO: 2201
uuggaaauguaggugauua

SEQ ID NO: 170867 - RNA, 19 nt, Artificial Sequence
  Description of Artificial Sequence: Synthetic oligonucleotide
  Antisense strand to SEQ ID NO: 170866
uaaucaccuacauuuccaa

SEQ ID NO: 170868 - RNA, 19 nt, Artificial Sequence
  Description of Artificial Sequence: Synthetic oligonucleotide
  Sense strand starting at position 1189 of SEQ ID NO: 2201
uggaaauguaggugauuaa

SEQ ID NO: 170869 - RNA, 19 nt, Artificial Sequence
  Description of Artificial Sequence: Synthetic oligonucleotide
  Antisense strand to SEQ ID NO: 170868
uuaaucaccuacauuucca

SEQ ID NO: 170870 - RNA, 19 nt, Artificial Sequence
  Description of Artificial Sequence: Synthetic oligonucleotide
  Sense strand starting at position 1196 of SEQ ID NO: 2201
guaggugauuaaguugaau

SEQ ID NO: 170871 - RNA, 19 nt, Artificial Sequence
  Description of Artificial Sequence: Synthetic oligonucleotide
  Antisense strand to SEQ ID NO: 170870
auucaacuuaaucaccuac

SEQ ID NO: 170872 - RNA, 19 nt, Artificial Sequence
  Description of Artificial Sequence: Synthetic oligonucleotide
  Sense strand starting at position 1263 of SEQ ID NO: 2201
ucaggaucaguuggcuuau

SEQ ID NO: 170873 - RNA, 19 nt, Artificial Sequence
  Description of Artificial Sequence: Synthetic oligonucleotide
  Antisense strand to SEQ ID NO: 170872
auaagccaacugauccuga

SEQ ID NO: 170874 - RNA, 19 nt, Artificial Sequence
  Description of Artificial Sequence: Synthetic oligonucleotide
  Sense strand starting at position 1264 of SEQ ID NO: 2201
caggaucaguuggcuuauu

SEQ ID NO: 170875 - RNA, 19 nt, Artificial Sequence
  Description of Artificial Sequence: Synthetic oligonucleotide
  Antisense strand to SEQ ID NO: 170874
aauaagccaacugauccug

SEQ ID NO: 170876 - RNA, 19 nt, Artificial Sequence
  Description of Artificial Sequence: Synthetic oligonucleotide
  Sense strand starting at position 1313 of SEQ ID NO: 2201
cuaguuauuugagcuuucu

SEQ ID NO: 170877 - RNA, 19 nt, Artificial Sequence
  Description of Artificial Sequence: Synthetic oligonucleotide
  Antisense strand to SEQ ID NO: 170876
agaaagcucaaauaacuag

SEQ ID NO: 170878 - RNA, 19 nt, Artificial Sequence
  Description of Artificial Sequence: Synthetic oligonucleotide
  Sense strand starting at position 1712 of SEQ ID NO: 2201
gcaccaaguugaucauucu

SEQ ID NO: 170879 - RNA, 19 nt, Artificial Sequence
  Description of Artificial Sequence: Synthetic oligonucleotide
  Antisense strand to SEQ ID NO: 170878
agaaugaucaacuuggugc

SEQ ID NO: 170880 - RNA, 19 nt, Artificial Sequence
  Description of Artificial Sequence: Synthetic oligonucleotide
  Sense strand starting at position 1763 of SEQ ID NO: 2201
uuugguugcaaaugaugga

SEQ ID NO: 170881 - RNA, 19 nt, Artificial Sequence
  Description of Artificial Sequence: Synthetic oligonucleotide
  Antisense strand to SEQ ID NO: 170880
uccaucauuugcaaccaaa

SEQ ID NO: 170882 - RNA, 19 nt, Artificial Sequence
  Description of Artificial Sequence: Synthetic oligonucleotide
  Sense strand starting at position 1767 of SEQ ID NO: 2201
guugcaaaugauggaaauu

SEQ ID NO: 170883 - RNA, 19 nt, Artificial Sequence
  Description of Artificial Sequence: Synthetic oligonucleotide
  Antisense strand to SEQ ID NO: 170882
aauuuccaucauuugcaac

SEQ ID NO: 170884 - RNA, 19 nt, Artificial Sequence
  Description of Artificial Sequence: Synthetic oligonucleotide
  Sense strand starting at position 1814 of SEQ ID NO: 2201
agguacugaccucaauguu

SEQ ID NO: 170885 - RNA, 19 nt, Artificial Sequence
  Description of Artificial Sequence: Synthetic oligonucleotide
  Antisense strand to SEQ ID NO: 170884
aacauugaggucaguaccu

SEQ ID NO: 170886 - RNA, 19 nt, Artificial Sequence
  Description of Artificial Sequence: Synthetic oligonucleotide
  Sense strand starting at position 1860 of SEQ ID NO: 2201
uggcauccaucugcagaua

SEQ ID NO: 170887 - RNA, 19 nt, Artificial Sequence
  Description of Artificial Sequence: Synthetic oligonucleotide
  Antisense strand to SEQ ID NO: 170886
uaucugcagauggaugcca

SEQ ID NO: 170888 - RNA, 19 nt, Artificial Sequence
  Description of Artificial Sequence: Synthetic oligonucleotide
  Sense strand starting at position 1923 of SEQ ID NO: 2201
ggcucaugcgguucuuuca

SEQ ID NO: 170889 - RNA, 19 nt, Artificial Sequence
  Description of Artificial Sequence: Synthetic oligonucleotide
  Antisense strand to SEQ ID NO: 170888
ugaaagaaccgcaugagcc

SEQ ID NO: 170890 - RNA, 19 nt, Artificial Sequence
  Description of Artificial Sequence: Synthetic oligonucleotide
  Sense strand starting at position 1969 of SEQ ID NO: 2201
cuuucuuucuuaguagcua

SEQ ID NO: 170891 - RNA, 19 nt, Artificial Sequence
  Description of Artificial Sequence: Synthetic oligonucleotide
  Antisense strand to SEQ ID NO: 170890
uagcuacuaagaaagaaag

SEQ ID NO: 170892 - RNA, 19 nt, Artificial Sequence
  Description of Artificial Sequence: Synthetic oligonucleotide
  Sense strand starting at position 2091 of SEQ ID NO: 2201
uuaggagaucgagacuguu

SEQ ID NO: 170893 - RNA, 19 nt, Artificial Sequence
  Description of Artificial Sequence: Synthetic oligonucleotide
  Antisense strand to SEQ ID NO: 170892
aacagucucgaucuccuaa

SEQ ID NO: 170894 - RNA, 19 nt, Artificial Sequence
  Description of Artificial Sequence: Synthetic oligonucleotide
  Sense strand starting at position 2355 of SEQ ID NO: 2201
ugugcucaucucgcgagaa

SEQ ID NO: 170895 - RNA, 19 nt, Artificial Sequence
  Description of Artificial Sequence: Synthetic oligonucleotide
  Antisense strand to SEQ ID NO: 170894
uucucgcgagaugagcaca

SEQ ID NO: 170896 - RNA, 19 nt, Artificial Sequence
  Description of Artificial Sequence: Synthetic oligonucleotide
  Sense strand starting at position 2561 of SEQ ID NO: 2201
agaggcagggcucaguaaa

SEQ ID NO: 170897 - RNA, 19 nt, Artificial Sequence
  Description of Artificial Sequence: Synthetic oligonucleotide
  Antisense strand to SEQ ID NO: 170896
uuuacugagcccugccucu

SEQ ID NO: 170898 - RNA, 19 nt, Artificial Sequence
  Description of Artificial Sequence: Synthetic oligonucleotide
  Sense strand starting at position 2612 of SEQ ID NO: 2201
uaaguuuccgcagaguaau

SEQ ID NO: 170899 - RNA, 19 nt, Artificial Sequence
  Description of Artificial Sequence: Synthetic oligonucleotide
  Antisense strand to SEQ ID NO: 170898
auuacucugcggaaacuua

SEQ ID NO: 170900 - RNA, 19 nt, Artificial Sequence
  Description of Artificial Sequence: Synthetic oligonucleotide
  Sense strand starting at position 2615 of SEQ ID NO: 2201
guuuccgcagaguaauaau

SEQ ID NO: 170901 - RNA, 19 nt, Artificial Sequence
  Description of Artificial Sequence: Synthetic oligonucleotide
  Antisense strand to SEQ ID NO: 170900
auuauuacucugcggaaac

SEQ ID NO: 170902 - RNA, 19 nt, Artificial Sequence
  Description of Artificial Sequence: Synthetic oligonucleotide
  Sense strand starting at position 2681 of SEQ ID NO: 2201
ggaggguucgaagagaugu

SEQ ID NO: 170903 - RNA, 19 nt, Artificial Sequence
  Description of Artificial Sequence: Synthetic oligonucleotide
  Antisense strand to SEQ ID NO: 170902
acaucucuucgaacccucc

SEQ ID NO: 170904 - RNA, 19 nt, Artificial Sequence
  Description of Artificial Sequence: Synthetic oligonucleotide
  Sense strand starting at position 2691 of SEQ ID NO: 2201
aagagaugugccuguaccu

SEQ ID NO: 170905 - RNA, 19 nt, Artificial Sequence
  Description of Artificial Sequence: Synthetic oligonucleotide
  Antisense strand to SEQ ID NO: 170904
agguacaggcacaucucuu

SEQ ID NO: 170906 - RNA, 19 nt, Artificial Sequence
  Description of Artificial Sequence: Synthetic oligonucleotide
  Sense strand starting at position 2715 of SEQ ID NO: 2201
uggcguccucucuucuuua

SEQ ID NO: 170907 - RNA, 19 nt, Artificial Sequence
  Description of Artificial Sequence: Synthetic oligonucleotide
  Antisense strand to SEQ ID NO: 170906
uaaagaagagaggacgcca

SEQ ID NO: 170908 - RNA, 19 nt, Artificial Sequence
  Description of Artificial Sequence: Synthetic oligonucleotide
  Sense strand starting at position 2736 of SEQ ID NO: 2201
uguuauuagcucugagcag

SEQ ID NO: 170909 - RNA, 19 nt, Artificial Sequence
  Description of Artificial Sequence: Synthetic oligonucleotide
  Antisense strand to SEQ ID NO: 170908
cugcucagagcuaauaaca

SEQ ID NO: 170910 - RNA, 19 nt, Artificial Sequence
  Description of Artificial Sequence: Synthetic oligonucleotide
  Sense strand starting at position 2762 of SEQ ID NO: 2201
uguauagggaauuguguua

SEQ ID NO: 170911 - RNA, 19 nt, Artificial Sequence
  Description of Artificial Sequence: Synthetic oligonucleotide
  Antisense strand to SEQ ID NO: 170910
uaacacaauucccuauaca

SEQ ID NO: 170912 - RNA, 19 nt, Artificial Sequence
  Description of Artificial Sequence: Synthetic oligonucleotide
  Sense strand starting at position 2866 of SEQ ID NO: 2201
uggauaaauuuggauauca

SEQ ID NO: 170913 - RNA, 19 nt, Artificial Sequence
  Description of Artificial Sequence: Synthetic oligonucleotide
  Antisense strand to SEQ ID NO: 170912
ugauauccaaauuuaucca

SEQ ID NO: 170914 - RNA, 19 nt, Artificial Sequence
  Description of Artificial Sequence: Synthetic oligonucleotide
  Sense strand starting at position 2882 of SEQ ID NO: 2201
ucauaaaggcuguauaagu

SEQ ID NO: 170915 - RNA, 19 nt, Artificial Sequence
  Description of Artificial Sequence: Synthetic oligonucleotide
  Antisense strand to SEQ ID NO: 170914
acuuauacagccuuuauga

SEQ ID NO: 170916 - RNA, 19 nt, Artificial Sequence
  Description of Artificial Sequence: Synthetic oligonucleotide
  Sense strand starting at position 2891 of SEQ ID NO: 2201
cuguauaaguguguucaug

SEQ ID NO: 170917 - RNA, 19 nt, Artificial Sequence
  Description of Artificial Sequence: Synthetic oligonucleotide
  Antisense strand to SEQ ID NO: 170916
caugaacacacuuauacag

SEQ ID NO: 170918 - RNA, 19 nt, Artificial Sequence
  Description of Artificial Sequence: Synthetic oligonucleotide
  Sense strand starting at position 2901 of SEQ ID NO: 2201
guguucauguguucuagag

SEQ ID NO: 170919 - RNA, 19 nt, Artificial Sequence
  Description of Artificial Sequence: Synthetic oligonucleotide
  Antisense strand to SEQ ID NO: 170918
cucuagaacacaugaacac

SEQ ID NO: 170920 - RNA, 19 nt, Artificial Sequence
  Description of Artificial Sequence: Synthetic oligonucleotide
  Sense strand starting at position 2905 of SEQ ID NO: 2201
ucauguguucuagagccuu

SEQ ID NO: 170921 - RNA, 19 nt, Artificial Sequence
  Description of Artificial Sequence: Synthetic oligonucleotide
  Antisense strand to SEQ ID NO: 170920
aaggcucuagaacacauga

SEQ ID NO: 170922 - RNA, 19 nt, Artificial Sequence
  Description of Artificial Sequence: Synthetic oligonucleotide
  Sense strand starting at position 2961 of SEQ ID NO: 2201
ggaauauaaacguaagugu

SEQ ID NO: 170923 - RNA, 19 nt, Artificial Sequence
  Description of Artificial Sequence: Synthetic oligonucleotide
  Antisense strand to SEQ ID NO: 170922
acacuuacguuuauauucc

SEQ ID NO: 170924 - RNA, 19 nt, Artificial Sequence
  Description of Artificial Sequence: Synthetic oligonucleotide
  Sense strand starting at position 3138 of SEQ ID NO: 2201
acaacaguaugacuaaagu

SEQ ID NO: 170925 - RNA, 19 nt, Artificial Sequence
  Description of Artificial Sequence: Synthetic oligonucleotide
  Antisense strand to SEQ ID NO: 170924
acuuuagucauacuguugu

SEQ ID NO: 170926 - RNA, 19 nt, Artificial Sequence
  Description of Artificial Sequence: Synthetic oligonucleotide
  Sense strand starting at position 3376 of SEQ ID NO: 2201
augguagagugugcagaaa

SEQ ID NO: 170927 - RNA, 19 nt, Artificial Sequence
  Description of Artificial Sequence: Synthetic oligonucleotide
  Antisense strand to SEQ ID NO: 170926
uuucugcacacucuaccau

SEQ ID NO: 170928 - RNA, 19 nt, Artificial Sequence
  Description of Artificial Sequence: Synthetic oligonucleotide
  Sense strand starting at position 3721 of SEQ ID NO: 2201
cagauaguuuggguuggau

SEQ ID NO: 170929 - RNA, 19 nt, Artificial Sequence
  Description of Artificial Sequence: Synthetic oligonucleotide
  Antisense strand to SEQ ID NO: 170928
auccaacccaaacuaucug

SEQ ID NO: 170930 - RNA, 19 nt, Artificial Sequence
  Description of Artificial Sequence: Synthetic oligonucleotide
  Sense strand starting at position 3723 of SEQ ID NO: 2201
gauaguuuggguuggauua

SEQ ID NO: 170931 - RNA, 19 nt, Artificial Sequence
  Description of Artificial Sequence: Synthetic oligonucleotide
  Antisense strand to SEQ ID NO: 170930
uaauccaacccaaacuauc

SEQ ID NO: 170932 - RNA, 19 nt, Artificial Sequence
  Description of Artificial Sequence: Synthetic oligonucleotide
  Sense strand starting at position 3050 of SEQ ID NO: 2202
gcugccuucccagagacuu

SEQ ID NO: 170933 - RNA, 19 nt, Artificial Sequence
  Description of Artificial Sequence: Synthetic oligonucleotide
  Antisense strand to SEQ ID NO: 170932
aagucucugggaaggcagc

SEQ ID NO: 170934 - RNA, 19 nt, Artificial Sequence
  Description of Artificial Sequence: Synthetic oligonucleotide
  Sense strand starting at position 2972 of SEQ ID NO: 2202
guuuguuucuaaggaauuc

SEQ ID NO: 170935 - RNA, 19 nt, Artificial Sequence
  Description of Artificial Sequence: Synthetic oligonucleotide
  Antisense strand to SEQ ID NO: 170934
gaauuccuuagaaacaaac

SEQ ID NO: 170936 - RNA, 19 nt, Artificial Sequence
  Description of Artificial Sequence: Synthetic oligonucleotide
  Sense strand starting at position 2969 of SEQ ID NO: 2202
gugguuuguuucuaaggaa

SEQ ID NO: 170937 - RNA, 19 nt, Artificial Sequence
  Description of Artificial Sequence: Synthetic oligonucleotide
  Antisense strand to SEQ ID NO: 170936
uuccuuagaaacaaaccac

SEQ ID NO: 170938 - RNA, 19 nt, Artificial Sequence
  Description of Artificial Sequence: Synthetic oligonucleotide
  Sense strand starting at position 2968 of SEQ ID NO: 2202
ugugguuuguuucuaagga

SEQ ID NO: 170939 - RNA, 19 nt, Artificial Sequence
  Description of Artificial Sequence: Synthetic oligonucleotide
  Antisense strand to SEQ ID NO: 170938
uccuuagaaacaaaccaca

SEQ ID NO: 170940 - RNA, 19 nt, Artificial Sequence
  Description of Artificial Sequence: Synthetic oligonucleotide
  Sense strand starting at position 2965 of SEQ ID NO: 2202
uccugugguuuguuucuaa

SEQ ID NO: 170941 - RNA, 19 nt, Artificial Sequence
  Description of Artificial Sequence: Synthetic oligonucleotide
  Antisense strand to SEQ ID NO: 170940
uuagaaacaaaccacagga

SEQ ID NO: 170942 - RNA, 19 nt, Artificial Sequence
  Description of Artificial Sequence: Synthetic oligonucleotide
  Sense strand starting at position 2919 of SEQ ID NO: 2202
uccucaaucugaugaagaa

SEQ ID NO: 170943 - RNA, 19 nt, Artificial Sequence
  Description of Artificial Sequence: Synthetic oligonucleotide
  Antisense strand to SEQ ID NO: 170942
uucuucaucagauugagga

SEQ ID NO: 170944 - RNA, 19 nt, Artificial Sequence
  Description of Artificial Sequence: Synthetic oligonucleotide
  Sense strand starting at position 2548 of SEQ ID NO: 2202
gucaucuuguaagaagaaa

SEQ ID NO: 170945 - RNA, 19 nt, Artificial Sequence
  Description of Artificial Sequence: Synthetic oligonucleotide
  Antisense strand to SEQ ID NO: 170944
uuucuucuuacaagaugac

SEQ ID NO: 170946 - RNA, 19 nt, Artificial Sequence
  Description of Artificial Sequence: Synthetic oligonucleotide
  Sense strand starting at position 2545 of SEQ ID NO: 2202
ggcgucaucuuguaagaag

SEQ ID NO: 170947 - RNA, 19 nt, Artificial Sequence
  Description of Artificial Sequence: Synthetic oligonucleotide
  Antisense strand to SEQ ID NO: 170946
cuucuuacaagaugacgcc

SEQ ID NO: 170948 - RNA, 19 nt, Artificial Sequence
  Description of Artificial Sequence: Synthetic oligonucleotide
  Sense strand starting at position 2418 of SEQ ID NO: 2202
uaaguuuggucacagggaa

SEQ ID NO: 170949 - RNA, 19 nt, Artificial Sequence
  Description of Artificial Sequence: Synthetic oligonucleotide
  Antisense strand to SEQ ID NO: 170948
uucccugugaccaaacuua

SEQ ID NO: 170950 - RNA, 19 nt, Artificial Sequence
  Description of Artificial Sequence: Synthetic oligonucleotide
  Sense strand starting at position 2413 of SEQ ID NO: 2202
gcccuuaaguuuggucaca

SEQ ID NO: 170951 - RNA, 19 nt, Artificial Sequence
  Description of Artificial Sequence: Synthetic oligonucleotide
  Antisense strand to SEQ ID NO: 170950
ugugaccaaacuuaagggc

SEQ ID NO: 170952 - RNA, 19 nt, Artificial Sequence
  Description of Artificial Sequence: Synthetic oligonucleotide
  Sense strand starting at position 2406 of SEQ ID NO: 2202
gcucacugcccuuaaguuu

SEQ ID NO: 170953 - RNA, 19 nt, Artificial Sequence
  Description of Artificial Sequence: Synthetic oligonucleotide
  Antisense strand to SEQ ID NO: 170952
aaacuuaagggcagugagc

SEQ ID NO: 170954 - RNA, 19 nt, Artificial Sequence
  Description of Artificial Sequence: Synthetic oligonucleotide
  Sense strand starting at position 2325 of SEQ ID NO: 2202
ugugaauaggucuggacuc

SEQ ID NO: 170955 - RNA, 19 nt, Artificial Sequence
  Description of Artificial Sequence: Synthetic oligonucleotide
  Antisense strand to SEQ ID NO: 170954
gaguccagaccuauucaca

SEQ ID NO: 170956 - RNA, 19 nt, Artificial Sequence
  Description of Artificial Sequence: Synthetic oligonucleotide
  Sense strand starting at position 2319 of SEQ ID NO: 2202
uugaauugugaauaggucu

SEQ ID NO: 170957 - RNA, 19 nt, Artificial Sequence
  Description of Artificial Sequence: Synthetic oligonucleotide
  Antisense strand to SEQ ID NO: 170956
agaccuauucacaauucaa

SEQ ID NO: 170958 - RNA, 19 nt, Artificial Sequence
  Description of Artificial Sequence: Synthetic oligonucleotide
  Sense strand starting at position 2315 of SEQ ID NO: 2202
ggcuuugaauugugaauag

SEQ ID NO: 170959 - RNA, 19 nt, Artificial Sequence
  Description of Artificial Sequence: Synthetic oligonucleotide
  Antisense strand to SEQ ID NO: 170958
cuauucacaauucaaagcc

SEQ ID NO: 170960 - RNA, 19 nt, Artificial Sequence
  Description of Artificial Sequence: Synthetic oligonucleotide
  Sense strand starting at position 2313 of SEQ ID NO: 2202
agggcuuugaauugugaau

SEQ ID NO: 170961 - RNA, 19 nt, Artificial Sequence
  Description of Artificial Sequence: Synthetic oligonucleotide
  Antisense strand to SEQ ID NO: 170960
auucacaauucaaagcccu

SEQ ID NO: 170962 - RNA, 19 nt, Artificial Sequence
  Description of Artificial Sequence: Synthetic oligonucleotide
  Sense strand starting at position 1848 of SEQ ID NO: 2202
ccgccucuuaccgguggaa

SEQ ID NO: 170963 - RNA, 19 nt, Artificial Sequence
  Description of Artificial Sequence: Synthetic oligonucleotide
  Antisense strand to SEQ ID NO: 170962
uuccaccgguaagaggcgg

SEQ ID NO: 170964 - RNA, 19 nt, Artificial Sequence
  Description of Artificial Sequence: Synthetic oligonucleotide
  Sense strand starting at position 1356 of SEQ ID NO: 2202
aacugugacuaaugacgau

SEQ ID NO: 170965 - RNA, 19 nt, Artificial Sequence
  Description of Artificial Sequence: Synthetic oligonucleotide
  Antisense strand to SEQ ID NO: 170964
aucgucauuagucacaguu

SEQ ID NO: 170966 - RNA, 19 nt, Artificial Sequence
  Description of Artificial Sequence: Synthetic oligonucleotide
  Sense strand starting at position 1352 of SEQ ID NO: 2202
gcgcaacugugacuaauga

SEQ ID NO: 170967 - RNA, 19 nt, Artificial Sequence
  Description of Artificial Sequence: Synthetic oligonucleotide
  Antisense strand to SEQ ID NO: 170966
ucauuagucacaguugcgc

SEQ ID NO: 170968 - RNA, 19 nt, Artificial Sequence
  Description of Artificial Sequence: Synthetic oligonucleotide
  Sense strand starting at position 1350 of SEQ ID NO: 2202
aagcgcaacugugacuaau

SEQ ID NO: 170969 - RNA, 19 nt, Artificial Sequence
  Description of Artificial Sequence: Synthetic oligonucleotide
  Antisense strand to SEQ ID NO: 170968
auuagucacaguugcgcuu

SEQ ID NO: 170970 - RNA, 19 nt, Artificial Sequence
  Description of Artificial Sequence: Synthetic oligonucleotide
  Sense strand starting at position 1332 of SEQ ID NO: 2202
gugacuggaccuuggagaa

SEQ ID NO: 170971 - RNA, 19 nt, Artificial Sequence
  Description of Artificial Sequence: Synthetic oligonucleotide
  Antisense strand to SEQ ID NO: 170970
uucuccaagguccagucac

SEQ ID NO: 170972 - RNA, 19 nt, Artificial Sequence
  Description of Artificial Sequence: Synthetic oligonucleotide
  Sense strand starting at position 1319 of SEQ ID NO: 2202
gagaaauggugccgugacu

SEQ ID NO: 170973 - RNA, 19 nt, Artificial Sequence
  Description of Artificial Sequence: Synthetic oligonucleotide
  Antisense strand to SEQ ID NO: 170972
agucacggcaccauuucuc

SEQ ID NO: 170974 - RNA, 19 nt, Artificial Sequence
  Description of Artificial Sequence: Synthetic oligonucleotide
  Sense strand starting at position 1179 of SEQ ID NO: 2202
acuuaugauucgugcauuu

SEQ ID NO: 170975 - RNA, 19 nt, Artificial Sequence
  Description of Artificial Sequence: Synthetic oligonucleotide
  Antisense strand to SEQ ID NO: 170974
aaaugcacgaaucauaagu

SEQ ID NO: 170976 - RNA, 19 nt, Artificial Sequence
  Description of Artificial Sequence: Synthetic oligonucleotide
  Sense strand starting at position 1178 of SEQ ID NO: 2202
uacuuaugauucgugcauu

SEQ ID NO: 170977 - RNA, 19 nt, Artificial Sequence
  Description of Artificial Sequence: Synthetic oligonucleotide
  Antisense strand to SEQ ID NO: 170976
aaugcacgaaucauaagua

SEQ ID NO: 170978 - RNA, 19 nt, Artificial Sequence
  Description of Artificial Sequence: Synthetic oligonucleotide
  Sense strand starting at position 1169 of SEQ ID NO: 2202
ugggcuguauacuuaugau

SEQ ID NO: 170979 - RNA, 19 nt, Artificial Sequence
  Description of Artificial Sequence: Synthetic oligonucleotide
  Antisense strand to SEQ ID NO: 170978
aucauaaguauacagccca

SEQ ID NO: 170980 - RNA, 19 nt, Artificial Sequence
  Description of Artificial Sequence: Synthetic oligonucleotide
  Sense strand starting at position 692 of SEQ ID NO: 2202
aauauuauguggcaacgaa

SEQ ID NO: 170981 - RNA, 19 nt, Artificial Sequence
  Description of Artificial Sequence: Synthetic oligonucleotide
  Antisense strand to SEQ ID NO: 170980
uucguugccacauaauauu

SEQ ID NO: 170982 - RNA, 19 nt, Artificial Sequence
  Description of Artificial Sequence: Synthetic oligonucleotide
  Sense strand starting at position 662 of SEQ ID NO: 2202
ucaguaaauucuggcacuu

SEQ ID NO: 170983 - RNA, 19 nt, Artificial Sequence
  Description of Artificial Sequence: Synthetic oligonucleotide
  Antisense strand to SEQ ID NO: 170982
aagugccagaauuuacuga

SEQ ID NO: 170984 - RNA, 19 nt, Artificial Sequence
  Description of Artificial Sequence: Synthetic oligonucleotide
  Sense strand starting at position 603 of SEQ ID NO: 2202
ccauguauuugucauccaa

SEQ ID NO: 170985 - RNA, 19 nt, Artificial Sequence
  Description of Artificial Sequence: Synthetic oligonucleotide
  Antisense strand to SEQ ID NO: 170984
uuggaugacaaauacaugg

SEQ ID NO: 170986 - RNA, 19 nt, Artificial Sequence
  Description of Artificial Sequence: Synthetic oligonucleotide
  Sense strand starting at position 134 of SEQ ID NO: 2202
ucacuagugaugugacaga

SEQ ID NO: 170987 - RNA, 19 nt, Artificial Sequence
  Description of Artificial Sequence: Synthetic oligonucleotide
  Antisense strand to SEQ ID NO: 170986
ucugucacaucacuaguga

SEQ ID NO: 170988 - RNA, 19 nt, Artificial Sequence
  Description of Artificial Sequence: Synthetic oligonucleotide
  Sense strand starting at position 132 of SEQ ID NO: 2202
gcucacuagugaugugaca

SEQ ID NO: 170989 - RNA, 19 nt, Artificial Sequence
  Description of Artificial Sequence: Synthetic oligonucleotide
  Antisense strand to SEQ ID NO: 170988
ugucacaucacuagugagc

SEQ ID NO: 170990 - RNA, 19 nt, Artificial Sequence
  Description of Artificial Sequence: Synthetic oligonucleotide
  Sense strand starting at position 111 of SEQ ID NO: 2202
gcaaucgaucagugucaca

SEQ ID NO: 170991 - RNA, 19 nt, Artificial Sequence
  Description of Artificial Sequence: Synthetic oligonucleotide
  Antisense strand to SEQ ID NO: 170990
ugugacacugaucgauugc

SEQ ID NO: 170992 - RNA, 19 nt, Artificial Sequence
  Description of Artificial Sequence: Synthetic oligonucleotide
  Sense strand starting at position 98 of SEQ ID NO: 2202
ugugaaaugcuaugcaauc

SEQ ID NO: 170993 - RNA, 19 nt, Artificial Sequence
  Description of Artificial Sequence: Synthetic oligonucleotide
  Antisense strand to SEQ ID NO: 170992
gauugcauagcauuucaca

SEQ ID NO: 170994 - RNA, 19 nt, Artificial Sequence
  Description of Artificial Sequence: Synthetic oligonucleotide
  Sense strand starting at position 88 of SEQ ID NO: 2202
gggucaguugugugaaaug

SEQ ID NO: 170995 - RNA, 19 nt, Artificial Sequence
  Description of Artificial Sequence: Synthetic oligonucleotide
  Antisense strand to SEQ ID NO: 170994
cauuucacacaacugaccc

SEQ ID NO: 170996 - RNA, 19 nt, Artificial Sequence
  Description of Artificial Sequence: Synthetic oligonucleotide
  Sense strand starting at position 39 of SEQ ID NO: 2202
ggccaagaaguguaccaga

SEQ ID NO: 170997 - RNA, 19 nt, Artificial Sequence
  Description of Artificial Sequence: Synthetic oligonucleotide
  Antisense strand to SEQ ID NO: 170996
ucugguacacuucuuggcc

SEQ ID NO: 170998 - RNA, 19 nt, Artificial Sequence
  Description of Artificial Sequence: Synthetic oligonucleotide
  Sense strand starting at position 2765 of SEQ ID NO: 2203
gcugccuucccagagacuu

SEQ ID NO: 170999 - RNA, 19 nt, Artificial Sequence
  Description of Artificial Sequence: Synthetic oligonucleotide
  Antisense strand to SEQ ID NO: 170998
aagucucugggaaggcagc

SEQ ID NO: 171000 - RNA, 19 nt, Artificial Sequence
  Description of Artificial Sequence: Synthetic oligonucleotide
  Sense strand starting at position 2687 of SEQ ID NO: 2203
guuuguuucuaaggaauuc

SEQ ID NO: 171001 - RNA, 19 nt, Artificial Sequence
  Description of Artificial Sequence: Synthetic oligonucleotide
  Antisense strand to SEQ ID NO: 171000
gaauuccuuagaaacaaac

SEQ ID NO: 171002 - RNA, 19 nt, Artificial Sequence
  Description of Artificial Sequence: Synthetic oligonucleotide
  Sense strand starting at position 2684 of SEQ ID NO: 2203
gugguuuguuucuaaggaa

SEQ ID NO: 171003 - RNA, 19 nt, Artificial Sequence
  Description of Artificial Sequence: Synthetic oligonucleotide
  Antisense strand to SEQ ID NO: 171002
uuccuuagaaacaaaccac

SEQ ID NO: 171004 - RNA, 19 nt, Artificial Sequence
  Description of Artificial Sequence: Synthetic oligonucleotide
  Sense strand starting at position 2683 of SEQ ID NO: 2203
ugugguuuguuucuaagga

SEQ ID NO: 171005 - RNA, 19 nt, Artificial Sequence
  Description of Artificial Sequence: Synthetic oligonucleotide
  Antisense strand to SEQ ID NO: 171004
uccuuagaaacaaaccaca

SEQ ID NO: 171006 - RNA, 19 nt, Artificial Sequence
  Description of Artificial Sequence: Synthetic oligonucleotide
  Sense strand starting at position 2680 of SEQ ID NO: 2203
uccugugguuuguuucuaa

SEQ ID NO: 171007 - RNA, 19 nt, Artificial Sequence
  Description of Artificial Sequence: Synthetic oligonucleotide
  Antisense strand to SEQ ID NO: 171006
uuagaaacaaaccacagga

SEQ ID NO: 171008 - RNA, 19 nt, Artificial Sequence
  Description of Artificial Sequence: Synthetic oligonucleotide
  Sense strand starting at position 2634 of SEQ ID NO: 2203
uccucaaucugaugaagaa

SEQ ID NO: 171009 - RNA, 19 nt, Artificial Sequence
  Description of Artificial Sequence: Synthetic oligonucleotide
  Antisense strand to SEQ ID NO: 171008
uucuucaucagauugagga

SEQ ID NO: 171010 - RNA, 19 nt, Artificial Sequence
  Description of Artificial Sequence: Synthetic oligonucleotide
  Sense strand starting at position 2263 of SEQ ID NO: 2203
gucaucuuguaagaagaaa

SEQ ID NO: 171011 - RNA, 19 nt, Artificial Sequence
  Description of Artificial Sequence: Synthetic oligonucleotide
  Antisense strand to SEQ ID NO: 171010
uuucuucuuacaagaugac

SEQ ID NO: 171012 - RNA, 19 nt, Artificial Sequence
  Description of Artificial Sequence: Synthetic oligonucleotide
  Sense strand starting at position 2260 of SEQ ID NO: 2203
ggcgucaucuuguaagaag

SEQ ID NO: 171013 - RNA, 19 nt, Artificial Sequence
  Description of Artificial Sequence: Synthetic oligonucleotide
  Antisense strand to SEQ ID NO: 171012
cuucuuacaagaugacgcc

SEQ ID NO: 171014 - RNA, 19 nt, Artificial Sequence
  Description of Artificial Sequence: Synthetic oligonucleotide
  Sense strand starting at position 2133 of SEQ ID NO: 2203
uaaguuuggucacagggaa

SEQ ID NO: 171015 - RNA, 19 nt, Artificial Sequence
  Description of Artificial Sequence: Synthetic oligonucleotide
  Antisense strand to SEQ ID NO: 171014
uucccugugaccaaacuua

SEQ ID NO: 171016 - RNA, 19 nt, Artificial Sequence
  Description of Artificial Sequence: Synthetic oligonucleotide
  Sense strand starting at position 2128 of SEQ ID NO: 2203
gcccuuaaguuuggucaca

SEQ ID NO: 171017 - RNA, 19 nt, Artificial Sequence
  Description of Artificial Sequence: Synthetic oligonucleotide
  Antisense strand to SEQ ID NO: 171016
ugugaccaaacuuaagggc

SEQ ID NO: 171018 - RNA, 19 nt, Artificial Sequence
  Description of Artificial Sequence: Synthetic oligonucleotide
  Sense strand starting at position 2121 of SEQ ID NO: 2203
gcucacugcccuuaaguuu

SEQ ID NO: 171019 - RNA, 19 nt, Artificial Sequence
  Description of Artificial Sequence: Synthetic oligonucleotide
  Antisense strand to SEQ ID NO: 171018
aaacuuaagggcagugagc

SEQ ID NO: 171020 - RNA, 19 nt, Artificial Sequence
  Description of Artificial Sequence: Synthetic oligonucleotide
  Sense strand starting at position 2040 of SEQ ID NO: 2203
ugugaauaggucuggacuc

SEQ ID NO: 171021 - RNA, 19 nt, Artificial Sequence
  Description of Artificial Sequence: Synthetic oligonucleotide
  Antisense strand to SEQ ID NO: 171020
gaguccagaccuauucaca

SEQ ID NO: 171022 - RNA, 19 nt, Artificial Sequence
  Description of Artificial Sequence: Synthetic oligonucleotide
  Sense strand starting at position 2034 of SEQ ID NO: 2203
uugaauugugaauaggucu

SEQ ID NO: 171023 - RNA, 19 nt, Artificial Sequence
  Description of Artificial Sequence: Synthetic oligonucleotide
  Antisense strand to SEQ ID NO: 171022
agaccuauucacaauucaa

SEQ ID NO: 171024 - RNA, 19 nt, Artificial Sequence
  Description of Artificial Sequence: Synthetic oligonucleotide
  Sense strand starting at position 2030 of SEQ ID NO: 2203
ggcuuugaauugugaauag

SEQ ID NO: 171025 - RNA, 19 nt, Artificial Sequence
  Description of Artificial Sequence: Synthetic oligonucleotide
  Antisense strand to SEQ ID NO: 171024
cuauucacaauucaaagcc

SEQ ID NO: 171026 - RNA, 19 nt, Artificial Sequence
  Description of Artificial Sequence: Synthetic oligonucleotide
  Sense strand starting at position 2028 of SEQ ID NO: 2203
agggcuuugaauugugaau

SEQ ID NO: 171027 - RNA, 19 nt, Artificial Sequence
  Description of Artificial Sequence: Synthetic oligonucleotide
  Antisense strand to SEQ ID NO: 171026
auucacaauucaaagcccu

SEQ ID NO: 171028 - RNA, 19 nt, Artificial Sequence
  Description of Artificial Sequence: Synthetic oligonucleotide
  Sense strand starting at position 1563 of SEQ ID NO: 2203
ccgccucuuaccgguggaa

SEQ ID NO: 171029 - RNA, 19 nt, Artificial Sequence
  Description of Artificial Sequence: Synthetic oligonucleotide
  Antisense strand to SEQ ID NO: 171028
uuccaccgguaagaggcgg

SEQ ID NO: 171030 - RNA, 19 nt, Artificial Sequence
  Description of Artificial Sequence: Synthetic oligonucleotide
  Sense strand starting at position 1071 of SEQ ID NO: 2203
aacugugacuaaugacgau

SEQ ID NO: 171031 - RNA, 19 nt, Artificial Sequence
  Description of Artificial Sequence: Synthetic oligonucleotide
  Antisense strand to SEQ ID NO: 171030
aucgucauuagucacaguu

SEQ ID NO: 171032 - RNA, 19 nt, Artificial Sequence
  Description of Artificial Sequence: Synthetic oligonucleotide
  Sense strand starting at position 1067 of SEQ ID NO: 2203
gcgcaacugugacuaauga

SEQ ID NO: 171033 - RNA, 19 nt, Artificial Sequence
  Description of Artificial Sequence: Synthetic oligonucleotide
  Antisense strand to SEQ ID NO: 171032
ucauuagucacaguugcgc

SEQ ID NO: 171034 - RNA, 19 nt, Artificial Sequence
  Description of Artificial Sequence: Synthetic oligonucleotide
  Sense strand starting at position 1065 of SEQ ID NO: 2203
aagcgcaacugugacuaau

SEQ ID NO: 171035 - RNA, 19 nt, Artificial Sequence
  Description of Artificial Sequence: Synthetic oligonucleotide
  Antisense strand to SEQ ID NO: 171034
auuagucacaguugcgcuu

SEQ ID NO: 171036 - RNA, 19 nt, Artificial Sequence
  Description of Artificial Sequence: Synthetic oligonucleotide
  Sense strand starting at position 1047 of SEQ ID NO: 2203
gugacuggaccuuggagaa

SEQ ID NO: 171037 - RNA, 19 nt, Artificial Sequence
  Description of Artificial Sequence: Synthetic oligonucleotide
  Antisense strand to SEQ ID NO: 171036
uucuccaagguccagucac

SEQ ID NO: 171038 - RNA, 19 nt, Artificial Sequence
  Description of Artificial Sequence: Synthetic oligonucleotide
  Sense strand starting at position 1034 of SEQ ID NO: 2203
gagaaauggugccgugacu

SEQ ID NO: 171039 - RNA, 19 nt, Artificial Sequence
  Description of Artificial Sequence: Synthetic oligonucleotide
  Antisense strand to SEQ ID NO: 171038
agucacggcaccauuucuc

SEQ ID NO: 171040 - RNA, 19 nt, Artificial Sequence
  Description of Artificial Sequence: Synthetic oligonucleotide
  Sense strand starting at position 894 of SEQ ID NO: 2203
acuuaugauucgugcauuu

SEQ ID NO: 171041 - RNA, 19 nt, Artificial Sequence
  Description of Artificial Sequence: Synthetic oligonucleotide
  Antisense strand to SEQ ID NO: 171040
aaaugcacgaaucauaagu

SEQ ID NO: 171042 - RNA, 19 nt, Artificial Sequence
  Description of Artificial Sequence: Synthetic oligonucleotide
  Sense strand starting at position 893 of SEQ ID NO: 2203
uacuuaugauucgugcauu

SEQ ID NO: 171043 - RNA, 19 nt, Artificial Sequence
  Description of Artificial Sequence: Synthetic oligonucleotide
  Antisense strand to SEQ ID NO: 171042
aaugcacgaaucauaagua

SEQ ID NO: 171044 - RNA, 19 nt, Artificial Sequence
  Description of Artificial Sequence: Synthetic oligonucleotide
  Sense strand starting at position 884 of SEQ ID NO: 2203
ugggcuguauacuuaugau

SEQ ID NO: 171045 - RNA, 19 nt, Artificial Sequence
  Description of Artificial Sequence: Synthetic oligonucleotide
  Antisense strand to SEQ ID NO: 171044
aucauaaguauacagccca

SEQ ID NO: 171046 - RNA, 19 nt, Artificial Sequence
  Description of Artificial Sequence: Synthetic oligonucleotide
  Sense strand starting at position 407 of SEQ ID NO: 2203
aauauuauguggcaacgaa

SEQ ID NO: 171047 - RNA, 19 nt, Artificial Sequence
  Description of Artificial Sequence: Synthetic oligonucleotide
  Antisense strand to SEQ ID NO: 171046
uucguugccacauaauauu

SEQ ID NO: 171048 - RNA, 19 nt, Artificial Sequence
  Description of Artificial Sequence: Synthetic oligonucleotide
  Sense strand starting at position 377 of SEQ ID NO: 2203
ucaguaaauucuggcacuu

SEQ ID NO: 171049 - RNA, 19 nt, Artificial Sequence
  Description of Artificial Sequence: Synthetic oligonucleotide
  Antisense strand to SEQ ID NO: 171048
aagugccagaauuuacuga

SEQ ID NO: 171050 - RNA, 19 nt, Artificial Sequence
  Description of Artificial Sequence: Synthetic oligonucleotide
  Sense strand starting at position 318 of SEQ ID NO: 2203
ccauguauuugucauccaa

SEQ ID NO: 171051 - RNA, 19 nt, Artificial Sequence
  Description of Artificial Sequence: Synthetic oligonucleotide
  Antisense strand to SEQ ID NO: 171050
uuggaugacaaauacaugg

SEQ ID NO: 171052 - RNA, 19 nt, Artificial Sequence
  Description of Artificial Sequence: Synthetic oligonucleotide
  Sense strand starting at position 163 of SEQ ID NO: 2204
gagggagagugcuuaagga

SEQ ID NO: 171053 - RNA, 19 nt, Artificial Sequence
  Description of Artificial Sequence: Synthetic oligonucleotide
  Antisense strand to SEQ ID NO: 171052
uccuuaagcacucucccuc

SEQ ID NO: 171054 - RNA, 19 nt, Artificial Sequence
  Description of Artificial Sequence: Synthetic oligonucleotide
  Sense strand starting at position 173 of SEQ ID NO: 2204
gcuuaaggaggucaccauu

SEQ ID NO: 171055 - RNA, 19 nt, Artificial Sequence
  Description of Artificial Sequence: Synthetic oligonucleotide
  Antisense strand to SEQ ID NO: 171054
aauggugaccuccuuaagc

SEQ ID NO: 171056 - RNA, 19 nt, Artificial Sequence
  Description of Artificial Sequence: Synthetic oligonucleotide
  Sense strand starting at position 179 of SEQ ID NO: 2204
ggaggucaccauugcaaga

SEQ ID NO: 171057 - RNA, 19 nt, Artificial Sequence
  Description of Artificial Sequence: Synthetic oligonucleotide
  Antisense strand to SEQ ID NO: 171056
ucuugcaauggugaccucc

SEQ ID NO: 171058 - RNA, 19 nt, Artificial Sequence
  Description of Artificial Sequence: Synthetic oligonucleotide
  Sense strand starting at position 210 of SEQ ID NO: 2204
accagucaccuuuguugau

SEQ ID NO: 171059 - RNA, 19 nt, Artificial Sequence
  Description of Artificial Sequence: Synthetic oligonucleotide
  Antisense strand to SEQ ID NO: 171058
aucaacaaaggugacuggu

SEQ ID NO: 171060 - RNA, 19 nt, Artificial Sequence
  Description of Artificial Sequence: Synthetic oligonucleotide
  Sense strand starting at position 222 of SEQ ID NO: 2204
uguugaucuugccuacaac

SEQ ID NO: 171061 - RNA, 19 nt, Artificial Sequence
  Description of Artificial Sequence: Synthetic oligonucleotide
  Antisense strand to SEQ ID NO: 171060
guuguaggcaagaucaaca

SEQ ID NO: 171062 - RNA, 19 nt, Artificial Sequence
  Description of Artificial Sequence: Synthetic oligonucleotide
  Sense strand starting at position 223 of SEQ ID NO: 2204
guugaucuugccuacaaca

SEQ ID NO: 171063 - RNA, 19 nt, Artificial Sequence
  Description of Artificial Sequence: Synthetic oligonucleotide
  Antisense strand to SEQ ID NO: 171062
uguuguaggcaagaucaac

SEQ ID NO: 171064 - RNA, 19 nt, Artificial Sequence
  Description of Artificial Sequence: Synthetic oligonucleotide
  Sense strand starting at position 225 of SEQ ID NO: 2204
ugaucuugccuacaacaga

SEQ ID NO: 171065 - RNA, 19 nt, Artificial Sequence
  Description of Artificial Sequence: Synthetic oligonucleotide
  Antisense strand to SEQ ID NO: 171064
ucuguuguaggcaagauca

SEQ ID NO: 171066 - RNA, 19 nt, Artificial Sequence
  Description of Artificial Sequence: Synthetic oligonucleotide
  Sense strand starting at position 256 of SEQ ID NO: 2204
ucgaguguugucuuggcga

SEQ ID NO: 171067 - RNA, 19 nt, Artificial Sequence
  Description of Artificial Sequence: Synthetic oligonucleotide
  Antisense strand to SEQ ID NO: 171066
ucgccaagacaacacucga

SEQ ID NO: 171068 - RNA, 19 nt, Artificial Sequence
  Description of Artificial Sequence: Synthetic oligonucleotide
  Sense strand starting at position 261 of SEQ ID NO: 2204
uguugucuuggcgagaaua

SEQ ID NO: 171069 - RNA, 19 nt, Artificial Sequence
  Description of Artificial Sequence: Synthetic oligonucleotide
  Antisense strand to SEQ ID NO: 171068
uauucucgccaagacaaca

SEQ ID NO: 171070 - RNA, 19 nt, Artificial Sequence
  Description of Artificial Sequence: Synthetic oligonucleotide
  Sense strand starting at position 263 of SEQ ID NO: 2204
uugucuuggcgagaauaga

SEQ ID NO: 171071 - RNA, 19 nt, Artificial Sequence
  Description of Artificial Sequence: Synthetic oligonucleotide
  Antisense strand to SEQ ID NO: 171070
ucuauucucgccaagacaa

SEQ ID NO: 171072 - RNA, 19 nt, Artificial Sequence
  Description of Artificial Sequence: Synthetic oligonucleotide
  Sense strand starting at position 364 of SEQ ID NO: 2204
ccggaucuucucugccaca

SEQ ID NO: 171073 - RNA, 19 nt, Artificial Sequence
  Description of Artificial Sequence: Synthetic oligonucleotide
  Antisense strand to SEQ ID NO: 171072
uguggcagagaagauccgg

SEQ ID NO: 171074 - RNA, 19 nt, Artificial Sequence
  Description of Artificial Sequence: Synthetic oligonucleotide
  Sense strand starting at position 418 of SEQ ID NO: 2204
gucaauuacuggucaggca

SEQ ID NO: 171075 - RNA, 19 nt, Artificial Sequence
  Description of Artificial Sequence: Synthetic oligonucleotide
  Antisense strand to SEQ ID NO: 171074
ugccugaccaguaauugac

SEQ ID NO: 171076 - RNA, 19 nt, Artificial Sequence
  Description of Artificial Sequence: Synthetic oligonucleotide
  Sense strand starting at position 449 of SEQ ID NO: 2204
guuagagaaugggaucaaa

SEQ ID NO: 171077 - RNA, 19 nt, Artificial Sequence
  Description of Artificial Sequence: Synthetic oligonucleotide
  Antisense strand to SEQ ID NO: 171076
uuugaucccauucucuaac

SEQ ID NO: 171078 - RNA, 19 nt, Artificial Sequence
  Description of Artificial Sequence: Synthetic oligonucleotide
  Sense strand starting at position 522 of SEQ ID NO: 2204
cagcguuagucaccucaaa

SEQ ID NO: 171079 - RNA, 19 nt, Artificial Sequence
  Description of Artificial Sequence: Synthetic oligonucleotide
  Antisense strand to SEQ ID NO: 171078
uuugaggugacuaacgcug

SEQ ID NO: 171080 - RNA, 19 nt, Artificial Sequence
  Description of Artificial Sequence: Synthetic oligonucleotide
  Sense strand starting at position 901 of SEQ ID NO: 2204
guugcucucagaggacaga

SEQ ID NO: 171081 - RNA, 19 nt, Artificial Sequence
  Description of Artificial Sequence: Synthetic oligonucleotide
  Antisense strand to SEQ ID NO: 171080
ucuguccucugagagcaac

SEQ ID NO: 171082 - RNA, 19 nt, Artificial Sequence
  Description of Artificial Sequence: Synthetic oligonucleotide
  Sense strand starting at position 977 of SEQ ID NO: 2204
guuugagacucacuuggaa

SEQ ID NO: 171083 - RNA, 19 nt, Artificial Sequence
  Description of Artificial Sequence: Synthetic oligonucleotide
  Antisense strand to SEQ ID NO: 171082
uuccaagugagucucaaac

SEQ ID NO: 171084 - RNA, 19 nt, Artificial Sequence
  Description of Artificial Sequence: Synthetic oligonucleotide
  Sense strand starting at position 1086 of SEQ ID NO: 2204
guguccacaacguagaaau

SEQ ID NO: 171085 - RNA, 19 nt, Artificial Sequence
  Description of Artificial Sequence: Synthetic oligonucleotide
  Antisense strand to SEQ ID NO: 171084
auuucuacguuguggacac

SEQ ID NO: 171086 - RNA, 19 nt, Artificial Sequence
  Description of Artificial Sequence: Synthetic oligonucleotide
  Sense strand starting at position 1183 of SEQ ID NO: 2204
gcacacucgcucuggauaa

SEQ ID NO: 171087 - RNA, 19 nt, Artificial Sequence
  Description of Artificial Sequence: Synthetic oligonucleotide
  Antisense strand to SEQ ID NO: 171086
uuauccagagcgagugugc

SEQ ID NO: 171088 - RNA, 19 nt, Artificial Sequence
  Description of Artificial Sequence: Synthetic oligonucleotide
  Sense strand starting at position 1185 of SEQ ID NO: 2204
acacucgcucuggauaaga

SEQ ID NO: 171089 - RNA, 19 nt, Artificial Sequence
  Description of Artificial Sequence: Synthetic oligonucleotide
  Antisense strand to SEQ ID NO: 171088
ucuuauccagagcgagugu

SEQ ID NO: 171090 - RNA, 19 nt, Artificial Sequence
  Description of Artificial Sequence: Synthetic oligonucleotide
  Sense strand starting at position 1243 of SEQ ID NO: 2204
ggcuaucucccacgggaau

SEQ ID NO: 171091 - RNA, 19 nt, Artificial Sequence
  Description of Artificial Sequence: Synthetic oligonucleotide
  Antisense strand to SEQ ID NO: 171090
auucccgugggagauagcc

SEQ ID NO: 171092 - RNA, 19 nt, Artificial Sequence
  Description of Artificial Sequence: Synthetic oligonucleotide
  Sense strand starting at position 1326 of SEQ ID NO: 2204
agaaucuaugccuguguca

SEQ ID NO: 171093 - RNA, 19 nt, Artificial Sequence
  Description of Artificial Sequence: Synthetic oligonucleotide
  Antisense strand to SEQ ID NO: 171092
ugacacaggcauagauucu

SEQ ID NO: 171094 - RNA, 19 nt, Artificial Sequence
  Description of Artificial Sequence: Synthetic oligonucleotide
  Sense strand starting at position 1737 of SEQ ID NO: 2204
ccacauguucucugcuacu

SEQ ID NO: 171095 - RNA, 19 nt, Artificial Sequence
  Description of Artificial Sequence: Synthetic oligonucleotide
  Antisense strand to SEQ ID NO: 171094
aguagcagagaacaugugg

SEQ ID NO: 171096 - RNA, 19 nt, Artificial Sequence
  Description of Artificial Sequence: Synthetic oligonucleotide
  Sense strand starting at position 1807 of SEQ ID NO: 2204
acaggcuuacccugcagau

SEQ ID NO: 171097 - RNA, 19 nt, Artificial Sequence
  Description of Artificial Sequence: Synthetic oligonucleotide
  Antisense strand to SEQ ID NO: 171096
aucugcaggguaagccugu

SEQ ID NO: 171098 - RNA, 19 nt, Artificial Sequence
  Description of Artificial Sequence: Synthetic oligonucleotide
  Sense strand starting at position 1827 of SEQ ID NO: 2204
cugacuggcagaugugaaa

SEQ ID NO: 171099 - RNA, 19 nt, Artificial Sequence
  Description of Artificial Sequence: Synthetic oligonucleotide
  Antisense strand to SEQ ID NO: 171098
uuucacaucugccagucag

SEQ ID NO: 171100 - RNA, 19 nt, Artificial Sequence
  Description of Artificial Sequence: Synthetic oligonucleotide
  Sense strand starting at position 2260 of SEQ ID NO: 2204
cuagacagugggcauuauu

SEQ ID NO: 171101 - RNA, 19 nt, Artificial Sequence
  Description of Artificial Sequence: Synthetic oligonucleotide
  Antisense strand to SEQ ID NO: 171100
aauaaugcccacugucuag

SEQ ID NO: 171102 - RNA, 19 nt, Artificial Sequence
  Description of Artificial Sequence: Synthetic oligonucleotide
  Sense strand starting at position 2325 of SEQ ID NO: 2204
ugcuauagugcccagggau

SEQ ID NO: 171103 - RNA, 19 nt, Artificial Sequence
  Description of Artificial Sequence: Synthetic oligonucleotide
  Antisense strand to SEQ ID NO: 171102
aucccugggcacuauagca

SEQ ID NO: 171104 - RNA, 19 nt, Artificial Sequence
  Description of Artificial Sequence: Synthetic oligonucleotide
  Sense strand starting at position 2378 of SEQ ID NO: 2204
gcaagugcucuuuauuagg

SEQ ID NO: 171105 - RNA, 19 nt, Artificial Sequence
  Description of Artificial Sequence: Synthetic oligonucleotide
  Antisense strand to SEQ ID NO: 171104
ccuaauaaagagcacuugc

SEQ ID NO: 171106 - RNA, 19 nt, Artificial Sequence
  Description of Artificial Sequence: Synthetic oligonucleotide
  Sense strand starting at position 2409 of SEQ ID NO: 2204
cugacaagugccuguuucu

SEQ ID NO: 171107 - RNA, 19 nt, Artificial Sequence
  Description of Artificial Sequence: Synthetic oligonucleotide
  Antisense strand to SEQ ID NO: 171106
agaaacaggcacuugucag

SEQ ID NO: 171108 - RNA, 19 nt, Artificial Sequence
  Description of Artificial Sequence: Synthetic oligonucleotide
  Sense strand starting at position 2662 of SEQ ID NO: 2204
cugaguucccgucaccuaa

SEQ ID NO: 171109 - RNA, 19 nt, Artificial Sequence
  Description of Artificial Sequence: Synthetic oligonucleotide
  Antisense strand to SEQ ID NO: 171108
uuaggugacgggaacucag

SEQ ID NO: 171110 - RNA, 19 nt, Artificial Sequence
  Description of Artificial Sequence: Synthetic oligonucleotide
  Sense strand starting at position 3528 of SEQ ID NO: 2204
ggcuuaaugcagcaaugaa

SEQ ID NO: 171111 - RNA, 19 nt, Artificial Sequence
  Description of Artificial Sequence: Synthetic oligonucleotide
  Antisense strand to SEQ ID NO: 171110
uucauugcugcauuaagcc

SEQ ID NO: 171112 - RNA, 19 nt, Artificial Sequence
  Description of Artificial Sequence: Synthetic oligonucleotide
  Sense strand starting at position 3689 of SEQ ID NO: 2204
ccuacucuagcuuggaauu

SEQ ID NO: 171113 - RNA, 19 nt, Artificial Sequence
  Description of Artificial Sequence: Synthetic oligonucleotide
  Antisense strand to SEQ ID NO: 171112
aauuccaagcuagaguagg

SEQ ID NO: 171114 - RNA, 19 nt, Artificial Sequence
  Description of Artificial Sequence: Synthetic oligonucleotide
  Sense strand starting at position 3763 of SEQ ID NO: 2204
gaggcuauuguuuguuaga

SEQ ID NO: 171115 - RNA, 19 nt, Artificial Sequence
  Description of Artificial Sequence: Synthetic oligonucleotide
  Antisense strand to SEQ ID NO: 171114
ucuaacaaacaauagccuc

SEQ ID NO: 171116 - RNA, 19 nt, Artificial Sequence
  Description of Artificial Sequence: Synthetic oligonucleotide
  Sense strand starting at position 3764 of SEQ ID NO: 2204
aggcuauuguuuguuagac

SEQ ID NO: 171117 - RNA, 19 nt, Artificial Sequence
  Description of Artificial Sequence: Synthetic oligonucleotide
  Antisense strand to SEQ ID NO: 171116
gucuaacaaacaauagccu

SEQ ID NO: 171118 - RNA, 19 nt, Artificial Sequence
  Description of Artificial Sequence: Synthetic oligonucleotide
  Sense strand starting at position 3793 of SEQ ID NO: 2204
acagccaggcuuuguauaa

SEQ ID NO: 171119 - RNA, 19 nt, Artificial Sequence
  Description of Artificial Sequence: Synthetic oligonucleotide
  Antisense strand to SEQ ID NO: 171118
uuauacaaagccuggcugu

SEQ ID NO: 171120 - RNA, 19 nt, Artificial Sequence
  Description of Artificial Sequence: Synthetic oligonucleotide
  Sense strand starting at position 3794 of SEQ ID NO: 2204
cagccaggcuuuguauaaa

SEQ ID NO: 171121 - RNA, 19 nt, Artificial Sequence
  Description of Artificial Sequence: Synthetic oligonucleotide
  Antisense strand to SEQ ID NO: 171120
uuuauacaaagccuggcug

SEQ ID NO: 171122 - RNA, 19 nt, Artificial Sequence
  Description of Artificial Sequence: Synthetic oligonucleotide
  Sense strand starting at position 3806 of SEQ ID NO: 2204
guauaaagagcuuagcaau

SEQ ID NO: 171123 - RNA, 19 nt, Artificial Sequence
  Description of Artificial Sequence: Synthetic oligonucleotide
  Antisense strand to SEQ ID NO: 171122
auugcuaagcucuuuauac

SEQ ID NO: 171124 - RNA, 19 nt, Artificial Sequence
  Description of Artificial Sequence: Synthetic oligonucleotide
  Sense strand starting at position 3851 of SEQ ID NO: 2204
uugacuccuugcuuuaaag

SEQ ID NO: 171125 - RNA, 19 nt, Artificial Sequence
  Description of Artificial Sequence: Synthetic oligonucleotide
  Antisense strand to SEQ ID NO: 171124
cuuuaaagcaaggagucaa

SEQ ID NO: 171126 - RNA, 19 nt, Artificial Sequence
  Description of Artificial Sequence: Synthetic oligonucleotide
  Sense strand starting at position 3869 of SEQ ID NO: 2204
gaggaucuauuagauuucu

SEQ ID NO: 171127 - RNA, 19 nt, Artificial Sequence
  Description of Artificial Sequence: Synthetic oligonucleotide
  Antisense strand to SEQ ID NO: 171126
agaaaucuaauagauccuc

SEQ ID NO: 171128 - RNA, 19 nt, Artificial Sequence
  Description of Artificial Sequence: Synthetic oligonucleotide
  Sense strand starting at position 3935 of SEQ ID NO: 2204
ucccuucgaguuuacagaa

SEQ ID NO: 171129 - RNA, 19 nt, Artificial Sequence
  Description of Artificial Sequence: Synthetic oligonucleotide
  Antisense strand to SEQ ID NO: 171128
uucuguaaacucgaaggga

SEQ ID NO: 171130 - RNA, 19 nt, Artificial Sequence
  Description of Artificial Sequence: Synthetic oligonucleotide
  Sense strand starting at position 3956 of SEQ ID NO: 2204
gcagauagguaagcaaaua

SEQ ID NO: 171131 - RNA, 19 nt, Artificial Sequence
  Description of Artificial Sequence: Synthetic oligonucleotide
  Antisense strand to SEQ ID NO: 171130
uauuugcuuaccuaucugc

SEQ ID NO: 171132 - RNA, 19 nt, Artificial Sequence
  Description of Artificial Sequence: Synthetic oligonucleotide
  Sense strand starting at position 313 of SEQ ID NO: 2205
ugaugaggauuaccguuua

SEQ ID NO: 171133 - RNA, 19 nt, Artificial Sequence
  Description of Artificial Sequence: Synthetic oligonucleotide
  Antisense strand to SEQ ID NO: 171132
uaaacgguaauccucauca

SEQ ID NO: 171134 - RNA, 19 nt, Artificial Sequence
  Description of Artificial Sequence: Synthetic oligonucleotide
  Sense strand starting at position 413 of SEQ ID NO: 2205
cuguaugcuccacagcaaa

SEQ ID NO: 171135 - RNA, 19 nt, Artificial Sequence
  Description of Artificial Sequence: Synthetic oligonucleotide
  Antisense strand to SEQ ID NO: 171134
uuugcuguggagcauacag

SEQ ID NO: 171136 - RNA, 19 nt, Artificial Sequence
  Description of Artificial Sequence: Synthetic oligonucleotide
  Sense strand starting at position 688 of SEQ ID NO: 2205
uuagauaauaaggguguua

SEQ ID NO: 171137 - RNA, 19 nt, Artificial Sequence
  Description of Artificial Sequence: Synthetic oligonucleotide
  Antisense strand to SEQ ID NO: 171136
uaacacccuuauuaucuaa

SEQ ID NO: 171138 - RNA, 19 nt, Artificial Sequence
  Description of Artificial Sequence: Synthetic oligonucleotide
  Sense strand starting at position 829 of SEQ ID NO: 2205
ugcggucgacugaguuauu

SEQ ID NO: 171139 - RNA, 19 nt, Artificial Sequence
  Description of Artificial Sequence: Synthetic oligonucleotide
  Antisense strand to SEQ ID NO: 171138
aauaacucagucgaccgca

SEQ ID NO: 171140 - RNA, 19 nt, Artificial Sequence
  Description of Artificial Sequence: Synthetic oligonucleotide
  Sense strand starting at position 830 of SEQ ID NO: 2205
gcggucgacugaguuauuu

SEQ ID NO: 171141 - RNA, 19 nt, Artificial Sequence
  Description of Artificial Sequence: Synthetic oligonucleotide
  Antisense strand to SEQ ID NO: 171140
aaauaacucagucgaccgc

SEQ ID NO: 171142 - RNA, 19 nt, Artificial Sequence
  Description of Artificial Sequence: Synthetic oligonucleotide
  Sense strand starting at position 940 of SEQ ID NO: 2205
ucccucucccugugaugaa

SEQ ID NO: 171143 - RNA, 19 nt, Artificial Sequence
  Description of Artificial Sequence: Synthetic oligonucleotide
  Antisense strand to SEQ ID NO: 171142
uucaucacagggagaggga

SEQ ID NO: 171144 - RNA, 19 nt, Artificial Sequence
  Description of Artificial Sequence: Synthetic oligonucleotide
  Sense strand starting at position 1059 of SEQ ID NO: 2205
aagauaagcguuuggauca

SEQ ID NO: 171145 - RNA, 19 nt, Artificial Sequence
  Description of Artificial Sequence: Synthetic oligonucleotide
  Antisense strand to SEQ ID NO: 171144
ugauccaaacgcuuaucuu

SEQ ID NO: 171146 - RNA, 19 nt, Artificial Sequence
  Description of Artificial Sequence: Synthetic oligonucleotide
  Sense strand starting at position 1064 of SEQ ID NO: 2205
aagcguuuggaucaaauau

SEQ ID NO: 171147 - RNA, 19 nt, Artificial Sequence
  Description of Artificial Sequence: Synthetic oligonucleotide
  Antisense strand to SEQ ID NO: 171146
auauuugauccaaacgcuu

SEQ ID NO: 171148 - RNA, 19 nt, Artificial Sequence
  Description of Artificial Sequence: Synthetic oligonucleotide
  Sense strand starting at position 1124 of SEQ ID NO: 2205
acgucacuuuaaucuuuga

SEQ ID NO: 171149 - RNA, 19 nt, Artificial Sequence
  Description of Artificial Sequence: Synthetic oligonucleotide
  Antisense strand to SEQ ID NO: 171148
ucaaagauuaaagugacgu

SEQ ID NO: 171150 - RNA, 19 nt, Artificial Sequence
  Description of Artificial Sequence: Synthetic oligonucleotide
  Sense strand starting at position 1836 of SEQ ID NO: 2205
gggcuucucaaaggcaaga

SEQ ID NO: 171151 - RNA, 19 nt, Artificial Sequence
  Description of Artificial Sequence: Synthetic oligonucleotide
  Antisense strand to SEQ ID NO: 171150
ucuugccuuugagaagccc

SEQ ID NO: 171152 - RNA, 19 nt, Artificial Sequence
  Description of Artificial Sequence: Synthetic oligonucleotide
  Sense strand starting at position 2047 of SEQ ID NO: 2205
cuaggaguaguaugaauaa

SEQ ID NO: 171153 - RNA, 19 nt, Artificial Sequence
  Description of Artificial Sequence: Synthetic oligonucleotide
  Antisense strand to SEQ ID NO: 171152
uuauucauacuacuccuag

SEQ ID NO: 171154 - RNA, 19 nt, Artificial Sequence
  Description of Artificial Sequence: Synthetic oligonucleotide
  Sense strand starting at position 2355 of SEQ ID NO: 2205
ugggaauacuaggcgcaua

SEQ ID NO: 171155 - RNA, 19 nt, Artificial Sequence
  Description of Artificial Sequence: Synthetic oligonucleotide
  Antisense strand to SEQ ID NO: 171154
uaugcgccuaguauuccca

SEQ ID NO: 171156 - RNA, 19 nt, Artificial Sequence
  Description of Artificial Sequence: Synthetic oligonucleotide
  Sense strand starting at position 2426 of SEQ ID NO: 2205
guuggaguauucccauuac

SEQ ID NO: 171157 - RNA, 19 nt, Artificial Sequence
  Description of Artificial Sequence: Synthetic oligonucleotide
  Antisense strand to SEQ ID NO: 171156
guaaugggaauacuccaac

SEQ ID NO: 171158 - RNA, 19 nt, Artificial Sequence
  Description of Artificial Sequence: Synthetic oligonucleotide
  Sense strand starting at position 2432 of SEQ ID NO: 2205
guauucccauuacucagau

SEQ ID NO: 171159 - RNA, 19 nt, Artificial Sequence
  Description of Artificial Sequence: Synthetic oligonucleotide
  Antisense strand to SEQ ID NO: 171158
aucugaguaaugggaauac

SEQ ID NO: 171160 - RNA, 19 nt, Artificial Sequence
  Description of Artificial Sequence: Synthetic oligonucleotide
  Sense strand starting at position 2454 of SEQ ID NO: 2205
gcaaauccgggccaucaua

SEQ ID NO: 171161 - RNA, 19 nt, Artificial Sequence
  Description of Artificial Sequence: Synthetic oligonucleotide
  Antisense strand to SEQ ID NO: 171160
uaugauggcccggauuugc

SEQ ID NO: 171162 - RNA, 19 nt, Artificial Sequence
  Description of Artificial Sequence: Synthetic oligonucleotide
  Sense strand starting at position 2555 of SEQ ID NO: 2205
cagagucucgcagagauac

SEQ ID NO: 171163 - RNA, 19 nt, Artificial Sequence
  Description of Artificial Sequence: Synthetic oligonucleotide
  Antisense strand to SEQ ID NO: 171162
guaucucugcgagacucug

SEQ ID NO: 171164 - RNA, 19 nt, Artificial Sequence
  Description of Artificial Sequence: Synthetic oligonucleotide
  Sense strand starting at position 2707 of SEQ ID NO: 2205
guuugucaguagguaagaa

SEQ ID NO: 171165 - RNA, 19 nt, Artificial Sequence
  Description of Artificial Sequence: Synthetic oligonucleotide
  Antisense strand to SEQ ID NO: 171164
uucuuaccuacugacaaac

SEQ ID NO: 171166 - RNA, 19 nt, Artificial Sequence
  Description of Artificial Sequence: Synthetic oligonucleotide
  Sense strand starting at position 2828 of SEQ ID NO: 2205
cuuggaauccuagagcuac

SEQ ID NO: 171167 - RNA, 19 nt, Artificial Sequence
  Description of Artificial Sequence: Synthetic oligonucleotide
  Antisense strand to SEQ ID NO: 171166
guagcucuaggauuccaag

SEQ ID NO: 171168 - RNA, 19 nt, Artificial Sequence
  Description of Artificial Sequence: Synthetic oligonucleotide
  Sense strand starting at position 2866 of SEQ ID NO: 2205
aaaggaugguuguugagau

SEQ ID NO: 171169 - RNA, 19 nt, Artificial Sequence
  Description of Artificial Sequence: Synthetic oligonucleotide
  Antisense strand to SEQ ID NO: 171168
aucucaacaaccauccuuu

SEQ ID NO: 171170 - RNA, 19 nt, Artificial Sequence
  Description of Artificial Sequence: Synthetic oligonucleotide
  Sense strand starting at position 2876 of SEQ ID NO: 2205
uguugagauucuguaauuc

SEQ ID NO: 171171 - RNA, 19 nt, Artificial Sequence
  Description of Artificial Sequence: Synthetic oligonucleotide
  Antisense strand to SEQ ID NO: 171170
gaauuacagaaucucaaca

SEQ ID NO: 171172 - RNA, 19 nt, Artificial Sequence
  Description of Artificial Sequence: Synthetic oligonucleotide
  Sense strand starting at position 2880 of SEQ ID NO: 2205
gagauucuguaauucuaag

SEQ ID NO: 171173 - RNA, 19 nt, Artificial Sequence
  Description of Artificial Sequence: Synthetic oligonucleotide
  Antisense strand to SEQ ID NO: 171172
cuuagaauuacagaaucuc

SEQ ID NO: 171174 - RNA, 19 nt, Artificial Sequence
  Description of Artificial Sequence: Synthetic oligonucleotide
  Sense strand starting at position 2888 of SEQ ID NO: 2205
guaauucuaagagguugua

SEQ ID NO: 171175 - RNA, 19 nt, Artificial Sequence
  Description of Artificial Sequence: Synthetic oligonucleotide
  Antisense strand to SEQ ID NO: 171174
uacaaccucuuagaauuac

SEQ ID NO: 171176 - RNA, 19 nt, Artificial Sequence
  Description of Artificial Sequence: Synthetic oligonucleotide
  Sense strand starting at position 2891 of SEQ ID NO: 2205
auucuaagagguuguauuc

SEQ ID NO: 171177 - RNA, 19 nt, Artificial Sequence
  Description of Artificial Sequence: Synthetic oligonucleotide
  Antisense strand to SEQ ID NO: 171176
gaauacaaccucuuagaau

SEQ ID NO: 171178 - RNA, 19 nt, Artificial Sequence
  Description of Artificial Sequence: Synthetic oligonucleotide
  Sense strand starting at position 3014 of SEQ ID NO: 2205
gggucagauugccuuauua

SEQ ID NO: 171179 - RNA, 19 nt, Artificial Sequence
  Description of Artificial Sequence: Synthetic oligonucleotide
  Antisense strand to SEQ ID NO: 171178
uaauaaggcaaucugaccc

SEQ ID NO: 171180 - RNA, 19 nt, Artificial Sequence
  Description of Artificial Sequence: Synthetic oligonucleotide
  Sense strand starting at position 3016 of SEQ ID NO: 2205
gucagauugccuuauuaau

SEQ ID NO: 171181 - RNA, 19 nt, Artificial Sequence
  Description of Artificial Sequence: Synthetic oligonucleotide
  Antisense strand to SEQ ID NO: 171180
auuaauaaggcaaucugac

SEQ ID NO: 171182 - RNA, 19 nt, Artificial Sequence
  Description of Artificial Sequence: Synthetic oligonucleotide
  Sense strand starting at position 3053 of SEQ ID NO: 2205
gugcuugaauacuuacuua

SEQ ID NO: 171183 - RNA, 19 nt, Artificial Sequence
  Description of Artificial Sequence: Synthetic oligonucleotide
  Antisense strand to SEQ ID NO: 171182
uaaguaaguauucaagcac

SEQ ID NO: 171184 - RNA, 19 nt, Artificial Sequence
  Description of Artificial Sequence: Synthetic oligonucleotide
  Sense strand starting at position 3064 of SEQ ID NO: 2205
cuuacuuagcagcaagaau

SEQ ID NO: 171185 - RNA, 19 nt, Artificial Sequence
  Description of Artificial Sequence: Synthetic oligonucleotide
  Antisense strand to SEQ ID NO: 171184
auucuugcugcuaaguaag

SEQ ID NO: 171186 - RNA, 19 nt, Artificial Sequence
  Description of Artificial Sequence: Synthetic oligonucleotide
  Sense strand starting at position 3229 of SEQ ID NO: 2205
uuuacaguguagucaaauc

SEQ ID NO: 171187 - RNA, 19 nt, Artificial Sequence
  Description of Artificial Sequence: Synthetic oligonucleotide
  Antisense strand to SEQ ID NO: 171186
gauuugacuacacuguaaa

SEQ ID NO: 171188 - RNA, 19 nt, Artificial Sequence
  Description of Artificial Sequence: Synthetic oligonucleotide
  Sense strand starting at position 3272 of SEQ ID NO: 2205
cugcuaagauugucuauau

SEQ ID NO: 171189 - RNA, 19 nt, Artificial Sequence
  Description of Artificial Sequence: Synthetic oligonucleotide
  Antisense strand to SEQ ID NO: 171188
auauagacaaucuuagcag

SEQ ID NO: 171190 - RNA, 19 nt, Artificial Sequence
  Description of Artificial Sequence: Synthetic oligonucleotide
  Sense strand starting at position 3273 of SEQ ID NO: 2205
ugcuaagauugucuauaug

SEQ ID NO: 171191 - RNA, 19 nt, Artificial Sequence
  Description of Artificial Sequence: Synthetic oligonucleotide
  Antisense strand to SEQ ID NO: 171190
cauauagacaaucuuagca

SEQ ID NO: 171192 - RNA, 19 nt, Artificial Sequence
  Description of Artificial Sequence: Synthetic oligonucleotide
  Sense strand starting at position 3645 of SEQ ID NO: 2205
agggcaauuagaggucagu

SEQ ID NO: 171193 - RNA, 19 nt, Artificial Sequence
  Description of Artificial Sequence: Synthetic oligonucleotide
  Antisense strand to SEQ ID NO: 171192
acugaccucuaauugcccu

SEQ ID NO: 171194 - RNA, 19 nt, Artificial Sequence
  Description of Artificial Sequence: Synthetic oligonucleotide
  Sense strand starting at position 3648 of SEQ ID NO: 2205
gcaauuagaggucaguuac

SEQ ID NO: 171195 - RNA, 19 nt, Artificial Sequence
  Description of Artificial Sequence: Synthetic oligonucleotide
  Antisense strand to SEQ ID NO: 171194
guaacugaccucuaauugc

SEQ ID NO: 171196 - RNA, 19 nt, Artificial Sequence
  Description of Artificial Sequence: Synthetic oligonucleotide
  Sense strand starting at position 3658 of SEQ ID NO: 2205
gucaguuacacugaguuua

SEQ ID NO: 171197 - RNA, 19 nt, Artificial Sequence
  Description of Artificial Sequence: Synthetic oligonucleotide
  Antisense strand to SEQ ID NO: 171196
uaaacucaguguaacugac

SEQ ID NO: 171198 - RNA, 19 nt, Artificial Sequence
  Description of Artificial Sequence: Synthetic oligonucleotide
  Sense strand starting at position 3749 of SEQ ID NO: 2205
cauggcuuacucugggaua

SEQ ID NO: 171199 - RNA, 19 nt, Artificial Sequence
  Description of Artificial Sequence: Synthetic oligonucleotide
  Antisense strand to SEQ ID NO: 171198
uaucccagaguaagccaug

SEQ ID NO: 171200 - RNA, 19 nt, Artificial Sequence
  Description of Artificial Sequence: Synthetic oligonucleotide
  Sense strand starting at position 3751 of SEQ ID NO: 2205
uggcuuacucugggauauu

SEQ ID NO: 171201 - RNA, 19 nt, Artificial Sequence
  Description of Artificial Sequence: Synthetic oligonucleotide
  Antisense strand to SEQ ID NO: 171200
aauaucccagaguaagcca

SEQ ID NO: 171202 - RNA, 19 nt, Artificial Sequence
  Description of Artificial Sequence: Synthetic oligonucleotide
  Sense strand starting at position 3764 of SEQ ID NO: 2205
gauauucguguugacagca

SEQ ID NO: 171203 - RNA, 19 nt, Artificial Sequence
  Description of Artificial Sequence: Synthetic oligonucleotide
  Antisense strand to SEQ ID NO: 171202
ugcugucaacacgaauauc

SEQ ID NO: 171204 - RNA, 19 nt, Artificial Sequence
  Description of Artificial Sequence: Synthetic oligonucleotide
  Sense strand starting at position 3837 of SEQ ID NO: 2205
auaggauugauaggcuaug

SEQ ID NO: 171205 - RNA, 19 nt, Artificial Sequence
  Description of Artificial Sequence: Synthetic oligonucleotide
  Antisense strand to SEQ ID NO: 171204
cauagccuaucaauccuau

SEQ ID NO: 171206 - RNA, 19 nt, Artificial Sequence
  Description of Artificial Sequence: Synthetic oligonucleotide
  Sense strand starting at position 3842 of SEQ ID NO: 2205
auugauaggcuauggaagu

SEQ ID NO: 171207 - RNA, 19 nt, Artificial Sequence
  Description of Artificial Sequence: Synthetic oligonucleotide
  Antisense strand to SEQ ID NO: 171206
acuuccauagccuaucaau

SEQ ID NO: 171208 - RNA, 19 nt, Artificial Sequence
  Description of Artificial Sequence: Synthetic oligonucleotide
  Sense strand starting at position 3915 of SEQ ID NO: 2205
agaacuaggcuucgaauaa

SEQ ID NO: 171209 - RNA, 19 nt, Artificial Sequence
  Description of Artificial Sequence: Synthetic oligonucleotide
  Antisense strand to SEQ ID NO: 171208
uuauucgaagccuaguucu

SEQ ID NO: 171210 - RNA, 19 nt, Artificial Sequence
  Description of Artificial Sequence: Synthetic oligonucleotide
  Sense strand starting at position 3927 of SEQ ID NO: 2205
cgaauaagccaaugguaug

SEQ ID NO: 171211 - RNA, 19 nt, Artificial Sequence
  Description of Artificial Sequence: Synthetic oligonucleotide
  Antisense strand to SEQ ID NO: 171210
cauaccauuggcuuauucg

SEQ ID NO: 171212 - RNA, 19 nt, Artificial Sequence
  Description of Artificial Sequence: Synthetic oligonucleotide
  Sense strand starting at position 241 of SEQ ID NO: 2206
ugggaugaggcuugauagu

SEQ ID NO: 171213 - RNA, 19 nt, Artificial Sequence
  Description of Artificial Sequence: Synthetic oligonucleotide
  Antisense strand to SEQ ID NO: 171212
acuaucaagccucauccca

SEQ ID NO: 171214 - RNA, 19 nt, Artificial Sequence
  Description of Artificial Sequence: Synthetic oligonucleotide
  Sense strand starting at position 247 of SEQ ID NO: 2206
gaggcuugauaguuaggga

SEQ ID NO: 171215 - RNA, 19 nt, Artificial Sequence
  Description of Artificial Sequence: Synthetic oligonucleotide
  Antisense strand to SEQ ID NO: 171214
ucccuaacuaucaagccuc

SEQ ID NO: 171216 - RNA, 19 nt, Artificial Sequence
  Description of Artificial Sequence: Synthetic oligonucleotide
  Sense strand starting at position 456 of SEQ ID NO: 2206
ggaagaacucgcugagaac

SEQ ID NO: 171217 - RNA, 19 nt, Artificial Sequence
  Description of Artificial Sequence: Synthetic oligonucleotide
  Antisense strand to SEQ ID NO: 171216
guucucagcgaguucuucc

SEQ ID NO: 171218 - RNA, 19 nt, Artificial Sequence
  Description of Artificial Sequence: Synthetic oligonucleotide
  Sense strand starting at position 477 of SEQ ID NO: 2206
gaaggcggucugugaaguu

SEQ ID NO: 171219 - RNA, 19 nt, Artificial Sequence
  Description of Artificial Sequence: Synthetic oligonucleotide
  Antisense strand to SEQ ID NO: 171218
aacuucacagaccgccuuc

SEQ ID NO: 171220 - RNA, 19 nt, Artificial Sequence
  Description of Artificial Sequence: Synthetic oligonucleotide
  Sense strand starting at position 600 of SEQ ID NO: 2206
ggauguggucucuguugga

SEQ ID NO: 171221 - RNA, 19 nt, Artificial Sequence
  Description of Artificial Sequence: Synthetic oligonucleotide
  Antisense strand to SEQ ID NO: 171220
uccaacagagaccacaucc

SEQ ID NO: 171222 - RNA, 19 nt, Artificial Sequence
  Description of Artificial Sequence: Synthetic oligonucleotide
  Sense strand starting at position 609 of SEQ ID NO: 2206
cucuguuggacuugaagga

SEQ ID NO: 171223 - RNA, 19 nt, Artificial Sequence
  Description of Artificial Sequence: Synthetic oligonucleotide
  Antisense strand to SEQ ID NO: 171222
uccuucaaguccaacagag

SEQ ID NO: 171224 - RNA, 19 nt, Artificial Sequence
  Description of Artificial Sequence: Synthetic oligonucleotide
  Sense strand starting at position 663 of SEQ ID NO: 2206
ccagaaauucuugguacag

SEQ ID NO: 171225 - RNA, 19 nt, Artificial Sequence
  Description of Artificial Sequence: Synthetic oligonucleotide
  Antisense strand to SEQ ID NO: 171224
cuguaccaagaauuucugg

SEQ ID NO: 171226 - RNA, 19 nt, Artificial Sequence
  Description of Artificial Sequence: Synthetic oligonucleotide
  Sense strand starting at position 739 of SEQ ID NO: 2206
cuucucuggcaagaaucuu

SEQ ID NO: 171227 - RNA, 19 nt, Artificial Sequence
  Description of Artificial Sequence: Synthetic oligonucleotide
  Antisense strand to SEQ ID NO: 171226
aagauucuugccagagaag

SEQ ID NO: 171228 - RNA, 19 nt, Artificial Sequence
  Description of Artificial Sequence: Synthetic oligonucleotide
  Sense strand starting at position 1051 of SEQ ID NO: 2206
gugagcaguucuuuaaagu

SEQ ID NO: 171229 - RNA, 19 nt, Artificial Sequence
  Description of Artificial Sequence: Synthetic oligonucleotide
  Antisense strand to SEQ ID NO: 171228
acuuuaaagaacugcucac

SEQ ID NO: 171230 - RNA, 19 nt, Artificial Sequence
  Description of Artificial Sequence: Synthetic oligonucleotide
  Sense strand starting at position 1052 of SEQ ID NO: 2206
ugagcaguucuuuaaaguu

SEQ ID NO: 171231 - RNA, 19 nt, Artificial Sequence
  Description of Artificial Sequence: Synthetic oligonucleotide
  Antisense strand to SEQ ID NO: 171230
aacuuuaaagaacugcuca

SEQ ID NO: 171232 - RNA, 19 nt, Artificial Sequence
  Description of Artificial Sequence: Synthetic oligonucleotide
  Sense strand starting at position 1068 of SEQ ID NO: 2206
guugacaacugcucauauu

SEQ ID NO: 171233 - RNA, 19 nt, Artificial Sequence
  Description of Artificial Sequence: Synthetic oligonucleotide
  Antisense strand to SEQ ID NO: 171232
aauaugagcaguugucaac

SEQ ID NO: 171234 - RNA, 19 nt, Artificial Sequence
  Description of Artificial Sequence: Synthetic oligonucleotide
  Sense strand starting at position 1080 of SEQ ID NO: 2206
ucauauuagccucacugua

SEQ ID NO: 171235 - RNA, 19 nt, Artificial Sequence
  Description of Artificial Sequence: Synthetic oligonucleotide
  Antisense strand to SEQ ID NO: 171234
uacagugaggcuaauauga

SEQ ID NO: 171236 - RNA, 19 nt, Artificial Sequence
  Description of Artificial Sequence: Synthetic oligonucleotide
  Sense strand starting at position 1198 of SEQ ID NO: 2206
acaguuguugaggaccauu

SEQ ID NO: 171237 - RNA, 19 nt, Artificial Sequence
  Description of Artificial Sequence: Synthetic oligonucleotide
  Antisense strand to SEQ ID NO: 171236
aaugguccucaacaacugu

SEQ ID NO: 171238 - RNA, 19 nt, Artificial Sequence
  Description of Artificial Sequence: Synthetic oligonucleotide
  Sense strand starting at position 1201 of SEQ ID NO: 2206
guuguugaggaccauucua

SEQ ID NO: 171239 - RNA, 19 nt, Artificial Sequence
  Description of Artificial Sequence: Synthetic oligonucleotide
  Antisense strand to SEQ ID NO: 171238
uagaaugguccucaacaac

SEQ ID NO: 171240 - RNA, 19 nt, Artificial Sequence
  Description of Artificial Sequence: Synthetic oligonucleotide
  Sense strand starting at position 1353 of SEQ ID NO: 2206
aucugugugacguaaggaa

SEQ ID NO: 171241 - RNA, 19 nt, Artificial Sequence
  Description of Artificial Sequence: Synthetic oligonucleotide
  Antisense strand to SEQ ID NO: 171240
uuccuuacgucacacagau

SEQ ID NO: 171242 - RNA, 19 nt, Artificial Sequence
  Description of Artificial Sequence: Synthetic oligonucleotide
  Sense strand starting at position 1587 of SEQ ID NO: 2206
cuugguaucccagagcacu

SEQ ID NO: 171243 - RNA, 19 nt, Artificial Sequence
  Description of Artificial Sequence: Synthetic oligonucleotide
  Antisense strand to SEQ ID NO: 171242
agugcucugggauaccaag

SEQ ID NO: 171244 - RNA, 19 nt, Artificial Sequence
  Description of Artificial Sequence: Synthetic oligonucleotide
  Sense strand starting at position 1781 of SEQ ID NO: 2206
gguugagucugggcaggau

SEQ ID NO: 171245 - RNA, 19 nt, Artificial Sequence
  Description of Artificial Sequence: Synthetic oligonucleotide
  Antisense strand to SEQ ID NO: 171244
auccugcccagacucaacc

SEQ ID NO: 171246 - RNA, 19 nt, Artificial Sequence
  Description of Artificial Sequence: Synthetic oligonucleotide
  Sense strand starting at position 1850 of SEQ ID NO: 2206
ggaagcaucuccuuaucau

SEQ ID NO: 171247 - RNA, 19 nt, Artificial Sequence
  Description of Artificial Sequence: Synthetic oligonucleotide
  Antisense strand to SEQ ID NO: 171246
augauaaggagaugcuucc

SEQ ID NO: 171248 - RNA, 19 nt, Artificial Sequence
  Description of Artificial Sequence: Synthetic oligonucleotide
  Sense strand starting at position 2036 of SEQ ID NO: 2206
gccuuuagcuggucuagga

SEQ ID NO: 171249 - RNA, 19 nt, Artificial Sequence
  Description of Artificial Sequence: Synthetic oligonucleotide
  Antisense strand to SEQ ID NO: 171248
uccuagaccagcuaaaggc

SEQ ID NO: 171250 - RNA, 19 nt, Artificial Sequence
  Description of Artificial Sequence: Synthetic oligonucleotide
  Sense strand starting at position 2234 of SEQ ID NO: 2206
ggaagccugucccuugauu

SEQ ID NO: 171251 - RNA, 19 nt, Artificial Sequence
  Description of Artificial Sequence: Synthetic oligonucleotide
  Antisense strand to SEQ ID NO: 171250
aaucaagggacaggcuucc

SEQ ID NO: 171252 - RNA, 19 nt, Artificial Sequence
  Description of Artificial Sequence: Synthetic oligonucleotide
  Sense strand starting at position 2263 of SEQ ID NO: 2206
gguggaguguucuugguau

SEQ ID NO: 171253 - RNA, 19 nt, Artificial Sequence
  Description of Artificial Sequence: Synthetic oligonucleotide
  Antisense strand to SEQ ID NO: 171252
auaccaagaacacuccacc

SEQ ID NO: 171254 - RNA, 19 nt, Artificial Sequence
  Description of Artificial Sequence: Synthetic oligonucleotide
  Sense strand starting at position 2265 of SEQ ID NO: 2206
uggaguguucuugguaugu

SEQ ID NO: 171255 - RNA, 19 nt, Artificial Sequence
  Description of Artificial Sequence: Synthetic oligonucleotide
  Antisense strand to SEQ ID NO: 171254
acauaccaagaacacucca

SEQ ID NO: 171256 - RNA, 19 nt, Artificial Sequence
  Description of Artificial Sequence: Synthetic oligonucleotide
  Sense strand starting at position 2275 of SEQ ID NO: 2206
uugguaugugcucugcagu

SEQ ID NO: 171257 - RNA, 19 nt, Artificial Sequence
  Description of Artificial Sequence: Synthetic oligonucleotide
  Antisense strand to SEQ ID NO: 171256
acugcagagcacauaccaa

SEQ ID NO: 171258 - RNA, 19 nt, Artificial Sequence
  Description of Artificial Sequence: Synthetic oligonucleotide
  Sense strand starting at position 2280 of SEQ ID NO: 2206
augugcucugcaguguaua

SEQ ID NO: 171259 - RNA, 19 nt, Artificial Sequence
  Description of Artificial Sequence: Synthetic oligonucleotide
  Antisense strand to SEQ ID NO: 171258
uauacacugcagagcacau

SEQ ID NO: 171260 - RNA, 19 nt, Artificial Sequence
  Description of Artificial Sequence: Synthetic oligonucleotide
  Sense strand starting at position 3003 of SEQ ID NO: 2206
uucuuauaucccggacaag

SEQ ID NO: 171261 - RNA, 19 nt, Artificial Sequence
  Description of Artificial Sequence: Synthetic oligonucleotide
  Antisense strand to SEQ ID NO: 171260
cuuguccgggauauaagaa

SEQ ID NO: 171262 - RNA, 19 nt, Artificial Sequence
  Description of Artificial Sequence: Synthetic oligonucleotide
  Sense strand starting at position 3216 of SEQ ID NO: 2206
cagugaggcuuuguugagu

SEQ ID NO: 171263 - RNA, 19 nt, Artificial Sequence
  Description of Artificial Sequence: Synthetic oligonucleotide
  Antisense strand to SEQ ID NO: 171262
acucaacaaagccucacug

SEQ ID NO: 171264 - RNA, 19 nt, Artificial Sequence
  Description of Artificial Sequence: Synthetic oligonucleotide
  Sense strand starting at position 3221 of SEQ ID NO: 2206
aggcuuuguugagugggaa

SEQ ID NO: 171265 - RNA, 19 nt, Artificial Sequence
  Description of Artificial Sequence: Synthetic oligonucleotide
  Antisense strand to SEQ ID NO: 171264
uucccacucaacaaagccu

SEQ ID NO: 171266 - RNA, 19 nt, Artificial Sequence
  Description of Artificial Sequence: Synthetic oligonucleotide
  Sense strand starting at position 3222 of SEQ ID NO: 2206
ggcuuuguugagugggaag

SEQ ID NO: 171267 - RNA, 19 nt, Artificial Sequence
  Description of Artificial Sequence: Synthetic oligonucleotide
  Antisense strand to SEQ ID NO: 171266
cuucccacucaacaaagcc

SEQ ID NO: 171268 - RNA, 19 nt, Artificial Sequence
  Description of Artificial Sequence: Synthetic oligonucleotide
  Sense strand starting at position 3280 of SEQ ID NO: 2206
gguggugugucuucuauug

SEQ ID NO: 171269 - RNA, 19 nt, Artificial Sequence
  Description of Artificial Sequence: Synthetic oligonucleotide
  Antisense strand to SEQ ID NO: 171268
caauagaagacacaccacc

SEQ ID NO: 171270 - RNA, 19 nt, Artificial Sequence
  Description of Artificial Sequence: Synthetic oligonucleotide
  Sense strand starting at position 3367 of SEQ ID NO: 2206
agaucaguccucgcgcagu

SEQ ID NO: 171271 - RNA, 19 nt, Artificial Sequence
  Description of Artificial Sequence: Synthetic oligonucleotide
  Antisense strand to SEQ ID NO: 171270
acugcgcgaggacugaucu

SEQ ID NO: 171272 - RNA, 19 nt, Artificial Sequence
  Description of Artificial Sequence: Synthetic oligonucleotide
  Sense strand starting at position 3467 of SEQ ID NO: 2206
guggaaucauaacagugau

SEQ ID NO: 171273 - RNA, 19 nt, Artificial Sequence
  Description of Artificial Sequence: Synthetic oligonucleotide
  Antisense strand to SEQ ID NO: 171272
aucacuguuaugauuccac

SEQ ID NO: 171274 - RNA, 19 nt, Artificial Sequence
  Description of Artificial Sequence: Synthetic oligonucleotide
  Sense strand starting at position 3485 of SEQ ID NO: 2206
ugaugacgauaauaauagu

SEQ ID NO: 171275 - RNA, 19 nt, Artificial Sequence
  Description of Artificial Sequence: Synthetic oligonucleotide
  Antisense strand to SEQ ID NO: 171274
acuauuauuaucgucauca

SEQ ID NO: 171276 - RNA, 19 nt, Artificial Sequence
  Description of Artificial Sequence: Synthetic oligonucleotide
  Sense strand starting at position 3491 of SEQ ID NO: 2206
cgauaauaauaguugugau

SEQ ID NO: 171277 - RNA, 19 nt, Artificial Sequence
  Description of Artificial Sequence: Synthetic oligonucleotide
  Antisense strand to SEQ ID NO: 171276
aucacaacuauuauuaucg

SEQ ID NO: 171278 - RNA, 19 nt, Artificial Sequence
  Description of Artificial Sequence: Synthetic oligonucleotide
  Sense strand starting at position 3504 of SEQ ID NO: 2206
ugugaugauuaugacauuu

SEQ ID NO: 171279 - RNA, 19 nt, Artificial Sequence
  Description of Artificial Sequence: Synthetic oligonucleotide
  Antisense strand to SEQ ID NO: 171278
aaaugucauaaucaucaca

SEQ ID NO: 171280 - RNA, 19 nt, Artificial Sequence
  Description of Artificial Sequence: Synthetic oligonucleotide
  Sense strand starting at position 3545 of SEQ ID NO: 2206
cugauuuaaugcggaaauu

SEQ ID NO: 171281 - RNA, 19 nt, Artificial Sequence
  Description of Artificial Sequence: Synthetic oligonucleotide
  Antisense strand to SEQ ID NO: 171280
aauuuccgcauuaaaucag

SEQ ID NO: 171282 - RNA, 19 nt, Artificial Sequence
  Description of Artificial Sequence: Synthetic oligonucleotide
  Sense strand starting at position 3583 of SEQ ID NO: 2206
ucuguauuugguugcccua

SEQ ID NO: 171283 - RNA, 19 nt, Artificial Sequence
  Description of Artificial Sequence: Synthetic oligonucleotide
  Antisense strand to SEQ ID NO: 171282
uagggcaaccaaauacaga

SEQ ID NO: 171284 - RNA, 19 nt, Artificial Sequence
  Description of Artificial Sequence: Synthetic oligonucleotide
  Sense strand starting at position 3585 of SEQ ID NO: 2206
uguauuugguugcccuaga

SEQ ID NO: 171285 - RNA, 19 nt, Artificial Sequence
  Description of Artificial Sequence: Synthetic oligonucleotide
  Antisense strand to SEQ ID NO: 171284
ucuagggcaaccaaauaca

SEQ ID NO: 171286 - RNA, 19 nt, Artificial Sequence
  Description of Artificial Sequence: Synthetic oligonucleotide
  Sense strand starting at position 3586 of SEQ ID NO: 2206
guauuugguugcccuagaa

SEQ ID NO: 171287 - RNA, 19 nt, Artificial Sequence
  Description of Artificial Sequence: Synthetic oligonucleotide
  Antisense strand to SEQ ID NO: 171286
uucuagggcaaccaaauac

SEQ ID NO: 171288 - RNA, 19 nt, Artificial Sequence
  Description of Artificial Sequence: Synthetic oligonucleotide
  Sense strand starting at position 3637 of SEQ ID NO: 2206
ccugcaaagguuugaauua

SEQ ID NO: 171289 - RNA, 19 nt, Artificial Sequence
  Description of Artificial Sequence: Synthetic oligonucleotide
  Antisense strand to SEQ ID NO: 171288
uaauucaaaccuuugcagg

SEQ ID NO: 171290 - RNA, 19 nt, Artificial Sequence
  Description of Artificial Sequence: Synthetic oligonucleotide
  Sense strand starting at position 3716 of SEQ ID NO: 2206
acucuuauugcccaggagu

SEQ ID NO: 171291 - RNA, 19 nt, Artificial Sequence
  Description of Artificial Sequence: Synthetic oligonucleotide
  Antisense strand to SEQ ID NO: 171290
acuccugggcaauaagagu

SEQ ID NO: 171292 - RNA, 19 nt, Artificial Sequence
  Description of Artificial Sequence: Synthetic oligonucleotide
  Sense strand starting at position 3570 of SEQ ID NO: 2207
ccgaaauugcaucauuaca

SEQ ID NO: 171293 - RNA, 19 nt, Artificial Sequence
  Description of Artificial Sequence: Synthetic oligonucleotide
  Antisense strand to SEQ ID NO: 171292
uguaaugaugcaauuucgg

SEQ ID NO: 171294 - RNA, 19 nt, Artificial Sequence
  Description of Artificial Sequence: Synthetic oligonucleotide
  Sense strand starting at position 3075 of SEQ ID NO: 2207
cuggguguggccuguaauc

SEQ ID NO: 171295 - RNA, 19 nt, Artificial Sequence
  Description of Artificial Sequence: Synthetic oligonucleotide
  Antisense strand to SEQ ID NO: 171294
gauuacaggccacacccag

SEQ ID NO: 171296 - RNA, 19 nt, Artificial Sequence
  Description of Artificial Sequence: Synthetic oligonucleotide
  Sense strand starting at position 2701 of SEQ ID NO: 2207
ucacuuugauugugugaac

SEQ ID NO: 171297 - RNA, 19 nt, Artificial Sequence
  Description of Artificial Sequence: Synthetic oligonucleotide
  Antisense strand to SEQ ID NO: 171296
guucacacaaucaaaguga

SEQ ID NO: 171298 - RNA, 19 nt, Artificial Sequence
  Description of Artificial Sequence: Synthetic oligonucleotide
  Sense strand starting at position 2699 of SEQ ID NO: 2207
aaucacuuugauuguguga

SEQ ID NO: 171299 - RNA, 19 nt, Artificial Sequence
  Description of Artificial Sequence: Synthetic oligonucleotide
  Antisense strand to SEQ ID NO: 171298
ucacacaaucaaagugauu

SEQ ID NO: 171300 - RNA, 19 nt, Artificial Sequence
  Description of Artificial Sequence: Synthetic oligonucleotide
  Sense strand starting at position 2695 of SEQ ID NO: 2207
ggcaaaucacuuugauugu

SEQ ID NO: 171301 - RNA, 19 nt, Artificial Sequence
  Description of Artificial Sequence: Synthetic oligonucleotide
  Antisense strand to SEQ ID NO: 171300
acaaucaaagugauuugcc

SEQ ID NO: 171302 - RNA, 19 nt, Artificial Sequence
  Description of Artificial Sequence: Synthetic oligonucleotide
  Sense strand starting at position 2692 of SEQ ID NO: 2207
uuaggcaaaucacuuugau

SEQ ID NO: 171303 - RNA, 19 nt, Artificial Sequence
  Description of Artificial Sequence: Synthetic oligonucleotide
  Antisense strand to SEQ ID NO: 171302
aucaaagugauuugccuaa

SEQ ID NO: 171304 - RNA, 19 nt, Artificial Sequence
  Description of Artificial Sequence: Synthetic oligonucleotide
  Sense strand starting at position 2681 of SEQ ID NO: 2207
guuguaugacguuaggcaa

SEQ ID NO: 171305 - RNA, 19 nt, Artificial Sequence
  Description of Artificial Sequence: Synthetic oligonucleotide
  Antisense strand to SEQ ID NO: 171304
uugccuaacgucauacaac

SEQ ID NO: 171306 - RNA, 19 nt, Artificial Sequence
  Description of Artificial Sequence: Synthetic oligonucleotide
  Sense strand starting at position 2680 of SEQ ID NO: 2207
cguuguaugacguuaggca

SEQ ID NO: 171307 - RNA, 19 nt, Artificial Sequence
  Description of Artificial Sequence: Synthetic oligonucleotide
  Antisense strand to SEQ ID NO: 171306
ugccuaacgucauacaacg

SEQ ID NO: 171308 - RNA, 19 nt, Artificial Sequence
  Description of Artificial Sequence: Synthetic oligonucleotide
  Sense strand starting at position 2671 of SEQ ID NO: 2207
ccucuugcucguuguauga

SEQ ID NO: 171309 - RNA, 19 nt, Artificial Sequence
  Description of Artificial Sequence: Synthetic oligonucleotide
  Antisense strand to SEQ ID NO: 171308
ucauacaacgagcaagagg

SEQ ID NO: 171310 - RNA, 19 nt, Artificial Sequence
  Description of Artificial Sequence: Synthetic oligonucleotide
  Sense strand starting at position 2552 of SEQ ID NO: 2207
gagaaaucugcuuagaagc

SEQ ID NO: 171311 - RNA, 19 nt, Artificial Sequence
  Description of Artificial Sequence: Synthetic oligonucleotide
  Antisense strand to SEQ ID NO: 171310
gcuucuaagcagauuucuc

SEQ ID NO: 171312 - RNA, 19 nt, Artificial Sequence
  Description of Artificial Sequence: Synthetic oligonucleotide
  Sense strand starting at position 2482 of SEQ ID NO: 2207
gugugauccaccugugagc

SEQ ID NO: 171313 - RNA, 19 nt, Artificial Sequence
  Description of Artificial Sequence: Synthetic oligonucleotide
  Antisense strand to SEQ ID NO: 171312
gcucacagguggaucacac

SEQ ID NO: 171314 - RNA, 19 nt, Artificial Sequence
  Description of Artificial Sequence: Synthetic oligonucleotide
  Sense strand starting at position 2399 of SEQ ID NO: 2207
gauaauuauugucuacguu

SEQ ID NO: 171315 - RNA, 19 nt, Artificial Sequence
  Description of Artificial Sequence: Synthetic oligonucleotide
  Antisense strand to SEQ ID NO: 171314
aacguagacaauaauuauc

SEQ ID NO: 171316 - RNA, 19 nt, Artificial Sequence
  Description of Artificial Sequence: Synthetic oligonucleotide
  Sense strand starting at position 2398 of SEQ ID NO: 2207
cgauaauuauugucuacgu

SEQ ID NO: 171317 - RNA, 19 nt, Artificial Sequence
  Description of Artificial Sequence: Synthetic oligonucleotide
  Antisense strand to SEQ ID NO: 171316
acguagacaauaauuaucg

SEQ ID NO: 171318 - RNA, 19 nt, Artificial Sequence
  Description of Artificial Sequence: Synthetic oligonucleotide
  Sense strand starting at position 2342 of SEQ ID NO: 2207
cggaaaccuccuggugaag

SEQ ID NO: 171319 - RNA, 19 nt, Artificial Sequence
  Description of Artificial Sequence: Synthetic oligonucleotide
  Antisense strand to SEQ ID NO: 171318
cuucaccaggagguuuccg

SEQ ID NO: 171320 - RNA, 19 nt, Artificial Sequence
  Description of Artificial Sequence: Synthetic oligonucleotide
  Sense strand starting at position 2341 of SEQ ID NO: 2207
ucggaaaccuccuggugaa

SEQ ID NO: 171321 - RNA, 19 nt, Artificial Sequence
  Description of Artificial Sequence: Synthetic oligonucleotide
  Antisense strand to SEQ ID NO: 171320
uucaccaggagguuuccga

SEQ ID NO: 171322 - RNA, 19 nt, Artificial Sequence
  Description of Artificial Sequence: Synthetic oligonucleotide
  Sense strand starting at position 2234 of SEQ ID NO: 2207
uguucugcgucucauagga

SEQ ID NO: 171323 - RNA, 19 nt, Artificial Sequence
  Description of Artificial Sequence: Synthetic oligonucleotide
  Antisense strand to SEQ ID NO: 171322
uccuaugagacgcagaaca

SEQ ID NO: 171324 - RNA, 19 nt, Artificial Sequence
  Description of Artificial Sequence: Synthetic oligonucleotide
  Sense strand starting at position 2229 of SEQ ID NO: 2207
cgacuuguucugcgucuca

SEQ ID NO: 171325 - RNA, 19 nt, Artificial Sequence
  Description of Artificial Sequence: Synthetic oligonucleotide
  Antisense strand to SEQ ID NO: 171324
ugagacgcagaacaagucg

SEQ ID NO: 171326 - RNA, 19 nt, Artificial Sequence
  Description of Artificial Sequence: Synthetic oligonucleotide
  Sense strand starting at position 2155 of SEQ ID NO: 2207
gggcgaugaugaagaugaa

SEQ ID NO: 171327 - RNA, 19 nt, Artificial Sequence
  Description of Artificial Sequence: Synthetic oligonucleotide
  Antisense strand to SEQ ID NO: 171326
uucaucuucaucaucgccc

SEQ ID NO: 171328 - RNA, 19 nt, Artificial Sequence
  Description of Artificial Sequence: Synthetic oligonucleotide
  Sense strand starting at position 1400 of SEQ ID NO: 2207
aguacugcccauggucaaa

SEQ ID NO: 171329 - RNA, 19 nt, Artificial Sequence
  Description of Artificial Sequence: Synthetic oligonucleotide
  Antisense strand to SEQ ID NO: 171328
uuugaccaugggcaguacu

SEQ ID NO: 171330 - RNA, 19 nt, Artificial Sequence
  Description of Artificial Sequence: Synthetic oligonucleotide
  Sense strand starting at position 1342 of SEQ ID NO: 2207
ggaaggcuuccgggaggaa

SEQ ID NO: 171331 - RNA, 19 nt, Artificial Sequence
  Description of Artificial Sequence: Synthetic oligonucleotide
  Antisense strand to SEQ ID NO: 171330
uuccucccggaagccuucc

SEQ ID NO: 171332 - RNA, 19 nt, Artificial Sequence
  Description of Artificial Sequence: Synthetic oligonucleotide
  Sense strand starting at position 1269 of SEQ ID NO: 2207
ugcccaucccugugaacca

SEQ ID NO: 171333 - RNA, 19 nt, Artificial Sequence
  Description of Artificial Sequence: Synthetic oligonucleotide
  Antisense strand to SEQ ID NO: 171332
ugguucacagggaugggca

SEQ ID NO: 171334 - RNA, 19 nt, Artificial Sequence
  Description of Artificial Sequence: Synthetic oligonucleotide
  Sense strand starting at position 1056 of SEQ ID NO: 2207
caguucgcucucuaaggaa

SEQ ID NO: 171335 - RNA, 19 nt, Artificial Sequence
  Description of Artificial Sequence: Synthetic oligonucleotide
  Antisense strand to SEQ ID NO: 171334
uuccuuagagagcgaacug

SEQ ID NO: 171336 - RNA, 19 nt, Artificial Sequence
  Description of Artificial Sequence: Synthetic oligonucleotide
  Sense strand starting at position 1055 of SEQ ID NO: 2207
ucaguucgcucucuaagga

SEQ ID NO: 171337 - RNA, 19 nt, Artificial Sequence
  Description of Artificial Sequence: Synthetic oligonucleotide
  Antisense strand to SEQ ID NO: 171336
uccuuagagagcgaacuga

SEQ ID NO: 171338 - RNA, 19 nt, Artificial Sequence
  Description of Artificial Sequence: Synthetic oligonucleotide
  Sense strand starting at position 1052 of SEQ ID NO: 2207
gccucaguucgcucucuaa

SEQ ID NO: 171339 - RNA, 19 nt, Artificial Sequence
  Description of Artificial Sequence: Synthetic oligonucleotide
  Antisense strand to SEQ ID NO: 171338
uuagagagcgaacugaggc

SEQ ID NO: 171340 - RNA, 19 nt, Artificial Sequence
  Description of Artificial Sequence: Synthetic oligonucleotide
  Sense strand starting at position 940 of SEQ ID NO: 2207
gagggaccuccuuggucua

SEQ ID NO: 171341 - RNA, 19 nt, Artificial Sequence
  Description of Artificial Sequence: Synthetic oligonucleotide
  Antisense strand to SEQ ID NO: 171340
uagaccaaggaggucccuc

SEQ ID NO: 171342 - RNA, 19 nt, Artificial Sequence
  Description of Artificial Sequence: Synthetic oligonucleotide
  Sense strand starting at position 729 of SEQ ID NO: 2207
ggaaacagguguuguaaca

SEQ ID NO: 171343 - RNA, 19 nt, Artificial Sequence
  Description of Artificial Sequence: Synthetic oligonucleotide
  Antisense strand to SEQ ID NO: 171342
uguuacaacaccuguuucc

SEQ ID NO: 171344 - RNA, 19 nt, Artificial Sequence
  Description of Artificial Sequence: Synthetic oligonucleotide
  Sense strand starting at position 726 of SEQ ID NO: 2207
ugaggaaacagguguugua

SEQ ID NO: 171345 - RNA, 19 nt, Artificial Sequence
  Description of Artificial Sequence: Synthetic oligonucleotide
  Antisense strand to SEQ ID NO: 171344
uacaacaccuguuuccuca

SEQ ID NO: 171346 - RNA, 19 nt, Artificial Sequence
  Description of Artificial Sequence: Synthetic oligonucleotide
  Sense strand starting at position 664 of SEQ ID NO: 2207
ggccuucucuagucaccau

SEQ ID NO: 171347 - RNA, 19 nt, Artificial Sequence
  Description of Artificial Sequence: Synthetic oligonucleotide
  Antisense strand to SEQ ID NO: 171346
auggugacuagagaaggcc

SEQ ID NO: 171348 - RNA, 19 nt, Artificial Sequence
  Description of Artificial Sequence: Synthetic oligonucleotide
  Sense strand starting at position 515 of SEQ ID NO: 2207
gguugaacccaggguguuu

SEQ ID NO: 171349 - RNA, 19 nt, Artificial Sequence
  Description of Artificial Sequence: Synthetic oligonucleotide
  Antisense strand to SEQ ID NO: 171348
aaacacccuggguucaacc

SEQ ID NO: 171350 - RNA, 19 nt, Artificial Sequence
  Description of Artificial Sequence: Synthetic oligonucleotide
  Sense strand starting at position 438 of SEQ ID NO: 2207
ugagcuguaucgugccacu

SEQ ID NO: 171351 - RNA, 19 nt, Artificial Sequence
  Description of Artificial Sequence: Synthetic oligonucleotide
  Antisense strand to SEQ ID NO: 171350
aguggcacgauacagcuca

SEQ ID NO: 171352 - RNA, 19 nt, Artificial Sequence
  Description of Artificial Sequence: Synthetic oligonucleotide
  Sense strand starting at position 3634 of SEQ ID NO: 2208
cugggaacacgguaguaaa

SEQ ID NO: 171353 - RNA, 19 nt, Artificial Sequence
  Description of Artificial Sequence: Synthetic oligonucleotide
  Antisense strand to SEQ ID NO: 171352
uuuacuaccguguucccag

SEQ ID NO: 171354 - RNA, 19 nt, Artificial Sequence
  Description of Artificial Sequence: Synthetic oligonucleotide
  Sense strand starting at position 3610 of SEQ ID NO: 2208
guauacaaugcccagugua

SEQ ID NO: 171355 - RNA, 19 nt, Artificial Sequence
  Description of Artificial Sequence: Synthetic oligonucleotide
  Antisense strand to SEQ ID NO: 171354
uacacugggcauuguauac

SEQ ID NO: 171356 - RNA, 19 nt, Artificial Sequence
  Description of Artificial Sequence: Synthetic oligonucleotide
  Sense strand starting at position 3293 of SEQ ID NO: 2208
uugagauucucccuauguc

SEQ ID NO: 171357 - RNA, 19 nt, Artificial Sequence
  Description of Artificial Sequence: Synthetic oligonucleotide
  Antisense strand to SEQ ID NO: 171356
gacauagggagaaucucaa

SEQ ID NO: 171358 - RNA, 19 nt, Artificial Sequence
  Description of Artificial Sequence: Synthetic oligonucleotide
  Sense strand starting at position 3225 of SEQ ID NO: 2208
cugcgcagugcuucuuaaa

SEQ ID NO: 171359 - RNA, 19 nt, Artificial Sequence
  Description of Artificial Sequence: Synthetic oligonucleotide
  Antisense strand to SEQ ID NO: 171358
uuuaagaagcacugcgcag

SEQ ID NO: 171360 - RNA, 19 nt, Artificial Sequence
  Description of Artificial Sequence: Synthetic oligonucleotide
  Sense strand starting at position 2944 of SEQ ID NO: 2208
gcaucuuacucuguaagua

SEQ ID NO: 171361 - RNA, 19 nt, Artificial Sequence
  Description of Artificial Sequence: Synthetic oligonucleotide
  Antisense strand to SEQ ID NO: 171360
uacuuacagaguaagaugc

SEQ ID NO: 171362 - RNA, 19 nt, Artificial Sequence
  Description of Artificial Sequence: Synthetic oligonucleotide
  Sense strand starting at position 2925 of SEQ ID NO: 2208
guguucccacaguaaguuu

SEQ ID NO: 171363 - RNA, 19 nt, Artificial Sequence
  Description of Artificial Sequence: Synthetic oligonucleotide
  Antisense strand to SEQ ID NO: 171362
aaacuuacugugggaacac

SEQ ID NO: 171364 - RNA, 19 nt, Artificial Sequence
  Description of Artificial Sequence: Synthetic oligonucleotide
  Sense strand starting at position 2876 of SEQ ID NO: 2208
auaggucaucugugaugcu

SEQ ID NO: 171365 - RNA, 19 nt, Artificial Sequence
  Description of Artificial Sequence: Synthetic oligonucleotide
  Antisense strand to SEQ ID NO: 171364
agcaucacagaugaccuau

SEQ ID NO: 171366 - RNA, 19 nt, Artificial Sequence
  Description of Artificial Sequence: Synthetic oligonucleotide
  Sense strand starting at position 2872 of SEQ ID NO: 2208
ucucauaggucaucuguga

SEQ ID NO: 171367 - RNA, 19 nt, Artificial Sequence
  Description of Artificial Sequence: Synthetic oligonucleotide
  Antisense strand to SEQ ID NO: 171366
ucacagaugaccuaugaga

SEQ ID NO: 171368 - RNA, 19 nt, Artificial Sequence
  Description of Artificial Sequence: Synthetic oligonucleotide
  Sense strand starting at position 2842 of SEQ ID NO: 2208
gcucuagugucucugaaca

SEQ ID NO: 171369 - RNA, 19 nt, Artificial Sequence
  Description of Artificial Sequence: Synthetic oligonucleotide
  Antisense strand to SEQ ID NO: 171368
uguucagagacacuagagc

SEQ ID NO: 171370 - RNA, 19 nt, Artificial Sequence
  Description of Artificial Sequence: Synthetic oligonucleotide
  Sense strand starting at position 2832 of SEQ ID NO: 2208
cggaauuucugcucuagug

SEQ ID NO: 171371 - RNA, 19 nt, Artificial Sequence
  Description of Artificial Sequence: Synthetic oligonucleotide
  Antisense strand to SEQ ID NO: 171370
cacuagagcagaaauuccg

SEQ ID NO: 171372 - RNA, 19 nt, Artificial Sequence
  Description of Artificial Sequence: Synthetic oligonucleotide
  Sense strand starting at position 2792 of SEQ ID NO: 2208
aaucucugcguuuaucagu

SEQ ID NO: 171373 - RNA, 19 nt, Artificial Sequence
  Description of Artificial Sequence: Synthetic oligonucleotide
  Antisense strand to SEQ ID NO: 171372
acugauaaacgcagagauu

SEQ ID NO: 171374 - RNA, 19 nt, Artificial Sequence
  Description of Artificial Sequence: Synthetic oligonucleotide
  Sense strand starting at position 2789 of SEQ ID NO: 2208
gagaaucucugcguuuauc

SEQ ID NO: 171375 - RNA, 19 nt, Artificial Sequence
  Description of Artificial Sequence: Synthetic oligonucleotide
  Antisense strand to SEQ ID NO: 171374
gauaaacgcagagauucuc

SEQ ID NO: 171376 - RNA, 19 nt, Artificial Sequence
  Description of Artificial Sequence: Synthetic oligonucleotide
  Sense strand starting at position 2787 of SEQ ID NO: 2208
uugagaaucucugcguuua

SEQ ID NO: 171377 - RNA, 19 nt, Artificial Sequence
  Description of Artificial Sequence: Synthetic oligonucleotide
  Antisense strand to SEQ ID NO: 171376
uaaacgcagagauucucaa

SEQ ID NO: 171378 - RNA, 19 nt, Artificial Sequence
  Description of Artificial Sequence: Synthetic oligonucleotide
  Sense strand starting at position 2785 of SEQ ID NO: 2208
auuugagaaucucugcguu

SEQ ID NO: 171379 - RNA, 19 nt, Artificial Sequence
  Description of Artificial Sequence: Synthetic oligonucleotide
  Antisense strand to SEQ ID NO: 171378
aacgcagagauucucaaau

SEQ ID NO: 171380 - RNA, 19 nt, Artificial Sequence
  Description of Artificial Sequence: Synthetic oligonucleotide
  Sense strand starting at position 2763 of SEQ ID NO: 2208
ggugauucuuacccaccua

SEQ ID NO: 171381 - RNA, 19 nt, Artificial Sequence
  Description of Artificial Sequence: Synthetic oligonucleotide
  Antisense strand to SEQ ID NO: 171380
uagguggguaagaaucacc

SEQ ID NO: 171382 - RNA, 19 nt, Artificial Sequence
  Description of Artificial Sequence: Synthetic oligonucleotide
  Sense strand starting at position 2762 of SEQ ID NO: 2208
gggugauucuuacccaccu

SEQ ID NO: 171383 - RNA, 19 nt, Artificial Sequence
  Description of Artificial Sequence: Synthetic oligonucleotide
  Antisense strand to SEQ ID NO: 171382
agguggguaagaaucaccc

SEQ ID NO: 171384 - RNA, 19 nt, Artificial Sequence
  Description of Artificial Sequence: Synthetic oligonucleotide
  Sense strand starting at position 2754 of SEQ ID NO: 2208
gaucucucgggugauucuu

SEQ ID NO: 171385 - RNA, 19 nt, Artificial Sequence
  Description of Artificial Sequence: Synthetic oligonucleotide
  Antisense strand to SEQ ID NO: 171384
aagaaucacccgagagauc

SEQ ID NO: 171386 - RNA, 19 nt, Artificial Sequence
  Description of Artificial Sequence: Synthetic oligonucleotide
  Sense strand starting at position 2750 of SEQ ID NO: 2208
aaccgaucucucgggugau

SEQ ID NO: 171387 - RNA, 19 nt, Artificial Sequence
  Description of Artificial Sequence: Synthetic oligonucleotide
  Antisense strand to SEQ ID NO: 171386
aucacccgagagaucgguu

SEQ ID NO: 171388 - RNA, 19 nt, Artificial Sequence
  Description of Artificial Sequence: Synthetic oligonucleotide
  Sense strand starting at position 2633 of SEQ ID NO: 2208
ugccuucuguaacuaugau

SEQ ID NO: 171389 - RNA, 19 nt, Artificial Sequence
  Description of Artificial Sequence: Synthetic oligonucleotide
  Antisense strand to SEQ ID NO: 171388
aucauaguuacagaaggca

SEQ ID NO: 171390 - RNA, 19 nt, Artificial Sequence
  Description of Artificial Sequence: Synthetic oligonucleotide
  Sense strand starting at position 2630 of SEQ ID NO: 2208
gccugccuucuguaacuau

SEQ ID NO: 171391 - RNA, 19 nt, Artificial Sequence
  Description of Artificial Sequence: Synthetic oligonucleotide
  Antisense strand to SEQ ID NO: 171390
auaguuacagaaggcaggc

SEQ ID NO: 171392 - RNA, 19 nt, Artificial Sequence
  Description of Artificial Sequence: Synthetic oligonucleotide
  Sense strand starting at position 2584 of SEQ ID NO: 2208
uuaauugugugaccucauu

SEQ ID NO: 171393 - RNA, 19 nt, Artificial Sequence
  Description of Artificial Sequence: Synthetic oligonucleotide
  Antisense strand to SEQ ID NO: 171392
aaugaggucacacaauuaa

SEQ ID NO: 171394 - RNA, 19 nt, Artificial Sequence
  Description of Artificial Sequence: Synthetic oligonucleotide
  Sense strand starting at position 2339 of SEQ ID NO: 2208
aagcuuccgaguuggaagu

SEQ ID NO: 171395 - RNA, 19 nt, Artificial Sequence
  Description of Artificial Sequence: Synthetic oligonucleotide
  Antisense strand to SEQ ID NO: 171394
acuuccaacucggaagcuu

SEQ ID NO: 171396 - RNA, 19 nt, Artificial Sequence
  Description of Artificial Sequence: Synthetic oligonucleotide
  Sense strand starting at position 1656 of SEQ ID NO: 2208
ggagcugcucugcagagaa

SEQ ID NO: 171397 - RNA, 19 nt, Artificial Sequence
  Description of Artificial Sequence: Synthetic oligonucleotide
  Antisense strand to SEQ ID NO: 171396
uucucugcagagcagcucc

SEQ ID NO: 171398 - RNA, 19 nt, Artificial Sequence
  Description of Artificial Sequence: Synthetic oligonucleotide
  Sense strand starting at position 1409 of SEQ ID NO: 2208
ggagacaaauuuggacuau

SEQ ID NO: 171399 - RNA, 19 nt, Artificial Sequence
  Description of Artificial Sequence: Synthetic oligonucleotide
  Antisense strand to SEQ ID NO: 171398
auaguccaaauuugucucc

SEQ ID NO: 171400 - RNA, 19 nt, Artificial Sequence
  Description of Artificial Sequence: Synthetic oligonucleotide
  Sense strand starting at position 1397 of SEQ ID NO: 2208
aauauucccguaggagaca

SEQ ID NO: 171401 - RNA, 19 nt, Artificial Sequence
  Description of Artificial Sequence: Synthetic oligonucleotide
  Antisense strand to SEQ ID NO: 171400
ugucuccuacgggaauauu

SEQ ID NO: 171402 - RNA, 19 nt, Artificial Sequence
  Description of Artificial Sequence: Synthetic oligonucleotide
  Sense strand starting at position 1395 of SEQ ID NO: 2208
cuaauauucccguaggaga

SEQ ID NO: 171403 - RNA, 19 nt, Artificial Sequence
  Description of Artificial Sequence: Synthetic oligonucleotide
  Antisense strand to SEQ ID NO: 171402
ucuccuacgggaauauuag

SEQ ID NO: 171404 - RNA, 19 nt, Artificial Sequence
  Description of Artificial Sequence: Synthetic oligonucleotide
  Sense strand starting at position 1335 of SEQ ID NO: 2208
gccgauugccacuggaaug

SEQ ID NO: 171405 - RNA, 19 nt, Artificial Sequence
  Description of Artificial Sequence: Synthetic oligonucleotide
  Antisense strand to SEQ ID NO: 171404
cauuccaguggcaaucggc

SEQ ID NO: 171406 - RNA, 19 nt, Artificial Sequence
  Description of Artificial Sequence: Synthetic oligonucleotide
  Sense strand starting at position 1241 of SEQ ID NO: 2208
cccuaagauuuguaaaguc

SEQ ID NO: 171407 - RNA, 19 nt, Artificial Sequence
  Description of Artificial Sequence: Synthetic oligonucleotide
  Antisense strand to SEQ ID NO: 171406
gacuuuacaaaucuuaggg

SEQ ID NO: 171408 - RNA, 19 nt, Artificial Sequence
  Description of Artificial Sequence: Synthetic oligonucleotide
  Sense strand starting at position 1110 of SEQ ID NO: 2208
guccuucuauacucucaga

SEQ ID NO: 171409 - RNA, 19 nt, Artificial Sequence
  Description of Artificial Sequence: Synthetic oligonucleotide
  Antisense strand to SEQ ID NO: 171408
ucugagaguauagaaggac

SEQ ID NO: 171410 - RNA, 19 nt, Artificial Sequence
  Description of Artificial Sequence: Synthetic oligonucleotide
  Sense strand starting at position 1102 of SEQ ID NO: 2208
cuugccagguccuucuaua

SEQ ID NO: 171411 - RNA, 19 nt, Artificial Sequence
  Description of Artificial Sequence: Synthetic oligonucleotide
  Antisense strand to SEQ ID NO: 171410
uauagaaggaccuggcaag

SEQ ID NO: 171412 - RNA, 19 nt, Artificial Sequence
  Description of Artificial Sequence: Synthetic oligonucleotide
  Sense strand starting at position 771 of SEQ ID NO: 2208
aagucagggucaucugaaa

SEQ ID NO: 171413 - RNA, 19 nt, Artificial Sequence
  Description of Artificial Sequence: Synthetic oligonucleotide
  Antisense strand to SEQ ID NO: 171412
uuucagaugacccugacuu

SEQ ID NO: 171414 - RNA, 19 nt, Artificial Sequence
  Description of Artificial Sequence: Synthetic oligonucleotide
  Sense strand starting at position 714 of SEQ ID NO: 2208
acgucagacugucuagaau

SEQ ID NO: 171415 - RNA, 19 nt, Artificial Sequence
  Description of Artificial Sequence: Synthetic oligonucleotide
  Antisense strand to SEQ ID NO: 171414
auucuagacagucugacgu

SEQ ID NO: 171416 - RNA, 19 nt, Artificial Sequence
  Description of Artificial Sequence: Synthetic oligonucleotide
  Sense strand starting at position 589 of SEQ ID NO: 2208
guaugaacauuggcucaca

SEQ ID NO: 171417 - RNA, 19 nt, Artificial Sequence
  Description of Artificial Sequence: Synthetic oligonucleotide
  Antisense strand to SEQ ID NO: 171416
ugugagccaauguucauac

SEQ ID NO: 171418 - RNA, 19 nt, Artificial Sequence
  Description of Artificial Sequence: Synthetic oligonucleotide
  Sense strand starting at position 580 of SEQ ID NO: 2208
aucauuaacguaugaacau

SEQ ID NO: 171419 - RNA, 19 nt, Artificial Sequence
  Description of Artificial Sequence: Synthetic oligonucleotide
  Antisense strand to SEQ ID NO: 171418
auguucauacguuaaugau

SEQ ID NO: 171420 - RNA, 19 nt, Artificial Sequence
  Description of Artificial Sequence: Synthetic oligonucleotide
  Sense strand starting at position 557 of SEQ ID NO: 2208
cccaaauggcugcaguaaa

SEQ ID NO: 171421 - RNA, 19 nt, Artificial Sequence
  Description of Artificial Sequence: Synthetic oligonucleotide
  Antisense strand to SEQ ID NO: 171420
uuuacugcagccauuuggg

SEQ ID NO: 171422 - RNA, 19 nt, Artificial Sequence
  Description of Artificial Sequence: Synthetic oligonucleotide
  Sense strand starting at position 430 of SEQ ID NO: 2208
gagaucuuucucugguguu

SEQ ID NO: 171423 - RNA, 19 nt, Artificial Sequence
  Description of Artificial Sequence: Synthetic oligonucleotide
  Antisense strand to SEQ ID NO: 171422
aacaccagagaaagaucuc

SEQ ID NO: 171424 - RNA, 19 nt, Artificial Sequence
  Description of Artificial Sequence: Synthetic oligonucleotide
  Sense strand starting at position 429 of SEQ ID NO: 2208
ggagaucuuucucuggugu

SEQ ID NO: 171425 - RNA, 19 nt, Artificial Sequence
  Description of Artificial Sequence: Synthetic oligonucleotide
  Antisense strand to SEQ ID NO: 171424
acaccagagaaagaucucc

SEQ ID NO: 171426 - RNA, 19 nt, Artificial Sequence
  Description of Artificial Sequence: Synthetic oligonucleotide
  Sense strand starting at position 240 of SEQ ID NO: 2208
cuccaauuccucggaacaa

SEQ ID NO: 171427 - RNA, 19 nt, Artificial Sequence
  Description of Artificial Sequence: Synthetic oligonucleotide
  Antisense strand to SEQ ID NO: 171426
uuguuccgaggaauuggag

SEQ ID NO: 171428 - RNA, 19 nt, Artificial Sequence
  Description of Artificial Sequence: Synthetic oligonucleotide
  Sense strand starting at position 239 of SEQ ID NO: 2208
ccuccaauuccucggaaca

SEQ ID NO: 171429 - RNA, 19 nt, Artificial Sequence
  Description of Artificial Sequence: Synthetic oligonucleotide
  Antisense strand to SEQ ID NO: 171428
uguuccgaggaauuggagg

SEQ ID NO: 171430 - RNA, 19 nt, Artificial Sequence
  Description of Artificial Sequence: Synthetic oligonucleotide
  Sense strand starting at position 155 of SEQ ID NO: 2208
uaauaaaucguaugucugu

SEQ ID NO: 171431 - RNA, 19 nt, Artificial Sequence
  Description of Artificial Sequence: Synthetic oligonucleotide
  Antisense strand to SEQ ID NO: 171430
acagacauacgauuuauua

SEQ ID NO: 171432 - RNA, 19 nt, Artificial Sequence
  Description of Artificial Sequence: Synthetic oligonucleotide
  Sense strand starting at position 3980 of SEQ ID NO: 2209
cgacuuaagccauaaugca

SEQ ID NO: 171433 - RNA, 19 nt, Artificial Sequence
  Description of Artificial Sequence: Synthetic oligonucleotide
  Antisense strand to SEQ ID NO: 171432
ugcauuauggcuuaagucg

SEQ ID NO: 171434 - RNA, 19 nt, Artificial Sequence
  Description of Artificial Sequence: Synthetic oligonucleotide
  Sense strand starting at position 3968 of SEQ ID NO: 2209
agauguauaagacgacuua

SEQ ID NO: 171435 - RNA, 19 nt, Artificial Sequence
  Description of Artificial Sequence: Synthetic oligonucleotide
  Antisense strand to SEQ ID NO: 171434
uaagucgucuuauacaucu

SEQ ID NO: 171436 - RNA, 19 nt, Artificial Sequence
  Description of Artificial Sequence: Synthetic oligonucleotide
  Sense strand starting at position 3941 of SEQ ID NO: 2209
guggguuguguauacaucu

SEQ ID NO: 171437 - RNA, 19 nt, Artificial Sequence
  Description of Artificial Sequence: Synthetic oligonucleotide
  Antisense strand to SEQ ID NO: 171436
agauguauacacaacccac

SEQ ID NO: 171438 - RNA, 19 nt, Artificial Sequence
  Description of Artificial Sequence: Synthetic oligonucleotide
  Sense strand starting at position 3856 of SEQ ID NO: 2209
gagauuaugcugcaaguaa

SEQ ID NO: 171439 - RNA, 19 nt, Artificial Sequence
  Description of Artificial Sequence: Synthetic oligonucleotide
  Antisense strand to SEQ ID NO: 171438
uuacuugcagcauaaucuc

SEQ ID NO: 171440 - RNA, 19 nt, Artificial Sequence
  Description of Artificial Sequence: Synthetic oligonucleotide
  Sense strand starting at position 3844 of SEQ ID NO: 2209
uuuacauguguugagauua

SEQ ID NO: 171441 - RNA, 19 nt, Artificial Sequence
  Description of Artificial Sequence: Synthetic oligonucleotide
  Antisense strand to SEQ ID NO: 171440
uaaucucaacacauguaaa

SEQ ID NO: 171442 - RNA, 19 nt, Artificial Sequence
  Description of Artificial Sequence: Synthetic oligonucleotide
  Sense strand starting at position 3750 of SEQ ID NO: 2209
ugguaauaaugaucuguac

SEQ ID NO: 171443 - RNA, 19 nt, Artificial Sequence
  Description of Artificial Sequence: Synthetic oligonucleotide
  Antisense strand to SEQ ID NO: 171442
guacagaucauuauuacca

SEQ ID NO: 171444 - RNA, 19 nt, Artificial Sequence
  Description of Artificial Sequence: Synthetic oligonucleotide
  Sense strand starting at position 3634 of SEQ ID NO: 2209
cagauauuggcacagguau

SEQ ID NO: 171445 - RNA, 19 nt, Artificial Sequence
  Description of Artificial Sequence: Synthetic oligonucleotide
  Antisense strand to SEQ ID NO: 171444
auaccugugccaauaucug

SEQ ID NO: 171446 - RNA, 19 nt, Artificial Sequence
  Description of Artificial Sequence: Synthetic oligonucleotide
  Sense strand starting at position 3617 of SEQ ID NO: 2209
ucuuguuggaagugacaca

SEQ ID NO: 171447 - RNA, 19 nt, Artificial Sequence
  Description of Artificial Sequence: Synthetic oligonucleotide
  Antisense strand to SEQ ID NO: 171446
ugugucacuuccaacaaga

SEQ ID NO: 171448 - RNA, 19 nt, Artificial Sequence
  Description of Artificial Sequence: Synthetic oligonucleotide
  Sense strand starting at position 3507 of SEQ ID NO: 2209
guuuguauggcaggauuca

SEQ ID NO: 171449 - RNA, 19 nt, Artificial Sequence
  Description of Artificial Sequence: Synthetic oligonucleotide
  Antisense strand to SEQ ID NO: 171448
ugaauccugccauacaaac

SEQ ID NO: 171450 - RNA, 19 nt, Artificial Sequence
  Description of Artificial Sequence: Synthetic oligonucleotide
  Sense strand starting at position 3455 of SEQ ID NO: 2209
gugccagaccuuugaaucu

SEQ ID NO: 171451 - RNA, 19 nt, Artificial Sequence
  Description of Artificial Sequence: Synthetic oligonucleotide
  Antisense strand to SEQ ID NO: 171450
agauucaaaggucuggcac

SEQ ID NO: 171452 - RNA, 19 nt, Artificial Sequence
  Description of Artificial Sequence: Synthetic oligonucleotide
  Sense strand starting at position 3419 of SEQ ID NO: 2209
gagagugguggaugccuua

SEQ ID NO: 171453 - RNA, 19 nt, Artificial Sequence
  Description of Artificial Sequence: Synthetic oligonucleotide
  Antisense strand to SEQ ID NO: 171452
uaaggcauccaccacucuc

SEQ ID NO: 171454 - RNA, 19 nt, Artificial Sequence
  Description of Artificial Sequence: Synthetic oligonucleotide
  Sense strand starting at position 3366 of SEQ ID NO: 2209
ggaggagcuuucucuagac

SEQ ID NO: 171455 - RNA, 19 nt, Artificial Sequence
  Description of Artificial Sequence: Synthetic oligonucleotide
  Antisense strand to SEQ ID NO: 171454
gucuagagaaagcuccucc

SEQ ID NO: 171456 - RNA, 19 nt, Artificial Sequence
  Description of Artificial Sequence: Synthetic oligonucleotide
  Sense strand starting at position 3276 of SEQ ID NO: 2209
ugacuccuggaguagcaua

SEQ ID NO: 171457 - RNA, 19 nt, Artificial Sequence
  Description of Artificial Sequence: Synthetic oligonucleotide
  Antisense strand to SEQ ID NO: 171456
uaugcuacuccaggaguca

SEQ ID NO: 171458 - RNA, 19 nt, Artificial Sequence
  Description of Artificial Sequence: Synthetic oligonucleotide
  Sense strand starting at position 3127 of SEQ ID NO: 2209
gaguguguucugggugaag

SEQ ID NO: 171459 - RNA, 19 nt, Artificial Sequence
  Description of Artificial Sequence: Synthetic oligonucleotide
  Antisense strand to SEQ ID NO: 171458
cuucacccagaacacacuc

SEQ ID NO: 171460 - RNA, 19 nt, Artificial Sequence
  Description of Artificial Sequence: Synthetic oligonucleotide
  Sense strand starting at position 3112 of SEQ ID NO: 2209
ugggacaucuucccagagu

SEQ ID NO: 171461 - RNA, 19 nt, Artificial Sequence
  Description of Artificial Sequence: Synthetic oligonucleotide
  Antisense strand to SEQ ID NO: 171460
acucugggaagauguccca

SEQ ID NO: 171462 - RNA, 19 nt, Artificial Sequence
  Description of Artificial Sequence: Synthetic oligonucleotide
  Sense strand starting at position 3049 of SEQ ID NO: 2209
ggaugagacuuggugucag

SEQ ID NO: 171463 - RNA, 19 nt, Artificial Sequence
  Description of Artificial Sequence: Synthetic oligonucleotide
  Antisense strand to SEQ ID NO: 171462
cugacaccaagucucaucc

SEQ ID NO: 171464 - RNA, 19 nt, Artificial Sequence
  Description of Artificial Sequence: Synthetic oligonucleotide
  Sense strand starting at position 2787 of SEQ ID NO: 2209
ggagcagucgcacugcuuu

SEQ ID NO: 171465 - RNA, 19 nt, Artificial Sequence
  Description of Artificial Sequence: Synthetic oligonucleotide
  Antisense strand to SEQ ID NO: 171464
aaagcagugcgacugcucc

SEQ ID NO: 171466 - RNA, 19 nt, Artificial Sequence
  Description of Artificial Sequence: Synthetic oligonucleotide
  Sense strand starting at position 2734 of SEQ ID NO: 2209
gcagaagucugcccaggga

SEQ ID NO: 171467 - RNA, 19 nt, Artificial Sequence
  Description of Artificial Sequence: Synthetic oligonucleotide
  Antisense strand to SEQ ID NO: 171466
ucccugggcagacuucugc

SEQ ID NO: 171468 - RNA, 19 nt, Artificial Sequence
  Description of Artificial Sequence: Synthetic oligonucleotide
  Sense strand starting at position 2629 of SEQ ID NO: 2209
auagauaguccucagcuua

SEQ ID NO: 171469 - RNA, 19 nt, Artificial Sequence
  Description of Artificial Sequence: Synthetic oligonucleotide
  Antisense strand to SEQ ID NO: 171468
uaagcugaggacuaucuau

SEQ ID NO: 171470 - RNA, 19 nt, Artificial Sequence
  Description of Artificial Sequence: Synthetic oligonucleotide
  Sense strand starting at position 2452 of SEQ ID NO: 2209
guaccucucucauuguaca

SEQ ID NO: 171471 - RNA, 19 nt, Artificial Sequence
  Description of Artificial Sequence: Synthetic oligonucleotide
  Antisense strand to SEQ ID NO: 171470
uguacaaugagagagguac

SEQ ID NO: 171472 - RNA, 19 nt, Artificial Sequence
  Description of Artificial Sequence: Synthetic oligonucleotide
  Sense strand starting at position 2334 of SEQ ID NO: 2209
ggguuuccuagagagcagu

SEQ ID NO: 171473 - RNA, 19 nt, Artificial Sequence
  Description of Artificial Sequence: Synthetic oligonucleotide
  Antisense strand to SEQ ID NO: 171472
acugcucucuaggaaaccc

SEQ ID NO: 171474 - RNA, 19 nt, Artificial Sequence
  Description of Artificial Sequence: Synthetic oligonucleotide
  Sense strand starting at position 2332 of SEQ ID NO: 2209
auggguuuccuagagagca

SEQ ID NO: 171475 - RNA, 19 nt, Artificial Sequence
  Description of Artificial Sequence: Synthetic oligonucleotide
  Antisense strand to SEQ ID NO: 171474
ugcucucuaggaaacccau

SEQ ID NO: 171476 - RNA, 19 nt, Artificial Sequence
  Description of Artificial Sequence: Synthetic oligonucleotide
  Sense strand starting at position 2288 of SEQ ID NO: 2209
ccacaugaguccucaugua

SEQ ID NO: 171477 - RNA, 19 nt, Artificial Sequence
  Description of Artificial Sequence: Synthetic oligonucleotide
  Antisense strand to SEQ ID NO: 171476
uacaugaggacucaugugg

SEQ ID NO: 171478 - RNA, 19 nt, Artificial Sequence
  Description of Artificial Sequence: Synthetic oligonucleotide
  Sense strand starting at position 2057 of SEQ ID NO: 2209
ggaggagucacuugaggug

SEQ ID NO: 171479 - RNA, 19 nt, Artificial Sequence
  Description of Artificial Sequence: Synthetic oligonucleotide
  Antisense strand to SEQ ID NO: 171478
caccucaagugacuccucc

SEQ ID NO: 171480 - RNA, 19 nt, Artificial Sequence
  Description of Artificial Sequence: Synthetic oligonucleotide
  Sense strand starting at position 1986 of SEQ ID NO: 2209
gacucauucugccuuugag

SEQ ID NO: 171481 - RNA, 19 nt, Artificial Sequence
  Description of Artificial Sequence: Synthetic oligonucleotide
  Antisense strand to SEQ ID NO: 171480
cucaaaggcagaaugaguc

SEQ ID NO: 171482 - RNA, 19 nt, Artificial Sequence
  Description of Artificial Sequence: Synthetic oligonucleotide
  Sense strand starting at position 1701 of SEQ ID NO: 2209
guuucuuggguagaaauca

SEQ ID NO: 171483 - RNA, 19 nt, Artificial Sequence
  Description of Artificial Sequence: Synthetic oligonucleotide
  Antisense strand to SEQ ID NO: 171482
ugauuucuacccaagaaac

SEQ ID NO: 171484 - RNA, 19 nt, Artificial Sequence
  Description of Artificial Sequence: Synthetic oligonucleotide
  Sense strand starting at position 1699 of SEQ ID NO: 2209
ggguuucuuggguagaaau

SEQ ID NO: 171485 - RNA, 19 nt, Artificial Sequence
  Description of Artificial Sequence: Synthetic oligonucleotide
  Antisense strand to SEQ ID NO: 171484
auuucuacccaagaaaccc

SEQ ID NO: 171486 - RNA, 19 nt, Artificial Sequence
  Description of Artificial Sequence: Synthetic oligonucleotide
  Sense strand starting at position 1698 of SEQ ID NO: 2209
aggguuucuuggguagaaa

SEQ ID NO: 171487 - RNA, 19 nt, Artificial Sequence
  Description of Artificial Sequence: Synthetic oligonucleotide
  Antisense strand to SEQ ID NO: 171486
uuucuacccaagaaacccu

SEQ ID NO: 171488 - RNA, 19 nt, Artificial Sequence
  Description of Artificial Sequence: Synthetic oligonucleotide
  Sense strand starting at position 938 of SEQ ID NO: 2209
agugauggcagugaugaua

SEQ ID NO: 171489 - RNA, 19 nt, Artificial Sequence
  Description of Artificial Sequence: Synthetic oligonucleotide
  Antisense strand to SEQ ID NO: 171488
uaucaucacugccaucacu

SEQ ID NO: 171490 - RNA, 19 nt, Artificial Sequence
  Description of Artificial Sequence: Synthetic oligonucleotide
  Sense strand starting at position 937 of SEQ ID NO: 2209
aagugauggcagugaugau

SEQ ID NO: 171491 - RNA, 19 nt, Artificial Sequence
  Description of Artificial Sequence: Synthetic oligonucleotide
  Antisense strand to SEQ ID NO: 171490
aucaucacugccaucacuu

SEQ ID NO: 171492 - RNA, 19 nt, Artificial Sequence
  Description of Artificial Sequence: Synthetic oligonucleotide
  Sense strand starting at position 743 of SEQ ID NO: 2209
auguuuguccagugaacaa

SEQ ID NO: 171493 - RNA, 19 nt, Artificial Sequence
  Description of Artificial Sequence: Synthetic oligonucleotide
  Antisense strand to SEQ ID NO: 171492
uuguucacuggacaaacau

SEQ ID NO: 171494 - RNA, 19 nt, Artificial Sequence
  Description of Artificial Sequence: Synthetic oligonucleotide
  Sense strand starting at position 720 of SEQ ID NO: 2209
ggaauauuguuggugcuca

SEQ ID NO: 171495 - RNA, 19 nt, Artificial Sequence
  Description of Artificial Sequence: Synthetic oligonucleotide
  Antisense strand to SEQ ID NO: 171494
ugagcaccaacaauauucc

SEQ ID NO: 171496 - RNA, 19 nt, Artificial Sequence
  Description of Artificial Sequence: Synthetic oligonucleotide
  Sense strand starting at position 709 of SEQ ID NO: 2209
gcacaacuccuggaauauu

SEQ ID NO: 171497 - RNA, 19 nt, Artificial Sequence
  Description of Artificial Sequence: Synthetic oligonucleotide
  Antisense strand to SEQ ID NO: 171496
aauauuccaggaguugugc

SEQ ID NO: 171498 - RNA, 19 nt, Artificial Sequence
  Description of Artificial Sequence: Synthetic oligonucleotide
  Sense strand starting at position 708 of SEQ ID NO: 2209
agcacaacuccuggaauau

SEQ ID NO: 171499 - RNA, 19 nt, Artificial Sequence
  Description of Artificial Sequence: Synthetic oligonucleotide
  Antisense strand to SEQ ID NO: 171498
auauuccaggaguugugcu

SEQ ID NO: 171500 - RNA, 19 nt, Artificial Sequence
  Description of Artificial Sequence: Synthetic oligonucleotide
  Sense strand starting at position 545 of SEQ ID NO: 2209
gcugccaccuacucagaaa

SEQ ID NO: 171501 - RNA, 19 nt, Artificial Sequence
  Description of Artificial Sequence: Synthetic oligonucleotide
  Antisense strand to SEQ ID NO: 171500
uuucugaguagguggcagc

SEQ ID NO: 171502 - RNA, 19 nt, Artificial Sequence
  Description of Artificial Sequence: Synthetic oligonucleotide
  Sense strand starting at position 466 of SEQ ID NO: 2209
uguguucugcacuagacca

SEQ ID NO: 171503 - RNA, 19 nt, Artificial Sequence
  Description of Artificial Sequence: Synthetic oligonucleotide
  Antisense strand to SEQ ID NO: 171502
uggucuagugcagaacaca

SEQ ID NO: 171504 - RNA, 19 nt, Artificial Sequence
  Description of Artificial Sequence: Synthetic oligonucleotide
  Sense strand starting at position 463 of SEQ ID NO: 2209
uccuguguucugcacuaga

SEQ ID NO: 171505 - RNA, 19 nt, Artificial Sequence
  Description of Artificial Sequence: Synthetic oligonucleotide
  Antisense strand to SEQ ID NO: 171504
ucuagugcagaacacagga

SEQ ID NO: 171506 - RNA, 19 nt, Artificial Sequence
  Description of Artificial Sequence: Synthetic oligonucleotide
  Sense strand starting at position 347 of SEQ ID NO: 2209
agugaaaucuuccuugauu

SEQ ID NO: 171507 - RNA, 19 nt, Artificial Sequence
  Description of Artificial Sequence: Synthetic oligonucleotide
  Antisense strand to SEQ ID NO: 171506
aaucaaggaagauuucacu

SEQ ID NO: 171508 - RNA, 19 nt, Artificial Sequence
  Description of Artificial Sequence: Synthetic oligonucleotide
  Sense strand starting at position 282 of SEQ ID NO: 2209
ccuccaugccucugagacu

SEQ ID NO: 171509 - RNA, 19 nt, Artificial Sequence
  Description of Artificial Sequence: Synthetic oligonucleotide
  Antisense strand to SEQ ID NO: 171508
agucucagaggcauggagg

SEQ ID NO: 171510 - RNA, 19 nt, Artificial Sequence
  Description of Artificial Sequence: Synthetic oligonucleotide
  Sense strand starting at position 118 of SEQ ID NO: 2209
ccuccacggugaucuaaga

SEQ ID NO: 171511 - RNA, 19 nt, Artificial Sequence
  Description of Artificial Sequence: Synthetic oligonucleotide
  Antisense strand to SEQ ID NO: 171510
ucuuagaucaccguggagg

SEQ ID NO: 171512 - RNA, 19 nt, Artificial Sequence
  Description of Artificial Sequence: Synthetic oligonucleotide
  Sense strand starting at position 3944 of SEQ ID NO: 2210
aagaccugguggguauaaa

SEQ ID NO: 171513 - RNA, 19 nt, Artificial Sequence
  Description of Artificial Sequence: Synthetic oligonucleotide
  Antisense strand to SEQ ID NO: 171512
uuuauacccaccaggucuu

SEQ ID NO: 171514 - RNA, 19 nt, Artificial Sequence
  Description of Artificial Sequence: Synthetic oligonucleotide
  Sense strand starting at position 3942 of SEQ ID NO: 2210
cgaagaccugguggguaua

SEQ ID NO: 171515 - RNA, 19 nt, Artificial Sequence
  Description of Artificial Sequence: Synthetic oligonucleotide
  Antisense strand to SEQ ID NO: 171514
uauacccaccaggucuucg

SEQ ID NO: 171516 - RNA, 19 nt, Artificial Sequence
  Description of Artificial Sequence: Synthetic oligonucleotide
  Sense strand starting at position 3916 of SEQ ID NO: 2210
gcaggaaucugacauuuag

SEQ ID NO: 171517 - RNA, 19 nt, Artificial Sequence
  Description of Artificial Sequence: Synthetic oligonucleotide
  Antisense strand to SEQ ID NO: 171516
cuaaaugucagauuccugc

SEQ ID NO: 171518 - RNA, 19 nt, Artificial Sequence
  Description of Artificial Sequence: Synthetic oligonucleotide
  Sense strand starting at position 3913 of SEQ ID NO: 2210
agggcaggaaucugacauu

SEQ ID NO: 171519 - RNA, 19 nt, Artificial Sequence
  Description of Artificial Sequence: Synthetic oligonucleotide
  Antisense strand to SEQ ID NO: 171518
aaugucagauuccugcccu

SEQ ID NO: 171520 - RNA, 19 nt, Artificial Sequence
  Description of Artificial Sequence: Synthetic oligonucleotide
  Sense strand starting at position 3827 of SEQ ID NO: 2210
augugacuguaauuaagaa

SEQ ID NO: 171521 - RNA, 19 nt, Artificial Sequence
  Description of Artificial Sequence: Synthetic oligonucleotide
  Antisense strand to SEQ ID NO: 171520
uucuuaauuacagucacau

SEQ ID NO: 171522 - RNA, 19 nt, Artificial Sequence
  Description of Artificial Sequence: Synthetic oligonucleotide
  Sense strand starting at position 3811 of SEQ ID NO: 2210
agaagacguguucagaaug

SEQ ID NO: 171523 - RNA, 19 nt, Artificial Sequence
  Description of Artificial Sequence: Synthetic oligonucleotide
  Antisense strand to SEQ ID NO: 171522
cauucugaacacgucuucu

SEQ ID NO: 171524 - RNA, 19 nt, Artificial Sequence
  Description of Artificial Sequence: Synthetic oligonucleotide
  Sense strand starting at position 3798 of SEQ ID NO: 2210
guguguaagguggagaaga

SEQ ID NO: 171525 - RNA, 19 nt, Artificial Sequence
  Description of Artificial Sequence: Synthetic oligonucleotide
  Antisense strand to SEQ ID NO: 171524
ucuucuccaccuuacacac

SEQ ID NO: 171526 - RNA, 19 nt, Artificial Sequence
  Description of Artificial Sequence: Synthetic oligonucleotide
  Sense strand starting at position 3796 of SEQ ID NO: 2210
ggguguguaagguggagaa

SEQ ID NO: 171527 - RNA, 19 nt, Artificial Sequence
  Description of Artificial Sequence: Synthetic oligonucleotide
  Antisense strand to SEQ ID NO: 171526
uucuccaccuuacacaccc

SEQ ID NO: 171528 - RNA, 19 nt, Artificial Sequence
  Description of Artificial Sequence: Synthetic oligonucleotide
  Sense strand starting at position 3776 of SEQ ID NO: 2210
ucauacuaguuaucugauu

SEQ ID NO: 171529 - RNA, 19 nt, Artificial Sequence
  Description of Artificial Sequence: Synthetic oligonucleotide
  Antisense strand to SEQ ID NO: 171528
aaucagauaacuaguauga

SEQ ID NO: 171530 - RNA, 19 nt, Artificial Sequence
  Description of Artificial Sequence: Synthetic oligonucleotide
  Sense strand starting at position 3763 of SEQ ID NO: 2210
acgugagaaugguucauac

SEQ ID NO: 171531 - RNA, 19 nt, Artificial Sequence
  Description of Artificial Sequence: Synthetic oligonucleotide
  Antisense strand to SEQ ID NO: 171530
guaugaaccauucucacgu

SEQ ID NO: 171532 - RNA, 19 nt, Artificial Sequence
  Description of Artificial Sequence: Synthetic oligonucleotide
  Sense strand starting at position 3755 of SEQ ID NO: 2210
ugucuugcacgugagaaug

SEQ ID NO: 171533 - RNA, 19 nt, Artificial Sequence
  Description of Artificial Sequence: Synthetic oligonucleotide
  Antisense strand to SEQ ID NO: 171532
cauucucacgugcaagaca

SEQ ID NO: 171534 - RNA, 19 nt, Artificial Sequence
  Description of Artificial Sequence: Synthetic oligonucleotide
  Sense strand starting at position 3672 of SEQ ID NO: 2210
gagugagggucucuccaaa

SEQ ID NO: 171535 - RNA, 19 nt, Artificial Sequence
  Description of Artificial Sequence: Synthetic oligonucleotide
  Antisense strand to SEQ ID NO: 171534
uuuggagagacccucacuc

SEQ ID NO: 171536 - RNA, 19 nt, Artificial Sequence
  Description of Artificial Sequence: Synthetic oligonucleotide
  Sense strand starting at position 3599 of SEQ ID NO: 2210
uaagauugugccuggguga

SEQ ID NO: 171537 - RNA, 19 nt, Artificial Sequence
  Description of Artificial Sequence: Synthetic oligonucleotide
  Antisense strand to SEQ ID NO: 171536
ucacccaggcacaaucuua

SEQ ID NO: 171538 - RNA, 19 nt, Artificial Sequence
  Description of Artificial Sequence: Synthetic oligonucleotide
  Sense strand starting at position 3267 of SEQ ID NO: 2210
ucaugugauggcuguuaaa

SEQ ID NO: 171539 - RNA, 19 nt, Artificial Sequence
  Description of Artificial Sequence: Synthetic oligonucleotide
  Antisense strand to SEQ ID NO: 171538
uuuaacagccaucacauga

SEQ ID NO: 171540 - RNA, 19 nt, Artificial Sequence
  Description of Artificial Sequence: Synthetic oligonucleotide
  Sense strand starting at position 3264 of SEQ ID NO: 2210
caaucaugugauggcuguu

SEQ ID NO: 171541 - RNA, 19 nt, Artificial Sequence
  Description of Artificial Sequence: Synthetic oligonucleotide
  Antisense strand to SEQ ID NO: 171540
aacagccaucacaugauug

SEQ ID NO: 171542 - RNA, 19 nt, Artificial Sequence
  Description of Artificial Sequence: Synthetic oligonucleotide
  Sense strand starting at position 3025 of SEQ ID NO: 2210
gauguuuggcucggagaag

SEQ ID NO: 171543 - RNA, 19 nt, Artificial Sequence
  Description of Artificial Sequence: Synthetic oligonucleotide
  Antisense strand to SEQ ID NO: 171542
cuucuccgagccaaacauc

SEQ ID NO: 171544 - RNA, 19 nt, Artificial Sequence
  Description of Artificial Sequence: Synthetic oligonucleotide
  Sense strand starting at position 3024 of SEQ ID NO: 2210
agauguuuggcucggagaa

SEQ ID NO: 171545 - RNA, 19 nt, Artificial Sequence
  Description of Artificial Sequence: Synthetic oligonucleotide
  Antisense strand to SEQ ID NO: 171544
uucuccgagccaaacaucu

SEQ ID NO: 171546 - RNA, 19 nt, Artificial Sequence
  Description of Artificial Sequence: Synthetic oligonucleotide
  Sense strand starting at position 3021 of SEQ ID NO: 2210
ugaagauguuuggcucgga

SEQ ID NO: 171547 - RNA, 19 nt, Artificial Sequence
  Description of Artificial Sequence: Synthetic oligonucleotide
  Antisense strand to SEQ ID NO: 171546
uccgagccaaacaucuuca

SEQ ID NO: 171548 - RNA, 19 nt, Artificial Sequence
  Description of Artificial Sequence: Synthetic oligonucleotide
  Sense strand starting at position 2990 of SEQ ID NO: 2210
aggccucuccacuaaugau

SEQ ID NO: 171549 - RNA, 19 nt, Artificial Sequence
  Description of Artificial Sequence: Synthetic oligonucleotide
  Antisense strand to SEQ ID NO: 171548
aucauuaguggagaggccu

SEQ ID NO: 171550 - RNA, 19 nt, Artificial Sequence
  Description of Artificial Sequence: Synthetic oligonucleotide
  Sense strand starting at position 2926 of SEQ ID NO: 2210
ucuggagagccaugaccaa

SEQ ID NO: 171551 - RNA, 19 nt, Artificial Sequence
  Description of Artificial Sequence: Synthetic oligonucleotide
  Antisense strand to SEQ ID NO: 171550
uuggucauggcucuccaga

SEQ ID NO: 171552 - RNA, 19 nt, Artificial Sequence
  Description of Artificial Sequence: Synthetic oligonucleotide
  Sense strand starting at position 2784 of SEQ ID NO: 2210
auucgucacuuacugugaa

SEQ ID NO: 171553 - RNA, 19 nt, Artificial Sequence
  Description of Artificial Sequence: Synthetic oligonucleotide
  Antisense strand to SEQ ID NO: 171552
uucacaguaagugacgaau

SEQ ID NO: 171554 - RNA, 19 nt, Artificial Sequence
  Description of Artificial Sequence: Synthetic oligonucleotide
  Sense strand starting at position 2777 of SEQ ID NO: 2210
cuaucuuauucgucacuua

SEQ ID NO: 171555 - RNA, 19 nt, Artificial Sequence
  Description of Artificial Sequence: Synthetic oligonucleotide
  Antisense strand to SEQ ID NO: 171554
uaagugacgaauaagauag

SEQ ID NO: 171556 - RNA, 19 nt, Artificial Sequence
  Description of Artificial Sequence: Synthetic oligonucleotide
  Sense strand starting at position 2757 of SEQ ID NO: 2210
cugucaaauguggauuaau

SEQ ID NO: 171557 - RNA, 19 nt, Artificial Sequence
  Description of Artificial Sequence: Synthetic oligonucleotide
  Antisense strand to SEQ ID NO: 171556
auuaauccacauuugacag

SEQ ID NO: 171558 - RNA, 19 nt, Artificial Sequence
  Description of Artificial Sequence: Synthetic oligonucleotide
  Sense strand starting at position 2755 of SEQ ID NO: 2210
ugcugucaaauguggauua

SEQ ID NO: 171559 - RNA, 19 nt, Artificial Sequence
  Description of Artificial Sequence: Synthetic oligonucleotide
  Antisense strand to SEQ ID NO: 171558
uaauccacauuugacagca

SEQ ID NO: 171560 - RNA, 19 nt, Artificial Sequence
  Description of Artificial Sequence: Synthetic oligonucleotide
  Sense strand starting at position 2753 of SEQ ID NO: 2210
uuugcugucaaauguggau

SEQ ID NO: 171561 - RNA, 19 nt, Artificial Sequence
  Description of Artificial Sequence: Synthetic oligonucleotide
  Antisense strand to SEQ ID NO: 171560
auccacauuugacagcaaa

SEQ ID NO: 171562 - RNA, 19 nt, Artificial Sequence
  Description of Artificial Sequence: Synthetic oligonucleotide
  Sense strand starting at position 2264 of SEQ ID NO: 2210
cgcgauacugccuaaauac

SEQ ID NO: 171563 - RNA, 19 nt, Artificial Sequence
  Description of Artificial Sequence: Synthetic oligonucleotide
  Antisense strand to SEQ ID NO: 171562
guauuuaggcaguaucgcg

SEQ ID NO: 171564 - RNA, 19 nt, Artificial Sequence
  Description of Artificial Sequence: Synthetic oligonucleotide
  Sense strand starting at position 2252 of SEQ ID NO: 2210
gacugaaaucaacgcgaua

SEQ ID NO: 171565 - RNA, 19 nt, Artificial Sequence
  Description of Artificial Sequence: Synthetic oligonucleotide
  Antisense strand to SEQ ID NO: 171564
uaucgcguugauuucaguc

SEQ ID NO: 171566 - RNA, 19 nt, Artificial Sequence
  Description of Artificial Sequence: Synthetic oligonucleotide
  Sense strand starting at position 2240 of SEQ ID NO: 2210
agagguuccguggacugaa

SEQ ID NO: 171567 - RNA, 19 nt, Artificial Sequence
  Description of Artificial Sequence: Synthetic oligonucleotide
  Antisense strand to SEQ ID NO: 171566
uucaguccacggaaccucu

SEQ ID NO: 171568 - RNA, 19 nt, Artificial Sequence
  Description of Artificial Sequence: Synthetic oligonucleotide
  Sense strand starting at position 1265 of SEQ ID NO: 2210
caauaaacgcuggauguaa

SEQ ID NO: 171569 - RNA, 19 nt, Artificial Sequence
  Description of Artificial Sequence: Synthetic oligonucleotide
  Antisense strand to SEQ ID NO: 171568
uuacauccagcguuuauug

SEQ ID NO: 171570 - RNA, 19 nt, Artificial Sequence
  Description of Artificial Sequence: Synthetic oligonucleotide
  Sense strand starting at position 1264 of SEQ ID NO: 2210
ucaauaaacgcuggaugua

SEQ ID NO: 171571 - RNA, 19 nt, Artificial Sequence
  Description of Artificial Sequence: Synthetic oligonucleotide
  Antisense strand to SEQ ID NO: 171570
uacauccagcguuuauuga

SEQ ID NO: 171572 - RNA, 19 nt, Artificial Sequence
  Description of Artificial Sequence: Synthetic oligonucleotide
  Sense strand starting at position 1096 of SEQ ID NO: 2210
ugaggacaucuugguuguu

SEQ ID NO: 171573 - RNA, 19 nt, Artificial Sequence
  Description of Artificial Sequence: Synthetic oligonucleotide
  Antisense strand to SEQ ID NO: 171572
aacaaccaagauguccuca

SEQ ID NO: 171574 - RNA, 19 nt, Artificial Sequence
  Description of Artificial Sequence: Synthetic oligonucleotide
  Sense strand starting at position 1054 of SEQ ID NO: 2210
auaccagaguaguaauuua

SEQ ID NO: 171575 - RNA, 19 nt, Artificial Sequence
  Description of Artificial Sequence: Synthetic oligonucleotide
  Antisense strand to SEQ ID NO: 171574
uaaauuacuacucugguau

SEQ ID NO: 171576 - RNA, 19 nt, Artificial Sequence
  Description of Artificial Sequence: Synthetic oligonucleotide
  Sense strand starting at position 945 of SEQ ID NO: 2210
ggauaacugcuuugaagaa

SEQ ID NO: 171577 - RNA, 19 nt, Artificial Sequence
  Description of Artificial Sequence: Synthetic oligonucleotide
  Antisense strand to SEQ ID NO: 171576
uucuucaaagcaguuaucc

SEQ ID NO: 171578 - RNA, 19 nt, Artificial Sequence
  Description of Artificial Sequence: Synthetic oligonucleotide
  Sense strand starting at position 943 of SEQ ID NO: 2210
gaggauaacugcuuugaag

SEQ ID NO: 171579 - RNA, 19 nt, Artificial Sequence
  Description of Artificial Sequence: Synthetic oligonucleotide
  Antisense strand to SEQ ID NO: 171578
cuucaaagcaguuauccuc

SEQ ID NO: 171580 - RNA, 19 nt, Artificial Sequence
  Description of Artificial Sequence: Synthetic oligonucleotide
  Sense strand starting at position 907 of SEQ ID NO: 2210
ugcugaguccuacauaucu

SEQ ID NO: 171581 - RNA, 19 nt, Artificial Sequence
  Description of Artificial Sequence: Synthetic oligonucleotide
  Antisense strand to SEQ ID NO: 171580
agauauguaggacucagca

SEQ ID NO: 171582 - RNA, 19 nt, Artificial Sequence
  Description of Artificial Sequence: Synthetic oligonucleotide
  Sense strand starting at position 419 of SEQ ID NO: 2210
ccagguaacugauuauauu

SEQ ID NO: 171583 - RNA, 19 nt, Artificial Sequence
  Description of Artificial Sequence: Synthetic oligonucleotide
  Antisense strand to SEQ ID NO: 171582
aauauaaucaguuaccugg

SEQ ID NO: 171584 - RNA, 19 nt, Artificial Sequence
  Description of Artificial Sequence: Synthetic oligonucleotide
  Sense strand starting at position 279 of SEQ ID NO: 2210
caguaaggauuauaaugga

SEQ ID NO: 171585 - RNA, 19 nt, Artificial Sequence
  Description of Artificial Sequence: Synthetic oligonucleotide
  Antisense strand to SEQ ID NO: 171584
uccauuauaauccuuacug

SEQ ID NO: 171586 - RNA, 19 nt, Artificial Sequence
  Description of Artificial Sequence: Synthetic oligonucleotide
  Sense strand starting at position 270 of SEQ ID NO: 2210
uugccaauacaguaaggau

SEQ ID NO: 171587 - RNA, 19 nt, Artificial Sequence
  Description of Artificial Sequence: Synthetic oligonucleotide
  Antisense strand to SEQ ID NO: 171586
auccuuacuguauuggcaa

SEQ ID NO: 171588 - RNA, 19 nt, Artificial Sequence
  Description of Artificial Sequence: Synthetic oligonucleotide
  Sense strand starting at position 103 of SEQ ID NO: 2210
cccacuuaccacuggagaa

SEQ ID NO: 171589 - RNA, 19 nt, Artificial Sequence
  Description of Artificial Sequence: Synthetic oligonucleotide
  Antisense strand to SEQ ID NO: 171588
uucuccagugguaaguggg

SEQ ID NO: 171590 - RNA, 19 nt, Artificial Sequence
  Description of Artificial Sequence: Synthetic oligonucleotide
  Sense strand starting at position 68 of SEQ ID NO: 2210
ccaaguugcaagugaugau

SEQ ID NO: 171591 - RNA, 19 nt, Artificial Sequence
  Description of Artificial Sequence: Synthetic oligonucleotide
  Antisense strand to SEQ ID NO: 171590
aucaucacuugcaacuugg

SEQ ID NO: 171592 - RNA, 19 nt, Artificial Sequence
  Description of Artificial Sequence: Synthetic oligonucleotide
  Sense strand starting at position 3980 of SEQ ID NO: 2212
aaguguguuuaccugucua

SEQ ID NO: 171593 - RNA, 19 nt, Artificial Sequence
  Description of Artificial Sequence: Synthetic oligonucleotide
  Antisense strand to SEQ ID NO: 171592
uagacagguaaacacacuu

SEQ ID NO: 171594 - RNA, 19 nt, Artificial Sequence
  Description of Artificial Sequence: Synthetic oligonucleotide
  Sense strand starting at position 3865 of SEQ ID NO: 2212
ccgccaugccugccugaau

SEQ ID NO: 171595 - RNA, 19 nt, Artificial Sequence
  Description of Artificial Sequence: Synthetic oligonucleotide
  Antisense strand to SEQ ID NO: 171594
auucaggcaggcauggcgg

SEQ ID NO: 171596 - RNA, 19 nt, Artificial Sequence
  Description of Artificial Sequence: Synthetic oligonucleotide
  Sense strand starting at position 3618 of SEQ ID NO: 2212
gcauguguauaucugaguu

SEQ ID NO: 171597 - RNA, 19 nt, Artificial Sequence
  Description of Artificial Sequence: Synthetic oligonucleotide
  Antisense strand to SEQ ID NO: 171596
aacucagauauacacaugc

SEQ ID NO: 171598 - RNA, 19 nt, Artificial Sequence
  Description of Artificial Sequence: Synthetic oligonucleotide
  Sense strand starting at position 3591 of SEQ ID NO: 2212
ggguguguuaucucugugu

SEQ ID NO: 171599 - RNA, 19 nt, Artificial Sequence
  Description of Artificial Sequence: Synthetic oligonucleotide
  Antisense strand to SEQ ID NO: 171598
acacagagauaacacaccc

SEQ ID NO: 171600 - RNA, 19 nt, Artificial Sequence
  Description of Artificial Sequence: Synthetic oligonucleotide
  Sense strand starting at position 3468 of SEQ ID NO: 2212
uguccagaguuccuacuuu

SEQ ID NO: 171601 - RNA, 19 nt, Artificial Sequence
  Description of Artificial Sequence: Synthetic oligonucleotide
  Antisense strand to SEQ ID NO: 171600
aaaguaggaacucuggaca

SEQ ID NO: 171602 - RNA, 19 nt, Artificial Sequence
  Description of Artificial Sequence: Synthetic oligonucleotide
  Sense strand starting at position 3460 of SEQ ID NO: 2212
agaguucguguccagaguu

SEQ ID NO: 171603 - RNA, 19 nt, Artificial Sequence
  Description of Artificial Sequence: Synthetic oligonucleotide
  Antisense strand to SEQ ID NO: 171602
aacucuggacacgaacucu

SEQ ID NO: 171604 - RNA, 19 nt, Artificial Sequence
  Description of Artificial Sequence: Synthetic oligonucleotide
  Sense strand starting at position 3459 of SEQ ID NO: 2212
aagaguucguguccagagu

SEQ ID NO: 171605 - RNA, 19 nt, Artificial Sequence
  Description of Artificial Sequence: Synthetic oligonucleotide
  Antisense strand to SEQ ID NO: 171604
acucuggacacgaacucuu

SEQ ID NO: 171606 - RNA, 19 nt, Artificial Sequence
  Description of Artificial Sequence: Synthetic oligonucleotide
  Sense strand starting at position 3418 of SEQ ID NO: 2212
ucauauccucaggguaaga

SEQ ID NO: 171607 - RNA, 19 nt, Artificial Sequence
  Description of Artificial Sequence: Synthetic oligonucleotide
  Antisense strand to SEQ ID NO: 171606
ucuuacccugaggauauga

SEQ ID NO: 171608 - RNA, 19 nt, Artificial Sequence
  Description of Artificial Sequence: Synthetic oligonucleotide
  Sense strand starting at position 3415 of SEQ ID NO: 2212
augucauauccucagggua

SEQ ID NO: 171609 - RNA, 19 nt, Artificial Sequence
  Description of Artificial Sequence: Synthetic oligonucleotide
  Antisense strand to SEQ ID NO: 171608
uacccugaggauaugacau

SEQ ID NO: 171610 - RNA, 19 nt, Artificial Sequence
  Description of Artificial Sequence: Synthetic oligonucleotide
  Sense strand starting at position 2455 of SEQ ID NO: 2212
ggaguaugauccuuaggug

SEQ ID NO: 171611 - RNA, 19 nt, Artificial Sequence
  Description of Artificial Sequence: Synthetic oligonucleotide
  Antisense strand to SEQ ID NO: 171610
caccuaaggaucauacucc

SEQ ID NO: 171612 - RNA, 19 nt, Artificial Sequence
  Description of Artificial Sequence: Synthetic oligonucleotide
  Sense strand starting at position 2452 of SEQ ID NO: 2212
ccaggaguaugauccuuag

SEQ ID NO: 171613 - RNA, 19 nt, Artificial Sequence
  Description of Artificial Sequence: Synthetic oligonucleotide
  Antisense strand to SEQ ID NO: 171612
cuaaggaucauacuccugg

SEQ ID NO: 171614 - RNA, 19 nt, Artificial Sequence
  Description of Artificial Sequence: Synthetic oligonucleotide
  Sense strand starting at position 2443 of SEQ ID NO: 2212
auuggaauuccaggaguau

SEQ ID NO: 171615 - RNA, 19 nt, Artificial Sequence
  Description of Artificial Sequence: Synthetic oligonucleotide
  Antisense strand to SEQ ID NO: 171614
auacuccuggaauuccaau

SEQ ID NO: 171616 - RNA, 19 nt, Artificial Sequence
  Description of Artificial Sequence: Synthetic oligonucleotide
  Sense strand starting at position 2288 of SEQ ID NO: 2212
acacaaguuugggaaauga

SEQ ID NO: 171617 - RNA, 19 nt, Artificial Sequence
  Description of Artificial Sequence: Synthetic oligonucleotide
  Antisense strand to SEQ ID NO: 171616
ucauuucccaaacuugugu

SEQ ID NO: 171618 - RNA, 19 nt, Artificial Sequence
  Description of Artificial Sequence: Synthetic oligonucleotide
  Sense strand starting at position 2287 of SEQ ID NO: 2212
gacacaaguuugggaaaug

SEQ ID NO: 171619 - RNA, 19 nt, Artificial Sequence
  Description of Artificial Sequence: Synthetic oligonucleotide
  Antisense strand to SEQ ID NO: 171618
cauuucccaaacuuguguc

SEQ ID NO: 171620 - RNA, 19 nt, Artificial Sequence
  Description of Artificial Sequence: Synthetic oligonucleotide
  Sense strand starting at position 2286 of SEQ ID NO: 2212
ggacacaaguuugggaaau

SEQ ID NO: 171621 - RNA, 19 nt, Artificial Sequence
  Description of Artificial Sequence: Synthetic oligonucleotide
  Antisense strand to SEQ ID NO: 171620
auuucccaaacuugugucc

SEQ ID NO: 171622 - RNA, 19 nt, Artificial Sequence
  Description of Artificial Sequence: Synthetic oligonucleotide
  Sense strand starting at position 2279 of SEQ ID NO: 2212
ggguuauggacacaaguuu

SEQ ID NO: 171623 - RNA, 19 nt, Artificial Sequence
  Description of Artificial Sequence: Synthetic oligonucleotide
  Antisense strand to SEQ ID NO: 171622
aaacuuguguccauaaccc

SEQ ID NO: 171624 - RNA, 19 nt, Artificial Sequence
  Description of Artificial Sequence: Synthetic oligonucleotide
  Sense strand starting at position 2277 of SEQ ID NO: 2212
cuggguuauggacacaagu

SEQ ID NO: 171625 - RNA, 19 nt, Artificial Sequence
  Description of Artificial Sequence: Synthetic oligonucleotide
  Antisense strand to SEQ ID NO: 171624
acuuguguccauaacccag

SEQ ID NO: 171626 - RNA, 19 nt, Artificial Sequence
  Description of Artificial Sequence: Synthetic oligonucleotide
  Sense strand starting at position 2187 of SEQ ID NO: 2212
gcgguuucacacugggaag

SEQ ID NO: 171627 - RNA, 19 nt, Artificial Sequence
  Description of Artificial Sequence: Synthetic oligonucleotide
  Antisense strand to SEQ ID NO: 171626
cuucccagugugaaaccgc

SEQ ID NO: 171628 - RNA, 19 nt, Artificial Sequence
  Description of Artificial Sequence: Synthetic oligonucleotide
  Sense strand starting at position 2144 of SEQ ID NO: 2212
ggcggaagccguucccuua

SEQ ID NO: 171629 - RNA, 19 nt, Artificial Sequence
  Description of Artificial Sequence: Synthetic oligonucleotide
  Antisense strand to SEQ ID NO: 171628
uaagggaacggcuuccgcc

SEQ ID NO: 171630 - RNA, 19 nt, Artificial Sequence
  Description of Artificial Sequence: Synthetic oligonucleotide
  Sense strand starting at position 2053 of SEQ ID NO: 2212
uggcuuguaccuggaguaa

SEQ ID NO: 171631 - RNA, 19 nt, Artificial Sequence
  Description of Artificial Sequence: Synthetic oligonucleotide
  Antisense strand to SEQ ID NO: 171630
uuacuccagguacaagcca

SEQ ID NO: 171632 - RNA, 19 nt, Artificial Sequence
  Description of Artificial Sequence: Synthetic oligonucleotide
  Sense strand starting at position 2052 of SEQ ID NO: 2212
cuggcuuguaccuggagua

SEQ ID NO: 171633 - RNA, 19 nt, Artificial Sequence
  Description of Artificial Sequence: Synthetic oligonucleotide
  Antisense strand to SEQ ID NO: 171632
uacuccagguacaagccag

SEQ ID NO: 171634 - RNA, 19 nt, Artificial Sequence
  Description of Artificial Sequence: Synthetic oligonucleotide
  Sense strand starting at position 1839 of SEQ ID NO: 2212
uguuucuucucugucuaca

SEQ ID NO: 171635 - RNA, 19 nt, Artificial Sequence
  Description of Artificial Sequence: Synthetic oligonucleotide
  Antisense strand to SEQ ID NO: 171634
uguagacagagaagaaaca

SEQ ID NO: 171636 - RNA, 19 nt, Artificial Sequence
  Description of Artificial Sequence: Synthetic oligonucleotide
  Sense strand starting at position 1837 of SEQ ID NO: 2212
ccuguuucuucucugucua

SEQ ID NO: 171637 - RNA, 19 nt, Artificial Sequence
  Description of Artificial Sequence: Synthetic oligonucleotide
  Antisense strand to SEQ ID NO: 171636
uagacagagaagaaacagg

SEQ ID NO: 171638 - RNA, 19 nt, Artificial Sequence
  Description of Artificial Sequence: Synthetic oligonucleotide
  Sense strand starting at position 1413 of SEQ ID NO: 2212
guuuccuggagcugugagu

SEQ ID NO: 171639 - RNA, 19 nt, Artificial Sequence
  Description of Artificial Sequence: Synthetic oligonucleotide
  Antisense strand to SEQ ID NO: 171638
acucacagcuccaggaaac

SEQ ID NO: 171640 - RNA, 19 nt, Artificial Sequence
  Description of Artificial Sequence: Synthetic oligonucleotide
  Sense strand starting at position 1409 of SEQ ID NO: 2212
cccaguuuccuggagcugu

SEQ ID NO: 171641 - RNA, 19 nt, Artificial Sequence
  Description of Artificial Sequence: Synthetic oligonucleotide
  Antisense strand to SEQ ID NO: 171640
acagcuccaggaaacuggg

SEQ ID NO: 171642 - RNA, 19 nt, Artificial Sequence
  Description of Artificial Sequence: Synthetic oligonucleotide
  Sense strand starting at position 1397 of SEQ ID NO: 2212
agggaugagucucccaguu

SEQ ID NO: 171643 - RNA, 19 nt, Artificial Sequence
  Description of Artificial Sequence: Synthetic oligonucleotide
  Antisense strand to SEQ ID NO: 171642
aacugggagacucaucccu

SEQ ID NO: 171644 - RNA, 19 nt, Artificial Sequence
  Description of Artificial Sequence: Synthetic oligonucleotide
  Sense strand starting at position 975 of SEQ ID NO: 2212
cugagucugagguggacaa

SEQ ID NO: 171645 - RNA, 19 nt, Artificial Sequence
  Description of Artificial Sequence: Synthetic oligonucleotide
  Antisense strand to SEQ ID NO: 171644
uuguccaccucagacucag

SEQ ID NO: 171646 - RNA, 19 nt, Artificial Sequence
  Description of Artificial Sequence: Synthetic oligonucleotide
  Sense strand starting at position 932 of SEQ ID NO: 2212
cuggaaaugucagugcauc

SEQ ID NO: 171647 - RNA, 19 nt, Artificial Sequence
  Description of Artificial Sequence: Synthetic oligonucleotide
  Antisense strand to SEQ ID NO: 171646
gaugcacugacauuuccag

SEQ ID NO: 171648 - RNA, 19 nt, Artificial Sequence
  Description of Artificial Sequence: Synthetic oligonucleotide
  Sense strand starting at position 867 of SEQ ID NO: 2212
agucuugcuggagaguaaa

SEQ ID NO: 171649 - RNA, 19 nt, Artificial Sequence
  Description of Artificial Sequence: Synthetic oligonucleotide
  Antisense strand to SEQ ID NO: 171648
uuuacucuccagcaagacu

SEQ ID NO: 171650 - RNA, 19 nt, Artificial Sequence
  Description of Artificial Sequence: Synthetic oligonucleotide
  Sense strand starting at position 865 of SEQ ID NO: 2212
ucagucuugcuggagagua

SEQ ID NO: 171651 - RNA, 19 nt, Artificial Sequence
  Description of Artificial Sequence: Synthetic oligonucleotide
  Antisense strand to SEQ ID NO: 171650
uacucuccagcaagacuga

SEQ ID NO: 171652 - RNA, 19 nt, Artificial Sequence
  Description of Artificial Sequence: Synthetic oligonucleotide
  Sense strand starting at position 864 of SEQ ID NO: 2212
uucagucuugcuggagagu

SEQ ID NO: 171653 - RNA, 19 nt, Artificial Sequence
  Description of Artificial Sequence: Synthetic oligonucleotide
  Antisense strand to SEQ ID NO: 171652
acucuccagcaagacugaa

SEQ ID NO: 171654 - RNA, 19 nt, Artificial Sequence
  Description of Artificial Sequence: Synthetic oligonucleotide
  Sense strand starting at position 770 of SEQ ID NO: 2212
caccuuccgugucuggaaa

SEQ ID NO: 171655 - RNA, 19 nt, Artificial Sequence
  Description of Artificial Sequence: Synthetic oligonucleotide
  Antisense strand to SEQ ID NO: 171654
uuuccagacacggaaggug

SEQ ID NO: 171656 - RNA, 19 nt, Artificial Sequence
  Description of Artificial Sequence: Synthetic oligonucleotide
  Sense strand starting at position 731 of SEQ ID NO: 2212
gccuuaucagcccaagagu

SEQ ID NO: 171657 - RNA, 19 nt, Artificial Sequence
  Description of Artificial Sequence: Synthetic oligonucleotide
  Antisense strand to SEQ ID NO: 171656
acucuugggcugauaaggc

SEQ ID NO: 171658 - RNA, 19 nt, Artificial Sequence
  Description of Artificial Sequence: Synthetic oligonucleotide
  Sense strand starting at position 721 of SEQ ID NO: 2212
acccauaugugccuuauca

SEQ ID NO: 171659 - RNA, 19 nt, Artificial Sequence
  Description of Artificial Sequence: Synthetic oligonucleotide
  Antisense strand to SEQ ID NO: 171658
ugauaaggcacauaugggu

SEQ ID NO: 171660 - RNA, 19 nt, Artificial Sequence
  Description of Artificial Sequence: Synthetic oligonucleotide
  Sense strand starting at position 630 of SEQ ID NO: 2212
acccaucucccagguauga

SEQ ID NO: 171661 - RNA, 19 nt, Artificial Sequence
  Description of Artificial Sequence: Synthetic oligonucleotide
  Antisense strand to SEQ ID NO: 171660
ucauaccugggagaugggu

SEQ ID NO: 171662 - RNA, 19 nt, Artificial Sequence
  Description of Artificial Sequence: Synthetic oligonucleotide
  Sense strand starting at position 555 of SEQ ID NO: 2212
aagugauucuccuauugga

SEQ ID NO: 171663 - RNA, 19 nt, Artificial Sequence
  Description of Artificial Sequence: Synthetic oligonucleotide
  Antisense strand to SEQ ID NO: 171662
uccaauaggagaaucacuu

SEQ ID NO: 171664 - RNA, 19 nt, Artificial Sequence
  Description of Artificial Sequence: Synthetic oligonucleotide
  Sense strand starting at position 553 of SEQ ID NO: 2212
gcaagugauucuccuauug

SEQ ID NO: 171665 - RNA, 19 nt, Artificial Sequence
  Description of Artificial Sequence: Synthetic oligonucleotide
  Antisense strand to SEQ ID NO: 171664
caauaggagaaucacuugc

SEQ ID NO: 171666 - RNA, 19 nt, Artificial Sequence
  Description of Artificial Sequence: Synthetic oligonucleotide
  Sense strand starting at position 482 of SEQ ID NO: 2212
cagcacucuugagaugaca

SEQ ID NO: 171667 - RNA, 19 nt, Artificial Sequence
  Description of Artificial Sequence: Synthetic oligonucleotide
  Antisense strand to SEQ ID NO: 171666
ugucaucucaagagugcug

SEQ ID NO: 171668 - RNA, 19 nt, Artificial Sequence
  Description of Artificial Sequence: Synthetic oligonucleotide
  Sense strand starting at position 398 of SEQ ID NO: 2212
uaaguuagggcuuggagau

SEQ ID NO: 171669 - RNA, 19 nt, Artificial Sequence
  Description of Artificial Sequence: Synthetic oligonucleotide
  Antisense strand to SEQ ID NO: 171668
aucuccaagcccuaacuua

SEQ ID NO: 171670 - RNA, 19 nt, Artificial Sequence
  Description of Artificial Sequence: Synthetic oligonucleotide
  Sense strand starting at position 367 of SEQ ID NO: 2212
acaacauuccugggauccu

SEQ ID NO: 171671 - RNA, 19 nt, Artificial Sequence
  Description of Artificial Sequence: Synthetic oligonucleotide
  Antisense strand to SEQ ID NO: 171670
aggaucccaggaauguugu

SEQ ID NO: 171672 - RNA, 19 nt, Artificial Sequence
  Description of Artificial Sequence: Synthetic oligonucleotide
  Sense strand starting at position 3948 of SEQ ID NO: 2211
acacaaguuugggaaauga

SEQ ID NO: 171673 - RNA, 19 nt, Artificial Sequence
  Description of Artificial Sequence: Synthetic oligonucleotide
  Antisense strand to SEQ ID NO: 171672
ucauuucccaaacuugugu

SEQ ID NO: 171674 - RNA, 19 nt, Artificial Sequence
  Description of Artificial Sequence: Synthetic oligonucleotide
  Sense strand starting at position 3939 of SEQ ID NO: 2211
ggguuauggacacaaguuu

SEQ ID NO: 171675 - RNA, 19 nt, Artificial Sequence
  Description of Artificial Sequence: Synthetic oligonucleotide
  Antisense strand to SEQ ID NO: 171674
aaacuuguguccauaaccc

SEQ ID NO: 171676 - RNA, 19 nt, Artificial Sequence
  Description of Artificial Sequence: Synthetic oligonucleotide
  Sense strand starting at position 3937 of SEQ ID NO: 2211
cuggguuauggacacaagu

SEQ ID NO: 171677 - RNA, 19 nt, Artificial Sequence
  Description of Artificial Sequence: Synthetic oligonucleotide
  Antisense strand to SEQ ID NO: 171676
acuuguguccauaacccag

SEQ ID NO: 171678 - RNA, 19 nt, Artificial Sequence
  Description of Artificial Sequence: Synthetic oligonucleotide
  Sense strand starting at position 3847 of SEQ ID NO: 2211
gcgguuucacacugggaag

SEQ ID NO: 171679 - RNA, 19 nt, Artificial Sequence
  Description of Artificial Sequence: Synthetic oligonucleotide
  Antisense strand to SEQ ID NO: 171678
cuucccagugugaaaccgc

SEQ ID NO: 171680 - RNA, 19 nt, Artificial Sequence
  Description of Artificial Sequence: Synthetic oligonucleotide
  Sense strand starting at position 3804 of SEQ ID NO: 2211
ggcggaagccguucccuua

SEQ ID NO: 171681 - RNA, 19 nt, Artificial Sequence
  Description of Artificial Sequence: Synthetic oligonucleotide
  Antisense strand to SEQ ID NO: 171680
uaagggaacggcuuccgcc

SEQ ID NO: 171682 - RNA, 19 nt, Artificial Sequence
  Description of Artificial Sequence: Synthetic oligonucleotide
  Sense strand starting at position 3713 of SEQ ID NO: 2211
uggcuuguaccuggaguaa

SEQ ID NO: 171683 - RNA, 19 nt, Artificial Sequence
  Description of Artificial Sequence: Synthetic oligonucleotide
  Antisense strand to SEQ ID NO: 171682
uuacuccagguacaagcca

SEQ ID NO: 171684 - RNA, 19 nt, Artificial Sequence
  Description of Artificial Sequence: Synthetic oligonucleotide
  Sense strand starting at position 3712 of SEQ ID NO: 2211
cuggcuuguaccuggagua

SEQ ID NO: 171685 - RNA, 19 nt, Artificial Sequence
  Description of Artificial Sequence: Synthetic oligonucleotide
  Antisense strand to SEQ ID NO: 171684
uacuccagguacaagccag

SEQ ID NO: 171686 - RNA, 19 nt, Artificial Sequence
  Description of Artificial Sequence: Synthetic oligonucleotide
  Sense strand starting at position 3499 of SEQ ID NO: 2211
uguuucuucucugucuaca

SEQ ID NO: 171687 - RNA, 19 nt, Artificial Sequence
  Description of Artificial Sequence: Synthetic oligonucleotide
  Antisense strand to SEQ ID NO: 171686
uguagacagagaagaaaca

SEQ ID NO: 171688 - RNA, 19 nt, Artificial Sequence
  Description of Artificial Sequence: Synthetic oligonucleotide
  Sense strand starting at position 3497 of SEQ ID NO: 2211
ccuguuucuucucugucua

SEQ ID NO: 171689 - RNA, 19 nt, Artificial Sequence
  Description of Artificial Sequence: Synthetic oligonucleotide
  Antisense strand to SEQ ID NO: 171688
uagacagagaagaaacagg

SEQ ID NO: 171690 - RNA, 19 nt, Artificial Sequence
  Description of Artificial Sequence: Synthetic oligonucleotide
  Sense strand starting at position 3073 of SEQ ID NO: 2211
guuuccuggagcugugagu

SEQ ID NO: 171691 - RNA, 19 nt, Artificial Sequence
  Description of Artificial Sequence: Synthetic oligonucleotide
  Antisense strand to SEQ ID NO: 171690
acucacagcuccaggaaac

SEQ ID NO: 171692 - RNA, 19 nt, Artificial Sequence
  Description of Artificial Sequence: Synthetic oligonucleotide
  Sense strand starting at position 3069 of SEQ ID NO: 2211
cccaguuuccuggagcugu

SEQ ID NO: 171693 - RNA, 19 nt, Artificial Sequence
  Description of Artificial Sequence: Synthetic oligonucleotide
  Antisense strand to SEQ ID NO: 171692
acagcuccaggaaacuggg

SEQ ID NO: 171694 - RNA, 19 nt, Artificial Sequence
  Description of Artificial Sequence: Synthetic oligonucleotide
  Sense strand starting at position 3057 of SEQ ID NO: 2211
agggaugagucucccaguu

SEQ ID NO: 171695 - RNA, 19 nt, Artificial Sequence
  Description of Artificial Sequence: Synthetic oligonucleotide
  Antisense strand to SEQ ID NO: 171694
aacugggagacucaucccu

SEQ ID NO: 171696 - RNA, 19 nt, Artificial Sequence
  Description of Artificial Sequence: Synthetic oligonucleotide
  Sense strand starting at position 2635 of SEQ ID NO: 2211
cugagucugagguggacaa

SEQ ID NO: 171697 - RNA, 19 nt, Artificial Sequence
  Description of Artificial Sequence: Synthetic oligonucleotide
  Antisense strand to SEQ ID NO: 171696
uuguccaccucagacucag

SEQ ID NO: 171698 - RNA, 19 nt, Artificial Sequence
  Description of Artificial Sequence: Synthetic oligonucleotide
  Sense strand starting at position 2592 of SEQ ID NO: 2211
cuggaaaugucagugcauc

SEQ ID NO: 171699 - RNA, 19 nt, Artificial Sequence
  Description of Artificial Sequence: Synthetic oligonucleotide
  Antisense strand to SEQ ID NO: 171698
gaugcacugacauuuccag

SEQ ID NO: 171700 - RNA, 19 nt, Artificial Sequence
  Description of Artificial Sequence: Synthetic oligonucleotide
  Sense strand starting at position 2527 of SEQ ID NO: 2211
agucuugcuggagaguaaa

SEQ ID NO: 171701 - RNA, 19 nt, Artificial Sequence
  Description of Artificial Sequence: Synthetic oligonucleotide
  Antisense strand to SEQ ID NO: 171700
uuuacucuccagcaagacu

SEQ ID NO: 171702 - RNA, 19 nt, Artificial Sequence
  Description of Artificial Sequence: Synthetic oligonucleotide
  Sense strand starting at position 2525 of SEQ ID NO: 2211
ucagucuugcuggagagua

SEQ ID NO: 171703 - RNA, 19 nt, Artificial Sequence
  Description of Artificial Sequence: Synthetic oligonucleotide
  Antisense strand to SEQ ID NO: 171702
uacucuccagcaagacuga

SEQ ID NO: 171704 - RNA, 19 nt, Artificial Sequence
  Description of Artificial Sequence: Synthetic oligonucleotide
  Sense strand starting at position 2524 of SEQ ID NO: 2211
uucagucuugcuggagagu

SEQ ID NO: 171705 - RNA, 19 nt, Artificial Sequence
  Description of Artificial Sequence: Synthetic oligonucleotide
  Antisense strand to SEQ ID NO: 171704
acucuccagcaagacugaa

SEQ ID NO: 171706 - RNA, 19 nt, Artificial Sequence
  Description of Artificial Sequence: Synthetic oligonucleotide
  Sense strand starting at position 2430 of SEQ ID NO: 2211
caccuuccgugucuggaaa

SEQ ID NO: 171707 - RNA, 19 nt, Artificial Sequence
  Description of Artificial Sequence: Synthetic oligonucleotide
  Antisense strand to SEQ ID NO: 171706
uuuccagacacggaaggug

SEQ ID NO: 171708 - RNA, 19 nt, Artificial Sequence
  Description of Artificial Sequence: Synthetic oligonucleotide
  Sense strand starting at position 2391 of SEQ ID NO: 2211
gccuuaucagcccaagagu

SEQ ID NO: 171709 - RNA, 19 nt, Artificial Sequence
  Description of Artificial Sequence: Synthetic oligonucleotide
  Antisense strand to SEQ ID NO: 171708
acucuugggcugauaaggc

SEQ ID NO: 171710 - RNA, 19 nt, Artificial Sequence
  Description of Artificial Sequence: Synthetic oligonucleotide
  Sense strand starting at position 2381 of SEQ ID NO: 2211
acccauaugugccuuauca

SEQ ID NO: 171711 - RNA, 19 nt, Artificial Sequence
  Description of Artificial Sequence: Synthetic oligonucleotide
  Antisense strand to SEQ ID NO: 171710
ugauaaggcacauaugggu

SEQ ID NO: 171712 - RNA, 19 nt, Artificial Sequence
  Description of Artificial Sequence: Synthetic oligonucleotide
  Sense strand starting at position 2290 of SEQ ID NO: 2211
acccaucucccagguauga

SEQ ID NO: 171713 - RNA, 19 nt, Artificial Sequence
  Description of Artificial Sequence: Synthetic oligonucleotide
  Antisense strand to SEQ ID NO: 171712
ucauaccugggagaugggu

SEQ ID NO: 171714 - RNA, 19 nt, Artificial Sequence
  Description of Artificial Sequence: Synthetic oligonucleotide
  Sense strand starting at position 2213 of SEQ ID NO: 2211
gcaagugauucuccuauug

SEQ ID NO: 171715 - RNA, 19 nt, Artificial Sequence
  Description of Artificial Sequence: Synthetic oligonucleotide
  Antisense strand to SEQ ID NO: 171714
caauaggagaaucacuugc

SEQ ID NO: 171716 - RNA, 19 nt, Artificial Sequence
  Description of Artificial Sequence: Synthetic oligonucleotide
  Sense strand starting at position 2058 of SEQ ID NO: 2211
uaaguuagggcuuggagau

SEQ ID NO: 171717 - RNA, 19 nt, Artificial Sequence
  Description of Artificial Sequence: Synthetic oligonucleotide
  Antisense strand to SEQ ID NO: 171716
aucuccaagcccuaacuua

SEQ ID NO: 171718 - RNA, 19 nt, Artificial Sequence
  Description of Artificial Sequence: Synthetic oligonucleotide
  Sense strand starting at position 2027 of SEQ ID NO: 2211
acaacauuccugggauccu

SEQ ID NO: 171719 - RNA, 19 nt, Artificial Sequence
  Description of Artificial Sequence: Synthetic oligonucleotide
  Antisense strand to SEQ ID NO: 171718
aggaucccaggaauguugu

SEQ ID NO: 171720 - RNA, 19 nt, Artificial Sequence
  Description of Artificial Sequence: Synthetic oligonucleotide
  Sense strand starting at position 1430 of SEQ ID NO: 2211
ucucacugagauuaagcua

SEQ ID NO: 171721 - RNA, 19 nt, Artificial Sequence
  Description of Artificial Sequence: Synthetic oligonucleotide
  Antisense strand to SEQ ID NO: 171720
uagcuuaaucucagugaga

SEQ ID NO: 171722 - RNA, 19 nt, Artificial Sequence
  Description of Artificial Sequence: Synthetic oligonucleotide
  Sense strand starting at position 1424 of SEQ ID NO: 2211
accagcucucacugagauu

SEQ ID NO: 171723 - RNA, 19 nt, Artificial Sequence
  Description of Artificial Sequence: Synthetic oligonucleotide
  Antisense strand to SEQ ID NO: 171722
aaucucagugagagcuggu

SEQ ID NO: 171724 - RNA, 19 nt, Artificial Sequence
  Description of Artificial Sequence: Synthetic oligonucleotide
  Sense strand starting at position 739 of SEQ ID NO: 2211
cucuauugcagaugaggaa

SEQ ID NO: 171725 - RNA, 19 nt, Artificial Sequence
  Description of Artificial Sequence: Synthetic oligonucleotide
  Antisense strand to SEQ ID NO: 171724
uuccucaucugcaauagag

SEQ ID NO: 171726 - RNA, 19 nt, Artificial Sequence
  Description of Artificial Sequence: Synthetic oligonucleotide
  Sense strand starting at position 716 of SEQ ID NO: 2211
ugacuuggucaguguuaaa

SEQ ID NO: 171727 - RNA, 19 nt, Artificial Sequence
  Description of Artificial Sequence: Synthetic oligonucleotide
  Antisense strand to SEQ ID NO: 171726
uuuaacacugaccaaguca

SEQ ID NO: 171728 - RNA, 19 nt, Artificial Sequence
  Description of Artificial Sequence: Synthetic oligonucleotide
  Sense strand starting at position 715 of SEQ ID NO: 2211
uugacuuggucaguguuaa

SEQ ID NO: 171729 - RNA, 19 nt, Artificial Sequence
  Description of Artificial Sequence: Synthetic oligonucleotide
  Antisense strand to SEQ ID NO: 171728
uuaacacugaccaagucaa

SEQ ID NO: 171730 - RNA, 19 nt, Artificial Sequence
  Description of Artificial Sequence: Synthetic oligonucleotide
  Sense strand starting at position 713 of SEQ ID NO: 2211
aguugacuuggucaguguu

SEQ ID NO: 171731 - RNA, 19 nt, Artificial Sequence
  Description of Artificial Sequence: Synthetic oligonucleotide
  Antisense strand to SEQ ID NO: 171730
aacacugaccaagucaacu

SEQ ID NO: 171732 - RNA, 19 nt, Artificial Sequence
  Description of Artificial Sequence: Synthetic oligonucleotide
  Sense strand starting at position 710 of SEQ ID NO: 2211
auaaguugacuuggucagu

SEQ ID NO: 171733 - RNA, 19 nt, Artificial Sequence
  Description of Artificial Sequence: Synthetic oligonucleotide
  Antisense strand to SEQ ID NO: 171732
acugaccaagucaacuuau

SEQ ID NO: 171734 - RNA, 19 nt, Artificial Sequence
  Description of Artificial Sequence: Synthetic oligonucleotide
  Sense strand starting at position 702 of SEQ ID NO: 2211
gauguuagauaaguugacu

SEQ ID NO: 171735 - RNA, 19 nt, Artificial Sequence
  Description of Artificial Sequence: Synthetic oligonucleotide
  Antisense strand to SEQ ID NO: 171734
agucaacuuaucuaacauc

SEQ ID NO: 171736 - RNA, 19 nt, Artificial Sequence
  Description of Artificial Sequence: Synthetic oligonucleotide
  Sense strand starting at position 695 of SEQ ID NO: 2211
uuggaaugauguuagauaa

SEQ ID NO: 171737 - RNA, 19 nt, Artificial Sequence
  Description of Artificial Sequence: Synthetic oligonucleotide
  Antisense strand to SEQ ID NO: 171736
uuaucuaacaucauuccaa

SEQ ID NO: 171738 - RNA, 19 nt, Artificial Sequence
  Description of Artificial Sequence: Synthetic oligonucleotide
  Sense strand starting at position 690 of SEQ ID NO: 2211
uguuguuggaaugauguua

SEQ ID NO: 171739 - RNA, 19 nt, Artificial Sequence
  Description of Artificial Sequence: Synthetic oligonucleotide
  Antisense strand to SEQ ID NO: 171738
uaacaucauuccaacaaca

SEQ ID NO: 171740 - RNA, 19 nt, Artificial Sequence
  Description of Artificial Sequence: Synthetic oligonucleotide
  Sense strand starting at position 685 of SEQ ID NO: 2211
aggaauguuguuggaauga

SEQ ID NO: 171741 - RNA, 19 nt, Artificial Sequence
  Description of Artificial Sequence: Synthetic oligonucleotide
  Antisense strand to SEQ ID NO: 171740
ucauuccaacaacauuccu

SEQ ID NO: 171742 - RNA, 19 nt, Artificial Sequence
  Description of Artificial Sequence: Synthetic oligonucleotide
  Sense strand starting at position 683 of SEQ ID NO: 2211
ugaggaauguuguuggaau

SEQ ID NO: 171743 - RNA, 19 nt, Artificial Sequence
  Description of Artificial Sequence: Synthetic oligonucleotide
  Antisense strand to SEQ ID NO: 171742
auuccaacaacauuccuca

SEQ ID NO: 171744 - RNA, 19 nt, Artificial Sequence
  Description of Artificial Sequence: Synthetic oligonucleotide
  Sense strand starting at position 678 of SEQ ID NO: 2211
augcuugaggaauguuguu

SEQ ID NO: 171745 - RNA, 19 nt, Artificial Sequence
  Description of Artificial Sequence: Synthetic oligonucleotide
  Antisense strand to SEQ ID NO: 171744
aacaacauuccucaagcau

SEQ ID NO: 171746 - RNA, 19 nt, Artificial Sequence
  Description of Artificial Sequence: Synthetic oligonucleotide
  Sense strand starting at position 672 of SEQ ID NO: 2211
cuggccaugcuugaggaau

SEQ ID NO: 171747 - RNA, 19 nt, Artificial Sequence
  Description of Artificial Sequence: Synthetic oligonucleotide
  Antisense strand to SEQ ID NO: 171746
auuccucaagcauggccag

SEQ ID NO: 171748 - RNA, 19 nt, Artificial Sequence
  Description of Artificial Sequence: Synthetic oligonucleotide
  Sense strand starting at position 581 of SEQ ID NO: 2211
aggaauagcugggaggaau

SEQ ID NO: 171749 - RNA, 19 nt, Artificial Sequence
  Description of Artificial Sequence: Synthetic oligonucleotide
  Antisense strand to SEQ ID NO: 171748
auuccucccagcuauuccu

SEQ ID NO: 171750 - RNA, 19 nt, Artificial Sequence
  Description of Artificial Sequence: Synthetic oligonucleotide
  Sense strand starting at position 179 of SEQ ID NO: 2211
auaucuuaugcgcaaugca

SEQ ID NO: 171751 - RNA, 19 nt, Artificial Sequence
  Description of Artificial Sequence: Synthetic oligonucleotide
  Antisense strand to SEQ ID NO: 171750
ugcauugcgcauaagauau

SEQ ID NO: 171752 - RNA, 19 nt, Artificial Sequence
  Description of Artificial Sequence: Synthetic oligonucleotide
  Sense strand starting at position 3948 of SEQ ID NO: 2213
aggucuuguuuauuuguau

SEQ ID NO: 171753 - RNA, 19 nt, Artificial Sequence
  Description of Artificial Sequence: Synthetic oligonucleotide
  Antisense strand to SEQ ID NO: 171752
auacaaauaaacaagaccu

SEQ ID NO: 171754 - RNA, 19 nt, Artificial Sequence
  Description of Artificial Sequence: Synthetic oligonucleotide
  Sense strand starting at position 3946 of SEQ ID NO: 2213
gcaggucuuguuuauuugu

SEQ ID NO: 171755 - RNA, 19 nt, Artificial Sequence
  Description of Artificial Sequence: Synthetic oligonucleotide
  Antisense strand to SEQ ID NO: 171754
acaaauaaacaagaccugc

SEQ ID NO: 171756 - RNA, 19 nt, Artificial Sequence
  Description of Artificial Sequence: Synthetic oligonucleotide
  Sense strand starting at position 3943 of SEQ ID NO: 2213
cucgcaggucuuguuuauu

SEQ ID NO: 171757 - RNA, 19 nt, Artificial Sequence
  Description of Artificial Sequence: Synthetic oligonucleotide
  Antisense strand to SEQ ID NO: 171756
aauaaacaagaccugcgag

SEQ ID NO: 171758 - RNA, 19 nt, Artificial Sequence
  Description of Artificial Sequence: Synthetic oligonucleotide
  Sense strand starting at position 3504 of SEQ ID NO: 2213
ucugucaugugauucuaca

SEQ ID NO: 171759 - RNA, 19 nt, Artificial Sequence
  Description of Artificial Sequence: Synthetic oligonucleotide
  Antisense strand to SEQ ID NO: 171758
uguagaaucacaugacaga

SEQ ID NO: 171760 - RNA, 19 nt, Artificial Sequence
  Description of Artificial Sequence: Synthetic oligonucleotide
  Sense strand starting at position 2964 of SEQ ID NO: 2213
uaauuagcuguguaugaug

SEQ ID NO: 171761 - RNA, 19 nt, Artificial Sequence
  Description of Artificial Sequence: Synthetic oligonucleotide
  Antisense strand to SEQ ID NO: 171760
caucauacacagcuaauua

SEQ ID NO: 171762 - RNA, 19 nt, Artificial Sequence
  Description of Artificial Sequence: Synthetic oligonucleotide
  Sense strand starting at position 2963 of SEQ ID NO: 2213
uuaauuagcuguguaugau

SEQ ID NO: 171763 - RNA, 19 nt, Artificial Sequence
  Description of Artificial Sequence: Synthetic oligonucleotide
  Antisense strand to SEQ ID NO: 171762
aucauacacagcuaauuaa

SEQ ID NO: 171764 - RNA, 19 nt, Artificial Sequence
  Description of Artificial Sequence: Synthetic oligonucleotide
  Sense strand starting at position 2962 of SEQ ID NO: 2213
guuaauuagcuguguauga

SEQ ID NO: 171765 - RNA, 19 nt, Artificial Sequence
  Description of Artificial Sequence: Synthetic oligonucleotide
  Antisense strand to SEQ ID NO: 171764
ucauacacagcuaauuaac

SEQ ID NO: 171766 - RNA, 19 nt, Artificial Sequence
  Description of Artificial Sequence: Synthetic oligonucleotide
  Sense strand starting at position 2949 of SEQ ID NO: 2213
cucuacaaaccguguuaau

SEQ ID NO: 171767 - RNA, 19 nt, Artificial Sequence
  Description of Artificial Sequence: Synthetic oligonucleotide
  Antisense strand to SEQ ID NO: 171766
auuaacacgguuuguagag

SEQ ID NO: 171768 - RNA, 19 nt, Artificial Sequence
  Description of Artificial Sequence: Synthetic oligonucleotide
  Sense strand starting at position 2934 of SEQ ID NO: 2213
agaguaagcccucaucucu

SEQ ID NO: 171769 - RNA, 19 nt, Artificial Sequence
  Description of Artificial Sequence: Synthetic oligonucleotide
  Antisense strand to SEQ ID NO: 171768
agagaugagggcuuacucu

SEQ ID NO: 171770 - RNA, 19 nt, Artificial Sequence
  Description of Artificial Sequence: Synthetic oligonucleotide
  Sense strand starting at position 2808 of SEQ ID NO: 2213
cggcaaucuguugaaagau

SEQ ID NO: 171771 - RNA, 19 nt, Artificial Sequence
  Description of Artificial Sequence: Synthetic oligonucleotide
  Antisense strand to SEQ ID NO: 171770
aucuuucaacagauugccg

SEQ ID NO: 171772 - RNA, 19 nt, Artificial Sequence
  Description of Artificial Sequence: Synthetic oligonucleotide
  Sense strand starting at position 2751 of SEQ ID NO: 2213
ugggaugucuugaaggaga

SEQ ID NO: 171773 - RNA, 19 nt, Artificial Sequence
  Description of Artificial Sequence: Synthetic oligonucleotide
  Antisense strand to SEQ ID NO: 171772
ucuccuucaagacauccca

SEQ ID NO: 171774 - RNA, 19 nt, Artificial Sequence
  Description of Artificial Sequence: Synthetic oligonucleotide
  Sense strand starting at position 2599 of SEQ ID NO: 2213
gaccauggcccagggaaua

SEQ ID NO: 171775 - RNA, 19 nt, Artificial Sequence
  Description of Artificial Sequence: Synthetic oligonucleotide
  Antisense strand to SEQ ID NO: 171774
uauucccugggccaugguc

SEQ ID NO: 171776 - RNA, 19 nt, Artificial Sequence
  Description of Artificial Sequence: Synthetic oligonucleotide
  Sense strand starting at position 2464 of SEQ ID NO: 2213
gugugaauccuugggcaaa

SEQ ID NO: 171777 - RNA, 19 nt, Artificial Sequence
  Description of Artificial Sequence: Synthetic oligonucleotide
  Antisense strand to SEQ ID NO: 171776
uuugcccaaggauucacac

SEQ ID NO: 171778 - RNA, 19 nt, Artificial Sequence
  Description of Artificial Sequence: Synthetic oligonucleotide
  Sense strand starting at position 2462 of SEQ ID NO: 2213
uugugugaauccuugggca

SEQ ID NO: 171779 - RNA, 19 nt, Artificial Sequence
  Description of Artificial Sequence: Synthetic oligonucleotide
  Antisense strand to SEQ ID NO: 171778
ugcccaaggauucacacaa

SEQ ID NO: 171780 - RNA, 19 nt, Artificial Sequence
  Description of Artificial Sequence: Synthetic oligonucleotide
  Sense strand starting at position 2424 of SEQ ID NO: 2213
acagcugacuuagugcuaa

SEQ ID NO: 171781 - RNA, 19 nt, Artificial Sequence
  Description of Artificial Sequence: Synthetic oligonucleotide
  Antisense strand to SEQ ID NO: 171780
uuagcacuaagucagcugu

SEQ ID NO: 171782 - RNA, 19 nt, Artificial Sequence
  Description of Artificial Sequence: Synthetic oligonucleotide
  Sense strand starting at position 2373 of SEQ ID NO: 2213
gacuuuccauggucuaguu

SEQ ID NO: 171783 - RNA, 19 nt, Artificial Sequence
  Description of Artificial Sequence: Synthetic oligonucleotide
  Antisense strand to SEQ ID NO: 171782
aacuagaccauggaaaguc

SEQ ID NO: 171784 - RNA, 19 nt, Artificial Sequence
  Description of Artificial Sequence: Synthetic oligonucleotide
  Sense strand starting at position 2370 of SEQ ID NO: 2213
gaagacuuuccauggucua

SEQ ID NO: 171785 - RNA, 19 nt, Artificial Sequence
  Description of Artificial Sequence: Synthetic oligonucleotide
  Antisense strand to SEQ ID NO: 171784
uagaccauggaaagucuuc

SEQ ID NO: 171786 - RNA, 19 nt, Artificial Sequence
  Description of Artificial Sequence: Synthetic oligonucleotide
  Sense strand starting at position 2356 of SEQ ID NO: 2213
ccucguagauaugcgaaga

SEQ ID NO: 171787 - RNA, 19 nt, Artificial Sequence
  Description of Artificial Sequence: Synthetic oligonucleotide
  Antisense strand to SEQ ID NO: 171786
ucuucgcauaucuacgagg

SEQ ID NO: 171788 - RNA, 19 nt, Artificial Sequence
  Description of Artificial Sequence: Synthetic oligonucleotide
  Sense strand starting at position 2214 of SEQ ID NO: 2213
ucguguuacagaggaaauu

SEQ ID NO: 171789 - RNA, 19 nt, Artificial Sequence
  Description of Artificial Sequence: Synthetic oligonucleotide
  Antisense strand to SEQ ID NO: 171788
aauuuccucuguaacacga

SEQ ID NO: 171790 - RNA, 19 nt, Artificial Sequence
  Description of Artificial Sequence: Synthetic oligonucleotide
  Sense strand starting at position 2202 of SEQ ID NO: 2213
uguguuagugaaucguguu

SEQ ID NO: 171791 - RNA, 19 nt, Artificial Sequence
  Description of Artificial Sequence: Synthetic oligonucleotide
  Antisense strand to SEQ ID NO: 171790
aacacgauucacuaacaca

SEQ ID NO: 171792 - RNA, 19 nt, Artificial Sequence
  Description of Artificial Sequence: Synthetic oligonucleotide
  Sense strand starting at position 2201 of SEQ ID NO: 2213
auguguuagugaaucgugu

SEQ ID NO: 171793 - RNA, 19 nt, Artificial Sequence
  Description of Artificial Sequence: Synthetic oligonucleotide
  Antisense strand to SEQ ID NO: 171792
acacgauucacuaacacau

SEQ ID NO: 171794 - RNA, 19 nt, Artificial Sequence
  Description of Artificial Sequence: Synthetic oligonucleotide
  Sense strand starting at position 2199 of SEQ ID NO: 2213
ucauguguuagugaaucgu

SEQ ID NO: 171795 - RNA, 19 nt, Artificial Sequence
  Description of Artificial Sequence: Synthetic oligonucleotide
  Antisense strand to SEQ ID NO: 171794
acgauucacuaacacauga

SEQ ID NO: 171796 - RNA, 19 nt, Artificial Sequence
  Description of Artificial Sequence: Synthetic oligonucleotide
  Sense strand starting at position 2197 of SEQ ID NO: 2213
ccucauguguuagugaauc

SEQ ID NO: 171797 - RNA, 19 nt, Artificial Sequence
  Description of Artificial Sequence: Synthetic oligonucleotide
  Antisense strand to SEQ ID NO: 171796
gauucacuaacacaugagg

SEQ ID NO: 171798 - RNA, 19 nt, Artificial Sequence
  Description of Artificial Sequence: Synthetic oligonucleotide
  Sense strand starting at position 2188 of SEQ ID NO: 2213
gugugauuaccucaugugu

SEQ ID NO: 171799 - RNA, 19 nt, Artificial Sequence
  Description of Artificial Sequence: Synthetic oligonucleotide
  Antisense strand to SEQ ID NO: 171798
acacaugagguaaucacac

SEQ ID NO: 171800 - RNA, 19 nt, Artificial Sequence
  Description of Artificial Sequence: Synthetic oligonucleotide
  Sense strand starting at position 2186 of SEQ ID NO: 2213
cagugugauuaccucaugu

SEQ ID NO: 171801 - RNA, 19 nt, Artificial Sequence
  Description of Artificial Sequence: Synthetic oligonucleotide
  Antisense strand to SEQ ID NO: 171800
acaugagguaaucacacug

SEQ ID NO: 171802 - RNA, 19 nt, Artificial Sequence
  Description of Artificial Sequence: Synthetic oligonucleotide
  Sense strand starting at position 2177 of SEQ ID NO: 2213
accucaaagcagugugauu

SEQ ID NO: 171803 - RNA, 19 nt, Artificial Sequence
  Description of Artificial Sequence: Synthetic oligonucleotide
  Antisense strand to SEQ ID NO: 171802
aaucacacugcuuugaggu

SEQ ID NO: 171804 - RNA, 19 nt, Artificial Sequence
  Description of Artificial Sequence: Synthetic oligonucleotide
  Sense strand starting at position 2108 of SEQ ID NO: 2213
ugacgucaucucgaaggau

SEQ ID NO: 171805 - RNA, 19 nt, Artificial Sequence
  Description of Artificial Sequence: Synthetic oligonucleotide
  Antisense strand to SEQ ID NO: 171804
auccuucgagaugacguca

SEQ ID NO: 171806 - RNA, 19 nt, Artificial Sequence
  Description of Artificial Sequence: Synthetic oligonucleotide
  Sense strand starting at position 2092 of SEQ ID NO: 2213
ucuugaacucguuggguga

SEQ ID NO: 171807 - RNA, 19 nt, Artificial Sequence
  Description of Artificial Sequence: Synthetic oligonucleotide
  Antisense strand to SEQ ID NO: 171806
ucacccaacgaguucaaga

SEQ ID NO: 171808 - RNA, 19 nt, Artificial Sequence
  Description of Artificial Sequence: Synthetic oligonucleotide
  Sense strand starting at position 1499 of SEQ ID NO: 2213
ggaagugugacuggauuau

SEQ ID NO: 171809 - RNA, 19 nt, Artificial Sequence
  Description of Artificial Sequence: Synthetic oligonucleotide
  Antisense strand to SEQ ID NO: 171808
auaauccagucacacuucc

SEQ ID NO: 171810 - RNA, 19 nt, Artificial Sequence
  Description of Artificial Sequence: Synthetic oligonucleotide
  Sense strand starting at position 1497 of SEQ ID NO: 2213
ccggaagugugacuggauu

SEQ ID NO: 171811 - RNA, 19 nt, Artificial Sequence
  Description of Artificial Sequence: Synthetic oligonucleotide
  Antisense strand to SEQ ID NO: 171810
aauccagucacacuuccgg

SEQ ID NO: 171812 - RNA, 19 nt, Artificial Sequence
  Description of Artificial Sequence: Synthetic oligonucleotide
  Sense strand starting at position 1447 of SEQ ID NO: 2213
cggauugacaguugacgaa

SEQ ID NO: 171813 - RNA, 19 nt, Artificial Sequence
  Description of Artificial Sequence: Synthetic oligonucleotide
  Antisense strand to SEQ ID NO: 171812
uucgucaacugucaauccg

SEQ ID NO: 171814 - RNA, 19 nt, Artificial Sequence
  Description of Artificial Sequence: Synthetic oligonucleotide
  Sense strand starting at position 1215 of SEQ ID NO: 2213
cucucacgagacugugaau

SEQ ID NO: 171815 - RNA, 19 nt, Artificial Sequence
  Description of Artificial Sequence: Synthetic oligonucleotide
  Antisense strand to SEQ ID NO: 171814
auucacagucucgugagag

SEQ ID NO: 171816 - RNA, 19 nt, Artificial Sequence
  Description of Artificial Sequence: Synthetic oligonucleotide
  Sense strand starting at position 1196 of SEQ ID NO: 2213
guaauauaauugucugucu

SEQ ID NO: 171817 - RNA, 19 nt, Artificial Sequence
  Description of Artificial Sequence: Synthetic oligonucleotide
  Antisense strand to SEQ ID NO: 171816
agacagacaauuauauuac

SEQ ID NO: 171818 - RNA, 19 nt, Artificial Sequence
  Description of Artificial Sequence: Synthetic oligonucleotide
  Sense strand starting at position 1152 of SEQ ID NO: 2213
ucacaucacuccguguaua

SEQ ID NO: 171819 - RNA, 19 nt, Artificial Sequence
  Description of Artificial Sequence: Synthetic oligonucleotide
  Antisense strand to SEQ ID NO: 171818
uauacacggagugauguga

SEQ ID NO: 171820 - RNA, 19 nt, Artificial Sequence
  Description of Artificial Sequence: Synthetic oligonucleotide
  Sense strand starting at position 918 of SEQ ID NO: 2213
ggacacagcucuuuaaaca

SEQ ID NO: 171821 - RNA, 19 nt, Artificial Sequence
  Description of Artificial Sequence: Synthetic oligonucleotide
  Antisense strand to SEQ ID NO: 171820
uguuuaaagagcugugucc

SEQ ID NO: 171822 - RNA, 19 nt, Artificial Sequence
  Description of Artificial Sequence: Synthetic oligonucleotide
  Sense strand starting at position 814 of SEQ ID NO: 2213
acuccuuagccaggcauaa

SEQ ID NO: 171823 - RNA, 19 nt, Artificial Sequence
  Description of Artificial Sequence: Synthetic oligonucleotide
  Antisense strand to SEQ ID NO: 171822
uuaugccuggcuaaggagu

SEQ ID NO: 171824 - RNA, 19 nt, Artificial Sequence
  Description of Artificial Sequence: Synthetic oligonucleotide
  Sense strand starting at position 576 of SEQ ID NO: 2213
agaucuugucaucagcaua

SEQ ID NO: 171825 - RNA, 19 nt, Artificial Sequence
  Description of Artificial Sequence: Synthetic oligonucleotide
  Antisense strand to SEQ ID NO: 171824
uaugcugaugacaagaucu

SEQ ID NO: 171826 - RNA, 19 nt, Artificial Sequence
  Description of Artificial Sequence: Synthetic oligonucleotide
  Sense strand starting at position 575 of SEQ ID NO: 2213
gagaucuugucaucagcau

SEQ ID NO: 171827 - RNA, 19 nt, Artificial Sequence
  Description of Artificial Sequence: Synthetic oligonucleotide
  Antisense strand to SEQ ID NO: 171826
augcugaugacaagaucuc

SEQ ID NO: 171828 - RNA, 19 nt, Artificial Sequence
  Description of Artificial Sequence: Synthetic oligonucleotide
  Sense strand starting at position 147 of SEQ ID NO: 2213
gugagucuacuagaauauu

SEQ ID NO: 171829 - RNA, 19 nt, Artificial Sequence
  Description of Artificial Sequence: Synthetic oligonucleotide
  Antisense strand to SEQ ID NO: 171828
aauauucuaguagacucac

SEQ ID NO: 171830 - RNA, 19 nt, Artificial Sequence
  Description of Artificial Sequence: Synthetic oligonucleotide
  Sense strand starting at position 80 of SEQ ID NO: 2213
uucaauuucuggugggaug

SEQ ID NO: 171831 - RNA, 19 nt, Artificial Sequence
  Description of Artificial Sequence: Synthetic oligonucleotide
  Antisense strand to SEQ ID NO: 171830
caucccaccagaaauugaa

SEQ ID NO: 171832 - RNA, 19 nt, Artificial Sequence
  Description of Artificial Sequence: Synthetic oligonucleotide
  Sense strand starting at position 78 of SEQ ID NO: 2214
ugcucagagcuguaaauau

SEQ ID NO: 171833 - RNA, 19 nt, Artificial Sequence
  Description of Artificial Sequence: Synthetic oligonucleotide
  Antisense strand to SEQ ID NO: 171832
auauuuacagcucugagca

SEQ ID NO: 171834 - RNA, 19 nt, Artificial Sequence
  Description of Artificial Sequence: Synthetic oligonucleotide
  Sense strand starting at position 85 of SEQ ID NO: 2214
agcuguaaauauccaaaga

SEQ ID NO: 171835 - RNA, 19 nt, Artificial Sequence
  Description of Artificial Sequence: Synthetic oligonucleotide
  Antisense strand to SEQ ID NO: 171834
ucuuuggauauuuacagcu

SEQ ID NO: 171836 - RNA, 19 nt, Artificial Sequence
  Description of Artificial Sequence: Synthetic oligonucleotide
  Sense strand starting at position 103 of SEQ ID NO: 2214
aggugauccucugccauca

SEQ ID NO: 171837 - RNA, 19 nt, Artificial Sequence
  Description of Artificial Sequence: Synthetic oligonucleotide
  Antisense strand to SEQ ID NO: 171836
ugauggcagaggaucaccu

SEQ ID NO: 171838 - RNA, 19 nt, Artificial Sequence
  Description of Artificial Sequence: Synthetic oligonucleotide
  Sense strand starting at position 809 of SEQ ID NO: 2214
ccaagagaucuuggacgca

SEQ ID NO: 171839 - RNA, 19 nt, Artificial Sequence
  Description of Artificial Sequence: Synthetic oligonucleotide
  Antisense strand to SEQ ID NO: 171838
ugcguccaagaucucuugg

SEQ ID NO: 171840 - RNA, 19 nt, Artificial Sequence
  Description of Artificial Sequence: Synthetic oligonucleotide
  Sense strand starting at position 812 of SEQ ID NO: 2214
agagaucuuggacgcacuu

SEQ ID NO: 171841 - RNA, 19 nt, Artificial Sequence
  Description of Artificial Sequence: Synthetic oligonucleotide
  Antisense strand to SEQ ID NO: 171840
aagugcguccaagaucucu

SEQ ID NO: 171842 - RNA, 19 nt, Artificial Sequence
  Description of Artificial Sequence: Synthetic oligonucleotide
  Sense strand starting at position 878 of SEQ ID NO: 2214
ccacauuggcccugcaaga

SEQ ID NO: 171843 - RNA, 19 nt, Artificial Sequence
  Description of Artificial Sequence: Synthetic oligonucleotide
  Antisense strand to SEQ ID NO: 171842
ucuugcagggccaaugugg

SEQ ID NO: 171844 - RNA, 19 nt, Artificial Sequence
  Description of Artificial Sequence: Synthetic oligonucleotide
  Sense strand starting at position 1008 of SEQ ID NO: 2214
agaucaucucauugacuag

SEQ ID NO: 171845 - RNA, 19 nt, Artificial Sequence
  Description of Artificial Sequence: Synthetic oligonucleotide
  Antisense strand to SEQ ID NO: 171844
cuagucaaugagaugaucu

SEQ ID NO: 171846 - RNA, 19 nt, Artificial Sequence
  Description of Artificial Sequence: Synthetic oligonucleotide
  Sense strand starting at position 1027 of SEQ ID NO: 2214
gugacugcucagcaacagu

SEQ ID NO: 171847 - RNA, 19 nt, Artificial Sequence
  Description of Artificial Sequence: Synthetic oligonucleotide
  Antisense strand to SEQ ID NO: 171846
acuguugcugagcagucac

SEQ ID NO: 171848 - RNA, 19 nt, Artificial Sequence
  Description of Artificial Sequence: Synthetic oligonucleotide
  Sense strand starting at position 1041 of SEQ ID NO: 2214
acaguaucugaaggacacu

SEQ ID NO: 171849 - RNA, 19 nt, Artificial Sequence
  Description of Artificial Sequence: Synthetic oligonucleotide
  Antisense strand to SEQ ID NO: 171848
aguguccuucagauacugu

SEQ ID NO: 171850 - RNA, 19 nt, Artificial Sequence
  Description of Artificial Sequence: Synthetic oligonucleotide
  Sense strand starting at position 1271 of SEQ ID NO: 2214
ggaaauggcuuuccaauug

SEQ ID NO: 171851 - RNA, 19 nt, Artificial Sequence
  Description of Artificial Sequence: Synthetic oligonucleotide
  Antisense strand to SEQ ID NO: 171850
caauuggaaagccauuucc

SEQ ID NO: 171852 - RNA, 19 nt, Artificial Sequence
  Description of Artificial Sequence: Synthetic oligonucleotide
  Sense strand starting at position 2078 of SEQ ID NO: 2214
uucucugagggcugugaga

SEQ ID NO: 171853 - RNA, 19 nt, Artificial Sequence
  Description of Artificial Sequence: Synthetic oligonucleotide
  Antisense strand to SEQ ID NO: 171852
ucucacagcccucagagaa

SEQ ID NO: 171854 - RNA, 19 nt, Artificial Sequence
  Description of Artificial Sequence: Synthetic oligonucleotide
  Sense strand starting at position 2143 of SEQ ID NO: 2214
agacuuccacagugucuau

SEQ ID NO: 171855 - RNA, 19 nt, Artificial Sequence
  Description of Artificial Sequence: Synthetic oligonucleotide
  Antisense strand to SEQ ID NO: 171854
auagacacuguggaagucu

SEQ ID NO: 171856 - RNA, 19 nt, Artificial Sequence
  Description of Artificial Sequence: Synthetic oligonucleotide
  Sense strand starting at position 2153 of SEQ ID NO: 2214
agugucuaucgagaucaca

SEQ ID NO: 171857 - RNA, 19 nt, Artificial Sequence
  Description of Artificial Sequence: Synthetic oligonucleotide
  Antisense strand to SEQ ID NO: 171856
ugugaucucgauagacacu

SEQ ID NO: 171858 - RNA, 19 nt, Artificial Sequence
  Description of Artificial Sequence: Synthetic oligonucleotide
  Sense strand starting at position 2156 of SEQ ID NO: 2214
gucuaucgagaucacacau

SEQ ID NO: 171859 - RNA, 19 nt, Artificial Sequence
  Description of Artificial Sequence: Synthetic oligonucleotide
  Antisense strand to SEQ ID NO: 171858
augugugaucucgauagac

SEQ ID NO: 171860 - RNA, 19 nt, Artificial Sequence
  Description of Artificial Sequence: Synthetic oligonucleotide
  Sense strand starting at position 2358 of SEQ ID NO: 2214
acauuccugucagcagaau

SEQ ID NO: 171861 - RNA, 19 nt, Artificial Sequence
  Description of Artificial Sequence: Synthetic oligonucleotide
  Antisense strand to SEQ ID NO: 171860
auucugcugacaggaaugu

SEQ ID NO: 171862 - RNA, 19 nt, Artificial Sequence
  Description of Artificial Sequence: Synthetic oligonucleotide
  Sense strand starting at position 2671 of SEQ ID NO: 2214
cagaaauagcacugucuug

SEQ ID NO: 171863 - RNA, 19 nt, Artificial Sequence
  Description of Artificial Sequence: Synthetic oligonucleotide
  Antisense strand to SEQ ID NO: 171862
caagacagugcuauuucug

SEQ ID NO: 171864 - RNA, 19 nt, Artificial Sequence
  Description of Artificial Sequence: Synthetic oligonucleotide
  Sense strand starting at position 2677 of SEQ ID NO: 2214
uagcacugucuugaguuaa

SEQ ID NO: 171865 - RNA, 19 nt, Artificial Sequence
  Description of Artificial Sequence: Synthetic oligonucleotide
  Antisense strand to SEQ ID NO: 171864
uuaacucaagacagugcua

SEQ ID NO: 171866 - RNA, 19 nt, Artificial Sequence
  Description of Artificial Sequence: Synthetic oligonucleotide
  Sense strand starting at position 2840 of SEQ ID NO: 2214
gcgggaaagauagguguaa

SEQ ID NO: 171867 - RNA, 19 nt, Artificial Sequence
  Description of Artificial Sequence: Synthetic oligonucleotide
  Antisense strand to SEQ ID NO: 171866
uuacaccuaucuuucccgc

SEQ ID NO: 171868 - RNA, 19 nt, Artificial Sequence
  Description of Artificial Sequence: Synthetic oligonucleotide
  Sense strand starting at position 2841 of SEQ ID NO: 2214
cgggaaagauagguguaaa

SEQ ID NO: 171869 - RNA, 19 nt, Artificial Sequence
  Description of Artificial Sequence: Synthetic oligonucleotide
  Antisense strand to SEQ ID NO: 171868
uuuacaccuaucuuucccg

SEQ ID NO: 171870 - RNA, 19 nt, Artificial Sequence
  Description of Artificial Sequence: Synthetic oligonucleotide
  Sense strand starting at position 2872 of SEQ ID NO: 2214
acuuaauuacagugcaaag

SEQ ID NO: 171871 - RNA, 19 nt, Artificial Sequence
  Description of Artificial Sequence: Synthetic oligonucleotide
  Antisense strand to SEQ ID NO: 171870
cuuugcacuguaauuaagu

SEQ ID NO: 171872 - RNA, 19 nt, Artificial Sequence
  Description of Artificial Sequence: Synthetic oligonucleotide
  Sense strand starting at position 2874 of SEQ ID NO: 2214
uuaauuacagugcaaagau

SEQ ID NO: 171873 - RNA, 19 nt, Artificial Sequence
  Description of Artificial Sequence: Synthetic oligonucleotide
  Antisense strand to SEQ ID NO: 171872
aucuuugcacuguaauuaa

SEQ ID NO: 171874 - RNA, 19 nt, Artificial Sequence
  Description of Artificial Sequence: Synthetic oligonucleotide
  Sense strand starting at position 2931 of SEQ ID NO: 2214
cagcuugaagccugaguga

SEQ ID NO: 171875 - RNA, 19 nt, Artificial Sequence
  Description of Artificial Sequence: Synthetic oligonucleotide
  Antisense strand to SEQ ID NO: 171874
ucacucaggcuucaagcug

SEQ ID NO: 171876 - RNA, 19 nt, Artificial Sequence
  Description of Artificial Sequence: Synthetic oligonucleotide
  Sense strand starting at position 2934 of SEQ ID NO: 2214
cuugaagccugagugacaa

SEQ ID NO: 171877 - RNA, 19 nt, Artificial Sequence
  Description of Artificial Sequence: Synthetic oligonucleotide
  Antisense strand to SEQ ID NO: 171876
uugucacucaggcuucaag

SEQ ID NO: 171878 - RNA, 19 nt, Artificial Sequence
  Description of Artificial Sequence: Synthetic oligonucleotide
  Sense strand starting at position 2946 of SEQ ID NO: 2214
gugacaaauugccuaggua

SEQ ID NO: 171879 - RNA, 19 nt, Artificial Sequence
  Description of Artificial Sequence: Synthetic oligonucleotide
  Antisense strand to SEQ ID NO: 171878
uaccuaggcaauuugucac

SEQ ID NO: 171880 - RNA, 19 nt, Artificial Sequence
  Description of Artificial Sequence: Synthetic oligonucleotide
  Sense strand starting at position 2947 of SEQ ID NO: 2214
ugacaaauugccuagguag

SEQ ID NO: 171881 - RNA, 19 nt, Artificial Sequence
  Description of Artificial Sequence: Synthetic oligonucleotide
  Antisense strand to SEQ ID NO: 171880
cuaccuaggcaauuuguca

SEQ ID NO: 171882 - RNA, 19 nt, Artificial Sequence
  Description of Artificial Sequence: Synthetic oligonucleotide
  Sense strand starting at position 2976 of SEQ ID NO: 2214
gcuguauguagagggauga

SEQ ID NO: 171883 - RNA, 19 nt, Artificial Sequence
  Description of Artificial Sequence: Synthetic oligonucleotide
  Antisense strand to SEQ ID NO: 171882
ucaucccucuacauacagc

SEQ ID NO: 171884 - RNA, 19 nt, Artificial Sequence
  Description of Artificial Sequence: Synthetic oligonucleotide
  Sense strand starting at position 2977 of SEQ ID NO: 2214
cuguauguagagggaugaa

SEQ ID NO: 171885 - RNA, 19 nt, Artificial Sequence
  Description of Artificial Sequence: Synthetic oligonucleotide
  Antisense strand to SEQ ID NO: 171884
uucaucccucuacauacag

SEQ ID NO: 171886 - RNA, 19 nt, Artificial Sequence
  Description of Artificial Sequence: Synthetic oligonucleotide
  Sense strand starting at position 3131 of SEQ ID NO: 2214
uggcccuagccugacauaa

SEQ ID NO: 171887 - RNA, 19 nt, Artificial Sequence
  Description of Artificial Sequence: Synthetic oligonucleotide
  Antisense strand to SEQ ID NO: 171886
uuaugucaggcuagggcca

SEQ ID NO: 171888 - RNA, 19 nt, Artificial Sequence
  Description of Artificial Sequence: Synthetic oligonucleotide
  Sense strand starting at position 3235 of SEQ ID NO: 2214
cuguuuacucugcaucaua

SEQ ID NO: 171889 - RNA, 19 nt, Artificial Sequence
  Description of Artificial Sequence: Synthetic oligonucleotide
  Antisense strand to SEQ ID NO: 171888
uaugaugcagaguaaacag

SEQ ID NO: 171890 - RNA, 19 nt, Artificial Sequence
  Description of Artificial Sequence: Synthetic oligonucleotide
  Sense strand starting at position 3300 of SEQ ID NO: 2214
ugugaauaugugggagaga

SEQ ID NO: 171891 - RNA, 19 nt, Artificial Sequence
  Description of Artificial Sequence: Synthetic oligonucleotide
  Antisense strand to SEQ ID NO: 171890
ucucucccacauauucaca

SEQ ID NO: 171892 - RNA, 19 nt, Artificial Sequence
  Description of Artificial Sequence: Synthetic oligonucleotide
  Sense strand starting at position 3462 of SEQ ID NO: 2214
cuggccaugucuuccaaca

SEQ ID NO: 171893 - RNA, 19 nt, Artificial Sequence
  Description of Artificial Sequence: Synthetic oligonucleotide
  Antisense strand to SEQ ID NO: 171892
uguuggaagacauggccag

SEQ ID NO: 171894 - RNA, 19 nt, Artificial Sequence
  Description of Artificial Sequence: Synthetic oligonucleotide
  Sense strand starting at position 3474 of SEQ ID NO: 2214
uccaacagccgagaucauu

SEQ ID NO: 171895 - RNA, 19 nt, Artificial Sequence
  Description of Artificial Sequence: Synthetic oligonucleotide
  Antisense strand to SEQ ID NO: 171894
aaugaucucggcuguugga

SEQ ID NO: 171896 - RNA, 19 nt, Artificial Sequence
  Description of Artificial Sequence: Synthetic oligonucleotide
  Sense strand starting at position 3480 of SEQ ID NO: 2214
agccgagaucauugaggaa

SEQ ID NO: 171897 - RNA, 19 nt, Artificial Sequence
  Description of Artificial Sequence: Synthetic oligonucleotide
  Antisense strand to SEQ ID NO: 171896
uuccucaaugaucucggcu

SEQ ID NO: 171898 - RNA, 19 nt, Artificial Sequence
  Description of Artificial Sequence: Synthetic oligonucleotide
  Sense strand starting at position 3529 of SEQ ID NO: 2214
agcuuagggucuucucaca

SEQ ID NO: 171899 - RNA, 19 nt, Artificial Sequence
  Description of Artificial Sequence: Synthetic oligonucleotide
  Antisense strand to SEQ ID NO: 171898
ugugagaagacccuaagcu

SEQ ID NO: 171900 - RNA, 19 nt, Artificial Sequence
  Description of Artificial Sequence: Synthetic oligonucleotide
  Sense strand starting at position 3536 of SEQ ID NO: 2214
ggucuucucacauguggac

SEQ ID NO: 171901 - RNA, 19 nt, Artificial Sequence
  Description of Artificial Sequence: Synthetic oligonucleotide
  Antisense strand to SEQ ID NO: 171900
guccacaugugagaagacc

SEQ ID NO: 171902 - RNA, 19 nt, Artificial Sequence
  Description of Artificial Sequence: Synthetic oligonucleotide
  Sense strand starting at position 3545 of SEQ ID NO: 2214
acauguggaccuugaaaug

SEQ ID NO: 171903 - RNA, 19 nt, Artificial Sequence
  Description of Artificial Sequence: Synthetic oligonucleotide
  Antisense strand to SEQ ID NO: 171902
cauuucaagguccacaugu

SEQ ID NO: 171904 - RNA, 19 nt, Artificial Sequence
  Description of Artificial Sequence: Synthetic oligonucleotide
  Sense strand starting at position 3738 of SEQ ID NO: 2214
ccgucauucccauauauua

SEQ ID NO: 171905 - RNA, 19 nt, Artificial Sequence
  Description of Artificial Sequence: Synthetic oligonucleotide
  Antisense strand to SEQ ID NO: 171904
uaauauaugggaaugacgg

SEQ ID NO: 171906 - RNA, 19 nt, Artificial Sequence
  Description of Artificial Sequence: Synthetic oligonucleotide
  Sense strand starting at position 3792 of SEQ ID NO: 2214
guuuauauucuaggucaaa

SEQ ID NO: 171907 - RNA, 19 nt, Artificial Sequence
  Description of Artificial Sequence: Synthetic oligonucleotide
  Antisense strand to SEQ ID NO: 171906
uuugaccuagaauauaaac

SEQ ID NO: 171908 - RNA, 19 nt, Artificial Sequence
  Description of Artificial Sequence: Synthetic oligonucleotide
  Sense strand starting at position 3829 of SEQ ID NO: 2214
ugacaacuucucuaggcuu

SEQ ID NO: 171909 - RNA, 19 nt, Artificial Sequence
  Description of Artificial Sequence: Synthetic oligonucleotide
  Antisense strand to SEQ ID NO: 171908
aagccuagagaaguuguca

SEQ ID NO: 171910 - RNA, 19 nt, Artificial Sequence
  Description of Artificial Sequence: Synthetic oligonucleotide
  Sense strand starting at position 3938 of SEQ ID NO: 2214
ggaauacucuuucuccaug

SEQ ID NO: 171911 - RNA, 19 nt, Artificial Sequence
  Description of Artificial Sequence: Synthetic oligonucleotide
  Antisense strand to SEQ ID NO: 171910
cauggagaaagaguauucc

SEQ ID NO: 171912 - RNA, 19 nt, Artificial Sequence
  Description of Artificial Sequence: Synthetic oligonucleotide
  Sense strand starting at position 13 of SEQ ID NO: 2215
aguacacuugccuaacuga

SEQ ID NO: 171913 - RNA, 19 nt, Artificial Sequence
  Description of Artificial Sequence: Synthetic oligonucleotide
  Antisense strand to SEQ ID NO: 171912
ucaguuaggcaaguguacu

SEQ ID NO: 171914 - RNA, 19 nt, Artificial Sequence
  Description of Artificial Sequence: Synthetic oligonucleotide
  Sense strand starting at position 54 of SEQ ID NO: 2215
cccuauuauuguuuauaug

SEQ ID NO: 171915 - RNA, 19 nt, Artificial Sequence
  Description of Artificial Sequence: Synthetic oligonucleotide
  Antisense strand to SEQ ID NO: 171914
cauauaaacaauaauaggg

SEQ ID NO: 171916 - RNA, 19 nt, Artificial Sequence
  Description of Artificial Sequence: Synthetic oligonucleotide
  Sense strand starting at position 124 of SEQ ID NO: 2215
ugacaaccucuagguaguu

SEQ ID NO: 171917 - RNA, 19 nt, Artificial Sequence
  Description of Artificial Sequence: Synthetic oligonucleotide
  Antisense strand to SEQ ID NO: 171916
aacuaccuagagguuguca

SEQ ID NO: 171918 - RNA, 19 nt, Artificial Sequence
  Description of Artificial Sequence: Synthetic oligonucleotide
  Sense strand starting at position 205 of SEQ ID NO: 2215
auuaauugccuuuagugau

SEQ ID NO: 171919 - RNA, 19 nt, Artificial Sequence
  Description of Artificial Sequence: Synthetic oligonucleotide
  Antisense strand to SEQ ID NO: 171918
aucacuaaaggcaauuaau

SEQ ID NO: 171920 - RNA, 19 nt, Artificial Sequence
  Description of Artificial Sequence: Synthetic oligonucleotide
  Sense strand starting at position 212 of SEQ ID NO: 2215
gccuuuagugaucauacau

SEQ ID NO: 171921 - RNA, 19 nt, Artificial Sequence
  Description of Artificial Sequence: Synthetic oligonucleotide
  Antisense strand to SEQ ID NO: 171920
auguaugaucacuaaaggc

SEQ ID NO: 171922 - RNA, 19 nt, Artificial Sequence
  Description of Artificial Sequence: Synthetic oligonucleotide
  Sense strand starting at position 219 of SEQ ID NO: 2215
gugaucauacauugaccua

SEQ ID NO: 171923 - RNA, 19 nt, Artificial Sequence
  Description of Artificial Sequence: Synthetic oligonucleotide
  Antisense strand to SEQ ID NO: 171922
uaggucaauguaugaucac

SEQ ID NO: 171924 - RNA, 19 nt, Artificial Sequence
  Description of Artificial Sequence: Synthetic oligonucleotide
  Sense strand starting at position 265 of SEQ ID NO: 2215
aaagacauguuucuugaag

SEQ ID NO: 171925 - RNA, 19 nt, Artificial Sequence
  Description of Artificial Sequence: Synthetic oligonucleotide
  Antisense strand to SEQ ID NO: 171924
cuucaagaaacaugucuuu

SEQ ID NO: 171926 - RNA, 19 nt, Artificial Sequence
  Description of Artificial Sequence: Synthetic oligonucleotide
  Sense strand starting at position 266 of SEQ ID NO: 2215
aagacauguuucuugaagu

SEQ ID NO: 171927 - RNA, 19 nt, Artificial Sequence
  Description of Artificial Sequence: Synthetic oligonucleotide
  Antisense strand to SEQ ID NO: 171926
acuucaagaaacaugucuu

SEQ ID NO: 171928 - RNA, 19 nt, Artificial Sequence
  Description of Artificial Sequence: Synthetic oligonucleotide
  Sense strand starting at position 277 of SEQ ID NO: 2215
cuugaagucuuaccaugag

SEQ ID NO: 171929 - RNA, 19 nt, Artificial Sequence
  Description of Artificial Sequence: Synthetic oligonucleotide
  Antisense strand to SEQ ID NO: 171928
cucaugguaagacuucaag

SEQ ID NO: 171930 - RNA, 19 nt, Artificial Sequence
  Description of Artificial Sequence: Synthetic oligonucleotide
  Sense strand starting at position 280 of SEQ ID NO: 2215
gaagucuuaccaugagcug

SEQ ID NO: 171931 - RNA, 19 nt, Artificial Sequence
  Description of Artificial Sequence: Synthetic oligonucleotide
  Antisense strand to SEQ ID NO: 171930
cagcucaugguaagacuuc

SEQ ID NO: 171932 - RNA, 19 nt, Artificial Sequence
  Description of Artificial Sequence: Synthetic oligonucleotide
  Sense strand starting at position 325 of SEQ ID NO: 2215
ugcguagcgucauuuauuu

SEQ ID NO: 171933 - RNA, 19 nt, Artificial Sequence
  Description of Artificial Sequence: Synthetic oligonucleotide
  Antisense strand to SEQ ID NO: 171932
aaauaaaugacgcuacgca

SEQ ID NO: 171934 - RNA, 19 nt, Artificial Sequence
  Description of Artificial Sequence: Synthetic oligonucleotide
  Sense strand starting at position 481 of SEQ ID NO: 2215
uguccaagucaauaagcau

SEQ ID NO: 171935 - RNA, 19 nt, Artificial Sequence
  Description of Artificial Sequence: Synthetic oligonucleotide
  Antisense strand to SEQ ID NO: 171934
augcuuauugacuuggaca

SEQ ID NO: 171936 - RNA, 19 nt, Artificial Sequence
  Description of Artificial Sequence: Synthetic oligonucleotide
  Sense strand starting at position 586 of SEQ ID NO: 2215
gcaacauaacgagaagucu

SEQ ID NO: 171937 - RNA, 19 nt, Artificial Sequence
  Description of Artificial Sequence: Synthetic oligonucleotide
  Antisense strand to SEQ ID NO: 171936
agacuucucguuauguugc

SEQ ID NO: 171938 - RNA, 19 nt, Artificial Sequence
  Description of Artificial Sequence: Synthetic oligonucleotide
  Sense strand starting at position 597 of SEQ ID NO: 2215
agaagucugucucuacaaa

SEQ ID NO: 171939 - RNA, 19 nt, Artificial Sequence
  Description of Artificial Sequence: Synthetic oligonucleotide
  Antisense strand to SEQ ID NO: 171938
uuuguagagacagacuucu

SEQ ID NO: 171940 - RNA, 19 nt, Artificial Sequence
  Description of Artificial Sequence: Synthetic oligonucleotide
  Sense strand starting at position 1051 of SEQ ID NO: 2215
ucucaugaaguuugaagau

SEQ ID NO: 171941 - RNA, 19 nt, Artificial Sequence
  Description of Artificial Sequence: Synthetic oligonucleotide
  Antisense strand to SEQ ID NO: 171940
aucuucaaacuucaugaga

SEQ ID NO: 171942 - RNA, 19 nt, Artificial Sequence
  Description of Artificial Sequence: Synthetic oligonucleotide
  Sense strand starting at position 1101 of SEQ ID NO: 2215
guuaaugauaaaugggcaa

SEQ ID NO: 171943 - RNA, 19 nt, Artificial Sequence
  Description of Artificial Sequence: Synthetic oligonucleotide
  Antisense strand to SEQ ID NO: 171942
uugcccauuuaucauuaac

SEQ ID NO: 171944 - RNA, 19 nt, Artificial Sequence
  Description of Artificial Sequence: Synthetic oligonucleotide
  Sense strand starting at position 1125 of SEQ ID NO: 2215
uggcuagaucguuauuacu

SEQ ID NO: 171945 - RNA, 19 nt, Artificial Sequence
  Description of Artificial Sequence: Synthetic oligonucleotide
  Antisense strand to SEQ ID NO: 171944
aguaauaacgaucuagcca

SEQ ID NO: 171946 - RNA, 19 nt, Artificial Sequence
  Description of Artificial Sequence: Synthetic oligonucleotide
  Sense strand starting at position 1155 of SEQ ID NO: 2215
uaggaagaguuggcaaaca

SEQ ID NO: 171947 - RNA, 19 nt, Artificial Sequence
  Description of Artificial Sequence: Synthetic oligonucleotide
  Antisense strand to SEQ ID NO: 171946
uguuugccaacucuuccua

SEQ ID NO: 171948 - RNA, 19 nt, Artificial Sequence
  Description of Artificial Sequence: Synthetic oligonucleotide
  Sense strand starting at position 1182 of SEQ ID NO: 2215
guaagagacuauccaucuu

SEQ ID NO: 171949 - RNA, 19 nt, Artificial Sequence
  Description of Artificial Sequence: Synthetic oligonucleotide
  Antisense strand to SEQ ID NO: 171948
aagauggauagucucuuac

SEQ ID NO: 171950 - RNA, 19 nt, Artificial Sequence
  Description of Artificial Sequence: Synthetic oligonucleotide
  Sense strand starting at position 1310 of SEQ ID NO: 2215
agcgccaaugacuaguaaa

SEQ ID NO: 171951 - RNA, 19 nt, Artificial Sequence
  Description of Artificial Sequence: Synthetic oligonucleotide
  Antisense strand to SEQ ID NO: 171950
uuuacuagucauuggcgcu

SEQ ID NO: 171952 - RNA, 19 nt, Artificial Sequence
  Description of Artificial Sequence: Synthetic oligonucleotide
  Sense strand starting at position 1416 of SEQ ID NO: 2215
cacagaucagauuaucguu

SEQ ID NO: 171953 - RNA, 19 nt, Artificial Sequence
  Description of Artificial Sequence: Synthetic oligonucleotide
  Antisense strand to SEQ ID NO: 171952
aacgauaaucugaucugug

SEQ ID NO: 171954 - RNA, 19 nt, Artificial Sequence
  Description of Artificial Sequence: Synthetic oligonucleotide
  Sense strand starting at position 1512 of SEQ ID NO: 2215
ggguguucuccacagagga

SEQ ID NO: 171955 - RNA, 19 nt, Artificial Sequence
  Description of Artificial Sequence: Synthetic oligonucleotide
  Antisense strand to SEQ ID NO: 171954
uccucuguggagaacaccc

SEQ ID NO: 171956 - RNA, 19 nt, Artificial Sequence
  Description of Artificial Sequence: Synthetic oligonucleotide
  Sense strand starting at position 1514 of SEQ ID NO: 2215
guguucuccacagaggaua

SEQ ID NO: 171957 - RNA, 19 nt, Artificial Sequence
  Description of Artificial Sequence: Synthetic oligonucleotide
  Antisense strand to SEQ ID NO: 171956
uauccucuguggagaacac

SEQ ID NO: 171958 - RNA, 19 nt, Artificial Sequence
  Description of Artificial Sequence: Synthetic oligonucleotide
  Sense strand starting at position 1525 of SEQ ID NO: 2215
agaggauauugucccacuu

SEQ ID NO: 171959 - RNA, 19 nt, Artificial Sequence
  Description of Artificial Sequence: Synthetic oligonucleotide
  Antisense strand to SEQ ID NO: 171958
aagugggacaauauccucu

SEQ ID NO: 171960 - RNA, 19 nt, Artificial Sequence
  Description of Artificial Sequence: Synthetic oligonucleotide
  Sense strand starting at position 1835 of SEQ ID NO: 2215
gcccgugagcccguggaau

SEQ ID NO: 171961 - RNA, 19 nt, Artificial Sequence
  Description of Artificial Sequence: Synthetic oligonucleotide
  Antisense strand to SEQ ID NO: 171960
auuccacgggcucacgggc

SEQ ID NO: 171962 - RNA, 19 nt, Artificial Sequence
  Description of Artificial Sequence: Synthetic oligonucleotide
  Sense strand starting at position 1931 of SEQ ID NO: 2215
agcuaagguuaaucuuuga

SEQ ID NO: 171963 - RNA, 19 nt, Artificial Sequence
  Description of Artificial Sequence: Synthetic oligonucleotide
  Antisense strand to SEQ ID NO: 171962
ucaaagauuaaccuuagcu

SEQ ID NO: 171964 - RNA, 19 nt, Artificial Sequence
  Description of Artificial Sequence: Synthetic oligonucleotide
  Sense strand starting at position 1934 of SEQ ID NO: 2215
uaagguuaaucuuugagug

SEQ ID NO: 171965 - RNA, 19 nt, Artificial Sequence
  Description of Artificial Sequence: Synthetic oligonucleotide
  Antisense strand to SEQ ID NO: 171964
cacucaaagauuaaccuua

SEQ ID NO: 171966 - RNA, 19 nt, Artificial Sequence
  Description of Artificial Sequence: Synthetic oligonucleotide
  Sense strand starting at position 1939 of SEQ ID NO: 2215
uuaaucuuugagugcugga

SEQ ID NO: 171967 - RNA, 19 nt, Artificial Sequence
  Description of Artificial Sequence: Synthetic oligonucleotide
  Antisense strand to SEQ ID NO: 171966
uccagcacucaaagauuaa

SEQ ID NO: 171968 - RNA, 19 nt, Artificial Sequence
  Description of Artificial Sequence: Synthetic oligonucleotide
  Sense strand starting at position 1959 of SEQ ID NO: 2215
gaaggaaacgagugguuua

SEQ ID NO: 171969 - RNA, 19 nt, Artificial Sequence
  Description of Artificial Sequence: Synthetic oligonucleotide
  Antisense strand to SEQ ID NO: 171968
uaaaccacucguuuccuuc

SEQ ID NO: 171970 - RNA, 19 nt, Artificial Sequence
  Description of Artificial Sequence: Synthetic oligonucleotide
  Sense strand starting at position 1964 of SEQ ID NO: 2215
aaacgagugguuuaggcaa

SEQ ID NO: 171971 - RNA, 19 nt, Artificial Sequence
  Description of Artificial Sequence: Synthetic oligonucleotide
  Antisense strand to SEQ ID NO: 171970
uugccuaaaccacucguuu

SEQ ID NO: 171972 - RNA, 19 nt, Artificial Sequence
  Description of Artificial Sequence: Synthetic oligonucleotide
  Sense strand starting at position 2170 of SEQ ID NO: 2215
cuaagugacucagucggaa

SEQ ID NO: 171973 - RNA, 19 nt, Artificial Sequence
  Description of Artificial Sequence: Synthetic oligonucleotide
  Antisense strand to SEQ ID NO: 171972
uuccgacugagucacuuag

SEQ ID NO: 171974 - RNA, 19 nt, Artificial Sequence
  Description of Artificial Sequence: Synthetic oligonucleotide
  Sense strand starting at position 2183 of SEQ ID NO: 2215
ucggaaugaaauugauguu

SEQ ID NO: 171975 - RNA, 19 nt, Artificial Sequence
  Description of Artificial Sequence: Synthetic oligonucleotide
  Antisense strand to SEQ ID NO: 171974
aacaucaauuucauuccga

SEQ ID NO: 171976 - RNA, 19 nt, Artificial Sequence
  Description of Artificial Sequence: Synthetic oligonucleotide
  Sense strand starting at position 2190 of SEQ ID NO: 2215
gaaauugauguuugccaga

SEQ ID NO: 171977 - RNA, 19 nt, Artificial Sequence
  Description of Artificial Sequence: Synthetic oligonucleotide
  Antisense strand to SEQ ID NO: 171976
ucuggcaaacaucaauuuc

SEQ ID NO: 171978 - RNA, 19 nt, Artificial Sequence
  Description of Artificial Sequence: Synthetic oligonucleotide
  Sense strand starting at position 2192 of SEQ ID NO: 2215
aauugauguuugccagauu

SEQ ID NO: 171979 - RNA, 19 nt, Artificial Sequence
  Description of Artificial Sequence: Synthetic oligonucleotide
  Antisense strand to SEQ ID NO: 171978
aaucuggcaaacaucaauu

SEQ ID NO: 171980 - RNA, 19 nt, Artificial Sequence
  Description of Artificial Sequence: Synthetic oligonucleotide
  Sense strand starting at position 2595 of SEQ ID NO: 2215
uaacuuuggugguucucaa

SEQ ID NO: 171981 - RNA, 19 nt, Artificial Sequence
  Description of Artificial Sequence: Synthetic oligonucleotide
  Antisense strand to SEQ ID NO: 171980
uugagaaccaccaaaguua

SEQ ID NO: 171982 - RNA, 19 nt, Artificial Sequence
  Description of Artificial Sequence: Synthetic oligonucleotide
  Sense strand starting at position 2606 of SEQ ID NO: 2215
guucucaaacuuugaauag

SEQ ID NO: 171983 - RNA, 19 nt, Artificial Sequence
  Description of Artificial Sequence: Synthetic oligonucleotide
  Antisense strand to SEQ ID NO: 171982
cuauucaaaguuugagaac

SEQ ID NO: 171984 - RNA, 19 nt, Artificial Sequence
  Description of Artificial Sequence: Synthetic oligonucleotide
  Sense strand starting at position 2628 of SEQ ID NO: 2215
cugaaucaccuguaguagu

SEQ ID NO: 171985 - RNA, 19 nt, Artificial Sequence
  Description of Artificial Sequence: Synthetic oligonucleotide
  Antisense strand to SEQ ID NO: 171984
acuacuacaggugauucag

SEQ ID NO: 171986 - RNA, 19 nt, Artificial Sequence
  Description of Artificial Sequence: Synthetic oligonucleotide
  Sense strand starting at position 2773 of SEQ ID NO: 2215
cuuugagaacacugguaua

SEQ ID NO: 171987 - RNA, 19 nt, Artificial Sequence
  Description of Artificial Sequence: Synthetic oligonucleotide
  Antisense strand to SEQ ID NO: 171986
uauaccaguguucucaaag

SEQ ID NO: 171988 - RNA, 19 nt, Artificial Sequence
  Description of Artificial Sequence: Synthetic oligonucleotide
  Sense strand starting at position 3295 of SEQ ID NO: 2215
uccggaaaggcugggauua

SEQ ID NO: 171989 - RNA, 19 nt, Artificial Sequence
  Description of Artificial Sequence: Synthetic oligonucleotide
  Antisense strand to SEQ ID NO: 171988
uaaucccagccuuuccgga

SEQ ID NO: 171990 - RNA, 19 nt, Artificial Sequence
  Description of Artificial Sequence: Synthetic oligonucleotide
  Sense strand starting at position 3545 of SEQ ID NO: 2215
ggaguugagacgggaguuu

SEQ ID NO: 171991 - RNA, 19 nt, Artificial Sequence
  Description of Artificial Sequence: Synthetic oligonucleotide
  Antisense strand to SEQ ID NO: 171990
aaacucccgucucaacucc

SEQ ID NO: 171992 - RNA, 19 nt, Artificial Sequence
  Description of Artificial Sequence: Synthetic oligonucleotide
  Sense strand starting at position 3890 of SEQ ID NO: 2216
acgggaacuugauagaaau

SEQ ID NO: 171993 - RNA, 19 nt, Artificial Sequence
  Description of Artificial Sequence: Synthetic oligonucleotide
  Antisense strand to SEQ ID NO: 171992
auuucuaucaaguucccgu

SEQ ID NO: 171994 - RNA, 19 nt, Artificial Sequence
  Description of Artificial Sequence: Synthetic oligonucleotide
  Sense strand starting at position 3855 of SEQ ID NO: 2216
aauugugauccuuggacua

SEQ ID NO: 171995 - RNA, 19 nt, Artificial Sequence
  Description of Artificial Sequence: Synthetic oligonucleotide
  Antisense strand to SEQ ID NO: 171994
uaguccaaggaucacaauu

SEQ ID NO: 171996 - RNA, 19 nt, Artificial Sequence
  Description of Artificial Sequence: Synthetic oligonucleotide
  Sense strand starting at position 3706 of SEQ ID NO: 2216
ugugcugaguaaucuggaa

SEQ ID NO: 171997 - RNA, 19 nt, Artificial Sequence
  Description of Artificial Sequence: Synthetic oligonucleotide
  Antisense strand to SEQ ID NO: 171996
uuccagauuacucagcaca

SEQ ID NO: 171998 - RNA, 19 nt, Artificial Sequence
  Description of Artificial Sequence: Synthetic oligonucleotide
  Sense strand starting at position 3700 of SEQ ID NO: 2216
ccaaacugugcugaguaau

SEQ ID NO: 171999 - RNA, 19 nt, Artificial Sequence
  Description of Artificial Sequence: Synthetic oligonucleotide
  Antisense strand to SEQ ID NO: 171998
auuacucagcacaguuugg

SEQ ID NO: 172000 - RNA, 19 nt, Artificial Sequence
  Description of Artificial Sequence: Synthetic oligonucleotide
  Sense strand starting at position 3667 of SEQ ID NO: 2216
agggaaugcugucucucuu

SEQ ID NO: 172001 - RNA, 19 nt, Artificial Sequence
  Description of Artificial Sequence: Synthetic oligonucleotide
  Antisense strand to SEQ ID NO: 172000
aagagagacagcauucccu

SEQ ID NO: 172002 - RNA, 19 nt, Artificial Sequence
  Description of Artificial Sequence: Synthetic oligonucleotide
  Sense strand starting at position 3650 of SEQ ID NO: 2216
cauauagauguguggaaag

SEQ ID NO: 172003 - RNA, 19 nt, Artificial Sequence
  Description of Artificial Sequence: Synthetic oligonucleotide
  Antisense strand to SEQ ID NO: 172002
cuuuccacacaucuauaug

SEQ ID NO: 172004 - RNA, 19 nt, Artificial Sequence
  Description of Artificial Sequence: Synthetic oligonucleotide
  Sense strand starting at position 3649 of SEQ ID NO: 2216
acauauagauguguggaaa

SEQ ID NO: 172005 - RNA, 19 nt, Artificial Sequence
  Description of Artificial Sequence: Synthetic oligonucleotide
  Antisense strand to SEQ ID NO: 172004
uuuccacacaucuauaugu

SEQ ID NO: 172006 - RNA, 19 nt, Artificial Sequence
  Description of Artificial Sequence: Synthetic oligonucleotide
  Sense strand starting at position 3642 of SEQ ID NO: 2216
gguugcuacauauagaugu

SEQ ID NO: 172007 - RNA, 19 nt, Artificial Sequence
  Description of Artificial Sequence: Synthetic oligonucleotide
  Antisense strand to SEQ ID NO: 172006
acaucuauauguagcaacc

SEQ ID NO: 172008 - RNA, 19 nt, Artificial Sequence
  Description of Artificial Sequence: Synthetic oligonucleotide
  Sense strand starting at position 3627 of SEQ ID NO: 2216
guauuaauggcaggagguu

SEQ ID NO: 172009 - RNA, 19 nt, Artificial Sequence
  Description of Artificial Sequence: Synthetic oligonucleotide
  Antisense strand to SEQ ID NO: 172008
aaccuccugccauuaauac

SEQ ID NO: 172010 - RNA, 19 nt, Artificial Sequence
  Description of Artificial Sequence: Synthetic oligonucleotide
  Sense strand starting at position 3581 of SEQ ID NO: 2216
gugagaguuccuuacaaac

SEQ ID NO: 172011 - RNA, 19 nt, Artificial Sequence
  Description of Artificial Sequence: Synthetic oligonucleotide
  Antisense strand to SEQ ID NO: 172010
guuuguaaggaacucucac

SEQ ID NO: 172012 - RNA, 19 nt, Artificial Sequence
  Description of Artificial Sequence: Synthetic oligonucleotide
  Sense strand starting at position 3579 of SEQ ID NO: 2216
augugagaguuccuuacaa

SEQ ID NO: 172013 - RNA, 19 nt, Artificial Sequence
  Description of Artificial Sequence: Synthetic oligonucleotide
  Antisense strand to SEQ ID NO: 172012
uuguaaggaacucucacau

SEQ ID NO: 172014 - RNA, 19 nt, Artificial Sequence
  Description of Artificial Sequence: Synthetic oligonucleotide
  Sense strand starting at position 3570 of SEQ ID NO: 2216
caauaacguaugugagagu

SEQ ID NO: 172015 - RNA, 19 nt, Artificial Sequence
  Description of Artificial Sequence: Synthetic oligonucleotide
  Antisense strand to SEQ ID NO: 172014
acucucacauacguuauug

SEQ ID NO: 172016 - RNA, 19 nt, Artificial Sequence
  Description of Artificial Sequence: Synthetic oligonucleotide
  Sense strand starting at position 3568 of SEQ ID NO: 2216
cacaauaacguaugugaga

SEQ ID NO: 172017 - RNA, 19 nt, Artificial Sequence
  Description of Artificial Sequence: Synthetic oligonucleotide
  Antisense strand to SEQ ID NO: 172016
ucucacauacguuauugug

SEQ ID NO: 172018 - RNA, 19 nt, Artificial Sequence
  Description of Artificial Sequence: Synthetic oligonucleotide
  Sense strand starting at position 3537 of SEQ ID NO: 2216
cucagaaauugggaagaau

SEQ ID NO: 172019 - RNA, 19 nt, Artificial Sequence
  Description of Artificial Sequence: Synthetic oligonucleotide
  Antisense strand to SEQ ID NO: 172018
auucuucccaauuucugag

SEQ ID NO: 172020 - RNA, 19 nt, Artificial Sequence
  Description of Artificial Sequence: Synthetic oligonucleotide
  Sense strand starting at position 3513 of SEQ ID NO: 2216
agacuuuacuuggcauaau

SEQ ID NO: 172021 - RNA, 19 nt, Artificial Sequence
  Description of Artificial Sequence: Synthetic oligonucleotide
  Antisense strand to SEQ ID NO: 172020
auuaugccaaguaaagucu

SEQ ID NO: 172022 - RNA, 19 nt, Artificial Sequence
  Description of Artificial Sequence: Synthetic oligonucleotide
  Sense strand starting at position 3510 of SEQ ID NO: 2216
augagacuuuacuuggcau

SEQ ID NO: 172023 - RNA, 19 nt, Artificial Sequence
  Description of Artificial Sequence: Synthetic oligonucleotide
  Antisense strand to SEQ ID NO: 172022
augccaaguaaagucucau

SEQ ID NO: 172024 - RNA, 19 nt, Artificial Sequence
  Description of Artificial Sequence: Synthetic oligonucleotide
  Sense strand starting at position 3496 of SEQ ID NO: 2216
ugcauuauuucuuaaugag

SEQ ID NO: 172025 - RNA, 19 nt, Artificial Sequence
  Description of Artificial Sequence: Synthetic oligonucleotide
  Antisense strand to SEQ ID NO: 172024
cucauuaagaaauaaugca

SEQ ID NO: 172026 - RNA, 19 nt, Artificial Sequence
  Description of Artificial Sequence: Synthetic oligonucleotide
  Sense strand starting at position 3398 of SEQ ID NO: 2216
ggauacuuggucugaguua

SEQ ID NO: 172027 - RNA, 19 nt, Artificial Sequence
  Description of Artificial Sequence: Synthetic oligonucleotide
  Antisense strand to SEQ ID NO: 172026
uaacucagaccaaguaucc

SEQ ID NO: 172028 - RNA, 19 nt, Artificial Sequence
  Description of Artificial Sequence: Synthetic oligonucleotide
  Sense strand starting at position 3396 of SEQ ID NO: 2216
uaggauacuuggucugagu

SEQ ID NO: 172029 - RNA, 19 nt, Artificial Sequence
  Description of Artificial Sequence: Synthetic oligonucleotide
  Antisense strand to SEQ ID NO: 172028
acucagaccaaguauccua

SEQ ID NO: 172030 - RNA, 19 nt, Artificial Sequence
  Description of Artificial Sequence: Synthetic oligonucleotide
  Sense strand starting at position 3318 of SEQ ID NO: 2216
gagggauguuuauuaucac

SEQ ID NO: 172031 - RNA, 19 nt, Artificial Sequence
  Description of Artificial Sequence: Synthetic oligonucleotide
  Antisense strand to SEQ ID NO: 172030
gugauaauaaacaucccuc

SEQ ID NO: 172032 - RNA, 19 nt, Artificial Sequence
  Description of Artificial Sequence: Synthetic oligonucleotide
  Sense strand starting at position 3312 of SEQ ID NO: 2216
gcacaagagggauguuuau

SEQ ID NO: 172033 - RNA, 19 nt, Artificial Sequence
  Description of Artificial Sequence: Synthetic oligonucleotide
  Antisense strand to SEQ ID NO: 172032
auaaacaucccucuugugc

SEQ ID NO: 172034 - RNA, 19 nt, Artificial Sequence
  Description of Artificial Sequence: Synthetic oligonucleotide
  Sense strand starting at position 3290 of SEQ ID NO: 2216
ucgcuuuauuuggcgagaa

SEQ ID NO: 172035 - RNA, 19 nt, Artificial Sequence
  Description of Artificial Sequence: Synthetic oligonucleotide
  Antisense strand to SEQ ID NO: 172034
uucucgccaaauaaagcga

SEQ ID NO: 172036 - RNA, 19 nt, Artificial Sequence
  Description of Artificial Sequence: Synthetic oligonucleotide
  Sense strand starting at position 2152 of SEQ ID NO: 2216
ugcgcucaccuuuaaauca

SEQ ID NO: 172037 - RNA, 19 nt, Artificial Sequence
  Description of Artificial Sequence: Synthetic oligonucleotide
  Antisense strand to SEQ ID NO: 172036
ugauuuaaaggugagcgca

SEQ ID NO: 172038 - RNA, 19 nt, Artificial Sequence
  Description of Artificial Sequence: Synthetic oligonucleotide
  Sense strand starting at position 1795 of SEQ ID NO: 2216
gagacuuacucagcaagga

SEQ ID NO: 172039 - RNA, 19 nt, Artificial Sequence
  Description of Artificial Sequence: Synthetic oligonucleotide
  Antisense strand to SEQ ID NO: 172038
uccuugcugaguaagucuc

SEQ ID NO: 172040 - RNA, 19 nt, Artificial Sequence
  Description of Artificial Sequence: Synthetic oligonucleotide
  Sense strand starting at position 1791 of SEQ ID NO: 2216
gguagagacuuacucagca

SEQ ID NO: 172041 - RNA, 19 nt, Artificial Sequence
  Description of Artificial Sequence: Synthetic oligonucleotide
  Antisense strand to SEQ ID NO: 172040
ugcugaguaagucucuacc

SEQ ID NO: 172042 - RNA, 19 nt, Artificial Sequence
  Description of Artificial Sequence: Synthetic oligonucleotide
  Sense strand starting at position 1420 of SEQ ID NO: 2216
caggaaagcgcucaaagau

SEQ ID NO: 172043 - RNA, 19 nt, Artificial Sequence
  Description of Artificial Sequence: Synthetic oligonucleotide
  Antisense strand to SEQ ID NO: 172042
aucuuugagcgcuuuccug

SEQ ID NO: 172044 - RNA, 19 nt, Artificial Sequence
  Description of Artificial Sequence: Synthetic oligonucleotide
  Sense strand starting at position 1110 of SEQ ID NO: 2216
ucgccaauugucucggcaa

SEQ ID NO: 172045 - RNA, 19 nt, Artificial Sequence
  Description of Artificial Sequence: Synthetic oligonucleotide
  Antisense strand to SEQ ID NO: 172044
uugccgagacaauuggcga

SEQ ID NO: 172046 - RNA, 19 nt, Artificial Sequence
  Description of Artificial Sequence: Synthetic oligonucleotide
  Sense strand starting at position 1046 of SEQ ID NO: 2216
ccggcaaaggugcauuauu

SEQ ID NO: 172047 - RNA, 19 nt, Artificial Sequence
  Description of Artificial Sequence: Synthetic oligonucleotide
  Antisense strand to SEQ ID NO: 172046
aauaaugcaccuuugccgg

SEQ ID NO: 172048 - RNA, 19 nt, Artificial Sequence
  Description of Artificial Sequence: Synthetic oligonucleotide
  Sense strand starting at position 910 of SEQ ID NO: 2216
cugcaccuucucuggagaa

SEQ ID NO: 172049 - RNA, 19 nt, Artificial Sequence
  Description of Artificial Sequence: Synthetic oligonucleotide
  Antisense strand to SEQ ID NO: 172048
uucuccagagaaggugcag

SEQ ID NO: 172050 - RNA, 19 nt, Artificial Sequence
  Description of Artificial Sequence: Synthetic oligonucleotide
  Sense strand starting at position 843 of SEQ ID NO: 2216
gcugcugccauaggauaua

SEQ ID NO: 172051 - RNA, 19 nt, Artificial Sequence
  Description of Artificial Sequence: Synthetic oligonucleotide
  Antisense strand to SEQ ID NO: 172050
uauauccuauggcagcagc

SEQ ID NO: 172052 - RNA, 19 nt, Artificial Sequence
  Description of Artificial Sequence: Synthetic oligonucleotide
  Sense strand starting at position 804 of SEQ ID NO: 2216
gaggaauggcauuggcuua

SEQ ID NO: 172053 - RNA, 19 nt, Artificial Sequence
  Description of Artificial Sequence: Synthetic oligonucleotide
  Antisense strand to SEQ ID NO: 172052
uaagccaaugccauuccuc

SEQ ID NO: 172054 - RNA, 19 nt, Artificial Sequence
  Description of Artificial Sequence: Synthetic oligonucleotide
  Sense strand starting at position 798 of SEQ ID NO: 2216
ccaaaugaggaauggcauu

SEQ ID NO: 172055 - RNA, 19 nt, Artificial Sequence
  Description of Artificial Sequence: Synthetic oligonucleotide
  Antisense strand to SEQ ID NO: 172054
aaugccauuccucauuugg

SEQ ID NO: 172056 - RNA, 19 nt, Artificial Sequence
  Description of Artificial Sequence: Synthetic oligonucleotide
  Sense strand starting at position 587 of SEQ ID NO: 2216
acauaagucuagccacgaa

SEQ ID NO: 172057 - RNA, 19 nt, Artificial Sequence
  Description of Artificial Sequence: Synthetic oligonucleotide
  Antisense strand to SEQ ID NO: 172056
uucguggcuagacuuaugu

SEQ ID NO: 172058 - RNA, 19 nt, Artificial Sequence
  Description of Artificial Sequence: Synthetic oligonucleotide
  Sense strand starting at position 542 of SEQ ID NO: 2216
caagcuucuugugcagaga

SEQ ID NO: 172059 - RNA, 19 nt, Artificial Sequence
  Description of Artificial Sequence: Synthetic oligonucleotide
  Antisense strand to SEQ ID NO: 172058
ucucugcacaagaagcuug

SEQ ID NO: 172060 - RNA, 19 nt, Artificial Sequence
  Description of Artificial Sequence: Synthetic oligonucleotide
  Sense strand starting at position 330 of SEQ ID NO: 2216
aggguuugcuggccagacu

SEQ ID NO: 172061 - RNA, 19 nt, Artificial Sequence
  Description of Artificial Sequence: Synthetic oligonucleotide
  Antisense strand to SEQ ID NO: 172060
agucuggccagcaaacccu

SEQ ID NO: 172062 - RNA, 19 nt, Artificial Sequence
  Description of Artificial Sequence: Synthetic oligonucleotide
  Sense strand starting at position 309 of SEQ ID NO: 2216
ggucucauuggucaaagau

SEQ ID NO: 172063 - RNA, 19 nt, Artificial Sequence
  Description of Artificial Sequence: Synthetic oligonucleotide
  Antisense strand to SEQ ID NO: 172062
aucuuugaccaaugagacc

SEQ ID NO: 172064 - RNA, 19 nt, Artificial Sequence
  Description of Artificial Sequence: Synthetic oligonucleotide
  Sense strand starting at position 308 of SEQ ID NO: 2216
gggucucauuggucaaaga

SEQ ID NO: 172065 - RNA, 19 nt, Artificial Sequence
  Description of Artificial Sequence: Synthetic oligonucleotide
  Antisense strand to SEQ ID NO: 172064
ucuuugaccaaugagaccc

SEQ ID NO: 172066 - RNA, 19 nt, Artificial Sequence
  Description of Artificial Sequence: Synthetic oligonucleotide
  Sense strand starting at position 306 of SEQ ID NO: 2216
gagggucucauuggucaaa

SEQ ID NO: 172067 - RNA, 19 nt, Artificial Sequence
  Description of Artificial Sequence: Synthetic oligonucleotide
  Antisense strand to SEQ ID NO: 172066
uuugaccaaugagacccuc

SEQ ID NO: 172068 - RNA, 19 nt, Artificial Sequence
  Description of Artificial Sequence: Synthetic oligonucleotide
  Sense strand starting at position 35 of SEQ ID NO: 2216
aguguaaaguuguuacuac

SEQ ID NO: 172069 - RNA, 19 nt, Artificial Sequence
  Description of Artificial Sequence: Synthetic oligonucleotide
  Antisense strand to SEQ ID NO: 172068
guaguaacaacuuuacacu

SEQ ID NO: 172070 - RNA, 19 nt, Artificial Sequence
  Description of Artificial Sequence: Synthetic oligonucleotide
  Sense strand starting at position 11 of SEQ ID NO: 2216
agggcaguucggcaguuaa

SEQ ID NO: 172071 - RNA, 19 nt, Artificial Sequence
  Description of Artificial Sequence: Synthetic oligonucleotide
  Antisense strand to SEQ ID NO: 172070
uuaacugccgaacugcccu

SEQ ID NO: 172072 - RNA, 19 nt, Artificial Sequence
  Description of Artificial Sequence: Synthetic oligonucleotide
  Sense strand starting at position 3894 of SEQ ID NO: 2217
gggugcugccagcacaaau

SEQ ID NO: 172073 - RNA, 19 nt, Artificial Sequence
  Description of Artificial Sequence: Synthetic oligonucleotide
  Antisense strand to SEQ ID NO: 172072
auuugugcuggcagcaccc

SEQ ID NO: 172074 - RNA, 19 nt, Artificial Sequence
  Description of Artificial Sequence: Synthetic oligonucleotide
  Sense strand starting at position 3813 of SEQ ID NO: 2217
cuggauuagccugauaauc

SEQ ID NO: 172075 - RNA, 19 nt, Artificial Sequence
  Description of Artificial Sequence: Synthetic oligonucleotide
  Antisense strand to SEQ ID NO: 172074
gauuaucaggcuaauccag

SEQ ID NO: 172076 - RNA, 19 nt, Artificial Sequence
  Description of Artificial Sequence: Synthetic oligonucleotide
  Sense strand starting at position 3812 of SEQ ID NO: 2217
ccuggauuagccugauaau

SEQ ID NO: 172077 - RNA, 19 nt, Artificial Sequence
  Description of Artificial Sequence: Synthetic oligonucleotide
  Antisense strand to SEQ ID NO: 172076
auuaucaggcuaauccagg

SEQ ID NO: 172078 - RNA, 19 nt, Artificial Sequence
  Description of Artificial Sequence: Synthetic oligonucleotide
  Sense strand starting at position 3739 of SEQ ID NO: 2217
uugagcauucucugaccca

SEQ ID NO: 172079 - RNA, 19 nt, Artificial Sequence
  Description of Artificial Sequence: Synthetic oligonucleotide
  Antisense strand to SEQ ID NO: 172078
ugggucagagaaugcucaa

SEQ ID NO: 172080 - RNA, 19 nt, Artificial Sequence
  Description of Artificial Sequence: Synthetic oligonucleotide
  Sense strand starting at position 3544 of SEQ ID NO: 2217
ugaccuuugucuucccuau

SEQ ID NO: 172081 - RNA, 19 nt, Artificial Sequence
  Description of Artificial Sequence: Synthetic oligonucleotide
  Antisense strand to SEQ ID NO: 172080
auagggaagacaaagguca

SEQ ID NO: 172082 - RNA, 19 nt, Artificial Sequence
  Description of Artificial Sequence: Synthetic oligonucleotide
  Sense strand starting at position 3532 of SEQ ID NO: 2217
augaguauacucugaccuu

SEQ ID NO: 172083 - RNA, 19 nt, Artificial Sequence
  Description of Artificial Sequence: Synthetic oligonucleotide
  Antisense strand to SEQ ID NO: 172082
aaggucagaguauacucau

SEQ ID NO: 172084 - RNA, 19 nt, Artificial Sequence
  Description of Artificial Sequence: Synthetic oligonucleotide
  Sense strand starting at position 3519 of SEQ ID NO: 2217
ucugucaugcucuaugagu

SEQ ID NO: 172085 - RNA, 19 nt, Artificial Sequence
  Description of Artificial Sequence: Synthetic oligonucleotide
  Antisense strand to SEQ ID NO: 172084
acucauagagcaugacaga

SEQ ID NO: 172086 - RNA, 19 nt, Artificial Sequence
  Description of Artificial Sequence: Synthetic oligonucleotide
  Sense strand starting at position 3060 of SEQ ID NO: 2217
agaacuguuuggucuucca

SEQ ID NO: 172087 - RNA, 19 nt, Artificial Sequence
  Description of Artificial Sequence: Synthetic oligonucleotide
  Antisense strand to SEQ ID NO: 172086
uggaagaccaaacaguucu

SEQ ID NO: 172088 - RNA, 19 nt, Artificial Sequence
  Description of Artificial Sequence: Synthetic oligonucleotide
  Sense strand starting at position 3000 of SEQ ID NO: 2217
ugaguuucccuuggaacuc

SEQ ID NO: 172089 - RNA, 19 nt, Artificial Sequence
  Description of Artificial Sequence: Synthetic oligonucleotide
  Antisense strand to SEQ ID NO: 172088
gaguuccaagggaaacuca

SEQ ID NO: 172090 - RNA, 19 nt, Artificial Sequence
  Description of Artificial Sequence: Synthetic oligonucleotide
  Sense strand starting at position 2999 of SEQ ID NO: 2217
cugaguuucccuuggaacu

SEQ ID NO: 172091 - RNA, 19 nt, Artificial Sequence
  Description of Artificial Sequence: Synthetic oligonucleotide
  Antisense strand to SEQ ID NO: 172090
aguuccaagggaaacucag

SEQ ID NO: 172092 - RNA, 19 nt, Artificial Sequence
  Description of Artificial Sequence: Synthetic oligonucleotide
  Sense strand starting at position 2961 of SEQ ID NO: 2217
ugcucuggugaucaucuaa

SEQ ID NO: 172093 - RNA, 19 nt, Artificial Sequence
  Description of Artificial Sequence: Synthetic oligonucleotide
  Antisense strand to SEQ ID NO: 172092
uuagaugaucaccagagca

SEQ ID NO: 172094 - RNA, 19 nt, Artificial Sequence
  Description of Artificial Sequence: Synthetic oligonucleotide
  Sense strand starting at position 2954 of SEQ ID NO: 2217
auggaucugcucuggugau

SEQ ID NO: 172095 - RNA, 19 nt, Artificial Sequence
  Description of Artificial Sequence: Synthetic oligonucleotide
  Antisense strand to SEQ ID NO: 172094
aucaccagagcagauccau

SEQ ID NO: 172096 - RNA, 19 nt, Artificial Sequence
  Description of Artificial Sequence: Synthetic oligonucleotide
  Sense strand starting at position 2913 of SEQ ID NO: 2217
gucuguguugaugagagga

SEQ ID NO: 172097 - RNA, 19 nt, Artificial Sequence
  Description of Artificial Sequence: Synthetic oligonucleotide
  Antisense strand to SEQ ID NO: 172096
uccucucaucaacacagac

SEQ ID NO: 172098 - RNA, 19 nt, Artificial Sequence
  Description of Artificial Sequence: Synthetic oligonucleotide
  Sense strand starting at position 2910 of SEQ ID NO: 2217
acagucuguguugaugaga

SEQ ID NO: 172099 - RNA, 19 nt, Artificial Sequence
  Description of Artificial Sequence: Synthetic oligonucleotide
  Antisense strand to SEQ ID NO: 172098
ucucaucaacacagacugu

SEQ ID NO: 172100 - RNA, 19 nt, Artificial Sequence
  Description of Artificial Sequence: Synthetic oligonucleotide
  Sense strand starting at position 2906 of SEQ ID NO: 2217
agaaacagucuguguugau

SEQ ID NO: 172101 - RNA, 19 nt, Artificial Sequence
  Description of Artificial Sequence: Synthetic oligonucleotide
  Antisense strand to SEQ ID NO: 172100
aucaacacagacuguuucu

SEQ ID NO: 172102 - RNA, 19 nt, Artificial Sequence
  Description of Artificial Sequence: Synthetic oligonucleotide
  Sense strand starting at position 2905 of SEQ ID NO: 2217
gagaaacagucuguguuga

SEQ ID NO: 172103 - RNA, 19 nt, Artificial Sequence
  Description of Artificial Sequence: Synthetic oligonucleotide
  Antisense strand to SEQ ID NO: 172102
ucaacacagacuguuucuc

SEQ ID NO: 172104 - RNA, 19 nt, Artificial Sequence
  Description of Artificial Sequence: Synthetic oligonucleotide
  Sense strand starting at position 2904 of SEQ ID NO: 2217
ugagaaacagucuguguug

SEQ ID NO: 172105 - RNA, 19 nt, Artificial Sequence
  Description of Artificial Sequence: Synthetic oligonucleotide
  Antisense strand to SEQ ID NO: 172104
caacacagacuguuucuca

SEQ ID NO: 172106 - RNA, 19 nt, Artificial Sequence
  Description of Artificial Sequence: Synthetic oligonucleotide
  Sense strand starting at position 2841 of SEQ ID NO: 2217
cacaaaugcuuguugaaug

SEQ ID NO: 172107 - RNA, 19 nt, Artificial Sequence
  Description of Artificial Sequence: Synthetic oligonucleotide
  Antisense strand to SEQ ID NO: 172106
cauucaacaagcauuugug

SEQ ID NO: 172108 - RNA, 19 nt, Artificial Sequence
  Description of Artificial Sequence: Synthetic oligonucleotide
  Sense strand starting at position 2770 of SEQ ID NO: 2217
agcacuuucuacguuagaa

SEQ ID NO: 172109 - RNA, 19 nt, Artificial Sequence
  Description of Artificial Sequence: Synthetic oligonucleotide
  Antisense strand to SEQ ID NO: 172108
uucuaacguagaaagugcu

SEQ ID NO: 172110 - RNA, 19 nt, Artificial Sequence
  Description of Artificial Sequence: Synthetic oligonucleotide
  Sense strand starting at position 2726 of SEQ ID NO: 2217
cucacaggauugcuuuaau

SEQ ID NO: 172111 - RNA, 19 nt, Artificial Sequence
  Description of Artificial Sequence: Synthetic oligonucleotide
  Antisense strand to SEQ ID NO: 172110
auuaaagcaauccugugag

SEQ ID NO: 172112 - RNA, 19 nt, Artificial Sequence
  Description of Artificial Sequence: Synthetic oligonucleotide
  Sense strand starting at position 2649 of SEQ ID NO: 2217
agccgagauggaugacaaa

SEQ ID NO: 172113 - RNA, 19 nt, Artificial Sequence
  Description of Artificial Sequence: Synthetic oligonucleotide
  Antisense strand to SEQ ID NO: 172112
uuugucauccaucucggcu

SEQ ID NO: 172114 - RNA, 19 nt, Artificial Sequence
  Description of Artificial Sequence: Synthetic oligonucleotide
  Sense strand starting at position 2351 of SEQ ID NO: 2217
uggcuugaucuuugaaacc

SEQ ID NO: 172115 - RNA, 19 nt, Artificial Sequence
  Description of Artificial Sequence: Synthetic oligonucleotide
  Antisense strand to SEQ ID NO: 172114
gguuucaaagaucaagcca

SEQ ID NO: 172116 - RNA, 19 nt, Artificial Sequence
  Description of Artificial Sequence: Synthetic oligonucleotide
  Sense strand starting at position 2350 of SEQ ID NO: 2217
guggcuugaucuuugaaac

SEQ ID NO: 172117 - RNA, 19 nt, Artificial Sequence
  Description of Artificial Sequence: Synthetic oligonucleotide
  Antisense strand to SEQ ID NO: 172116
guuucaaagaucaagccac

SEQ ID NO: 172118 - RNA, 19 nt, Artificial Sequence
  Description of Artificial Sequence: Synthetic oligonucleotide
  Sense strand starting at position 2338 of SEQ ID NO: 2217
ucagaaaccuuuguggcuu

SEQ ID NO: 172119 - RNA, 19 nt, Artificial Sequence
  Description of Artificial Sequence: Synthetic oligonucleotide
  Antisense strand to SEQ ID NO: 172118
aagccacaaagguuucuga

SEQ ID NO: 172120 - RNA, 19 nt, Artificial Sequence
  Description of Artificial Sequence: Synthetic oligonucleotide
  Sense strand starting at position 2337 of SEQ ID NO: 2217
aucagaaaccuuuguggcu

SEQ ID NO: 172121 - RNA, 19 nt, Artificial Sequence
  Description of Artificial Sequence: Synthetic oligonucleotide
  Antisense strand to SEQ ID NO: 172120
agccacaaagguuucugau

SEQ ID NO: 172122 - RNA, 19 nt, Artificial Sequence
  Description of Artificial Sequence: Synthetic oligonucleotide
  Sense strand starting at position 2316 of SEQ ID NO: 2217
cugucaugcccacauagaa

SEQ ID NO: 172123 - RNA, 19 nt, Artificial Sequence
  Description of Artificial Sequence: Synthetic oligonucleotide
  Antisense strand to SEQ ID NO: 172122
uucuaugugggcaugacag

SEQ ID NO: 172124 - RNA, 19 nt, Artificial Sequence
  Description of Artificial Sequence: Synthetic oligonucleotide
  Sense strand starting at position 2235 of SEQ ID NO: 2217
uuccuugacucaguuauug

SEQ ID NO: 172125 - RNA, 19 nt, Artificial Sequence
  Description of Artificial Sequence: Synthetic oligonucleotide
  Antisense strand to SEQ ID NO: 172124
caauaacugagucaaggaa

SEQ ID NO: 172126 - RNA, 19 nt, Artificial Sequence
  Description of Artificial Sequence: Synthetic oligonucleotide
  Sense strand starting at position 2108 of SEQ ID NO: 2217
ggcauuuccacguggaugu

SEQ ID NO: 172127 - RNA, 19 nt, Artificial Sequence
  Description of Artificial Sequence: Synthetic oligonucleotide
  Antisense strand to SEQ ID NO: 172126
acauccacguggaaaugcc

SEQ ID NO: 172128 - RNA, 19 nt, Artificial Sequence
  Description of Artificial Sequence: Synthetic oligonucleotide
  Sense strand starting at position 2106 of SEQ ID NO: 2217
uuggcauuuccacguggau

SEQ ID NO: 172129 - RNA, 19 nt, Artificial Sequence
  Description of Artificial Sequence: Synthetic oligonucleotide
  Antisense strand to SEQ ID NO: 172128
auccacguggaaaugccaa

SEQ ID NO: 172130 - RNA, 19 nt, Artificial Sequence
  Description of Artificial Sequence: Synthetic oligonucleotide
  Sense strand starting at position 1507 of SEQ ID NO: 2217
uggauaucuugggcacagu

SEQ ID NO: 172131 - RNA, 19 nt, Artificial Sequence
  Description of Artificial Sequence: Synthetic oligonucleotide
  Antisense strand to SEQ ID NO: 172130
acugugcccaagauaucca

SEQ ID NO: 172132 - RNA, 19 nt, Artificial Sequence
  Description of Artificial Sequence: Synthetic oligonucleotide
  Sense strand starting at position 1505 of SEQ ID NO: 2217
ucuggauaucuugggcaca

SEQ ID NO: 172133 - RNA, 19 nt, Artificial Sequence
  Description of Artificial Sequence: Synthetic oligonucleotide
  Antisense strand to SEQ ID NO: 172132
ugugcccaagauauccaga

SEQ ID NO: 172134 - RNA, 19 nt, Artificial Sequence
  Description of Artificial Sequence: Synthetic oligonucleotide
  Sense strand starting at position 1259 of SEQ ID NO: 2217
uuagucuacucaucuguaa

SEQ ID NO: 172135 - RNA, 19 nt, Artificial Sequence
  Description of Artificial Sequence: Synthetic oligonucleotide
  Antisense strand to SEQ ID NO: 172134
uuacagaugaguagacuaa

SEQ ID NO: 172136 - RNA, 19 nt, Artificial Sequence
  Description of Artificial Sequence: Synthetic oligonucleotide
  Sense strand starting at position 1172 of SEQ ID NO: 2217
gagucuuggguacagacua

SEQ ID NO: 172137 - RNA, 19 nt, Artificial Sequence
  Description of Artificial Sequence: Synthetic oligonucleotide
  Antisense strand to SEQ ID NO: 172136
uagucuguacccaagacuc

SEQ ID NO: 172138 - RNA, 19 nt, Artificial Sequence
  Description of Artificial Sequence: Synthetic oligonucleotide
  Sense strand starting at position 1100 of SEQ ID NO: 2217
aggcaaaccugcucuccau

SEQ ID NO: 172139 - RNA, 19 nt, Artificial Sequence
  Description of Artificial Sequence: Synthetic oligonucleotide
  Antisense strand to SEQ ID NO: 172138
auggagagcagguuugccu

SEQ ID NO: 172140 - RNA, 19 nt, Artificial Sequence
  Description of Artificial Sequence: Synthetic oligonucleotide
  Sense strand starting at position 1035 of SEQ ID NO: 2217
ucaggaaaucuaugcaacu

SEQ ID NO: 172141 - RNA, 19 nt, Artificial Sequence
  Description of Artificial Sequence: Synthetic oligonucleotide
  Antisense strand to SEQ ID NO: 172140
aguugcauagauuuccuga

SEQ ID NO: 172142 - RNA, 19 nt, Artificial Sequence
  Description of Artificial Sequence: Synthetic oligonucleotide
  Sense strand starting at position 809 of SEQ ID NO: 2217
cuguguuuacuagggagag

SEQ ID NO: 172143 - RNA, 19 nt, Artificial Sequence
  Description of Artificial Sequence: Synthetic oligonucleotide
  Antisense strand to SEQ ID NO: 172142
cucucccuaguaaacacag

SEQ ID NO: 172144 - RNA, 19 nt, Artificial Sequence
  Description of Artificial Sequence: Synthetic oligonucleotide
  Sense strand starting at position 770 of SEQ ID NO: 2217
gcuaguaaccgccagggau

SEQ ID NO: 172145 - RNA, 19 nt, Artificial Sequence
  Description of Artificial Sequence: Synthetic oligonucleotide
  Antisense strand to SEQ ID NO: 172144
aucccuggcgguuacuagc

SEQ ID NO: 172146 - RNA, 19 nt, Artificial Sequence
  Description of Artificial Sequence: Synthetic oligonucleotide
  Sense strand starting at position 444 of SEQ ID NO: 2217
guggaucuagcaggaauaa

SEQ ID NO: 172147 - RNA, 19 nt, Artificial Sequence
  Description of Artificial Sequence: Synthetic oligonucleotide
  Antisense strand to SEQ ID NO: 172146
uuauuccugcuagauccac

SEQ ID NO: 172148 - RNA, 19 nt, Artificial Sequence
  Description of Artificial Sequence: Synthetic oligonucleotide
  Sense strand starting at position 409 of SEQ ID NO: 2217
gaaguaauugaaggcacaa

SEQ ID NO: 172149 - RNA, 19 nt, Artificial Sequence
  Description of Artificial Sequence: Synthetic oligonucleotide
  Antisense strand to SEQ ID NO: 172148
uugugccuucaauuacuuc

SEQ ID NO: 172150 - RNA, 19 nt, Artificial Sequence
  Description of Artificial Sequence: Synthetic oligonucleotide
  Sense strand starting at position 305 of SEQ ID NO: 2217
ucaacugauccacgcaaau

SEQ ID NO: 172151 - RNA, 19 nt, Artificial Sequence
  Description of Artificial Sequence: Synthetic oligonucleotide
  Antisense strand to SEQ ID NO: 172150
auuugcguggaucaguuga

SEQ ID NO: 172152 - RNA, 19 nt, Artificial Sequence
  Description of Artificial Sequence: Synthetic oligonucleotide
  Sense strand starting at position 3939 of SEQ ID NO: 2219
augugucuggcaggaagau

SEQ ID NO: 172153 - RNA, 19 nt, Artificial Sequence
  Description of Artificial Sequence: Synthetic oligonucleotide
  Antisense strand to SEQ ID NO: 172152
aucuuccugccagacacau

SEQ ID NO: 172154 - RNA, 19 nt, Artificial Sequence
  Description of Artificial Sequence: Synthetic oligonucleotide
  Sense strand starting at position 3880 of SEQ ID NO: 2219
cugagacuguuuccacaaa

SEQ ID NO: 172155 - RNA, 19 nt, Artificial Sequence
  Description of Artificial Sequence: Synthetic oligonucleotide
  Antisense strand to SEQ ID NO: 172154
uuuguggaaacagucucag

SEQ ID NO: 172156 - RNA, 19 nt, Artificial Sequence
  Description of Artificial Sequence: Synthetic oligonucleotide
  Sense strand starting at position 3878 of SEQ ID NO: 2219
cgcugagacuguuuccaca

SEQ ID NO: 172157 - RNA, 19 nt, Artificial Sequence
  Description of Artificial Sequence: Synthetic oligonucleotide
  Antisense strand to SEQ ID NO: 172156
uguggaaacagucucagcg

SEQ ID NO: 172158 - RNA, 19 nt, Artificial Sequence
  Description of Artificial Sequence: Synthetic oligonucleotide
  Sense strand starting at position 3825 of SEQ ID NO: 2219
gcgugagacucacuuccau

SEQ ID NO: 172159 - RNA, 19 nt, Artificial Sequence
  Description of Artificial Sequence: Synthetic oligonucleotide
  Antisense strand to SEQ ID NO: 172158
auggaagugagucucacgc

SEQ ID NO: 172160 - RNA, 19 nt, Artificial Sequence
  Description of Artificial Sequence: Synthetic oligonucleotide
  Sense strand starting at position 3715 of SEQ ID NO: 2219
ugagacguguucccaaauc

SEQ ID NO: 172161 - RNA, 19 nt, Artificial Sequence
  Description of Artificial Sequence: Synthetic oligonucleotide
  Antisense strand to SEQ ID NO: 172160
gauuugggaacacgucuca

SEQ ID NO: 172162 - RNA, 19 nt, Artificial Sequence
  Description of Artificial Sequence: Synthetic oligonucleotide
  Sense strand starting at position 3704 of SEQ ID NO: 2219
gucuuuauacaugagacgu

SEQ ID NO: 172163 - RNA, 19 nt, Artificial Sequence
  Description of Artificial Sequence: Synthetic oligonucleotide
  Antisense strand to SEQ ID NO: 172162
acgucucauguauaaagac

SEQ ID NO: 172164 - RNA, 19 nt, Artificial Sequence
  Description of Artificial Sequence: Synthetic oligonucleotide
  Sense strand starting at position 3703 of SEQ ID NO: 2219
cgucuuuauacaugagacg

SEQ ID NO: 172165 - RNA, 19 nt, Artificial Sequence
  Description of Artificial Sequence: Synthetic oligonucleotide
  Antisense strand to SEQ ID NO: 172164
cgucucauguauaaagacg

SEQ ID NO: 172166 - RNA, 19 nt, Artificial Sequence
  Description of Artificial Sequence: Synthetic oligonucleotide
  Sense strand starting at position 3697 of SEQ ID NO: 2219
ccugcucgucuuuauacau

SEQ ID NO: 172167 - RNA, 19 nt, Artificial Sequence
  Description of Artificial Sequence: Synthetic oligonucleotide
  Antisense strand to SEQ ID NO: 172166
auguauaaagacgagcagg

SEQ ID NO: 172168 - RNA, 19 nt, Artificial Sequence
  Description of Artificial Sequence: Synthetic oligonucleotide
  Sense strand starting at position 3530 of SEQ ID NO: 2219
agguuauagcuccacucca

SEQ ID NO: 172169 - RNA, 19 nt, Artificial Sequence
  Description of Artificial Sequence: Synthetic oligonucleotide
  Antisense strand to SEQ ID NO: 172168
uggaguggagcuauaaccu

SEQ ID NO: 172170 - RNA, 19 nt, Artificial Sequence
  Description of Artificial Sequence: Synthetic oligonucleotide
  Sense strand starting at position 3519 of SEQ ID NO: 2219
ucccuaauggaagguuaua

SEQ ID NO: 172171 - RNA, 19 nt, Artificial Sequence
  Description of Artificial Sequence: Synthetic oligonucleotide
  Antisense strand to SEQ ID NO: 172170
uauaaccuuccauuaggga

SEQ ID NO: 172172 - RNA, 19 nt, Artificial Sequence
  Description of Artificial Sequence: Synthetic oligonucleotide
  Sense strand starting at position 3438 of SEQ ID NO: 2219
cagaaagaguuuccugcaa

SEQ ID NO: 172173 - RNA, 19 nt, Artificial Sequence
  Description of Artificial Sequence: Synthetic oligonucleotide
  Antisense strand to SEQ ID NO: 172172
uugcaggaaacucuuucug

SEQ ID NO: 172174 - RNA, 19 nt, Artificial Sequence
  Description of Artificial Sequence: Synthetic oligonucleotide
  Sense strand starting at position 3377 of SEQ ID NO: 2219
ggguucacucugcauggua

SEQ ID NO: 172175 - RNA, 19 nt, Artificial Sequence
  Description of Artificial Sequence: Synthetic oligonucleotide
  Antisense strand to SEQ ID NO: 172174
uaccaugcagagugaaccc

SEQ ID NO: 172176 - RNA, 19 nt, Artificial Sequence
  Description of Artificial Sequence: Synthetic oligonucleotide
  Sense strand starting at position 2600 of SEQ ID NO: 2219
acagcuuggucuucucaua

SEQ ID NO: 172177 - RNA, 19 nt, Artificial Sequence
  Description of Artificial Sequence: Synthetic oligonucleotide
  Antisense strand to SEQ ID NO: 172176
uaugagaagaccaagcugu

SEQ ID NO: 172178 - RNA, 19 nt, Artificial Sequence
  Description of Artificial Sequence: Synthetic oligonucleotide
  Sense strand starting at position 2539 of SEQ ID NO: 2219
ucauuuagcugccaugaaa

SEQ ID NO: 172179 - RNA, 19 nt, Artificial Sequence
  Description of Artificial Sequence: Synthetic oligonucleotide
  Antisense strand to SEQ ID NO: 172178
uuucauggcagcuaaauga

SEQ ID NO: 172180 - RNA, 19 nt, Artificial Sequence
  Description of Artificial Sequence: Synthetic oligonucleotide
  Sense strand starting at position 2393 of SEQ ID NO: 2219
aaggguuauuuguaaauag

SEQ ID NO: 172181 - RNA, 19 nt, Artificial Sequence
  Description of Artificial Sequence: Synthetic oligonucleotide
  Antisense strand to SEQ ID NO: 172180
cuauuuacaaauaacccuu

SEQ ID NO: 172182 - RNA, 19 nt, Artificial Sequence
  Description of Artificial Sequence: Synthetic oligonucleotide
  Sense strand starting at position 2347 of SEQ ID NO: 2219
acuggaucuugacuuuaua

SEQ ID NO: 172183 - RNA, 19 nt, Artificial Sequence
  Description of Artificial Sequence: Synthetic oligonucleotide
  Antisense strand to SEQ ID NO: 172182
uauaaagucaagauccagu

SEQ ID NO: 172184 - RNA, 19 nt, Artificial Sequence
  Description of Artificial Sequence: Synthetic oligonucleotide
  Sense strand starting at position 2224 of SEQ ID NO: 2219
ugugaagaagccuggcaaa

SEQ ID NO: 172185 - RNA, 19 nt, Artificial Sequence
  Description of Artificial Sequence: Synthetic oligonucleotide
  Antisense strand to SEQ ID NO: 172184
uuugccaggcuucuucaca

SEQ ID NO: 172186 - RNA, 19 nt, Artificial Sequence
  Description of Artificial Sequence: Synthetic oligonucleotide
  Sense strand starting at position 2194 of SEQ ID NO: 2219
acauuugugguuggcugau

SEQ ID NO: 172187 - RNA, 19 nt, Artificial Sequence
  Description of Artificial Sequence: Synthetic oligonucleotide
  Antisense strand to SEQ ID NO: 172186
aucagccaaccacaaaugu

SEQ ID NO: 172188 - RNA, 19 nt, Artificial Sequence
  Description of Artificial Sequence: Synthetic oligonucleotide
  Sense strand starting at position 2193 of SEQ ID NO: 2219
aacauuugugguuggcuga

SEQ ID NO: 172189 - RNA, 19 nt, Artificial Sequence
  Description of Artificial Sequence: Synthetic oligonucleotide
  Antisense strand to SEQ ID NO: 172188
ucagccaaccacaaauguu

SEQ ID NO: 172190 - RNA, 19 nt, Artificial Sequence
  Description of Artificial Sequence: Synthetic oligonucleotide
  Sense strand starting at position 2103 of SEQ ID NO: 2219
gugcuaucucugggagcca

SEQ ID NO: 172191 - RNA, 19 nt, Artificial Sequence
  Description of Artificial Sequence: Synthetic oligonucleotide
  Antisense strand to SEQ ID NO: 172190
uggcucccagagauagcac

SEQ ID NO: 172192 - RNA, 19 nt, Artificial Sequence
  Description of Artificial Sequence: Synthetic oligonucleotide
  Sense strand starting at position 2074 of SEQ ID NO: 2219
ucaagaaggugugaagaga

SEQ ID NO: 172193 - RNA, 19 nt, Artificial Sequence
  Description of Artificial Sequence: Synthetic oligonucleotide
  Antisense strand to SEQ ID NO: 172192
ucucuucacaccuucuuga

SEQ ID NO: 172194 - RNA, 19 nt, Artificial Sequence
  Description of Artificial Sequence: Synthetic oligonucleotide
  Sense strand starting at position 2054 of SEQ ID NO: 2219
uugauuggguagucccaaa

SEQ ID NO: 172195 - RNA, 19 nt, Artificial Sequence
  Description of Artificial Sequence: Synthetic oligonucleotide
  Antisense strand to SEQ ID NO: 172194
uuugggacuacccaaucaa

SEQ ID NO: 172196 - RNA, 19 nt, Artificial Sequence
  Description of Artificial Sequence: Synthetic oligonucleotide
  Sense strand starting at position 2010 of SEQ ID NO: 2219
ugaggaacuccaggcuuaa

SEQ ID NO: 172197 - RNA, 19 nt, Artificial Sequence
  Description of Artificial Sequence: Synthetic oligonucleotide
  Antisense strand to SEQ ID NO: 172196
uuaagccuggaguuccuca

SEQ ID NO: 172198 - RNA, 19 nt, Artificial Sequence
  Description of Artificial Sequence: Synthetic oligonucleotide
  Sense strand starting at position 1733 of SEQ ID NO: 2219
ccagcauugcccuggcaaa

SEQ ID NO: 172199 - RNA, 19 nt, Artificial Sequence
  Description of Artificial Sequence: Synthetic oligonucleotide
  Antisense strand to SEQ ID NO: 172198
uuugccagggcaaugcugg

SEQ ID NO: 172200 - RNA, 19 nt, Artificial Sequence
  Description of Artificial Sequence: Synthetic oligonucleotide
  Sense strand starting at position 1651 of SEQ ID NO: 2219
cugagauccugucccagaa

SEQ ID NO: 172201 - RNA, 19 nt, Artificial Sequence
  Description of Artificial Sequence: Synthetic oligonucleotide
  Antisense strand to SEQ ID NO: 172200
uucugggacaggaucucag

SEQ ID NO: 172202 - RNA, 19 nt, Artificial Sequence
  Description of Artificial Sequence: Synthetic oligonucleotide
  Sense strand starting at position 1640 of SEQ ID NO: 2219
auucuucugcccugagauc

SEQ ID NO: 172203 - RNA, 19 nt, Artificial Sequence
  Description of Artificial Sequence: Synthetic oligonucleotide
  Antisense strand to SEQ ID NO: 172202
gaucucagggcagaagaau

SEQ ID NO: 172204 - RNA, 19 nt, Artificial Sequence
  Description of Artificial Sequence: Synthetic oligonucleotide
  Sense strand starting at position 1636 of SEQ ID NO: 2219
gggaauucuucugcccuga

SEQ ID NO: 172205 - RNA, 19 nt, Artificial Sequence
  Description of Artificial Sequence: Synthetic oligonucleotide
  Antisense strand to SEQ ID NO: 172204
ucagggcagaagaauuccc

SEQ ID NO: 172206 - RNA, 19 nt, Artificial Sequence
  Description of Artificial Sequence: Synthetic oligonucleotide
  Sense strand starting at position 1389 of SEQ ID NO: 2219
auggauucggaauggaagu

SEQ ID NO: 172207 - RNA, 19 nt, Artificial Sequence
  Description of Artificial Sequence: Synthetic oligonucleotide
  Antisense strand to SEQ ID NO: 172206
acuuccauuccgaauccau

SEQ ID NO: 172208 - RNA, 19 nt, Artificial Sequence
  Description of Artificial Sequence: Synthetic oligonucleotide
  Sense strand starting at position 1384 of SEQ ID NO: 2219
gucucauggauucggaaug

SEQ ID NO: 172209 - RNA, 19 nt, Artificial Sequence
  Description of Artificial Sequence: Synthetic oligonucleotide
  Antisense strand to SEQ ID NO: 172208
cauuccgaauccaugagac

SEQ ID NO: 172210 - RNA, 19 nt, Artificial Sequence
  Description of Artificial Sequence: Synthetic oligonucleotide
  Sense strand starting at position 1196 of SEQ ID NO: 2219
aggugugacaggcaucaau

SEQ ID NO: 172211 - RNA, 19 nt, Artificial Sequence
  Description of Artificial Sequence: Synthetic oligonucleotide
  Antisense strand to SEQ ID NO: 172210
auugaugccugucacaccu

SEQ ID NO: 172212 - RNA, 19 nt, Artificial Sequence
  Description of Artificial Sequence: Synthetic oligonucleotide
  Sense strand starting at position 1171 of SEQ ID NO: 2219
gugaguugugugcauaagg

SEQ ID NO: 172213 - RNA, 19 nt, Artificial Sequence
  Description of Artificial Sequence: Synthetic oligonucleotide
  Antisense strand to SEQ ID NO: 172212
ccuuaugcacacaacucac

SEQ ID NO: 172214 - RNA, 19 nt, Artificial Sequence
  Description of Artificial Sequence: Synthetic oligonucleotide
  Sense strand starting at position 1031 of SEQ ID NO: 2219
cggauugcucuaggagauu

SEQ ID NO: 172215 - RNA, 19 nt, Artificial Sequence
  Description of Artificial Sequence: Synthetic oligonucleotide
  Antisense strand to SEQ ID NO: 172214
aaucuccuagagcaauccg

SEQ ID NO: 172216 - RNA, 19 nt, Artificial Sequence
  Description of Artificial Sequence: Synthetic oligonucleotide
  Sense strand starting at position 1029 of SEQ ID NO: 2219
ggcggauugcucuaggaga

SEQ ID NO: 172217 - RNA, 19 nt, Artificial Sequence
  Description of Artificial Sequence: Synthetic oligonucleotide
  Antisense strand to SEQ ID NO: 172216
ucuccuagagcaauccgcc

SEQ ID NO: 172218 - RNA, 19 nt, Artificial Sequence
  Description of Artificial Sequence: Synthetic oligonucleotide
  Sense strand starting at position 798 of SEQ ID NO: 2219
cggugaaauucucuccuuc

SEQ ID NO: 172219 - RNA, 19 nt, Artificial Sequence
  Description of Artificial Sequence: Synthetic oligonucleotide
  Antisense strand to SEQ ID NO: 172218
gaaggagagaauuucaccg

SEQ ID NO: 172220 - RNA, 19 nt, Artificial Sequence
  Description of Artificial Sequence: Synthetic oligonucleotide
  Sense strand starting at position 707 of SEQ ID NO: 2219
aggagagcucccugagaga

SEQ ID NO: 172221 - RNA, 19 nt, Artificial Sequence
  Description of Artificial Sequence: Synthetic oligonucleotide
  Antisense strand to SEQ ID NO: 172220
ucucucagggagcucuccu

SEQ ID NO: 172222 - RNA, 19 nt, Artificial Sequence
  Description of Artificial Sequence: Synthetic oligonucleotide
  Sense strand starting at position 692 of SEQ ID NO: 2219
guucucuauaccuggagga

SEQ ID NO: 172223 - RNA, 19 nt, Artificial Sequence
  Description of Artificial Sequence: Synthetic oligonucleotide
  Antisense strand to SEQ ID NO: 172222
uccuccagguauagagaac

SEQ ID NO: 172224 - RNA, 19 nt, Artificial Sequence
  Description of Artificial Sequence: Synthetic oligonucleotide
  Sense strand starting at position 346 of SEQ ID NO: 2219
ggucuucuccauuguccau

SEQ ID NO: 172225 - RNA, 19 nt, Artificial Sequence
  Description of Artificial Sequence: Synthetic oligonucleotide
  Antisense strand to SEQ ID NO: 172224
auggacaauggagaagacc

SEQ ID NO: 172226 - RNA, 19 nt, Artificial Sequence
  Description of Artificial Sequence: Synthetic oligonucleotide
  Sense strand starting at position 233 of SEQ ID NO: 2219
gugucugcccuguggagaa

SEQ ID NO: 172227 - RNA, 19 nt, Artificial Sequence
  Description of Artificial Sequence: Synthetic oligonucleotide
  Antisense strand to SEQ ID NO: 172226
uucuccacagggcagacac

SEQ ID NO: 172228 - RNA, 19 nt, Artificial Sequence
  Description of Artificial Sequence: Synthetic oligonucleotide
  Sense strand starting at position 38 of SEQ ID NO: 2219
ugccuauuaucagcugaca

SEQ ID NO: 172229 - RNA, 19 nt, Artificial Sequence
  Description of Artificial Sequence: Synthetic oligonucleotide
  Antisense strand to SEQ ID NO: 172228
ugucagcugauaauaggca

SEQ ID NO: 172230 - RNA, 19 nt, Artificial Sequence
  Description of Artificial Sequence: Synthetic oligonucleotide
  Sense strand starting at position 30 of SEQ ID NO: 2219
gagccagcugccuauuauc

SEQ ID NO: 172231 - RNA, 19 nt, Artificial Sequence
  Description of Artificial Sequence: Synthetic oligonucleotide
  Antisense strand to SEQ ID NO: 172230
gauaauaggcagcuggcuc

SEQ ID NO: 172232 - RNA, 19 nt, Artificial Sequence
  Description of Artificial Sequence: Synthetic oligonucleotide
  Sense strand starting at position 3975 of SEQ ID NO: 2218
cugaauuauuuggaaguag

SEQ ID NO: 172233 - RNA, 19 nt, Artificial Sequence
  Description of Artificial Sequence: Synthetic oligonucleotide
  Antisense strand to SEQ ID NO: 172232
cuacuuccaaauaauucag

SEQ ID NO: 172234 - RNA, 19 nt, Artificial Sequence
  Description of Artificial Sequence: Synthetic oligonucleotide
  Sense strand starting at position 3974 of SEQ ID NO: 2218
ucugaauuauuuggaagua

SEQ ID NO: 172235 - RNA, 19 nt, Artificial Sequence
  Description of Artificial Sequence: Synthetic oligonucleotide
  Antisense strand to SEQ ID NO: 172234
uacuuccaaauaauucaga

SEQ ID NO: 172236 - RNA, 19 nt, Artificial Sequence
  Description of Artificial Sequence: Synthetic oligonucleotide
  Sense strand starting at position 3879 of SEQ ID NO: 2218
caggcucuauggccagaua

SEQ ID NO: 172237 - RNA, 19 nt, Artificial Sequence
  Description of Artificial Sequence: Synthetic oligonucleotide
  Antisense strand to SEQ ID NO: 172236
uaucuggccauagagccug

SEQ ID NO: 172238 - RNA, 19 nt, Artificial Sequence
  Description of Artificial Sequence: Synthetic oligonucleotide
  Sense strand starting at position 3799 of SEQ ID NO: 2218
gucugugguguguuucaua

SEQ ID NO: 172239 - RNA, 19 nt, Artificial Sequence
  Description of Artificial Sequence: Synthetic oligonucleotide
  Antisense strand to SEQ ID NO: 172238
uaugaaacacaccacagac

SEQ ID NO: 172240 - RNA, 19 nt, Artificial Sequence
  Description of Artificial Sequence: Synthetic oligonucleotide
  Sense strand starting at position 3752 of SEQ ID NO: 2218
ucuacuugucgucauauuu

SEQ ID NO: 172241 - RNA, 19 nt, Artificial Sequence
  Description of Artificial Sequence: Synthetic oligonucleotide
  Antisense strand to SEQ ID NO: 172240
aaauaugacgacaaguaga

SEQ ID NO: 172242 - RNA, 19 nt, Artificial Sequence
  Description of Artificial Sequence: Synthetic oligonucleotide
  Sense strand starting at position 3642 of SEQ ID NO: 2218
agcagagagcauuauaauu

SEQ ID NO: 172243 - RNA, 19 nt, Artificial Sequence
  Description of Artificial Sequence: Synthetic oligonucleotide
  Antisense strand to SEQ ID NO: 172242
aauuauaaugcucucugcu

SEQ ID NO: 172244 - RNA, 19 nt, Artificial Sequence
  Description of Artificial Sequence: Synthetic oligonucleotide
  Sense strand starting at position 3624 of SEQ ID NO: 2218
uuugguuucguuuaaggaa

SEQ ID NO: 172245 - RNA, 19 nt, Artificial Sequence
  Description of Artificial Sequence: Synthetic oligonucleotide
  Antisense strand to SEQ ID NO: 172244
uuccuuaaacgaaaccaaa

SEQ ID NO: 172246 - RNA, 19 nt, Artificial Sequence
  Description of Artificial Sequence: Synthetic oligonucleotide
  Sense strand starting at position 3621 of SEQ ID NO: 2218
ggauuugguuucguuuaag

SEQ ID NO: 172247 - RNA, 19 nt, Artificial Sequence
  Description of Artificial Sequence: Synthetic oligonucleotide
  Antisense strand to SEQ ID NO: 172246
cuuaaacgaaaccaaaucc

SEQ ID NO: 172248 - RNA, 19 nt, Artificial Sequence
  Description of Artificial Sequence: Synthetic oligonucleotide
  Sense strand starting at position 3547 of SEQ ID NO: 2218
gugagcaugcauugacaca

SEQ ID NO: 172249 - RNA, 19 nt, Artificial Sequence
  Description of Artificial Sequence: Synthetic oligonucleotide
  Antisense strand to SEQ ID NO: 172248
ugugucaaugcaugcucac

SEQ ID NO: 172250 - RNA, 19 nt, Artificial Sequence
  Description of Artificial Sequence: Synthetic oligonucleotide
  Sense strand starting at position 3471 of SEQ ID NO: 2218
ugacuuggcccagauaagu

SEQ ID NO: 172251 - RNA, 19 nt, Artificial Sequence
  Description of Artificial Sequence: Synthetic oligonucleotide
  Antisense strand to SEQ ID NO: 172250
acuuaucugggccaaguca

SEQ ID NO: 172252 - RNA, 19 nt, Artificial Sequence
  Description of Artificial Sequence: Synthetic oligonucleotide
  Sense strand starting at position 3469 of SEQ ID NO: 2218
ccugacuuggcccagauaa

SEQ ID NO: 172253 - RNA, 19 nt, Artificial Sequence
  Description of Artificial Sequence: Synthetic oligonucleotide
  Antisense strand to SEQ ID NO: 172252
uuaucugggccaagucagg

SEQ ID NO: 172254 - RNA, 19 nt, Artificial Sequence
  Description of Artificial Sequence: Synthetic oligonucleotide
  Sense strand starting at position 3156 of SEQ ID NO: 2218
uuuaauguguauccuagaa

SEQ ID NO: 172255 - RNA, 19 nt, Artificial Sequence
  Description of Artificial Sequence: Synthetic oligonucleotide
  Antisense strand to SEQ ID NO: 172254
uucuaggauacacauuaaa

SEQ ID NO: 172256 - RNA, 19 nt, Artificial Sequence
  Description of Artificial Sequence: Synthetic oligonucleotide
  Sense strand starting at position 2869 of SEQ ID NO: 2218
acgggaacuugauagaaau

SEQ ID NO: 172257 - RNA, 19 nt, Artificial Sequence
  Description of Artificial Sequence: Synthetic oligonucleotide
  Antisense strand to SEQ ID NO: 172256
auuucuaucaaguucccgu

SEQ ID NO: 172258 - RNA, 19 nt, Artificial Sequence
  Description of Artificial Sequence: Synthetic oligonucleotide
  Sense strand starting at position 2834 of SEQ ID NO: 2218
aauugugauccuuggacua

SEQ ID NO: 172259 - RNA, 19 nt, Artificial Sequence
  Description of Artificial Sequence: Synthetic oligonucleotide
  Antisense strand to SEQ ID NO: 172258
uaguccaaggaucacaauu

SEQ ID NO: 172260 - RNA, 19 nt, Artificial Sequence
  Description of Artificial Sequence: Synthetic oligonucleotide
  Sense strand starting at position 2685 of SEQ ID NO: 2218
ugugcugaguaaucuggaa

SEQ ID NO: 172261 - RNA, 19 nt, Artificial Sequence
  Description of Artificial Sequence: Synthetic oligonucleotide
  Antisense strand to SEQ ID NO: 172260
uuccagauuacucagcaca

SEQ ID NO: 172262 - RNA, 19 nt, Artificial Sequence
  Description of Artificial Sequence: Synthetic oligonucleotide
  Sense strand starting at position 2679 of SEQ ID NO: 2218
ccaaacugugcugaguaau

SEQ ID NO: 172263 - RNA, 19 nt, Artificial Sequence
  Description of Artificial Sequence: Synthetic oligonucleotide
  Antisense strand to SEQ ID NO: 172262
auuacucagcacaguuugg

SEQ ID NO: 172264 - RNA, 19 nt, Artificial Sequence
  Description of Artificial Sequence: Synthetic oligonucleotide
  Sense strand starting at position 2646 of SEQ ID NO: 2218
agggaaugcugucucucuu

SEQ ID NO: 172265 - RNA, 19 nt, Artificial Sequence
  Description of Artificial Sequence: Synthetic oligonucleotide
  Antisense strand to SEQ ID NO: 172264
aagagagacagcauucccu

SEQ ID NO: 172266 - RNA, 19 nt, Artificial Sequence
  Description of Artificial Sequence: Synthetic oligonucleotide
  Sense strand starting at position 2629 of SEQ ID NO: 2218
cauauagauguguggaaag

SEQ ID NO: 172267 - RNA, 19 nt, Artificial Sequence
  Description of Artificial Sequence: Synthetic oligonucleotide
  Antisense strand to SEQ ID NO: 172266
cuuuccacacaucuauaug

SEQ ID NO: 172268 - RNA, 19 nt, Artificial Sequence
  Description of Artificial Sequence: Synthetic oligonucleotide
  Sense strand starting at position 2628 of SEQ ID NO: 2218
acauauagauguguggaaa

SEQ ID NO: 172269 - RNA, 19 nt, Artificial Sequence
  Description of Artificial Sequence: Synthetic oligonucleotide
  Antisense strand to SEQ ID NO: 172268
uuuccacacaucuauaugu

SEQ ID NO: 172270 - RNA, 19 nt, Artificial Sequence
  Description of Artificial Sequence: Synthetic oligonucleotide
  Sense strand starting at position 2621 of SEQ ID NO: 2218
gguugcuacauauagaugu

SEQ ID NO: 172271 - RNA, 19 nt, Artificial Sequence
  Description of Artificial Sequence: Synthetic oligonucleotide
  Antisense strand to SEQ ID NO: 172270
acaucuauauguagcaacc

SEQ ID NO: 172272 - RNA, 19 nt, Artificial Sequence
  Description of Artificial Sequence: Synthetic oligonucleotide
  Sense strand starting at position 2606 of SEQ ID NO: 2218
guauuaauggcaggagguu

SEQ ID NO: 172273 - RNA, 19 nt, Artificial Sequence
  Description of Artificial Sequence: Synthetic oligonucleotide
  Antisense strand to SEQ ID NO: 172272
aaccuccugccauuaauac

SEQ ID NO: 172274 - RNA, 19 nt, Artificial Sequence
  Description of Artificial Sequence: Synthetic oligonucleotide
  Sense strand starting at position 2560 of SEQ ID NO: 2218
gugagaguuccuuacaaac

SEQ ID NO: 172275 - RNA, 19 nt, Artificial Sequence
  Description of Artificial Sequence: Synthetic oligonucleotide
  Antisense strand to SEQ ID NO: 172274
guuuguaaggaacucucac

SEQ ID NO: 172276 - RNA, 19 nt, Artificial Sequence
  Description of Artificial Sequence: Synthetic oligonucleotide
  Sense strand starting at position 2558 of SEQ ID NO: 2218
augugagaguuccuuacaa

SEQ ID NO: 172277 - RNA, 19 nt, Artificial Sequence
  Description of Artificial Sequence: Synthetic oligonucleotide
  Antisense strand to SEQ ID NO: 172276
uuguaaggaacucucacau

SEQ ID NO: 172278 - RNA, 19 nt, Artificial Sequence
  Description of Artificial Sequence: Synthetic oligonucleotide
  Sense strand starting at position 2549 of SEQ ID NO: 2218
caauaacguaugugagagu

SEQ ID NO: 172279 - RNA, 19 nt, Artificial Sequence
  Description of Artificial Sequence: Synthetic oligonucleotide
  Antisense strand to SEQ ID NO: 172278
acucucacauacguuauug

SEQ ID NO: 172280 - RNA, 19 nt, Artificial Sequence
  Description of Artificial Sequence: Synthetic oligonucleotide
  Sense strand starting at position 2547 of SEQ ID NO: 2218
cacaauaacguaugugaga

SEQ ID NO: 172281 - RNA, 19 nt, Artificial Sequence
  Description of Artificial Sequence: Synthetic oligonucleotide
  Antisense strand to SEQ ID NO: 172280
ucucacauacguuauugug

SEQ ID NO: 172282 - RNA, 19 nt, Artificial Sequence
  Description of Artificial Sequence: Synthetic oligonucleotide
  Sense strand starting at position 2516 of SEQ ID NO: 2218
cucagaaauugggaagaau

SEQ ID NO: 172283 - RNA, 19 nt, Artificial Sequence
  Description of Artificial Sequence: Synthetic oligonucleotide
  Antisense strand to SEQ ID NO: 172282
auucuucccaauuucugag

SEQ ID NO: 172284 - RNA, 19 nt, Artificial Sequence
  Description of Artificial Sequence: Synthetic oligonucleotide
  Sense strand starting at position 2492 of SEQ ID NO: 2218
agacuuuacuuggcauaau

SEQ ID NO: 172285 - RNA, 19 nt, Artificial Sequence
  Description of Artificial Sequence: Synthetic oligonucleotide
  Antisense strand to SEQ ID NO: 172284
auuaugccaaguaaagucu

SEQ ID NO: 172286 - RNA, 19 nt, Artificial Sequence
  Description of Artificial Sequence: Synthetic oligonucleotide
  Sense strand starting at position 2489 of SEQ ID NO: 2218
augagacuuuacuuggcau

SEQ ID NO: 172287 - RNA, 19 nt, Artificial Sequence
  Description of Artificial Sequence: Synthetic oligonucleotide
  Antisense strand to SEQ ID NO: 172286
augccaaguaaagucucau

SEQ ID NO: 172288 - RNA, 19 nt, Artificial Sequence
  Description of Artificial Sequence: Synthetic oligonucleotide
  Sense strand starting at position 2475 of SEQ ID NO: 2218
ugcauuauuucuuaaugag

SEQ ID NO: 172289 - RNA, 19 nt, Artificial Sequence
  Description of Artificial Sequence: Synthetic oligonucleotide
  Antisense strand to SEQ ID NO: 172288
cucauuaagaaauaaugca

SEQ ID NO: 172290 - RNA, 19 nt, Artificial Sequence
  Description of Artificial Sequence: Synthetic oligonucleotide
  Sense strand starting at position 2377 of SEQ ID NO: 2218
ggauacuuggucugaguua

SEQ ID NO: 172291 - RNA, 19 nt, Artificial Sequence
  Description of Artificial Sequence: Synthetic oligonucleotide
  Antisense strand to SEQ ID NO: 172290
uaacucagaccaaguaucc

SEQ ID NO: 172292 - RNA, 19 nt, Artificial Sequence
  Description of Artificial Sequence: Synthetic oligonucleotide
  Sense strand starting at position 2375 of SEQ ID NO: 2218
uaggauacuuggucugagu

SEQ ID NO: 172293 - RNA, 19 nt, Artificial Sequence
  Description of Artificial Sequence: Synthetic oligonucleotide
  Antisense strand to SEQ ID NO: 172292
acucagaccaaguauccua

SEQ ID NO: 172294 - RNA, 19 nt, Artificial Sequence
  Description of Artificial Sequence: Synthetic oligonucleotide
  Sense strand starting at position 2297 of SEQ ID NO: 2218
gagggauguuuauuaucac

SEQ ID NO: 172295 - RNA, 19 nt, Artificial Sequence
  Description of Artificial Sequence: Synthetic oligonucleotide
  Antisense strand to SEQ ID NO: 172294
gugauaauaaacaucccuc

SEQ ID NO: 172296 - RNA, 19 nt, Artificial Sequence
  Description of Artificial Sequence: Synthetic oligonucleotide
  Sense strand starting at position 2291 of SEQ ID NO: 2218
gcacaagagggauguuuau

SEQ ID NO: 172297 - RNA, 19 nt, Artificial Sequence
  Description of Artificial Sequence: Synthetic oligonucleotide
  Antisense strand to SEQ ID NO: 172296
auaaacaucccucuugugc

SEQ ID NO: 172298 - RNA, 19 nt, Artificial Sequence
  Description of Artificial Sequence: Synthetic oligonucleotide
  Sense strand starting at position 2269 of SEQ ID NO: 2218
ucgcuuuauuuggcgagaa

SEQ ID NO: 172299 - RNA, 19 nt, Artificial Sequence
  Description of Artificial Sequence: Synthetic oligonucleotide
  Antisense strand to SEQ ID NO: 172298
uucucgccaaauaaagcga

SEQ ID NO: 172300 - RNA, 19 nt, Artificial Sequence
  Description of Artificial Sequence: Synthetic oligonucleotide
  Sense strand starting at position 1131 of SEQ ID NO: 2218
ugcgcucaccuuuaaauca

SEQ ID NO: 172301 - RNA, 19 nt, Artificial Sequence
  Description of Artificial Sequence: Synthetic oligonucleotide
  Antisense strand to SEQ ID NO: 172300
ugauuuaaaggugagcgca

SEQ ID NO: 172302 - RNA, 19 nt, Artificial Sequence
  Description of Artificial Sequence: Synthetic oligonucleotide
  Sense strand starting at position 774 of SEQ ID NO: 2218
gagacuuacucagcaagga

SEQ ID NO: 172303 - RNA, 19 nt, Artificial Sequence
  Description of Artificial Sequence: Synthetic oligonucleotide
  Antisense strand to SEQ ID NO: 172302
uccuugcugaguaagucuc

SEQ ID NO: 172304 - RNA, 19 nt, Artificial Sequence
  Description of Artificial Sequence: Synthetic oligonucleotide
  Sense strand starting at position 770 of SEQ ID NO: 2218
gguagagacuuacucagca

SEQ ID NO: 172305 - RNA, 19 nt, Artificial Sequence
  Description of Artificial Sequence: Synthetic oligonucleotide
  Antisense strand to SEQ ID NO: 172304
ugcugaguaagucucuacc

SEQ ID NO: 172306 - RNA, 19 nt, Artificial Sequence
  Description of Artificial Sequence: Synthetic oligonucleotide
  Sense strand starting at position 399 of SEQ ID NO: 2218
caggaaagcgcucaaagau

SEQ ID NO: 172307 - RNA, 19 nt, Artificial Sequence
  Description of Artificial Sequence: Synthetic oligonucleotide
  Antisense strand to SEQ ID NO: 172306
aucuuugagcgcuuuccug

SEQ ID NO: 172308 - RNA, 19 nt, Artificial Sequence
  Description of Artificial Sequence: Synthetic oligonucleotide
  Sense strand starting at position 89 of SEQ ID NO: 2218
ucgccaauugucucggcaa

SEQ ID NO: 172309 - RNA, 19 nt, Artificial Sequence
  Description of Artificial Sequence: Synthetic oligonucleotide
  Antisense strand to SEQ ID NO: 172308
uugccgagacaauuggcga

SEQ ID NO: 172310 - RNA, 19 nt, Artificial Sequence
  Description of Artificial Sequence: Synthetic oligonucleotide
  Sense strand starting at position 25 of SEQ ID NO: 2218
ccggcaaaggugcauuauu

SEQ ID NO: 172311 - RNA, 19 nt, Artificial Sequence
  Description of Artificial Sequence: Synthetic oligonucleotide
  Antisense strand to SEQ ID NO: 172310
aauaaugcaccuuugccgg

SEQ ID NO: 172312 - RNA, 19 nt, Artificial Sequence
  Description of Artificial Sequence: Synthetic oligonucleotide
  Sense strand starting at position 8 of SEQ ID NO: 2220
gaauaucacguuugugaag

SEQ ID NO: 172313 - RNA, 19 nt, Artificial Sequence
  Description of Artificial Sequence: Synthetic oligonucleotide
  Antisense strand to SEQ ID NO: 172312
cuucacaaacgugauauuc

SEQ ID NO: 172314 - RNA, 19 nt, Artificial Sequence
  Description of Artificial Sequence: Synthetic oligonucleotide
  Sense strand starting at position 36 of SEQ ID NO: 2220
acgaguuuggcccagauau

SEQ ID NO: 172315 - RNA, 19 nt, Artificial Sequence
  Description of Artificial Sequence: Synthetic oligonucleotide
  Antisense strand to SEQ ID NO: 172314
auaucugggccaaacucgu

SEQ ID NO: 172316 - RNA, 19 nt, Artificial Sequence
  Description of Artificial Sequence: Synthetic oligonucleotide
  Sense strand starting at position 88 of SEQ ID NO: 2220
ggaacaguaagcuguaauu

SEQ ID NO: 172317 - RNA, 19 nt, Artificial Sequence
  Description of Artificial Sequence: Synthetic oligonucleotide
  Antisense strand to SEQ ID NO: 172316
aauuacagcuuacuguucc

SEQ ID NO: 172318 - RNA, 19 nt, Artificial Sequence
  Description of Artificial Sequence: Synthetic oligonucleotide
  Sense strand starting at position 117 of SEQ ID NO: 2220
gagucuggucucuaauucu

SEQ ID NO: 172319 - RNA, 19 nt, Artificial Sequence
  Description of Artificial Sequence: Synthetic oligonucleotide
  Antisense strand to SEQ ID NO: 172318
agaauuagagaccagacuc

SEQ ID NO: 172320 - RNA, 19 nt, Artificial Sequence
  Description of Artificial Sequence: Synthetic oligonucleotide
  Sense strand starting at position 152 of SEQ ID NO: 2220
guaaguugucauuaucauc

SEQ ID NO: 172321 - RNA, 19 nt, Artificial Sequence
  Description of Artificial Sequence: Synthetic oligonucleotide
  Antisense strand to SEQ ID NO: 172320
gaugauaaugacaacuuac

SEQ ID NO: 172322 - RNA, 19 nt, Artificial Sequence
  Description of Artificial Sequence: Synthetic oligonucleotide
  Sense strand starting at position 188 of SEQ ID NO: 2220
uuccuaugacauggaggua

SEQ ID NO: 172323 - RNA, 19 nt, Artificial Sequence
  Description of Artificial Sequence: Synthetic oligonucleotide
  Antisense strand to SEQ ID NO: 172322
uaccuccaugucauaggaa

SEQ ID NO: 172324 - RNA, 19 nt, Artificial Sequence
  Description of Artificial Sequence: Synthetic oligonucleotide
  Sense strand starting at position 231 of SEQ ID NO: 2220
gguugcuguguagaucaaa

SEQ ID NO: 172325 - RNA, 19 nt, Artificial Sequence
  Description of Artificial Sequence: Synthetic oligonucleotide
  Antisense strand to SEQ ID NO: 172324
uuugaucuacacagcaacc

SEQ ID NO: 172326 - RNA, 19 nt, Artificial Sequence
  Description of Artificial Sequence: Synthetic oligonucleotide
  Sense strand starting at position 234 of SEQ ID NO: 2220
ugcuguguagaucaaauau

SEQ ID NO: 172327 - RNA, 19 nt, Artificial Sequence
  Description of Artificial Sequence: Synthetic oligonucleotide
  Antisense strand to SEQ ID NO: 172326
auauuugaucuacacagca

SEQ ID NO: 172328 - RNA, 19 nt, Artificial Sequence
  Description of Artificial Sequence: Synthetic oligonucleotide
  Sense strand starting at position 313 of SEQ ID NO: 2220
cagaaaguuguaggaauuc

SEQ ID NO: 172329 - RNA, 19 nt, Artificial Sequence
  Description of Artificial Sequence: Synthetic oligonucleotide
  Antisense strand to SEQ ID NO: 172328
gaauuccuacaacuuucug

SEQ ID NO: 172330 - RNA, 19 nt, Artificial Sequence
  Description of Artificial Sequence: Synthetic oligonucleotide
  Sense strand starting at position 625 of SEQ ID NO: 2220
gcucauauguuauuucuuu

SEQ ID NO: 172331 - RNA, 19 nt, Artificial Sequence
  Description of Artificial Sequence: Synthetic oligonucleotide
  Antisense strand to SEQ ID NO: 172330
aaagaaauaacauaugagc

SEQ ID NO: 172332 - RNA, 19 nt, Artificial Sequence
  Description of Artificial Sequence: Synthetic oligonucleotide
  Sense strand starting at position 1204 of SEQ ID NO: 2220
uauugugaacauggacuua

SEQ ID NO: 172333 - RNA, 19 nt, Artificial Sequence
  Description of Artificial Sequence: Synthetic oligonucleotide
  Antisense strand to SEQ ID NO: 172332
uaaguccauguucacaaua

SEQ ID NO: 172334 - RNA, 19 nt, Artificial Sequence
  Description of Artificial Sequence: Synthetic oligonucleotide
  Sense strand starting at position 1227 of SEQ ID NO: 2220
gcuugacguguugaaauua

SEQ ID NO: 172335 - RNA, 19 nt, Artificial Sequence
  Description of Artificial Sequence: Synthetic oligonucleotide
  Antisense strand to SEQ ID NO: 172334
uaauuucaacacgucaagc

SEQ ID NO: 172336 - RNA, 19 nt, Artificial Sequence
  Description of Artificial Sequence: Synthetic oligonucleotide
  Sense strand starting at position 1314 of SEQ ID NO: 2220
uugucuguccuguaaacca

SEQ ID NO: 172337 - RNA, 19 nt, Artificial Sequence
  Description of Artificial Sequence: Synthetic oligonucleotide
  Antisense strand to SEQ ID NO: 172336
ugguuuacaggacagacaa

SEQ ID NO: 172338 - RNA, 19 nt, Artificial Sequence
  Description of Artificial Sequence: Synthetic oligonucleotide
  Sense strand starting at position 1408 of SEQ ID NO: 2220
gugguuacuguuggagaag

SEQ ID NO: 172339 - RNA, 19 nt, Artificial Sequence
  Description of Artificial Sequence: Synthetic oligonucleotide
  Antisense strand to SEQ ID NO: 172338
cuucuccaacaguaaccac

SEQ ID NO: 172340 - RNA, 19 nt, Artificial Sequence
  Description of Artificial Sequence: Synthetic oligonucleotide
  Sense strand starting at position 1410 of SEQ ID NO: 2220
gguuacuguuggagaagga

SEQ ID NO: 172341 - RNA, 19 nt, Artificial Sequence
  Description of Artificial Sequence: Synthetic oligonucleotide
  Antisense strand to SEQ ID NO: 172340
uccuucuccaacaguaacc

SEQ ID NO: 172342 - RNA, 19 nt, Artificial Sequence
  Description of Artificial Sequence: Synthetic oligonucleotide
  Sense strand starting at position 1521 of SEQ ID NO: 2220
augugaaggugucuccaca

SEQ ID NO: 172343 - RNA, 19 nt, Artificial Sequence
  Description of Artificial Sequence: Synthetic oligonucleotide
  Antisense strand to SEQ ID NO: 172342
uguggagacaccuucacau

SEQ ID NO: 172344 - RNA, 19 nt, Artificial Sequence
  Description of Artificial Sequence: Synthetic oligonucleotide
  Sense strand starting at position 1548 of SEQ ID NO: 2220
agugaaaucuaccugagac

SEQ ID NO: 172345 - RNA, 19 nt, Artificial Sequence
  Description of Artificial Sequence: Synthetic oligonucleotide
  Antisense strand to SEQ ID NO: 172344
gucucagguagauuucacu

SEQ ID NO: 172346 - RNA, 19 nt, Artificial Sequence
  Description of Artificial Sequence: Synthetic oligonucleotide
  Sense strand starting at position 1613 of SEQ ID NO: 2220
ucacgaguugcccagagau

SEQ ID NO: 172347 - RNA, 19 nt, Artificial Sequence
  Description of Artificial Sequence: Synthetic oligonucleotide
  Antisense strand to SEQ ID NO: 172346
aucucugggcaacucguga

SEQ ID NO: 172348 - RNA, 19 nt, Artificial Sequence
  Description of Artificial Sequence: Synthetic oligonucleotide
  Sense strand starting at position 1615 of SEQ ID NO: 2220
acgaguugcccagagauuc

SEQ ID NO: 172349 - RNA, 19 nt, Artificial Sequence
  Description of Artificial Sequence: Synthetic oligonucleotide
  Antisense strand to SEQ ID NO: 172348
gaaucucugggcaacucgu

SEQ ID NO: 172350 - RNA, 19 nt, Artificial Sequence
  Description of Artificial Sequence: Synthetic oligonucleotide
  Sense strand starting at position 1623 of SEQ ID NO: 2220
cccagagauucccugaagu

SEQ ID NO: 172351 - RNA, 19 nt, Artificial Sequence
  Description of Artificial Sequence: Synthetic oligonucleotide
  Antisense strand to SEQ ID NO: 172350
acuucagggaaucucuggg

SEQ ID NO: 172352 - RNA, 19 nt, Artificial Sequence
  Description of Artificial Sequence: Synthetic oligonucleotide
  Sense strand starting at position 1728 of SEQ ID NO: 2220
ugaucaaacgucugagaaa

SEQ ID NO: 172353 - RNA, 19 nt, Artificial Sequence
  Description of Artificial Sequence: Synthetic oligonucleotide
  Antisense strand to SEQ ID NO: 172352
uuucucagacguuugauca

SEQ ID NO: 172354 - RNA, 19 nt, Artificial Sequence
  Description of Artificial Sequence: Synthetic oligonucleotide
  Sense strand starting at position 2451 of SEQ ID NO: 2220
gagguauuaccacagugcu

SEQ ID NO: 172355 - RNA, 19 nt, Artificial Sequence
  Description of Artificial Sequence: Synthetic oligonucleotide
  Antisense strand to SEQ ID NO: 172354
agcacugugguaauaccuc

SEQ ID NO: 172356 - RNA, 19 nt, Artificial Sequence
  Description of Artificial Sequence: Synthetic oligonucleotide
  Sense strand starting at position 2479 of SEQ ID NO: 2220
gguugagagaguggucaga

SEQ ID NO: 172357 - RNA, 19 nt, Artificial Sequence
  Description of Artificial Sequence: Synthetic oligonucleotide
  Antisense strand to SEQ ID NO: 172356
ucugaccacucucucaacc

SEQ ID NO: 172358 - RNA, 19 nt, Artificial Sequence
  Description of Artificial Sequence: Synthetic oligonucleotide
  Sense strand starting at position 2481 of SEQ ID NO: 2220
uugagagaguggucagaag

SEQ ID NO: 172359 - RNA, 19 nt, Artificial Sequence
  Description of Artificial Sequence: Synthetic oligonucleotide
  Antisense strand to SEQ ID NO: 172358
cuucugaccacucucucaa

SEQ ID NO: 172360 - RNA, 19 nt, Artificial Sequence
  Description of Artificial Sequence: Synthetic oligonucleotide
  Sense strand starting at position 2562 of SEQ ID NO: 2220
aggacuuucuaggcaaagu

SEQ ID NO: 172361 - RNA, 19 nt, Artificial Sequence
  Description of Artificial Sequence: Synthetic oligonucleotide
  Antisense strand to SEQ ID NO: 172360
acuuugccuagaaaguccu

SEQ ID NO: 172362 - RNA, 19 nt, Artificial Sequence
  Description of Artificial Sequence: Synthetic oligonucleotide
  Sense strand starting at position 2563 of SEQ ID NO: 2220
ggacuuucuaggcaaagug

SEQ ID NO: 172363 - RNA, 19 nt, Artificial Sequence
  Description of Artificial Sequence: Synthetic oligonucleotide
  Antisense strand to SEQ ID NO: 172362
cacuuugccuagaaagucc

SEQ ID NO: 172364 - RNA, 19 nt, Artificial Sequence
  Description of Artificial Sequence: Synthetic oligonucleotide
  Sense strand starting at position 2628 of SEQ ID NO: 2220
ugaguaauguaucuagaga

SEQ ID NO: 172365 - RNA, 19 nt, Artificial Sequence
  Description of Artificial Sequence: Synthetic oligonucleotide
  Antisense strand to SEQ ID NO: 172364
ucucuagauacauuacuca

SEQ ID NO: 172366 - RNA, 19 nt, Artificial Sequence
  Description of Artificial Sequence: Synthetic oligonucleotide
  Sense strand starting at position 2726 of SEQ ID NO: 2220
aaguuacuacgauggauaa

SEQ ID NO: 172367 - RNA, 19 nt, Artificial Sequence
  Description of Artificial Sequence: Synthetic oligonucleotide
  Antisense strand to SEQ ID NO: 172366
uuauccaucguaguaacuu

SEQ ID NO: 172368 - RNA, 19 nt, Artificial Sequence
  Description of Artificial Sequence: Synthetic oligonucleotide
  Sense strand starting at position 2728 of SEQ ID NO: 2220
guuacuacgauggauaagu

SEQ ID NO: 172369 - RNA, 19 nt, Artificial Sequence
  Description of Artificial Sequence: Synthetic oligonucleotide
  Antisense strand to SEQ ID NO: 172368
acuuauccaucguaguaac

SEQ ID NO: 172370 - RNA, 19 nt, Artificial Sequence
  Description of Artificial Sequence: Synthetic oligonucleotide
  Sense strand starting at position 2737 of SEQ ID NO: 2220
auggauaagugagcauuaa

SEQ ID NO: 172371 - RNA, 19 nt, Artificial Sequence
  Description of Artificial Sequence: Synthetic oligonucleotide
  Antisense strand to SEQ ID NO: 172370
uuaaugcucacuuauccau

SEQ ID NO: 172372 - RNA, 19 nt, Artificial Sequence
  Description of Artificial Sequence: Synthetic oligonucleotide
  Sense strand starting at position 2741 of SEQ ID NO: 2220
auaagugagcauuaaguuc

SEQ ID NO: 172373 - RNA, 19 nt, Artificial Sequence
  Description of Artificial Sequence: Synthetic oligonucleotide
  Antisense strand to SEQ ID NO: 172372
gaacuuaaugcucacuuau

SEQ ID NO: 172374 - RNA, 19 nt, Artificial Sequence
  Description of Artificial Sequence: Synthetic oligonucleotide
  Sense strand starting at position 2793 of SEQ ID NO: 2220
ccauuucucuaggagaaug

SEQ ID NO: 172375 - RNA, 19 nt, Artificial Sequence
  Description of Artificial Sequence: Synthetic oligonucleotide
  Antisense strand to SEQ ID NO: 172374
cauucuccuagagaaaugg

SEQ ID NO: 172376 - RNA, 19 nt, Artificial Sequence
  Description of Artificial Sequence: Synthetic oligonucleotide
  Sense strand starting at position 3422 of SEQ ID NO: 2220
gugcauuucuugucuccca

SEQ ID NO: 172377 - RNA, 19 nt, Artificial Sequence
  Description of Artificial Sequence: Synthetic oligonucleotide
  Antisense strand to SEQ ID NO: 172376
ugggagacaagaaaugcac

SEQ ID NO: 172378 - RNA, 19 nt, Artificial Sequence
  Description of Artificial Sequence: Synthetic oligonucleotide
  Sense strand starting at position 3493 of SEQ ID NO: 2220
acuauaugucaagaacugu

SEQ ID NO: 172379 - RNA, 19 nt, Artificial Sequence
  Description of Artificial Sequence: Synthetic oligonucleotide
  Antisense strand to SEQ ID NO: 172378
acaguucuugacauauagu

SEQ ID NO: 172380 - RNA, 19 nt, Artificial Sequence
  Description of Artificial Sequence: Synthetic oligonucleotide
  Sense strand starting at position 3600 of SEQ ID NO: 2220
agguauuauagagguauuc

SEQ ID NO: 172381 - RNA, 19 nt, Artificial Sequence
  Description of Artificial Sequence: Synthetic oligonucleotide
  Antisense strand to SEQ ID NO: 172380
gaauaccucuauaauaccu

SEQ ID NO: 172382 - RNA, 19 nt, Artificial Sequence
  Description of Artificial Sequence: Synthetic oligonucleotide
  Sense strand starting at position 3682 of SEQ ID NO: 2220
ucagaaagaucauauuuga

SEQ ID NO: 172383 - RNA, 19 nt, Artificial Sequence
  Description of Artificial Sequence: Synthetic oligonucleotide
  Antisense strand to SEQ ID NO: 172382
ucaaauaugaucuuucuga

SEQ ID NO: 172384 - RNA, 19 nt, Artificial Sequence
  Description of Artificial Sequence: Synthetic oligonucleotide
  Sense strand starting at position 3780 of SEQ ID NO: 2220
acaauaagagcaugaucuu

SEQ ID NO: 172385 - RNA, 19 nt, Artificial Sequence
  Description of Artificial Sequence: Synthetic oligonucleotide
  Antisense strand to SEQ ID NO: 172384
aagaucaugcucuuauugu

SEQ ID NO: 172386 - RNA, 19 nt, Artificial Sequence
  Description of Artificial Sequence: Synthetic oligonucleotide
  Sense strand starting at position 3787 of SEQ ID NO: 2220
gagcaugaucuuggaaauc

SEQ ID NO: 172387 - RNA, 19 nt, Artificial Sequence
  Description of Artificial Sequence: Synthetic oligonucleotide
  Antisense strand to SEQ ID NO: 172386
gauuuccaagaucaugcuc

SEQ ID NO: 172388 - RNA, 19 nt, Artificial Sequence
  Description of Artificial Sequence: Synthetic oligonucleotide
  Sense strand starting at position 3843 of SEQ ID NO: 2220
acagcaguccuagaaccua

SEQ ID NO: 172389 - RNA, 19 nt, Artificial Sequence
  Description of Artificial Sequence: Synthetic oligonucleotide
  Antisense strand to SEQ ID NO: 172388
uagguucuaggacugcugu

SEQ ID NO: 172390 - RNA, 19 nt, Artificial Sequence
  Description of Artificial Sequence: Synthetic oligonucleotide
  Sense strand starting at position 3891 of SEQ ID NO: 2220
gugguaacaucagcuauga

SEQ ID NO: 172391 - RNA, 19 nt, Artificial Sequence
  Description of Artificial Sequence: Synthetic oligonucleotide
  Antisense strand to SEQ ID NO: 172390
ucauagcugauguuaccac

SEQ ID NO: 172392 - RNA, 19 nt, Artificial Sequence
  Description of Artificial Sequence: Synthetic oligonucleotide
  Sense strand starting at position 3967 of SEQ ID NO: 2221
auaguagucuuaucaaugu

SEQ ID NO: 172393 - RNA, 19 nt, Artificial Sequence
  Description of Artificial Sequence: Synthetic oligonucleotide
  Antisense strand to SEQ ID NO: 172392
acauugauaagacuacuau

SEQ ID NO: 172394 - RNA, 19 nt, Artificial Sequence
  Description of Artificial Sequence: Synthetic oligonucleotide
  Sense strand starting at position 3678 of SEQ ID NO: 2221
cuggcugaucucugcauuu

SEQ ID NO: 172395 - RNA, 19 nt, Artificial Sequence
  Description of Artificial Sequence: Synthetic oligonucleotide
  Antisense strand to SEQ ID NO: 172394
aaaugcagagaucagccag

SEQ ID NO: 172396 - RNA, 19 nt, Artificial Sequence
  Description of Artificial Sequence: Synthetic oligonucleotide
  Sense strand starting at position 3448 of SEQ ID NO: 2221
aguagucuuccauaucaug

SEQ ID NO: 172397 - RNA, 19 nt, Artificial Sequence
  Description of Artificial Sequence: Synthetic oligonucleotide
  Antisense strand to SEQ ID NO: 172396
caugauauggaagacuacu

SEQ ID NO: 172398 - RNA, 19 nt, Artificial Sequence
  Description of Artificial Sequence: Synthetic oligonucleotide
  Sense strand starting at position 3423 of SEQ ID NO: 2221
acucaucugucagucacuu

SEQ ID NO: 172399 - RNA, 19 nt, Artificial Sequence
  Description of Artificial Sequence: Synthetic oligonucleotide
  Antisense strand to SEQ ID NO: 172398
aagugacugacagaugagu

SEQ ID NO: 172400 - RNA, 19 nt, Artificial Sequence
  Description of Artificial Sequence: Synthetic oligonucleotide
  Sense strand starting at position 2617 of SEQ ID NO: 2221
cucucuugguuaguguaga

SEQ ID NO: 172401 - RNA, 19 nt, Artificial Sequence
  Description of Artificial Sequence: Synthetic oligonucleotide
  Antisense strand to SEQ ID NO: 172400
ucuacacuaaccaagagag

SEQ ID NO: 172402 - RNA, 19 nt, Artificial Sequence
  Description of Artificial Sequence: Synthetic oligonucleotide
  Sense strand starting at position 2253 of SEQ ID NO: 2221
ugaauagugcagcagagau

SEQ ID NO: 172403 - RNA, 19 nt, Artificial Sequence
  Description of Artificial Sequence: Synthetic oligonucleotide
  Antisense strand to SEQ ID NO: 172402
aucucugcugcacuauuca

SEQ ID NO: 172404 - RNA, 19 nt, Artificial Sequence
  Description of Artificial Sequence: Synthetic oligonucleotide
  Sense strand starting at position 2250 of SEQ ID NO: 2221
augugaauagugcagcaga

SEQ ID NO: 172405 - RNA, 19 nt, Artificial Sequence
  Description of Artificial Sequence: Synthetic oligonucleotide
  Antisense strand to SEQ ID NO: 172404
ucugcugcacuauucacau

SEQ ID NO: 172406 - RNA, 19 nt, Artificial Sequence
  Description of Artificial Sequence: Synthetic oligonucleotide
  Sense strand starting at position 2245 of SEQ ID NO: 2221
cugaaaugugaauagugca

SEQ ID NO: 172407 - RNA, 19 nt, Artificial Sequence
  Description of Artificial Sequence: Synthetic oligonucleotide
  Antisense strand to SEQ ID NO: 172406
ugcacuauucacauuucag

SEQ ID NO: 172408 - RNA, 19 nt, Artificial Sequence
  Description of Artificial Sequence: Synthetic oligonucleotide
  Sense strand starting at position 2164 of SEQ ID NO: 2221
cauagugcuguccaguaca

SEQ ID NO: 172409 - RNA, 19 nt, Artificial Sequence
  Description of Artificial Sequence: Synthetic oligonucleotide
  Antisense strand to SEQ ID NO: 172408
uguacuggacagcacuaug

SEQ ID NO: 172410 - RNA, 19 nt, Artificial Sequence
  Description of Artificial Sequence: Synthetic oligonucleotide
  Sense strand starting at position 2149 of SEQ ID NO: 2221
uaguucuggcucuagcaua

SEQ ID NO: 172411 - RNA, 19 nt, Artificial Sequence
  Description of Artificial Sequence: Synthetic oligonucleotide
  Antisense strand to SEQ ID NO: 172410
uaugcuagagccagaacua

SEQ ID NO: 172412 - RNA, 19 nt, Artificial Sequence
  Description of Artificial Sequence: Synthetic oligonucleotide
  Sense strand starting at position 2147 of SEQ ID NO: 2221
gcuaguucuggcucuagca

SEQ ID NO: 172413 - RNA, 19 nt, Artificial Sequence
  Description of Artificial Sequence: Synthetic oligonucleotide
  Antisense strand to SEQ ID NO: 172412
ugcuagagccagaacuagc

SEQ ID NO: 172414 - RNA, 19 nt, Artificial Sequence
  Description of Artificial Sequence: Synthetic oligonucleotide
  Sense strand starting at position 2123 of SEQ ID NO: 2221
ucauauugcuuugucugau

SEQ ID NO: 172415 - RNA, 19 nt, Artificial Sequence
  Description of Artificial Sequence: Synthetic oligonucleotide
  Antisense strand to SEQ ID NO: 172414
aucagacaaagcaauauga

SEQ ID NO: 172416 - RNA, 19 nt, Artificial Sequence
  Description of Artificial Sequence: Synthetic oligonucleotide
  Sense strand starting at position 2026 of SEQ ID NO: 2221
ugaugucacuguuccaaag

SEQ ID NO: 172417 - RNA, 19 nt, Artificial Sequence
  Description of Artificial Sequence: Synthetic oligonucleotide
  Antisense strand to SEQ ID NO: 172416
cuuuggaacagugacauca

SEQ ID NO: 172418 - RNA, 19 nt, Artificial Sequence
  Description of Artificial Sequence: Synthetic oligonucleotide
  Sense strand starting at position 2011 of SEQ ID NO: 2221
gugagcugugcuuugugau

SEQ ID NO: 172419 - RNA, 19 nt, Artificial Sequence
  Description of Artificial Sequence: Synthetic oligonucleotide
  Antisense strand to SEQ ID NO: 172418
aucacaaagcacagcucac

SEQ ID NO: 172420 - RNA, 19 nt, Artificial Sequence
  Description of Artificial Sequence: Synthetic oligonucleotide
  Sense strand starting at position 1991 of SEQ ID NO: 2221
cuagguauuccagagccau

SEQ ID NO: 172421 - RNA, 19 nt, Artificial Sequence
  Description of Artificial Sequence: Synthetic oligonucleotide
  Antisense strand to SEQ ID NO: 172420
auggcucuggaauaccuag

SEQ ID NO: 172422 - RNA, 19 nt, Artificial Sequence
  Description of Artificial Sequence: Synthetic oligonucleotide
  Sense strand starting at position 1571 of SEQ ID NO: 2221
gcacaucugcaugaucuua

SEQ ID NO: 172423 - RNA, 19 nt, Artificial Sequence
  Description of Artificial Sequence: Synthetic oligonucleotide
  Antisense strand to SEQ ID NO: 172422
uaagaucaugcagaugugc

SEQ ID NO: 172424 - RNA, 19 nt, Artificial Sequence
  Description of Artificial Sequence: Synthetic oligonucleotide
  Sense strand starting at position 1570 of SEQ ID NO: 2221
ugcacaucugcaugaucuu

SEQ ID NO: 172425 - RNA, 19 nt, Artificial Sequence
  Description of Artificial Sequence: Synthetic oligonucleotide
  Antisense strand to SEQ ID NO: 172424
aagaucaugcagaugugca

SEQ ID NO: 172426 - RNA, 19 nt, Artificial Sequence
  Description of Artificial Sequence: Synthetic oligonucleotide
  Sense strand starting at position 1552 of SEQ ID NO: 2221
gagacaaagguucgccuuu

SEQ ID NO: 172427 - RNA, 19 nt, Artificial Sequence
  Description of Artificial Sequence: Synthetic oligonucleotide
  Antisense strand to SEQ ID NO: 172426
aaaggcgaaccuuugucuc

SEQ ID NO: 172428 - RNA, 19 nt, Artificial Sequence
  Description of Artificial Sequence: Synthetic oligonucleotide
  Sense strand starting at position 1502 of SEQ ID NO: 2221
agccuaauugguggagauu

SEQ ID NO: 172429 - RNA, 19 nt, Artificial Sequence
  Description of Artificial Sequence: Synthetic oligonucleotide
  Antisense strand to SEQ ID NO: 172428
aaucuccaccaauuaggcu

SEQ ID NO: 172430 - RNA, 19 nt, Artificial Sequence
  Description of Artificial Sequence: Synthetic oligonucleotide
  Sense strand starting at position 1464 of SEQ ID NO: 2221
gccaaagaccauugugaga

SEQ ID NO: 172431 - RNA, 19 nt, Artificial Sequence
  Description of Artificial Sequence: Synthetic oligonucleotide
  Antisense strand to SEQ ID NO: 172430
ucucacaauggucuuuggc

SEQ ID NO: 172432 - RNA, 19 nt, Artificial Sequence
  Description of Artificial Sequence: Synthetic oligonucleotide
  Sense strand starting at position 1429 of SEQ ID NO: 2221
ccaacauguuuggucuauu

SEQ ID NO: 172433 - RNA, 19 nt, Artificial Sequence
  Description of Artificial Sequence: Synthetic oligonucleotide
  Antisense strand to SEQ ID NO: 172432
aauagaccaaacauguugg

SEQ ID NO: 172434 - RNA, 19 nt, Artificial Sequence
  Description of Artificial Sequence: Synthetic oligonucleotide
  Sense strand starting at position 1421 of SEQ ID NO: 2221
ucagguuaccaacauguuu

SEQ ID NO: 172435 - RNA, 19 nt, Artificial Sequence
  Description of Artificial Sequence: Synthetic oligonucleotide
  Antisense strand to SEQ ID NO: 172434
aaacauguugguaaccuga

SEQ ID NO: 172436 - RNA, 19 nt, Artificial Sequence
  Description of Artificial Sequence: Synthetic oligonucleotide
  Sense strand starting at position 1346 of SEQ ID NO: 2221
gugccuauuguauaaacau

SEQ ID NO: 172437 - RNA, 19 nt, Artificial Sequence
  Description of Artificial Sequence: Synthetic oligonucleotide
  Antisense strand to SEQ ID NO: 172436
auguuuauacaauaggcac

SEQ ID NO: 172438 - RNA, 19 nt, Artificial Sequence
  Description of Artificial Sequence: Synthetic oligonucleotide
  Sense strand starting at position 1339 of SEQ ID NO: 2221
uacuuuggugccuauugua

SEQ ID NO: 172439 - RNA, 19 nt, Artificial Sequence
  Description of Artificial Sequence: Synthetic oligonucleotide
  Antisense strand to SEQ ID NO: 172438
uacaauaggcaccaaagua

SEQ ID NO: 172440 - RNA, 19 nt, Artificial Sequence
  Description of Artificial Sequence: Synthetic oligonucleotide
  Sense strand starting at position 1318 of SEQ ID NO: 2221
ggccauacucaugauccua

SEQ ID NO: 172441 - RNA, 19 nt, Artificial Sequence
  Description of Artificial Sequence: Synthetic oligonucleotide
  Antisense strand to SEQ ID NO: 172440
uaggaucaugaguauggcc

SEQ ID NO: 172442 - RNA, 19 nt, Artificial Sequence
  Description of Artificial Sequence: Synthetic oligonucleotide
  Sense strand starting at position 1291 of SEQ ID NO: 2221
guuacagaacaauggcaua

SEQ ID NO: 172443 - RNA, 19 nt, Artificial Sequence
  Description of Artificial Sequence: Synthetic oligonucleotide
  Antisense strand to SEQ ID NO: 172442
uaugccauuguucuguaac

SEQ ID NO: 172444 - RNA, 19 nt, Artificial Sequence
  Description of Artificial Sequence: Synthetic oligonucleotide
  Sense strand starting at position 1247 of SEQ ID NO: 2221
uaaugaacacauugugaug

SEQ ID NO: 172445 - RNA, 19 nt, Artificial Sequence
  Description of Artificial Sequence: Synthetic oligonucleotide
  Antisense strand to SEQ ID NO: 172444
caucacaauguguucauua

SEQ ID NO: 172446 - RNA, 19 nt, Artificial Sequence
  Description of Artificial Sequence: Synthetic oligonucleotide
  Sense strand starting at position 1206 of SEQ ID NO: 2221
gcuccuauauacuuaugga

SEQ ID NO: 172447 - RNA, 19 nt, Artificial Sequence
  Description of Artificial Sequence: Synthetic oligonucleotide
  Antisense strand to SEQ ID NO: 172446
uccauaaguauauaggagc

SEQ ID NO: 172448 - RNA, 19 nt, Artificial Sequence
  Description of Artificial Sequence: Synthetic oligonucleotide
  Sense strand starting at position 1123 of SEQ ID NO: 2221
cuauuauuauuggugacua

SEQ ID NO: 172449 - RNA, 19 nt, Artificial Sequence
  Description of Artificial Sequence: Synthetic oligonucleotide
  Antisense strand to SEQ ID NO: 172448
uagucaccaauaauaauag

SEQ ID NO: 172450 - RNA, 19 nt, Artificial Sequence
  Description of Artificial Sequence: Synthetic oligonucleotide
  Sense strand starting at position 1106 of SEQ ID NO: 2221
acuauauuguaugucaacu

SEQ ID NO: 172451 - RNA, 19 nt, Artificial Sequence
  Description of Artificial Sequence: Synthetic oligonucleotide
  Antisense strand to SEQ ID NO: 172450
aguugacauacaauauagu

SEQ ID NO: 172452 - RNA, 19 nt, Artificial Sequence
  Description of Artificial Sequence: Synthetic oligonucleotide
  Sense strand starting at position 960 of SEQ ID NO: 2221
guaaacuugucacucuaag

SEQ ID NO: 172453 - RNA, 19 nt, Artificial Sequence
  Description of Artificial Sequence: Synthetic oligonucleotide
  Antisense strand to SEQ ID NO: 172452
cuuagagugacaaguuuac

SEQ ID NO: 172454 - RNA, 19 nt, Artificial Sequence
  Description of Artificial Sequence: Synthetic oligonucleotide
  Sense strand starting at position 870 of SEQ ID NO: 2221
cgugaccaugauuacuaaa

SEQ ID NO: 172455 - RNA, 19 nt, Artificial Sequence
  Description of Artificial Sequence: Synthetic oligonucleotide
  Antisense strand to SEQ ID NO: 172454
uuuaguaaucauggucacg

SEQ ID NO: 172456 - RNA, 19 nt, Artificial Sequence
  Description of Artificial Sequence: Synthetic oligonucleotide
  Sense strand starting at position 869 of SEQ ID NO: 2221
ccgugaccaugauuacuaa

SEQ ID NO: 172457 - RNA, 19 nt, Artificial Sequence
  Description of Artificial Sequence: Synthetic oligonucleotide
  Antisense strand to SEQ ID NO: 172456
uuaguaaucauggucacgg

SEQ ID NO: 172458 - RNA, 19 nt, Artificial Sequence
  Description of Artificial Sequence: Synthetic oligonucleotide
  Sense strand starting at position 838 of SEQ ID NO: 2221
caggauugugaugguuuaa

SEQ ID NO: 172459 - RNA, 19 nt, Artificial Sequence
  Description of Artificial Sequence: Synthetic oligonucleotide
  Antisense strand to SEQ ID NO: 172458
uuaaaccaucacaauccug

SEQ ID NO: 172460 - RNA, 19 nt, Artificial Sequence
  Description of Artificial Sequence: Synthetic oligonucleotide
  Sense strand starting at position 828 of SEQ ID NO: 2221
gacuguuaugcaggauugu

SEQ ID NO: 172461 - RNA, 19 nt, Artificial Sequence
  Description of Artificial Sequence: Synthetic oligonucleotide
  Antisense strand to SEQ ID NO: 172460
acaauccugcauaacaguc

SEQ ID NO: 172462 - RNA, 19 nt, Artificial Sequence
  Description of Artificial Sequence: Synthetic oligonucleotide
  Sense strand starting at position 826 of SEQ ID NO: 2221
cugacuguuaugcaggauu

SEQ ID NO: 172463 - RNA, 19 nt, Artificial Sequence
  Description of Artificial Sequence: Synthetic oligonucleotide
  Antisense strand to SEQ ID NO: 172462
aauccugcauaacagucag

SEQ ID NO: 172464 - RNA, 19 nt, Artificial Sequence
  Description of Artificial Sequence: Synthetic oligonucleotide
  Sense strand starting at position 669 of SEQ ID NO: 2221
guugguuugcauuaaauga

SEQ ID NO: 172465 - RNA, 19 nt, Artificial Sequence
  Description of Artificial Sequence: Synthetic oligonucleotide
  Antisense strand to SEQ ID NO: 172464
ucauuuaaugcaaaccaac

SEQ ID NO: 172466 - RNA, 19 nt, Artificial Sequence
  Description of Artificial Sequence: Synthetic oligonucleotide
  Sense strand starting at position 254 of SEQ ID NO: 2221
agauucuugcuaggauaag

SEQ ID NO: 172467 - RNA, 19 nt, Artificial Sequence
  Description of Artificial Sequence: Synthetic oligonucleotide
  Antisense strand to SEQ ID NO: 172466
cuuauccuagcaagaaucu

SEQ ID NO: 172468 - RNA, 19 nt, Artificial Sequence
  Description of Artificial Sequence: Synthetic oligonucleotide
  Sense strand starting at position 251 of SEQ ID NO: 2221
gacagauucuugcuaggau

SEQ ID NO: 172469 - RNA, 19 nt, Artificial Sequence
  Description of Artificial Sequence: Synthetic oligonucleotide
  Antisense strand to SEQ ID NO: 172468
auccuagcaagaaucuguc

SEQ ID NO: 172470 - RNA, 19 nt, Artificial Sequence
  Description of Artificial Sequence: Synthetic oligonucleotide
  Sense strand starting at position 238 of SEQ ID NO: 2221
auauguauaguaggacaga

SEQ ID NO: 172471 - RNA, 19 nt, Artificial Sequence
  Description of Artificial Sequence: Synthetic oligonucleotide
  Antisense strand to SEQ ID NO: 172470
ucuguccuacuauacauau

SEQ ID NO: 172472 - RNA, 19 nt, Artificial Sequence
  Description of Artificial Sequence: Synthetic oligonucleotide
  Sense strand starting at position 291 of SEQ ID NO: 2222
guacaacacuguuuacaaa

SEQ ID NO: 172473 - RNA, 19 nt, Artificial Sequence
  Description of Artificial Sequence: Synthetic oligonucleotide
  Antisense strand to SEQ ID NO: 172472
uuuguaaacaguguuguac

SEQ ID NO: 172474 - RNA, 19 nt, Artificial Sequence
  Description of Artificial Sequence: Synthetic oligonucleotide
  Sense strand starting at position 476 of SEQ ID NO: 2222
gagcuacaugcugagcuau

SEQ ID NO: 172475 - RNA, 19 nt, Artificial Sequence
  Description of Artificial Sequence: Synthetic oligonucleotide
  Antisense strand to SEQ ID NO: 172474
auagcucagcauguagcuc

SEQ ID NO: 172476 - RNA, 19 nt, Artificial Sequence
  Description of Artificial Sequence: Synthetic oligonucleotide
  Sense strand starting at position 553 of SEQ ID NO: 2222
aguauaaagucucccaaag

SEQ ID NO: 172477 - RNA, 19 nt, Artificial Sequence
  Description of Artificial Sequence: Synthetic oligonucleotide
  Antisense strand to SEQ ID NO: 172476
cuuugggagacuuuauacu

SEQ ID NO: 172478 - RNA, 19 nt, Artificial Sequence
  Description of Artificial Sequence: Synthetic oligonucleotide
  Sense strand starting at position 781 of SEQ ID NO: 2222
gggaaaugccaguggucuc

SEQ ID NO: 172479 - RNA, 19 nt, Artificial Sequence
  Description of Artificial Sequence: Synthetic oligonucleotide
  Antisense strand to SEQ ID NO: 172478
gagaccacuggcauuuccc

SEQ ID NO: 172480 - RNA, 19 nt, Artificial Sequence
  Description of Artificial Sequence: Synthetic oligonucleotide
  Sense strand starting at position 901 of SEQ ID NO: 2222
auccucguugccuaaacaa

SEQ ID NO: 172481 - RNA, 19 nt, Artificial Sequence
  Description of Artificial Sequence: Synthetic oligonucleotide
  Antisense strand to SEQ ID NO: 172480
uuguuuaggcaacgaggau

SEQ ID NO: 172482 - RNA, 19 nt, Artificial Sequence
  Description of Artificial Sequence: Synthetic oligonucleotide
  Sense strand starting at position 1000 of SEQ ID NO: 2222
ugcaaugaacacugaguua

SEQ ID NO: 172483 - RNA, 19 nt, Artificial Sequence
  Description of Artificial Sequence: Synthetic oligonucleotide
  Antisense strand to SEQ ID NO: 172482
uaacucaguguucauugca

SEQ ID NO: 172484 - RNA, 19 nt, Artificial Sequence
  Description of Artificial Sequence: Synthetic oligonucleotide
  Sense strand starting at position 1040 of SEQ ID NO: 2222
ugacuccuacuucgaguua

SEQ ID NO: 172485 - RNA, 19 nt, Artificial Sequence
  Description of Artificial Sequence: Synthetic oligonucleotide
  Antisense strand to SEQ ID NO: 172484
uaacucgaaguaggaguca

SEQ ID NO: 172486 - RNA, 19 nt, Artificial Sequence
  Description of Artificial Sequence: Synthetic oligonucleotide
  Sense strand starting at position 1057 of SEQ ID NO: 2222
uagguaguagucugggauu

SEQ ID NO: 172487 - RNA, 19 nt, Artificial Sequence
  Description of Artificial Sequence: Synthetic oligonucleotide
  Antisense strand to SEQ ID NO: 172486
aaucccagacuacuaccua

SEQ ID NO: 172488 - RNA, 19 nt, Artificial Sequence
  Description of Artificial Sequence: Synthetic oligonucleotide
  Sense strand starting at position 1059 of SEQ ID NO: 2222
gguaguagucugggauucu

SEQ ID NO: 172489 - RNA, 19 nt, Artificial Sequence
  Description of Artificial Sequence: Synthetic oligonucleotide
  Antisense strand to SEQ ID NO: 172488
agaaucccagacuacuacc

SEQ ID NO: 172490 - RNA, 19 nt, Artificial Sequence
  Description of Artificial Sequence: Synthetic oligonucleotide
  Sense strand starting at position 1410 of SEQ ID NO: 2222
ccuggaauucucuguuuga

SEQ ID NO: 172491 - RNA, 19 nt, Artificial Sequence
  Description of Artificial Sequence: Synthetic oligonucleotide
  Antisense strand to SEQ ID NO: 172490
ucaaacagagaauuccagg

SEQ ID NO: 172492 - RNA, 19 nt, Artificial Sequence
  Description of Artificial Sequence: Synthetic oligonucleotide
  Sense strand starting at position 1411 of SEQ ID NO: 2222
cuggaauucucuguuugag

SEQ ID NO: 172493 - RNA, 19 nt, Artificial Sequence
  Description of Artificial Sequence: Synthetic oligonucleotide
  Antisense strand to SEQ ID NO: 172492
cucaaacagagaauuccag

SEQ ID NO: 172494 - RNA, 19 nt, Artificial Sequence
  Description of Artificial Sequence: Synthetic oligonucleotide
  Sense strand starting at position 1413 of SEQ ID NO: 2222
ggaauucucuguuugagag

SEQ ID NO: 172495 - RNA, 19 nt, Artificial Sequence
  Description of Artificial Sequence: Synthetic oligonucleotide
  Antisense strand to SEQ ID NO: 172494
cucucaaacagagaauucc

SEQ ID NO: 172496 - RNA, 19 nt, Artificial Sequence
  Description of Artificial Sequence: Synthetic oligonucleotide
  Sense strand starting at position 1414 of SEQ ID NO: 2222
gaauucucuguuugagagu

SEQ ID NO: 172497 - RNA, 19 nt, Artificial Sequence
  Description of Artificial Sequence: Synthetic oligonucleotide
  Antisense strand to SEQ ID NO: 172496
acucucaaacagagaauuc

SEQ ID NO: 172498 - RNA, 19 nt, Artificial Sequence
  Description of Artificial Sequence: Synthetic oligonucleotide
  Sense strand starting at position 2327 of SEQ ID NO: 2222
aggguuggacuuugcagaa

SEQ ID NO: 172499 - RNA, 19 nt, Artificial Sequence
  Description of Artificial Sequence: Synthetic oligonucleotide
  Antisense strand to SEQ ID NO: 172498
uucugcaaaguccaacccu

SEQ ID NO: 172500 - RNA, 19 nt, Artificial Sequence
  Description of Artificial Sequence: Synthetic oligonucleotide
  Sense strand starting at position 2509 of SEQ ID NO: 2222
aguucuuccugauucuacu

SEQ ID NO: 172501 - RNA, 19 nt, Artificial Sequence
  Description of Artificial Sequence: Synthetic oligonucleotide
  Antisense strand to SEQ ID NO: 172500
aguagaaucaggaagaacu

SEQ ID NO: 172502 - RNA, 19 nt, Artificial Sequence
  Description of Artificial Sequence: Synthetic oligonucleotide
  Sense strand starting at position 2665 of SEQ ID NO: 2222
aucugagagucuucccuga

SEQ ID NO: 172503 - RNA, 19 nt, Artificial Sequence
  Description of Artificial Sequence: Synthetic oligonucleotide
  Antisense strand to SEQ ID NO: 172502
ucagggaagacucucagau

SEQ ID NO: 172504 - RNA, 19 nt, Artificial Sequence
  Description of Artificial Sequence: Synthetic oligonucleotide
  Sense strand starting at position 2669 of SEQ ID NO: 2222
gagagucuucccugagcac

SEQ ID NO: 172505 - RNA, 19 nt, Artificial Sequence
  Description of Artificial Sequence: Synthetic oligonucleotide
  Antisense strand to SEQ ID NO: 172504
gugcucagggaagacucuc

SEQ ID NO: 172506 - RNA, 19 nt, Artificial Sequence
  Description of Artificial Sequence: Synthetic oligonucleotide
  Sense strand starting at position 3163 of SEQ ID NO: 2222
gcacuuaaugaauggaucu

SEQ ID NO: 172507 - RNA, 19 nt, Artificial Sequence
  Description of Artificial Sequence: Synthetic oligonucleotide
  Antisense strand to SEQ ID NO: 172506
agauccauucauuaagugc

SEQ ID NO: 172508 - RNA, 19 nt, Artificial Sequence
  Description of Artificial Sequence: Synthetic oligonucleotide
  Sense strand starting at position 3270 of SEQ ID NO: 2222
agagcuaaugagugccaga

SEQ ID NO: 172509 - RNA, 19 nt, Artificial Sequence
  Description of Artificial Sequence: Synthetic oligonucleotide
  Antisense strand to SEQ ID NO: 172508
ucuggcacucauuagcucu

SEQ ID NO: 172510 - RNA, 19 nt, Artificial Sequence
  Description of Artificial Sequence: Synthetic oligonucleotide
  Sense strand starting at position 3286 of SEQ ID NO: 2222
agagcuagggcaugaauca

SEQ ID NO: 172511 - RNA, 19 nt, Artificial Sequence
  Description of Artificial Sequence: Synthetic oligonucleotide
  Antisense strand to SEQ ID NO: 172510
ugauucaugcccuagcucu

SEQ ID NO: 172512 - RNA, 19 nt, Artificial Sequence
  Description of Artificial Sequence: Synthetic oligonucleotide
  Sense strand starting at position 3287 of SEQ ID NO: 2222
gagcuagggcaugaaucau

SEQ ID NO: 172513 - RNA, 19 nt, Artificial Sequence
  Description of Artificial Sequence: Synthetic oligonucleotide
  Antisense strand to SEQ ID NO: 172512
augauucaugcccuagcuc

SEQ ID NO: 172514 - RNA, 19 nt, Artificial Sequence
  Description of Artificial Sequence: Synthetic oligonucleotide
  Sense strand starting at position 3299 of SEQ ID NO: 2222
gaaucaucguggccucaga

SEQ ID NO: 172515 - RNA, 19 nt, Artificial Sequence
  Description of Artificial Sequence: Synthetic oligonucleotide
  Antisense strand to SEQ ID NO: 172514
ucugaggccacgaugauuc

SEQ ID NO: 172516 - RNA, 19 nt, Artificial Sequence
  Description of Artificial Sequence: Synthetic oligonucleotide
  Sense strand starting at position 3427 of SEQ ID NO: 2222
gugaaauguuccuuccuuc

SEQ ID NO: 172517 - RNA, 19 nt, Artificial Sequence
  Description of Artificial Sequence: Synthetic oligonucleotide
  Antisense strand to SEQ ID NO: 172516
gaaggaaggaacauuucac

SEQ ID NO: 172518 - RNA, 19 nt, Artificial Sequence
  Description of Artificial Sequence: Synthetic oligonucleotide
  Sense strand starting at position 3506 of SEQ ID NO: 2222
aguuauugugagggucaaa

SEQ ID NO: 172519 - RNA, 19 nt, Artificial Sequence
  Description of Artificial Sequence: Synthetic oligonucleotide
  Antisense strand to SEQ ID NO: 172518
uuugacccucacaauaacu

SEQ ID NO: 172520 - RNA, 19 nt, Artificial Sequence
  Description of Artificial Sequence: Synthetic oligonucleotide
  Sense strand starting at position 3515 of SEQ ID NO: 2222
gagggucaaaugggucaau

SEQ ID NO: 172521 - RNA, 19 nt, Artificial Sequence
  Description of Artificial Sequence: Synthetic oligonucleotide
  Antisense strand to SEQ ID NO: 172520
auugacccauuugacccuc

SEQ ID NO: 172522 - RNA, 19 nt, Artificial Sequence
  Description of Artificial Sequence: Synthetic oligonucleotide
  Sense strand starting at position 3518 of SEQ ID NO: 2222
ggucaaaugggucaaucgu

SEQ ID NO: 172523 - RNA, 19 nt, Artificial Sequence
  Description of Artificial Sequence: Synthetic oligonucleotide
  Antisense strand to SEQ ID NO: 172522
acgauugacccauuugacc

SEQ ID NO: 172524 - RNA, 19 nt, Artificial Sequence
  Description of Artificial Sequence: Synthetic oligonucleotide
  Sense strand starting at position 3560 of SEQ ID NO: 2222
gguuauaucugagcaugug

SEQ ID NO: 172525 - RNA, 19 nt, Artificial Sequence
  Description of Artificial Sequence: Synthetic oligonucleotide
  Antisense strand to SEQ ID NO: 172524
cacaugcucagauauaacc

SEQ ID NO: 172526 - RNA, 19 nt, Artificial Sequence
  Description of Artificial Sequence: Synthetic oligonucleotide
  Sense strand starting at position 3561 of SEQ ID NO: 2222
guuauaucugagcauguga

SEQ ID NO: 172527 - RNA, 19 nt, Artificial Sequence
  Description of Artificial Sequence: Synthetic oligonucleotide
  Antisense strand to SEQ ID NO: 172526
ucacaugcucagauauaac

SEQ ID NO: 172528 - RNA, 19 nt, Artificial Sequence
  Description of Artificial Sequence: Synthetic oligonucleotide
  Sense strand starting at position 3574 of SEQ ID NO: 2222
augugagcuuugucaagau

SEQ ID NO: 172529 - RNA, 19 nt, Artificial Sequence
  Description of Artificial Sequence: Synthetic oligonucleotide
  Antisense strand to SEQ ID NO: 172528
aucuugacaaagcucacau

SEQ ID NO: 172530 - RNA, 19 nt, Artificial Sequence
  Description of Artificial Sequence: Synthetic oligonucleotide
  Sense strand starting at position 3578 of SEQ ID NO: 2222
gagcuuugucaagauugag

SEQ ID NO: 172531 - RNA, 19 nt, Artificial Sequence
  Description of Artificial Sequence: Synthetic oligonucleotide
  Antisense strand to SEQ ID NO: 172530
cucaaucuugacaaagcuc

SEQ ID NO: 172532 - RNA, 19 nt, Artificial Sequence
  Description of Artificial Sequence: Synthetic oligonucleotide
  Sense strand starting at position 3581 of SEQ ID NO: 2222
cuuugucaagauugagaac

SEQ ID NO: 172533 - RNA, 19 nt, Artificial Sequence
  Description of Artificial Sequence: Synthetic oligonucleotide
  Antisense strand to SEQ ID NO: 172532
guucucaaucuugacaaag

SEQ ID NO: 172534 - RNA, 19 nt, Artificial Sequence
  Description of Artificial Sequence: Synthetic oligonucleotide
  Sense strand starting at position 3707 of SEQ ID NO: 2222
uagagaccuuguguugaac

SEQ ID NO: 172535 - RNA, 19 nt, Artificial Sequence
  Description of Artificial Sequence: Synthetic oligonucleotide
  Antisense strand to SEQ ID NO: 172534
guucaacacaaggucucua

SEQ ID NO: 172536 - RNA, 19 nt, Artificial Sequence
  Description of Artificial Sequence: Synthetic oligonucleotide
  Sense strand starting at position 3710 of SEQ ID NO: 2222
agaccuuguguugaacaca

SEQ ID NO: 172537 - RNA, 19 nt, Artificial Sequence
  Description of Artificial Sequence: Synthetic oligonucleotide
  Antisense strand to SEQ ID NO: 172536
uguguucaacacaaggucu

SEQ ID NO: 172538 - RNA, 19 nt, Artificial Sequence
  Description of Artificial Sequence: Synthetic oligonucleotide
  Sense strand starting at position 3724 of SEQ ID NO: 2222
acacacuugucuuugggua

SEQ ID NO: 172539 - RNA, 19 nt, Artificial Sequence
  Description of Artificial Sequence: Synthetic oligonucleotide
  Antisense strand to SEQ ID NO: 172538
uacccaaagacaagugugu

SEQ ID NO: 172540 - RNA, 19 nt, Artificial Sequence
  Description of Artificial Sequence: Synthetic oligonucleotide
  Sense strand starting at position 3725 of SEQ ID NO: 2222
cacacuugucuuuggguau

SEQ ID NO: 172541 - RNA, 19 nt, Artificial Sequence
  Description of Artificial Sequence: Synthetic oligonucleotide
  Antisense strand to SEQ ID NO: 172540
auacccaaagacaagugug

SEQ ID NO: 172542 - RNA, 19 nt, Artificial Sequence
  Description of Artificial Sequence: Synthetic oligonucleotide
  Sense strand starting at position 3729 of SEQ ID NO: 2222
cuugucuuuggguauugga

SEQ ID NO: 172543 - RNA, 19 nt, Artificial Sequence
  Description of Artificial Sequence: Synthetic oligonucleotide
  Antisense strand to SEQ ID NO: 172542
uccaauacccaaagacaag

SEQ ID NO: 172544 - RNA, 19 nt, Artificial Sequence
  Description of Artificial Sequence: Synthetic oligonucleotide
  Sense strand starting at position 3823 of SEQ ID NO: 2222
ugaggcuaugggugggaaa

SEQ ID NO: 172545 - RNA, 19 nt, Artificial Sequence
  Description of Artificial Sequence: Synthetic oligonucleotide
  Antisense strand to SEQ ID NO: 172544
uuucccacccauagccuca

SEQ ID NO: 172546 - RNA, 19 nt, Artificial Sequence
  Description of Artificial Sequence: Synthetic oligonucleotide
  Sense strand starting at position 3825 of SEQ ID NO: 2222
aggcuaugggugggaaaga

SEQ ID NO: 172547 - RNA, 19 nt, Artificial Sequence
  Description of Artificial Sequence: Synthetic oligonucleotide
  Antisense strand to SEQ ID NO: 172546
ucuuucccacccauagccu

SEQ ID NO: 172548 - RNA, 19 nt, Artificial Sequence
  Description of Artificial Sequence: Synthetic oligonucleotide
  Sense strand starting at position 3893 of SEQ ID NO: 2222
agguuugguauuggacauu

SEQ ID NO: 172549 - RNA, 19 nt, Artificial Sequence
  Description of Artificial Sequence: Synthetic oligonucleotide
  Antisense strand to SEQ ID NO: 172548
aauguccaauaccaaaccu

SEQ ID NO: 172550 - RNA, 19 nt, Artificial Sequence
  Description of Artificial Sequence: Synthetic oligonucleotide
  Sense strand starting at position 3953 of SEQ ID NO: 2222
uguuuagggaguuguggaa

SEQ ID NO: 172551 - RNA, 19 nt, Artificial Sequence
  Description of Artificial Sequence: Synthetic oligonucleotide
  Antisense strand to SEQ ID NO: 172550
uuccacaacucccuaaaca

SEQ ID NO: 172552 - RNA, 19 nt, Artificial Sequence
  Description of Artificial Sequence: Synthetic oligonucleotide
  Sense strand starting at position 9 of SEQ ID NO: 2223
uuugcucacuaugugauuu

SEQ ID NO: 172553 - RNA, 19 nt, Artificial Sequence
  Description of Artificial Sequence: Synthetic oligonucleotide
  Antisense strand to SEQ ID NO: 172552
aaaucacauagugagcaaa

SEQ ID NO: 172554 - RNA, 19 nt, Artificial Sequence
  Description of Artificial Sequence: Synthetic oligonucleotide
  Sense strand starting at position 129 of SEQ ID NO: 2223
ugugacaguaccugguauu

SEQ ID NO: 172555 - RNA, 19 nt, Artificial Sequence
  Description of Artificial Sequence: Synthetic oligonucleotide
  Antisense strand to SEQ ID NO: 172554
aauaccagguacugucaca

SEQ ID NO: 172556 - RNA, 19 nt, Artificial Sequence
  Description of Artificial Sequence: Synthetic oligonucleotide
  Sense strand starting at position 130 of SEQ ID NO: 2223
gugacaguaccugguauuu

SEQ ID NO: 172557 - RNA, 19 nt, Artificial Sequence
  Description of Artificial Sequence: Synthetic oligonucleotide
  Antisense strand to SEQ ID NO: 172556
aaauaccagguacugucac

SEQ ID NO: 172558 - RNA, 19 nt, Artificial Sequence
  Description of Artificial Sequence: Synthetic oligonucleotide
  Sense strand starting at position 132 of SEQ ID NO: 2223
gacaguaccugguauuuaa

SEQ ID NO: 172559 - RNA, 19 nt, Artificial Sequence
  Description of Artificial Sequence: Synthetic oligonucleotide
  Antisense strand to SEQ ID NO: 172558
uuaaauaccagguacuguc

SEQ ID NO: 172560 - RNA, 19 nt, Artificial Sequence
  Description of Artificial Sequence: Synthetic oligonucleotide
  Sense strand starting at position 346 of SEQ ID NO: 2223
gguaauucccagcaagaau

SEQ ID NO: 172561 - RNA, 19 nt, Artificial Sequence
  Description of Artificial Sequence: Synthetic oligonucleotide
  Antisense strand to SEQ ID NO: 172560
auucuugcugggaauuacc

SEQ ID NO: 172562 - RNA, 19 nt, Artificial Sequence
  Description of Artificial Sequence: Synthetic oligonucleotide
  Sense strand starting at position 641 of SEQ ID NO: 2223
ccaacucuagcuugagcaa

SEQ ID NO: 172563 - RNA, 19 nt, Artificial Sequence
  Description of Artificial Sequence: Synthetic oligonucleotide
  Antisense strand to SEQ ID NO: 172562
uugcucaagcuagaguugg

SEQ ID NO: 172564 - RNA, 19 nt, Artificial Sequence
  Description of Artificial Sequence: Synthetic oligonucleotide
  Sense strand starting at position 714 of SEQ ID NO: 2223
ugcuuacaaugcucaauga

SEQ ID NO: 172565 - RNA, 19 nt, Artificial Sequence
  Description of Artificial Sequence: Synthetic oligonucleotide
  Antisense strand to SEQ ID NO: 172564
ucauugagcauuguaagca

SEQ ID NO: 172566 - RNA, 19 nt, Artificial Sequence
  Description of Artificial Sequence: Synthetic oligonucleotide
  Sense strand starting at position 715 of SEQ ID NO: 2223
gcuuacaaugcucaaugaa

SEQ ID NO: 172567 - RNA, 19 nt, Artificial Sequence
  Description of Artificial Sequence: Synthetic oligonucleotide
  Antisense strand to SEQ ID NO: 172566
uucauugagcauuguaagc

SEQ ID NO: 172568 - RNA, 19 nt, Artificial Sequence
  Description of Artificial Sequence: Synthetic oligonucleotide
  Sense strand starting at position 868 of SEQ ID NO: 2223
ugccaauuacacgaucaua

SEQ ID NO: 172569 - RNA, 19 nt, Artificial Sequence
  Description of Artificial Sequence: Synthetic oligonucleotide
  Antisense strand to SEQ ID NO: 172568
uaugaucguguaauuggca

SEQ ID NO: 172570 - RNA, 19 nt, Artificial Sequence
  Description of Artificial Sequence: Synthetic oligonucleotide
  Sense strand starting at position 913 of SEQ ID NO: 2223
gacagugauuuguaacauc

SEQ ID NO: 172571 - RNA, 19 nt, Artificial Sequence
  Description of Artificial Sequence: Synthetic oligonucleotide
  Antisense strand to SEQ ID NO: 172570
gauguuacaaaucacuguc

SEQ ID NO: 172572 - RNA, 19 nt, Artificial Sequence
  Description of Artificial Sequence: Synthetic oligonucleotide
  Sense strand starting at position 916 of SEQ ID NO: 2223
agugauuuguaacaucuga

SEQ ID NO: 172573 - RNA, 19 nt, Artificial Sequence
  Description of Artificial Sequence: Synthetic oligonucleotide
  Antisense strand to SEQ ID NO: 172572
ucagauguuacaaaucacu

SEQ ID NO: 172574 - RNA, 19 nt, Artificial Sequence
  Description of Artificial Sequence: Synthetic oligonucleotide
  Sense strand starting at position 927 of SEQ ID NO: 2223
acaucugaacugugugaaa

SEQ ID NO: 172575 - RNA, 19 nt, Artificial Sequence
  Description of Artificial Sequence: Synthetic oligonucleotide
  Antisense strand to SEQ ID NO: 172574
uuucacacaguucagaugu

SEQ ID NO: 172576 - RNA, 19 nt, Artificial Sequence
  Description of Artificial Sequence: Synthetic oligonucleotide
  Sense strand starting at position 999 of SEQ ID NO: 2223
acguguaucaguucugcau

SEQ ID NO: 172577 - RNA, 19 nt, Artificial Sequence
  Description of Artificial Sequence: Synthetic oligonucleotide
  Antisense strand to SEQ ID NO: 172576
augcagaacugauacacgu

SEQ ID NO: 172578 - RNA, 19 nt, Artificial Sequence
  Description of Artificial Sequence: Synthetic oligonucleotide
  Sense strand starting at position 1000 of SEQ ID NO: 2223
cguguaucaguucugcauu

SEQ ID NO: 172579 - RNA, 19 nt, Artificial Sequence
  Description of Artificial Sequence: Synthetic oligonucleotide
  Antisense strand to SEQ ID NO: 172578
aaugcagaacugauacacg

SEQ ID NO: 172580 - RNA, 19 nt, Artificial Sequence
  Description of Artificial Sequence: Synthetic oligonucleotide
  Sense strand starting at position 1019 of SEQ ID NO: 2223
gugaaauucucaguaugag

SEQ ID NO: 172581 - RNA, 19 nt, Artificial Sequence
  Description of Artificial Sequence: Synthetic oligonucleotide
  Antisense strand to SEQ ID NO: 172580
cucauacugagaauuucac

SEQ ID NO: 172582 - RNA, 19 nt, Artificial Sequence
  Description of Artificial Sequence: Synthetic oligonucleotide
  Sense strand starting at position 1136 of SEQ ID NO: 2223
ggagaaggcggguagucau

SEQ ID NO: 172583 - RNA, 19 nt, Artificial Sequence
  Description of Artificial Sequence: Synthetic oligonucleotide
  Antisense strand to SEQ ID NO: 172582
augacuacccgccuucucc

SEQ ID NO: 172584 - RNA, 19 nt, Artificial Sequence
  Description of Artificial Sequence: Synthetic oligonucleotide
  Sense strand starting at position 1285 of SEQ ID NO: 2223
gaaguuucuaaacggguga

SEQ ID NO: 172585 - RNA, 19 nt, Artificial Sequence
  Description of Artificial Sequence: Synthetic oligonucleotide
  Antisense strand to SEQ ID NO: 172584
ucacccguuuagaaacuuc

SEQ ID NO: 172586 - RNA, 19 nt, Artificial Sequence
  Description of Artificial Sequence: Synthetic oligonucleotide
  Sense strand starting at position 1287 of SEQ ID NO: 2223
aguuucuaaacgggugaga

SEQ ID NO: 172587 - RNA, 19 nt, Artificial Sequence
  Description of Artificial Sequence: Synthetic oligonucleotide
  Antisense strand to SEQ ID NO: 172586
ucucacccguuuagaaacu

SEQ ID NO: 172588 - RNA, 19 nt, Artificial Sequence
  Description of Artificial Sequence: Synthetic oligonucleotide
  Sense strand starting at position 1442 of SEQ ID NO: 2223
aggugaagucgcuaucgag

SEQ ID NO: 172589 - RNA, 19 nt, Artificial Sequence
  Description of Artificial Sequence: Synthetic oligonucleotide
  Antisense strand to SEQ ID NO: 172588
cucgauagcgacuucaccu

SEQ ID NO: 172590 - RNA, 19 nt, Artificial Sequence
  Description of Artificial Sequence: Synthetic oligonucleotide
  Sense strand starting at position 1870 of SEQ ID NO: 2223
gcgguaauugugggaaaug

SEQ ID NO: 172591 - RNA, 19 nt, Artificial Sequence
  Description of Artificial Sequence: Synthetic oligonucleotide
  Antisense strand to SEQ ID NO: 172590
cauuucccacaauuaccgc

SEQ ID NO: 172592 - RNA, 19 nt, Artificial Sequence
  Description of Artificial Sequence: Synthetic oligonucleotide
  Sense strand starting at position 2529 of SEQ ID NO: 2223
cuuucagacggauguaaga

SEQ ID NO: 172593 - RNA, 19 nt, Artificial Sequence
  Description of Artificial Sequence: Synthetic oligonucleotide
  Antisense strand to SEQ ID NO: 172592
ucuuacauccgucugaaag

SEQ ID NO: 172594 - RNA, 19 nt, Artificial Sequence
  Description of Artificial Sequence: Synthetic oligonucleotide
  Sense strand starting at position 2543 of SEQ ID NO: 2223
uaagauuagcugugucaag

SEQ ID NO: 172595 - RNA, 19 nt, Artificial Sequence
  Description of Artificial Sequence: Synthetic oligonucleotide
  Antisense strand to SEQ ID NO: 172594
cuugacacagcuaaucuua

SEQ ID NO: 172596 - RNA, 19 nt, Artificial Sequence
  Description of Artificial Sequence: Synthetic oligonucleotide
  Sense strand starting at position 2572 of SEQ ID NO: 2223
acaggagacuacuacauaa

SEQ ID NO: 172597 - RNA, 19 nt, Artificial Sequence
  Description of Artificial Sequence: Synthetic oligonucleotide
  Antisense strand to SEQ ID NO: 172596
uuauguaguagucuccugu

SEQ ID NO: 172598 - RNA, 19 nt, Artificial Sequence
  Description of Artificial Sequence: Synthetic oligonucleotide
  Sense strand starting at position 2718 of SEQ ID NO: 2223
guuaauuagggccgaaaga

SEQ ID NO: 172599 - RNA, 19 nt, Artificial Sequence
  Description of Artificial Sequence: Synthetic oligonucleotide
  Antisense strand to SEQ ID NO: 172598
ucuuucggcccuaauuaac

SEQ ID NO: 172600 - RNA, 19 nt, Artificial Sequence
  Description of Artificial Sequence: Synthetic oligonucleotide
  Sense strand starting at position 2781 of SEQ ID NO: 2223
uaugcauagucagugaaga

SEQ ID NO: 172601 - RNA, 19 nt, Artificial Sequence
  Description of Artificial Sequence: Synthetic oligonucleotide
  Antisense strand to SEQ ID NO: 172600
ucuucacugacuaugcaua

SEQ ID NO: 172602 - RNA, 19 nt, Artificial Sequence
  Description of Artificial Sequence: Synthetic oligonucleotide
  Sense strand starting at position 2782 of SEQ ID NO: 2223
augcauagucagugaagau

SEQ ID NO: 172603 - RNA, 19 nt, Artificial Sequence
  Description of Artificial Sequence: Synthetic oligonucleotide
  Antisense strand to SEQ ID NO: 172602
aucuucacugacuaugcau

SEQ ID NO: 172604 - RNA, 19 nt, Artificial Sequence
  Description of Artificial Sequence: Synthetic oligonucleotide
  Sense strand starting at position 2783 of SEQ ID NO: 2223
ugcauagucagugaagaua

SEQ ID NO: 172605 - RNA, 19 nt, Artificial Sequence
  Description of Artificial Sequence: Synthetic oligonucleotide
  Antisense strand to SEQ ID NO: 172604
uaucuucacugacuaugca

SEQ ID NO: 172606 - RNA, 19 nt, Artificial Sequence
  Description of Artificial Sequence: Synthetic oligonucleotide
  Sense strand starting at position 3232 of SEQ ID NO: 2223
uuauuucuugcauggcaau

SEQ ID NO: 172607 - RNA, 19 nt, Artificial Sequence
  Description of Artificial Sequence: Synthetic oligonucleotide
  Antisense strand to SEQ ID NO: 172606
auugccaugcaagaaauaa

SEQ ID NO: 172608 - RNA, 19 nt, Artificial Sequence
  Description of Artificial Sequence: Synthetic oligonucleotide
  Sense strand starting at position 3358 of SEQ ID NO: 2223
gagagcuagagauguugaa

SEQ ID NO: 172609 - RNA, 19 nt, Artificial Sequence
  Description of Artificial Sequence: Synthetic oligonucleotide
  Antisense strand to SEQ ID NO: 172608
uucaacaucucuagcucuc

SEQ ID NO: 172610 - RNA, 19 nt, Artificial Sequence
  Description of Artificial Sequence: Synthetic oligonucleotide
  Sense strand starting at position 3405 of SEQ ID NO: 2223
auugacuugucugcgagag

SEQ ID NO: 172611 - RNA, 19 nt, Artificial Sequence
  Description of Artificial Sequence: Synthetic oligonucleotide
  Antisense strand to SEQ ID NO: 172610
cucucgcagacaagucaau

SEQ ID NO: 172612 - RNA, 19 nt, Artificial Sequence
  Description of Artificial Sequence: Synthetic oligonucleotide
  Sense strand starting at position 3440 of SEQ ID NO: 2223
gaagcaaauuuguggaaac

SEQ ID NO: 172613 - RNA, 19 nt, Artificial Sequence
  Description of Artificial Sequence: Synthetic oligonucleotide
  Antisense strand to SEQ ID NO: 172612
guuuccacaaauuugcuuc

SEQ ID NO: 172614 - RNA, 19 nt, Artificial Sequence
  Description of Artificial Sequence: Synthetic oligonucleotide
  Sense strand starting at position 3475 of SEQ ID NO: 2223
auagaaccaguuugucuau

SEQ ID NO: 172615 - RNA, 19 nt, Artificial Sequence
  Description of Artificial Sequence: Synthetic oligonucleotide
  Antisense strand to SEQ ID NO: 172614
auagacaaacugguucuau

SEQ ID NO: 172616 - RNA, 19 nt, Artificial Sequence
  Description of Artificial Sequence: Synthetic oligonucleotide
  Sense strand starting at position 3477 of SEQ ID NO: 2223
agaaccaguuugucuauua

SEQ ID NO: 172617 - RNA, 19 nt, Artificial Sequence
  Description of Artificial Sequence: Synthetic oligonucleotide
  Antisense strand to SEQ ID NO: 172616
uaauagacaaacugguucu

SEQ ID NO: 172618 - RNA, 19 nt, Artificial Sequence
  Description of Artificial Sequence: Synthetic oligonucleotide
  Sense strand starting at position 3704 of SEQ ID NO: 2223
acguaaugcacaggacuuu

SEQ ID NO: 172619 - RNA, 19 nt, Artificial Sequence
  Description of Artificial Sequence: Synthetic oligonucleotide
  Antisense strand to SEQ ID NO: 172618
aaaguccugugcauuacgu

SEQ ID NO: 172620 - RNA, 19 nt, Artificial Sequence
  Description of Artificial Sequence: Synthetic oligonucleotide
  Sense strand starting at position 3790 of SEQ ID NO: 2223
aaagguaaaugggaucuga

SEQ ID NO: 172621 - RNA, 19 nt, Artificial Sequence
  Description of Artificial Sequence: Synthetic oligonucleotide
  Antisense strand to SEQ ID NO: 172620
ucagaucccauuuaccuuu

SEQ ID NO: 172622 - RNA, 19 nt, Artificial Sequence
  Description of Artificial Sequence: Synthetic oligonucleotide
  Sense strand starting at position 3825 of SEQ ID NO: 2223
uaagauugcgcagaaagcu

SEQ ID NO: 172623 - RNA, 19 nt, Artificial Sequence
  Description of Artificial Sequence: Synthetic oligonucleotide
  Antisense strand to SEQ ID NO: 172622
agcuuucugcgcaaucuua

SEQ ID NO: 172624 - RNA, 19 nt, Artificial Sequence
  Description of Artificial Sequence: Synthetic oligonucleotide
  Sense strand starting at position 3835 of SEQ ID NO: 2223
cagaaagcucuguaguagu

SEQ ID NO: 172625 - RNA, 19 nt, Artificial Sequence
  Description of Artificial Sequence: Synthetic oligonucleotide
  Antisense strand to SEQ ID NO: 172624
acuacuacagagcuuucug

SEQ ID NO: 172626 - RNA, 19 nt, Artificial Sequence
  Description of Artificial Sequence: Synthetic oligonucleotide
  Sense strand starting at position 3842 of SEQ ID NO: 2223
cucuguaguaguggagauu

SEQ ID NO: 172627 - RNA, 19 nt, Artificial Sequence
  Description of Artificial Sequence: Synthetic oligonucleotide
  Antisense strand to SEQ ID NO: 172626
aaucuccacuacuacagag

SEQ ID NO: 172628 - RNA, 19 nt, Artificial Sequence
  Description of Artificial Sequence: Synthetic oligonucleotide
  Sense strand starting at position 3843 of SEQ ID NO: 2223
ucuguaguaguggagauua

SEQ ID NO: 172629 - RNA, 19 nt, Artificial Sequence
  Description of Artificial Sequence: Synthetic oligonucleotide
  Antisense strand to SEQ ID NO: 172628
uaaucuccacuacuacaga

SEQ ID NO: 172630 - RNA, 19 nt, Artificial Sequence
  Description of Artificial Sequence: Synthetic oligonucleotide
  Sense strand starting at position 3845 of SEQ ID NO: 2223
uguaguaguggagauuaua

SEQ ID NO: 172631 - RNA, 19 nt, Artificial Sequence
  Description of Artificial Sequence: Synthetic oligonucleotide
  Antisense strand to SEQ ID NO: 172630
uauaaucuccacuacuaca

SEQ ID NO: 172632 - RNA, 19 nt, Artificial Sequence
  Description of Artificial Sequence: Synthetic oligonucleotide
  Sense strand starting at position 3815 of SEQ ID NO: 2224
gagacagugguguggcauu

SEQ ID NO: 172633 - RNA, 19 nt, Artificial Sequence
  Description of Artificial Sequence: Synthetic oligonucleotide
  Antisense strand to SEQ ID NO: 172632
aaugccacaccacugucuc

SEQ ID NO: 172634 - RNA, 19 nt, Artificial Sequence
  Description of Artificial Sequence: Synthetic oligonucleotide
  Sense strand starting at position 3744 of SEQ ID NO: 2224
agauguccuuucccucaga

SEQ ID NO: 172635 - RNA, 19 nt, Artificial Sequence
  Description of Artificial Sequence: Synthetic oligonucleotide
  Antisense strand to SEQ ID NO: 172634
ucugagggaaaggacaucu

SEQ ID NO: 172636 - RNA, 19 nt, Artificial Sequence
  Description of Artificial Sequence: Synthetic oligonucleotide
  Sense strand starting at position 3731 of SEQ ID NO: 2224
auggcauggcuuuagaugu

SEQ ID NO: 172637 - RNA, 19 nt, Artificial Sequence
  Description of Artificial Sequence: Synthetic oligonucleotide
  Antisense strand to SEQ ID NO: 172636
acaucuaaagccaugccau

SEQ ID NO: 172638 - RNA, 19 nt, Artificial Sequence
  Description of Artificial Sequence: Synthetic oligonucleotide
  Sense strand starting at position 3444 of SEQ ID NO: 2224
uauguuauugaugagcuau

SEQ ID NO: 172639 - RNA, 19 nt, Artificial Sequence
  Description of Artificial Sequence: Synthetic oligonucleotide
  Antisense strand to SEQ ID NO: 172638
auagcucaucaauaacaua

SEQ ID NO: 172640 - RNA, 19 nt, Artificial Sequence
  Description of Artificial Sequence: Synthetic oligonucleotide
  Sense strand starting at position 3382 of SEQ ID NO: 2224
agaaacccaugagauuaau

SEQ ID NO: 172641 - RNA, 19 nt, Artificial Sequence
  Description of Artificial Sequence: Synthetic oligonucleotide
  Antisense strand to SEQ ID NO: 172640
auuaaucucauggguuucu

SEQ ID NO: 172642 - RNA, 19 nt, Artificial Sequence
  Description of Artificial Sequence: Synthetic oligonucleotide
  Sense strand starting at position 3329 of SEQ ID NO: 2224
uagcgugagcuacauauau

SEQ ID NO: 172643 - RNA, 19 nt, Artificial Sequence
  Description of Artificial Sequence: Synthetic oligonucleotide
  Antisense strand to SEQ ID NO: 172642
auauauguagcucacgcua

SEQ ID NO: 172644 - RNA, 19 nt, Artificial Sequence
  Description of Artificial Sequence: Synthetic oligonucleotide
  Sense strand starting at position 3323 of SEQ ID NO: 2224
gaaauauagcgugagcuac

SEQ ID NO: 172645 - RNA, 19 nt, Artificial Sequence
  Description of Artificial Sequence: Synthetic oligonucleotide
  Antisense strand to SEQ ID NO: 172644
guagcucacgcuauauuuc

SEQ ID NO: 172646 - RNA, 19 nt, Artificial Sequence
  Description of Artificial Sequence: Synthetic oligonucleotide
  Sense strand starting at position 3322 of SEQ ID NO: 2224
agaaauauagcgugagcua

SEQ ID NO: 172647 - RNA, 19 nt, Artificial Sequence
  Description of Artificial Sequence: Synthetic oligonucleotide
  Antisense strand to SEQ ID NO: 172646
uagcucacgcuauauuucu

SEQ ID NO: 172648 - RNA, 19 nt, Artificial Sequence
  Description of Artificial Sequence: Synthetic oligonucleotide
  Sense strand starting at position 3227 of SEQ ID NO: 2224
gguucagugaggcgagauu

SEQ ID NO: 172649 - RNA, 19 nt, Artificial Sequence
  Description of Artificial Sequence: Synthetic oligonucleotide
  Antisense strand to SEQ ID NO: 172648
aaucucgccucacugaacc

SEQ ID NO: 172650 - RNA, 19 nt, Artificial Sequence
  Description of Artificial Sequence: Synthetic oligonucleotide
  Sense strand starting at position 2984 of SEQ ID NO: 2224
cccuguccgcuagaaauau

SEQ ID NO: 172651 - RNA, 19 nt, Artificial Sequence
  Description of Artificial Sequence: Synthetic oligonucleotide
  Antisense strand to SEQ ID NO: 172650
auauuucuagcggacaggg

SEQ ID NO: 172652 - RNA, 19 nt, Artificial Sequence
  Description of Artificial Sequence: Synthetic oligonucleotide
  Sense strand starting at position 2982 of SEQ ID NO: 2224
agcccuguccgcuagaaau

SEQ ID NO: 172653 - RNA, 19 nt, Artificial Sequence
  Description of Artificial Sequence: Synthetic oligonucleotide
  Antisense strand to SEQ ID NO: 172652
auuucuagcggacagggcu

SEQ ID NO: 172654 - RNA, 19 nt, Artificial Sequence
  Description of Artificial Sequence: Synthetic oligonucleotide
  Sense strand starting at position 2937 of SEQ ID NO: 2224
cuuuguucugcggagauga

SEQ ID NO: 172655 - RNA, 19 nt, Artificial Sequence
  Description of Artificial Sequence: Synthetic oligonucleotide
  Antisense strand to SEQ ID NO: 172654
ucaucuccgcagaacaaag

SEQ ID NO: 172656 - RNA, 19 nt, Artificial Sequence
  Description of Artificial Sequence: Synthetic oligonucleotide
  Sense strand starting at position 2836 of SEQ ID NO: 2224
uccugauguguaugaacua

SEQ ID NO: 172657 - RNA, 19 nt, Artificial Sequence
  Description of Artificial Sequence: Synthetic oligonucleotide
  Antisense strand to SEQ ID NO: 172656
uaguucauacacaucagga

SEQ ID NO: 172658 - RNA, 19 nt, Artificial Sequence
  Description of Artificial Sequence: Synthetic oligonucleotide
  Sense strand starting at position 2834 of SEQ ID NO: 2224
ccuccugauguguaugaac

SEQ ID NO: 172659 - RNA, 19 nt, Artificial Sequence
  Description of Artificial Sequence: Synthetic oligonucleotide
  Antisense strand to SEQ ID NO: 172658
guucauacacaucaggagg

SEQ ID NO: 172660 - RNA, 19 nt, Artificial Sequence
  Description of Artificial Sequence: Synthetic oligonucleotide
  Sense strand starting at position 2833 of SEQ ID NO: 2224
uccuccugauguguaugaa

SEQ ID NO: 172661 - RNA, 19 nt, Artificial Sequence
  Description of Artificial Sequence: Synthetic oligonucleotide
  Antisense strand to SEQ ID NO: 172660
uucauacacaucaggagga

SEQ ID NO: 172662 - RNA, 19 nt, Artificial Sequence
  Description of Artificial Sequence: Synthetic oligonucleotide
  Sense strand starting at position 2485 of SEQ ID NO: 2224
guaggacguaaucaauaca

SEQ ID NO: 172663 - RNA, 19 nt, Artificial Sequence
  Description of Artificial Sequence: Synthetic oligonucleotide
  Antisense strand to SEQ ID NO: 172662
uguauugauuacguccuac

SEQ ID NO: 172664 - RNA, 19 nt, Artificial Sequence
  Description of Artificial Sequence: Synthetic oligonucleotide
  Sense strand starting at position 2481 of SEQ ID NO: 2224
guauguaggacguaaucaa

SEQ ID NO: 172665 - RNA, 19 nt, Artificial Sequence
  Description of Artificial Sequence: Synthetic oligonucleotide
  Antisense strand to SEQ ID NO: 172664
uugauuacguccuacauac

SEQ ID NO: 172666 - RNA, 19 nt, Artificial Sequence
  Description of Artificial Sequence: Synthetic oligonucleotide
  Sense strand starting at position 2397 of SEQ ID NO: 2224
ccugucauucccugcuaga

SEQ ID NO: 172667 - RNA, 19 nt, Artificial Sequence
  Description of Artificial Sequence: Synthetic oligonucleotide
  Antisense strand to SEQ ID NO: 172666
ucuagcagggaaugacagg

SEQ ID NO: 172668 - RNA, 19 nt, Artificial Sequence
  Description of Artificial Sequence: Synthetic oligonucleotide
  Sense strand starting at position 2372 of SEQ ID NO: 2224
ugcuuaauugccuauuaug

SEQ ID NO: 172669 - RNA, 19 nt, Artificial Sequence
  Description of Artificial Sequence: Synthetic oligonucleotide
  Antisense strand to SEQ ID NO: 172668
cauaauaggcaauuaagca

SEQ ID NO: 172670 - RNA, 19 nt, Artificial Sequence
  Description of Artificial Sequence: Synthetic oligonucleotide
  Sense strand starting at position 2198 of SEQ ID NO: 2224
ucccuugccugggauauuu

SEQ ID NO: 172671 - RNA, 19 nt, Artificial Sequence
  Description of Artificial Sequence: Synthetic oligonucleotide
  Antisense strand to SEQ ID NO: 172670
aaauaucccaggcaaggga

SEQ ID NO: 172672 - RNA, 19 nt, Artificial Sequence
  Description of Artificial Sequence: Synthetic oligonucleotide
  Sense strand starting at position 2197 of SEQ ID NO: 2224
cucccuugccugggauauu

SEQ ID NO: 172673 - RNA, 19 nt, Artificial Sequence
  Description of Artificial Sequence: Synthetic oligonucleotide
  Antisense strand to SEQ ID NO: 172672
aauaucccaggcaagggag

SEQ ID NO: 172674 - RNA, 19 nt, Artificial Sequence
  Description of Artificial Sequence: Synthetic oligonucleotide
  Sense strand starting at position 1997 of SEQ ID NO: 2224
gaagcaggauuugagugaa

SEQ ID NO: 172675 - RNA, 19 nt, Artificial Sequence
  Description of Artificial Sequence: Synthetic oligonucleotide
  Antisense strand to SEQ ID NO: 172674
uucacucaaauccugcuuc

SEQ ID NO: 172676 - RNA, 19 nt, Artificial Sequence
  Description of Artificial Sequence: Synthetic oligonucleotide
  Sense strand starting at position 1709 of SEQ ID NO: 2224
cccuaaucuggcuagaaac

SEQ ID NO: 172677 - RNA, 19 nt, Artificial Sequence
  Description of Artificial Sequence: Synthetic oligonucleotide
  Antisense strand to SEQ ID NO: 172676
guuucuagccagauuaggg

SEQ ID NO: 172678 - RNA, 19 nt, Artificial Sequence
  Description of Artificial Sequence: Synthetic oligonucleotide
  Sense strand starting at position 1478 of SEQ ID NO: 2224
ggaggaaugucgucuaucu

SEQ ID NO: 172679 - RNA, 19 nt, Artificial Sequence
  Description of Artificial Sequence: Synthetic oligonucleotide
  Antisense strand to SEQ ID NO: 172678
agauagacgacauuccucc

SEQ ID NO: 172680 - RNA, 19 nt, Artificial Sequence
  Description of Artificial Sequence: Synthetic oligonucleotide
  Sense strand starting at position 1437 of SEQ ID NO: 2224
gcaguuagggcucggaaca

SEQ ID NO: 172681 - RNA, 19 nt, Artificial Sequence
  Description of Artificial Sequence: Synthetic oligonucleotide
  Antisense strand to SEQ ID NO: 172680
uguuccgagcccuaacugc

SEQ ID NO: 172682 - RNA, 19 nt, Artificial Sequence
  Description of Artificial Sequence: Synthetic oligonucleotide
  Sense strand starting at position 1401 of SEQ ID NO: 2224
gaggcauuccugugaaggg

SEQ ID NO: 172683 - RNA, 19 nt, Artificial Sequence
  Description of Artificial Sequence: Synthetic oligonucleotide
  Antisense strand to SEQ ID NO: 172682
cccuucacaggaaugccuc

SEQ ID NO: 172684 - RNA, 19 nt, Artificial Sequence
  Description of Artificial Sequence: Synthetic oligonucleotide
  Sense strand starting at position 1059 of SEQ ID NO: 2224
ugacuucguuggucugaaa

SEQ ID NO: 172685 - RNA, 19 nt, Artificial Sequence
  Description of Artificial Sequence: Synthetic oligonucleotide
  Antisense strand to SEQ ID NO: 172684
uuucagaccaacgaaguca

SEQ ID NO: 172686 - RNA, 19 nt, Artificial Sequence
  Description of Artificial Sequence: Synthetic oligonucleotide
  Sense strand starting at position 1058 of SEQ ID NO: 2224
gugacuucguuggucugaa

SEQ ID NO: 172687 - RNA, 19 nt, Artificial Sequence
  Description of Artificial Sequence: Synthetic oligonucleotide
  Antisense strand to SEQ ID NO: 172686
uucagaccaacgaagucac

SEQ ID NO: 172688 - RNA, 19 nt, Artificial Sequence
  Description of Artificial Sequence: Synthetic oligonucleotide
  Sense strand starting at position 907 of SEQ ID NO: 2224
uuacauccugacgagguau

SEQ ID NO: 172689 - RNA, 19 nt, Artificial Sequence
  Description of Artificial Sequence: Synthetic oligonucleotide
  Antisense strand to SEQ ID NO: 172688
auaccucgucaggauguaa

SEQ ID NO: 172690 - RNA, 19 nt, Artificial Sequence
  Description of Artificial Sequence: Synthetic oligonucleotide
  Sense strand starting at position 867 of SEQ ID NO: 2224
ugggucauucugggaauau

SEQ ID NO: 172691 - RNA, 19 nt, Artificial Sequence
  Description of Artificial Sequence: Synthetic oligonucleotide
  Antisense strand to SEQ ID NO: 172690
auauucccagaaugaccca

SEQ ID NO: 172692 - RNA, 19 nt, Artificial Sequence
  Description of Artificial Sequence: Synthetic oligonucleotide
  Sense strand starting at position 856 of SEQ ID NO: 2224
gacguagguccugggucau

SEQ ID NO: 172693 - RNA, 19 nt, Artificial Sequence
  Description of Artificial Sequence: Synthetic oligonucleotide
  Antisense strand to SEQ ID NO: 172692
augacccaggaccuacguc

SEQ ID NO: 172694 - RNA, 19 nt, Artificial Sequence
  Description of Artificial Sequence: Synthetic oligonucleotide
  Sense strand starting at position 731 of SEQ ID NO: 2224
ggaugagucaccugacauc

SEQ ID NO: 172695 - RNA, 19 nt, Artificial Sequence
  Description of Artificial Sequence: Synthetic oligonucleotide
  Antisense strand to SEQ ID NO: 172694
gaugucaggugacucaucc

SEQ ID NO: 172696 - RNA, 19 nt, Artificial Sequence
  Description of Artificial Sequence: Synthetic oligonucleotide
  Sense strand starting at position 658 of SEQ ID NO: 2224
aaugguucgucucuuagag

SEQ ID NO: 172697 - RNA, 19 nt, Artificial Sequence
  Description of Artificial Sequence: Synthetic oligonucleotide
  Antisense strand to SEQ ID NO: 172696
cucuaagagacgaaccauu

SEQ ID NO: 172698 - RNA, 19 nt, Artificial Sequence
  Description of Artificial Sequence: Synthetic oligonucleotide
  Sense strand starting at position 655 of SEQ ID NO: 2224
cugaaugguucgucucuua

SEQ ID NO: 172699 - RNA, 19 nt, Artificial Sequence
  Description of Artificial Sequence: Synthetic oligonucleotide
  Antisense strand to SEQ ID NO: 172698
uaagagacgaaccauucag

SEQ ID NO: 172700 - RNA, 19 nt, Artificial Sequence
  Description of Artificial Sequence: Synthetic oligonucleotide
  Sense strand starting at position 590 of SEQ ID NO: 2224
guggguuagucagcccaga

SEQ ID NO: 172701 - RNA, 19 nt, Artificial Sequence
  Description of Artificial Sequence: Synthetic oligonucleotide
  Antisense strand to SEQ ID NO: 172700
ucugggcugacuaacccac

SEQ ID NO: 172702 - RNA, 19 nt, Artificial Sequence
  Description of Artificial Sequence: Synthetic oligonucleotide
  Sense strand starting at position 466 of SEQ ID NO: 2224
aggaaagcaugucucacau

SEQ ID NO: 172703 - RNA, 19 nt, Artificial Sequence
  Description of Artificial Sequence: Synthetic oligonucleotide
  Antisense strand to SEQ ID NO: 172702
augugagacaugcuuuccu

SEQ ID NO: 172704 - RNA, 19 nt, Artificial Sequence
  Description of Artificial Sequence: Synthetic oligonucleotide
  Sense strand starting at position 203 of SEQ ID NO: 2224
gggcuccaccucuaaacau

SEQ ID NO: 172705 - RNA, 19 nt, Artificial Sequence
  Description of Artificial Sequence: Synthetic oligonucleotide
  Antisense strand to SEQ ID NO: 172704
auguuuagagguggagccc

SEQ ID NO: 172706 - RNA, 19 nt, Artificial Sequence
  Description of Artificial Sequence: Synthetic oligonucleotide
  Sense strand starting at position 50 of SEQ ID NO: 2224
ccuugaugucccugugaug

SEQ ID NO: 172707 - RNA, 19 nt, Artificial Sequence
  Description of Artificial Sequence: Synthetic oligonucleotide
  Antisense strand to SEQ ID NO: 172706
caucacagggacaucaagg

SEQ ID NO: 172708 - RNA, 19 nt, Artificial Sequence
  Description of Artificial Sequence: Synthetic oligonucleotide
  Sense strand starting at position 38 of SEQ ID NO: 2224
agucaauugucaccuugau

SEQ ID NO: 172709 - RNA, 19 nt, Artificial Sequence
  Description of Artificial Sequence: Synthetic oligonucleotide
  Antisense strand to SEQ ID NO: 172708
aucaaggugacaauugacu

SEQ ID NO: 172710 - RNA, 19 nt, Artificial Sequence
  Description of Artificial Sequence: Synthetic oligonucleotide
  Sense strand starting at position 35 of SEQ ID NO: 2224
cugagucaauugucaccuu

SEQ ID NO: 172711 - RNA, 19 nt, Artificial Sequence
  Description of Artificial Sequence: Synthetic oligonucleotide
  Antisense strand to SEQ ID NO: 172710
aaggugacaauugacucag

SEQ ID NO: 172712 - RNA, 19 nt, Artificial Sequence
  Description of Artificial Sequence: Synthetic oligonucleotide
  Sense strand starting at position 3470 of SEQ ID NO: 2225
agucuagugcaggacagau

SEQ ID NO: 172713 - RNA, 19 nt, Artificial Sequence
  Description of Artificial Sequence: Synthetic oligonucleotide
  Antisense strand to SEQ ID NO: 172712
aucuguccugcacuagacu

SEQ ID NO: 172714 - RNA, 19 nt, Artificial Sequence
  Description of Artificial Sequence: Synthetic oligonucleotide
  Sense strand starting at position 3428 of SEQ ID NO: 2225
gccaaagcauccucuggaa

SEQ ID NO: 172715 - RNA, 19 nt, Artificial Sequence
  Description of Artificial Sequence: Synthetic oligonucleotide
  Antisense strand to SEQ ID NO: 172714
uuccagaggaugcuuuggc

SEQ ID NO: 172716 - RNA, 19 nt, Artificial Sequence
  Description of Artificial Sequence: Synthetic oligonucleotide
  Sense strand starting at position 3297 of SEQ ID NO: 2225
ggcuaacuggaggguuaaa

SEQ ID NO: 172717 - RNA, 19 nt, Artificial Sequence
  Description of Artificial Sequence: Synthetic oligonucleotide
  Antisense strand to SEQ ID NO: 172716
uuuaacccuccaguuagcc

SEQ ID NO: 172718 - RNA, 19 nt, Artificial Sequence
  Description of Artificial Sequence: Synthetic oligonucleotide
  Sense strand starting at position 3296 of SEQ ID NO: 2225
aggcuaacuggaggguuaa

SEQ ID NO: 172719 - RNA, 19 nt, Artificial Sequence
  Description of Artificial Sequence: Synthetic oligonucleotide
  Antisense strand to SEQ ID NO: 172718
uuaacccuccaguuagccu

SEQ ID NO: 172720 - RNA, 19 nt, Artificial Sequence
  Description of Artificial Sequence: Synthetic oligonucleotide
  Sense strand starting at position 3135 of SEQ ID NO: 2225
acacuuugacaacgugaca

SEQ ID NO: 172721 - RNA, 19 nt, Artificial Sequence
  Description of Artificial Sequence: Synthetic oligonucleotide
  Antisense strand to SEQ ID NO: 172720
ugucacguugucaaagugu

SEQ ID NO: 172722 - RNA, 19 nt, Artificial Sequence
  Description of Artificial Sequence: Synthetic oligonucleotide
  Sense strand starting at position 3099 of SEQ ID NO: 2225
agaaaucggcgauaucuag

SEQ ID NO: 172723 - RNA, 19 nt, Artificial Sequence
  Description of Artificial Sequence: Synthetic oligonucleotide
  Antisense strand to SEQ ID NO: 172722
cuagauaucgccgauuucu

SEQ ID NO: 172724 - RNA, 19 nt, Artificial Sequence
  Description of Artificial Sequence: Synthetic oligonucleotide
  Sense strand starting at position 3097 of SEQ ID NO: 2225
ccagaaaucggcgauaucu

SEQ ID NO: 172725 - RNA, 19 nt, Artificial Sequence
  Description of Artificial Sequence: Synthetic oligonucleotide
  Antisense strand to SEQ ID NO: 172724
agauaucgccgauuucugg

SEQ ID NO: 172726 - RNA, 19 nt, Artificial Sequence
  Description of Artificial Sequence: Synthetic oligonucleotide
  Sense strand starting at position 3063 of SEQ ID NO: 2225
uuaauuaaugcugggauca

SEQ ID NO: 172727 - RNA, 19 nt, Artificial Sequence
  Description of Artificial Sequence: Synthetic oligonucleotide
  Antisense strand to SEQ ID NO: 172726
ugaucccagcauuaauuaa

SEQ ID NO: 172728 - RNA, 19 nt, Artificial Sequence
  Description of Artificial Sequence: Synthetic oligonucleotide
  Sense strand starting at position 2998 of SEQ ID NO: 2225
gcccguuugcuugugugaa

SEQ ID NO: 172729 - RNA, 19 nt, Artificial Sequence
  Description of Artificial Sequence: Synthetic oligonucleotide
  Antisense strand to SEQ ID NO: 172728
uucacacaagcaaacgggc

SEQ ID NO: 172730 - RNA, 19 nt, Artificial Sequence
  Description of Artificial Sequence: Synthetic oligonucleotide
  Sense strand starting at position 2432 of SEQ ID NO: 2225
ugcgucugaacguugcaaa

SEQ ID NO: 172731 - RNA, 19 nt, Artificial Sequence
  Description of Artificial Sequence: Synthetic oligonucleotide
  Antisense strand to SEQ ID NO: 172730
uuugcaacguucagacgca

SEQ ID NO: 172732 - RNA, 19 nt, Artificial Sequence
  Description of Artificial Sequence: Synthetic oligonucleotide
  Sense strand starting at position 2414 of SEQ ID NO: 2225
auggaaaucuagucagacu

SEQ ID NO: 172733 - RNA, 19 nt, Artificial Sequence
  Description of Artificial Sequence: Synthetic oligonucleotide
  Antisense strand to SEQ ID NO: 172732
agucugacuagauuuccau

SEQ ID NO: 172734 - RNA, 19 nt, Artificial Sequence
  Description of Artificial Sequence: Synthetic oligonucleotide
  Sense strand starting at position 2403 of SEQ ID NO: 2225
ccuuacuccggauggaaau

SEQ ID NO: 172735 - RNA, 19 nt, Artificial Sequence
  Description of Artificial Sequence: Synthetic oligonucleotide
  Antisense strand to SEQ ID NO: 172734
auuuccauccggaguaagg

SEQ ID NO: 172736 - RNA, 19 nt, Artificial Sequence
  Description of Artificial Sequence: Synthetic oligonucleotide
  Sense strand starting at position 2401 of SEQ ID NO: 2225
uuccuuacuccggauggaa

SEQ ID NO: 172737 - RNA, 19 nt, Artificial Sequence
  Description of Artificial Sequence: Synthetic oligonucleotide
  Antisense strand to SEQ ID NO: 172736
uuccauccggaguaaggaa

SEQ ID NO: 172738 - RNA, 19 nt, Artificial Sequence
  Description of Artificial Sequence: Synthetic oligonucleotide
  Sense strand starting at position 2320 of SEQ ID NO: 2225
ugggcuuccacuugagaga

SEQ ID NO: 172739 - RNA, 19 nt, Artificial Sequence
  Description of Artificial Sequence: Synthetic oligonucleotide
  Antisense strand to SEQ ID NO: 172738
ucucucaaguggaagccca

SEQ ID NO: 172740 - RNA, 19 nt, Artificial Sequence
  Description of Artificial Sequence: Synthetic oligonucleotide
  Sense strand starting at position 2212 of SEQ ID NO: 2225
cgcgucaguguguuugaaa

SEQ ID NO: 172741 - RNA, 19 nt, Artificial Sequence
  Description of Artificial Sequence: Synthetic oligonucleotide
  Antisense strand to SEQ ID NO: 172740
uuucaaacacacugacgcg

SEQ ID NO: 172742 - RNA, 19 nt, Artificial Sequence
  Description of Artificial Sequence: Synthetic oligonucleotide
  Sense strand starting at position 2098 of SEQ ID NO: 2225
ggaaacugcguguuuacgu

SEQ ID NO: 172743 - RNA, 19 nt, Artificial Sequence
  Description of Artificial Sequence: Synthetic oligonucleotide
  Antisense strand to SEQ ID NO: 172742
acguaaacacgcaguuucc

SEQ ID NO: 172744 - RNA, 19 nt, Artificial Sequence
  Description of Artificial Sequence: Synthetic oligonucleotide
  Sense strand starting at position 1891 of SEQ ID NO: 2225
aguucucaccguucgucau

SEQ ID NO: 172745 - RNA, 19 nt, Artificial Sequence
  Description of Artificial Sequence: Synthetic oligonucleotide
  Antisense strand to SEQ ID NO: 172744
augacgaacggugagaacu

SEQ ID NO: 172746 - RNA, 19 nt, Artificial Sequence
  Description of Artificial Sequence: Synthetic oligonucleotide
  Sense strand starting at position 1890 of SEQ ID NO: 2225
caguucucaccguucguca

SEQ ID NO: 172747 - RNA, 19 nt, Artificial Sequence
  Description of Artificial Sequence: Synthetic oligonucleotide
  Antisense strand to SEQ ID NO: 172746
ugacgaacggugagaacug

SEQ ID NO: 172748 - RNA, 19 nt, Artificial Sequence
  Description of Artificial Sequence: Synthetic oligonucleotide
  Sense strand starting at position 1673 of SEQ ID NO: 2225
uagauaacucgagguguga

SEQ ID NO: 172749 - RNA, 19 nt, Artificial Sequence
  Description of Artificial Sequence: Synthetic oligonucleotide
  Antisense strand to SEQ ID NO: 172748
ucacaccucgaguuaucua

SEQ ID NO: 172750 - RNA, 19 nt, Artificial Sequence
  Description of Artificial Sequence: Synthetic oligonucleotide
  Sense strand starting at position 1671 of SEQ ID NO: 2225
gauagauaacucgaggugu

SEQ ID NO: 172751 - RNA, 19 nt, Artificial Sequence
  Description of Artificial Sequence: Synthetic oligonucleotide
  Antisense strand to SEQ ID NO: 172750
acaccucgaguuaucuauc

SEQ ID NO: 172752 - RNA, 19 nt, Artificial Sequence
  Description of Artificial Sequence: Synthetic oligonucleotide
  Sense strand starting at position 1482 of SEQ ID NO: 2225
gggacuugauauucuaugu

SEQ ID NO: 172753 - RNA, 19 nt, Artificial Sequence
  Description of Artificial Sequence: Synthetic oligonucleotide
  Antisense strand to SEQ ID NO: 172752
acauagaauaucaaguccc

SEQ ID NO: 172754 - RNA, 19 nt, Artificial Sequence
  Description of Artificial Sequence: Synthetic oligonucleotide
  Sense strand starting at position 1476 of SEQ ID NO: 2225
aagugugggacuugauauu

SEQ ID NO: 172755 - RNA, 19 nt, Artificial Sequence
  Description of Artificial Sequence: Synthetic oligonucleotide
  Antisense strand to SEQ ID NO: 172754
aauaucaagucccacacuu

SEQ ID NO: 172756 - RNA, 19 nt, Artificial Sequence
  Description of Artificial Sequence: Synthetic oligonucleotide
  Sense strand starting at position 1406 of SEQ ID NO: 2225
ucagaaaucuuuccgguau

SEQ ID NO: 172757 - RNA, 19 nt, Artificial Sequence
  Description of Artificial Sequence: Synthetic oligonucleotide
  Antisense strand to SEQ ID NO: 172756
auaccggaaagauuucuga

SEQ ID NO: 172758 - RNA, 19 nt, Artificial Sequence
  Description of Artificial Sequence: Synthetic oligonucleotide
  Sense strand starting at position 1204 of SEQ ID NO: 2225
uccuguaagguugacacua

SEQ ID NO: 172759 - RNA, 19 nt, Artificial Sequence
  Description of Artificial Sequence: Synthetic oligonucleotide
  Antisense strand to SEQ ID NO: 172758
uagugucaaccuuacagga

SEQ ID NO: 172760 - RNA, 19 nt, Artificial Sequence
  Description of Artificial Sequence: Synthetic oligonucleotide
  Sense strand starting at position 1161 of SEQ ID NO: 2225
cccucaaaucaucguaaug

SEQ ID NO: 172761 - RNA, 19 nt, Artificial Sequence
  Description of Artificial Sequence: Synthetic oligonucleotide
  Antisense strand to SEQ ID NO: 172760
cauuacgaugauuugaggg

SEQ ID NO: 172762 - RNA, 19 nt, Artificial Sequence
  Description of Artificial Sequence: Synthetic oligonucleotide
  Sense strand starting at position 1060 of SEQ ID NO: 2225
uaaguuucugcagacaaug

SEQ ID NO: 172763 - RNA, 19 nt, Artificial Sequence
  Description of Artificial Sequence: Synthetic oligonucleotide
  Antisense strand to SEQ ID NO: 172762
cauugucugcagaaacuua

SEQ ID NO: 172764 - RNA, 19 nt, Artificial Sequence
  Description of Artificial Sequence: Synthetic oligonucleotide
  Sense strand starting at position 1057 of SEQ ID NO: 2225
ucauaaguuucugcagaca

SEQ ID NO: 172765 - RNA, 19 nt, Artificial Sequence
  Description of Artificial Sequence: Synthetic oligonucleotide
  Antisense strand to SEQ ID NO: 172764
ugucugcagaaacuuauga

SEQ ID NO: 172766 - RNA, 19 nt, Artificial Sequence
  Description of Artificial Sequence: Synthetic oligonucleotide
  Sense strand starting at position 967 of SEQ ID NO: 2225
cuaagcugucacuaagaaa

SEQ ID NO: 172767 - RNA, 19 nt, Artificial Sequence
  Description of Artificial Sequence: Synthetic oligonucleotide
  Antisense strand to SEQ ID NO: 172766
uuucuuagugacagcuuag
